United States Patent Application Publication US 2025/0084491 A1 - sequence listing, part 9

SEQ ID NO: 156189 - DNA, 75 bp, synthetic construct
  source 1..75: mol_type = other DNA
agcagtcagtgcctgtggtgcgaatactgtgctgtgtgcaaatgaagtcagtatctgggttgcggaaatggtcgc

SEQ ID NO: 156190 - DNA, 75 bp, synthetic construct
  source 1..75: mol_type = other DNA
gtgtggctactggagctgctgccgggaagaatgttgttgagaataacctgctgggtggtaatgaagacactcaga

SEQ ID NO: 156191 - DNA, 75 bp, synthetic construct
  source 1..75: mol_type = other DNA
caggctaccgctgtcatgtcactgaggatacctggattgagccacaggcagaactggtttacggtgctgtatccg

SEQ ID NO: 156192 - DNA, 75 bp, synthetic construct
  source 1..75: mol_type = other DNA
tctcgccatgcatgacctgataattaaaaggggtatggtggtttcagatagtgcgggcctcattgggcggctgaa

SEQ ID NO: 156193 - DNA, 75 bp, synthetic construct
  source 1..75: mol_type = other DNA
ttgaaaaataatcatttaatatcatatgattggctaaatgcgctgaataatcttgagttactgtcacttcattcc

SEQ ID NO: 156194 - DNA, 75 bp, synthetic construct
  source 1..75: mol_type = other DNA
cgcctccggtgagaaacgaattaagggagaaaaagatggtcgtattatgatgagtgtgggtctgaatgcagaagc

SEQ ID NO: 156195 - DNA, 75 bp, synthetic construct
  source 1..75: mol_type = other DNA
tgaccctgttgtcgcagggatatggtgtatcagcaaaacacggaggccttggtgatgtaaacaatgccagttttg

SEQ ID NO: 156196 - DNA, 75 bp, synthetic construct
  source 1..75: mol_type = other DNA
tgtcagtatatcaggagatatgtcaaaacaggacggtgctcttatcttccagggacacccgcttattcatgcagg

SEQ ID NO: 156197 - DNA, 75 bp, synthetic construct
  source 1..75: mol_type = other DNA
gtctcggaaaggtggacagcagtctgtttgccggactgtatgacctgctcaggatgcaacccggacaggcaccac

SEQ ID NO: 156198 - DNA, 75 bp, synthetic construct
  source 1..75: mol_type = other DNA
caacctgaatgcggggctgataagcgcgggcggtagcctggacctgagcgccatcggggatatcagcaatatcag

SEQ ID NO: 156199 - DNA, 75 bp, synthetic construct
  source 1..75: mol_type = other DNA
tggccgcggtgaaaaacctccagataaatgcgggaaacaacgccgatatcggcgtagtgaagaatatgtttatcg

SEQ ID NO: 156200 - DNA, 75 bp, synthetic construct
  source 1..75: mol_type = other DNA
ggagcacaaagcgggaagaatgctgttgagaataactcactcagtgatggctggaacaatatcctgccatcagga

SEQ ID NO: 156201 - DNA, 75 bp, synthetic construct
  source 1..75: mol_type = other DNA
cgaagaaaaaaagcggaggttttctcagtaagaaaaccacccgcaccatcagtgaggacagtgccacccgtgaag

SEQ ID NO: 156202 - DNA, 75 bp, synthetic construct
  source 1..75: mol_type = other DNA
ggcgccgcaaacacacaaaaaacaacgggcaggaacagcagcagtggcggtggcgtgggtgtcagtatcggtgcc

SEQ ID NO: 156203 - DNA, 75 bp, synthetic construct
  source 1..75: mol_type = other DNA
atggagacgacattcgtgctggatgcactggagcaggcgttatgggcccgtcgaccgtccggcacggtccatcac

SEQ ID NO: 156204 - DNA, 75 bp, synthetic construct
  source 1..75: mol_type = other DNA
atatggatgaagtacttgatccaatgaacatagagctacgagcgaaagtgcgaaaacagcttaggttagtactta

SEQ ID NO: 156205 - DNA, 75 bp, synthetic construct
  source 1..75: mol_type = other DNA
aggctagtaagggatcgtcggttgttgggtgaacataaacgttacaatgacgaggttattcataatgtctatccg

SEQ ID NO: 156206 - DNA, 75 bp, synthetic construct
  source 1..75: mol_type = other DNA
ccatgcaatggtacatcgtgggagcaaagtactttcaattgcagacttgaaagagaaaatgaccttttggagcga

SEQ ID NO: 156207 - DNA, 75 bp, synthetic construct
  source 1..75: mol_type = other DNA
atgtatatgaacgaacccagactctacgctcgccaggcgctggaacgctttcgcgcgctgctgccggaggatgcg

SEQ ID NO: 156208 - DNA, 75 bp, synthetic construct
  source 1..75: mol_type = other DNA
cacattaaagcgctggcgcagacgtatcagatgccgattatcggttatacgccagaaactaatggctatccgtat

SEQ ID NO: 156209 - DNA, 75 bp, synthetic construct
  source 1..75: mol_type = other DNA
gtaatgctaatgatgtgcttcatgcgctggcgctggtgccttcgccgcgcctgttcagcatggtcgacatttgcg

SEQ ID NO: 156210 - DNA, 75 bp, synthetic construct
  source 1..75: mol_type = other DNA
tttaactttgagaaagtctatggtgaacacgccaagggctttatacacgttcatcatatcaaaccgctacacaca

SEQ ID NO: 156211 - DNA, 75 bp, synthetic construct
  source 1..75: mol_type = other DNA
tccggtcgagtcattcctggccgcaggctggctgttgagcttctatgctgcagtctatggtgtcacgcttttgtt

SEQ ID NO: 156212 - DNA, 75 bp, synthetic construct
  source 1..75: mol_type = other DNA
cagtctatggcgtcacgcttttgttcttgagttggagtcttcgcaaacgcgcctggggtaagagcgtgccaaacc

SEQ ID NO: 156213 - DNA, 75 bp, synthetic construct
  source 1..75: mol_type = other DNA
aaaaacaactgggatacacccaggcactggaacacgtcaggttagtccatgaaggctacgaactttacaccttca

SEQ ID NO: 156214 - DNA, 75 bp, synthetic construct
  source 1..75: mol_type = other DNA
tatattctgatcttactcactatattgtcactgattgtaccagtgtatcttgttttcctgagtgatggtgaacat

SEQ ID NO: 156215 - DNA, 75 bp, synthetic construct
  source 1..75: mol_type = other DNA
gatgcacgcaccgaaaggggtggcggtcgccagcggcgagcacctgcaactggccgctgtgaaaaacctccagat

SEQ ID NO: 156216 - DNA, 75 bp, synthetic construct
  source 1..75: mol_type = other DNA
cgaatcgttcggcgctgcaacaagcgatagtcgctgttctggctgacggaggagcctggtttgcacaacaaatca

SEQ ID NO: 156217 - DNA, 75 bp, synthetic construct
  source 1..75: mol_type = other DNA
aaagtctctgcaatcagacaccccagccaccgatgctttcctgaccgaaattgaacgcaaagcaatccgaaagtt

SEQ ID NO: 156218 - DNA, 75 bp, synthetic construct
  source 1..75: mol_type = other DNA
aacaatgggcggcgcaggttaccagcgcaacatggaaagcagcattcaccgcgctggcccccaatctggtgacaa

SEQ ID NO: 156219 - DNA, 75 bp, synthetic construct
  source 1..75: mol_type = other DNA
gctactctaacttgcataaccttaaatcattgaatgtcgatattttgaaaatcgataaatcgtttgttgaaacgc

SEQ ID NO: 156220 - DNA, 75 bp, synthetic construct
  source 1..75: mol_type = other DNA
atgcgctacgcttatcaggcatgggggaaactatttgtattctctcagaccggtaaaggcacctatgctgcatcc

SEQ ID NO: 156221 - DNA, 75 bp, synthetic construct
  source 1..75: mol_type = other DNA
agattacccccttcgatttccatgctctccagggatgcctgtggcctgccgttcccataaatcagataacgacgt

SEQ ID NO: 156222 - DNA, 75 bp, synthetic construct
  source 1..75: mol_type = other DNA
tcatggctaatcgcatgatggatacagtgatggtggataaaaagaagccagcagaagatcttttgctggaacctg

SEQ ID NO: 156223 - DNA, 75 bp, synthetic construct
  source 1..75: mol_type = other DNA
agatcatcttacaacgttcgcacaacgaatcattgatgaaatcagtacgtgcaaaggttgcctggcaaaacaagg

SEQ ID NO: 156224 - DNA, 75 bp, synthetic construct
  source 1..75: mol_type = other DNA
tgatgttggattgtatcttaatcttctcaagcgtgaaaaatttgagatcattgttaatgaagatatgattgattg

SEQ ID NO: 156225 - DNA, 75 bp, synthetic construct
  source 1..75: mol_type = other DNA
cctataaaggtgttaatccatttgagtgggacaatcgtatagctgtaaggaaaaatattgaagagtatcaggaag

SEQ ID NO: 156226 - DNA, 75 bp, synthetic construct
  source 1..75: mol_type = other DNA
tatcgaattttacgacgaccagagcggctatgagcgcgggctgacgctgccgcttcgccatccttctgggctgtt

SEQ ID NO: 156227 - DNA, 75 bp, synthetic construct
  source 1..75: mol_type = other DNA
ctcgataataccggtgaaatgctggttgctataaatgacatgaatattagcaacgctattacagctgaatatctc

SEQ ID NO: 156228 - DNA, 75 bp, synthetic construct
  source 1..75: mol_type = other DNA
atgaacgaagtaatcatgattgtctctcccggcaaatgggtatccgaagagcaactaatagcactgaaaggaata

SEQ ID NO: 156229 - DNA, 75 bp, synthetic construct
  source 1..75: mol_type = other DNA
tttaagaattcgcccgactcaggagagacagacgattatttatgttgcctcattcgctccatgaataaaacctgt

SEQ ID NO: 156230 - DNA, 75 bp, synthetic construct
  source 1..75: mol_type = other DNA
agaatatttactaaagcatttcgatggcatataaggagtattacgcgctacatattacggaaaccaattctttct

SEQ ID NO: 156231 - DNA, 75 bp, synthetic construct
  source 1..75: mol_type = other DNA
gatgcacgctccgaaaggagtggcggtcgccagcggcgagcacctgcaactggccgcggtgaaaaacctccagat

SEQ ID NO: 156232 - DNA, 75 bp, synthetic construct
  source 1..75: mol_type = other DNA
gcgaagcgtgagcacattgtaccgctatctcctcaggcattagagattctggaagtgatgaagccaatcagtgct

SEQ ID NO: 156233 - DNA, 75 bp, synthetic construct
  source 1..75: mol_type = other DNA
gatgcacgctccgaaaggggtggcggtcgccagcggcgagcacctgcaactggccgcagtgaaaaacctccagat

SEQ ID NO: 156234 - DNA, 75 bp, synthetic construct
  source 1..75: mol_type = other DNA
tcgatgctgaggtggataccttcgaccggctactggacgactacatcgttttccgtgtctcttttgaacaggaca

SEQ ID NO: 156235 - DNA, 75 bp, synthetic construct
  source 1..75: mol_type = other DNA
ctgggtggaagatgccgatgagtacccggaaaaagtgacgcaactggtgacgcctgccgtgtttgtggatgtacc

SEQ ID NO: 156236 - DNA, 75 bp, synthetic construct
  source 1..75: mol_type = other DNA
gcacaatattgtggggaaatgtattgggtggttgtctccactccatgctaaaaattattatttaaatttaagaaa

SEQ ID NO: 156237 - DNA, 75 bp, synthetic construct
  source 1..75: mol_type = other DNA
gctcaggtatatgctcgaacatatggttttaaaactattggattacgttattttaatgtatttggtcgtcgtcaa

SEQ ID NO: 156238 - DNA, 75 bp, synthetic construct
  source 1..75: mol_type = other DNA
gcggaagttttcgcaaaaacttatggttttaaaagcattggattgagatattttaatgtgtttggtaaaaggcaa

SEQ ID NO: 156239 - DNA, 75 bp, synthetic construct
  source 1..75: mol_type = other DNA
tcgatgctgaggtggataccttcgaccggctgctggacgactacatcgttttccgcatctcatttgagcaggaca

SEQ ID NO: 156240 - DNA, 75 bp, synthetic construct
  source 1..75: mol_type = other DNA
gctgcttattttgtccgtgttttggggtattgggctttgggtccagaatttttcatattacacacattaaaaaag

SEQ ID NO: 156241 - DNA, 75 bp, synthetic construct
  source 1..75: mol_type = other DNA
aatacttcttatttttgtgatgacaaaaaagcgcttggtctttttgaggaattcaataaactcagcattcaatat

SEQ ID NO: 156242 - DNA, 75 bp, synthetic construct
  source 1..75: mol_type = other DNA
ggccattgatattgcttatgaaggctccggcagtggtgactggcgcactgacggtttcatcatgggtgtcggtta

SEQ ID NO: 156243 - DNA, 75 bp, synthetic construct
  source 1..75: mol_type = other DNA
gacggaccgcatcccgacgggtgtgatacggacggacgacgagcggacccaccactaccactacgacagccagca

SEQ ID NO: 156244 - DNA, 75 bp, synthetic construct
  source 1..75: mol_type = other DNA
tatgccattgcgggtaacaatcactgggcgcgacgagtcgttaatgatgattccgtggaagcagagaatgattgc

SEQ ID NO: 156245 - DNA, 75 bp, synthetic construct
  source 1..75: mol_type = other DNA
ggaaatacaatataagttcaggctttggtagtgatatatttaaaatagaggcggaatatggaggggagtgcgaat

SEQ ID NO: 156246 - DNA, 75 bp, synthetic construct
  source 1..75: mol_type = other DNA
taatgctgccttttatcggcgcactggtcgtttcgttttcgccacaacgtcgggccgccgaatggggggttttgt

SEQ ID NO: 156247 - DNA, 75 bp, synthetic construct
  source 1..75: mol_type = other DNA
ctggtcatgtcgaatctgtctgttccgactcgctgccttattgagtggcaactcctgacccttgttcgcccctca

SEQ ID NO: 156248 - DNA, 75 bp, synthetic construct
  source 1..75: mol_type = other DNA
ataccctaactattgaccgtgcaggtatgagtatcactgaagcactgagtaaagcaggggggaccgatcaaacaa

SEQ ID NO: 156249 - DNA, 75 bp, synthetic construct
  source 1..75: mol_type = other DNA
atgataatcgcgcagttaatctattattttgggattgctgttagcaccagttatttaacggtgtcgttgcgaaat

SEQ ID NO: 156250 - DNA, 75 bp, synthetic construct
  source 1..75: mol_type = other DNA
taattattttattttatttaccgtttatttttttaaaatttggtttacgaaagaaaataacgcatccgccaactt

SEQ ID NO: 156251 - DNA, 75 bp, synthetic construct
  source 1..75: mol_type = other DNA
agaattacttctgcgttgcgcgatggcaataaaaagattttcctttctaatcttgttgagaaaaatgtcggatat

SEQ ID NO: 156252 - DNA, 75 bp, synthetic construct
  source 1..75: mol_type = other DNA
gaatcgacaggtccgaaggtgatgatctgcgcccatatggacgaagtgggatttatggtgcgcagcatctcccgc

SEQ ID NO: 156253 - DNA, 75 bp, synthetic construct
  source 1..75: mol_type = other DNA
ctgcattatttgtattgctggattatcttaatgaacaaaaacagttactacctgtgttgtcatatggactgaata

SEQ ID NO: 156254 - DNA, 75 bp, synthetic construct
  source 1..75: mol_type = other DNA
atataaaattcattaaccatgtaaattttttatttagtgtgttaatgcccatattaataacggttagcaaagatt

SEQ ID NO: 156255 - DNA, 75 bp, synthetic construct
  source 1..75: mol_type = other DNA
tatattcatagactatctttctgacggtgctggtgattggcaactatatgataatgagttaattacatcattaaa

SEQ ID NO: 156256 - DNA, 75 bp, synthetic construct
  source 1..75: mol_type = other DNA
tccaatgaccgggtatcacaactttaaccgcgatgaattcaacgctgaggctcgcatcctggaagagcgcggctt

SEQ ID NO: 156257 - DNA, 75 bp, synthetic construct
  source 1..75: mol_type = other DNA
atcctgaacccactccggaagggcatgataacaacctgcgcccggaagccagctcctataccgcgaatatagctg

SEQ ID NO: 156258 - DNA, 75 bp, synthetic construct
  source 1..75: mol_type = other DNA
gcgcctgaggaaagggcagctctcagacgacgaaaatccctgacacggacggccaagacgatgatagactacacc

SEQ ID NO: 156259 - DNA, 75 bp, synthetic construct
  source 1..75: mol_type = other DNA
aatcttgaatgctttctggaaaaacattcacctgaaatctcagataaaggaatacggcatgatttaataacaaaa

SEQ ID NO: 156260 - DNA, 75 bp, synthetic construct
  source 1..75: mol_type = other DNA
agaactacagtctggaggcgctgtcccgtcgtgatgcccgtgaggatccgttcgcgtcggccgggaaaacagttt

SEQ ID NO: 156261 - DNA, 75 bp, synthetic construct
  source 1..75: mol_type = other DNA
gtccaggtactttccgccgaggttagccagcttaaaactgcattgcagggtagcccggatatcgcgccactccag

SEQ ID NO: 156262 - DNA, 75 bp, synthetic construct
  source 1..75: mol_type = other DNA
aggtgcctgaaattaaagagtctgtcagaccagcacgaagcaaactctgggcgatagtccgttacggattcggtg

SEQ ID NO: 156263 - DNA, 75 bp, synthetic construct
  source 1..75: mol_type = other DNA
atgagcagattcagggggagggggggggttgctgcagataatcaaacttatgattcgtttaggaaagacattgaa

SEQ ID NO: 156264 - DNA, 75 bp, synthetic construct
  source 1..75: mol_type = other DNA
tagacgatctttatcggccaaatgcaaaagtaggaagtggaagcacagcagatgctgttcgttatgaattggcca

SEQ ID NO: 156265 - DNA, 75 bp, synthetic construct
  source 1..75: mol_type = other DNA
tggtgagacactggttcttggttctgccacaacagtaacaggaacaaaatttgggggggcgttactttcgggtgg

SEQ ID NO: 156266 - DNA, 75 bp, synthetic construct
  source 1..75: mol_type = other DNA
cgtggtgcggggagtatgacgaatggggaaacctgctgggcgaaaccagtgcgcagcaccttcaacagtcactcc

SEQ ID NO: 156267 - DNA, 75 bp, synthetic construct
  source 1..75: mol_type = other DNA
tgacatctctgggctcctggatgatgctggttggacaggcaggacgtcgtgcagcaatggatggtaacttcccgg

SEQ ID NO: 156268 - DNA, 75 bp, synthetic construct
  source 1..75: mol_type = other DNA
ttttcaccgtttttactgtgccagatatcgtatacgccgagtcaccttttagctcattacaatccgcaaaagaga

SEQ ID NO: 156269 - DNA, 75 bp, synthetic construct
  source 1..75: mol_type = other DNA
agctcataatggggccgccgatgcaatgagacattgttacttgatgtgtcgaatgactaagacatttggatcaac

SEQ ID NO: 156270 - DNA, 75 bp, synthetic construct
  source 1..75: mol_type = other DNA
ccaattcctgcaaggaaaagagagttaaataatattgttagggcccttttgaatcagtgtcagaaaagcgcactt

SEQ ID NO: 156271 - DNA, 75 bp, synthetic construct
  source 1..75: mol_type = other DNA
ttttgcttttgcaaaaggggctggtgtttttggtgaggctggaccggaagccattatgccattaacacgaacttc

SEQ ID NO: 156272 - DNA, 75 bp, synthetic construct
  source 1..75: mol_type = other DNA
gtatcgtaacccgcgtctgtttgatgtcacgatggcgctgtgcgtggagatgcttatctccggcaaactggcgaa

SEQ ID NO: 156273 - DNA, 75 bp, synthetic construct
  source 1..75: mol_type = other DNA
gtgacctggtttgaactgggggagaacgacaaaaaccagatgctgtacagcatgaaggtgtgcccaccgctgtgg

SEQ ID NO: 156274 - DNA, 75 bp, synthetic construct
  source 1..75: mol_type = other DNA
tggtatttcaggaagtgtttttaatggtgtatgggaacatttctatgatgatggtttttttctgaaggcgaggca

SEQ ID NO: 156275 - DNA, 75 bp, synthetic construct
  source 1..75: mol_type = other DNA
gcattttgtgaggtcaagcttgaagaggctagcacctataatgaaattgagcattttaaggataaaaaaaatttc

SEQ ID NO: 156276 - DNA, 75 bp, synthetic construct
  source 1..75: mol_type = other DNA
aacgtatgaatgaaatgataaaagaaattataccccaccatgtaaaatggtatgcggacaccaataattactgtg

SEQ ID NO: 156277 - DNA, 75 bp, synthetic construct
  source 1..75: mol_type = other DNA
tctgatttattcaacaaagcctatttccgtcacaaaaataaaaaaaaagatatctttcctgtgaattatttataa

SEQ ID NO: 156278 - DNA, 75 bp, synthetic construct
  source 1..75: mol_type = other DNA
aaaataatttgtgctgatgcttctcgttcaaagccatggcccattgttgccgggattccacataactacctgcgc

SEQ ID NO: 156279 - DNA, 75 bp, synthetic construct
  source 1..75: mol_type = other DNA
tttgtatggtaaggaaaatactgtggaaaaaaaagtaacgccagtgacgcagtggcagataggcactgattattg

SEQ ID NO: 156280 - DNA, 75 bp, synthetic construct
  source 1..75: mol_type = other DNA
cggtggcgggcgtttcgtatattcttgcctttaacagcgctccggtttatctcaccggaacggcggcaattgtga

SEQ ID NO: 156281 - DNA, 75 bp, synthetic construct
  source 1..75: mol_type = other DNA
cttcacgatgtaccagcgctacatgagcggctttgctgatgtgatgaacgggacatctgatgtcaccatcactat

SEQ ID NO: 156282 - DNA, 75 bp, synthetic construct
  source 1..75: mol_type = other DNA
tgcttcagggagatatggttgaaatcatggatattgctatgcgcaaggctggcaactctccggtaactccggatg

SEQ ID NO: 156283 - DNA, 75 bp, synthetic construct
  source 1..75: mol_type = other DNA
acgaaggcagccaccccgaaagcggtgaaagcggcaatggacaaagcggacggatgcctggagaaagcgaaaaac

SEQ ID NO: 156284 - DNA, 75 bp, synthetic construct
  source 1..75: mol_type = other DNA
atgacgccgattattctggctttccgccaggctggttacgaagtggcaattgatgattttggtattggctactct

SEQ ID NO: 156285 - DNA, 75 bp, synthetic construct
  source 1..75: mol_type = other DNA
ttcttgaatacttctattgaaaatattagatccgcactcgaagatctttctaaatggcgtgttatcatattcaaa

SEQ ID NO: 156286 - DNA, 75 bp, synthetic construct
  source 1..75: mol_type = other DNA
ttttggacaatatgctgttcgacttggacttgaaactcgtgaagagtggactaaaatccaaggccgttatgctga

SEQ ID NO: 156287 - DNA, 75 bp, synthetic construct
  source 1..75: mol_type = other DNA
ggaagcaatgagtagtatcagcaagaatactctcggcgtttaccacaacgtggatgagagggatgaaaaactcaa

SEQ ID NO: 156288 - DNA, 75 bp, synthetic construct
  source 1..75: mol_type = other DNA
agccctgagttgctcaactacagcgttgtagattcaattggtcaacgcaacagttatgtgaaaacatggggttgc

SEQ ID NO: 156289 - DNA, 75 bp, synthetic construct
  source 1..75: mol_type = other DNA
gcggcccgaaaacgcccgatcttgagtcttatttttccacgcctacccggaaaacttatgccgggacaccggata

SEQ ID NO: 156290 - DNA, 75 bp, synthetic construct
  source 1..75: mol_type = other DNA
gatgctgagctgaaattcaaaaaaggcatggcgcttgtattagaaaatatcgataaggtcgatgaaaaactggtc

SEQ ID NO: 156291 - DNA, 75 bp, synthetic construct
  source 1..75: mol_type = other DNA
ttcgtgatggcatcgatcgctatctcacgccttcccgggcccagccccgtacaacgtcagccgtgaacggtcact

SEQ ID NO: 156292 - DNA, 75 bp, synthetic construct
  source 1..75: mol_type = other DNA
cggggattttctgcggatttgtagttggctgtttgccactatattgttagcaaagggatattttaaaataaatgc

SEQ ID NO: 156293 - DNA, 75 bp, synthetic construct
  source 1..75: mol_type = other DNA
gccgtgcccgtctttcctttgcattccaattggaattggcaaaagcacttcgactgcatgaagaaagcgtatgca

SEQ ID NO: 156294 - DNA, 75 bp, synthetic construct
  source 1..75: mol_type = other DNA
gcaagggcgtactgattaccggcgtgacggtcagcgcggcgcgtgaccgcagctatgagctgacgtttaccgcca

SEQ ID NO: 156295 - DNA, 75 bp, synthetic construct
  source 1..75: mol_type = other DNA
ccatcgccattgccgcctgtactagccttgggcttaacccgaccgctgccgcgattgcggtggtgatttctggct

SEQ ID NO: 156296 - DNA, 75 bp, synthetic construct
  source 1..75: mol_type = other DNA
atctgaagcatgctctgaaacatcctactctgtcactctaatgatggcaccttgctcttcttataaagaagggaa

SEQ ID NO: 156297 - DNA, 75 bp, synthetic construct
  source 1..75: mol_type = other DNA
agcgtattgctatggcggttaaggcaaacgaatcagcagcggaaccggatgatgctgaactgaaattcaaaaaag

SEQ ID NO: 156298 - DNA, 75 bp, synthetic construct
  source 1..75: mol_type = other DNA
aaacaccggatctgaatagttatttttctgagccgacccggaaaactgatacccggacaccggatattgataact

SEQ ID NO: 156299 - DNA, 75 bp, synthetic construct
  source 1..75: mol_type = other DNA
aaatcgaaaggtcctgaggctttaggttttaagcccgcccgtcaggcaccgccgccaccgacaagtggacaggca

SEQ ID NO: 156300 - DNA, 75 bp, synthetic construct
  source 1..75: mol_type = other DNA
agtgtcagcgatcgggcaggaaacaccaccagccacagcgcgaatttcacggtagacacctcagcacccgtggtc

SEQ ID NO: 156301 - DNA, 75 bp, synthetic construct
  source 1..75: mol_type = other DNA
ggcgcggcggcgggcgatgtggtcacggttaacctgaacggtaaaaactacaccaccacgctggacgcttccggt

SEQ ID NO: 156302 - DNA, 75 bp, synthetic construct
  source 1..75: mol_type = other DNA
tcaccgtgacctttggcggtaaaaattacaccgccagcgtggcgagcgatggtagctggactgccaccgttcctg

SEQ ID NO: 156303 - DNA, 75 bp, synthetic construct
  source 1..75: mol_type = other DNA
cccgcaggcaccaccattacagtgacgctgaacggacaaaattacaccgctaccaccgatagcagtggcaactgg

SEQ ID NO: 156304 - DNA, 75 bp, synthetic construct
  source 1..75: mol_type = other DNA
tggcgcgcttggcgctttactggcaagcggtggtgatgatgactcaaaaactgaagtggttaacaacccaccgcc

SEQ ID NO: 156305 - DNA, 75 bp, synthetic construct
  source 1..75: mol_type = other DNA
atcgtgatagatgccaacctgcctggcctgcgggtcgatatcgtggcaggcgatgatgtgattaacagcattgag

SEQ ID NO: 156306 - DNA, 75 bp, synthetic construct
  source 1..75: mol_type = other DNA
tgttcgaggacttcctcggcagtgacttcttccgcatcggcgacgacgcgacgccagttgccgccgataccgatg

SEQ ID NO: 156307 - DNA, 75 bp, synthetic construct
  source 1..75: mol_type = other DNA
tggccgctgtgaaaaacctccagataaatgcgggaaacaacgccgatatcggcgttgtgaagaatatgtttatcg

SEQ ID NO: 156308 - DNA, 75 bp, synthetic construct
  source 1..75: mol_type = other DNA
ttgtcattgaccggttctatgaagcgcttgacgagcaaactgctgagcaattaactgcgcagcagaaagccgagg

SEQ ID NO: 156309 - DNA, 75 bp, synthetic construct
  source 1..75: mol_type = other DNA
aagcgggcaggatctgcccatcaccggcaccaccgatgcccagccggggcagacggtaacggtgacgcttaacgg

SEQ ID NO: 156310 - DNA, 75 bp, synthetic construct
  source 1..75: mol_type = other DNA
ggcgctatccgacagcgacgtggtgaagaccatcctgggacagttcaagatcaaggtcgatgacctcaagcgaca

SEQ ID NO: 156311 - DNA, 75 bp, synthetic construct
  source 1..75: mol_type = other DNA
gcgtgtcgccccgggtcaaggacgcgctcagccgtgctttcgtggcctccaacgaactcggccactcttatgtcg

SEQ ID NO: 156312 - DNA, 75 bp, synthetic construct
  source 1..75: mol_type = other DNA
atggcgggaatattcttgatatgggattacgtgatatccgcaatagctggacggaatcggtatcaggtaataaaa

SEQ ID NO: 156313 - DNA, 75 bp, synthetic construct
  source 1..75: mol_type = other DNA
cctcagcgcctttttcattgccgcggtaggtaatgactctaacttattgatagtgttttatgttcagataatgcc

SEQ ID NO: 156314 - DNA, 75 bp, synthetic construct
  source 1..75: mol_type = other DNA
cctagtctgccatgtgcgtggtttgactttgataatcatgccggaacctggcaggcaacccagaagctgattgct

SEQ ID NO: 156315 - DNA, 75 bp, synthetic construct
  source 1..75: mol_type = other DNA
cgtacgttaccgtgaacgcctgcagaagcagttaacagaaaacgatgtggaaaaggtgttgttccggggttcggc

SEQ ID NO: 156316 - DNA, 75 bp, synthetic construct
  source 1..75: mol_type = other DNA
gccttcttacgtaacgaactggacactgctgacgtagaggaaatagctgatcgcgtcatatgggataacgattca

SEQ ID NO: 156317 - DNA, 75 bp, synthetic construct
  source 1..75: mol_type = other DNA
aaaaagtggctccaataatcaaaattggtgagttcgcaatgtctggcaataacgtttttgatgggttatttgcca

SEQ ID NO: 156318 - DNA, 75 bp, synthetic construct
  source 1..75: mol_type = other DNA
gtgcagtcagatttaagctggagcgtcagcgtaccggcgaacattttgcaggcgctgggtaacggtgaactgacc

SEQ ID NO: 156319 - DNA, 75 bp, synthetic construct
  source 1..75: mol_type = other DNA
ctcagccggggcagacggtgaccgttacgttaaatgggcagacgtatcagggcgtcgtgcagccagacggcacct

SEQ ID NO: 156320 - DNA, 75 bp, synthetic construct
  source 1..75: mol_type = other DNA
aattacgctgtcaatgccagtgtcagcgatcgggcagggaacaccaccagccacagcgcgaatttcacggtagac

SEQ ID NO: 156321 - DNA, 75 bp, synthetic construct
  source 1..75: mol_type = other DNA
gagcgttccgccagtccggcgacaactggcggcccccaaacgcccgtcggggccaacgccaattgagttgctgaa

SEQ ID NO: 156322 - DNA, 75 bp, synthetic construct
  source 1..75: mol_type = other DNA
gggtaatgattataaataaacagaaggatgtggctaatagtccctttaaattagactgggatacaccattaaaaa

SEQ ID NO: 156323 - DNA, 75 bp, synthetic construct
  source 1..75: mol_type = other DNA
taagcggattaaccgccagcagctataccgtgactgcgacggtgagcgataaagcgggtaacccggcaagcgccg

SEQ ID NO: 156324 - DNA, 75 bp, synthetic construct
  source 1..75: mol_type = other DNA
actgaagaagaaagcggaagcggcagaagcagctgcagctgaagcaagaaagaaagcggcaactgaagctgctga

SEQ ID NO: 156325 - DNA, 75 bp, synthetic construct
  source 1..75: mol_type = other DNA
gcagcacctaaagttgagtttgccgatcgagttggcgaggccagcggaattttgattggaaactttgcaaaggtt

SEQ ID NO: 156326 - DNA, 75 bp, synthetic construct
  source 1..75: mol_type = other DNA
aactccgcggcctacgctggcgattgtctctggactgtatgagctgtttcccgaaaatgagcaggtaaaaaactc

SEQ ID NO: 156327 - DNA, 75 bp, synthetic construct
  source 1..75: mol_type = other DNA
tcgttttagtggcaaacagaagatgctggcgttaggggtttatccaatggtttcattggcagaggctcgtaagag

SEQ ID NO: 156328 - DNA, 75 bp, synthetic construct
  source 1..75: mol_type = other DNA
actgcgttttgcaagatggcaagaaatcgattttaaaaatgcgctttggacgatacctgcagaacgagaacccct

SEQ ID NO: 156329 - DNA, 75 bp, synthetic construct
  source 1..75: mol_type = other DNA
gtaaacgtaggatttcggagctgaagacaagggatttactcgtcccgataaaggtagtcgaggtgagcgcgcgat

SEQ ID NO: 156330 - DNA, 75 bp, synthetic construct
  source 1..75: mol_type = other DNA
cggcacctataaagtggagcttgaaaatggtgttctcaatcataccgctggtgtagaggcttcggatgctgatgc

SEQ ID NO: 156331 - DNA, 75 bp, synthetic construct
  source 1..75: mol_type = other DNA
ccggaaacagcaccgcatcagcagcagtgggagcacagagcgggaagaatgctgttgagaataatgcgctcagtg

SEQ ID NO: 156332 - DNA, 75 bp, synthetic construct
  source 1..75: mol_type = other DNA
gagcgacttagaaagagagcttaatacctggatccgtcagtatgttgccgaccaggaaaacccgcctgcagacgt

SEQ ID NO: 156333 - DNA, 75 bp, synthetic construct
  source 1..75: mol_type = other DNA
caagaagggcgagagtcaatatttgatttttacaaaattagtattgctcatattactcgcgaatattcatttaaa

SEQ ID NO: 156334 - DNA, 75 bp, synthetic construct
  source 1..75: mol_type = other DNA
tcatttcttataattctagcgccacaatatctgatacgctaaatagtattctccagcagacttataataagaaaa

SEQ ID NO: 156335 - DNA, 75 bp, synthetic construct
  source 1..75: mol_type = other DNA
ctatctcatctgcgcaaggcagaacgtgaagacggccgcgagcgccaggcgcacgaggccggcgcgcggacccgc

SEQ ID NO: 156336 - DNA, 75 bp, synthetic construct
  source 1..75: mol_type = other DNA
aacggcactaactaccagaccacggtgcaggcagacggcagctggagtttaacgctgcccgccagcgacttaacc

SEQ ID NO: 156337 - DNA, 75 bp, synthetic construct
  source 1..75: mol_type = other DNA
gcagagccgcagactggaagacgggaagtttcggcccttacggatgcccggaaaaccttagcgtacgattttttc

SEQ ID NO: 156338 - DNA, 75 bp, synthetic construct
  source 1..75: mol_type = other DNA
gcagtggaaataggtgctccggtaacagcgcttgatgtgaccgttaaacctgaccagaagaacgttttaattctt

SEQ ID NO: 156339 - DNA, 75 bp, synthetic construct
  source 1..75: mol_type = other DNA
gtttataggaactgttatatggctactttatgtaattagaggtagatcatttaaaaatttaaatgatacaatctt

SEQ ID NO: 156340 - DNA, 75 bp, synthetic construct
  source 1..75: mol_type = other DNA
tcgggcaggtaatagcgacgacgccagccgcaccgtgaccgtcagcctcagcgcgccagtgattagcatcaacac

SEQ ID NO: 156341 - DNA, 75 bp, synthetic construct
  source 1..75: mol_type = other DNA
agggcagacggtaaccgtcacctttggaggcaaaacttataccgccacggtggccgccaatggcacctgggcgct

SEQ ID NO: 156342 - DNA, 75 bp, synthetic construct
  source 1..75: mol_type = other DNA
cctccttcccgtctgccgtgattttccggtcgttcacccgctcagatttcgcggtctcaccctccaactcccgtc

SEQ ID NO: 156343 - DNA, 75 bp, synthetic construct
  source 1..75: mol_type = other DNA
ccttcaactcccgccagccgtgtgcgtcaggctgcggcttcccttgcgcccctgcatccccgcctgttcgcccgg

SEQ ID NO: 156344 - DNA, 75 bp, synthetic construct
  source 1..75: mol_type = other DNA
ttaaactaactgattttactttagtagataaatctccccagtacagcaataagtcatggactggtcaaattatac

SEQ ID NO: 156345 - DNA, 75 bp, synthetic construct
  source 1..75: mol_type = other DNA
ctgtggctgcttctgccgcagtatccggctctgctatggcgtggaatcccgttggccttggtggcaacggtggca

SEQ ID NO: 156346 - DNA, 75 bp, synthetic construct
  source 1..75: mol_type = other DNA
atgcacgtgcattttgcgtgtatatttttgtcttttttaagtccgcttactgtctggtcagtgtccgtaagtggc

SEQ ID NO: 156347 - DNA, 75 bp, synthetic construct
  source 1..75: mol_type = other DNA
ccgccactaccaaagaaaaaggggctacgttttcacgtaaccccttgttttatttggtggagctggcgggagttg

SEQ ID NO: 156348 - DNA, 75 bp, synthetic construct
  source 1..75: mol_type = other DNA
ctggcgagataaaaacggctttcaccgaaaggtgctggatcaagctatcctggacagcgatgaggaaaatagctg

SEQ ID NO: 156349 - DNA, 75 bp, synthetic construct
  source 1..75: mol_type = other DNA
gcatttcatcacgatcccacaggtcattttcgccaaatctgcgatatccccttgcagcacaagccgctatgccac

SEQ ID NO: 156350 - DNA, 75 bp, synthetic construct
  source 1..75: mol_type = other DNA
accaacgaaccttaattcaaataaggatctaatggctataacaacaaaagaccttggtaattggataacatatgg

SEQ ID NO: 156351 - DNA, 75 bp, synthetic construct
  source 1..75: mol_type = other DNA
gacccaacaaaccgcctacgcccgatccaagtaaattgccggacatagcgaaacaattaagactgccatatccta

SEQ ID NO: 156352 - DNA, 75 bp, synthetic construct
  source 1..75: mol_type = other DNA
ccggggagcttcgcgccgctcatccgcatcgaaacagacaacggtgaacgggagaaagcgcagtgccgcagcctg

SEQ ID NO: 156353 - DNA, 75 bp, synthetic construct
  source 1..75: mol_type = other DNA
gtaagggagcagaatgccaacaagaagagattcccggcctcgatcctgaacagtttcacccaattagcgatgctg

SEQ ID NO: 156354 - DNA, 75 bp, synthetic construct
  source 1..75: mol_type = other DNA
tcatagcggctcgcggggggtggggcagtctattttacagcggcatattgcctcgttctcgcatcatggtttgcc

SEQ ID NO: 156355 - DNA, 75 bp, synthetic construct
  source 1..75: mol_type = other DNA
atgatgacactggcggggaaaatccccgcctttttcctgccggtccccggacagagcacaaaggaagtcgccgcc

SEQ ID NO: 156356 - DNA, 75 bp, synthetic construct
  source 1..75: mol_type = other DNA
gctttggtggtggagataaggcccatatggaagaagagaataaagcatataaaacagcagctgattgcagtggct

SEQ ID NO: 156357 - DNA, 75 bp, synthetic construct
  source 1..75: mol_type = other DNA
aatcagtgctttggtggtggagataaggcccatatggaagaagagaataaagcatataaaacagcagctgattgc

SEQ ID NO: 156358 - DNA, 75 bp, synthetic construct
  source 1..75: mol_type = other DNA
tacagcgcaccaaagcgtctatccagatgaaggccagcagcatgggtctttaccgctgcgggaagttaaccctcg

SEQ ID NO: 156359 - DNA, 75 bp, synthetic construct
  source 1..75: mol_type = other DNA
ctatctcgtcttgaccgatttgatagcgatacgacgaataccatagatatgttgaggctacaccgtgaacacatc

SEQ ID NO: 156360 - DNA, 75 bp, synthetic construct
  source 1..75: mol_type = other DNA
gttgaggctacaccgtgaacacatctcaagcaatatagaaaagctggtacaactatcacttgaaattgaagactt

SEQ ID NO: 156361 - DNA, 75 bp, synthetic construct
  source 1..75: mol_type = other DNA
tgttcttctctaaaattaacaaaatagtccaagaagaacagctcgtgagaaaaaaaatagttaccaaagcacaaa

SEQ ID NO: 156362 - DNA, 75 bp, synthetic construct
  source 1..75: mol_type = other DNA
aaagacccgttagccctgattaaaagcattttgataatgcagagggcgcatgaggaatcactacgtaaatcagag

SEQ ID NO: 156363 - DNA, 75 bp, synthetic construct
  source 1..75: mol_type = other DNA
gattttcaagtgaacgacaactaaaaggggactctgtacgcagacaatctaagctggtcactgactggcttgata

SEQ ID NO: 156364 - DNA, 75 bp, synthetic construct
  source 1..75: mol_type = other DNA
ttacgtcgtatcttaagggctggtgtagatgtagtcaccctgtccgatggtgaacattacacacgagaaagttta

SEQ ID NO: 156365 - DNA, 75 bp, synthetic construct
  source 1..75: mol_type = other DNA
actctataatggatatttcggtaatggcaaagtcaatatttccaataatggactgattaataacaaagaatattc

SEQ ID NO: 156366 - DNA, 75 bp, synthetic construct
  source 1..75: mol_type = other DNA
aggggcaatattttgataaagtagttgttggaataaccaaaaaagaatatttagaacatattgagaaaagcaagt

SEQ ID NO: 156367 - DNA, 75 bp, synthetic construct
  source 1..75: mol_type = other DNA
aattatcaattaatttttacatcaaaagatgtggttggaaaatcgagggaattaagaaagagtggttctttagaa

SEQ ID NO: 156368 - DNA, 75 bp, synthetic construct
  source 1..75: mol_type = other DNA
ggccttcgatgagcgcttctgcatggtctttgatgagaacgatctgcgcatcagcgccgacatcacggcgccgga

SEQ ID NO: 156369 - DNA, 75 bp, synthetic construct
  source 1..75: mol_type = other DNA
gtcgttgaaaaggggggcgagtggctaataaaaaataatgattcctcaattgaatttcaaattggtaatcaagga

SEQ ID NO: 156370 - DNA, 75 bp, synthetic construct
  source 1..75: mol_type = other DNA
tagctatggcacaggttcattaaatattacggataaggcttatgtcacgagttcaatcgtcgccattttaggcta

SEQ ID NO: 156371 - DNA, 75 bp, synthetic construct
  source 1..75: mol_type = other DNA
gctggctcagcaatgagcgtccggggctacttttcgatctggcgaccagatggcttctgcaaaacaaaatactgt

SEQ ID NO: 156372 - DNA, 75 bp, synthetic construct
  source 1..75: mol_type = other DNA
gcggtggcattgatgatcgggtgtgttcgctttcttggtacatggcttcatgatctgtcatcaattccggctaac

SEQ ID NO: 156373 - DNA, 75 bp, synthetic construct
  source 1..75: mol_type = other DNA
ggttccctgacgttgggaaaaatccgcgcttcagtggcgatccgttcattattgagcagtgaacgaccttctggc

SEQ ID NO: 156374 - DNA, 75 bp, synthetic construct
  source 1..75: mol_type = other DNA
aaccacgacgactactttaatgaagcaaggcttctctataaacatgcacatccaaatattgtgcaagttcagtat

SEQ ID NO: 156375 - DNA, 75 bp, synthetic construct
  source 1..75: mol_type = other DNA
aggcagaatatcgcgagcagagggctgagatgctacaagattgggcgaatatgattgatgaatggactagtaagt

SEQ ID NO: 156376 - DNA, 75 bp, synthetic construct
  source 1..75: mol_type = other DNA
gatgcacgcgccgaaaggagtggcggtcgccagcggcgagcacctgcaactggccgctgtgaaaaacctccagat

SEQ ID NO: 156377 - DNA, 75 bp, synthetic construct
  source 1..75: mol_type = other DNA
tttggtgcagtagcggtgcagaagaatattcgtgatgccggaataaacccgccaaaagaaacacaggttacccag

SEQ ID NO: 156378 - DNA, 75 bp, synthetic construct
  source 1..75: mol_type = other DNA
caggagcagggtgccggtgcagttctgcttttatatgggatttgcatggggactgacgtttgagtatctgcggca

SEQ ID NO: 156379 - DNA, 75 bp, synthetic construct
  source 1..75: mol_type = other DNA
ttgagggaaggccggaagcctttgcagagagggtgtttcatctgtggtgtgacaacaggaaacagcgaaggacgg

SEQ ID NO: 156380 - DNA, 75 bp, synthetic construct
  source 1..75: mol_type = other DNA
gcgggtggtggtgattatggaactgcaacaacctgatcgcgacgcactgcataatctgatggagtattttgaata

SEQ ID NO: 156381 - DNA, 75 bp, synthetic construct
  source 1..75: mol_type = other DNA
taccgattaattttcgcgaccagctgattggtgtactgggcattaccggcgagcctggtgaagtgaaggcatatg

SEQ ID NO: 156382 - DNA, 75 bp, synthetic construct
  source 1..75: mol_type = other DNA
cgcaaacagcgactggcttgcatattcatgtcaatacattacgctatcgactgcagagagtggaagatattacag

SEQ ID NO: 156383 - DNA, 75 bp, synthetic construct
  source 1..75: mol_type = other DNA
aatgtatagctgccgacataattattgattttagcaatggtcgtggtttctatagctctggaaacctcaatggta

SEQ ID NO: 156384 - DNA, 75 bp, synthetic construct
  source 1..75: mol_type = other DNA
ggcattaatcctccacttcaatatgaatgctgggagttgccctgccgtacagttccgtgtgaattacaggaacgg

SEQ ID NO: 156385 - DNA, 75 bp, synthetic construct
  source 1..75: mol_type = other DNA
atcaaatggtacagatggccaagcatttcttgatagcagtggtaacttccagtgcggcgggcaaatacttccagc

SEQ ID NO: 156386 - DNA, 75 bp, synthetic construct
  source 1..75: mol_type = other DNA
ctttcaaaaggaagtgaaaagcttgatgatgctgccaagcaatcaatattacgtgcttttaatgactatcctaaa

SEQ ID NO: 156387 - DNA, 75 bp, synthetic construct
  source 1..75: mol_type = other DNA
agtactgaaaacatcccatcaataacctccgcctacaacccattaatgacaaaggttatggatatttattgtaaa

SEQ ID NO: 156388 - DNA, 75 bp, synthetic construct
  source 1..75: mol_type = other DNA
ttgagcacggctaacacatggagtgcgcgccagactttcaacggcgggatcaccggagcgctgacagggaacgcc

SEQ ID NO: 156389 - DNA, 75 bp, synthetic construct
  source 1..75: mol_type = other DNA
tttttaacttttttggtgtgttattgggcggacttagcgttgcctatgccattgtccatatgttaccaaccgatt

SEQ ID NO: 156390 - DNA, 75 bp, synthetic construct
  source 1..75: mol_type = other DNA
aggcaggaagagcaccaatcagattttcaacgagtgtcggcaaagcccggcgatgaaacgggtactggctgttta

SEQ ID NO: 156391 - DNA, 75 bp, synthetic construct
  source 1..75: mol_type = other DNA
aaagagaaagatctgcatttagcacgattgaacaactcagagagtcgataattaatggctgctatccattaaaag

SEQ ID NO: 156392 - DNA, 75 bp, synthetic construct
  source 1..75: mol_type = other DNA
gttgttaagcgccgccgtgctcggtttactcggcctggtgcctggaatgccgaacctggtatttttgctgttcac

SEQ ID NO: 156393 - DNA, 75 bp, synthetic construct
  source 1..75: mol_type = other DNA
aaattaaaactcattgatgaattatgggatgtttctgatgatgaagaagtttgggataaaaacccggggggaatt

SEQ ID NO: 156394 - DNA, 75 bp, synthetic construct
  source 1..75: mol_type = other DNA
gccggtgctgatgccgaaatcatcactgagtattttccagatcaagctaaaagatttaatgcagctgacaaagaa

SEQ ID NO: 156395 - DNA, 75 bp, synthetic construct
  source 1..75: mol_type = other DNA
caggcatggatcgatgatggaaacacaactatcgcgccagaaaaaattcaggtcccatttattctcactccgcca

SEQ ID NO: 156396 - DNA, 75 bp, synthetic construct
  source 1..75: mol_type = other DNA
ccgctagcaggattagtaaaaggggggattagctcgctattttcatcaaatccattgagttcaacggctaacact

SEQ ID NO: 156397 - DNA, 75 bp, synthetic construct
  source 1..75: mol_type = other DNA
cctcacactatctagtcagcggcctgccgatatttcacctactattgtttcccagattcacaacttcttcataca

SEQ ID NO: 156398 - DNA, 75 bp, synthetic construct
  source 1..75: mol_type = other DNA
aatgtgccatgtgctccaggaaggccgcagtgactggtatatgtggtgtcagcggcggacaaggataagtacatg

SEQ ID NO: 156399 - DNA, 75 bp, synthetic construct
  source 1..75: mol_type = other DNA
gctgaccacctgagcattgacgggctggaacaattacgtgccattcaggatgccaccggagtcgggatggtattg

SEQ ID NO: 156400 - DNA, 75 bp, synthetic construct
  source 1..75: mol_type = other DNA
gagtatctaattattgatggtggttctgaggataattcaatagaacatgctaagaaaagtgtaatatgcacaaaa

SEQ ID NO: 156401 - DNA, 75 bp, synthetic construct
  source 1..75: mol_type = other DNA
catcatttaatatgagctcatcagcatcgataagcacgttggacggcaataagtttattgcttcagttatggcat

SEQ ID NO: 156402 - DNA, 75 bp, synthetic construct
  source 1..75: mol_type = other DNA
taattggagcgattgccagtgcggttatattgtattttattagctccatgttgctttttgcattagaaatgttaa

SEQ ID NO: 156403 - DNA, 75 bp, synthetic construct
  source 1..75: mol_type = other DNA
atatttcaggtgtttctataaatgaagatagcttgattagcttaagcacggcaattgtcgaacgctgcgttaaaa

SEQ ID NO: 156404 - DNA, 75 bp, synthetic construct
  source 1..75: mol_type = other DNA
atgtgtatccaccttaacttaatgatttttaccaaaatcattaggggattcatcagcgctaagcacgaaatatat

SEQ ID NO: 156405 - DNA, 75 bp, synthetic construct
  source 1..75: mol_type = other DNA
aatgtcggtaattttggtagcggcatcgtaaatgtcagtaatggtgccacccttaattcaacgggctatggattt

SEQ ID NO: 156406 - DNA, 75 bp, synthetic construct
  source 1..75: mol_type = other DNA
catctggtacgggtacgttaaccctgacgaatagagggtggatgggcagaactctcttcttgaaacattcaatat

SEQ ID NO: 156407 - DNA, 75 bp, synthetic construct
  source 1..75: mol_type = other DNA
gtggcgcaccgttatgcaggcaggccggagatgcgctaccgctacgacgatgcggggcgggtggtggagcaactt

SEQ ID NO: 156408 - DNA, 75 bp, synthetic construct
  source 1..75: mol_type = other DNA
gatgtatgccggaagcgtgattgaaagcggcgtgacggcagacgttatccatcatccccggcatccgtataccat

SEQ ID NO: 156409 - DNA, 75 bp, synthetic construct
  source 1..75: mol_type = other DNA
attgagtcaattgatggtaatgactttatatataacgaaaaacaatctaaaatattagaaatgaaacaggatcgt

SEQ ID NO: 156410 - DNA, 75 bp, synthetic construct
  source 1..75: mol_type = other DNA
ttgcttaaaaaggatgttcttaatgccagatatgatcttattagagatattcttcgatattctttaaatatacga

SEQ ID NO: 156411 - DNA, 75 bp, synthetic construct
  source 1..75: mol_type = other DNA
ctatagccagtggttgtatgagatcatggaacactacgaagtattgaaacttaaaggtcgtatgaaacgactact

SEQ ID NO: 156412 - DNA, 75 bp, synthetic construct
  source 1..75: mol_type = other DNA
gagtttgtgccggggggaacctgggcacgtgacagtaagaacacaccgctgggctttgtggctaacaatggtgtg

SEQ ID NO: 156413 - DNA, 75 bp, synthetic construct
  source 1..75: mol_type = other DNA
atgacccaacccgttctggacattcaacagctgcatttgagtttccccggttttaacggcgacgttcacgcgctc

SEQ ID NO: 156414 - DNA, 75 bp, synthetic construct
  source 1..75: mol_type = other DNA
atgaacttagcgtacgatctcgtacggttgggcctcaaaccccatctcgggggcaccacattagatatctctcag

SEQ ID NO: 156415 - DNA, 75 bp, synthetic construct
  source 1..75: mol_type = other DNA
gcaattgatggaaaaacgctccggcactcttatgacaagagtcgccgcaggggagcgattcatgtcattagtgcg

SEQ ID NO: 156416 - DNA, 75 bp, synthetic construct
  source 1..75: mol_type = other DNA
taatactgattccaaacaaacaattgatgtcagattattgaatcaaaatatagacatgatattgggaggcgtgca

SEQ ID NO: 156417 - DNA, 75 bp, synthetic construct
  source 1..75: mol_type = other DNA
tccaattgaccataatttaaattttattgatgcaaaatataatggagaaacttatcggggaaatgaagagtttgc

SEQ ID NO: 156418 - DNA, 75 bp, synthetic construct
  source 1..75: mol_type = other DNA
aaaaaagattcttaatgaaatactcaagatgatggcagaaagtacgctaaaatcatcggatcttgaggagttaag

SEQ ID NO: 156419 - DNA, 75 bp, synthetic construct
  source 1..75: mol_type = other DNA
ttttacagtaatgaaaaacctatcattgatgatttctttaaacgagacgacaataattctattgagtttgaatta

SEQ ID NO: 156420 - DNA, 75 bp, synthetic construct
  source 1..75: mol_type = other DNA
cattagattctgcgcaaaaagccgacgatatcatgcatcaggccaataataattacaatgcggtcgataaaaagg

SEQ ID NO: 156421 - DNA, 75 bp, synthetic construct
  source 1..75: mol_type = other DNA
gctaccggatggattttaggaaaacttactgaaggccttgcgggtattatttcaaaatatgatcccacgctgcta

SEQ ID NO: 156422 - DNA, 75 bp, synthetic construct
  source 1..75: mol_type = other DNA
aaaacgcgcgaacaaatgcttacagtgatgcaaaggatagataaaaccgtcgaacaagaggtagctcagatggtg

SEQ ID NO: 156423 - DNA, 75 bp, synthetic construct
  source 1..75: mol_type = other DNA
gcgcttattggtggaatagcgggcgcagtagtattaggtgtagatatcacttgtcaaatcgctctgggcaccacg

SEQ ID NO: 156424 - DNA, 75 bp, synthetic construct
  source 1..75: mol_type = other DNA
tcaattattaattcagtttcaaaaaatattataaaggtattagacagcgtatgcagcgtgctacaaacatcagcc

SEQ ID NO: 156425 - DNA, 75 bp, synthetic construct
  source 1..75: mol_type = other DNA
atgcagcatgatacaaacatcagtcgtagttttgaagttaattgccaagataagtaatgctctggagaaaatagg

SEQ ID NO: 156426 - DNA, 75 bp, synthetic construct
  source 1..75: mol_type = other DNA
tttcatatccgcgtgacgccggacacaccagaaatacgagccgccatcaccgcggagttgcgttcgtttcttctg

SEQ ID NO: 156427 - DNA, 75 bp, synthetic construct
  source 1..75: mol_type = other DNA
gatttccggtgcgaacggggaatacagccatcagttgcttgcaccggcagacaatatctccattgcaaaaaatga

SEQ ID NO: 156428 - DNA, 75 bp, synthetic construct
  source 1..75: mol_type = other DNA
ttggtcattaatgttgtccgctttccgccatttcatcatcactgattggcgtggcgttttttgccagcactcccg

SEQ ID NO: 156429 - DNA, 75 bp, synthetic construct
  source 1..75: mol_type = other DNA
gggcacacagaccgggcgcacgtatgtgggcctgcagaatgaatacaacggcatcatcgatgccgcctctcatcc

SEQ ID NO: 156430 - DNA, 75 bp, synthetic construct
  source 1..75: mol_type = other DNA
tacagagtcagacatgtaccatggggcaaaaaaactatgtggtgccattaaataccgtatatcaatcacagttca

SEQ ID NO: 156431 - DNA, 75 bp, synthetic construct
  source 1..75: mol_type = other DNA
ataccgtcactggatgggaacggggactgtcggtgtgatgattgccagcagtgacctgattaatcccattccgga

SEQ ID NO: 156432 - DNA, 75 bp, synthetic construct
  source 1..75: mol_type = other DNA
ccggcgcagtcgaaacgcctttctatgctggtagcgcttgtgatgcaggcgaactggtcaaaatcagcacctgga

SEQ ID NO: 156433 - DNA, 75 bp, synthetic construct
  source 1..75: mol_type = other DNA
ggcacttttatttggaactacaggtctgaatgtatttggtagtaaatctgttcagaaaaaactactcaatcactt

SEQ ID NO: 156434 - DNA, 75 bp, synthetic construct
  source 1..75: mol_type = other DNA
acaggctatcagtcgtattgctgccggtttaggaattccagcattagtgtttggatcacctaaaaaccgcgaccg

SEQ ID NO: 156435 - DNA, 75 bp, synthetic construct
  source 1..75: mol_type = other DNA
aaaaagccattctgggccgctggttatcggaagagatgaaggtcattttgctggatgaacctacgcgcggcattg

SEQ ID NO: 156436 - DNA, 75 bp, synthetic construct
  source 1..75: mol_type = other DNA
aacaacttacgccaaaagaacgggaactggcgcatctggtagcaaaagggttaatgaatcgggaaattgctgatg

SEQ ID NO: 156437 - DNA, 75 bp, synthetic construct
  source 1..75: mol_type = other DNA
acagccaggtcagggcgctggtcattaaggccaagaatttacgcagcggtctgagcaccattgacgtaaatacgg

SEQ ID NO: 156438 - DNA, 75 bp, synthetic construct
  source 1..75: mol_type = other DNA
ccagcagcagcgcgaagccacgttggtcaaaatcagggtcttccgtttcttacacaacagcccaagtacaatcac

SEQ ID NO: 156439 - DNA, 75 bp, synthetic construct
  source 1..75: mol_type = other DNA
aaagagtataaaatcaaccgtagaaaccatcattaaatctgtttcaaaaaaattcatgtctgcattagatgctgt

SEQ ID NO: 156440 - DNA, 75 bp, synthetic construct
  source 1..75: mol_type = other DNA
aacgccactacagcaaagacgaacgatgcccgcctgacaatgattttgggtaatctaacaggcattgccgatcag

SEQ ID NO: 156441 - DNA, 75 bp, synthetic construct
  source 1..75: mol_type = other DNA
gtcaccgtcgtcgccagccgtcccgttgaacagcaggtcgtccccagaatggaggccatcaaaggtgtgctgagt

SEQ ID NO: 156442 - DNA, 75 bp, synthetic construct
  source 1..75: mol_type = other DNA
tggcaggcaaccaactcgttcccatcgtgcataacacgacgtatggagctctccgtaatgtcagtcctttgcttg

SEQ ID NO: 156443 - DNA, 75 bp, synthetic construct
  source 1..75: mol_type = other DNA
cttgggatgaccgacaaggtattgccaaagagttacacgatttgctcgaagcggcaggtgtcaaagtatggttca

SEQ ID NO: 156444 - DNA, 75 bp, synthetic construct
  source 1..75: mol_type = other DNA
ttccagggaactgcagatgcttcttctgcacttacggcgtctggtaagaactcttatgcacttattgccacgggg

SEQ ID NO: 156445 - DNA, 75 bp, synthetic construct
  source 1..75: mol_type = other DNA
gcagcagcgatcagataggcttttatgtctatggaaaggactctgccattcataatacaggaagcggtgttatgg

SEQ ID NO: 156446 - DNA, 75 bp, synthetic construct
  source 1..75: mol_type = other DNA
ggaaggtgccagaagcaatgttaatgtatccggaaaaatcaatctttccggtactggtgctgtgggggtttttgc

SEQ ID NO: 156447 - DNA, 75 bp, synthetic construct
  source 1..75: mol_type = other DNA
aacatagacatacaaaaacttaaagacctgaatgttaattattcaggaattggtcgttcgcaaattagagaccat

SEQ ID NO: 156448 - DNA, 75 bp, synthetic construct
  source 1..75: mol_type = other DNA
gattacccggctgatctgcgcacccgcgaaaccgccgacatgttcatggcgctcatcatcaaaaaactgctgaaa

SEQ ID NO: 156449 - DNA, 75 bp, synthetic construct
  source 1..75: mol_type = other DNA
taactggtggtgcgacagcgacgctgaaacagggggcatcagttaaccttgtaggggatggcgctgttgtcgcgg

SEQ ID NO: 156450 - DNA, 75 bp, synthetic construct
  source 1..75: mol_type = other DNA
tgttaactctattgattttgtaatccagaatgaaatttactcagcaattattgctttaatcaatactgcgaaacc

SEQ ID NO: 156451 - DNA, 75 bp, synthetic construct
  source 1..75: mol_type = other DNA
gaaaatggtgatcctattttctctgatgaagatattgatgggcgtattaatgtcaacagcattgattatgttatg

SEQ ID NO: 156452 - DNA, 75 bp, synthetic construct
  source 1..75: mol_type = other DNA
gtccaggacaaagccagcgagaacgcagcagagggacgttaacgcagtaccagaaccagacagcgagatccctcc

SEQ ID NO: 156453 - DNA, 75 bp, synthetic construct
  source 1..75: mol_type = other DNA
cagccattaataatggtgttattaatattcgcccatttaaaaatgctttcgctccagaggggattaacaccgcaa

SEQ ID NO: 156454 - DNA, 75 bp, synthetic construct
  source 1..75: mol_type = other DNA
gatccaacaccaaacccggagccgacgcctgagccaacgccggagcctgaacctacgccggaaccgacacctgat

SEQ ID NO: 156455 - DNA, 75 bp, synthetic construct
  source 1..75: mol_type = other DNA
gcgaacgccgacccggcggatatggccgcgcagatagcattgataaccagccggataaatgacctgaccgccccg

SEQ ID NO: 156456 - DNA, 75 bp, synthetic construct
  source 1..75: mol_type = other DNA
agaaacgttactatcactttgctgtaagaaaggctgttgaaggttttccaaggattttaacagccttactgaata

SEQ ID NO: 156457 - DNA, 75 bp, synthetic construct
  source 1..75: mol_type = other DNA
tggccccggactacggcgacctcaacgacccacgcccggtgtttgactggcagcaggccattcgccagcgggcga

SEQ ID NO: 156458 - DNA, 75 bp, synthetic construct
  source 1..75: mol_type = other DNA
atggcaacaagtggatcggctgattgacgattttgccaaggccaaagcccgctgctgtgctggtaataacccagc

SEQ ID NO: 156459 - DNA, 75 bp, synthetic construct
  source 1..75: mol_type = other DNA
gatagggagaagtgaatggataaatcagtatcggcgacgtttacagcagttgtctgagacagatattgccggctg

SEQ ID NO: 156460 - DNA, 75 bp, synthetic construct
  source 1..75: mol_type = other DNA
agttgatgcggtaaaaaaaggcgcgtgggattttttgcaaaaaccggttgatcccggcaaattgctttctctggt

SEQ ID NO: 156461 - DNA, 75 bp, synthetic construct
  source 1..75: mol_type = other DNA
tcgggcctcgccactagccaggcagaccgtaatttccggatgagttataaccacaacatctcggggatcaataat

SEQ ID NO: 156462 - DNA, 75 bp, synthetic construct
  source 1..75: mol_type = other DNA
tcaataacattaatgtgatgaacggcgctcagttgcagggtgatataatttctgaatacaaccagaaggataata

SEQ ID NO: 156463 - DNA, 75 bp, synthetic construct
  source 1..75: mol_type = other DNA
tgatgacaacggtaatccggcccggcgtggtcaggttattctctgtaccggctgcgataatgcatatgagcccaa

SEQ ID NO: 156464 - DNA, 75 bp, synthetic construct
  source 1..75: mol_type = other DNA
tcaatcaatagccaactttctattaatagaagagccagaagcacatattcatacacatattcaaaaatcattatt

SEQ ID NO: 156465 - DNA, 75 bp, synthetic construct
  source 1..75: mol_type = other DNA
atagaagaacctgaagcacacatccacacacatattcaaaaatcactattcgaaaatataaaatatcataataca

SEQ ID NO: 156466 - DNA, 75 bp, synthetic construct
  source 1..75: mol_type = other DNA
acgcagatctggacgttcagccgatgctgcgtgcattagatttttccgccgttgatggtcgcgatattgccctcg

SEQ ID NO: 156467 - DNA, 75 bp, synthetic construct
  source 1..75: mol_type = other DNA
gaaaggtatcgacgaatgagtttaataatttcttaaaaaaatcgggtctgtataactctcgttatgaaattaaag

SEQ ID NO: 156468 - DNA, 75 bp, synthetic construct
  source 1..75: mol_type = other DNA
tcaacacattcgttaatgaccggacttatgagttacgtggcgaaaagatagttattcctggcatggcaaaagtac

SEQ ID NO: 156469 - DNA, 75 bp, synthetic construct
  source 1..75: mol_type = other DNA
acgtagcaaataaagaaaatctacgtagtttttttgaaacggtttcatcatatgcgggtaagcctacaatagtaa

SEQ ID NO: 156470 - DNA, 75 bp, synthetic construct
  source 1..75: mol_type = other DNA
taatggtggttaccaagatatttcgagtggtggaagtgtcactaatacactaattagcggaggtgagcagaacat

SEQ ID NO: 156471 - DNA, 75 bp, synthetic construct
  source 1..75: mol_type = other DNA
ctattggccttgccgaaaacagagcaaggggaatggcggcttgctacgttatatagtctggcaagagggggattt

SEQ ID NO: 156472 - DNA, 75 bp, synthetic construct
  source 1..75: mol_type = other DNA
aatagcagttacggttattatatttcgccagatatcattcccacggatgttaaattacgagcgctattaggtaga

SEQ ID NO: 156473 - DNA, 66 bp, synthetic construct
  source 1..66: mol_type = other DNA
ggggcacaggactatatccgcactcagtgtactaagcaggctttttattatccggaggatacatga

SEQ ID NO: 156474 - DNA, 75 bp, synthetic construct
  source 1..75: mol_type = other DNA
atgacaatgcagaagcagctggaaggggcgcaggaatatatccgcactcagtgcactaagctggctttttattat

SEQ ID NO: 156475 - DNA, 75 bp, synthetic construct
  source 1..75: mol_type = other DNA
atgattaaaaaagcttcgctgctgacggcgttttccgtcacagccttttccgcttgggcacaggatatcagcccg

SEQ ID NO: 156476 - DNA, 75 bp, synthetic construct
  source 1..75: mol_type = other DNA
agctgaaaaggttttaaggaaaacgagaaatttgactttcatttttttttctctcgtattagttgaaattgcaat

SEQ ID NO: 156477 - DNA, 75 bp, synthetic construct
  source 1..75: mol_type = other DNA
ggggcgcaaagtgctgtatatgcgctctgatctcgatacttatcttgcatccactcgcagaacgcagacagcgta

SEQ ID NO: 156478 - DNA, 75 bp, synthetic construct
  source 1..75: mol_type = other DNA
actggtgcatgtgatataattctcatgtttatcgatggggaaaaagagcataagaaaaatgtccttacgggaacc

SEQ ID NO: 156479 - DNA, 75 bp, synthetic construct
  source 1..75: mol_type = other DNA
gacgctcgtgcctttagcgtcatcaaatcctcctttttgccgattgaagaggcttacgctatccgtttatcggac

SEQ ID NO: 156480 - DNA, 75 bp, synthetic construct
  source 1..75: mol_type = other DNA
tcaggcgaggtggacctgttattccccaacaacaaggatcttgttaatctggatatccccaacaacaataagagt

SEQ ID NO: 156481 - DNA, 75 bp, synthetic construct
  source 1..75: mol_type = other DNA
tgaacggtggcgttgatgctgaaaaagtgattggtatttccggacatctgctggcacctgaggtgtgtattgttg

SEQ ID NO: 156482 - DNA, 75 bp, synthetic construct
  source 1..75: mol_type = other DNA
tgcgttgttgatccgatagcctcagccctaatttgtgaaccaatagatgacaagttttccccacaaacaccttat

SEQ ID NO: 156483 - DNA, 75 bp, synthetic construct
  source 1..75: mol_type = other DNA
tcagtgcggaaggccaccgatgggggagaagtgccgatatactccattccctcacggctgcagtcacgccaccgc

SEQ ID NO: 156484 - DNA, 75 bp, synthetic construct
  source 1..75: mol_type = other DNA
caaccgttaaccgtggactcattgtgtcaggcggcattgcgcggcgatctactggcaaaagacatcattaccggg

SEQ ID NO: 156485 - DNA, 75 bp, synthetic construct
  source 1..75: mol_type = other DNA
caagcagatgataatgctgcaaaagcattgacaaaatggtggaacgatacagcatcacaaagaatatttgactct

SEQ ID NO: 156486 - DNA, 75 bp, synthetic construct
  source 1..75: mol_type = other DNA
tccagcggtggtagtgctgtagacaccaccattgaggaggggcttcagactgttctcaatggcggaaatgtctcc

SEQ ID NO: 156487 - DNA, 75 bp, synthetic construct
  source 1..75: mol_type = other DNA
ttctaccacaatttaccgtggtggggagcagagtattcacaatgcaggtcttgcgaccggaaccatcatcagtgg

SEQ ID NO: 156488 - DNA, 75 bp, synthetic construct
  source 1..75: mol_type = other DNA
ttattttttttaaattcatgcgagcaatgattacaacaaattattctttaaataaatatcaatcttatgaaaaaa

SEQ ID NO: 156489 - DNA, 75 bp, synthetic construct
  source 1..75: mol_type = other DNA
atttaaccccgccaccgggtaatagcagtggcaaccttgagcaacaaatagccagtacttcacagcaaatcgggt

SEQ ID NO: 156490 - DNA, 75 bp, synthetic construct
  source 1..75: mol_type = other DNA
tcaaaggcctaatggatatgctctggctcggaataaagggtcgtgcaacacatgatacacaatgggataccccat

SEQ ID NO: 156491 - DNA, 75 bp, synthetic construct
  source 1..75: mol_type = other DNA
tcagaacgctacggctatcgcccggcgcttatcccccgccccgtaatggccggaacactcccggcgcgggtcacc

SEQ ID NO: 156492 - DNA, 75 bp, synthetic construct
  source 1..75: mol_type = other DNA
gataaactgcatgtgacagacattaccaggaatgcgacttacccggtactgatagacagcattgcggtggaagtg

SEQ ID NO: 156493 - DNA, 75 bp, synthetic construct
  source 1..75: mol_type = other DNA
ctcgatgctggcgattctgaccggtaacgttggtattaacggaggcaacagcggcgcgcgtgaaggttcatacag

SEQ ID NO: 156494 - DNA, 75 bp, synthetic construct
  source 1..75: mol_type = other DNA
cgacggtcatgtgttgacggtacgggaagatctgatctggcccctgctggaagttctgtatccgggcactcggga

SEQ ID NO: 156495 - DNA, 75 bp, synthetic construct
  source 1..75: mol_type = other DNA
ggtgtttaacagtaatgtcgcaggagtagggtttgtgtttgaaggccgttcctcggtcgacagcaacccgctacc

SEQ ID NO: 156496 - DNA, 75 bp, synthetic construct
  source 1..75: mol_type = other DNA
tggctggtgtcgaacctggggatggcctatcaggactgcaattatgatgcaacgccacaatacgtcatcaaagca

SEQ ID NO: 156497 - DNA, 75 bp, synthetic construct
  source 1..75: mol_type = other DNA
cccggcagaaaaaattatccagttggcacgagagatcggttcagcaaaacctgcttatatttgtcagggttgggg

SEQ ID NO: 156498 - DNA, 75 bp, synthetic construct
  source 1..75: mol_type = other DNA
taggttttttgcatcacatcaggctggttccgttatttgcctgcattcttggcggtatcttagttctattcgcat

SEQ ID NO: 156499 - DNA, 75 bp, synthetic construct
  source 1..75: mol_type = other DNA
ttttaagcttagacactgctcaggcatgtggtatagttcaaagcaaaatcaaacgctcaattaaacgactgtgtt

SEQ ID NO: 156500 - DNA, 75 bp, synthetic construct
  source 1..75: mol_type = other DNA
ctctcatgaatctgcagggaatatgggctatgtgatcctcgcccaacccgcaacctcagcaaaatttgaacgcaa

SEQ ID NO: 156501 - DNA, 75 bp, synthetic construct
  source 1..75: mol_type = other DNA
gaggtgtttcaggatgacagcaagtgcgagatgattgttggcattgaccacttcatgacggcctcggctaagtat

SEQ ID NO: 156502 - DNA, 75 bp, synthetic construct
  source 1..75: mol_type = other DNA
ccactgcagttaacgggcttccactacaaggcgcgtacccactccagctacggcaatattgatgtgttacagcag

SEQ ID NO: 156503 - DNA, 75 bp, synthetic construct
  source 1..75: mol_type = other DNA
tatgtattttgcagcaaccggggacaggccggaatggagtaactgtttcagtttttcagatgcagtagatgccgt

SEQ ID NO: 156504 - DNA, 75 bp, synthetic construct
  source 1..75: mol_type = other DNA
cggttgtgccggataatgcatcagagcctcttgcttatgcttacaaagagcttacgcctgagattatgcgcaacc

SEQ ID NO: 156505 - DNA, 75 bp, synthetic construct
  source 1..75: mol_type = other DNA
ctttaacggatgaaagcaataaagagcaagcggacgttattcctgtttatgctgccgcgcctgcgtcggttgtgc

SEQ ID NO: 156506 - DNA, 75 bp, synthetic construct
  source 1..75: mol_type = other DNA
aaagcattagagaaaaatatattttggtatatgcatgatcaagtcttgactttatttgcacttacatttggtaaa

SEQ ID NO: 156507 - DNA, 75 bp, synthetic construct
  source 1..75: mol_type = other DNA
atgtgcggtttggatgtcaccaatcaggcaatattaactcctgactatctctctacactgccgcagttaaaccgt

SEQ ID NO: 156508 - DNA, 75 bp, synthetic construct
  source 1..75: mol_type = other DNA
ccgggtcaacctcgattttgaccgcgatacgtggaaaccgggttatgagagcctgtgggtacgccagtcgcgccc

SEQ ID NO: 156509 - DNA, 75 bp, synthetic construct
  source 1..75: mol_type = other DNA
gacaccgtaatatacagcataccgttcattacacccagagtaatcctgcccgcttcagacgaatatggggaatgc

SEQ ID NO: 156510 - DNA, 75 bp, synthetic construct
  source 1..75: mol_type = other DNA
taagtttattccactacgcagatttctggcgtgccagttggctggtagtgcaactgagcgtgatgacgtggctcg

SEQ ID NO: 156511 - DNA, 75 bp, synthetic construct
  source 1..75: mol_type = other DNA
ggcctcgaccctgataacaccaggggcgaggctctggacgctggataagcgacttgaaaagctggctaaacgttt

SEQ ID NO: 156512 - DNA, 75 bp, synthetic construct
  source 1..75: mol_type = other DNA
ggctggaaatcagggttcagggcgacgatgcgccagcggtgttccgcaagggcgtactgattaccggcgtgacgg

SEQ ID NO: 156513 - DNA, 75 bp, synthetic construct
  source 1..75: mol_type = other DNA
tgtgttagcggctgactttaaaaacaactacccaccaaacatccccaacactcaggtcggcgtatatggcgactg

SEQ ID NO: 156514 - DNA, 75 bp, synthetic construct
  source 1..75: mol_type = other DNA
tttgatggacagaaaaacgcagagaacaacgctcgttatatcgcagctttcaaccctgaagtagtacaggcactg

SEQ ID NO: 156515 - DNA, 75 bp, synthetic construct
  source 1..75: mol_type = other DNA
cttcttgcgattgttactggtcagcgccgtgatgacatttgccacatgcgtttttcagatgtgtggaacgaacac

SEQ ID NO: 156516 - DNA, 75 bp, synthetic construct
  source 1..75: mol_type = other DNA
tatcagtgaagacggcaatacggcgtggcgcggggagtatgatgaatggggcaaccagcttaatgaagagaaccc

SEQ ID NO: 156517 - DNA, 75 bp, synthetic construct
  source 1..75: mol_type = other DNA
gcgggagcgtgacctgacggggtggatgtcgctgtcgcgtaaaccggagatgacgtggtacgggtgggacggcga

SEQ ID NO: 156518 - DNA, 75 bp, synthetic construct
  source 1..75: mol_type = other DNA
aacaggacaacttccgaggaatcaagcaagagcaatagaacaagctatcattaatgctaaaagaggaaacggctt

SEQ ID NO: 156519 - DNA, 75 bp, synthetic construct
  source 1..75: mol_type = other DNA
gggcagaccagcctgtgggggctggcactcagtctgcccgcagacaccggctacccggacccgcgcggggaactg

SEQ ID NO: 156520 - DNA, 75 bp, synthetic construct
  source 1..75: mol_type = other DNA
ggtgaggttgcaggatcatttgcaacgttatccagatttttataacgaagaaatattcagggaggtgaccgaaga

SEQ ID NO: 156521 - DNA, 75 bp, synthetic construct
  source 1..75: mol_type = other DNA
acggctctgatcatcttgtgaaaggtaagattgcagtatgtgagagcgatgatattttggttcaggctaacttaa

SEQ ID NO: 156522 - DNA, 75 bp, synthetic construct
  source 1..75: mol_type = other DNA
tgatgagatagaaatgcctttctgcgcaaaatggatttgtctcgctgatgagtctgtcgataaaaaggcaaaaga

SEQ ID NO: 156523 - DNA, 75 bp, synthetic construct
  source 1..75: mol_type = other DNA
gttgagcgtcgtggggcggttttggcttacttccgcgaaatgtcggagcgccttttcacaggaaaatctgacgtt

SEQ ID NO: 156524 - DNA, 75 bp, synthetic construct
  source 1..75: mol_type = other DNA
atcgcggcctgccgctggcccttatcagtaaggaaggggcaacagaatggtgcgcagaatacgatgagtggggca

SEQ ID NO: 156525 - DNA, 75 bp, synthetic construct
  source 1..75: mol_type = other DNA
tgttaaagcaggacataccgacgaccattctgtatggttgctaaaacaggaaaaagtagctcacagcccggatct

SEQ ID NO: 156526 - DNA, 75 bp, synthetic construct
  source 1..75: mol_type = other DNA
tgtttgatggtgaaacggaagcggtatgggggctgaataccgcgtacagcgtggtggaaaaaagcgtcaccactc

SEQ ID NO: 156527 - DNA, 75 bp, synthetic construct
  source 1..75: mol_type = other DNA
catgtctctctaccccgatagcgccaaagacggtaataatgtactgattctgtgcatgaaattttatgaatcgga

SEQ ID NO: 156528 - DNA, 75 bp, synthetic construct
  source 1..75: mol_type = other DNA
atgacaacaagaaagtggatattattattggttttagcggtaagttgcattgcgcaagccaaaccgaaaggtatc

SEQ ID NO: 156529 - DNA, 75 bp, synthetic construct
  source 1..75: mol_type = other DNA
atttcagccatgtttcggtgatgcggaaggtgctgctaagaatgaccagttggatgcattatctttatttggatc

SEQ ID NO: 156530 - DNA, 75 bp, synthetic construct
  source 1..75: mol_type = other DNA
caagtacgcggtggacaataatctgacaccggaacaaacacaggctgggctggataagatagcgaaaggtgatat

SEQ ID NO: 156531 - DNA, 75 bp, synthetic construct
  source 1..75: mol_type = other DNA
aatgatagccacacagatgtacggtaagccggtgagtgaactgagtgagacagagaagcagacggtctcgacact

SEQ ID NO: 156532 - DNA, 75 bp, synthetic construct
  source 1..75: mol_type = other DNA
tgcgtccacggcaacggcagataaaaacaggctggataccggcacactgggcttcagtgacactgaaaaccgggc

SEQ ID NO: 156533 - DNA, 75 bp, synthetic construct
  source 1..75: mol_type = other DNA
tggatgctaaacgcaatgtgctggatatgtggatggagcggttagggatactggcgggaacacatgaaaacgtaa

SEQ ID NO: 156534 - DNA, 75 bp, synthetic construct
  source 1..75: mol_type = other DNA
gcgagctacggcactggctggcctgttttgaccaggtggcaaagcgaacgcctgttactgccggattcttgctac

SEQ ID NO: 156535 - DNA, 75 bp, synthetic construct
  source 1..75: mol_type = other DNA
aaggcgcagtctgcgggcaggcaccggataagtgaagagactgaccagtatgccggaggccaccggctgaaacag

SEQ ID NO: 156536 - DNA, 75 bp, synthetic construct
  source 1..75: mol_type = other DNA
ggcgaatatcagtgccagtgggcaaatgttcaattacagtttatcatttttggggatgaaacatgttatacttat

SEQ ID NO: 156537 - DNA, 75 bp, synthetic construct
  source 1..75: mol_type = other DNA
gaaaaaatacagggttttgattaatcgtattaagccagaagatgcgccagatattgactggccggaggttccggg

SEQ ID NO: 156538 - DNA, 75 bp, synthetic construct
  source 1..75: mol_type = other DNA
gttacctgacgacgttgtttccgttgcgccggaaggccattttgttaaatggaatggtaaaaaatgggtgcatga

SEQ ID NO: 156539 - DNA, 75 bp, synthetic construct
  source 1..75: mol_type = other DNA
ctaagttttctcgtggattcacggccgtcgatcaccaataaatactcagccaaagatgtagggccagatatactt

SEQ ID NO: 156540 - DNA, 75 bp, synthetic construct
  source 1..75: mol_type = other DNA
ctcaacgcccgcaatcagttagataaaaacctcctcgaaatggctatgcaaatggtttatggcaaagatatggtg

SEQ ID NO: 156541 - DNA, 75 bp, synthetic construct
  source 1..75: mol_type = other DNA
tggaaacgcaaagtaccagaaagcgcagcgctggcaatgacgggaacagtatataaattatttggtagtcgctta

SEQ ID NO: 156542 - DNA, 75 bp, synthetic construct
  source 1..75: mol_type = other DNA
ttcctttagcctgtgaagcgcatagccatcgcagcgtcgcccttgccaaaaccgtggctgcgcccatcatggcga

SEQ ID NO: 156543 - DNA, 75 bp, synthetic construct
  source 1..75: mol_type = other DNA
atcaacacggatgttttacaagattcgttttttaaaaatgtcgatttcattcatgaatctaactcgtataccgta

SEQ ID NO: 156544 - DNA, 75 bp, synthetic construct
  source 1..75: mol_type = other DNA
atgcaacatcatcaggaccgtattatgcacaaagtctttctggttctccggatatcgagatgataaaaaatcgca

SEQ ID NO: 156545 - DNA, 75 bp, synthetic construct
  source 1..75: mol_type = other DNA
ggtggcagctacatccggctggatgcctgcggaatagaagcgggaacgccgggagaatataacgttaaggcggga

SEQ ID NO: 156546 - DNA, 75 bp, synthetic construct
  source 1..75: mol_type = other DNA
cttatgggttttcagttatgtggcctcagcgccgtgtgcgggctgtgccgtgcctccatcttagccgggctggcg

SEQ ID NO: 156547 - DNA, 75 bp, synthetic construct
  source 1..75: mol_type = other DNA
atgaagcaaatcatattacctttggccatattatccacgctcattcctgctaattattcttacgcaagaaacact

SEQ ID NO: 156548 - DNA, 75 bp, synthetic construct
  source 1..75: mol_type = other DNA
tgtatgcctttgaacaggcgtgcgaatcaaatagtgtcatgatgagtgatttcgatccgtattcccctataaata

SEQ ID NO: 156549 - DNA, 75 bp, synthetic construct
  source 1..75: mol_type = other DNA
taatatgagtttgtatggctttggtatcaataccacgcctgtacaaaatgagattggaccacaggcgcttatctt

SEQ ID NO: 156550 - DNA, 75 bp, synthetic construct
  source 1..75: mol_type = other DNA
aaagaattgatgtttcacccgatgggaccgtgatgatggtttgtggttccagaggagctgctatttatgatggta

SEQ ID NO: 156551 - DNA, 75 bp, synthetic construct
  source 1..75: mol_type = other DNA
acggctaccaaattgcaaacagcgcgtaccattaatggggtttcatttgacggttctgcgaatatttcactgtca

SEQ ID NO: 156552 - DNA, 75 bp, synthetic construct
  source 1..75: mol_type = other DNA
caacgggcaaccagaacacaacaggaaatgcggcgtctgccacgaaattacaaacggcaagaaccattggtggcg

SEQ ID NO: 156553 - DNA, 75 bp, synthetic construct
  source 1..75: mol_type = other DNA
ctatgcaggctggtatatctgaacttgttcttcgtgcgggaaatgggaatccaaaaggtcttactggtgcgttat

SEQ ID NO: 156554 - DNA, 75 bp, synthetic construct
  source 1..75: mol_type = other DNA
gcgacagggaaagaacaggtctacatccacgcgcagaagaacatgaacaccgaggtgctgaataaccgcaccact

SEQ ID NO: 156555 - DNA, 75 bp, synthetic construct
  source 1..75: mol_type = other DNA
tgagttattggaacgtcataaggacgactacagggaagctatgcagacccttaacaaaattggtaaacgtgttga

SEQ ID NO: 156556 - DNA, 75 bp, synthetic construct
  source 1..75: mol_type = other DNA
atcttacagaaatatggaaaatcctcggattacctaacaataagctaccctctcagtggcgcggcaaggtaacaa

SEQ ID NO: 156557 - DNA, 75 bp, synthetic construct
  source 1..75: mol_type = other DNA
ctggcaggcgagttgttttttgataaaaaaaacacagggaaactattgttctggacaaataaatctggtcactat

SEQ ID NO: 156558 - DNA, 75 bp, synthetic construct
  source 1..75: mol_type = other DNA
agccatccttgatagcgaaggtataactagaaataaaacaaacaatgacttaagaaagataatgtctttagcatc

SEQ ID NO: 156559 - DNA, 75 bp, synthetic construct
  source 1..75: mol_type = other DNA
cgactaatggtatggttttagcttacaaatttaagggaaaacgctttgattgcggaagtgtagagggctttgtag

SEQ ID NO: 156560 - DNA, 75 bp, synthetic construct
  source 1..75: mol_type = other DNA
actaatgcggagtttatctatgtgtctaatggctcaagttattcacctggatggcgcagagcgtataacactaaa

SEQ ID NO: 156561 - DNA, 75 bp, synthetic construct
  source 1..75: mol_type = other DNA
gaaaaacctgatcgcgaacgcaggaaatcacgctgatatcggtgttgtgaagaatatgtttatcggtgtgggtca

SEQ ID NO: 156562 - DNA, 75 bp, synthetic construct
  source 1..75: mol_type = other DNA
accagtgtttgaggcaaccggcgtaacgccacacgagctgcgcccagatctctacccaaatcccactgacggttt

SEQ ID NO: 156563 - DNA, 75 bp, synthetic construct
  source 1..75: mol_type = other DNA
ggagtacaggaactgcgcagggaactttatcaggttaaacagtctgttaaggggatgcggaacgggatgtttagt

SEQ ID NO: 156564 - DNA, 75 bp, synthetic construct
  source 1..75: mol_type = other DNA
ttacgaagcagagctaggtatggagcgtggtggattcagtgatgcgcttaacgaaatcaaaaccccagccaccga

SEQ ID NO: 156565 - DNA, 75 bp, synthetic construct
  source 1..75: mol_type = other DNA
acaggatttttcgcttaacaccccagccactgacgctttcctggctgaagtccgggctaaggcgtttgatgacct

SEQ ID NO: 156566 - DNA, 75 bp, synthetic construct
  source 1..75: mol_type = other DNA
tatagctcagattacaggagcgaacatgattggcgcaaatggcagaaatgtaccggaaatggcattgccggaaag

SEQ ID NO: 156567 - DNA, 75 bp, synthetic construct
  source 1..75: mol_type = other DNA
aattttcgattccaatggataacgccatttcgctgcgtacggtagatgataacggctgggttggcgaagtcagcg

SEQ ID NO: 156568 - DNA, 75 bp, synthetic construct
  source 1..75: mol_type = other DNA
atagcgttaaaaaatattcaggccggaaatgctaaaaaattcacgttatccagcgccaacaactccacgaaaaac

SEQ ID NO: 156569 - DNA, 75 bp, synthetic construct
  source 1..75: mol_type = other DNA
cttccagttgcaacgactgcttgagcgtgatgctcgtggtggtacccgttatatcgagattatccgttcccactt

SEQ ID NO: 156570 - DNA, 75 bp, synthetic construct
  source 1..75: mol_type = other DNA
ccgttcatggataacctgcgtctggatatccagtatttctccgtgccctatcgtctcgtctgggaccactggcaa

SEQ ID NO: 156571 - DNA, 75 bp, synthetic construct
  source 1..75: mol_type = other DNA
atgagtaagtttggtcgcagagtgcctagtaattcacaaagtcagcataatttttcagttatcccgagtgccaac

SEQ ID NO: 156572 - DNA, 75 bp, synthetic construct
  source 1..75: mol_type = other DNA
aaatcgattgagtcaattaagcaggctgatgcagctgttaagttggcacacgagaagttttcggcgctggcggcg

SEQ ID NO: 156573 - DNA, 75 bp, synthetic construct
  source 1..75: mol_type = other DNA
ctagtaatgcaaaaagtcagcataatttttcagtaatcccgagtgccaatattcagcgttcggtctttaaccgca

SEQ ID NO: 156574 - DNA, 75 bp, synthetic construct
  source 1..75: mol_type = other DNA
ccagattactggtaaattacgttccacggacccgcaatctcttgatgtatggcatttatcccagcggttcgactc

SEQ ID NO: 156575 - DNA, 75 bp, synthetic construct
  source 1..75: mol_type = other DNA
tggggaaaaacgggattattgtcgagccacatccggtattacgcaatggggccattgcccgtgacctggctgcgg

SEQ ID NO: 156576 - DNA, 75 bp, synthetic construct
  source 1..75: mol_type = other DNA
tcaaacgtcagcgactgcgtgaaactgaatttaaccgggaaaacgggctggtgttcgattctgacgccgctaacg

SEQ ID NO: 156577 - DNA, 75 bp, synthetic construct
  source 1..75: mol_type = other DNA
gtggtgcagcgacagaatctgactgggtgcgtgccggtgggcgcaatccggatgaggtcaaacgtcgccgcaagg

SEQ ID NO: 156578 - DNA, 75 bp, synthetic construct
  source 1..75: mol_type = other DNA
tcgaggaacgggtcattggtgcgcagggtattcaggttgagccgcaaccgttaaagactgacgggacgctacacg

SEQ ID NO: 156579 - DNA, 75 bp, synthetic construct
  source 1..75: mol_type = other DNA
cgcagaactgaaaactgttgctgctgagaatatgctgcatctcgcgcagcgaaaacgtctccatcagttacgcgg

SEQ ID NO: 156580 - DNA, 75 bp, synthetic construct
  source 1..75: mol_type = other DNA
accgcagccactggggctggacggcaaactgcatgaagaatttgcggcaaagatttccgcgctctggtccgaatg

SEQ ID NO: 156581 - DNA, 75 bp, synthetic construct
  source 1..75: mol_type = other DNA
aaataaaaatcacaaatagactcgtccatgaattttctaataattttttgtttgctaagaagaatgtagacttga

SEQ ID NO: 156582 - DNA, 75 bp, synthetic construct
  source 1..75: mol_type = other DNA
ctctggctgatgttactttgcgttcgtctgtctcttcctttgcaggctatttgctcaccgattttccgcgcctgg

SEQ ID NO: 156583 - DNA, 75 bp, synthetic construct
  source 1..75: mol_type = other DNA
tttgatgctttgatcgtatgttttaatgcgcttttgttattttctggataccgtgtttactcaagggtaaaatca

SEQ ID NO: 156584 - DNA, 75 bp, synthetic construct
  source 1..75: mol_type = other DNA
gcgtgttttcccccggatggaaagcagccagactgcgttcaagggcgttaatcatggcctatgaggcggtgaaac

SEQ ID NO: 156585 - DNA, 75 bp, synthetic construct
  source 1..75: mol_type = other DNA
cgcaacggccagttgcgtgctgtggccgctggtagtcgtctgagtttttccagtgcggcgcgtaactataacggt

SEQ ID NO: 156586 - DNA, 75 bp, synthetic construct
  source 1..75: mol_type = other DNA
gcggctgagcagcaatattttgaggcttcgcttgccagtattcctgaccgtctgcaggatgcaaaagatgaattg

SEQ ID NO: 156587 - DNA, 75 bp, synthetic construct
  source 1..75: mol_type = other DNA
gaaatcatatccactcaacctaacggagaatattactttgaatactacttacctatatacaaagattctgaagtg

SEQ ID NO: 156588 - DNA, 75 bp, synthetic construct
  source 1..75: mol_type = other DNA
agcccggcgtcagcgtaagattctcggtgaggaaaagccgcgtctgaaaacccgcaaagaaattactaaagccct

SEQ ID NO: 156589 - DNA, 75 bp, synthetic construct
  source 1..75: mol_type = other DNA
gcagtggaatctggaactgtcaccgttacccaggcgcgtcagcttggtgcgctcccacctgaagagcagcgtgcc

SEQ ID NO: 156590 - DNA, 75 bp, synthetic construct
  source 1..75: mol_type = other DNA
gaaaaagtagttaataaatgggaaagaatactaccaataaaaaaagtgattctcagtgaaaatgttggcttggga

SEQ ID NO: 156591 - DNA, 75 bp, synthetic construct
  source 1..75: mol_type = other DNA
aaatcatgtccaactgggagcagtactacgacacgcagaacaagacccgcacggtgctggaagagatcctgaaac

SEQ ID NO: 156592 - DNA, 75 bp, synthetic construct
  source 1..75: mol_type = other DNA
tatggcgtacttggggtgctgctggcctgatggtcaagcaggacatcaatcttaaacacggcgttctgtacgctc

SEQ ID NO: 156593 - DNA, 75 bp, synthetic construct
  source 1..75: mol_type = other DNA
aacgcaccagagctgaatgctgtaaacgctgtcgatgatatccgtcgcctctacaaagcctacgatcagaccgtt

SEQ ID NO: 156594 - DNA, 75 bp, synthetic construct
  source 1..75: mol_type = other DNA
ggaaggcaaagacaagctgattgcagagcttagaaaacaatgcgctgaatgggagcgaaaagcattaaacaactt

SEQ ID NO: 156595 - DNA, 75 bp, synthetic construct
  source 1..75: mol_type = other DNA
ttcgcgtgaattcattctgcaacattgattccgccgtattgttaccggaagtatgggtaggtcgctcgtgccgtc

SEQ ID NO: 156596 - DNA, 75 bp, synthetic construct
  source 1..75: mol_type = other DNA
catccacacgagagttgttcgccatgcgaaggggggggagcaacttcaaaacactgttagtgctacctacaatta

SEQ ID NO: 156597 - DNA, 75 bp, synthetic construct
  source 1..75: mol_type = other DNA
acagcaactctcaggtaggtaatgcttcagccgttttcaaaaacaatggggatgccgatgcaatggtatttactc

SEQ ID NO: 156598 - DNA, 75 bp, synthetic construct
  source 1..75: mol_type = other DNA
gtgaaaaggcagagaaagcaacgtggggtgactgggactcatataaaccacaccgtggcgcacgtggttatgaag

SEQ ID NO: 156599 - DNA, 75 bp, synthetic construct
  source 1..75: mol_type = other DNA
atgctgcgccgtatggggcttgagcgattcatccgcacgaaagaggaagtgaacaaggaagcggtcctggcggag

SEQ ID NO: 156600 - DNA, 75 bp, synthetic construct
  source 1..75: mol_type = other DNA
cagcgttttcagagaatattttggtataacacctcatcagatgatgattaatcagtccggatttattgagagcag

SEQ ID NO: 156601 - DNA, 75 bp, synthetic construct
  source 1..75: mol_type = other DNA
aatcagaaaggaaaagccgctgaaggtcgccgcatcctgccaccactggctgctgtgccggtgattaaggcgagc

SEQ ID NO: 156602 - DNA, 75 bp, synthetic construct
  source 1..75: mol_type = other DNA
ctatcagtcgctataacagcctgttgcgtaacccacagcgccagttaaccgttggcgaacttaccgcccagcgta

SEQ ID NO: 156603 - DNA, 75 bp, synthetic construct
  source 1..75: mol_type = other DNA
gtactataaccggaaccggtactatgacccgctacaggggaggtatattacacaagaccccattgggctggcggg

SEQ ID NO: 156604 - DNA, 75 bp, synthetic construct
  source 1..75: mol_type = other DNA
agaagttaagaaagatggagaaaaccctgatgtctgcataaacttcagaagaataattaatgaaaaaataaaatc

SEQ ID NO: 156605 - DNA, 75 bp, synthetic construct
  source 1..75: mol_type = other DNA
tgtcaatattagaaattacggcaatcatcagtttggattgctcagaaataacagcactgttaatattatcatgaa

SEQ ID NO: 156606 - DNA, 75 bp, synthetic construct
  source 1..75: mol_type = other DNA
cttatttgtgtggtgaatgtgttgttaacgattataacgcttaggtatctatttgccatgggcattaatgaaatg

SEQ ID NO: 156607 - DNA, 75 bp, synthetic construct
  source 1..75: mol_type = other DNA
gcccggaaggtgacctcccggatacggtgaaggatgaccacaaagaagcgctgcggcaactcagggagttacgtg

SEQ ID NO: 156608 - DNA, 75 bp, synthetic construct
  source 1..75: mol_type = other DNA
ttcgactgccgtccacaacggcacggatgtggatagcggcctggatcgatgagcaggcggtctggcatcagccgt

SEQ ID NO: 156609 - DNA, 75 bp, synthetic construct
  source 1..75: mol_type = other DNA
aatcgcttcccggacatacactaccgccgcggctggaatgtcaacgtatcccgggtgatggataacgccacccat

SEQ ID NO: 156610 - DNA, 75 bp, synthetic construct
  source 1..75: mol_type = other DNA
gtgggacggcagggctacttttcatggtgaggttgtcagacctgcctgtactctggcgatggaagacgcctggca

SEQ ID NO: 156611 - DNA, 75 bp, synthetic construct
  source 1..75: mol_type = other DNA
aggttttatttcatggaggtgcatggcctttagaaaaatcaggtgaaatgatggagtcattcttgacagatcgtg

SEQ ID NO: 156612 - DNA, 75 bp, synthetic construct
  source 1..75: mol_type = other DNA
tcaatgaccaaatcactacgcatcagcttctaacagaaggcaatgttatcggatctacatcacgtgcattaattc

SEQ ID NO: 156613 - DNA, 75 bp, synthetic construct
  source 1..75: mol_type = other DNA
tgttggagctcgataagcaggattatatttttttaagcatttatatagcaaggcttcgaccaaaaactgataaac

SEQ ID NO: 156614 - DNA, 75 bp, synthetic construct
  source 1..75: mol_type = other DNA
tccgctattagataagaatcttcatggggcggatatctctttgacagagctaagccagatattaacaggcaataa

SEQ ID NO: 156615 - DNA, 75 bp, synthetic construct
  source 1..75: mol_type = other DNA
atctaaaaaaaatatggagtaaccttacagatgatgaaatcaagatatttaaaataatcagcaaaaagatgttat

SEQ ID NO: 156616 - DNA, 75 bp, synthetic construct
  source 1..75: mol_type = other DNA
gaacaaatatcaccagagtttgtgactctctggaaaaatttggttttattaggcgtatggaaagtaaggaagatc

SEQ ID NO: 156617 - DNA, 75 bp, synthetic construct
  source 1..75: mol_type = other DNA
tgagcaggttgcacaggctgtcagccagatggatcaggtgactcagcagaacgcctcgctggtagaagaagcggc

SEQ ID NO: 156618 - DNA, 75 bp, synthetic construct
  source 1..75: mol_type = other DNA
cacaccatgcaggagatcgccaccagctcgcaaaaaattggcgacattatcagcgttatcgacggaattgctttc

SEQ ID NO: 156619 - DNA, 75 bp, synthetic construct
  source 1..75: mol_type = other DNA
tgctttccagaccaatattctggccctgaatgcggcagtggaagcggctcgcgccggagagcaggggcgtggttt

SEQ ID NO: 156620 - DNA, 75 bp, synthetic construct
  source 1..75: mol_type = other DNA
attcaggttaatttaatctcaaggatagcctatggtacaacagaatggaatttttatgataatgaagacttagaa

SEQ ID NO: 156621 - DNA, 75 bp, synthetic construct
  source 1..75: mol_type = other DNA
gttttgtggagtcctggctattttgccagtagctgcggaggtgcgccaatatccgtcatccgccaatacattgaa

SEQ ID NO: 156622 - DNA, 75 bp, synthetic construct
  source 1..75: mol_type = other DNA
ggcaacaatgtcagctgttagtttttccatcgctttctttactggggtgtgattattcgcgacgtgcccttcctg

SEQ ID NO: 156623 - DNA, 75 bp, synthetic construct
  source 1..75: mol_type = other DNA
cttggggtacacaatgaaactcttaaaaatagattgtatcttttaaagcgagataatcgaattatccttgatgga

SEQ ID NO: 156624 - DNA, 75 bp, synthetic construct
  source 1..75: mol_type = other DNA
taacgtttggttatgaagtcaatgatatccatggtcataatattggcgttgtcggccagggaagtcagttattta

SEQ ID NO: 156625 - DNA, 75 bp, synthetic construct
  source 1..75: mol_type = other DNA
ttggagtcattaccggggtttgcctcaaataatacgggattatcaggaacagtagggagtcgggatcagttcaat

SEQ ID NO: 156626 - DNA, 75 bp, synthetic construct
  source 1..75: mol_type = other DNA
tttcagagttggtgacccctgagctttttgccgaatatataggcaaaacgcctgctgcaattcgcaaaatggcca

SEQ ID NO: 156627 - DNA, 75 bp, synthetic construct
  source 1..75: mol_type = other DNA
tgaaaatattcgaacacaggataatcgaataacgtcagaccctatgttttgtgtgtatcaaaagcgcgaaatcgt

SEQ ID NO: 156628 - DNA, 75 bp, synthetic construct
  source 1..75: mol_type = other DNA
tttgcggctgggaatcccgccgatggttgggatggccgattggcctttttcgccagcgttaccccggcgtagaat

SEQ ID NO: 156629 - DNA, 75 bp, synthetic construct
  source 1..75: mol_type = other DNA
gataaaataaaaaaatatttattagaaggtttcaagttaaataatataatacatagtgacagcaatgcagttaca

SEQ ID NO: 156630 - DNA, 75 bp, synthetic construct
  source 1..75: mol_type = other DNA
tgatacatgtaaacttagtgtatatgataataattgtatttctacaatatatataaggcctacatctgttgaaaa

SEQ ID NO: 156631 - DNA, 75 bp, synthetic construct
  source 1..75: mol_type = other DNA
taactaacaatatcataaaagatataaaatcgagcttaccatcaatatatagcatgtccgacttatctggaattg

SEQ ID NO: 156632 - DNA, 75 bp, synthetic construct
  source 1..75: mol_type = other DNA
atatgtttggttctgtaaaggaacaagtctgctccgacctgtcatcatttaccaatattgtgacaggttttgcca

SEQ ID NO: 156633 - DNA, 75 bp, synthetic construct
  source 1..75: mol_type = other DNA
gttaagtctaattgatacaataacattaatctcagaagaccagggacttaaacagagaataatagatatagagaa

SEQ ID NO: 156634 - DNA, 75 bp, synthetic construct
  source 1..75: mol_type = other DNA
agcagcatgatgaatataaaaaatctatgttttctgttttggctagcgatcctgatgctaagttggtgatatgga

SEQ ID NO: 156635 - DNA, 75 bp, synthetic construct
  source 1..75: mol_type = other DNA
attgagcgtatgggtaactccgtcgaagagaagcgcgtcaagatcaagcacaagctgaactacgtcacccccacc

SEQ ID NO: 156636 - DNA, 75 bp, synthetic construct
  source 1..75: mol_type = other DNA
gaagaggtaacaaagtgggccagtgcagaattagttccagattctgttcttatcgcatcaaaaattattgatgat

SEQ ID NO: 156637 - DNA, 75 bp, synthetic construct
  source 1..75: mol_type = other DNA
gatctaagtaaatataagtgttattcttcaatagctatgaaagatctgctttatactcaacataattcatcaatt

SEQ ID NO: 156638 - DNA, 75 bp, synthetic construct
  source 1..75: mol_type = other DNA
actcttcggggattgttggcggcaatatgacccgctcttcgccatcagcctcggcggtcaaacgcctgatgaact

SEQ ID NO: 156639 - DNA, 75 bp, synthetic construct
  source 1..75: mol_type = other DNA
gcgttaacattaacgactacaaccctcacgactggatcgcctcatttaaacaagccttcggcgaagggcaaacgg

SEQ ID NO: 156640 - DNA, 75 bp, synthetic construct
  source 1..75: mol_type = other DNA
cgccatctaccagaaccagacggtgccgcaaatcgtcgaaaaaatcctgcgcgagcgacatcatatgcgcggtca

SEQ ID NO: 156641 - DNA, 75 bp, synthetic construct
  source 1..75: mol_type = other DNA
acaggaatccgggcagccgctaacgttaagcggcaccagcaatttaccggacggtggcacggttagcgtgacgct

SEQ ID NO: 156642 - DNA, 75 bp, synthetic construct
  source 1..75: mol_type = other DNA
tattcagattaaagacagtaacggcaatactattgccagtactcaggtagacaacaacggtcactggagtgtctc

SEQ ID NO: 156643 - DNA, 75 bp, synthetic construct
  source 1..75: mol_type = other DNA
ttctgctggcggtaaacagttaatgacatgtcttgcctttcgtaaatttgcggcttggctttcaagcattcaacc

SEQ ID NO: 156644 - DNA, 75 bp, synthetic construct
  source 1..75: mol_type = other DNA
attaatcggttgaatattgcaaccttcaaccattatcttccggggagagtcggtcttttagtcacaatacagact

SEQ ID NO: 156645 - DNA, 75 bp, synthetic construct
  source 1..75: mol_type = other DNA
actgccagcgcctacaggtatgcgcatgggtggcaaggcatcatcctcaaacgcggagcggcccagagagttcct

SEQ ID NO: 156646 - DNA, 75 bp, synthetic construct
  source 1..75: mol_type = other DNA
cgtggcgatatcggtaactatctgggcctgacggtagaaaccatcagccgtctgctgggtcgcttccagaaaagc

SEQ ID NO: 156647 - DNA, 75 bp, synthetic construct
  source 1..75: mol_type = other DNA
atccgcgacggcgtccgcggcaaagataaactggatgtgcccattaagttcatctggaacttcaaggacttgaag

SEQ ID NO: 156648 - DNA, 75 bp, synthetic construct
  source 1..75: mol_type = other DNA
cgcatgaaattctgcaggacgaatcgaaatgcgaaatgattgtggtcatcgaaaactttatgacctcatcggcaa

SEQ ID NO: 156649 - DNA, 75 bp, synthetic construct
  source 1..75: mol_type = other DNA
acgcctgccggtgctggataatccggtcaaaacgtcaatctcctgcttcagctggacagatgctatcgatcatgg

SEQ ID NO: 156650 - DNA, 75 bp, synthetic construct
  source 1..75: mol_type = other DNA
ctccacagccagcctttatgcaactggtgcgtcaggagctgcaggcgaaattaggcgataaggtaaaagatctct

SEQ ID NO: 156651 - DNA, 75 bp, synthetic construct
  source 1..75: mol_type = other DNA
gcggtgctggcaaacctgaccgcaggtcgcacggtgcagggtgcgagtacgctgacgcaacagctggtgaaaaac

SEQ ID NO: 156652 - DNA, 75 bp, synthetic construct
  source 1..75: mol_type = other DNA
tagccgtattgatggcaaggtctggcaactgcctgcggcagtttatggccgaatggtcaatcttgagccagatat

SEQ ID NO: 156653 - DNA, 75 bp, synthetic construct
  source 1..75: mol_type = other DNA
cgcgagaaatcgaacgccaaaatgattgttatcgatccgcgatataccgatacggctgctggtcgtgaagatgaa

SEQ ID NO: 156654 - DNA, 75 bp, synthetic construct
  source 1..75: mol_type = other DNA
ttatcgatccgcgatataccgatacggctgccggtcgtgaagatgaatggcttcctattcgcccgggcaccgatg

SEQ ID NO: 156655 - DNA, 75 bp, synthetic construct
  source 1..75: mol_type = other DNA
gccagtttatgcctcaacctttgaaggctgggactcccctgaacgtagaaccttcccactgcaactgtttggttt

SEQ ID NO: 156656 - DNA, 75 bp, synthetic construct
  source 1..75: mol_type = other DNA
ccattacaaatcccgtactcactcgacctacggcaatattgatctcctgaaggctgcctgccgtcaggaggtgtg

SEQ ID NO: 156657 - DNA, 75 bp, synthetic construct
  source 1..75: mol_type = other DNA
gtggaaactgacaataccggcagcgatgagtacggcaaccatcaggtacgcgcctgtttgcgcggtcgctccatc

SEQ ID NO: 156658 - DNA, 75 bp, synthetic construct
  source 1..75: mol_type = other DNA
cctttccactgcaactgtttggtttccattacaaatcccgtactcactcgacctacggcaatattgatctcctga

SEQ ID NO: 156659 - DNA, 75 bp, synthetic construct
  source 1..75: mol_type = other DNA
aaactatgcgctgctgagtcgcccttcagttcaggaatctctgatcggcttattactcaaagcccgtcttatcaa

SEQ ID NO: 156660 - DNA, 75 bp, synthetic construct
  source 1..75: mol_type = other DNA
agcaaatgggtatcaaccgttggcaaaaaaaacacctgacatcaataccgcgcttactctcttttattgatgaat

SEQ ID NO: 156661 - DNA, 75 bp, synthetic construct
  source 1..75: mol_type = other DNA
ttataccgtaaagttcagtcatccggcataagggatgtcagtaaggaaatccgggagattgacgatttactggat

SEQ ID NO: 156662 - DNA, 75 bp, synthetic construct
  source 1..75: mol_type = other DNA
cgtcaaaatgatataggaaaaaaatcaccacttcacaaactttctttcacggtaaattactctgatgaggatgag

SEQ ID NO: 156663 - DNA, 75 bp, synthetic construct
  source 1..75: mol_type = other DNA
ttttttcttttttgcgcgttataataagaatgctaatatcgaatcagcttaccttgtccacattaatagtgatat

SEQ ID NO: 156664 - DNA, 75 bp, synthetic construct
  source 1..75: mol_type = other DNA
tcagcgactgcaagcgcggtgacctggcaggccatcagcgactatggcggtgtcagccagaccgaaagccgtaag

SEQ ID NO: 156665 - DNA, 75 bp, synthetic construct
  source 1..75: mol_type = other DNA
tcagggaaaagaaaaaactccgtttgcatgtaactagcgcttatccatttctgaaaaacagaaaggtaaatcagt

SEQ ID NO: 156666 - DNA, 75 bp, synthetic construct
  source 1..75: mol_type = other DNA
atgaaacaggaagtggagaagtggcgaccttttaaacatccggatggcgacgttcgtgatttatcgtttcttgat

SEQ ID NO: 156667 - DNA, 75 bp, synthetic construct
  source 1..75: mol_type = other DNA
atgcttttattcgtcgcgtctggctcagattgcggtttatccccgctggcgcggggaactcagccattgtttaaa

SEQ ID NO: 156668 - DNA, 75 bp, synthetic construct
  source 1..75: mol_type = other DNA
acagtctttcgcataatgaaatcattgaacgtgctgaaaatggagacagcgaagcccaatatattcttggtattt

SEQ ID NO: 156669 - DNA, 75 bp, synthetic construct
  source 1..75: mol_type = other DNA
cgcagggtcaggtgcgcgaaatggctccggcgatggcaatactggatggcgcacagtcacagatgaagtcgctgt

SEQ ID NO: 156670 - DNA, 75 bp, synthetic construct
  source 1..75: mol_type = other DNA
cgaaggggtggaccaggactataagcaagcgatgtactggtatctgaaggctgccgctcaggggagcgtcggcgc

SEQ ID NO: 156671 - DNA, 75 bp, synthetic construct
  source 1..75: mol_type = other DNA
tgctgagcttcaccgactgttccagctaccagacccgttatgaccatgaccgcttcgggcagatgacggcggtgc

SEQ ID NO: 156672 - DNA, 75 bp, synthetic construct
  source 1..75: mol_type = other DNA
gatatttgtatttatgctacagcatgcggacatgcaggaattggtggtgggataaatgcggctatgacatattct

SEQ ID NO: 156673 - DNA, 75 bp, synthetic construct
  source 1..75: mol_type = other DNA
gaaaccgcctgccggacccggagctgcacccggacagcacgctcacggcgtggccggataaccgcatcaccaaag

SEQ ID NO: 156674 - DNA, 75 bp, synthetic construct
  source 1..75: mol_type = other DNA
atctacggtcttggcggtctgggtaacctcgccctgcaatacgcaaagaatgtctttaacgccaaagtgatcgcc

SEQ ID NO: 156675 - DNA, 75 bp, synthetic construct
  source 1..75: mol_type = other DNA
agactatcacttatttaagtgatactggttgtctggagattcagggggccagtctagctcataagacgccccagc

SEQ ID NO: 156676 - DNA, 75 bp, synthetic construct
  source 1..75: mol_type = other DNA
catcttgggcacgaagctcgcgaagccgtcatagaaaacctcatggtcataccgatcatgggaaaactaatggac

SEQ ID NO: 156677 - DNA, 75 bp, synthetic construct
  source 1..75: mol_type = other DNA
gtaccgggagattctccgccgtgaaaaaacctgtgatctgcctgttcctgctgatgtcgctggtgggctgctcga

SEQ ID NO: 156678 - DNA, 75 bp, synthetic construct
  source 1..75: mol_type = other DNA
attcacttcaagagccttactgacagcatcgacacttccagcccaatggggcgttttatatttcacatcatgtca

SEQ ID NO: 156679 - DNA, 75 bp, synthetic construct
  source 1..75: mol_type = other DNA
gaagataaattgagagatttaggtaatgtaggatataacgaaagccgctatgcattcaatttcaaagttgataat

SEQ ID NO: 156680 - DNA, 75 bp, synthetic construct
  source 1..75: mol_type = other DNA
gatgcggaagtgttagcacgcatccttgatatcatcagcgatatgccgacatatggctatcgtcgtgtctgggcc

SEQ ID NO: 156681 - DNA, 75 bp, synthetic construct
  source 1..75: mol_type = other DNA
gccttctactgaagcaatggataaaaaagcgttcgacaaagcgatgaatgacgaagcagatcgcatcattaatat

SEQ ID NO: 156682 - DNA, 75 bp, synthetic construct
  source 1..75: mol_type = other DNA
acctggttagcgcgacgtctggcgtactgcttgatgggagaaaaagcacctgagcgtattagcgcggtgcaattt

SEQ ID NO: 156683 - DNA, 75 bp, synthetic construct
  source 1..75: mol_type = other DNA
cagtcaattacgtatgacctgtacgggaaaggacatgcagttggtaggctgtccgaggtgctgaagacagcttta

SEQ ID NO: 156684 - DNA, 75 bp, synthetic construct
  source 1..75: mol_type = other DNA
aaggcgaacgcgtggcgctgattgccgaaacgagtagcgggtttgtagaggcttttttgcctgtcagtatgctgg

SEQ ID NO: 156685 - DNA, 75 bp, synthetic construct
  source 1..75: mol_type = other DNA
cagctaaggcattcctactggacaatccagaagtcacactacaggagcttacagcgcacatacggtccatggctg

SEQ ID NO: 156686 - DNA, 75 bp, synthetic construct
  source 1..75: mol_type = other DNA
gtcccgctctgagtggctggctgtcagggacgctatgctggcttctgaggtgagaccgtcgacgattaacaagct

SEQ ID NO: 156687 - DNA, 75 bp, synthetic construct
  source 1..75: mol_type = other DNA
gcctgaagtctcactacaggagcttacagagcacctccggtctatggctgagcagttcctgacagacgctagtga

SEQ ID NO: 156688 - DNA, 75 bp, synthetic construct
  source 1..75: mol_type = other DNA
aagctgattgatgataataaccatactgattactcaactataggcgactctacgtcaattctgaagaatgagcag

SEQ ID NO: 156689 - DNA, 75 bp, synthetic construct
  source 1..75: mol_type = other DNA
aaacttcttctggtttacttctcccggcgacgccggagagttgtgattttctgcatcaaattaaaataggcgagt

SEQ ID NO: 156690 - DNA, 75 bp, synthetic construct
  source 1..75: mol_type = other DNA
cacgcagaacccgggatgcggcattgctaaagtcgtttgaggcttttcgcgagtgggtaaccattcaggctggat

SEQ ID NO: 156691 - DNA, 75 bp, synthetic construct
  source 1..75: mol_type = other DNA
ctataagcaaagaagaagcactctcattagtcaagcaagccgaatctaacctgttgaaagcagaggaaaggttag

SEQ ID NO: 156692 - DNA, 75 bp, synthetic construct
  source 1..75: mol_type = other DNA
tggaaaaaagcgtctccacgcgggactacaactaccgtgaagccacggcggaaatgaccacaggtcagcatgacg

SEQ ID NO: 156693 - DNA, 75 bp, synthetic construct
  source 1..75: mol_type = other DNA
tgggtgatcatcgagtctggccactacgacgccatacagcttcccgacggcacccttcgcaaacacccccgcagc

SEQ ID NO: 156694 - DNA, 75 bp, synthetic construct
  source 1..75: mol_type = other DNA
ggtacgcaacccggcctttcaccgtcgtttcttcgcgttactcaatctcggtttcgaatactgggaacccaccgg

SEQ ID NO: 156695 - DNA, 75 bp, synthetic construct
  source 1..75: mol_type = other DNA
ctgaacgtatcttcatatgtggagagacactcaaatgtgaagatcccagcatatacattagacaaaaatatggcc

SEQ ID NO: 156696 - DNA, 75 bp, synthetic construct
  source 1..75: mol_type = other DNA
gtattcgagagaaatatattgaaaaaatcttgaaccagaatacccgagtcggtttcgtccattcccaaggatgtc

SEQ ID NO: 156697 - DNA, 75 bp, synthetic construct
  source 1..75: mol_type = other DNA
gccagaagtcagagaaagtttgtcgttgcaagatttaagccgggcgcaacggatggcgaggattctgaaaaaacg

SEQ ID NO: 156698 - DNA, 75 bp, synthetic construct
  source 1..75: mol_type = other DNA
gttacttagcctctgctatatttagtccagtgtacgatcacaaaggcatacaaggaaacataaacaaccttagtg

SEQ ID NO: 156699 - DNA, 75 bp, synthetic construct
  source 1..75: mol_type = other DNA
ggagatgtcgacgcgcagagcaatattatcagcctcgctttgataccaaacctgatgttcaggaagcgattaaat

SEQ ID NO: 156700 - DNA, 75 bp, synthetic construct
  source 1..75: mol_type = other DNA
gaaattataccaggcgagttttctatttctggatatgatatgaataaagcggaaggttttagagtgaggatggat

SEQ ID NO: 156701 - DNA, 75 bp, synthetic construct
  source 1..75: mol_type = other DNA
gctgtactacaaccggaaccggtactacgatccgttgcaggggcggtatatcactcaggacccgatagggctgga

SEQ ID NO: 156702 - DNA, 75 bp, synthetic construct
  source 1..75: mol_type = other DNA
tggtctgtatcgacatcaatgaagatggggacgggaagtctgtgaagaacaaacattcagtccgacttgtgccgt

SEQ ID NO: 156703 - DNA, 75 bp, synthetic construct
  source 1..75: mol_type = other DNA
acgcgcgagatgataaccggtctttaccgtccggtctgggcagacgtttcgctaggaaacggtgaggaaattcag

SEQ ID NO: 156704 - DNA, 75 bp, synthetic construct
  source 1..75: mol_type = other DNA
gagttttttaccattaggggtatgttataaaatactttcaaattctttttctgtacaggctgaagagtgtttttt

SEQ ID NO: 156705 - DNA, 75 bp, synthetic construct
  source 1..75: mol_type = other DNA
tagggaaccaataacagaagcaatgattataggaaaaaatgagtgttattttgaccagggcagagggaatttcat

SEQ ID NO: 156706 - DNA, 75 bp, synthetic construct
  source 1..75: mol_type = other DNA
cttaatcgttgaaaaagatgggattaccgtccttgccgctatcgaaaagggaggattactggaggttaaagaggg

SEQ ID NO: 156707 - DNA, 75 bp, synthetic construct
  source 1..75: mol_type = other DNA
atggatgtcatgagaagtgttctgggaatggtggtattgctgacgattgcgtttttgctgtcagtaaacaagaag

SEQ ID NO: 156708 - DNA, 75 bp, synthetic construct
  source 1..75: mol_type = other DNA
cagtaaaacgaatcttcccggcgatgattagcggacaggagcgtcttgcctgtatggatgatgccgccaggctgc

SEQ ID NO: 156709 - DNA, 75 bp, synthetic construct
  source 1..75: mol_type = other DNA
caggattttacgagagtcgggggtatgggcagtacagggagagtacaggccaatccgctttgaacaatgcgaaca

SEQ ID NO: 156710 - DNA, 75 bp, synthetic construct
  source 1..75: mol_type = other DNA
gcttttgcttttttatcccttctttttttggcagtaataataaaatatgatgtttccttgccgacaaaaaagtga

SEQ ID NO: 156711 - DNA, 75 bp, synthetic construct
  source 1..75: mol_type = other DNA
caataatggtgtgctacaggtttatggcgcagcgaatgatcccacgattaaaggcgggcgcttaatcgttgaaaa

SEQ ID NO: 156712 - DNA, 75 bp, synthetic construct
  source 1..75: mol_type = other DNA
agttttttatccgccaccagaaaaaacttgagcgtctaacttcgattgccataaccctgccgggaattattgata

SEQ ID NO: 156713 - DNA, 75 bp, synthetic construct
  source 1..75: mol_type = other DNA
gtcacaacgaaaagggagagctgcatgactatcaaatcaaatacgccatcacacgactgaaccgccccggaaatc

SEQ ID NO: 156714 - DNA, 75 bp, synthetic construct
  source 1..75: mol_type = other DNA
atgactcctggcgagagtatgaatggtcacaacgaaaagggagagctgcatgactatcaaatcaaatacgccatc

SEQ ID NO: 156715 - DNA, 75 bp, synthetic construct
  source 1..75: mol_type = other DNA
cctggcagaagagcgaaaggtgaagaaggattgttcgacctgctgcgcgaactggggccaatgaccgttgaagac

SEQ ID NO: 156716 - DNA, 75 bp, synthetic construct
  source 1..75: mol_type = other DNA
tcaatgcaaaacttatccgcattacttaaaagtaagatggaatcgacaatttcgtcttgtaacggggaatcatct

SEQ ID NO: 156717 - DNA, 75 bp, synthetic construct
  source 1..75: mol_type = other DNA
acctggtacgggtgggacggtgacaggctgaccactgtacagacccaacagacaagaatccagacggtataccag

SEQ ID NO: 156718 - DNA, 75 bp, synthetic construct
  source 1..75: mol_type = other DNA
gtttatctcttcagccctgacggctacgcgcgagaaatcggcggggaaacagtgctgacaacacaccgctacaat

SEQ ID NO: 156719 - DNA, 75 bp, synthetic construct
  source 1..75: mol_type = other DNA
attgaaaaacgtgctgttatgctaccgcaagaaattattgatttacgggatcagaaatttaaagtcaaaggagag

SEQ ID NO: 156720 - DNA, 75 bp, synthetic construct
  source 1..75: mol_type = other DNA
aaaaatatctgcttgccggacttgcggggactctgcttccgttcctgattgcactcatcctgacaatcgttatgt

SEQ ID NO: 156721 - DNA, 75 bp, synthetic construct
  source 1..75: mol_type = other DNA
ccagaaagcgttcaaaaatgagctgcagcggcgcggtattcacaaacctatagtctcactagtgacgcaaaccct

SEQ ID NO: 156722 - DNA, 75 bp, synthetic construct
  source 1..75: mol_type = other DNA
aagggaggaagcatggaaagctgcacaacccgcttttgataaagatgattttgatgatgagaaggaatatttttc

SEQ ID NO: 156723 - DNA, 75 bp, synthetic construct
  source 1..75: mol_type = other DNA
tcagaaatttaaagtcaaaggaaagaaaacaagtttttctttaccacaaatcgtaatgagtgagttttgtcgccc

SEQ ID NO: 156724 - DNA, 75 bp, synthetic construct
  source 1..75: mol_type = other DNA
cctcgagacgctggttctgcacagggacaataataacctgattcttgacggggatttaaaaccacacaaccttct

SEQ ID NO: 156725 - DNA, 75 bp, synthetic construct
  source 1..75: mol_type = other DNA
cttgatgctgcaaagaacatactcaaattgtcatccgataataaaactaccgttatattcacccataatcattgc

SEQ ID NO: 156726 - DNA, 75 bp, synthetic construct
  source 1..75: mol_type = other DNA
ggaagtccgggaaagaccggtgccaggcgataatgaagcattaattaaaattaaaactgtcgggatttgcggtac

SEQ ID NO: 156727 - DNA, 75 bp, synthetic construct
  source 1..75: mol_type = other DNA
caaaattattgaaggcgcggacgaccatacgatcatgggtatcccacaggcacgggatatggatcgggtcacctg

SEQ ID NO: 156728 - DNA, 75 bp, synthetic construct
  source 1..75: mol_type = other DNA
cttgggtatacgcaaaaagatattgatagaattaatgattatactaaagcgcacgatggaagaattatctatgtc

SEQ ID NO: 156729 - DNA, 75 bp, synthetic construct
  source 1..75: mol_type = other DNA
cgcttagctccaccaaatttcaaaccctcgctgcaaagcgggggttttttgtctctgccttttgccgcttttgta

SEQ ID NO: 156730 - DNA, 75 bp, synthetic construct
  source 1..75: mol_type = other DNA
actgggaagacgtgaaaacagaattacttaaggacgaagcaaccgctaatgttcttgatgttgttgtacaacgca

SEQ ID NO: 156731 - DNA, 75 bp, synthetic construct
  source 1..75: mol_type = other DNA
ataccagagtataaggagctgcgagcggatataagcacgttaaaagaatggcgtgatcagatcaaaacaaggcgc

SEQ ID NO: 156732 - DNA, 75 bp, synthetic construct
  source 1..75: mol_type = other DNA
agcagcgtctgaacaatcttgaggctttcgtgcaatcacgtcttgagagcgatgctgccacagctgagtgtctgt

SEQ ID NO: 156733 - DNA, 75 bp, synthetic construct
  source 1..75: mol_type = other DNA
atattttcacaagtaggtttacttcatgaactatgcgataagcttaaaactcgtataaaaacagcccaacaaacc

SEQ ID NO: 156734 - DNA, 75 bp, synthetic construct
  source 1..75: mol_type = other DNA
gtgaaacttcctgacttctgtactctcgccgatcccaacgccgcatatgatgtacaattcgtatatcaggatagt

SEQ ID NO: 156735 - DNA, 75 bp, synthetic construct
  source 1..75: mol_type = other DNA
tttgaaagcactggatgttatatatcgatgttatttggaaaataaaaaagatgtatttgctattaaaggtgaaaa

SEQ ID NO: 156736 - DNA, 75 bp, synthetic construct
  source 1..75: mol_type = other DNA
gctgtcacgaggcgtctgccaaaaggtgttgaaccggtacgtttgtacgaatcgtatctgaccaatttcagcttt

SEQ ID NO: 156737 - DNA, 75 bp, synthetic construct
  source 1..75: mol_type = other DNA
cctgacttacgaagctgaaaaatcggttagccataaccttgcctatgcgcgcattgcgccgttactgtggttacg

SEQ ID NO: 156738 - DNA, 75 bp, synthetic construct
  source 1..75: mol_type = other DNA
attgagcatcacattatacgcattgactgccgttcgctgggatcaggggatatggctggtaccgctatggatccg

SEQ ID NO: 156739 - DNA, 75 bp, synthetic construct
  source 1..75: mol_type = other DNA
gatgggctgtggctgatacttatggcctgctgtcggcagtggatcaggctacaccttttattgaagccattagcc

SEQ ID NO: 156740 - DNA, 75 bp, synthetic construct
  source 1..75: mol_type = other DNA
gccttaacaagcaggatggtggttatcgtcagtgcatctctgtcactaataacgaagtctctgccgacgaacaga

SEQ ID NO: 156741 - DNA, 75 bp, synthetic construct
  source 1..75: mol_type = other DNA
cgaggaaaacgccgaatttttcaccttgacctacgaagcagagaaatcggttagccacaacttggcttttagtca

SEQ ID NO: 156742 - DNA, 75 bp, synthetic construct
  source 1..75: mol_type = other DNA
gtgacatggcagcttacaggcggtgatacccttcaggccagtaatcccacgccttattttattaccttcagtact

SEQ ID NO: 156743 - DNA, 75 bp, synthetic construct
  source 1..75: mol_type = other DNA
gccatcgcgcgctggcgataaccggtgctattgctatttccagtagttgtgcattggaaggcaccgtcacccgac

SEQ ID NO: 156744 - DNA, 75 bp, synthetic construct
  source 1..75: mol_type = other DNA
ttcatactgaaaaccatcaaaacctccatcgatattgtggtgttcttcaaacacacacatatgacggagatctac

SEQ ID NO: 156745 - DNA, 75 bp, synthetic construct
  source 1..75: mol_type = other DNA
cgcgctggtttcctctcctcgggcagagaaggccaggctctattccgctattgaacagcgcctggagcaatcgtt

SEQ ID NO: 156746 - DNA, 75 bp, synthetic construct
  source 1..75: mol_type = other DNA
ggctgacgccttcgcgctgctcagttgtccaaccccgaaaacgggaaaaagcaagttttccccgcttccggcgtt

SEQ ID NO: 156747 - DNA, 75 bp, synthetic construct
  source 1..75: mol_type = other DNA
atggattcagaaaccgttcacgaagcagtaaggtctggtgctggcagcgtgccggaggccgggccgttattctgg

SEQ ID NO: 156748 - DNA, 75 bp, synthetic construct
  source 1..75: mol_type = other DNA
acgaaaaactccgcagggagcttgatgatttacgtgctgctggtgaatcagatttacagccaggcacaacagagt

SEQ ID NO: 156749 - DNA, 75 bp, synthetic construct
  source 1..75: mol_type = other DNA
atgacggcaccggtaacgccagttcccaccatccttaccattggtgcgcataatgtatattatgttaaattacct

SEQ ID NO: 156750 - DNA, 75 bp, synthetic construct
  source 1..75: mol_type = other DNA
tcgggactacaactaccgcaccgccacagcagagatgatgacagagcagcatgacgccaccgggggcgataacac

SEQ ID NO: 156751 - DNA, 75 bp, synthetic construct
  source 1..75: mol_type = other DNA
gaccgtgggcgtggcgtaccagacgacggtaggtggcattatgaacacttcggtggctctgatgcagtcctcgca

SEQ ID NO: 156752 - DNA, 75 bp, synthetic construct
  source 1..75: mol_type = other DNA
acgaacgctaccgtctcaccaaagcacaggcggacgggcaggaactgaagaacgccagagagacaggggaagtta

SEQ ID NO: 156753 - DNA, 75 bp, synthetic construct
  source 1..75: mol_type = other DNA
aacgccagggagacaggagaggttatagataccggcttttgtatgtatgcactgtctaaactggcgcaacagatt

SEQ ID NO: 156754 - DNA, 75 bp, synthetic construct
  source 1..75: mol_type = other DNA
cagtcaaaaagctgcaaaaaccagtgaaaccaatgcaaagacaagcgagactgcagcggcgaactcggcgcaagc

SEQ ID NO: 156755 - DNA, 75 bp, synthetic construct
  source 1..75: mol_type = other DNA
agcgaaacgaatgctaaagccagtgaaactgcagcaaaaaacagccaggttgcagcagcccaaagcgagagcgcg

SEQ ID NO: 156756 - DNA, 75 bp, synthetic construct
  source 1..75: mol_type = other DNA
agggttggatgatgatgattatttcaaagaagataggttacagattctggttaatcattataacaaggaattttc

SEQ ID NO: 156757 - DNA, 75 bp, synthetic construct
  source 1..75: mol_type = other DNA
aaattgatgaaccacgatttgaaaaagaaggtttattgattgaaggacagcgcactaactattttgttaaatcca

SEQ ID NO: 156758 - DNA, 75 bp, synthetic construct
  source 1..75: mol_type = other DNA
cgcaacccgctccagtgatatggtgacgatcccaactgaaaataatatctataatagaccgcttacgtgtcttgt

SEQ ID NO: 156759 - DNA, 75 bp, synthetic construct
  source 1..75: mol_type = other DNA
taagtattgcactgtttcatgcagggttaaagctcctgatggtcttcgttgtcgtttgcgttttgaaaaatacga

SEQ ID NO: 156760 - DNA, 75 bp, synthetic construct
  source 1..75: mol_type = other DNA
gcggatattcccgataaggcagcctttcttcaaaaccttggtttgggagaagcggcgaaaagggatgtgggcaca

SEQ ID NO: 156761 - DNA, 75 bp, synthetic construct
  source 1..75: mol_type = other DNA
gcagatattcctgacccggcgctctttgtcaaaaaccttggtttgggagatgcgagcggatacgttggtaggctg

SEQ ID NO: 156762 - DNA, 75 bp, synthetic construct
  source 1..75: mol_type = other DNA
atttaccagtaccgataaagccatcacgccggagtcggtactgatgcaggacggcgcattcagcctgacggcacc

SEQ ID NO: 156763 - DNA, 75 bp, synthetic construct
  source 1..75: mol_type = other DNA
agtttcagtcatgaaccatcaaaaaatatattggataatctgtttaggagagagagtaaccaaacatctaataaa

SEQ ID NO: 156764 - DNA, 75 bp, synthetic construct
  source 1..75: mol_type = other DNA
ctgcatgtggagatgcgaccggaaaccacgctccagctgctgccggagtgggagcaatatctggcgctgccggaa

SEQ ID NO: 156765 - DNA, 75 bp, synthetic construct
  source 1..75: mol_type = other DNA
ggtgacggccgttctgccgcaccactgcctgcgtgactgcatgtacccgctgcatccggcgcggtatcgctggct

SEQ ID NO: 156766 - DNA, 75 bp, synthetic construct
  source 1..75: mol_type = other DNA
agataattaaagatcaagcttacaataagcccaaaaaagaatctaatggtggttctttctttaacacattacctg

SEQ ID NO: 156767 - DNA, 75 bp, synthetic construct
  source 1..75: mol_type = other DNA
aaatcgacactgatacaattaacgctgaagattggcaaaaaggtgaccgattaaaatcggttgcgctgctgattg

SEQ ID NO: 156768 - DNA, 75 bp, synthetic construct
  source 1..75: mol_type = other DNA
atatctttgcacaagataatatttacaacccgaactcaactcctgcatccttttttgaatttgaaaacattgatg

SEQ ID NO: 156769 - DNA, 75 bp, synthetic construct
  source 1..75: mol_type = other DNA
agacgctctctagggcattgggagggcgatttagtctcaggtacaaaaaactctcatatagccacacttgtagac

SEQ ID NO: 156770 - DNA, 75 bp, synthetic construct
  source 1..75: mol_type = other DNA
gcaagtgattacctgccacagacaacttggccaacaactcaattaccaccaggatatacttgtgcagaaccctat

SEQ ID NO: 156771 - DNA, 75 bp, synthetic construct
  source 1..75: mol_type = other DNA
tcaaaacattcttcagagcattaagtccttacgattacacactgtattgcaggaagtgggtaaaacccaatctga

SEQ ID NO: 156772 - DNA, 75 bp, synthetic construct
  source 1..75: mol_type = other DNA
acaatgggaaaatctgttccggttcgccatacatacaggcctgcgtagttctgaattatgtgccctacgatggca

SEQ ID NO: 156773 - DNA, 75 bp, synthetic construct
  source 1..75: mol_type = other DNA
cagcacaaggatatcaggcaattgctgtaaacacgaatgatgcttacacctgcccggcaggttcttatacgacga

SEQ ID NO: 156774 - DNA, 75 bp, synthetic construct
  source 1..75: mol_type = other DNA
taccgccactctttttgcagatgcggaaatgataatcagctcaagatttgaaatcctggcgatgcctggaatcag

SEQ ID NO: 156775 - DNA, 75 bp, synthetic construct
  source 1..75: mol_type = other DNA
ttgtatcctgatgaggtttatcgattttgcacctgcaagcttaaagaagaaaatttcttattttcgcaagttgca

SEQ ID NO: 156776 - DNA, 75 bp, synthetic construct
  source 1..75: mol_type = other DNA
ccagtgtcgtaggcatattgaaaggcaccaaaacaaaagcaggcacccgtaaagtgaaattaaacagtgaggctc

SEQ ID NO: 156777 - DNA, 75 bp, synthetic construct
  source 1..75: mol_type = other DNA
gatccaaagaccaataaaccttgggcaagtgctgatgcaattaggaaaaaagcatgggtgccaatattgagaaaa

SEQ ID NO: 156778 - DNA, 75 bp, synthetic construct
  source 1..75: mol_type = other DNA
aggtgggcctattgcgtatgctggagaagttgctccaatattcgggcatcagacatccattctttattatcatgc

SEQ ID NO: 156779 - DNA, 75 bp, synthetic construct
  source 1..75: mol_type = other DNA
gttaatgagatcaactgcagaactccaatgcgcctctcatacattgagaaaaagaaaggccgccagacgactcat

SEQ ID NO: 156780 - DNA, 75 bp, synthetic construct
  source 1..75: mol_type = other DNA
gcggcgatttcacctcaaacggcatcacagtgcatacgcataaacacggtggcgtgaaaggcggcagcgattcga

SEQ ID NO: 156781 - DNA, 75 bp, synthetic construct
  source 1..75: mol_type = other DNA
acctgaaagccctgcaaaaacagctggatgagatgtatacctacatccgtaataatcagatgatgctcccaaact

SEQ ID NO: 156782 - DNA, 75 bp, synthetic construct
  source 1..75: mol_type = other DNA
tgacaccgctagggcattacatatcagtatcaatgccgtcgtccgcactttaaaaaactctcgccacggaatgta

SEQ ID NO: 156783 - DNA, 75 bp, synthetic construct
  source 1..75: mol_type = other DNA
gtacttacaaaatgtggaaaagaaacattggtccagttggacatttgtaggtgatggcagatatgagcgtaccta

SEQ ID NO: 156784 - DNA, 75 bp, synthetic construct
  source 1..75: mol_type = other DNA
gaaatttaatcctgaaactggtatatcagagcttgggacaggaaagtcttctggcttgtgcgtagagtattatta

SEQ ID NO: 156785 - DNA, 75 bp, synthetic construct
  source 1..75: mol_type = other DNA
tttaactcaacgaaagatgatgtagaatgtttaacaattgtatactgtggtcatttctctcaattaaaaaaccct

SEQ ID NO: 156786 - DNA, 75 bp, synthetic construct
  source 1..75: mol_type = other DNA
tgagcgtgtgaattttgtacgccagtcgatgaaacttgcgctgaaccatgtcctgcttgttggcgcaacggaagg

SEQ ID NO: 156787 - DNA, 75 bp, synthetic construct
  source 1..75: mol_type = other DNA
tttccggcgcgttctcatcctgttgttccagcgtttcaacgctgctgggcttacagggtggggttgaactggtcg

SEQ ID NO: 156788 - DNA, 75 bp, synthetic construct
  source 1..75: mol_type = other DNA
aacagcgaagcccggtttgcagtcagcagcaccgagagatctgaatgagcagatgttcgtaagcggctcgccaga

SEQ ID NO: 156789 - DNA, 75 bp, synthetic construct
  source 1..75: mol_type = other DNA
cgccagaatcttgaggcgcgtcttgatgctgaagtggatgccattctggatgagctgctggggggatccgttcct

SEQ ID NO: 156790 - DNA, 75 bp, synthetic construct
  source 1..75: mol_type = other DNA
aactgcgtaccgatatgtggggcgtggtgcgggcaaagaaaggcatctttatcagcgccgatgcgcaggataatg

SEQ ID NO: 156791 - DNA, 75 bp, synthetic construct
  source 1..75: mol_type = other DNA
attttaaaattgaagcggtaaaacaagttgttgaccgcggtcattctgcttccagcgttgcaacacttcgccatg

SEQ ID NO: 156792 - DNA, 75 bp, synthetic construct
  source 1..75: mol_type = other DNA
gccggtgattcgtatctgcgaacgcttctggttcagggggctcgttcagtgcttattggcgccgggaaaaggact

SEQ ID NO: 156793 - DNA, 75 bp, synthetic construct
  source 1..75: mol_type = other DNA
ctggtgaattctcatggggttggctgaacaatgtatccctgtatggtggtggtgatgctgccaacttactgattt

SEQ ID NO: 156794 - DNA, 75 bp, synthetic construct
  source 1..75: mol_type = other DNA
ataaggccatgctgctttgtaagtggggggtgcccctattaagttgtcaagcatgttatgacgcctgcggggtat

SEQ ID NO: 156795 - DNA, 75 bp, synthetic construct
  source 1..75: mol_type = other DNA
agacaaagtttttatcattctacgtacacctggtgttttagcatatttattgtctttattatgtatcgctaggaa

SEQ ID NO: 156796 - DNA, 75 bp, synthetic construct
  source 1..75: mol_type = other DNA
tcattgccggagaatcatgaactatttgaacataaagcaattagtattgaaccaatatttacagtgggtactggc

SEQ ID NO: 156797 - DNA, 75 bp, synthetic construct
  source 1..75: mol_type = other DNA
ggggatgtgatgttaaccgcctgccagaatgttactctacttcttcaggttgcggagcaccgcgaagccggtcgc

SEQ ID NO: 156798 - DNA, 75 bp, synthetic construct
  source 1..75: mol_type = other DNA
agttcccttgtctttcggaaacatttgtttacaatcaaattaagggattaagtaatttaggtcatgatgttaagg

SEQ ID NO: 156799 - DNA, 75 bp, synthetic construct
  source 1..75: mol_type = other DNA
ccgtcattgccccgctgaagtgttaacgggcatccacaggacacacagcacaaaacgtcctgtcggttgtgcttc

SEQ ID NO: 156800 - DNA, 75 bp, synthetic construct
  source 1..75: mol_type = other DNA
acgccaatccaccttgacctccaatgggtattaattgataaccaaactgcagtttgcgtgacaccagagcaatta

SEQ ID NO: 156801 - DNA, 75 bp, synthetic construct
  source 1..75: mol_type = other DNA
ggcgttaagcccgctcagtgcgcaggcggaattcacatctgaggtgacgaatgcaatggttaccggggaaacggt

SEQ ID NO: 156802 - DNA, 75 bp, synthetic construct
  source 1..75: mol_type = other DNA
aaagcgattcatctttcggcgttcgtgtccccgacattcccggctgcttctcgggtggcaacagctatcaggatg

SEQ ID NO: 156803 - DNA, 75 bp, synthetic construct
  source 1..75: mol_type = other DNA
tagaagtactgaaaactcagctattagatcaacaacgtcaaattgatgaactaattggcgtagtacaaagtctct

SEQ ID NO: 156804 - DNA, 75 bp, synthetic construct
  source 1..75: mol_type = other DNA
tatatttatcgcttgccgaatgtattcggtaagtggtgtcgcccaaattataactcctttatagcaactttctgc

SEQ ID NO: 156805 - DNA, 75 bp, synthetic construct
  source 1..75: mol_type = other DNA
cacaaaacttagcacaaaaaaagatggtgataagatatatttcggtgaaaaagaattttgggatgatgaactgtt

SEQ ID NO: 156806 - DNA, 75 bp, synthetic construct
  source 1..75: mol_type = other DNA
ttatgggacgggataaaaccggcgatctcgttgacagttccgtggtgcataaatccggccagtggaaaggtgttc

SEQ ID NO: 156807 - DNA, 75 bp, synthetic construct
  source 1..75: mol_type = other DNA
gggctgtatggtcgctccggtgactgggcgtatcgcgttggtttaccgggcaaaagcggtgtaggtggcggtatt

SEQ ID NO: 156808 - DNA, 75 bp, synthetic construct
  source 1..75: mol_type = other DNA
tgtacttgataataacgtcattatgatggatagtgttatttctattaaacttcttgcggataaaaatgcagcttt

SEQ ID NO: 156809 - DNA, 75 bp, synthetic construct
  source 1..75: mol_type = other DNA
cccttataattagtcttgaagttccagatgaaacagtaaatatatacactgaggttgaaaataaagtagatatac

SEQ ID NO: 156810 - DNA, 75 bp, synthetic construct
  source 1..75: mol_type = other DNA
tgttgtcctgttaattaaatgctcacgcaatcagttggaacgtgcaccagaacttattgccaatctagaagagct

SEQ ID NO: 156811 - DNA, 75 bp, synthetic construct
  source 1..75: mol_type = other DNA
caaactgtgccttctcaaaacagaagggcaacatgaaatagctaccctctttattcctgatgctaggcgtggagc

SEQ ID NO: 156812 - DNA, 75 bp, synthetic construct
  source 1..75: mol_type = other DNA
ttaacattggcaaatccatgctagaggaattaccaataaacattcccataaacggtgtttttaattctcatatag

SEQ ID NO: 156813 - DNA, 75 bp, synthetic construct
  source 1..75: mol_type = other DNA
ggttatcaggacattgtaggtaagatcataggtgaggaaattgttgagaactttaacattcgtactgatgacatt

SEQ ID NO: 156814 - DNA, 75 bp, synthetic construct
  source 1..75: mol_type = other DNA
ctttccacaccccattacttgttcaaatcgacagattagctgaggaaaatgctcctaacagcgatactcttgatt

SEQ ID NO: 156815 - DNA, 75 bp, synthetic construct
  source 1..75: mol_type = other DNA
ctaaagcattatccgatatacctcacagattattatccattggtgttaagcgccaagaactcaggcaattcggga

SEQ ID NO: 156816 - DNA, 75 bp, synthetic construct
  source 1..75: mol_type = other DNA
tgtcactgtactgtacactccagtgatcacgcctttcgacactgccacattacggaaaacactttccgtacctga

SEQ ID NO: 156817 - DNA, 75 bp, synthetic construct
  source 1..75: mol_type = other DNA
atttatgatgataactacaccatggataaaaataataagtatattggtgatttgcagtgtttaattcgggatgca

SEQ ID NO: 156818 - DNA, 75 bp, synthetic construct
  source 1..75: mol_type = other DNA
tttatgtgatatcttttttattcattattggaattatgttttcagggaacatcaagtcccgccgaacacataatg

SEQ ID NO: 156819 - DNA, 75 bp, synthetic construct
  source 1..75: mol_type = other DNA
taaagcatcgccgaacgacgatgagttgcaactattaagtgcagggtgtagtaacgataatattctccattttat

SEQ ID NO: 156820 - DNA, 75 bp, synthetic construct
  source 1..75: mol_type = other DNA
tctggattatgtgattattaatttaactccagaaagcaaaaaaacgttgatgagtgaacaccgtaacaatattcg

SEQ ID NO: 156821 - DNA, 75 bp, synthetic construct
  source 1..75: mol_type = other DNA
ttccggttatctcattttgccaacgaccgggcgtttctttcagatcccttatggttgtctggtgccgcaaaaagt

SEQ ID NO: 156822 - DNA, 75 bp, synthetic construct
  source 1..75: mol_type = other DNA
tcaaatcttgtcgccagccaatgaagagccagcgctagccaatgcagaaccagcgcaggagcaggagcaggagca

SEQ ID NO: 156823 - DNA, 75 bp, synthetic construct
  source 1..75: mol_type = other DNA
cgaaacagccagtacatcgtgaagggcacctccagtgcgggggggagcacatgggacgatcagcctgtcaaagtg

SEQ ID NO: 156824 - DNA, 75 bp, synthetic construct
  source 1..75: mol_type = other DNA
gtattgttgactgggaggaactgccgcccagagccagagatattccggctggttttaacccaatgaccgacggcg

SEQ ID NO: 156825 - DNA, 75 bp, synthetic construct
  source 1..75: mol_type = other DNA
attcttagtatgattgtgcagatatttattctaattcgtaaaaaggaaggtttgggggcaggtgatattaagttg

SEQ ID NO: 156826 - DNA, 75 bp, synthetic construct
  source 1..75: mol_type = other DNA
tgcttgtctaccacttctccattaacagtattgatctggcgatggaagtcatgtccagagccttctcctttagtg

SEQ ID NO: 156827 - DNA, 75 bp, synthetic construct
  source 1..75: mol_type = other DNA
tctaccttactacaccgcgcttttaaaattgctaatagtgtttggtgcaagaacacaagaaattcgtctttcgac

SEQ ID NO: 156828 - DNA, 75 bp, synthetic construct
  source 1..75: mol_type = other DNA
agtgctctaaagcaagatggatggagacatttagcagaatcaaaaaagtcgcgccggtagcaagcggctacatat

SEQ ID NO: 156829 - DNA, 75 bp, synthetic construct
  source 1..75: mol_type = other DNA
gatttataaccgtagtctgtacttgccggagaagctggacgcgctgaacaagtggtatgaccgcttagaacttct

SEQ ID NO: 156830 - DNA, 75 bp, synthetic construct
  source 1..75: mol_type = other DNA
cagcagaaagtctaatccaattcagaaaagaactgattaatttattacataaaaatggccatgttgtatatgcat

SEQ ID NO: 156831 - DNA, 75 bp, synthetic construct
  source 1..75: mol_type = other DNA
cttaaagtaatagacgtaaaaaaaacgcagcgaacacagaatgttttcttgagtccccagatgtttcttgctcag

SEQ ID NO: 156832 - DNA, 75 bp, synthetic construct
  source 1..75: mol_type = other DNA
aaggtccccgatgagtacagggatgccatcaatggccttttatatattcttaattatttcgagtttcttgcgcag

SEQ ID NO: 156833 - DNA, 75 bp, synthetic construct
  source 1..75: mol_type = other DNA
caattgcgatgaccatggctgcgggctctgctatggctaatgtgcagcagggttctcagggagaggttcagtttg

SEQ ID NO: 156834 - DNA, 75 bp, synthetic construct
  source 1..75: mol_type = other DNA
cagaagtgaattgactggtaacatagtatgcctgaataccgctgataataactggagcaatgcagatgctaaaat

SEQ ID NO: 156835 - DNA, 75 bp, synthetic construct
  source 1..75: mol_type = other DNA
cgcacccaaaggcgtggcgatcgccagcggagagcacctgcaactggcggcatcgaaaaacctgatcgcgaacgc

SEQ ID NO: 156836 - DNA, 75 bp, synthetic construct
  source 1..75: mol_type = other DNA
atgatctacggcgaacgcttgcaacgcatatgaataatatgggtatagctccgcacgttgttgaacagttgctgg

SEQ ID NO: 156837 - DNA, 75 bp, synthetic construct
  source 1..75: mol_type = other DNA
tgcactgctttctatgcaaccgcttttacgttctggttatgcgcgtaatgcagcagtcacagccactataagcgg

SEQ ID NO: 156838 - DNA, 75 bp, synthetic construct
  source 1..75: mol_type = other DNA
gaacaaagcttattccggcgctgtccgtccttgctgtcactgacactgatgtctgttttattatcgcctttatct

SEQ ID NO: 156839 - DNA, 75 bp, synthetic construct
  source 1..75: mol_type = other DNA
aatgagaccctatcgattatccgacttatcaaaaatgcttgtttaaaattatacctagattctacgtcagtactt

SEQ ID NO: 156840 - DNA, 75 bp, synthetic construct
  source 1..75: mol_type = other DNA
aatattgcgttaggttatgataaatttggaaaagaagctgaagacattctttaccatattgttagggaaggtgcg

SEQ ID NO: 156841 - DNA, 75 bp, synthetic construct
  source 1..75: mol_type = other DNA
tacgggataactgtatttcactgttgcggggagtgatgagtgagcgtggcgttcagcaaaaatcactggcggcca

SEQ ID NO: 156842 - DNA, 75 bp, synthetic construct
  source 1..75: mol_type = other DNA
ccagaatacgctgcaaaaatgggacgtggtgatttttcaggggaattctacggagcctttttccgccaaagagga

SEQ ID NO: 156843 - DNA, 75 bp, synthetic construct
  source 1..75: mol_type = other DNA
aatataaatacccgactgcgcgatctcagccgttcgctgttaccgaatggcgctaaagactatatgttccgggga

SEQ ID NO: 156844 - DNA, 75 bp, synthetic construct
  source 1..75: mol_type = other DNA
atataatttggcacataccgcaaccacccccccctcaaatcacatgattcagatgatctcctgttcaaaaaacta

SEQ ID NO: 156845 - DNA, 75 bp, synthetic construct
  source 1..75: mol_type = other DNA
tggtgcgttatgaccgctatgtgctggttaacactcatccggatgcggtacagcgggatcccctttcccaggtga

SEQ ID NO: 156846 - DNA, 75 bp, synthetic construct
  source 1..75: mol_type = other DNA
tggtgttaaaaatagataccagccccctgagacatcagattgagaagttatacaaactacttgttcctgcggttt

SEQ ID NO: 156847 - DNA, 75 bp, synthetic construct
  source 1..75: mol_type = other DNA
ttgactcacatatagttaattcaaaacttatgaaaatactgcgcgtagatgatgaaaatacaaagtctaatgact

SEQ ID NO: 156848 - DNA, 75 bp, synthetic construct
  source 1..75: mol_type = other DNA
gctcacctgccgtggttgatgcggtggaggcatatcgcggatcaccacaactgatggtcgaacgccttaatgccc

SEQ ID NO: 156849 - DNA, 75 bp, synthetic construct
  source 1..75: mol_type = other DNA
catccgttttatcgttgaccgcctgtcacgctcacaactggacgagcgcattgtggcaatggttgagacggcgaa

SEQ ID NO: 156850 - DNA, 75 bp, synthetic construct
  source 1..75: mol_type = other DNA
cagcgtgacccgctttcccaggtgattgatatccgtattccggcatcgttaaagcccaccgtggccgatgccatg

SEQ ID NO: 156851 - DNA, 75 bp, synthetic construct
  source 1..75: mol_type = other DNA
taataaatgtaagaaactaaatgatgatgaattatttcgcttacttgatgatcgcaattccttgaaaaggatttc

SEQ ID NO: 156852 - DNA, 75 bp, synthetic construct
  source 1..75: mol_type = other DNA
tggatttatccggggaagcattactcgatcctctgatgcgtttatcttctttgcacatgcttatctatatgctta

SEQ ID NO: 156853 - DNA, 75 bp, synthetic construct
  source 1..75: mol_type = other DNA
catcagcggcccggcatttaaccaggcagttgcgcgttatctgaaacttaaagcatacgggatgcagccgattga

SEQ ID NO: 156854 - DNA, 75 bp, synthetic construct
  source 1..75: mol_type = other DNA
gcttctgttttcattgagtatggattcaatttcagtgctgtgaaaaaaatcgcaggaaggaaagatgataaatat

SEQ ID NO: 156855 - DNA, 75 bp, synthetic construct
  source 1..75: mol_type = other DNA
ttttctttttctgtttttgttttctccgataaaataattttttttgtttttggtattgaatacgaaagagcgata

SEQ ID NO: 156856 - DNA, 75 bp, synthetic construct
  source 1..75: mol_type = other DNA
ggataggaaatgatgttgtattgaaaggtggcatcgcaataggtgatggtgctgttatgatcttacccagcaata

SEQ ID NO: 156857 - DNA, 75 bp, synthetic construct
  source 1..75: mol_type = other DNA
cgtcagagggcaacgtcgcgctgtcacacctgcgcgatctgttgttcggggactacctgagccgggaggggctga

SEQ ID NO: 156858 - DNA, 75 bp, synthetic construct
  source 1..75: mol_type = other DNA
acagaagttgcagtgaatcgtccaaatgaagtatttacgaaaatttatggaaaatgggaacgtcatgaagttgat

SEQ ID NO: 156859 - DNA, 75 bp, synthetic construct
  source 1..75: mol_type = other DNA
cgactcggcacacactgaccatgtgaccattcagaactataagcgtaacgtcctcagaaccccggcgaacaacaa

SEQ ID NO: 156860 - DNA, 75 bp, synthetic construct
  source 1..75: mol_type = other DNA
tcggctctggccatgaaggtcttgtcacatcacttcacgcgggaagccccgcagactgcatcaccggcattatcg

SEQ ID NO: 156861 - DNA, 75 bp, synthetic construct
  source 1..75: mol_type = other DNA
gattattttcccgactgcctgccaacgaaatactgtttcaattaccgtgcgtaagccgtcgttcattcagttaac

SEQ ID NO: 156862 - DNA, 75 bp, synthetic construct
  source 1..75: mol_type = other DNA
ctacgcaaggtactgaactgcgtcgatgtcatcatcagcgttgacgtaaaaggtaacgttcgccgcgccggtgaa

SEQ ID NO: 156863 - DNA, 75 bp, synthetic construct
  source 1..75: mol_type = other DNA
aggttcagccggtgtatctcggttaaatggctctgtttcattaattagcatagtcatgcaaccaaaaaaaataaa

SEQ ID NO: 156864 - DNA, 75 bp, synthetic construct
  source 1..75: mol_type = other DNA
acctacgcgaaattaaattaccaggagtactattgtgtgatgaataccaatatttatatccaaaaaggaggttgt

SEQ ID NO: 156865 - DNA, 75 bp, synthetic construct
  source 1..75: mol_type = other DNA
aattattcatgtcggctatataactattttaaatatgaaacaaaggaggcttttgataatttattagttgatgat

SEQ ID NO: 156866 - DNA, 75 bp, synthetic construct
  source 1..75: mol_type = other DNA
tcggattgtcaggtgtggggatgattggatgttctcatcaatggcgtctggacatgacgctggcggacttcaatc

SEQ ID NO: 156867 - DNA, 75 bp, synthetic construct
  source 1..75: mol_type = other DNA
taataggctccggggggcagtttgcatgggcgaatacttttctatatgataaaccatcagtcctcttgggtagaa

SEQ ID NO: 156868 - DNA, 75 bp, synthetic construct
  source 1..75: mol_type = other DNA
gaaaccgcaaaaatcgatatcctgatcgagaaacaacaacaacttattgaactgctgaaagaaaaacgtcaggcc

SEQ ID NO: 156869 - DNA, 75 bp, synthetic construct
  source 1..75: mol_type = other DNA
tcgccgatgccccgtcttcacaggcattaacccatctggtgggcggcctttgctttacactcggctttattttgc

SEQ ID NO: 156870 - DNA, 75 bp, synthetic construct
  source 1..75: mol_type = other DNA
ctgcggtaatctggcaggtattgcctgtttcagtttgttaatctggttttccgggctggtgatgagtgaaaacgc

SEQ ID NO: 156871 - DNA, 75 bp, synthetic construct
  source 1..75: mol_type = other DNA
acatatcaataggaaatataattttccccgcaatactcgatcttttactaagagtgacaggtttaattctcattg

SEQ ID NO: 156872 - DNA, 75 bp, synthetic construct
  source 1..75: mol_type = other DNA
tatttgtatttatgctacagcatgcggacatgcaggaattggtggtgggataaatgcggctatcacatattctga

SEQ ID NO: 156873 - DNA, 75 bp, synthetic construct
  source 1..75: mol_type = other DNA
agcgaggacgggcacggcgtggtatttccggctgaactggtgcggctgctggacagactggaggaagaaatccgg

SEQ ID NO: 156874 - DNA, 75 bp, synthetic construct
  source 1..75: mol_type = other DNA
atgacgttctgtatcttgatacggatagcctcatcggctgggatttttctggcatgaatttacatcacgctattt

SEQ ID NO: 156875 - DNA, 75 bp, synthetic construct
  source 1..75: mol_type = other DNA
caacttgagttgctggatgccagcgccattcgccgcgaagtagcaagcgatcgctacaccggcgcgctgctggat

SEQ ID NO: 156876 - DNA, 75 bp, synthetic construct
  source 1..75: mol_type = other DNA
cgccaatctgccgcattacccgttccccggcgggcgcacgctgcgcgtgccgtttaccgcgatgggcgcggctta

SEQ ID NO: 156877 - DNA, 75 bp, synthetic construct
  source 1..75: mol_type = other DNA
cggatgacgttgagcgtcttgtggtaccgaaactactaaaaaccttccctcagttgaagggcgtgaaaattgatt

SEQ ID NO: 156878 - DNA, 75 bp, synthetic construct
  source 1..75: mol_type = other DNA
cttcggcaacgcacgcctacagcgtcgacgccacggcaccgacgcttgtcatcaataccatcgccactgacgata

SEQ ID NO: 156879 - DNA, 75 bp, synthetic construct
  source 1..75: mol_type = other DNA
gtcagtgggaaagacaccacaggcaatacggtcaccggcgcgcagctgctaacggtcgatacccaaccgccgaca

SEQ ID NO: 156880 - DNA, 75 bp, synthetic construct
  source 1..75: mol_type = other DNA
tgcaggttcatgctcaggcctctgccgttgcgcgttacgtccgtgaaggaaatgacctgctgatctatatgcagg

SEQ ID NO: 156881 - DNA, 75 bp, synthetic construct
  source 1..75: mol_type = other DNA
cgcgctgcatctggcggaagcgggctttgacgtagtggttctcgaagcctcacgcatcggctttggcgcaagcgg

SEQ ID NO: 156882 - DNA, 75 bp, synthetic construct
  source 1..75: mol_type = other DNA
actgatgcggaagattccaaactggaaaccgtgtcgcgctacggcaccgacaccaaccaccagaaagcggcgacc

SEQ ID NO: 156883 - DNA, 75 bp, synthetic construct
  source 1..75: mol_type = other DNA
taagatgcaaagtgaattttctctgttacctctcctgttgcgtcctcagtggctgaccactatcacgctgaagta

SEQ ID NO: 156884 - DNA, 75 bp, synthetic construct
  source 1..75: mol_type = other DNA
tactgtgtcgaagactgtaactatctgcttgattactaccgcctgactgccgataaccgcctgctgtacggtggt

SEQ ID NO: 156885 - DNA, 75 bp, synthetic construct
  source 1..75: mol_type = other DNA
tttgacgtggtggttctcgaagcctcacgcatcggcttcggcgcaagcggacgcaatggcgggcagcttgtgaac

SEQ ID NO: 156886 - DNA, 75 bp, synthetic construct
  source 1..75: mol_type = other DNA
cacagcggcgggcatattcacccgctgaacctcgccattggcgaagcggacgctatccgcctgaacggcgggcgc

SEQ ID NO: 156887 - DNA, 75 bp, synthetic construct
  source 1..75: mol_type = other DNA
aaagttcggcgggtaacggcaataacgccaatattagcaacggcacggtgacggttaacgcggcgattgattaca

SEQ ID NO: 156888 - DNA, 75 bp, synthetic construct
  source 1..75: mol_type = other DNA
caccgcgccgcttgtgaccatcaacaccatcgccagcgacgatatccttaacgtgagcgaagctggcgcggggat

SEQ ID NO: 156889 - DNA, 75 bp, synthetic construct
  source 1..75: mol_type = other DNA
acggttaccgatgcggcaggcaacagcgacaatgagacacacacggtcaccgttaacctcaccgcaccaaccatt

SEQ ID NO: 156890 - DNA, 75 bp, synthetic construct
  source 1..75: mol_type = other DNA
ggcaattaccgacgcggcaggcaacagcgatgacgccagccgcacggtcaccgtgaatctcgccgcgccaaccat

SEQ ID NO: 156891 - DNA, 75 bp, synthetic construct
  source 1..75: mol_type = other DNA
cggcgagcaccacgcataatctggcggtggatctcaccgttccggtactcaccatcaacaccattgcgggcgatg

SEQ ID NO: 156892 - DNA, 75 bp, synthetic construct
  source 1..75: mol_type = other DNA
aacctgaacaactattacacgctatcttcgctcatcaaccaggggaatgggacgtttatctgggggcagaacacc

SEQ ID NO: 156893 - DNA, 75 bp, synthetic construct
  source 1..75: mol_type = other DNA
taacgctcaacagcccgaccgtgcagacgtatcaggcaacggtacaggccgatggcagctggagcatcaatattc

SEQ ID NO: 156894 - DNA, 75 bp, synthetic construct
  source 1..75: mol_type = other DNA
cagcgcctccgcgcaggccagcgtcagcaatataaacggcaatagcgcctcggcggtgcatagctacagcgtcga

SEQ ID NO: 156895 - DNA, 75 bp, synthetic construct
  source 1..75: mol_type = other DNA
gatacggtggcgggcgatgatgtggtcaatatcatcgagcacgggcaggcgctggtggtcaccggcagcagttcg

SEQ ID NO: 156896 - DNA, 75 bp, synthetic construct
  source 1..75: mol_type = other DNA
cctggcctgcggggccgttaaccgttgacgtggcaggacagagcagcgccggaaacccggtcagcgtcagccatc

SEQ ID NO: 156897 - DNA, 75 bp, synthetic construct
  source 1..75: mol_type = other DNA
taagcgggctgaccgccagcagctataccgtgactgcgacggtgagcgacaaagcgggtaacccggcaagcgccg

SEQ ID NO: 156898 - DNA, 75 bp, synthetic construct
  source 1..75: mol_type = other DNA
attaacaccatcgccaccgacgatattctgaacgccgccgaggcgggcaatccgctaaccatcagcggcagcagc

SEQ ID NO: 156899 - DNA, 75 bp, synthetic construct
  source 1..75: mol_type = other DNA
tacgatagtggttaatgccagcgcaacggaccccgccgggaatccggtttccatcgatcgcaacgtggaagtcaa

SEQ ID NO: 156900 - DNA, 75 bp, synthetic construct
  source 1..75: mol_type = other DNA
ctgaactggacctacagcgacagcgggctggtcagcggtgcctatacctacagtgcgcgagtggtggatctggcg

SEQ ID NO: 156901 - DNA, 75 bp, synthetic construct
  source 1..75: mol_type = other DNA
tactggcgcaaccagactttgcgtatggggctgacgggcaaatactccccgcactcactgcgctgcgcctgggcg

SEQ ID NO: 156902 - DNA, 75 bp, synthetic construct
  source 1..75: mol_type = other DNA
cgtgcctgcggcggatctggccgcgctcgggcagggtgcgcagaccattaccgccagcgtgaacgatcgcgcggg

SEQ ID NO: 156903 - DNA, 75 bp, synthetic construct
  source 1..75: mol_type = other DNA
ccgacgcctccggcaactggagcgtcaccgttcctgcctcggcggtcagtgcgctgggcgaagccacatatagcg

SEQ ID NO: 156904 - DNA, 75 bp, synthetic construct
  source 1..75: mol_type = other DNA
attaacaccattgcgggcgacgatattcttaacgccgccgaagcgggtgcggcgctgaccatcaccggcagcagc

SEQ ID NO: 156905 - DNA, 75 bp, synthetic construct
  source 1..75: mol_type = other DNA
taaaatctggcgcttgcgttgtgactggcgcgagaaccagctgcgtgctgttggcgcggtaaataaaaaagcgca

SEQ ID NO: 156906 - DNA, 75 bp, synthetic construct
  source 1..75: mol_type = other DNA
cagccacaccaccttccgttacgatgtactcgaccggctgatacaggaaaccggctttgacggccgcacacagcg

SEQ ID NO: 156907 - DNA, 75 bp, synthetic construct
  source 1..75: mol_type = other DNA
ggcagcagaaacgggacacagtacgatgcgtggggaaaggccgtccgtaccacgcagggcgggctgacccgtagt

SEQ ID NO: 156908 - DNA, 75 bp, synthetic construct
  source 1..75: mol_type = other DNA
aaacggggacactctgcgactcgcacggtgacagtactacatagcttagggatcacactgctgctgattctggca

SEQ ID NO: 156909 - DNA, 75 bp, synthetic construct
  source 1..75: mol_type = other DNA
tgtgtttggttgagatttcagagattcaggccgtttcgctgttaatggggagccgtctggagattggcgggaaat

SEQ ID NO: 156910 - DNA, 75 bp, synthetic construct
  source 1..75: mol_type = other DNA
gcgatccttcgcgcctacttcattgcggaagaccgcgacgagctgggccgcaataccggtgctcgtttcaagtca

SEQ ID NO: 156911 - DNA, 75 bp, synthetic construct
  source 1..75: mol_type = other DNA
accatcgcgggcgatgatgtgatcaacgcgacggaaaaaggatctgatctggcgctttctggcaccagcgatcag

SEQ ID NO: 156912 - DNA, 75 bp, synthetic construct
  source 1..75: mol_type = other DNA
cacagcgcaggttcagcccgatttaagctggagcgtcaccgttccggcagccgatttacaggcgctgggcaatgg

SEQ ID NO: 156913 - DNA, 75 bp, synthetic construct
  source 1..75: mol_type = other DNA
cggacggcaacgcctacgtgattaacgcctcggtaagcaatgctatcggcaacaccggcagcagcaatcacacca

SEQ ID NO: 156914 - DNA, 75 bp, synthetic construct
  source 1..75: mol_type = other DNA
accgccgctgaagagagcaagctggaaagcgtatcacgctacggcacggacacaaatcacatgaaggcgtcgagc

SEQ ID NO: 156915 - DNA, 75 bp, synthetic construct
  source 1..75: mol_type = other DNA
tggcgcagattagccttgatagtggcgcgacctggatcacgcttaccaccaacggtacacagtggacctacaccg

SEQ ID NO: 156916 - DNA, 75 bp, synthetic construct
  source 1..75: mol_type = other DNA
ctgaacgtgcctgcggcggatctggcaacgctcgggcagggcgcgcagaccattaccgccagcgtgaacgatcgc

SEQ ID NO: 156917 - DNA, 75 bp, synthetic construct
  source 1..75: mol_type = other DNA
cggcgacgccaccgtgcaggccagcgtcagcaacgttaacggcaacacggcttcggcaacccacgcctacagcgt

SEQ ID NO: 156918 - DNA, 75 bp, synthetic construct
  source 1..75: mol_type = other DNA
ctatcagggcatagtgcagtcagatggaacctggagcgtgaccgttcccgccgccaacgttgacgcgctggctga

SEQ ID NO: 156919 - DNA, 75 bp, synthetic construct
  source 1..75: mol_type = other DNA
attccgacgacgcttgcgcaaatcaccagccagaccacgcgtgacaccacgccgattatcagcggcgtgatcact

SEQ ID NO: 156920 - DNA, 75 bp, synthetic construct
  source 1..75: mol_type = other DNA
aatacgggcagcgccagccgtggcgtgacgctgaacggcgacgtccctaccgtcaccatcaacaccttcgcgggc

SEQ ID NO: 156921 - DNA, 75 bp, synthetic construct
  source 1..75: mol_type = other DNA
gcgggcagcaccgtcaccgttacgctgggcggtaaaacttacaccgccaccgtgcaggctgatttaagctggaat

SEQ ID NO: 156922 - DNA, 75 bp, synthetic construct
  source 1..75: mol_type = other DNA
cggttagcgcgctgggtgaagccaactacacggtaaccgcaaatgtcaccgacacggcaggcaacagcaattccg

SEQ ID NO: 156923 - DNA, 75 bp, synthetic construct
  source 1..75: mol_type = other DNA
gacctggcttgacgggcggacgctgaccgatggcaactacaattatcaggtgcgggtgatcgacaccgccggaaa

SEQ ID NO: 156924 - DNA, 75 bp, synthetic construct
  source 1..75: mol_type = other DNA
accagcgacacgacgcttgcggtgagcggcacgctgggcgcggcgctttctgctggtgagttcgcgcaaatcagt

SEQ ID NO: 156925 - DNA, 75 bp, synthetic construct
  source 1..75: mol_type = other DNA
caccaccgccagcaatatcgaccagacggtcaacaccagctggggcggcttacaggccaccgatgccactcacgc

SEQ ID NO: 156926 - DNA, 75 bp, synthetic construct
  source 1..75: mol_type = other DNA
gcgtgcctgccagcgtcatttccgcactggcgcagggcgatgtgaccattaccgccacggttaccgactccgccg

SEQ ID NO: 156927 - DNA, 75 bp, synthetic construct
  source 1..75: mol_type = other DNA
gggatcggcgctgaccatcagcggcaccagcacggcggaagccgggcagacggtgaccgtgacgcttaacggcgt

SEQ ID NO: 156928 - DNA, 75 bp, synthetic construct
  source 1..75: mol_type = other DNA
agcagcagcgatttcgttactcgcgacaccacgcttaccgtgcgcggtacgctcggagcggcgcttgccgccgat

SEQ ID NO: 156929 - DNA, 75 bp, synthetic construct
  source 1..75: mol_type = other DNA
cggcggcgcgacctggatcacgctcaccaccaacggcacgcagtggacctacaccgacggccgcacgctgaccga

SEQ ID NO: 156930 - DNA, 75 bp, synthetic construct
  source 1..75: mol_type = other DNA
gtaaccaacggtgttggcaatactggcagcggttcgcgcgatattgtgatagacgccaacctgccgggtctgcgc

SEQ ID NO: 156931 - DNA, 75 bp, synthetic construct
  source 1..75: mol_type = other DNA
ttaatcacaacctgacggtggatacttccgttccggtcgtcaccatcaacacggtggcaggcgatgatgtgatca

SEQ ID NO: 156932 - DNA, 75 bp, synthetic construct
  source 1..75: mol_type = other DNA
cggtcagtgcattaggtgaagccaactacacggtaacggcgagcgttaccgacacggcaggcaacagtaattccg

SEQ ID NO: 156933 - DNA, 75 bp, synthetic construct
  source 1..75: mol_type = other DNA
cagcccgcaggcaccacaataacggtgacgctgaacgggcaaaattacaccgctaccaccgatagcagtggcaac

SEQ ID NO: 156934 - DNA, 75 bp, synthetic construct
  source 1..75: mol_type = other DNA
cggcaataacgccaatattagtaacggcacggtgacggttaacgcagcgattgattatacaccgacctggaccac

SEQ ID NO: 156935 - DNA, 75 bp, synthetic construct
  source 1..75: mol_type = other DNA
tatctaatttaaaagagataagatcagcgagggatgatatatcagttatagttaattccttacctacagaacagc

SEQ ID NO: 156936 - DNA, 75 bp, synthetic construct
  source 1..75: mol_type = other DNA
ctccacacctgcgttctggcttgggctgggcgtcatcgtgctgtttttatggtcatctgcaaatacttcccggcg

SEQ ID NO: 156937 - DNA, 75 bp, synthetic construct
  source 1..75: mol_type = other DNA
tgattctcaactgctgagcactgccgaaaagcatatctacgctgatgcgcagaaggcggccagcctgtcagttgg

SEQ ID NO: 156938 - DNA, 75 bp, synthetic construct
  source 1..75: mol_type = other DNA
ctagaaatcatttgttaattgatagcatacaaaatatcgagttagcagatataacttctttctggacagataaaa

SEQ ID NO: 156939 - DNA, 75 bp, synthetic construct
  source 1..75: mol_type = other DNA
tgaacctaatccaagtcaaaaaggattcagacgacaatattcgtatcaatctcatggattgagatttgcagttat

SEQ ID NO: 156940 - DNA, 75 bp, synthetic construct
  source 1..75: mol_type = other DNA
ctttcgctatgtcagaagatattgcaccgtcatctcggtcatcggtatcctggggatggaaaaagcatgccccat

SEQ ID NO: 156941 - DNA, 75 bp, synthetic construct
  source 1..75: mol_type = other DNA
aggttaccgtcacactcaacggtcataactacagcgctaccaccgacgcggcgggcaactggacgttaaccgtgc

SEQ ID NO: 156942 - DNA, 75 bp, synthetic construct
  source 1..75: mol_type = other DNA
tagcctcgacggcggcgcgacctggaccaccctcaccaccaacggtacgcagtggacttacaccgacagccgcac

SEQ ID NO: 156943 - DNA, 75 bp, synthetic construct
  source 1..75: mol_type = other DNA
acacggggagttcggcaactgactttatcaccagcgatacctcgctcacgctgaccggttcgctgggggcggggc

SEQ ID NO: 156944 - DNA, 75 bp, synthetic construct
  source 1..75: mol_type = other DNA
gaggaaaaaatcgtagcgctgattaataaggcgatcgatgcgcgtttggctaaggccgacgaagagaaggaagcg

SEQ ID NO: 156945 - DNA, 75 bp, synthetic construct
  source 1..75: mol_type = other DNA
gttccgtcgggcaacattaccccggttttgaaacggatattcacggcgcgaaacaggacgaagatggcgtttacc

SEQ ID NO: 156946 - DNA, 75 bp, synthetic construct
  source 1..75: mol_type = other DNA
accacgacggcctgatggatatcgcccgtatcgcccagaccggacaatcgtatctttacaccaacgttggtggtg

SEQ ID NO: 156947 - DNA, 75 bp, synthetic construct
  source 1..75: mol_type = other DNA
ctgggcgaggcggtttattcgattagcgccaccgctaccgacagcgcgggcaacagcggcagcacaacgcatacg

SEQ ID NO: 156948 - DNA, 75 bp, synthetic construct
  source 1..75: mol_type = other DNA
aacggtgtccggcaccagcacggcggaaaccgggcagacgctcaccgtcacgcttaacggcactaactaccagac

SEQ ID NO: 156949 - DNA, 75 bp, synthetic construct
  source 1..75: mol_type = other DNA
cattaccgacgcggcaggcaacctcgatgacgccagccgcacggttaccgtgaatctgacctcgccaaccattgg

SEQ ID NO: 156950 - DNA, 75 bp, synthetic construct
  source 1..75: mol_type = other DNA
cgaaacgctggtcgtaagcggcagcaccagcggtgtggaagccgggcaaacggtgactgtcacctttggtggcaa

SEQ ID NO: 156951 - DNA, 75 bp, synthetic construct
  source 1..75: mol_type = other DNA
aagcagacggaagctggagcgtcagcgtaccaactggcgatttagttaacctcaccgctaattcgtatacggtca

SEQ ID NO: 156952 - DNA, 75 bp, synthetic construct
  source 1..75: mol_type = other DNA
ttacggttacaggcaccaacaccgccggaaccacaaccagcattagccatccgatcacggtcgatctcgctgccg

SEQ ID NO: 156953 - DNA, 75 bp, synthetic construct
  source 1..75: mol_type = other DNA
gacgctcaccattaacaccatcgccagcgatgacatccttaacgccacagaggcgggaagcccgctcaccatcag

SEQ ID NO: 156954 - DNA, 75 bp, synthetic construct
  source 1..75: mol_type = other DNA
cagcgcggcggtgagcgacaaagccggaaacccggcctccgctaatcacaacctgacggtggatacgtccgttcc

SEQ ID NO: 156955 - DNA, 75 bp, synthetic construct
  source 1..75: mol_type = other DNA
agcaaacgtacaagccagcgtcagcaacgtcgcagggaacagcgcccaggcaacgcatgtttatagcgtcgatgc

SEQ ID NO: 156956 - DNA, 75 bp, synthetic construct
  source 1..75: mol_type = other DNA
ggttatttctggtagcagtagccatcttcccacgggcaccaccgtgacggtaacgctcggcaacgaaacgtatca

SEQ ID NO: 156957 - DNA, 75 bp, synthetic construct
  source 1..75: mol_type = other DNA
aacggacacggcaacaccggtaatggtgaacgtgatatcaccatcagcgccacgctgccgggtctgcgtattaat

SEQ ID NO: 156958 - DNA, 75 bp, synthetic construct
  source 1..75: mol_type = other DNA
agtggggcttcacctggcgacacggtcaccgtcaaattaggtgccacggttctgaccggtgtggtgctggcagac

SEQ ID NO: 156959 - DNA, 75 bp, synthetic construct
  source 1..75: mol_type = other DNA
accagtggaattgaaagcgggcaaaccgtcaccgtcacttttggcggcaaaacctacactgcaagcgtcgccgcc

SEQ ID NO: 156960 - DNA, 75 bp, synthetic construct
  source 1..75: mol_type = other DNA
agtgccaccagtgcggcgggtaacaccgccagcagccaggcgaatttactggtcgatagcggcctgccgggcgtt

SEQ ID NO: 156961 - DNA, 75 bp, synthetic construct
  source 1..75: mol_type = other DNA
cgctggctgccgcactattcgccgctacgggtagttatgctgccgttgcattttctggtcaggctgatgcaatca

SEQ ID NO: 156962 - DNA, 75 bp, synthetic construct
  source 1..75: mol_type = other DNA
tttgcgacaggcacggtggtgaccgtgttgcttaacggcaaaggctacagcgctaccattcagaacaacgggagc

SEQ ID NO: 156963 - DNA, 75 bp, synthetic construct
  source 1..75: mol_type = other DNA
accaacgcccagggcaacagcagcaccgccagccataacgtgcaggtcaataccgcgctaccgagcgtcaccatt

SEQ ID NO: 156964 - DNA, 75 bp, synthetic construct
  source 1..75: mol_type = other DNA
cgcgagcaacaacggcaagttcgtcggcacgggctataacgacaccttctttgccaccgcaggcaccgacactta

SEQ ID NO: 156965 - DNA, 75 bp, synthetic construct
  source 1..75: mol_type = other DNA
ttgcggcgcttgccgatggcaccagctatacggttagcgcctccgcgcaggacagtgctggaaacagcgccacgg

SEQ ID NO: 156966 - DNA, 75 bp, synthetic construct
  source 1..75: mol_type = other DNA
gtggcgggcgaccgcctggtggtgaccatcgccgggcagcagtatgtcaccagcaccgatgccagcggcaactgg

SEQ ID NO: 156967 - DNA, 75 bp, synthetic construct
  source 1..75: mol_type = other DNA
accatcaacaccatcgccacggacgatattcttaacgccgccgaagcgggatcggcgctgaccatcagcggcacc

SEQ ID NO: 156968 - DNA, 75 bp, synthetic construct
  source 1..75: mol_type = other DNA
cgttaccgcgactgtccggtagcgaaacccgatgcttcccggcagtgacgttcacttcagcagagcgcactgtct

SEQ ID NO: 156969 - DNA, 75 bp, synthetic construct
  source 1..75: mol_type = other DNA
cggcaactgactttatcaccagcgatacctcgctcacgctgaccggttcgctgggggcggggcttaccagcggcg

SEQ ID NO: 156970 - DNA, 75 bp, synthetic construct
  source 1..75: mol_type = other DNA
caaaacgtggtggtcgataccaccagcccggaagcggcgaaaagcatcaccattaccggtatcagcgatgacacc

SEQ ID NO: 156971 - DNA, 75 bp, synthetic construct
  source 1..75: mol_type = other DNA
gattcttgacaatgtcgcctatgggctgatggtcaaaggcgtgaataaaaagcagcggcacgcaatggcgcaaga

SEQ ID NO: 156972 - DNA, 75 bp, synthetic construct
  source 1..75: mol_type = other DNA
aaatgccagtggctcgcattgagatcgaagttaaacaacaaaatggtattaaacgcatacccaagaaggttacta

SEQ ID NO: 156973 - DNA, 75 bp, synthetic construct
  source 1..75: mol_type = other DNA
cattttgcccagaattacaacggtaaaaaggcacggtttttcatctataactcaaaacaattgcaccagttagag

SEQ ID NO: 156974 - DNA, 75 bp, synthetic construct
  source 1..75: mol_type = other DNA
ggcgagcaggctgatacggcaacttacgatgacctcaaaaagggtaatgccttcgagttaaaagttaccaaaaca

SEQ ID NO: 156975 - DNA, 75 bp, synthetic construct
  source 1..75: mol_type = other DNA
ccttgcacataatcaaagaacgtatgaggagttggcttatattaatccattgttgattgaacatgatctcattat

SEQ ID NO: 156976 - DNA, 75 bp, synthetic construct
  source 1..75: mol_type = other DNA
cacattcggccttgcgcgaggggtgggataatccaaacgtatttgtcatgtgtatgttaaaacacagcgacaaca

SEQ ID NO: 156977 - DNA, 75 bp, synthetic construct
  source 1..75: mol_type = other DNA
ttgataagaaatcaaatcgtcttcagaaccccggctttaaagtccgtggtgaagatgccgggctatcagacgatg

SEQ ID NO: 156978 - DNA, 75 bp, synthetic construct
  source 1..75: mol_type = other DNA
ttgtcgggggaagaatatctggtcatctgagtgatggtcaaaataaaacaacgactaatagcttcgttaatcaga

SEQ ID NO: 156979 - DNA, 75 bp, synthetic construct
  source 1..75: mol_type = other DNA
attcgtatatgccggaggaagtgtaaccggaactgctatcaaaaacggtggtttgatacgggttgattcggatgc

SEQ ID NO: 156980 - DNA, 75 bp, synthetic construct
  source 1..75: mol_type = other DNA
gagggtataatgtgaatgtccaaacatggatatcccgaaatggaactaaaggtcaattctggctccagcctaata

SEQ ID NO: 156981 - DNA, 75 bp, synthetic construct
  source 1..75: mol_type = other DNA
tatcttatccagaacggctacgtcgataaaaaacgcaatatcacggagaagtaccatcaagccaagaaagacggc

SEQ ID NO: 156982 - DNA, 75 bp, synthetic construct
  source 1..75: mol_type = other DNA
gggatgccccttatgctaaatatctacgccgcattgcggccgataagacgcacagcggctacttttccattgaca

SEQ ID NO: 156983 - DNA, 75 bp, synthetic construct
  source 1..75: mol_type = other DNA
gatgcgactggtgatatttccgagatagcgctgcgccgcattcagatccgtgagacgatcaaggcgcactttgat

SEQ ID NO: 156984 - DNA, 75 bp, synthetic construct
  source 1..75: mol_type = other DNA
tcactggcagatttagccaaatatgctcaggaacataatttgtctccggtgcatcagagtggtcgccaggagcaa

SEQ ID NO: 156985 - DNA, 75 bp, synthetic construct
  source 1..75: mol_type = other DNA
gcatgataatattgtctctggttcagatagtataaaggttgtgtcagtgccgattatctgtaataaaaatagtag

SEQ ID NO: 156986 - DNA, 75 bp, synthetic construct
  source 1..75: mol_type = other DNA
tgttttttgttctttattcggtaagtgcttatggatctgattgtgcggttatatatagtctcccattaactctta

SEQ ID NO: 156987 - DNA, 75 bp, synthetic construct
  source 1..75: mol_type = other DNA
ctaatgatgggaatataaatctcaaattatctttacagactctaaatagtcccacaacttcatacattgaaggag

SEQ ID NO: 156988 - DNA, 75 bp, synthetic construct
  source 1..75: mol_type = other DNA
caatattaaatccgtattgaaaaaaacaaataatagccagccaggtaatttaagcggtgcggctgtaatggagat

SEQ ID NO: 156989 - DNA, 75 bp, synthetic construct
  source 1..75: mol_type = other DNA
tcatgttgtggcaattaataacaccagtgcatgcagttaatgataatacattttcttttttttggtcttcaaaca

SEQ ID NO: 156990 - DNA, 75 bp, synthetic construct
  source 1..75: mol_type = other DNA
aagtattaactgagtttgagtattacaaggctgcttatggtacaggaaaggaaaagtatgaatatataaatataa

SEQ ID NO: 156991 - DNA, 75 bp, synthetic construct
  source 1..75: mol_type = other DNA
tcacattgggtgtatggctctccgcgactggaacgctacaacggtctgccgtcaatggagattcagggggaagcc

SEQ ID NO: 156992 - DNA, 75 bp, synthetic construct
  source 1..75: mol_type = other DNA
tcatggcccaacggtcttgatcaccagtttcgatgagcaatcccagcggcgtaacagcctggtcaatgccggtgg

SEQ ID NO: 156993 - DNA, 75 bp, synthetic construct
  source 1..75: mol_type = other DNA
gacgcgcgtgaaatatcgtggaattgcggtagcggataccgctcgtgagcgcccggtgttgaccgtacagctgct

SEQ ID NO: 156994 - DNA, 75 bp, synthetic construct
  source 1..75: mol_type = other DNA
agttcagcagattttatcgtatacaatagtaaatatatgaaggagtatcatgagtcctgccttttttttaagaat

SEQ ID NO: 156995 - DNA, 75 bp, synthetic construct
  source 1..75: mol_type = other DNA
atgttgataagaaatctggaaaaaggacaatccttagttgataatggagtgctggactgggatctggacataaat

SEQ ID NO: 156996 - DNA, 75 bp, synthetic construct
  source 1..75: mol_type = other DNA
tcaaaaaatcagcgatgttgctttcggctccggaaggaatagcgcaggttacgccaaaaagcctgcaactgtccg

SEQ ID NO: 156997 - DNA, 75 bp, synthetic construct
  source 1..75: mol_type = other DNA
tgagattcgtaatggtggttgtatttccggagtggtaaataagataagtggcgatgagcaaagtaatgtatcaga

SEQ ID NO: 156998 - DNA, 75 bp, synthetic construct
  source 1..75: mol_type = other DNA
gtgacgtttatcgccgatgtcagcacggcgcagatcgcggatctggtggtcattaaggacggttcagaggcagac

SEQ ID NO: 156999 - DNA, 75 bp, synthetic construct
  source 1..75: mol_type = other DNA
gtctgctgtatgcgcttcccaacctgtttggtgaggatccggctgttcagatcactggtgcgcgcggagtcgccg

SEQ ID NO: 157000 - DNA, 75 bp, synthetic construct
  source 1..75: mol_type = other DNA
atccgtctctgagcgcttcggttactccggcggcgactggttccggcggtggcgttacctgggcaacgaaagacg

SEQ ID NO: 157001 - DNA, 75 bp, synthetic construct
  source 1..75: mol_type = other DNA
gctagatgcactaaataataaagatatctcttatgccaaagatttttcttatgctaaagatttctttttatacat

SEQ ID NO: 157002 - DNA, 75 bp, synthetic construct
  source 1..75: mol_type = other DNA
tgcgctgaaagatatccgcatcagcagcagtgaggggcgaatccttattagcgcaaaaaacgaaatcattctgac

SEQ ID NO: 157003 - DNA, 75 bp, synthetic construct
  source 1..75: mol_type = other DNA
ccgcctgagcctgaaccgcaaggaagtgaaaaaaagaaagtcccggcattattgataaagagttcttcaataaaa

SEQ ID NO: 157004 - DNA, 75 bp, synthetic construct
  source 1..75: mol_type = other DNA
cgcttggtacgaatttaagctggagaactcccgtcgccacaatagatggcagttatagccattctaaaaacgcct

SEQ ID NO: 157005 - DNA, 75 bp, synthetic construct
  source 1..75: mol_type = other DNA
taataacagtaatacagccagttatggccggtttaacagcggattaaatttatttagttggcagttacactctga

SEQ ID NO: 157006 - DNA, 75 bp, synthetic construct
  source 1..75: mol_type = other DNA
gctttttatacctcctataatttaagtcagtatcgctcttatgacagcaataataacagtaatacagccagttat

SEQ ID NO: 157007 - DNA, 75 bp, synthetic construct
  source 1..75: mol_type = other DNA
tcaatatgccattgttgctaaaataattaaatctagcaagggtgctattgatgcttttatagtcggagatcctaa

SEQ ID NO: 157008 - DNA, 75 bp, synthetic construct
  source 1..75: mol_type = other DNA
ttatatgtcatcggttcgagggccagaaaaaacctacatcttatttctgaaagagggagaagaagcaaatataaa

SEQ ID NO: 157009 - DNA, 75 bp, synthetic construct
  source 1..75: mol_type = other DNA
gtccggagatctgggaagataccgacggtcaggttgatgtatttattgctggcgttgggactggcggtacgctga

SEQ ID NO: 157010 - DNA, 75 bp, synthetic construct
  source 1..75: mol_type = other DNA
ggaatcatgccagacagacatggattgtggtttctgaattgtcgcggtgtcatggggttgttcttgcaaaaaaaa

SEQ ID NO: 157011 - DNA, 75 bp, synthetic construct
  source 1..75: mol_type = other DNA
tctcagaccaggcaacaattaatggttcggtgaataacaatggaagcgttgtctttaataacagcattataaacg

SEQ ID NO: 157012 - DNA, 75 bp, synthetic construct
  source 1..75: mol_type = other DNA
ttaattattatgactgcaatcattactacacatcgaaaggcttaaaattatctggttatatcaaaaagcatggag

SEQ ID NO: 157013 - DNA, 75 bp, synthetic construct
  source 1..75: mol_type = other DNA
atgtttgtcgccgatatcaggacggcgcagatcgcggatctggtggtcattaaggatggttcagaggcggacggt

SEQ ID NO: 157014 - DNA, 75 bp, synthetic construct
  source 1..75: mol_type = other DNA
acgcatcgcagctcacttcaaccgttgaaacaaataagtctaactacacggttggagagaccatcaccatcacgg

SEQ ID NO: 157015 - DNA, 75 bp, synthetic construct
  source 1..75: mol_type = other DNA
ccagccagacggcgggagccagtgcggtcaccgccagtatcaacagcagcaacgcgagccggaacgtgacgtttg

SEQ ID NO: 157016 - DNA, 75 bp, synthetic construct
  source 1..75: mol_type = other DNA
gatatttaataaattgtactttagtaaaacgcttgccgctgattgctcgtcatgcgcggagggtgatggttattg

SEQ ID NO: 157017 - DNA, 75 bp, synthetic construct
  source 1..75: mol_type = other DNA
gatatttaataacttgtactttagtgaaacgcctaccgctgatttctcgtcatgcgcggtgggcgatggttattg

SEQ ID NO: 157018 - DNA, 75 bp, synthetic construct
  source 1..75: mol_type = other DNA
agatattgataatgtaattgatgcccgtctacagaatggtggtgtatatcagacatcgattaataataaatcact

SEQ ID NO: 157019 - DNA, 75 bp, synthetic construct
  source 1..75: mol_type = other DNA
aaccaactggaagggcgcggcggcaacgacacgctcaacataggcaacggcggccatgacaccttgcactataaa

SEQ ID NO: 157020 - DNA, 75 bp, synthetic construct
  source 1..75: mol_type = other DNA
gcaggttaataccgcgctgccgggcgtcaccattaacgttgtcgcgagcgacgatattattaacgctgccgaagc

SEQ ID NO: 157021 - DNA, 75 bp, synthetic construct
  source 1..75: mol_type = other DNA
cggcggaaatcactgcgaccgtcactaatatcagcggtaacacaggcgacacctcccgtaccattaccgtcgaca

SEQ ID NO: 157022 - DNA, 75 bp, synthetic construct
  source 1..75: mol_type = other DNA
ccaccagcaacagcgcgaatttcacggtagacacctcagcacccgtggtcagcgttaacaccgtggcgggcgacg

SEQ ID NO: 157023 - DNA, 75 bp, synthetic construct
  source 1..75: mol_type = other DNA
tataccgatgatgtcgggcagcggcaggggacattaagcagttcgcaggccaccgacgacactacgccgctgctg

SEQ ID NO: 157024 - DNA, 75 bp, synthetic construct
  source 1..75: mol_type = other DNA
ggtgcgggtgctggatctggcggggaacaccggcccggtggtgtcgaaaacggtggtggtcgatacgattaaccc

SEQ ID NO: 157025 - DNA, 75 bp, synthetic construct
  source 1..75: mol_type = other DNA
cgacggcacctggaactacacggtgcgggtggtggatctggcggggaatgtcgggcagaccgcgacgcaaaacgt

SEQ ID NO: 157026 - DNA, 75 bp, synthetic construct
  source 1..75: mol_type = other DNA
cggtcaccatcgccaccgtggcgggtgacgatattatcaataacgccgagcagcttgccgggcagaccatcagcg

SEQ ID NO: 157027 - DNA, 75 bp, synthetic construct
  source 1..75: mol_type = other DNA
tgaatgtcgaatcgctcctgcctggggtgatcattaataccgtggcgggcgatgacattatcaacgccgctgaaa

SEQ ID NO: 157028 - DNA, 75 bp, synthetic construct
  source 1..75: mol_type = other DNA
aatattaacggcaacagcgcccaggccgatcgcgcgtatagcgtcgatgccaccgcgccgcttattactatcaac

SEQ ID NO: 157029 - DNA, 75 bp, synthetic construct
  source 1..75: mol_type = other DNA
gaagccagaccattaccgccagcctgagcgatcgcgcgggcaacagcgacagcgctacccataatgtgaccgttg

SEQ ID NO: 157030 - DNA, 75 bp, synthetic construct
  source 1..75: mol_type = other DNA
tggcgggcaacgttggcgcaaccggcagccagtcggcgcagattgacaccgttaacccggcgcaggtgctcacca

SEQ ID NO: 157031 - DNA, 75 bp, synthetic construct
  source 1..75: mol_type = other DNA
ggatgccagcggtaactggagcgtcggcgttccggcaagcgtcgtctcggcgctggcgaacggcacggtgaccat

SEQ ID NO: 157032 - DNA, 75 bp, synthetic construct
  source 1..75: mol_type = other DNA
aacggcaacaacgccactactacccacgcttacagcgtcgatgccagcgcgccaacggtggccattaacactatt

SEQ ID NO: 157033 - DNA, 75 bp, synthetic construct
  source 1..75: mol_type = other DNA
gatcaacacgacggaaaaaggatcgaatctggcgctttccggcaccagcgatcagcctgcgggcacggcgatcac

SEQ ID NO: 157034 - DNA, 75 bp, synthetic construct
  source 1..75: mol_type = other DNA
ggtcaccgtcacgctcaacggtcataactacagcgctaccaccgacgcggcgggcaactggaccttaaccgttcc

SEQ ID NO: 157035 - DNA, 75 bp, synthetic construct
  source 1..75: mol_type = other DNA
tgggcgttaacgacacctcggcgctggtcaacttctacggacttaacgcgggagaaacctacaacgcggtgctga

SEQ ID NO: 157036 - DNA, 75 bp, synthetic construct
  source 1..75: mol_type = other DNA
ttgcgggcgatgatgtagtgaacgcggcggaacacggcgcgtctttggtgatcagcggcaccaccaccgccccag

SEQ ID NO: 157037 - DNA, 75 bp, synthetic construct
  source 1..75: mol_type = other DNA
tgcccgccgccaacgtgggcgcactggctgacggcaacgctacggtcaccgccagcgtgaacgatgtcgccggta

SEQ ID NO: 157038 - DNA, 75 bp, synthetic construct
  source 1..75: mol_type = other DNA
caggtgatcatcaacacctttgcgggcgacaacattgtcaacaacgccgaagcggcggcagatcaaactctgagc

SEQ ID NO: 157039 - DNA, 75 bp, synthetic construct
  source 1..75: mol_type = other DNA
cgtgccggcttcggcggtcggcgcactgggcgaggcggtttattcgattagcgccagcgccaccgacagcgcggg

SEQ ID NO: 157040 - DNA, 75 bp, synthetic construct
  source 1..75: mol_type = other DNA
gaagccgggcagacggtgaccgtgacgctaaacggcgtcaattacagcggcaacgtgcaggcagacggaagctgg

SEQ ID NO: 157041 - DNA, 75 bp, synthetic construct
  source 1..75: mol_type = other DNA
caccacggttgccgcgggcggcacctgggggctgacaatcccagcagccgatctcgcaaccttgcctgacggcgc

SEQ ID NO: 157042 - DNA, 75 bp, synthetic construct
  source 1..75: mol_type = other DNA
tataacgacaccttctttgccaccgcaggtactgacacttacgacggctccggcggctgggtgtacagctccggc

SEQ ID NO: 157043 - DNA, 75 bp, synthetic construct
  source 1..75: mol_type = other DNA
tttaaagcgggtattaaacgcaagcaaaagcgggcaggacgtaagaatgaatacctttctctaatccttgctggc

SEQ ID NO: 157044 - DNA, 75 bp, synthetic construct
  source 1..75: mol_type = other DNA
aagatacacgatgctgcattgtgagccatgatttaaccgctctgggtgatttagcttatgaatggtcagagctga

SEQ ID NO: 157045 - DNA, 75 bp, synthetic construct
  source 1..75: mol_type = other DNA
gatcatcatgatttttcagttaggggtgaatggcgtaagtaaattcagaaaactactggcagcagcaaaggcggg

SEQ ID NO: 157046 - DNA, 75 bp, synthetic construct
  source 1..75: mol_type = other DNA
gccgaatgatagagcttttaagggaacaaaaagatttaattccagaaaagtatttacatcaatcatctataaaaa

SEQ ID NO: 157047 - DNA, 75 bp, synthetic construct
  source 1..75: mol_type = other DNA
tcgcgccgctatagctattggcgatacaatagatgattgtccgagttgtgcggctttgaatggtagaagttacca

SEQ ID NO: 157048 - DNA, 75 bp, synthetic construct
  source 1..75: mol_type = other DNA
gtggcagtgaatggctccagacgggaaaagccagagagcatggtgctgatgttctctcctgtagtgaaaatcctt

SEQ ID NO: 157049 - DNA, 75 bp, synthetic construct
  source 1..75: mol_type = other DNA
tgaacgctgtttcggcattctgaatgatgaggttattcataggcttattggaacaacacgaaggggaaagattgt

SEQ ID NO: 157050 - DNA, 75 bp, synthetic construct
  source 1..75: mol_type = other DNA
atgtgatcctgaaattgcatcaggtgtcagagtatttggaagaaccacttgtgtgatcttacccagcaatagtgg

SEQ ID NO: 157051 - DNA, 75 bp, synthetic construct
  source 1..75: mol_type = other DNA
aagaaagggatcgcgtcgaagtgtctccaactctcgaccacaaccggatgaacctggcccaactcgcctggtaca

SEQ ID NO: 157052 - DNA, 75 bp, synthetic construct
  source 1..75: mol_type = other DNA
gaatctatagattcactatggtataagcagacaaaatcacgtgtagatgatatgaataatcaattaaactggaag

SEQ ID NO: 157053 - DNA, 75 bp, synthetic construct
  source 1..75: mol_type = other DNA
tcaatggccaaacaaaatgctttgaacaaaagtgtagggatagagattttagtggtcgaaatgtggaagagttta

SEQ ID NO: 157054 - DNA, 75 bp, synthetic construct
  source 1..75: mol_type = other DNA
tcacgtctttactgattcgggagatacttgcacataatcagagaacgtatgaggaactggcttatatcaatccct

SEQ ID NO: 157055 - DNA, 75 bp, synthetic construct
  source 1..75: mol_type = other DNA
attattaacgctgccgaagcgggcaatgcacagactatcagcggccaggtgacgggcgcggcgcagggagatacg

SEQ ID NO: 157056 - DNA, 75 bp, synthetic construct
  source 1..75: mol_type = other DNA
gcccaggccgatcgcgcgtatagcgttgatgccaccgcgccgcttgtgaccatcaacaccatcgccagcgacgat

SEQ ID NO: 157057 - DNA, 75 bp, synthetic construct
  source 1..75: mol_type = other DNA
acggcgcgggcaacgtgcaggcgagtgtcagtaatattaacggcaacagcgcccaggccgatcgcgcgtatagcg

SEQ ID NO: 157058 - DNA, 75 bp, synthetic construct
  source 1..75: mol_type = other DNA
atacggtcagcgccagcgccaccagtgcagcaggcaacaccgccagcagccaggcgaatttactggtcgacagcg

SEQ ID NO: 157059 - DNA, 75 bp, synthetic construct
  source 1..75: mol_type = other DNA
gctacaccggcaacggcaaagccagctacgtcaacggcgtggcaacgctggatgcgcaggccggaaacatcggtg

SEQ ID NO: 157060 - DNA, 75 bp, synthetic construct
  source 1..75: mol_type = other DNA
tcggcaacgcataatctgacggtggaccttgccgctccggtcgtcaccatcaacacggtggcgggcgatgacatc

SEQ ID NO: 157061 - DNA, 75 bp, synthetic construct
  source 1..75: mol_type = other DNA
gcgtggcgcaaaccatcagcgggcaggtcactggagccaccgttggcgacacggtaaccgtcacgctgggcggta

SEQ ID NO: 157062 - DNA, 75 bp, synthetic construct
  source 1..75: mol_type = other DNA
actctctctgaatctccttcttatgatgtttatgaggaaatattcaagaaagctgttttcacacctgatgaatgt

SEQ ID NO: 157063 - DNA, 75 bp, synthetic construct
  source 1..75: mol_type = other DNA
caggcatgaatagctatataaaaattgagcagaccggaagtaataaatttaaagtcactgatatgtatcgtgagt

SEQ ID NO: 157064 - DNA, 75 bp, synthetic construct
  source 1..75: mol_type = other DNA
agccgatggcacatggagccttggcgttccggcggcaaatgtaggcaactggcctgcgggtacggtgaatatcac

SEQ ID NO: 157065 - DNA, 75 bp, synthetic construct
  source 1..75: mol_type = other DNA
cgtcacccttaatccggtagcgactgacgatattatcaacgctgccgaatcgggcgtggcgcagactaccagcgg

SEQ ID NO: 157066 - DNA, 75 bp, synthetic construct
  source 1..75: mol_type = other DNA
aattccgccagtcataatgtgctggtcaacagcgccttgcctgccgttaccattaacgcggtggcgactgacgat

SEQ ID NO: 157067 - DNA, 75 bp, synthetic construct
  source 1..75: mol_type = other DNA
ctaccactacgacagccagcaccgtctggtgttctacacgcggatacagcacggtgagcctccggtggagagccg

SEQ ID NO: 157068 - DNA, 75 bp, synthetic construct
  source 1..75: mol_type = other DNA
cagcatggagtatgacgccgccggtcgcatcaccgtgctgaccaacgagaacggcagccggagtgagtttaccta

SEQ ID NO: 157069 - DNA, 75 bp, synthetic construct
  source 1..75: mol_type = other DNA
tttatagattctttgggtttaaaattccatgttaacggtgatccaagtgattttaatcaggctgttgagtattta

SEQ ID NO: 157070 - DNA, 75 bp, synthetic construct
  source 1..75: mol_type = other DNA
ctaccactacgacagccagcaccgtctggtgttctacacgcggatacagcacggtgagccgctggtagagagccg

SEQ ID NO: 157071 - DNA, 75 bp, synthetic construct
  source 1..75: mol_type = other DNA
ctaccactacgacagccagcaccgtctggtgttctacacgcggatacagcacggtgagccgcaggttgagagccg

SEQ ID NO: 157072 - DNA, 75 bp, synthetic construct
  source 1..75: mol_type = other DNA
ctaccactacgacagccagcaccgtctggtgttctacacgcggatacagcacggtgagcctcgggtcgagagccg

SEQ ID NO: 157073 - DNA, 75 bp, synthetic construct
  source 1..75: mol_type = other DNA
cagggatggatacaaagacagcaagtgattacctgccacagacaaattggccaacaactcaattaccaccaggat

SEQ ID NO: 157074 - DNA, 75 bp, synthetic construct
  source 1..75: mol_type = other DNA
cacccgcgaccgcctgcaccgggaaacgctgcgcagcttcggccgttatgaactcaccaccgcttatacccctgc

SEQ ID NO: 157075 - DNA, 75 bp, synthetic construct
  source 1..75: mol_type = other DNA
catcagccatatcagcgaagggcaccgggtgacggtgcattacgggtatgatgagaaaggccgcctgaccggtga

SEQ ID NO: 157076 - DNA, 75 bp, synthetic construct
  source 1..75: mol_type = other DNA
tttccccgacacgctgcccgccggtacagaatacggtgccgataacggtatccggctggaggcggtgtggctgac

SEQ ID NO: 157077 - DNA, 75 bp, synthetic construct
  source 1..75: mol_type = other DNA
aggacatgtattgaaagcacaggattatacaagggctttacaggattggttggataagaatccaacagcatctcc

SEQ ID NO: 157078 - DNA, 75 bp, synthetic construct
  source 1..75: mol_type = other DNA
tagccaatctatttgcgaagataaagagttcgctggtttaatatgtaaggataatagtggcagatatttctcaac

SEQ ID NO: 157079 - DNA, 75 bp, synthetic construct
  source 1..75: mol_type = other DNA
gagagtgaggcatggcttcagcagtgcgggctgacggcggaacagatgaaaaaccagatggaggcggaatacatc

SEQ ID NO: 157080 - DNA, 75 bp, synthetic construct
  source 1..75: mol_type = other DNA
agggtgacatgacccgcaagggactggatattgtgcagggttcagcaggggtgctgataggcgcgccgacgggag

SEQ ID NO: 157081 - DNA, 75 bp, synthetic construct
  source 1..75: mol_type = other DNA
cattacgcgctggttttatgattcttcccgcagtggcctgccctgtgcggtggaagacggaaccggggtgaggcg

SEQ ID NO: 157082 - DNA, 75 bp, synthetic construct
  source 1..75: mol_type = other DNA
tacctgcaccagccataccgtctgccggggcagcagcatgatgaggaatcagggctgtactataaccggaaccgg

SEQ ID NO: 157083 - DNA, 75 bp, synthetic construct
  source 1..75: mol_type = other DNA
acggcgcattcagcctgacggcaccgcccgtacagggaatgccggtacagactgccctgcgcaccctgcacggcg

SEQ ID NO: 157084 - DNA, 75 bp, synthetic construct
  source 1..75: mol_type = other DNA
actactaagatagatccgttgggtctctccggagaagattccatagagcagtcaggtccatcttggttgattgct

SEQ ID NO: 157085 - DNA, 75 bp, synthetic construct
  source 1..75: mol_type = other DNA
gaactgaccagcacatacacccccgcaggccagttacagagccagcacctgaacagcctggtgtatgaccgtgac

SEQ ID NO: 157086 - DNA, 75 bp, synthetic construct
  source 1..75: mol_type = other DNA
cctcagcaaaagttaatggataaaaatcccggaaagttgattcttgaaataccagggctagagaaggatatgggc

SEQ ID NO: 157087 - DNA, 75 bp, synthetic construct
  source 1..75: mol_type = other DNA
cggaaaactcacgcagagtgaagatgaggggcttatcaccctctggcattacgatgcgtcagaccgtatcacccg

SEQ ID NO: 157088 - DNA, 75 bp, synthetic construct
  source 1..75: mol_type = other DNA
cgctacctctatgacccgctgggccgccggacgggaaaacgggtgtggcggcgggagcgtgacctgacggggtgg

SEQ ID NO: 157089 - DNA, 75 bp, synthetic construct
  source 1..75: mol_type = other DNA
accggtactacgatccgttgcaggggcggtatatcacccagaatccgatagggttgaaggggggaataaatctat

SEQ ID NO: 157090 - DNA, 75 bp, synthetic construct
  source 1..75: mol_type = other DNA
cggcccgctgccgtttattctttcccgcgcttacagcagctaccggaccaggacgcccgcgccggtgggggtgtt

SEQ ID NO: 157091 - DNA, 75 bp, synthetic construct
  source 1..75: mol_type = other DNA
aaaatttcatggctcttttaagccgaacagataagaaatatgagaataaagaagaggcaagggttattacaataa

SEQ ID NO: 157092 - DNA, 75 bp, synthetic construct
  source 1..75: mol_type = other DNA
acggtataccagccggggagcttcacgccgctcctgagaatcgaaacagagaatggcgaacaggcgaaggcgcgg

SEQ ID NO: 157093 - DNA, 75 bp, synthetic construct
  source 1..75: mol_type = other DNA
cccggcgcacggtgaacggtgaaccggcggagcagtggcagtatgacgaccacggctggctgacagaaatcagcc

SEQ ID NO: 157094 - DNA, 75 bp, synthetic construct
  source 1..75: mol_type = other DNA
tgctgatgaaaaaaaaactgataacattaagctgaatgttatttacacacaggatatccctgtcatcatcacgcc

SEQ ID NO: 157095 - DNA, 75 bp, synthetic construct
  source 1..75: mol_type = other DNA
tgcgaaaaaaagaacaactaaaccatcaaagagcatgggatatattatctgatacttatgatgatatgaagagat

SEQ ID NO: 157096 - DNA, 75 bp, synthetic construct
  source 1..75: mol_type = other DNA
ttacctgagcgaaaaattcatctttatcactgcgaccaccgggggctgccgctggcgctcatcagtaccgaagga

SEQ ID NO: 157097 - DNA, 75 bp, synthetic construct
  source 1..75: mol_type = other DNA
agggattacctatgctaacccggtgaacccgctgctgggtgcgaaggtgctgccgggcgagacggaccttgcgct

SEQ ID NO: 157098 - DNA, 75 bp, synthetic construct
  source 1..75: mol_type = other DNA
aagcagatatcgtcaggcttagaaatagtctatgccatggcaacattctggagttcattatgagtgttaaagtcg

SEQ ID NO: 157099 - DNA, 75 bp, synthetic construct
  source 1..75: mol_type = other DNA
cacgaactatggataccggcctgtacgagcttcctgaacgggattgaaacatcactcatggttacgttgaagtcg

SEQ ID NO: 157100 - DNA, 75 bp, synthetic construct
  source 1..75: mol_type = other DNA
gtacacgcgggaccggctgcaccgtgagacggcccgcagcttcggcggggaggcctgtgaacttgccaccgcctg

SEQ ID NO: 157101 - DNA, 75 bp, synthetic construct
  source 1..75: mol_type = other DNA
gacgggcttcgcagcagccgggagtatgatgagaagggaaggctgacggcggagacctcgcgcagcggtgagacg

SEQ ID NO: 157102 - DNA, 75 bp, synthetic construct
  source 1..75: mol_type = other DNA
tggtcagtcagaaggatgcgcaggggcgggagacccgttatgagtacagtaccgcaggcgacctcaccgctatca

SEQ ID NO: 157103 - DNA, 75 bp, synthetic construct
  source 1..75: mol_type = other DNA
accacaaccagttaacgtcagccaccgggcctgacgggctggaattgcgccgggaatatgatgaatccggccgtc

SEQ ID NO: 157104 - DNA, 75 bp, synthetic construct
  source 1..75: mol_type = other DNA
atcatgtgtatcagccgtaccgtctgccagggcagcagcatgatgaggaatcagggctgtactataaccgtcacc

SEQ ID NO: 157105 - DNA, 75 bp, synthetic construct
  source 1..75: mol_type = other DNA
gatagtcatggcgattatgttgatgaatttttttcaagtagcgataaaaatcttgtaagaagtaaagataataat

SEQ ID NO: 157106 - DNA, 75 bp, synthetic construct
  source 1..75: mol_type = other DNA
cgaggatgaggggctggtcacccactggcactatgacgaagcagaccgcatcacacagcgaacggtgaatggtga

SEQ ID NO: 157107 - DNA, 75 bp, synthetic construct
  source 1..75: mol_type = other DNA
cgcagcgaggatgaggggctggtcacccactggcactatgacgaagcagaccgcctcacgcaccgcaccgtgaag

SEQ ID NO: 157108 - DNA, 75 bp, synthetic construct
  source 1..75: mol_type = other DNA
gccggtgacctgaccgccgtcattgccccggacggcagcagaaacgggacacagtacgatgcgtggggaaaagcc

SEQ ID NO: 157109 - DNA, 75 bp, synthetic construct
  source 1..75: mol_type = other DNA
agatgacgtggagccgctacgggcagttgctggcgttcactgactgctcgggctaccagacccgttatgaatacg

SEQ ID NO: 157110 - DNA, 75 bp, synthetic construct
  source 1..75: mol_type = other DNA
cggacggagcattcactttgagccgctgctgccggggggggcggtgtacagccgcagcgagtcaatgtggctggt

SEQ ID NO: 157111 - DNA, 75 bp, synthetic construct
  source 1..75: mol_type = other DNA
aacaaggtacgaatttacaggttgtaaataccggcgcttacgtgattcgtctatctcctgaaatcatcatacctg

SEQ ID NO: 157112 - DNA, 75 bp, synthetic construct
  source 1..75: mol_type = other DNA
acagcctgctgtctgaccgcgattacacctggaacgacaacggcgaactcatccgcatcagcagcccgcgccaga

SEQ ID NO: 157113 - DNA, 75 bp, synthetic construct
  source 1..75: mol_type = other DNA
cggagaagttgcagcaggaaggaagcgaggacggccacggtgtggtgttcccggcagaacttgtgaggatgctgg

SEQ ID NO: 157114 - DNA, 75 bp, synthetic construct
  source 1..75: mol_type = other DNA
tggtgttctacacgcggatacagcatggcgagccgcaggtggagagccgctacctctacgacccgctgggccgcc

SEQ ID NO: 157115 - DNA, 75 bp, synthetic construct
  source 1..75: mol_type = other DNA
tctgcgggctactgtggagttccagtggatgggcagttgaccctttaggaacgattaatatcaatttgcacggta

SEQ ID NO: 157116 - DNA, 75 bp, synthetic construct
  source 1..75: mol_type = other DNA
tgttgaaaaaggttcgtcactttatggataccgtcagcccattccccggtggtaaacatggtctggctaaagtgt

SEQ ID NO: 157117 - DNA, 75 bp, synthetic construct
  source 1..75: mol_type = other DNA
atggaaacaaaagagattcggcgtttacgcctcaaagagtggttcaaagacaggactttgccgcctaaagagaaa

SEQ ID NO: 157118 - DNA, 75 bp, synthetic construct
  source 1..75: mol_type = other DNA
aattacaaattttgctgactggatcactgagtttggtaaggctgtccggacagataactggcgtctttttttgtt

SEQ ID NO: 157119 - DNA, 75 bp, synthetic construct
  source 1..75: mol_type = other DNA
ctccgggctttgtctgggaaaaagatagataccgcctttagggttcttggttatccggaaaataaacaggaattt

SEQ ID NO: 157120 - DNA, 75 bp, synthetic construct
  source 1..75: mol_type = other DNA
gctttggatgatcccgcaatggcacaaaccgtcgccatcgaattacgtaatagcgatcgctcccggctcgcactg

SEQ ID NO: 157121 - DNA, 75 bp, synthetic construct
  source 1..75: mol_type = other DNA
cagcattgaggtatcgcccgctgtcggtgcaattgtcactgcttccatttccgtggcagtcctgctgcgtattct

SEQ ID NO: 157122 - DNA, 75 bp, synthetic construct
  source 1..75: mol_type = other DNA
atgcctgatgcgacgcttatcgcgtcttatcaggccttgtattacccctccagtgaagaaaaaaccggccttttt

SEQ ID NO: 157123 - DNA, 75 bp, synthetic construct
  source 1..75: mol_type = other DNA
gggtgagccgcagtatatagattcactgcattctcaggggtcggcaagcagtatgtggatgcgtcatgtcggagg

SEQ ID NO: 157124 - DNA, 75 bp, synthetic construct
  source 1..75: mol_type = other DNA
aatccaaggtggcaaagatcttaggaataagtatttccacggtaaaaagacactgggataacggcatctttgggt

SEQ ID NO: 157125 - DNA, 75 bp, synthetic construct
  source 1..75: mol_type = other DNA
cgtgttatattgctaataatattattccggaaaatacatctgagatattcgagttttatgtaaatggcgctggtg

SEQ ID NO: 157126 - DNA, 75 bp, synthetic construct
  source 1..75: mol_type = other DNA
aaagatgaattaaattatataattttaaatagaaacaatctttcatatcgtgattgcctacttgctcttaataaa

SEQ ID NO: 157127 - DNA, 75 bp, synthetic construct
  source 1..75: mol_type = other DNA
cagcccgaacggtcagtcgtgattgtcggtgccggaactattggtctggaactggctgccagcgccacgcagcgc

SEQ ID NO: 157128 - DNA, 75 bp, synthetic construct
  source 1..75: mol_type = other DNA
ggtgccggaactattggtctggaactggctgccagcgccacgcagcgcagcgcagcgcagcgcagcgcagcgcag

SEQ ID NO: 157129 - DNA, 75 bp, synthetic construct
  source 1..75: mol_type = other DNA
tgggatcagctttttatagcaaccggcgcggcagcccgaccgctgccgttgcttgatgcactgggagaacgctgc

SEQ ID NO: 157130 - DNA, 75 bp, synthetic construct
  source 1..75: mol_type = other DNA
cgcacgatgcactatttaaatcttttctcacacaccctgacaccgcgcgggattttatggagatccacttaccaa

SEQ ID NO: 157131 - DNA, 75 bp, synthetic construct
  source 1..75: mol_type = other DNA
aaaaaagaattaggctgggaggtttcccttggaacgtcaatgccagccaagttcggccctgaatatatatcaatg

SEQ ID NO: 157132 - DNA, 75 bp, synthetic construct
  source 1..75: mol_type = other DNA
tgttatctgttatggttgcgacgctcccgccttacgctatatccgctgaagatatttcccccgaatctctttcgg

SEQ ID NO: 157133 - DNA, 75 bp, synthetic construct
  source 1..75: mol_type = other DNA
tcactggtttaccgcaacgtcaacgagcatttatctaattgtaaatactcgtaaaaatgatatagtgcttgtttc

SEQ ID NO: 157134 - DNA, 75 bp, synthetic construct
  source 1..75: mol_type = other DNA
aggaagtacggaaggttattcttggtttgtcacctacttacaaaactattacattggtaataacataacaacacc

SEQ ID NO: 157135 - DNA, 75 bp, synthetic construct
  source 1..75: mol_type = other DNA
tcccgcttatgatgcgtaaagcgtctgagggggtcactgaccgctattctattggccgtttactttccccacgcg

SEQ ID NO: 157136 - DNA, 75 bp, synthetic construct
  source 1..75: mol_type = other DNA
gcggcaaccgtcatgggccgtaatgcaccaccgcccgtacaacgctatcttttgcagcgccatcagcaggctggt

SEQ ID NO: 157137 - DNA, 75 bp, synthetic construct
  source 1..75: mol_type = other DNA
acaaacgaaatcaatagattggctggatacagaaaaaataaaactaatatatataggatatttggaatctcaatt

SEQ ID NO: 157138 - DNA, 75 bp, synthetic construct
  source 1..75: mol_type = other DNA
cattgaagaaaaacttaataaattagttatcaaactcaaaagttgtattgattgtgcttacattgttaaaatagg

SEQ ID NO: 157139 - DNA, 75 bp, synthetic construct
  source 1..75: mol_type = other DNA
ttaatgaaccgctggcttcatactgcccgaaggtctgctgatagtcataatactgcactgttcagctggcaggag

SEQ ID NO: 157140 - DNA, 75 bp, synthetic construct
  source 1..75: mol_type = other DNA
tacacagttatcactagtaaatcttcaatgcaggaagtcattaaagatatctatgtgcgaccattgaagattatt

SEQ ID NO: 157141 - DNA, 75 bp, synthetic construct
  source 1..75: mol_type = other DNA
ggatgggatgctgctggacacgattccagctcgacctgcaactccggatcttccttctgctgtgactgaggctat

SEQ ID NO: 157142 - DNA, 75 bp, synthetic construct
  source 1..75: mol_type = other DNA
ctgttggattctgatttaggcagcagcttaccgttaagccaggctgattttggcttatggtttaaccataaaggt

SEQ ID NO: 157143 - DNA, 75 bp, synthetic construct
  source 1..75: mol_type = other DNA
ggctaacacctacgatgtatcaatcacttctgtaagcactgccgagcatgcagcaaggttaatattgcaaactgc

SEQ ID NO: 157144 - DNA, 75 bp, synthetic construct
  source 1..75: mol_type = other DNA
ttccggatgggttcctcctatctcaggcattacattgagcactcctcgacaagccgtgtctgctagtgttacagg

SEQ ID NO: 157145 - DNA, 75 bp, synthetic construct
  source 1..75: mol_type = other DNA
catcgcggaggatgcgcactatgtctaccgccacgatgaatacggcaggctgacggagaagacggaccgcatccc

SEQ ID NO: 157146 - DNA, 75 bp, synthetic construct
  source 1..75: mol_type = other DNA
ggatactcggctggtcagagcgggtgccgggtgctgaggacgtactgccagcgccgctgccgccgtaccgggtgc

SEQ ID NO: 157147 - DNA, 75 bp, synthetic construct
  source 1..75: mol_type = other DNA
ccccgacacactgcccggtaccgaatacggccccgacaggggcatccgtctttcggcggtgtggctgatgcacga

SEQ ID NO: 157148 - DNA, 75 bp, synthetic construct
  source 1..75: mol_type = other DNA
cgtgaatcccgggcacacaaggaaagttctcatggaaaattttcaacgaaatcgactgaagccaatggcctacgg

SEQ ID NO: 157149 - DNA, 75 bp, synthetic construct
  source 1..75: mol_type = other DNA
gaattacaggccccagacactgggtacttatgggagacgcaggacttgatgaaggctcgaatttcgaggcaattc

SEQ ID NO: 157150 - DNA, 75 bp, synthetic construct
  source 1..75: mol_type = other DNA
ccagcggcgcgtcagggagatatgactcagtatggcggtcccattgtccagggttcggcaggtgtaagaattggc

SEQ ID NO: 157151 - DNA, 75 bp, synthetic construct
  source 1..75: mol_type = other DNA
taggcagtagtttgcctttaagccaggctgattttggcctgtggtttaaccataaaggtcgacattattttagcg

SEQ ID NO: 157152 - DNA, 75 bp, synthetic construct
  source 1..75: mol_type = other DNA
cacatggggacataacaccggtgacgagatcttacgtaaagtctcgcaggcgttttacgacaatgttcgcagcag

SEQ ID NO: 157153 - DNA, 75 bp, synthetic construct
  source 1..75: mol_type = other DNA
gtggaaaagaccaaactgaaagccgcaaatggcgatgatattcccctttctctgtccattggcgtcgccatgttt

SEQ ID NO: 157154 - DNA, 75 bp, synthetic construct
  source 1..75: mol_type = other DNA
cgaaatattatgacccgcatgctgtccccagaaataatgattatctggtaacagatcagtggtctggccccggag

SEQ ID NO: 157155 - DNA, 75 bp, synthetic construct
  source 1..75: mol_type = other DNA
tgaataacagaagtctgcgggtgaaatttttattacagataagaaagacggcagtaaaatctggacccgttttgc

SEQ ID NO: 157156 - DNA, 75 bp, synthetic construct
  source 1..75: mol_type = other DNA
tcggattattccgccgcagaaaaacttcaggtctaccatttctcgattaacagtattgatatcgcgatggaagtg

SEQ ID NO: 157157 - DNA, 75 bp, synthetic construct
  source 1..75: mol_type = other DNA
tcaggatttcgacggtattttcaatcaaaccatgcgtaacaccaggaatttgaataacagaagtttgcgggtgaa

SEQ ID NO: 157158 - DNA, 75 bp, synthetic construct
  source 1..75: mol_type = other DNA
ttgataaattcaaagagatcaatgatacatggggacataacaccggcgacgaaattctgcgtaaagtctcgcagg

SEQ ID NO: 157159 - DNA, 75 bp, synthetic construct
  source 1..75: mol_type = other DNA
atgctcattatctgagtatcgagttttatcgaattgtccgcatcgacccgcatgccgaagaattcttgagtaatg

SEQ ID NO: 157160 - DNA, 75 bp, synthetic construct
  source 1..75: mol_type = other DNA
tgattatgttttccgctacgggggcgatgaatttatcattgttttgactgaagcttctgaaaacgaaacgttacg

SEQ ID NO: 157161 - DNA, 75 bp, synthetic construct
  source 1..75: mol_type = other DNA
cggtttatggtttaatcacaagggccgccattattttagcggtattgctgaagtgggacatatctctcgtctggt

SEQ ID NO: 157162 - DNA, 75 bp, synthetic construct
  source 1..75: mol_type = other DNA
gaaaacgccgaagaagaaaaagaacgacaaatagcctcactactttcatgggaaatagaaattatctacaaagtt

SEQ ID NO: 157163 - DNA, 75 bp, synthetic construct
  source 1..75: mol_type = other DNA
atgttagctcgtttagggaaggtaaccgtgaaggttactggcaacccaagcaccgcacatgttgctagctttatc

SEQ ID NO: 157164 - DNA, 75 bp, synthetic construct
  source 1..75: mol_type = other DNA
ttctgagaaaatcgaccttaatggaaaagaacaaatcgagacatctgatatagatattgatacaggagtaaaaat

SEQ ID NO: 157165 - DNA, 75 bp, synthetic construct
  source 1..75: mol_type = other DNA
aatgtgggtgttcaggtcggtgacaaggggtacagcgacacctcagccatgctgggtgtgaagtacactttctga

SEQ ID NO: 157166 - DNA, 75 bp, synthetic construct
  source 1..75: mol_type = other DNA
tggaaatcaaaaggcctgactgcttcgctggaaactggttatacctggaaagctggtgagttcagcggcagtcat

SEQ ID NO: 157167 - DNA, 75 bp, synthetic construct
  source 1..75: mol_type = other DNA
ggcaaaaacctggtcgttaacctcggcaactcgattcagtgtagaaatgatgcaagcaccgtatataccgaccct

SEQ ID NO: 157168 - DNA, 75 bp, synthetic construct
  source 1..75: mol_type = other DNA
gtgaacgttatgccaggggggacactgcgtgtcgctaaaaccactgtcggcggtaacctggagaatggtggcacg

SEQ ID NO: 157169 - DNA, 75 bp, synthetic construct
  source 1..75: mol_type = other DNA
cgaaccagaaagggatacgtgcggaatgtgccgattgccatattccaaagtcagggatggattatttatttgcta

SEQ ID NO: 157170 - DNA, 75 bp, synthetic construct
  source 1..75: mol_type = other DNA
gaacgcaccggaattaatttaccggtggtagatttaggctgccgccgctttccgctattacatggggttcgccaa

SEQ ID NO: 157171 - DNA, 75 bp, synthetic construct
  source 1..75: mol_type = other DNA
gtatcagccggaaagcgacgttattgcagaattaagccgccgtttcagctgcacactggagcactggtatgccga

SEQ ID NO: 157172 - DNA, 75 bp, synthetic construct
  source 1..75: mol_type = other DNA
aacagggctgtgatttctgtggctggcagttgtatgagcgtggagagctcgttgatgtgctgtgggggggaactt

SEQ ID NO: 157173 - DNA, 75 bp, synthetic construct
  source 1..75: mol_type = other DNA
gcaagtgatagtaatacagttattcagggtgaaaacatatctgtacacacatcgggcaacggtgcagattcagta

SEQ ID NO: 157174 - DNA, 75 bp, synthetic construct
  source 1..75: mol_type = other DNA
gtttcaatccaaaccactggctatgctgcgaaagggatatacgttgcagccatctctccttctgattcatcccct

SEQ ID NO: 157175 - DNA, 75 bp, synthetic construct
  source 1..75: mol_type = other DNA
attgaaaactcgagtggttcaatcgaaggaggaaatattataacctctggcgataatgccagaggggttgtcatt

SEQ ID NO: 157176 - DNA, 75 bp, synthetic construct
  source 1..75: mol_type = other DNA
ggtgctctacgaagtggaccttatcaacatggtggaaattgtggacggtgtccgggcgcgaagtgctgattttcg

SEQ ID NO: 157177 - DNA, 75 bp, synthetic construct
  source 1..75: mol_type = other DNA
acgcgaagctgaccatcaattgtgaggtgctctacgaagtggaccttatcaacatggtggaaattgtggacggtg

SEQ ID NO: 157178 - DNA, 75 bp, synthetic construct
  source 1..75: mol_type = other DNA
gcagggcgattacctggtgggtacggatgaaaacgtgctggtacttaatcgtacttatgccaaccggggcaacgc

SEQ ID NO: 157179 - DNA, 75 bp, synthetic construct
  source 1..75: mol_type = other DNA
aggacggcgacagtcaccgctttaccttggcagatcgcggagcctatacgggcgtaattgccagctggttgcata

SEQ ID NO: 157180 - DNA, 75 bp, synthetic construct
  source 1..75: mol_type = other DNA
attttcgagaaacgctgaatacccgccgtgaaaagtcgtggcacaagaccacagtcggggaagtggtgaaggaaa

SEQ ID NO: 157181 - DNA, 75 bp, synthetic construct
  source 1..75: mol_type = other DNA
acggcctgcacctgccgctgctggcgggaacggaagtcagcatcgcctttgaggaaggcaacccggaccgacctt

SEQ ID NO: 157182 - DNA, 75 bp, synthetic construct
  source 1..75: mol_type = other DNA
cgatcaagacgatatttggtttgaaactaaaatatatgatgccatcaataggatgcatgattatgatgcatattc

SEQ ID NO: 157183 - DNA, 75 bp, synthetic construct
  source 1..75: mol_type = other DNA
ccgcaggcggagtatttattaaaaaaggctcgcggtttgcgcaattaaccttaaaaaaacgcgactcattaaatg

SEQ ID NO: 157184 - DNA, 75 bp, synthetic construct
  source 1..75: mol_type = other DNA
cgggtatctcacctactatggcacacagtatcccttccctcttaaatcggcaacggacgctgttaatcatacgtg

SEQ ID NO: 157185 - DNA, 75 bp, synthetic construct
  source 1..75: mol_type = other DNA
aggaatgcttcagcaatgcttcagcgtggtttgaaagcagtaaagctatcatggcagaatcatttgcaacaggtt

SEQ ID NO: 157186 - DNA, 75 bp, synthetic construct
  source 1..75: mol_type = other DNA
actacggcggatattcaacgattcaaaaccgcttattacgactaccgctatcacgttcaggatgcattctacagt

SEQ ID NO: 157187 - DNA, 75 bp, synthetic construct
  source 1..75: mol_type = other DNA
agcagtatcccagtttgagcgggcaggaatgccgagaaaagcaacattgaaaaagctggccgaaatttacaattg

SEQ ID NO: 157188 - DNA, 75 bp, synthetic construct
  source 1..75: mol_type = other DNA
tactgatttacgcgtgaatcttaactttatatatccactatcaacctcatcggttcatattgaagtgcaagatgg

SEQ ID NO: 157189 - DNA, 75 bp, synthetic construct
  source 1..75: mol_type = other DNA
atgaaatcattgctcgtgatgagattgatcgacttttctctccaaaggtattcactaatgttaaacgacatacaa

SEQ ID NO: 157190 - DNA, 75 bp, synthetic construct
  source 1..75: mol_type = other DNA
tattcctcaaagtatctgaaaaaatagcagttaagtattctgatgttgttattgctgataatcaagctatagggg

SEQ ID NO: 157191 - DNA, 75 bp, synthetic construct
  source 1..75: mol_type = other DNA
gtcaatccattaccgacccgtgtctgggctgggaagataccgaacgcctggtcgaaaaacttgcctctgcggtag

SEQ ID NO: 157192 - DNA, 75 bp, synthetic construct
  source 1..75: mol_type = other DNA
caagatagcttgaatggattaatctccttcgctcgcttttttttaacaaaagttgagctggttgtcattgaatca

SEQ ID NO: 157193 - DNA, 75 bp, synthetic construct
  source 1..75: mol_type = other DNA
tgaaaccaaccttgcaaatacggattaccgggaaaaccggtccatgatactgtccggtttatcactttgggagaa

SEQ ID NO: 157194 - DNA, 75 bp, synthetic construct
  source 1..75: mol_type = other DNA
cgggttacataaggctccctcagactggatactccacaaatgaaatatacctcggggtgaagtggcacactgaat

SEQ ID NO: 157195 - DNA, 75 bp, synthetic construct
  source 1..75: mol_type = other DNA
gttgccgaaggcagacagttgcaagatgtcattccgggggaatttctttctccagccacctttaccatcacttat

SEQ ID NO: 157196 - DNA, 75 bp, synthetic construct
  source 1..75: mol_type = other DNA
cgcgccgtgaatttactcgcgacagcatcgaagagaaagtcgctgccaccacgcaggcacaatggccggttcatg

SEQ ID NO: 157197 - DNA, 75 bp, synthetic construct
  source 1..75: mol_type = other DNA
gttttggttttgtaggtgcatatagcaaatctgatcgtactaatgaacaagttggtgacggctacggtgataacg

SEQ ID NO: 157198 - DNA, 75 bp, synthetic construct
  source 1..75: mol_type = other DNA
tgttgtcctaattctcggggtttcagggtgtgtttttctaccaatttacagatttttttcgtcatcaaaggttat

SEQ ID NO: 157199 - DNA, 75 bp, synthetic construct
  source 1..75: mol_type = other DNA
atgccgatgaaacacaaagctgtcattgagaaaatcaagcgacaactacgcgaagaaatcgaagatattaaccgc

SEQ ID NO: 157200 - DNA, 75 bp, synthetic construct
  source 1..75: mol_type = other DNA
aagcgaaaggccatccgtcaggatggcctttttgcattggcgcagaaaaaaatgccggatgcgacgctggcgcgt

SEQ ID NO: 157201 - DNA, 75 bp, synthetic construct
  source 1..75: mol_type = other DNA
ggaaaatacgccgggctatttgcgtaaaaccgtaagaatggatgaagccggacgccggattactgaatatcaggg

SEQ ID NO: 157202 - DNA, 75 bp, synthetic construct
  source 1..75: mol_type = other DNA
cacaaaagcagatgaggacaacgcgaatcaaaacatcgtcgcgtcagtcgaagatgaatcctcactggcagaagc

SEQ ID NO: 157203 - DNA, 75 bp, synthetic construct
  source 1..75: mol_type = other DNA
attgagccacatatccagacaaaattattacgagtactacaggaaaaacaggtaatgcgtcttggcagcgatacg

SEQ ID NO: 157204 - DNA, 75 bp, synthetic construct
  source 1..75: mol_type = other DNA
caactgtccggcttcttaggcggcaaaccgggcgatagtggcatggctggcgatgggctggtggacggaagtcgc

SEQ ID NO: 157205 - DNA, 75 bp, synthetic construct
  source 1..75: mol_type = other DNA
acacccggacagcacgctcacggcgtggccggataaccgcatcgcagaggatgcgcactatgtttaccactatga

SEQ ID NO: 157206 - DNA, 75 bp, synthetic construct
  source 1..75: mol_type = other DNA
acgatcaatgtaccgacggattcaaagtcagctcctcgttttataccgaagaaacgttggttgaagaagataaag

SEQ ID NO: 157207 - DNA, 75 bp, synthetic construct
  source 1..75: mol_type = other DNA
tatcaaagtacgcttagcgactatatcgtcgtgcaatttgacggtgccggtagcgttaacgaagaccctaccgcc

SEQ ID NO: 157208 - DNA, 75 bp, synthetic construct
  source 1..75: mol_type = other DNA
gttgaagtctgcgctggcgctgaactgctattttggctcatctggcggatctgtagaaaaatcagaagctattca

SEQ ID NO: 157209 - DNA, 75 bp, synthetic construct
  source 1..75: mol_type = other DNA
gctacgtttactggatgaaaacgcctcgccttataccttcaataaatatgctgaatacgccgatttcaccagcga

SEQ ID NO: 157210 - DNA, 75 bp, synthetic construct
  source 1..75: mol_type = other DNA
acgaaaaaacctatacggctgaactttcgtccattgcaggtacccccatcgaggctgggcccttcgatacagtgg

SEQ ID NO: 157211 - DNA, 75 bp, synthetic construct
  source 1..75: mol_type = other DNA
tcgtcatctgtctgttatttctgccgttgaagtctgcgcttgccctgaactgctactttggttcatccggtggtt

SEQ ID NO: 157212 - DNA, 75 bp, synthetic construct
  source 1..75: mol_type = other DNA
atgcagggtaataatgttgctgctggtgcagcaggcgcagcaacgggggagctggcagcccgagcgattgccgga

SEQ ID NO: 157213 - DNA, 75 bp, synthetic construct
  source 1..75: mol_type = other DNA
tgctctggcattgctgacgtcgatcccggcagaaaaggctttatcactggttggtaaaggcctgaaggtcattga

SEQ ID NO: 157214 - DNA, 75 bp, synthetic construct
  source 1..75: mol_type = other DNA
gagaacagagtgggagagacctttaataaaaccgtgacaaatggggactcttatcctgctcactgccattgtgat

SEQ ID NO: 157215 - DNA, 75 bp, synthetic construct
  source 1..75: mol_type = other DNA
gtcgcatcaatcaagcattgggcactcgcctgtgaagtaatgcgagaagaggatggtaaattcaaacttacagaa

SEQ ID NO: 157216 - DNA, 75 bp, synthetic construct
  source 1..75: mol_type = other DNA
gacgataaaaccattccgtgcatcaatgatttactggtcgataaatttggcttaaacctgaagtccgtcagtcgt

SEQ ID NO: 157217 - DNA, 75 bp, synthetic construct
  source 1..75: mol_type = other DNA
gacgataagtacgctggcaaccgtgtcagcagggctggccggcggtcttaccggaaacagcaccgcatcagcagc

SEQ ID NO: 157218 - DNA, 75 bp, synthetic construct
  source 1..75: mol_type = other DNA
ctgaaatcagagctgcaaagctcactaatgcaatgggacttcgcagccaaggataaggctgaccgtattctgaat

SEQ ID NO: 157219 - DNA, 75 bp, synthetic construct
  source 1..75: mol_type = other DNA
gataccacacaaggttttcgtgcctatagcagcaaattgctgctagatggccgtgtggctcctttccgtaatatc

SEQ ID NO: 157220 - DNA, 75 bp, synthetic construct
  source 1..75: mol_type = other DNA
tgatggaaatgacaaagatgatcctgtggctattccacaatttatcacagctctaaaagatggagtgcatttcgt

SEQ ID NO: 157221 - DNA, 75 bp, synthetic construct
  source 1..75: mol_type = other DNA
gtgatgaagcggcgctggcgcgcggtgtctataacacttatatcgaagataatctgcgctactcgcaaaacgcgc

SEQ ID NO: 157222 - DNA, 75 bp, synthetic construct
  source 1..75: mol_type = other DNA
atgggcttctccagtgaaccgtctgaagtgattcagcaaggaattaccggaaaagaactctctattttctcttca

SEQ ID NO: 157223 - DNA, 75 bp, synthetic construct
  source 1..75: mol_type = other DNA
tgacctgcgggatcagattgccatgaaggttgagctggcagagtcgccagaacaggaggacagtttgtcacaaga

SEQ ID NO: 157224 - DNA, 75 bp, synthetic construct
  source 1..75: mol_type = other DNA
ttacacagttaacccgatcaccccggaaatggtgggaacccctgaagccgccaaacctgaagtaaccaaaccaac

SEQ ID NO: 157225 - DNA, 75 bp, synthetic construct
  source 1..75: mol_type = other DNA
tcacgcgacagcagcggtcagctcagtacccaggccaaccgttacgttgcccagctcggtggggacttaacgcaa

SEQ ID NO: 157226 - DNA, 75 bp, synthetic construct
  source 1..75: mol_type = other DNA
gcagcgtcggatagtgagggggccgaagcaatatcgcaggtagttctaaacaacacaacgctcaaaatggtgaaa

SEQ ID NO: 157227 - DNA, 75 bp, synthetic construct
  source 1..75: mol_type = other DNA
ggcgcgttaagagcgcccttttaaactggcttggtgttcccataggcctgactaccggtgaattctggcaggagt

SEQ ID NO: 157228 - DNA, 75 bp, synthetic construct
  source 1..75: mol_type = other DNA
atggttcgtccggacgctccgatgaaacctggccaggaccacgacgatatcatcaacgccattaccgctggcgat

SEQ ID NO: 157229 - DNA, 75 bp, synthetic construct
  source 1..75: mol_type = other DNA
cacccacggtcgctttgtcgtggtggttggcgagcgcagcctgcgcagtgaagaagcggcccgaatgggggggcc

SEQ ID NO: 157230 - DNA, 75 bp, synthetic construct
  source 1..75: mol_type = other DNA
agtctggagttgcgctggtagcactggaagtgaggcctctgccgcccgttccacgttgcagctaccacatgattg

SEQ ID NO: 157231 - DNA, 75 bp, synthetic construct
  source 1..75: mol_type = other DNA
gagagaacacaggctgtgtatccgtgccatcgggagcgaaagagttggaggtggatgctgacgaagagccgactg

SEQ ID NO: 157232 - DNA, 75 bp, synthetic construct
  source 1..75: mol_type = other DNA
gctcccggcgcgggtcaccagcacggtgaagaacgacatctacgcccatatcgacaaggacgggcgctaccgggt

SEQ ID NO: 157233 - DNA, 75 bp, synthetic construct
  source 1..75: mol_type = other DNA
gtctgcgtgctatccaaggcgcaagtggcaactctggtaacggcagttcgggcaagattgaaatcaagggcacgc

SEQ ID NO: 157234 - DNA, 75 bp, synthetic construct
  source 1..75: mol_type = other DNA
acgcgctggagaacggcaaatggccggagcgcggcgcagaagcggaccgcctcttcaaccgctaccacggcaggc

SEQ ID NO: 157235 - DNA, 75 bp, synthetic construct
  source 1..75: mol_type = other DNA
atgtttactacatctcaaagcaatgaagaggtaacaaacgaagttcgttgcttcaaccaatattatggtgccggg

SEQ ID NO: 157236 - DNA, 75 bp, synthetic construct
  source 1..75: mol_type = other DNA
ttcgccaactggcaaaggcaattgctaaggaagttcttcaggcaaacggcccgcttattcggaaggtcattgatg

SEQ ID NO: 157237 - DNA, 75 bp, synthetic construct
  source 1..75: mol_type = other DNA
atgtttaaaaatgaaataaataaagaagatatattgaaactgatggctgcaagagaaaaatggacgggggagtca

SEQ ID NO: 157238 - DNA, 75 bp, synthetic construct
  source 1..75: mol_type = other DNA
caagatccaaacgctgcaatatctgcaatattaggcagaaacatggtgtattacacaaatcttattgcaacagaa

SEQ ID NO: 157239 - DNA, 75 bp, synthetic construct
  source 1..75: mol_type = other DNA
actagcgatagaatgctacaacaaatcaacgcttaaaaaagagattaatgagcgtctcagtactaatggttcata

SEQ ID NO: 157240 - DNA, 75 bp, synthetic construct
  source 1..75: mol_type = other DNA
agcaagttgttgcgacattatttaatcaggtgttcgggccaaatgctttgattgcggctagatatttaaagttac

SEQ ID NO: 157241 - DNA, 75 bp, synthetic construct
  source 1..75: mol_type = other DNA
cggtgatgatctggtcaataaaagtatccgtgaatatttcgatggcagcgacgagtttaatcgccgcttagacga

SEQ ID NO: 157242 - DNA, 75 bp, synthetic construct
  source 1..75: mol_type = other DNA
cccgccattgccgggtggcgatgtggctatgcgccagtcgcaatacgtgccgatcaccgatttaggaaccaacaa

SEQ ID NO: 157243 - DNA, 75 bp, synthetic construct
  source 1..75: mol_type = other DNA
tcacaccaaagttccgcctcaagggattgcccaggtgctgcaaaaatatttgcccgaaggcggactggtgcttga

SEQ ID NO: 157244 - DNA, 75 bp, synthetic construct
  source 1..75: mol_type = other DNA
aaggtgcgcgaaatggctccggcgatggcaatactggatggcgtacagtcacagatgaagtcgctgtccactgat

SEQ ID NO: 157245 - DNA, 75 bp, synthetic construct
  source 1..75: mol_type = other DNA
aagttggtgatactgacttattcagtgcggtcatgagtgcctacaggacgcaactgcagaataccacctatacac

SEQ ID NO: 157246 - DNA, 75 bp, synthetic construct
  source 1..75: mol_type = other DNA
ttatctcacaacctatggatgggtaacgcttggcgcgtggtatcagacctttgccactgctaaccagcgtctggc

SEQ ID NO: 157247 - DNA, 75 bp, synthetic construct
  source 1..75: mol_type = other DNA
tctctcatcgtcacaggacgaagcccgttacgaagtgcgccttgaaccccgtatggcgctgcttacccgcagccg

SEQ ID NO: 157248 - DNA, 75 bp, synthetic construct
  source 1..75: mol_type = other DNA
atgaaacattatttagaaaaaaattacccacgaaagagcagagcaacagagtttctgtttttcattctgtttata

SEQ ID NO: 157249 - DNA, 75 bp, synthetic construct
  source 1..75: mol_type = other DNA
ttgtaatgacttaagaaagtccattcttgtgtcagtgctaataatgttgtgtatgctttttggtaatgctgccaa

SEQ ID NO: 157250 - DNA, 75 bp, synthetic construct
  source 1..75: mol_type = other DNA
ttagctatgctgcacaaatatatgtcagtgctgtcgggattttaatactccctctgtacatcaagtacatgggag

SEQ ID NO: 157251 - DNA, 75 bp, synthetic construct
  source 1..75: mol_type = other DNA
ctccgtttggcgcagaagtaaaaaatgataacgagcagacagtgggccttgtcgatgatgacggcaatgtttatc

SEQ ID NO: 157252 - DNA, 75 bp, synthetic construct
  source 1..75: mol_type = other DNA
tataaacatggcaataaagatttgaatgccggaaccttcagtgcttcggtcacaatgagcatcagttacctgtaa

SEQ ID NO: 157253 - DNA, 75 bp, synthetic construct
  source 1..75: mol_type = other DNA
tcagctttccggtgcacccgataatgtgctgaaaaccacgggtgctaattcttcggcactgggtattgcattata

SEQ ID NO: 157254 - DNA, 75 bp, synthetic construct
  source 1..75: mol_type = other DNA
gcttttccctactcctcgccagtacacaacatcacctacgagaatggcgaaaaaaggtgatattttactcagtgt

SEQ ID NO: 157255 - DNA, 75 bp, synthetic construct
  source 1..75: mol_type = other DNA
atgaaaatcagaaaatggtatcggttttgtttaatgaggttttcggtccgaacgcactcatagcagccagatatc

SEQ ID NO: 157256 - DNA, 75 bp, synthetic construct
  source 1..75: mol_type = other DNA
gttggtcattcctttacagatccaaacctcagaaggttgatggatacagccaaaaaacttagagggaatgattct

SEQ ID NO: 157257 - DNA, 75 bp, synthetic construct
  source 1..75: mol_type = other DNA
ttagcgacttgtatagtatggcctctggaatatcttcgactaaagaacaagctggtcatggaagtccattcttgt

SEQ ID NO: 157258 - DNA, 75 bp, synthetic construct
  source 1..75: mol_type = other DNA
ggtgactatgaccttgtgctggtctgtgatggctacggcgtggaaaccgctaactatattgatggcgagtttcac

SEQ ID NO: 157259 - DNA, 75 bp, synthetic construct
  source 1..75: mol_type = other DNA
aatatggtgatgtagctgaatttcgtaatggtttaaatttcagcaaagatagccacggtaaagggtgcaaattca

SEQ ID NO: 157260 - DNA, 75 bp, synthetic construct
  source 1..75: mol_type = other DNA
taaccctgtcagataatcagcccgaaagttattttctggctaaagaagggttgtatggtatcgatcgggccggag

SEQ ID NO: 157261 - DNA, 75 bp, synthetic construct
  source 1..75: mol_type = other DNA
gtggataaggatatgattgcagtgcgaattgggccggatatgcggatggccatggtgggatcgccggcgtattca

SEQ ID NO: 157262 - DNA, 75 bp, synthetic construct
  source 1..75: mol_type = other DNA
tgtcgatattgttgagggtcgttttgatgccgggatacgcctgggtgaaattgtcgataatgatatggttgcagt

SEQ ID NO: 157263 - DNA, 75 bp, synthetic construct
  source 1..75: mol_type = other DNA
atggcggtgagccgggaaacagtgacagtcttattgagtcctggaacacgacaccgaacgcgcttgagatgacct

SEQ ID NO: 157264 - DNA, 75 bp, synthetic construct
  source 1..75: mol_type = other DNA
tgtgtctgcaaactaccctgggcacggagcatcagaaatttggcaacttgtcccgaaaccctatcctgtctcgtt

SEQ ID NO: 157265 - DNA, 75 bp, synthetic construct
  source 1..75: mol_type = other DNA
gataaaaaccagagtgctggcttatcggtggttttttactgccagaccacaagcgggctggtcagccaggaaatt

SEQ ID NO: 157266 - DNA, 75 bp, synthetic construct
  source 1..75: mol_type = other DNA
ataatcaataaaatagatggctgtaaaaatataagagtaagccattcttcgcttgttaataataaggaatggtgc

SEQ ID NO: 157267 - DNA, 75 bp, synthetic construct
  source 1..75: mol_type = other DNA
cagcatcgcctacatcgtcaaccacgcgttcgctaaaagcctgtttttccttgtagcaggtgcgctgagttacag

SEQ ID NO: 157268 - DNA, 75 bp, synthetic construct
  source 1..75: mol_type = other DNA
agcgctgcaaaaaaatcagaacggagcagatattcccgataaaccgctgtttatccagaacgttggtttacagga

SEQ ID NO: 157269 - DNA, 75 bp, synthetic construct
  source 1..75: mol_type = other DNA
tgtcgatattgttgacggtcgttttgatgccgggatacgcctgggtgaaattgttgataaagatatggttgcagt

SEQ ID NO: 157270 - DNA, 75 bp, synthetic construct
  source 1..75: mol_type = other DNA
tgtcgatattgttgatggtcgttttgatgccgggatacgcctgggtgaaattgtggataacgatatggttgcagt

SEQ ID NO: 157271 - DNA, 75 bp, synthetic construct
  source 1..75: mol_type = other DNA
tgtcgatattgttgaaggtcgttttgatgccgggatacgcctgggtgaaattgttgataacgatatggttgcagt

SEQ ID NO: 157272 - DNA, 75 bp, synthetic construct
  source 1..75: mol_type = other DNA
taacattaacagaaaacacacgaaagttaacgttgacggagaaaccctggggaacgtttattcttgcttctactt

SEQ ID NO: 157273 - DNA, 75 bp, synthetic construct
  source 1..75: mol_type = other DNA
tcatttcggcatgattgacgccattgatgatccgcaggtttttgccgcgttgtttggcgcagcgggtgatgctgc

SEQ ID NO: 157274 - DNA, 75 bp, synthetic construct
  source 1..75: mol_type = other DNA
tttttttgacgttcagtatagtgctgaaatatttaatgtggagagaatggatgggatatatcacatatgttacag

SEQ ID NO: 157275 - DNA, 75 bp, synthetic construct
  source 1..75: mol_type = other DNA
aagccacaattattcatcgcgacgttggcctgacgccgccgccccatttacgtgaagaaaccttcatggcgcttt

SEQ ID NO: 157276 - DNA, 75 bp, synthetic construct
  source 1..75: mol_type = other DNA
gctgcttgatgccattatgccgtactgcggtaacgccctgcgactgggcgttaccggcacacccggcgcggggaa

SEQ ID NO: 157277 - DNA, 75 bp, synthetic construct
  source 1..75: mol_type = other DNA
ggaggagacaccagtaaccaaaattgcagaaatgatagaggttatcgctgcgcaaagaggggttgagctacccag

SEQ ID NO: 157278 - DNA, 75 bp, synthetic construct
  source 1..75: mol_type = other DNA
tcgccaggcagcaactaatggtttaccctggctggcagacaacgatcccattattcttcccccgaatattgcccg

SEQ ID NO: 157279 - DNA, 75 bp, synthetic construct
  source 1..75: mol_type = other DNA
gagagcccacttaaggatgacgatgatccagagtttcatgcctttttagttgatctgtttgatggaccagagaag

SEQ ID NO: 157280 - DNA, 75 bp, synthetic construct
  source 1..75: mol_type = other DNA
tcaaaactggagtaggcttcttccagaagaaagaacaaagtaagcaagagctggacgcacagaacagccatgaac

SEQ ID NO: 157281 - DNA, 75 bp, synthetic construct
  source 1..75: mol_type = other DNA
agatcattgcgatgggctggcaaaataaactttgctccggcgatccaaccgttatgcacaaatcgcggacgtttg

SEQ ID NO: 157282 - DNA, 75 bp, synthetic construct
  source 1..75: mol_type = other DNA
gtacgcaatgtgttatgcgggggccgcatcgttacccggcgcactaagtcctggctgaaacgggtggtgccgtca

SEQ ID NO: 157283 - DNA, 75 bp, synthetic construct
  source 1..75: mol_type = other DNA
caaaagaagcgggcggcgaactgttcccgatgtcgaaaattaacgacgccatccagcatgtacgcgatggtaaag

SEQ ID NO: 157284 - DNA, 75 bp, synthetic construct
  source 1..75: mol_type = other DNA
ttctggcattttcaggttgtgccggggcaaaaacactccccgcagaaaatttgcaggggctgtatgaggcttatg

SEQ ID NO: 157285 - DNA, 75 bp, synthetic construct
  source 1..75: mol_type = other DNA
ttctggcactttcaggatatgtcggagcgaatacactacctgttaccacattacaggaactttacgaggtttacg

SEQ ID NO: 157286 - DNA, 75 bp, synthetic construct
  source 1..75: mol_type = other DNA
agactgaccccagaaagcgtcttgttgtttatgagttctcccgcatatctaatgaggtgcagttagaaatcgatg

SEQ ID NO: 157287 - DNA, 75 bp, synthetic construct
  source 1..75: mol_type = other DNA
cggcgggcagacgtacacgccagcgcgctttgaaatcgaagagagtcagcagagcggtactccggtgatagacgc

SEQ ID NO: 157288 - DNA, 75 bp, synthetic construct
  source 1..75: mol_type = other DNA
agcaacggccgacgcgcggactgtacgacaccattacgttctaccatccatcctttggctacgtccgcctggtcg

SEQ ID NO: 157289 - DNA, 75 bp, synthetic construct
  source 1..75: mol_type = other DNA
accgtctacacaattcttaccgtcggtgatggtcttgtttctcaaattccagctttattaattgctattagcgca

SEQ ID NO: 157290 - DNA, 75 bp, synthetic construct
  source 1..75: mol_type = other DNA
acctgccgaaaaagaggttaacctttttgacggcgatggtttgctgttgcgaatcgctcccctggcgaagggagg

SEQ ID NO: 157291 - DNA, 75 bp, synthetic construct
  source 1..75: mol_type = other DNA
atctggaaggcgcaatcaggcctgagccggatgacggcgacaaaccagaacggcaactggctggatgtcaccgta

SEQ ID NO: 157292 - DNA, 75 bp, synthetic construct
  source 1..75: mol_type = other DNA
tagtttatattgcggcctcccaagttattgcaggcatgtttccgaacgaagtcgtggcaaattcaggagcacctt

SEQ ID NO: 157293 - DNA, 75 bp, synthetic construct
  source 1..75: mol_type = other DNA
atggccaaaatgattccggcatttggacccattgataataatagctatggagaaaaaacggtctatacactgtta

SEQ ID NO: 157294 - DNA, 75 bp, synthetic construct
  source 1..75: mol_type = other DNA
gactgcgatgcaaataaaggttacgtacatccaggctttcaactggatggcagaacttatcatgcagggaaaaac

SEQ ID NO: 157295 - DNA, 75 bp, synthetic construct
  source 1..75: mol_type = other DNA
atgtctggaaatataggggcaaatccaggtaatgacagcagccaatacaattacggcgttaccggcggcgtggtt

SEQ ID NO: 157296 - DNA, 75 bp, synthetic construct
  source 1..75: mol_type = other DNA
catgcaggcacatgatatcagcgcaacaacgatggctgcattgctgaccccctggaatatccgccctgccgtctt

SEQ ID NO: 157297 - DNA, 75 bp, synthetic construct
  source 1..75: mol_type = other DNA
atagcgacaaaaaatctcaaagataacagtaatatgggagggctaaagtcggctattattgaattagaacatagt

SEQ ID NO: 157298 - DNA, 75 bp, synthetic construct
  source 1..75: mol_type = other DNA
aaacatttactaagccttgcctctgttaaattgaacattgacaagagaaacatagaattagagactgcaaagcaa

SEQ ID NO: 157299 - DNA, 75 bp, synthetic construct
  source 1..75: mol_type = other DNA
atgtcgaacccatcgccacaatatcagacagtggcgagatcaccgatatacgaaaaacccgcaaaccattaaatg

SEQ ID NO: 157300 - DNA, 75 bp, synthetic construct
  source 1..75: mol_type = other DNA
ccagcgccgcaaccggcatcaccacgccagtaagcacctggcagattgattttacggcacggcttcacggcatgg

SEQ ID NO: 157301 - DNA, 75 bp, synthetic construct
  source 1..75: mol_type = other DNA
gagactttattgccgtggtcggcagaatgcaggatatcaacgccgttcgtcaggtaaaagcggcattgttgtcat

SEQ ID NO: 157302 - DNA, 75 bp, synthetic construct
  source 1..75: mol_type = other DNA
aaacgaggcgagggtaaatttgagcgtatttcatgggatgaggcgacgaccttaattgccgataacctgaaaagg

SEQ ID NO: 157303 - DNA, 75 bp, synthetic construct
  source 1..75: mol_type = other DNA
tggcgaaaaaactgggtgtcgaagccgagttcagtcaaggacgtgatgagaagcaatggatcgagcatatctggg

SEQ ID NO: 157304 - DNA, 75 bp, synthetic construct
  source 1..75: mol_type = other DNA
cggcggccagacgtacacgcccgcgcgctttgaaatcgaggagagtcagcagagcggcacgccggtaatcgacgc

SEQ ID NO: 157305 - DNA, 75 bp, synthetic construct
  source 1..75: mol_type = other DNA
cgcatataataaatcaggttttaaatctcctgaatatagcaatgcaggcatttatctttctatgcctgttttttc

SEQ ID NO: 157306 - DNA, 75 bp, synthetic construct
  source 1..75: mol_type = other DNA
taagtttaaggcctaaaaaaggaggggctatcagggatgtgtcaataaaacacggtaattattcgacatctatta

SEQ ID NO: 157307 - DNA, 75 bp, synthetic construct
  source 1..75: mol_type = other DNA
catttatcgccgcccgggaacggtgctggtggactatcgcatccttcgtaactttattcgcatctaccagattgc

SEQ ID NO: 157308 - DNA, 75 bp, synthetic construct
  source 1..75: mol_type = other DNA
aaccgccgggggcatcttgattcactttctgtgaaagtggagttgaaagaaagtagcctgacattgacgcatgag

SEQ ID NO: 157309 - DNA, 75 bp, synthetic construct
  source 1..75: mol_type = other DNA
tatggttacggcctgtttactggtgggctgggtgcgcactatggtgccgaacgtctgggcgctacggtgatcccg

SEQ ID NO: 157310 - DNA, 75 bp, synthetic construct
  source 1..75: mol_type = other DNA
atgaaaatgtgccgatgtatcggcgcaaattcgacgcagcaggcgtacatcctgatgatttcagggaactttcag

SEQ ID NO: 157311 - DNA, 75 bp, synthetic construct
  source 1..75: mol_type = other DNA
aggagcggaaacgcattgagcgggagaaagaacaacgcgagcgccaaaccaaacaggctaaacgtttcaccgacc

SEQ ID NO: 157312 - DNA, 75 bp, synthetic construct
  source 1..75: mol_type = other DNA
ggtggcggcgtaacaatcaacagcccgatcaccattaacactacgaatggcttcagtgatgaagactcaaggcgt

SEQ ID NO: 157313 - DNA, 75 bp, synthetic construct
  source 1..75: mol_type = other DNA
aggagcgaaaacgcattgagcgtgagaaagaacagcgcgagcgccagacaaaacaagcgaaacgcttcactgacc

SEQ ID NO: 157314 - DNA, 75 bp, synthetic construct
  source 1..75: mol_type = other DNA
aaaagcagggcggttccgatgtcatgagcaacaccacccgcgcagagcgcctggaagatggctcttatcggctgg

SEQ ID NO: 157315 - DNA, 75 bp, synthetic construct
  source 1..75: mol_type = other DNA
accaccgcaagtggtcttgctttttactatcttaacgaatatgtcgatgtgggaacaaaaatatctgtgctaaat

SEQ ID NO: 157316 - DNA, 75 bp, synthetic construct
  source 1..75: mol_type = other DNA
gcgggctatacgggagttccttttgaacatgtctccaatcaggcaactacaacagatcatacttgtcagggaaac

SEQ ID NO: 157317 - DNA, 75 bp, synthetic construct
  source 1..75: mol_type = other DNA
ttccggctgccccgcttgatgttgaggaaatggttatcgctgcccgtcaggtggaacgggaaacgggtaaaccgg

SEQ ID NO: 157318 - DNA, 75 bp, synthetic construct
  source 1..75: mol_type = other DNA
cgggaactgaacatcagcaacgcggccatcgtcgatcttaatggatcgacgcagacggtagagacattcaccggg

SEQ ID NO: 157319 - DNA, 75 bp, synthetic construct
  source 1..75: mol_type = other DNA
tggtttgtacgttaactatgggctgaaagcgctgaacatccatggtgggcaaaagctgacgttagccgaacatgg

SEQ ID NO: 157320 - DNA, 75 bp, synthetic construct
  source 1..75: mol_type = other DNA
aacctttcatcttagaatttgatggtagaacaggtgagaaactgggagatgttatatcccgtgctttaaaaaagg

SEQ ID NO: 157321 - DNA, 75 bp, synthetic construct
  source 1..75: mol_type = other DNA
accgcccggcgcttatcccctgccccgtgatggccggcacgctcccggcacgggtcaccagcacggtgaagaacg

SEQ ID NO: 157322 - DNA, 75 bp, synthetic construct
  source 1..75: mol_type = other DNA
tgtcttttttcttatttcatggggatttgtttttagtgcaatgcaacctcgtgaaggtatgagaccggcaaccga

SEQ ID NO: 157323 - DNA, 75 bp, synthetic construct
  source 1..75: mol_type = other DNA
ttcatctctggacgaatttgtttactcactcgattttttgtttattttagagaaaatcatactaaacccagctaa

SEQ ID NO: 157324 - DNA, 75 bp, synthetic construct
  source 1..75: mol_type = other DNA
taatccagatcaacagggagagattatctatggtgaagtctatatggcttatgctaactggattggcaccaacca

SEQ ID NO: 157325 - DNA, 75 bp, synthetic construct
  source 1..75: mol_type = other DNA
ggttcagataatcgccgtggatggtggggggacagttaccgcgaccgccccatcggttcgcggttgtggctgttg

SEQ ID NO: 157326 - DNA, 75 bp, synthetic construct
  source 1..75: mol_type = other DNA
cgctgagcgtgacggccttaaggtacgcatcagcgaactggaggcgacggttctgcagctcaatcaggatggtga

SEQ ID NO: 157327 - DNA, 75 bp, synthetic construct
  source 1..75: mol_type = other DNA
tacctgagcgtgtctgaaaagacagagcttgagatagcaaaacagacgcttaaaaacagtaaaaatccggcagag

SEQ ID NO: 157328 - DNA, 75 bp, synthetic construct
  source 1..75: mol_type = other DNA
cgcgtacacagggagaactgaatgcgttgaaggccgcgaaggaagcaaccggcgaaacacttcctgctaatgcaa

SEQ ID NO: 157329 - DNA, 75 bp, synthetic construct
  source 1..75: mol_type = other DNA
aacaggaaaagtatagcactggcagtgagattcagcggggtatacaggctgcgacagccgcgcttcagggactgg

SEQ ID NO: 157330 - DNA, 75 bp, synthetic construct
  source 1..75: mol_type = other DNA
gccgccagaaattaaggcccggagcctgaaggcagtgatgaaactgtcacgcaacagccgtggccgcaagtggct

SEQ ID NO: 157331 - DNA, 75 bp, synthetic construct
  source 1..75: mol_type = other DNA
gacctgaaatttcaggcaacattaaaacgcgatggtaatgcaactgtgaaacccggcggatttaaggctaccagt

SEQ ID NO: 157332 - DNA, 75 bp, synthetic construct
  source 1..75: mol_type = other DNA
gaagatgatcctggagaaaacaatggaatttataacccagattatcctaatgccaacggtcgtactacaacccag

SEQ ID NO: 157333 - DNA, 75 bp, synthetic construct
  source 1..75: mol_type = other DNA
atgttgtccgcttttactccccgaccgctgaaacgcctgttcacaaccaaccagtgctggacatccttcctggat

SEQ ID NO: 157334 - DNA, 75 bp, synthetic construct
  source 1..75: mol_type = other DNA
cgttatatcctttttctgacggatgacgttatttttgaggaatcactgacaattgtccttatcgatgttaacgat

SEQ ID NO: 157335 - DNA, 75 bp, synthetic construct
  source 1..75: mol_type = other DNA
cagcaatatggttccgtcgaagcggcgctggcagccggtaagaccttccatatctgggccaagccgatgctggac

SEQ ID NO: 157336 - DNA, 75 bp, synthetic construct
  source 1..75: mol_type = other DNA
ataaaacactctccaggaaacccggggcggttcactggttcttcggtattcatggcgcgctggcgctgaccgcac

SEQ ID NO: 157337 - DNA, 75 bp, synthetic construct
  source 1..75: mol_type = other DNA
caaaagtcagttctgactgtagcgcaatacctttagatccttatgatgtctcctggaatgaaaatacggtcgtgc

SEQ ID NO: 157338 - DNA, 75 bp, synthetic construct
  source 1..75: mol_type = other DNA
gaaaatcacagttttctatgacggcgatatgcatggttgtccgtggattgtttcttcgtatgtaaagagcgagga

SEQ ID NO: 157339 - DNA, 75 bp, synthetic construct
  source 1..75: mol_type = other DNA
atgaacctgttcgatattatcggtatcaatcaggacgatcgcggcgacaacatgatcgtgctgacgccgtccgat

SEQ ID NO: 157340 - DNA, 75 bp, synthetic construct
  source 1..75: mol_type = other DNA
cgagcgtggttcatactgtcggtatgtttcacagcaaatgactttttcatttacgggttgcgataacgccaaagt

SEQ ID NO: 157341 - DNA, 75 bp, synthetic construct
  source 1..75: mol_type = other DNA
gtcttctgttgctgttaatgctcaatacaggggcgcaggcagcgccagagatcggccgactatggatccctgctg

SEQ ID NO: 157342 - DNA, 75 bp, synthetic construct
  source 1..75: mol_type = other DNA
atatgaagctacgcgtggacacaacggcgcaacagccaatagatgccacctgccggttcacttacatactgaata

SEQ ID NO: 157343 - DNA, 75 bp, synthetic construct
  source 1..75: mol_type = other DNA
gtgacctggtttgaactcggggagaacgacaaaaaccagatgctgtacagcgccacgggcaggctggagagtgtg

SEQ ID NO: 157344 - DNA, 75 bp, synthetic construct
  source 1..75: mol_type = other DNA
aaagagaatacaaggagcaagaaggaaatccagaaattaagtctaaacgcagagagcgcatcaggaaattctttc

SEQ ID NO: 157345 - DNA, 75 bp, synthetic construct
  source 1..75: mol_type = other DNA
tccatagtattatggctgcaactgcgatcggattttgtcgcatagcaccaactttttatttattgccattctttg

SEQ ID NO: 157346 - DNA, 75 bp, synthetic construct
  source 1..75: mol_type = other DNA
aatgtgcctggaaatacattaatagatattgctaatgcaacatcttctgaaaattatagcgttctgtgtaactgt

SEQ ID NO: 157347 - DNA, 75 bp, synthetic construct
  source 1..75: mol_type = other DNA
ccgctgccaggatcaatgcgcctggtgttgattgtactgattgtgatgtcgctgatttccagcgtaatcgccgcg

SEQ ID NO: 157348 - DNA, 75 bp, synthetic construct
  source 1..75: mol_type = other DNA
gggatgtggcgttgtttggcctggtcattgatcgcgtgagtacgctgattctgtttgtggtggtgtttctcggtt

SEQ ID NO: 157349 - DNA, 75 bp, synthetic construct
  source 1..75: mol_type = other DNA
tactgccgactggattaaagagcactggggattcgatccccgcagtgtgggccggacggtacgcggctggtttgg

SEQ ID NO: 157350 - DNA, 75 bp, synthetic construct
  source 1..75: mol_type = other DNA
acgggctcttgctcgtcagttaatgttgtacgccggacgtggaataaacagcgtggagaaaattatctctacctg

SEQ ID NO: 157351 - DNA, 75 bp, synthetic construct
  source 1..75: mol_type = other DNA
tacagagcgacagcctcgacagttatcgggtgatccctgcgagtgcgcaagattccaccctactggagcacagtc

SEQ ID NO: 157352 - DNA, 75 bp, synthetic construct
  source 1..75: mol_type = other DNA
aaatttagcaagagaagtaactatcttattgttttggcaactgaaaaaaatactgagatgccaaaaattattgtt

SEQ ID NO: 157353 - DNA, 75 bp, synthetic construct
  source 1..75: mol_type = other DNA
aaatgcacacggccattgatatgggatcaaataacctgaataacgttggggcagtaaatgcccagacaggtaatt

SEQ ID NO: 157354 - DNA, 75 bp, synthetic construct
  source 1..75: mol_type = other DNA
aacttatgatgcaaatcgaattgttaaatgtggtttttatgatgaatacaatttccataaagggacatttagagc

SEQ ID NO: 157355 - DNA, 75 bp, synthetic construct
  source 1..75: mol_type = other DNA
tttcctgtcttcaaaaacggcgcttaataaggaacagcgagaaagattgcgtcaaaaccttcagtcttttattgg

SEQ ID NO: 157356 - DNA, 75 bp, synthetic construct
  source 1..75: mol_type = other DNA
taacgtaaaaagcgatctgactttatggcgagatgtttttttaagatttaaagcctacctacaacctaaaaatat

SEQ ID NO: 157357 - DNA, 75 bp, synthetic construct
  source 1..75: mol_type = other DNA
aatttatacgagcgagctttggccggtgaatttggtgatgtcgctgaatatgtggctccaattataatcgaatca

SEQ ID NO: 157358 - DNA, 75 bp, synthetic construct
  source 1..75: mol_type = other DNA
cgtgtgcaattacttccctcggagacctgcagaaggaagaaatcacggcagagctgttacttaacgagctgaatg

SEQ ID NO: 157359 - DNA, 75 bp, synthetic construct
  source 1..75: mol_type = other DNA
tgaagaattttgattttctggcacgcagttttgcccgtatgcacgccctgggccagccagttgatatcgatgccg

SEQ ID NO: 157360 - DNA, 75 bp, synthetic construct
  source 1..75: mol_type = other DNA
gatgtgatattactatttccccaaaaaacatatgtgataacattttatcattagactctggattgattaattcaa

SEQ ID NO: 157361 - DNA, 75 bp, synthetic construct
  source 1..75: mol_type = other DNA
cttgccaaaaaataaagttgtataaaaaacttggtgtgacaaacgatctaactttatggagagatatttttttat

SEQ ID NO: 157362 - DNA, 75 bp, synthetic construct
  source 1..75: mol_type = other DNA
cgttgttcacggatacgccatatatgcagtggtatttgaacactttcattcttgctaccgctaacatgttaattt

SEQ ID NO: 157363 - DNA, 75 bp, synthetic construct
  source 1..75: mol_type = other DNA
cgacaatgcaatatattgatagcaggcttcttcaccgccatgtttttcagagaactggatgcattattcgacatt

SEQ ID NO: 157364 - DNA, 75 bp, synthetic construct
  source 1..75: mol_type = other DNA
ttttgctgaggcaattgaggaaaatcatataaaattaaaaacaaaatctaatggtgacttacccgaatatgcaca

SEQ ID NO: 157365 - DNA, 75 bp, synthetic construct
  source 1..75: mol_type = other DNA
tccaaaagagagcattgttattaaagaaaagcaaagaaaaaaatttgaattggtaagctcagacttagtcacgat

SEQ ID NO: 157366 - DNA, 75 bp, synthetic construct
  source 1..75: mol_type = other DNA
catataaagatgtgttaactattgctttttcggcgttgtcatttattattgcatgtacttccttatacttctccg

SEQ ID NO: 157367 - DNA, 75 bp, synthetic construct
  source 1..75: mol_type = other DNA
atggataaatttttacgtaaaatatctacgctcgtagtttatctttttttaatctgcaactccattgttgtgctt

SEQ ID NO: 157368 - DNA, 75 bp, synthetic construct
  source 1..75: mol_type = other DNA
agcagtaccagcaggtaatatcgtactgaatactaactctcaactattgggcgtaggtgacttagtacagttcac

SEQ ID NO: 157369 - DNA, 75 bp, synthetic construct
  source 1..75: mol_type = other DNA
gtagaacgtaccagtacttctattactatttttcctgtcttacaaaatacagtacaggcaagcgagattattaaa

SEQ ID NO: 157370 - DNA, 75 bp, synthetic construct
  source 1..75: mol_type = other DNA
attcatcttcggagatcaacaggagacaagaggctgctacactaaagttgaaatcttatgattggaattttgata

SEQ ID NO: 157371 - DNA, 75 bp, synthetic construct
  source 1..75: mol_type = other DNA
ttaaggtctgataaaaaggggttaactcctgaaaaattattagtcttgcaggatcatgtgcttaattataatgtc

SEQ ID NO: 157372 - DNA, 75 bp, synthetic construct
  source 1..75: mol_type = other DNA
gttgaactgaagcttttaaaagcaccagtatcacttccttcagatagctatcattcgttttttattgaaattgag

SEQ ID NO: 157373 - DNA, 75 bp, synthetic construct
  source 1..75: mol_type = other DNA
cctgcatcactaaatgaagtgaatagctttttagctcaatatgcacagggcaaacctttcactatgtcattgggg

SEQ ID NO: 157374 - DNA, 75 bp, synthetic construct
  source 1..75: mol_type = other DNA
agtggtcgaaccgaaaattgaaaatccgcagccggatgaaaagccgctcggcgaaacgctgaaagatctcttttc

SEQ ID NO: 157375 - DNA, 75 bp, synthetic construct
  source 1..75: mol_type = other DNA
ccttggctatagctggttatacggcacctttaaagatttcgacggtacttttacctttgacgaaaaaatccggct

SEQ ID NO: 157376 - DNA, 75 bp, synthetic construct
  source 1..75: mol_type = other DNA
tggggctggttcattctcggtctgattatcgacccgatactggcggggctgctgtactggcttattgcaaaggac

SEQ ID NO: 157377 - DNA, 75 bp, synthetic construct
  source 1..75: mol_type = other DNA
cttctggatgaccggcatcggcaactggatagtcagcgtactgattggatgtgctgctggccccctgtgggccgc

SEQ ID NO: 157378 - DNA, 75 bp, synthetic construct
  source 1..75: mol_type = other DNA
tttgcatcggtcgccatcgtggccggcggcaccattctgaatgcgttgtttggcgcggctctggttaatgtgcag

SEQ ID NO: 157379 - DNA, 75 bp, synthetic construct
  source 1..75: mol_type = other DNA
taaactggacgccctggatatcgattccagtcaagggatcgtcaacgccagcggcacggcgcagctgtcagacaa

SEQ ID NO: 157380 - DNA, 75 bp, synthetic construct
  source 1..75: mol_type = other DNA
tatcgagttttacgacgaccagagtggctatgagcgcggactgacgctgccgcttcgccatccttcagggctgtt

SEQ ID NO: 157381 - DNA, 75 bp, synthetic construct
  source 1..75: mol_type = other DNA
aatggcgtctggcaccagaacgtgttcgcttattatctctccatctcctgtaaccattgcgatgacccgcatgta

SEQ ID NO: 157382 - DNA, 75 bp, synthetic construct
  source 1..75: mol_type = other DNA
ctataagctagctgatggtggcggaatgtatctactgattaacactaatggttctaaatactggcgcatgaagta

SEQ ID NO: 157383 - DNA, 75 bp, synthetic construct
  source 1..75: mol_type = other DNA
aggctcctgaaccggtgacggttatcgacaccatgggtgccggagattcgttcattgccggattcctttgcggct

SEQ ID NO: 157384 - DNA, 75 bp, synthetic construct
  source 1..75: mol_type = other DNA
aaggagtgacggagaaggattatcaattcctgccgtcgaaggctgaccatttctcaggtgggaaaatcacgcgta

SEQ ID NO: 157385 - DNA, 75 bp, synthetic construct
  source 1..75: mol_type = other DNA
ggatagagggtagcggcattgagccgggaacgccgggggattataacgtcaaagcggtgcattatgggcgtcagc

SEQ ID NO: 157386 - DNA, 75 bp, synthetic construct
  source 1..75: mol_type = other DNA
cagtgaaggtgagcgggggagttcgacaggtaaagctacagggagtggaggaaaagctaaagagaaaatcggcgt

SEQ ID NO: 157387 - DNA, 75 bp, synthetic construct
  source 1..75: mol_type = other DNA
cacctacaaccttgtcgtggatattcgtaaacccgcagcggcttcgaaaaaatcagaaaagcaggacaaaacagg

SEQ ID NO: 157388 - DNA, 75 bp, synthetic construct
  source 1..75: mol_type = other DNA
cagacgtgaccgcactgaaaacccgggctttcagcgatatcacactgggcgacctggtgaacaccatcgccactg

SEQ ID NO: 157389 - DNA, 75 bp, synthetic construct
  source 1..75: mol_type = other DNA
gagaccaccggctacgtcaaatcggacggcgagtggttcattaactgcccgcgtatccgggctactggcgcggtg

SEQ ID NO: 157390 - DNA, 75 bp, synthetic construct
  source 1..75: mol_type = other DNA
ctgggtatggcaaccgcgccagtttatatttttaacagtgaactgcagaatctacgtttccgtcatggtgatgtc

SEQ ID NO: 157391 - DNA, 75 bp, synthetic construct
  source 1..75: mol_type = other DNA
tgaatgaatccacaggggaagtgggtagtgacctcagcactggtcaggaaggtcaacaacaagtaaaaatcagac

SEQ ID NO: 157392 - DNA, 75 bp, synthetic construct
  source 1..75: mol_type = other DNA
atggccttagacagtaagctacgaggctgcgatctggtgaacctcaaagtatctgatgttgcatatggtagctcg

SEQ ID NO: 157393 - DNA, 75 bp, synthetic construct
  source 1..75: mol_type = other DNA
aaaatggtgcatatcttttgagtaaaataaaatcagactcatcttctactgtgtcatttaactccgattgtaaga

SEQ ID NO: 157394 - DNA, 75 bp, synthetic construct
  source 1..75: mol_type = other DNA
ttcccttgttgtaagggatttgatggaagatataagaaataaactagaagttaaaactaatgttgaaaaagaaat

SEQ ID NO: 157395 - DNA, 75 bp, synthetic construct
  source 1..75: mol_type = other DNA
ttggtatgcgggtagcgactttgtttcaccacttgaaatgcgtatgcacgattattcagatggcttcgctctgtg

SEQ ID NO: 157396 - DNA, 75 bp, synthetic construct
  source 1..75: mol_type = other DNA
ataagatccttgccggatgttgctgcattattctcgccattatggtgttctgcgtaacctggcaagttattgcac

SEQ ID NO: 157397 - DNA, 75 bp, synthetic construct
  source 1..75: mol_type = other DNA
cgctacggctaccgcccggcgcttatcccccgcccggtaatggccggcacgctcccggcgcgggtcaccagcacg

SEQ ID NO: 157398 - DNA, 75 bp, synthetic construct
  source 1..75: mol_type = other DNA
acgtggtatatcccgaacctagcgcggtcggaaagatggtttgtgtcaccaggcggtacgatgacattgcttaca

SEQ ID NO: 157399 - DNA, 75 bp, synthetic construct
  source 1..75: mol_type = other DNA
gcttcctggcctttcatcgcttcgactgtgtgcttgaagatactggcgcgattaaggcgctggtgggcaaaccgg

SEQ ID NO: 157400 - DNA, 75 bp, synthetic construct
  source 1..75: mol_type = other DNA
ctggcggtgctgctgggcggcatggttggcgcggggattgtgttggggcgtaatgctctacgcgattacaacgcg

SEQ ID NO: 157401 - DNA, 75 bp, synthetic construct
  source 1..75: mol_type = other DNA
ggcaaaatcgccaatatttatcagctgaatgcgaaggacgcatcggcaatgatactcggaacggaattccagctt

SEQ ID NO: 157402 - DNA, 75 bp, synthetic construct
  source 1..75: mol_type = other DNA
ctgctataccgggtgtgtacgacgtcagtgtttatgtcaacgatcaacctattattaaccaaagcattacattta

SEQ ID NO: 157403 - DNA, 75 bp, synthetic construct
  source 1..75: mol_type = other DNA
catcaagcactacgcaacttcttaatcgctgttgccgagcgattggaagtgcgctcatcccatatctttttggcg

SEQ ID NO: 157404 - DNA, 75 bp, synthetic construct
  source 1..75: mol_type = other DNA
tctcgcaatatctgggcaacgcttttgcgcttatcgatgctaacggggcatctggcgtgaggatacaaaactatc

SEQ ID NO: 157405 - DNA, 75 bp, synthetic construct
  source 1..75: mol_type = other DNA
ttgaatctcagtattccgttagaacgctggttaccgcgtagccgggtttcctatcagatgaccagccagaaagat

SEQ ID NO: 157406 - DNA, 75 bp, synthetic construct
  source 1..75: mol_type = other DNA
ctttgaatctcagtattccgttagaacgctggttaccgcgtagccgggtttcctatcagatgaccagccagaaag

SEQ ID NO: 157407 - DNA, 75 bp, synthetic construct
  source 1..75: mol_type = other DNA
cgccatgttgcatcggcgtaatccgcctttttcgcctgaagaattgaaatcaattattgaatatcatgcggctct

SEQ ID NO: 157408 - DNA, 75 bp, synthetic construct
  source 1..75: mol_type = other DNA
ttttgtggcatacaatgatatgacgattgcgacccagcaacttattgatgccattgtcttggacgctgaaaaaga

SEQ ID NO: 157409 - DNA, 75 bp, synthetic construct
  source 1..75: mol_type = other DNA
atggctatcaatggcgtacgcagtacatcaaagaaattcgataaccagcactcttttcatggctatcaatggcgt

SEQ ID NO: 157410 - DNA, 75 bp, synthetic construct
  source 1..75: mol_type = other DNA
atcagctggaaatcttcgagcgccgcagcttttttcagttgctgcaaagcacgataacgacgatcggctgctggc

SEQ ID NO: 157411 - DNA, 75 bp, synthetic construct
  source 1..75: mol_type = other DNA
ggggatgcttcgtttacgctgggcaatactggcggtttcgttgatcttgggacctatgagtatgtcctgaaaagt

SEQ ID NO: 157412 - DNA, 75 bp, synthetic construct
  source 1..75: mol_type = other DNA
tataccaccagacttaacaatggcggcacactcgatgtgcgggagaaaggcagcgcaacggggatacagcagagt

SEQ ID NO: 157413 - DNA, 75 bp, synthetic construct
  source 1..75: mol_type = other DNA
ctaaaaccagcacagattacaaattgcagggttaccttcctgaaaaccaaaaacggtaaaaagcgaaccgtgccg

SEQ ID NO: 157414 - DNA, 75 bp, synthetic construct
  source 1..75: mol_type = other DNA
ccgcccggcgtttatcccccgcccggtcatggccggaacgctcccggcgcgggtcaccagcacggtgaagaacga

SEQ ID NO: 157415 - DNA, 75 bp, synthetic construct
  source 1..75: mol_type = other DNA
tagcgtagttaaaaatggcattgatactctgagaagagaaactttagaatcatttgctatgattatgcgattcac

SEQ ID NO: 157416 - DNA, 75 bp, synthetic construct
  source 1..75: mol_type = other DNA
acagaagtcattaacccgcagggtgaatcatatctttatgttctggataactgcggccgggtgacggaagagcgt

SEQ ID NO: 157417 - DNA, 75 bp, synthetic construct
  source 1..75: mol_type = other DNA
cgctgatgctctttaacagtgaaggtaaaaccgtctggcgaccggggcagaccagcctgtgggggctggcactca

SEQ ID NO: 157418 - DNA, 75 bp, synthetic construct
  source 1..75: mol_type = other DNA
atgataaactgtacagcgtaaggcacctggtgtttaacggctttgagctgataagccagcagttcagccgggtac

SEQ ID NO: 157419 - DNA, 75 bp, synthetic construct
  source 1..75: mol_type = other DNA
ggtcatttagccattgagcgagctgtcagagcaattaaatcactggaagaagattttgggtttatagtctgttcc

SEQ ID NO: 157420 - DNA, 75 bp, synthetic construct
  source 1..75: mol_type = other DNA
ttggtgaatatttctccaaaagagaagtttataagaacctttttgtggtggcaagagagttagaaagcctggcaa

SEQ ID NO: 157421 - DNA, 75 bp, synthetic construct
  source 1..75: mol_type = other DNA
gtacctcacgccacggcgctgatagtgattattctgattctttggccttgcgacgctggcggcgtttgatttcgc

SEQ ID NO: 157422 - DNA, 75 bp, synthetic construct
  source 1..75: mol_type = other DNA
aagatcaatattgctcatttagtcaaaattgctgttgctttaaaaactccaataagctggttctttattgattgt

SEQ ID NO: 157423 - DNA, 75 bp, synthetic construct
  source 1..75: mol_type = other DNA
ctgataagctggtagggcagcgtattcagaccagacgtaaagaagcagggctaactgctgccgatcttgcagaga

SEQ ID NO: 157424 - DNA, 75 bp, synthetic construct
  source 1..75: mol_type = other DNA
ggtattgctgcttcaaatatgactggcgttgagttttcccctgaagattttagtggtggtatcaagtcgaaatgc

SEQ ID NO: 157425 - DNA, 75 bp, synthetic construct
  source 1..75: mol_type = other DNA
caaggctgttgctgatattatcgctaaccccagactcgctgaagatctgatgtcggcggggagctatgcacattt

SEQ ID NO: 157426 - DNA, 75 bp, synthetic construct
  source 1..75: mol_type = other DNA
gatccgctggggttgctggggggtgagcagacttaccggtatgtgccaaatccgtgtgggtatgttgatccgctg

SEQ ID NO: 157427 - DNA, 75 bp, synthetic construct
  source 1..75: mol_type = other DNA
tcccgattaactatgccactgggcttgacgttgaattaaaacaacgactcgagcaagtctggaataagctggata

SEQ ID NO: 157428 - DNA, 75 bp, synthetic construct
  source 1..75: mol_type = other DNA
cggcgggagcgtgacctgacggggtggatgtcgctgtcgcgtaaaccggaggagacctggtacgggtgggacggt

SEQ ID NO: 157429 - DNA, 75 bp, synthetic construct
  source 1..75: mol_type = other DNA
gccttgaaaagatatatatatatagtgcattagtaatcatttcaagattaatagggcttgttttaatctatttgc

SEQ ID NO: 157430 - DNA, 75 bp, synthetic construct
  source 1..75: mol_type = other DNA
ggtagcattcgtatttattataagcgtgattcgcctgtcaaaaagtgatattcctgagcaactgataattggatt

SEQ ID NO: 157431 - DNA, 75 bp, synthetic construct
  source 1..75: mol_type = other DNA
ccggtggcaaagtggtcacaacgggtaaagatattctggttaccctgccggcttaccggttcaccagtacgccag

SEQ ID NO: 157432 - DNA, 75 bp, synthetic construct
  source 1..75: mol_type = other DNA
cctatgccagaatttcccatcctttcagccgtggactcatccgatttttgtcttgaatgcctgctgaatgccatc

SEQ ID NO: 157433 - DNA, 75 bp, synthetic construct
  source 1..75: mol_type = other DNA
tctcagtacccgtagtagctcactacgtacaaatgctggaagatggtagtggagcaccaccggttgatatggatg

SEQ ID NO: 157434 - DNA, 75 bp, synthetic construct
  source 1..75: mol_type = other DNA
accatcagtatcagaccctcaaagggctcatcgcgttatgcccttcatgccatgaagtcaaacatatggggttca

SEQ ID NO: 157435 - DNA, 75 bp, synthetic construct
  source 1..75: mol_type = other DNA
tccgcatggccagcgttctggtcagtctgccagcgagtgttctaccgggtgaaaaaggtgatacgggagcagtgg

SEQ ID NO: 157436 - DNA, 75 bp, synthetic construct
  source 1..75: mol_type = other DNA
ggttttaaagtttggaacgatattattgaattggagcgttcccgactaaggagcaatgatgaatttcaggaggca

SEQ ID NO: 157437 - DNA, 75 bp, synthetic construct
  source 1..75: mol_type = other DNA
tggcgaatccatttgtggacgaggttggcattgaggctgtagcccaaggcgatgtttgcgatggaggcaccgggt

SEQ ID NO: 157438 - DNA, 75 bp, synthetic construct
  source 1..75: mol_type = other DNA
cacgctgcgcaaaatcgactcctggatcaccatgcctcaggtgatgacactatcaactgaaggtggtgaccagca

SEQ ID NO: 157439 - DNA, 75 bp, synthetic construct
  source 1..75: mol_type = other DNA
tataagtttgtaaatgctctagatattgacttttcgatattaaaatatgactactttgatgtaaatgagtataaa

SEQ ID NO: 157440 - DNA, 75 bp, synthetic construct
  source 1..75: mol_type = other DNA
atgtagcgtcggttgttaattttgttgagacaggcatgagtggttataaatcatatttgataaaatattctgaac

SEQ ID NO: 157441 - DNA, 75 bp, synthetic construct
  source 1..75: mol_type = other DNA
gaaaatggcgattcgatgcaacaaacagtgacctatgtgccgaacgtagcgaatgctgaaatctcgctggcagcc

SEQ ID NO: 157442 - DNA, 75 bp, synthetic construct
  source 1..75: mol_type = other DNA
agggtaaggctaccgtcacttataccaatacccgctcctcgatagaatcaggagcgagaccggataccgttgagg

SEQ ID NO: 157443 - DNA, 75 bp, synthetic construct
  source 1..75: mol_type = other DNA
gacctatgagtatgtcctgaaaagcgacggcaacagcaactggaacctgactaatgactgtaccttatcaccatc

SEQ ID NO: 157444 - DNA, 75 bp, synthetic construct
  source 1..75: mol_type = other DNA
catggcagtgtgggcagttattctctgggcggctatgccagttgggaacatgaaagtggtttctatctggacggt

SEQ ID NO: 157445 - DNA, 75 bp, synthetic construct
  source 1..75: mol_type = other DNA
tccagacgagcacggctaacggtattgaaatcagcggtacgcaccagtacggcaccttttccattgccagcaatt

SEQ ID NO: 157446 - DNA, 75 bp, synthetic construct
  source 1..75: mol_type = other DNA
caactttcacgccctttatcctgaaggacgatggggtgttgattttaatgagcatcgctttgctttatttgattt

SEQ ID NO: 157447 - DNA, 75 bp, synthetic construct
  source 1..75: mol_type = other DNA
ctggcatacagagagccagatggaacagaatatgatttgaccggtactgaccttaaagatcagttttacgcgtac

SEQ ID NO: 157448 - DNA, 75 bp, synthetic construct
  source 1..75: mol_type = other DNA
aatttgtcgaatcgtgaacagagcatggtggtcgttcaggcacctacgctaagccagaaagattcctcggtatcg

SEQ ID NO: 157449 - DNA, 75 bp, synthetic construct
  source 1..75: mol_type = other DNA
cagcgtcatcaccgccacagtcgttgataataatggctttccggtgaaaggtgtgactgtgaacttcaccagcag

SEQ ID NO: 157450 - DNA, 75 bp, synthetic construct
  source 1..75: mol_type = other DNA
acggcggctgattatgagttttcaagctctgcctcctgggtcgatgttgatgctaccggtaaagtgacatataaa

SEQ ID NO: 157451 - DNA, 75 bp, synthetic construct
  source 1..75: mol_type = other DNA
gtgactcccagtaataacgctatatatacgaccaatcacgacggcaatttttacgcaagctttaccgctacaaaa

SEQ ID NO: 157452 - DNA, 75 bp, synthetic construct
  source 1..75: mol_type = other DNA
cgtgggtgtgggtggtgacgttcgtaacgattttaaccgccgcgaatctgaagagcgttaacctggtcgccaatt

SEQ ID NO: 157453 - DNA, 75 bp, synthetic construct
  source 1..75: mol_type = other DNA
gcggcgcatatttgtggtatctgatccgccgttatcgcaaagtgccgctgtacgagggcgacagaacgccggtga

SEQ ID NO: 157454 - DNA, 75 bp, synthetic construct
  source 1..75: mol_type = other DNA
atctcacaccaatgaccgtgttcgatacctttggcattgtgtccggaatcagcgacggtcacgttccggcgtcct

SEQ ID NO: 157455 - DNA, 75 bp, synthetic construct
  source 1..75: mol_type = other DNA
gccgcaggcccggcagggccacagggacctaaaggggatacaggagccacaggccaggcaggtgcgcagggtccg

SEQ ID NO: 157456 - DNA, 75 bp, synthetic construct
  source 1..75: mol_type = other DNA
gggccacagggacctaaaggggatacgggagccgcaggcccggcagggccacagggacctaaaggggatacagga

SEQ ID NO: 157457 - DNA, 75 bp, synthetic construct
  source 1..75: mol_type = other DNA
ttagctttcgcgcttcaaatgaaacagcagtattaattactgctttttattcattacatggggatcgcttagggt

SEQ ID NO: 157458 - DNA, 75 bp, synthetic construct
  source 1..75: mol_type = other DNA
ccgcgccagtctacccgcagacgcatctgagttttctggcaaacgtctataaccagaaggcgcgtgagttctacc

SEQ ID NO: 157459 - DNA, 75 bp, synthetic construct
  source 1..75: mol_type = other DNA
gtgattgattgcagccacccgccgcgcgaggatgcaccgcgtaatcactgtgatttaaataccgtgcttgcgctg

SEQ ID NO: 157460 - DNA, 75 bp, synthetic construct
  source 1..75: mol_type = other DNA
ccagtttgatgcgtggctgatggagaatgcgctgccgccgggttttgaggcggggtttgatgggatggagattgg

SEQ ID NO: 157461 - DNA, 75 bp, synthetic construct
  source 1..75: mol_type = other DNA
gcggcgcatatttgtggtacctgatccgccgctatcgcaaagtaccattgtatgatggcgacagaacgccggtta

SEQ ID NO: 157462 - DNA, 75 bp, synthetic construct
  source 1..75: mol_type = other DNA
ttggctttagccaaggctttacagtgctcccctgattacttgttgaaaggagaagatagtctttcaaacattgcc

SEQ ID NO: 157463 - DNA, 75 bp, synthetic construct
  source 1..75: mol_type = other DNA
tcgcgttattgattacgccgtaacgctgccttacgtcgatgctgaacggattggcgtgctgggtatttgcggcgg

SEQ ID NO: 157464 - DNA, 75 bp, synthetic construct
  source 1..75: mol_type = other DNA
tttctgctgttgaaggtgaaatcgaatttcctgacgttaacataccggagcacccaggggctgaattacttactc

SEQ ID NO: 157465 - DNA, 75 bp, synthetic construct
  source 1..75: mol_type = other DNA
agggattataacaggggataaaattacagaacatcatgcggattatttttcgagcgcattccttgtacctagagt

SEQ ID NO: 157466 - DNA, 75 bp, synthetic construct
  source 1..75: mol_type = other DNA
cttaactaatagtattctggctcgagctgaaattttggagcagtttgtaaagtgtttggaaacagaaatagttct

SEQ ID NO: 157467 - DNA, 75 bp, synthetic construct
  source 1..75: mol_type = other DNA
cgaaggtataaccacaggagataaagtgactgaatcgcaagcggatcgtttttcaagcgcgttgctagttcctcg

SEQ ID NO: 157468 - DNA, 75 bp, synthetic construct
  source 1..75: mol_type = other DNA
caaatgatattgaacgtgtagcggaagactgcagaagagcatggaacttagggctgggacctatatcctcaatgg

SEQ ID NO: 157469 - DNA, 75 bp, synthetic construct
  source 1..75: mol_type = other DNA
caaattggagaagggatttaggccatcagagcaatgcctggagttaatagcctcagctcttatgattaagcccga

SEQ ID NO: 157470 - DNA, 75 bp, synthetic construct
  source 1..75: mol_type = other DNA
tggaaaaaagcgtcaccacgcgggactacaactaccgcaccgccacagcagagatgatgacagagcagcatgacg

SEQ ID NO: 157471 - DNA, 75 bp, synthetic construct
  source 1..75: mol_type = other DNA
gccggagaaacctacaacgcggtgctgatcaaatccaccggcaccaccgccagcaatatcgaccagacggtcaac

SEQ ID NO: 157472 - DNA, 75 bp, synthetic construct
  source 1..75: mol_type = other DNA
gctacaccggcaacggcaaagccagctacgtcaacggcgtagcgacgctggatgcgcaggccggaaacatcggtg

SEQ ID NO: 157473 - DNA, 75 bp, synthetic construct
  source 1..75: mol_type = other DNA
ttaatagcgaggctgtttataacacttttttcaaacctgttttggaagatggtgagcttgtaggtcgcttgaata

SEQ ID NO: 157474 - DNA, 75 bp, synthetic construct
  source 1..75: mol_type = other DNA
ttatgattattcacataaaattaaaaataacacaagtataaaatatgattctattgattattcactagatgatta

SEQ ID NO: 157475 - DNA, 75 bp, synthetic construct
  source 1..75: mol_type = other DNA
cagagatgcagttaaatgaaaaagggtattattttgccgtactggtggatttgcccctatatttccagacatctg

SEQ ID NO: 157476 - DNA, 75 bp, synthetic construct
  source 1..75: mol_type = other DNA
aacttgtgcacagccttgggttatattacttgccagaaagaaatgcatattgtcgtctcgatgaacggggtgata

SEQ ID NO: 157477 - DNA, 75 bp, synthetic construct
  source 1..75: mol_type = other DNA
gcatcttcaaaaaatacttttcatttccaccgggaaagtataaaaacagaataagtaattcctcagagcttattc

SEQ ID NO: 157478 - DNA, 75 bp, synthetic construct
  source 1..75: mol_type = other DNA
gatttggtaatgaagcaaagaccatcatccagggtgatgcattaaccgaacttaaaaagatccccgccgatagtg

SEQ ID NO: 157479 - DNA, 75 bp, synthetic construct
  source 1..75: mol_type = other DNA
tgatcttgatgatttttctctggcggtgagccggattgcaaaagcaatatggtcagctatcaaatggatcggcgg

SEQ ID NO: 157480 - DNA, 75 bp, synthetic construct
  source 1..75: mol_type = other DNA
agtcagtatccgcctgtatccgatctacgcttacccgaaaaccactcaggaaattatcgatttttccgaagtcga

SEQ ID NO: 157481 - DNA, 75 bp, synthetic construct
  source 1..75: mol_type = other DNA
atctgtactgttaaaaccattcacagcaatgaatttaagcaattggtttctgccgggggtgcggtcgttgaacac

SEQ ID NO: 157482 - DNA, 75 bp, synthetic construct
  source 1..75: mol_type = other DNA
tggggggcgctgccgccggatatccggttaagcccgcatctttacctggcgaccaacagcgcacaggggccgtgg

SEQ ID NO: 157483 - DNA, 75 bp, synthetic construct
  source 1..75: mol_type = other DNA
actgtgccgccgacccaattcagaaatgacaccatcacgatttatgttgatggtggtcgccagtatttgcctgcg

SEQ ID NO: 157484 - DNA, 75 bp, synthetic construct
  source 1..75: mol_type = other DNA
acaaaaccgcatacgtgaagggcatgtggaagatgtttatgcgtatcggcgcaggcaaagatttagcgtacggta

SEQ ID NO: 157485 - DNA, 75 bp, synthetic construct
  source 1..75: mol_type = other DNA
caggggcgcgtggtttacgctcataaaccggggcagatgattgtggatgagtgcttcggtgcaggcactgacgcc

SEQ ID NO: 157486 - DNA, 75 bp, synthetic construct
  source 1..75: mol_type = other DNA
gctggatgacgagcgcggcaaggagcatatcaaggtcagcaccgagtatggcggcaagagccagctcaacctcgg

SEQ ID NO: 157487 - DNA, 75 bp, synthetic construct
  source 1..75: mol_type = other DNA
cgattggcgcagcgttcttctccgcaggccgtttttacccggcaagacgtcgcggtaacggtgctggaaacagaa

SEQ ID NO: 157488 - DNA, 75 bp, synthetic construct
  source 1..75: mol_type = other DNA
acattatcctgaacgcaaaagcaggagataaatacgaggctattactcttactggtaatattcttaaacaaaatg

SEQ ID NO: 157489 - DNA, 75 bp, synthetic construct
  source 1..75: mol_type = other DNA
ctctgcacttatttagagtcgtatttgactgaggttgcaacatggcactgcgataccatcaatcgcaggcttaaa

SEQ ID NO: 157490 - DNA, 75 bp, synthetic construct
  source 1..75: mol_type = other DNA
tgcaacggtatagaaatgaagggccttctggtctggtttcccaccgacgtggaaagcgtcctaataattcctttt

SEQ ID NO: 157491 - DNA, 75 bp, synthetic construct
  source 1..75: mol_type = other DNA
acggatcacatttacgaataccaagagcaagaaaaacagaaccgtcccgatttcggataacatccagaagctgtt

SEQ ID NO: 157492 - DNA, 75 bp, synthetic construct
  source 1..75: mol_type = other DNA
gaaagtggctttgtgaatgttatccatatggggcaagcggaaggcgtattcgtagacagtttgctacaaaaggtg

SEQ ID NO: 157493 - DNA, 75 bp, synthetic construct
  source 1..75: mol_type = other DNA
ttgtattgacgaagataatgttaaagcattgcgtaacgctaaaaccattgaacaggttttacaagtactcaacat

SEQ ID NO: 157494 - DNA, 75 bp, synthetic construct
  source 1..75: mol_type = other DNA
gggacaaaacttgcggttatgggcgttgccgggccgttcggctttggcatgatgtcccgtagtgttgtagagaaa

SEQ ID NO: 157495 - DNA, 75 bp, synthetic construct
  source 1..75: mol_type = other DNA
gcaaaatgatcaagagcaccccgcccgcgtcggcctgcttaatctggggcttaatcctgataaaaacgcgactga

SEQ ID NO: 157496 - DNA, 75 bp, synthetic construct
  source 1..75: mol_type = other DNA
agttagtcaaatatcaggacaaaatacctgaactcaataaagagtttttattgcgggcttctcagaatgactcgt

SEQ ID NO: 157497 - DNA, 75 bp, synthetic construct
  source 1..75: mol_type = other DNA
agagttttcgttacgtgcagcacaaaatgattcgttactgacctctgcacatacaagtaaatatcagaatcttac

SEQ ID NO: 157498 - DNA, 75 bp, synthetic construct
  source 1..75: mol_type = other DNA
aaaacgcgactgaaaacctgcctgtattcctgaaaaaggttgcagcgctggcaaaggaatatcagggaactggtc

SEQ ID NO: 157499 - DNA, 75 bp, synthetic construct
  source 1..75: mol_type = other DNA
agaaagcacttattcgccttatttttccggtgttggcaatgtgctcaatacactggcagcagcacaaaatgatat

SEQ ID NO: 157500 - DNA, 75 bp, synthetic construct
  source 1..75: mol_type = other DNA
ttatagttgcaggcgactacagcaataaaagagcaagtagtattcttgcaccaggaagaggaggtgcatttggtg

SEQ ID NO: 157501 - DNA, 75 bp, synthetic construct
  source 1..75: mol_type = other DNA
agaataaaagaaaagacatctctaatcgataaagcttttcatcgaaaagaaaaatcatacaaaaacccctaccaa

SEQ ID NO: 157502 - DNA, 75 bp, synthetic construct
  source 1..75: mol_type = other DNA
tatttttttaccagataaaccaaatggaacaggaatattgattattcccgggggggctaccaggctgttatgtta

SEQ ID NO: 157503 - DNA, 75 bp, synthetic construct
  source 1..75: mol_type = other DNA
catgccgagaaacagtttaaccgcaaggttgagctcaataagcagttaaagaatttaaggtgcgagcttcaagag

SEQ ID NO: 157504 - DNA, 75 bp, synthetic construct
  source 1..75: mol_type = other DNA
atgagcatgatttgcttgttcttgcaactgggaaagttggttcaccaaatgaatttttctcaattattgatatta

SEQ ID NO: 157505 - DNA, 75 bp, synthetic construct
  source 1..75: mol_type = other DNA
cgggaatgataatggctgggatattggtggtggttgtgaaggctcacgggaacagtgtgctgtacgtgacccgag

SEQ ID NO: 157506 - DNA, 75 bp, synthetic construct
  source 1..75: mol_type = other DNA
gaatatggagtttttacgttcgcgccttgctcttcacgaaataaatcaaaaacttgctcagacttatgaagaatt

SEQ ID NO: 157507 - DNA, 75 bp, synthetic construct
  source 1..75: mol_type = other DNA
gaacgaaagagcttcgttccatgcaatggaagaacgtcgattttgaaaacaggattatcaccatcgacgccagtg

SEQ ID NO: 157508 - DNA, 75 bp, synthetic construct
  source 1..75: mol_type = other DNA
gaactgtatgacaaaccggaagcagttcaggaggcgctggaaaaagttattccttttttcaacacccatctggga

SEQ ID NO: 157509 - DNA, 75 bp, synthetic construct
  source 1..75: mol_type = other DNA
ggtcaacaaagctttaaggcaggcatcaactattgcggcggttgtggcgcagtttatttcggataacagcggcga

SEQ ID NO: 157510 - DNA, 75 bp, synthetic construct
  source 1..75: mol_type = other DNA
atgattatgacaaactgcttaagagtgtatcaaaggttgataatatttatgcattaaaagttttgccaatcataa

SEQ ID NO: 157511 - DNA, 75 bp, synthetic construct
  source 1..75: mol_type = other DNA
cctatgagcgaagagctttcctctatgatactccagaacagcactcatatgctaaagctttaagtgatgtccgac

SEQ ID NO: 157512 - DNA, 75 bp, synthetic construct
  source 1..75: mol_type = other DNA
tgcaaccgaaatctgccgcgcaggaggaattgctaaagcgcgggagttggatgtcacagaccgacagtccatggc

SEQ ID NO: 157513 - DNA, 75 bp, synthetic construct
  source 1..75: mol_type = other DNA
ggaaacctatgcccgcatggtagcttttgcaatcagtgaaccagaagatgtagggattaacgaaattattttcag

SEQ ID NO: 157514 - DNA, 75 bp, synthetic construct
  source 1..75: mol_type = other DNA
cgtcatgagtagtatcggtattgagagtttattcagaaagtttgcgggcaacccttataagctccatacggcttt

SEQ ID NO: 157515 - DNA, 75 bp, synthetic construct
  source 1..75: mol_type = other DNA
cctatggaatatcgcagagaaaatatattgttacgaatcccgatgattatgataaatattcttacatggttaaaa

SEQ ID NO: 157516 - DNA, 75 bp, synthetic construct
  source 1..75: mol_type = other DNA
ccgtatgccaacatcattaccgtgcatcgtggcgacgagaagaaaaaggatatcgtagcgttggttgatgtcctg

SEQ ID NO: 157517 - DNA, 75 bp, synthetic construct
  source 1..75: mol_type = other DNA
tgcgttaatcctggcgttgtggaaagcgaacttgcctcaaccatcacccatgctgaaaccatggcggtgatggat

SEQ ID NO: 157518 - DNA, 75 bp, synthetic construct
  source 1..75: mol_type = other DNA
caattaaatggttttggatttgagtcagtggattataatcatccagttgatattgattacttaatgaatttaaaa

SEQ ID NO: 157519 - DNA, 75 bp, synthetic construct
  source 1..75: mol_type = other DNA
gctgggatgtgtttcattacgatacgttcccgaataaggatttcaatatttggcacttcccgcaagagatgcgag

SEQ ID NO: 157520 - DNA, 75 bp, synthetic construct
  source 1..75: mol_type = other DNA
agagtggtacgacagggagtgaccgctgttacggcattggtttgctgtgtgtgcgtaaagacacgctgcacattt

SEQ ID NO: 157521 - DNA, 75 bp, synthetic construct
  source 1..75: mol_type = other DNA
gccacgtttatgaatctgttttcagccgttgtgtatttgcaggggggcggcatgcagatgatgctggagacactc

SEQ ID NO: 157522 - DNA, 75 bp, synthetic construct
  source 1..75: mol_type = other DNA
gccacacacgattttttatcagcagagtatcgggccgagctggaggtgctagctagttcgttccttcctgccgga

SEQ ID NO: 157523 - DNA, 75 bp, synthetic construct
  source 1..75: mol_type = other DNA
ggcatgaggaaggggaggaactcgttgcgatttggtgtcgatctgtcgatgccacacacgattttttatcagcag

SEQ ID NO: 157524 - DNA, 75 bp, synthetic construct
  source 1..75: mol_type = other DNA
ttaaaaacaggcttaaattactcggcggtgaactatattgtatagacagatgtttgacagggagacagtatgcaa

SEQ ID NO: 157525 - DNA, 75 bp, synthetic construct
  source 1..75: mol_type = other DNA
gtagtgatttttatgaagatagcgaaggtgacagagtcaatgtctattatccgccagggcatccagaacaagccg

SEQ ID NO: 157526 - DNA, 75 bp, synthetic construct
  source 1..75: mol_type = other DNA
actgaaaaaacaccttcctgctggcccgcgactggttgaacctttcgcgggttcctgtgcagtgatgatggcgac

SEQ ID NO: 157527 - DNA, 75 bp, synthetic construct
  source 1..75: mol_type = other DNA
caggcgtttaccagcaacatcatgtggggcctgccagtggttccgactaaggcgcaagccgccggcacctttacg

SEQ ID NO: 157528 - DNA, 75 bp, synthetic construct
  source 1..75: mol_type = other DNA
caacccatggttacagttgcgccttctgagccagaaaaaataaacgttccatggggggggcgcagtcatccagaa

SEQ ID NO: 157529 - DNA, 75 bp, synthetic construct
  source 1..75: mol_type = other DNA
tttgcggattgtatgaacatgatgggatatggctgatatttgccattgacagaaatggttttattgtaatggata

SEQ ID NO: 157530 - DNA, 75 bp, synthetic construct
  source 1..75: mol_type = other DNA
tactattttatatttattgtttgggtttgttttttttatcttcaaatggttaggggttaactggctgtcattaat

SEQ ID NO: 157531 - DNA, 75 bp, synthetic construct
  source 1..75: mol_type = other DNA
tatatatcgactttgtgtgtgtcgacacttttaccttcttatatcctttgggtgtatcgtgattcattaattgca

SEQ ID NO: 157532 - DNA, 75 bp, synthetic construct
  source 1..75: mol_type = other DNA
gtcgatcagatcagaatggaagtatcacgtattcctctaaagccatctctgaaaatatggttatcaacaatggcc

SEQ ID NO: 157533 - DNA, 75 bp, synthetic construct
  source 1..75: mol_type = other DNA
gctgtttttcgcgaccctaaaacgggcatatctcagggtgctttaattgctgctgatggtgtgtgggaatatgac

SEQ ID NO: 157534 - DNA, 75 bp, synthetic construct
  source 1..75: mol_type = other DNA
aatacaaatgcgcctataagcctacaagtgctcggtgagttatatggatatcaaagatattttatgcctaaaggt

SEQ ID NO: 157535 - DNA, 75 bp, synthetic construct
  source 1..75: mol_type = other DNA
aatttaaagagcaggctcggacccgttatattagcgatagggaatatgatgcactttatagcgttgcttctattc

SEQ ID NO: 157536 - DNA, 75 bp, synthetic construct
  source 1..75: mol_type = other DNA
cgatgatggatgatacgtatgagacggatgacgggggaagtgaagcggaacaacatgcgcagtctgtagtggtca

SEQ ID NO: 157537 - DNA, 75 bp, synthetic construct
  source 1..75: mol_type = other DNA
ccctgtaaggcacggtttattgcgtcgatgatggatgatacgtatgagacggatgacgggggaagtgaagcggaa

SEQ ID NO: 157538 - DNA, 75 bp, synthetic construct
  source 1..75: mol_type = other DNA
gactcccgttttcaggcgaagtgctacgctcgaattgcggattttaaaaagcagggcaccacgctgctgctggtc

SEQ ID NO: 157539 - DNA, 75 bp, synthetic construct
  source 1..75: mol_type = other DNA
ttggcgtgctgggagtgtgtggggggggtggctatgccattaatgccgcgctgacagaaaaacgaattaaagcag

SEQ ID NO: 157540 - DNA, 75 bp, synthetic construct
  source 1..75: mol_type = other DNA
atgttgatgctgaacgcattggcgtgctgggtgtgtgtgggggggggtggctatgccattaatgccgcgctgaca

SEQ ID NO: 157541 - DNA, 75 bp, synthetic construct
  source 1..75: mol_type = other DNA
gaaatgggagaaatctttagctacatgcctggggaaatagacagttatatgaaacacataaataataaactttct

SEQ ID NO: 157542 - DNA, 75 bp, synthetic construct
  source 1..75: mol_type = other DNA
tccgtgacctgctggctcagggccgcatttccagtaacgctctggaatatgtgcgtgaagaggtgtttaccaata

SEQ ID NO: 157543 - DNA, 75 bp, synthetic construct
  source 1..75: mol_type = other DNA
aagctatcgaagaatcccagcagaaaatgacccagcttttcgatgcgcagaaagcagaaatcgaaagcacaggcc

SEQ ID NO: 157544 - DNA, 75 bp, synthetic construct
  source 1..75: mol_type = other DNA
acagggcaccttcgacgcgaagacgttcaataagtcgctcggcagtgacgctgactctgctggcgcactgatcca

SEQ ID NO: 157545 - DNA, 75 bp, synthetic construct
  source 1..75: mol_type = other DNA
catcaatttcagcattgaacctggtgaagcggtcggcattgtcggggtgaacggcgccggtaaaagtacgttact

SEQ ID NO: 157546 - DNA, 75 bp, synthetic construct
  source 1..75: mol_type = other DNA
agtaaaggagcttatcgaagaacagcgtaaatccatcaaccagaccggtgaaatcaacaagcagatgcagaccga

SEQ ID NO: 157547 - DNA, 75 bp, synthetic construct
  source 1..75: mol_type = other DNA
gaaggaagagggccaactgctgaacggcgacggtaccggggataacctggaaggtctgaacaaagtggcaaccgc

SEQ ID NO: 157548 - DNA, 75 bp, synthetic construct
  source 1..75: mol_type = other DNA
cgttaccgctaaatgatggaacatcaatctttgaaattgctgataaagagctactagaaatagacgcttatcaac

SEQ ID NO: 157549 - DNA, 75 bp, synthetic construct
  source 1..75: mol_type = other DNA
tagtagggcagttacctgatttgtttttttataataaacaattgtcaatgattttattatggggggggggctttt

SEQ ID NO: 157550 - DNA, 75 bp, synthetic construct
  source 1..75: mol_type = other DNA
aaacgattattatacaagtattctgagtggggcttctctacaaaaaacgatagatatacttatagctatcagaca

SEQ ID NO: 157551 - DNA, 75 bp, synthetic construct
  source 1..75: mol_type = other DNA
aatagatttgctgaaaaccaaagacgaaggctcagatcctaatacctatctgtttgaacgcgttgatcagtttct

SEQ ID NO: 157552 - DNA, 75 bp, synthetic construct
  source 1..75: mol_type = other DNA
atgctgaagttactgaaaactattatgcgcgccggaaccgcgacggtgaaatatcccttcgcgccactggaggtc

SEQ ID NO: 157553 - DNA, 75 bp, synthetic construct
  source 1..75: mol_type = other DNA
ggagtccggagagtaacggaacaacagaaagcttagtgaaaacgataaagcgtgactacatcagtatcatgccca

SEQ ID NO: 157554 - DNA, 75 bp, synthetic construct
  source 1..75: mol_type = other DNA
tacgtaatagcgatcgctcccggctcgcactgggagcggcgagcccgactgaggaagtagatgcaaatggcaatg

SEQ ID NO: 157555 - DNA, 75 bp, synthetic construct
  source 1..75: mol_type = other DNA
tgtggaaagagccgggaaaaagctgcatccatctggaaaaaacacatctgattatcaaactgttacgggtgatgc

SEQ ID NO: 157556 - DNA, 75 bp, synthetic construct
  source 1..75: mol_type = other DNA
cagtccctatgctggcggatccatcaccaacagcccattacccgtagctgtgttcggtgatgccccggtcaatac

SEQ ID NO: 157557 - DNA, 75 bp, synthetic construct
  source 1..75: mol_type = other DNA
aggatctgccgccggtactggctgaaccgcacgcaggatgggtgaatgcactggaacaagaatggttacgccgtt

SEQ ID NO: 157558 - DNA, 75 bp, synthetic construct
  source 1..75: mol_type = other DNA
cgaatgggttggcccgttcctggcctgccccgacggtgagaccctggacgcattcgaggtgaacatcaacttcca

SEQ ID NO: 157559 - DNA, 75 bp, synthetic construct
  source 1..75: mol_type = other DNA
gtgctgacggtaaacgctctacgtggcatacacaacgatttacaagagctaaacgaaaggctttaggggaaaagg

SEQ ID NO: 157560 - DNA, 75 bp, synthetic construct
  source 1..75: mol_type = other DNA
cggacaggcccgaacatcgttgatgaaattcagcgactgacggtcgttatccataacgtcggcggccagtggaaa

SEQ ID NO: 157561 - DNA, 75 bp, synthetic construct
  source 1..75: mol_type = other DNA
tctgcgctctccgcggccttctggcctatcttcttatggctgcttagcgcccgtttttcggcgggtgtgcaaaaa

SEQ ID NO: 157562 - DNA, 75 bp, synthetic construct
  source 1..75: mol_type = other DNA
cggaaaataagctccagtattattgcatttttcttaacgaactggcacatggaggtcgctttatgaccaattgtg

SEQ ID NO: 157563 - DNA, 75 bp, synthetic construct
  source 1..75: mol_type = other DNA
taggttatagatataatgtaaaaaaagaaaacactaatatattgcctacaaacgttatagaagtaaaacgtgtaa

SEQ ID NO: 157564 - DNA, 75 bp, synthetic construct
  source 1..75: mol_type = other DNA
cttaaaattggatcaatctcttctgctttcatttgttaatgcgggacttggacaaaataatggaggcttcgatgg

SEQ ID NO: 157565 - DNA, 75 bp, synthetic construct
  source 1..75: mol_type = other DNA
cacggcactcgtcccttttagcctgcggctggagggatgtcctccgggttcagttgcgattttatttacgggaac

SEQ ID NO: 157566 - DNA, 75 bp, synthetic construct
  source 1..75: mol_type = other DNA
ttttgataaaaatcattaagggattcatcagcgccgagcagctgtttgagctacgcgaaatgctcgaaacacatt

SEQ ID NO: 157567 - DNA, 75 bp, synthetic construct
  source 1..75: mol_type = other DNA
ggcgctggtagaggcgatgaatgagctctggaataacgaggaaacctccaaccgctatggcgaaaactcgcgtcg

SEQ ID NO: 157568 - DNA, 75 bp, synthetic construct
  source 1..75: mol_type = other DNA
gcagcagtcgccaccggctatattctcgccgctgtggtgggggattcacggctgggcatccatgcgcattccgac

SEQ ID NO: 157569 - DNA, 75 bp, synthetic construct
  source 1..75: mol_type = other DNA
ttcaccaagcggatgaacgggcgacagatttccgatatgccaggagaaatgacggcacccggagccttgaaggaa

SEQ ID NO: 157570 - DNA, 75 bp, synthetic construct
  source 1..75: mol_type = other DNA
ggagcggcgagcccgactgaggaagtagatgcaaatggcaatgtcacactaaactttttgccaattatcgagcgt

SEQ ID NO: 157571 - DNA, 75 bp, synthetic construct
  source 1..75: mol_type = other DNA
ctctctccagcaaccaatgccaccagggattaaagccccccgcaacattgcgcctcaccggaacctttccggctt

SEQ ID NO: 157572 - DNA, 75 bp, synthetic construct
  source 1..75: mol_type = other DNA
tttctcctacgatattaataaaattagcaaactatgtaagcatctgatcttcttaatactcattaccgcatgttc

SEQ ID NO: 157573 - DNA, 75 bp, synthetic construct
  source 1..75: mol_type = other DNA
gtgcttcatttatttcaataatttatttgccttttgctttattattagcaatgattgaaatgattaatggggcca

SEQ ID NO: 157574 - DNA, 75 bp, synthetic construct
  source 1..75: mol_type = other DNA
acggcgcaccgattcacaactacgcaggggataaccttgctaatggggtgaaggtaggtagtggaagcggaaaca

SEQ ID NO: 157575 - DNA, 75 bp, synthetic construct
  source 1..75: mol_type = other DNA
aacgcatgtccgacgtgctggtcaatagtgccagcgatctcttttctcgcacggaaattaaaggcgtaagcctcc

SEQ ID NO: 157576 - DNA, 75 bp, synthetic construct
  source 1..75: mol_type = other DNA
caccgctgaaaatcgagagctacacgctggatggcgttctggacgaggaccgggcataccgcatcggcatgcgcc

SEQ ID NO: 157577 - DNA, 75 bp, synthetic construct
  source 1..75: mol_type = other DNA
gcctgaagtggctggggatgtcacggatctggcctatatcattttcacttccggctccaccggtaccccgaaagg

SEQ ID NO: 157578 - DNA, 75 bp, synthetic construct
  source 1..75: mol_type = other DNA
aataaacaaattttatgtgcaggtgagaattcttaccgtaaaggcggtgatatcattataaaactgtttagaatg

SEQ ID NO: 157579 - DNA, 75 bp, synthetic construct
  source 1..75: mol_type = other DNA
gtgagtaatggtaaaggggctatgcgggaaattgttaggcatggagttaatggatttatttgcgacttaaataat

SEQ ID NO: 157580 - DNA, 75 bp, synthetic construct
  source 1..75: mol_type = other DNA
tttgtccgcaggaacaacatccctgatccggtttttgttcctggtggtcgcagtgtggaggtgatcagtgagcag

SEQ ID NO: 157581 - DNA, 75 bp, synthetic construct
  source 1..75: mol_type = other DNA
cctggtttatcaggagcagcgggaacggggcggacgtaacattgtgcgccgtgaatatccgctgcgtgaaagcgg

SEQ ID NO: 157582 - DNA, 75 bp, synthetic construct
  source 1..75: mol_type = other DNA
gcttttgccaaactgcacgatcgccaccaggcgcaggcattgcaagctaaggaagcggaggcggcggcactggcg

SEQ ID NO: 157583 - DNA, 75 bp, synthetic construct
  source 1..75: mol_type = other DNA
atcccgaatatgttgtaaaagttggtaatctattacatctggatgaaaccccaatgatgttagacggtttagctg

SEQ ID NO: 157584 - DNA, 75 bp, synthetic construct
  source 1..75: mol_type = other DNA
tagggggggtaatcacattaagagattggcgtcttgagaataaggaaacaagtggtttttataaagagaaaaaaa

SEQ ID NO: 157585 - DNA, 75 bp, synthetic construct
  source 1..75: mol_type = other DNA
cggtacgcctggtgatccagtatcgcaaggtcggcaccaccgcctggcagcagcagtctccgttctattcacgca

SEQ ID NO: 157586 - DNA, 75 bp, synthetic construct
  source 1..75: mol_type = other DNA
ccaaaacgtcggtttacaggaaacggtaaacaaggctggtaacgctgttcaaaagacaggcgataccttgtccgg

SEQ ID NO: 157587 - DNA, 75 bp, synthetic construct
  source 1..75: mol_type = other DNA
aaggcttatcaattgacatgggcggtactggtgcagttaacgtagctgaagcacgtaaaaacttaggtttaggta

SEQ ID NO: 157588 - DNA, 75 bp, synthetic construct
  source 1..75: mol_type = other DNA
tcaaaaaaaaactaataagaatgattatttcccgcacagatcaattttatgttgagactataagaaattataaca

SEQ ID NO: 157589 - DNA, 75 bp, synthetic construct
  source 1..75: mol_type = other DNA
acgtaatgagcgaacagcctgaaatgcgcagtatccagccggttcacgtctgggataactaccgctttacccggt

SEQ ID NO: 157590 - DNA, 75 bp, synthetic construct
  source 1..75: mol_type = other DNA
agcgcaccgtcgcgcagttgcatgcgatggaatggattaacggtgacggttatcagcacaacgtgtttgtccgct

SEQ ID NO: 157591 - DNA, 75 bp, synthetic construct
  source 1..75: mol_type = other DNA
tcagcgtctctggtcagcctgggagaaagcaacaggcgaacagcgactgcatgcagagcgtcgcacgaaagctgc

SEQ ID NO: 157592 - DNA, 75 bp, synthetic construct
  source 1..75: mol_type = other DNA
gcgcaaagaatttgtcgatgataaccgggtgaaagtgaatagtgacggtaatttcgtcaatgatttgtcgggcag

SEQ ID NO: 157593 - DNA, 75 bp, synthetic construct
  source 1..75: mol_type = other DNA
aaacgcttttcaagccagggttatgttgaaccgggtaaatacagtttacaggttgaggtgaataaacagccatta

SEQ ID NO: 157594 - DNA, 75 bp, synthetic construct
  source 1..75: mol_type = other DNA
agcatcagtaccgatgatcaaatgttaccgccaaacctgcgcggctacgccccccaatatttcaggtgttgcaca

SEQ ID NO: 157595 - DNA, 75 bp, synthetic construct
  source 1..75: mol_type = other DNA
tagctggtgacggtgatttgtattttggtagttattctgaccacacaaaaaacagcaaagtaatcacacaagcaa

SEQ ID NO: 157596 - DNA, 75 bp, synthetic construct
  source 1..75: mol_type = other DNA
aagtgttatgtttgattgggttatattaagcagtgagattgaaagttttagaaaagacaatgaaaaaataaaaat

SEQ ID NO: 157597 - DNA, 75 bp, synthetic construct
  source 1..75: mol_type = other DNA
ttgtggccgctggttatgatgctggcgtaaggcttggggatgtgatcgagaaagatatggttgccatcccgctta

SEQ ID NO: 157598 - DNA, 75 bp, synthetic construct
  source 1..75: mol_type = other DNA
tttcggccagaacaactgatgaattaaagcggaaactgaacgaaaaaatccgtgaaggatggcagccttatgaaa

SEQ ID NO: 157599 - DNA, 75 bp, synthetic construct
  source 1..75: mol_type = other DNA
acagtggcaaagatggcatctatttccacttaagagacaatgtagatgccttcttaaccttatcagcaactgaaa

SEQ ID NO: 157600 - DNA, 75 bp, synthetic construct
  source 1..75: mol_type = other DNA
aacccgtgcgactgatgctgcaggctcagcacgtgcagccagcacgtcagccggacaggccgcgtcgtcggctca

SEQ ID NO: 157601 - DNA, 75 bp, synthetic construct
  source 1..75: mol_type = other DNA
cttttttttataataattggtattaaaaaaaacgcgctttactatttttacaatgaaaatctcctgcggcaagaa

SEQ ID NO: 157602 - DNA, 75 bp, synthetic construct
  source 1..75: mol_type = other DNA
aatcaagacaagcaacttttctttataatcattggtacagagaaaaaggctctttattattttgtaggtgaaaat

SEQ ID NO: 157603 - DNA, 75 bp, synthetic construct
  source 1..75: mol_type = other DNA
taggacggaagattttcgttaacaccctgcctgatggaaaaattaaggctgaagagatcaagcctttcccacata

SEQ ID NO: 157604 - DNA, 75 bp, synthetic construct
  source 1..75: mol_type = other DNA
attgaaagcggtaagcttgtatcgctgcttgatgactttcttccacaatttccgggcttctatctgtatttccca

SEQ ID NO: 157605 - DNA, 75 bp, synthetic construct
  source 1..75: mol_type = other DNA
acgggagagctttcgaccttgcgattgaaccgcagattacgactaatgatctgcgtctgatgttgaggctggctc

SEQ ID NO: 157606 - DNA, 75 bp, synthetic construct
  source 1..75: mol_type = other DNA
aggtcaattgatttactttggtacgtggcatacacatcctgaaaaaaatccccatgcttcatacatcgatataag

SEQ ID NO: 157607 - DNA, 75 bp, synthetic construct
  source 1..75: mol_type = other DNA
ataatcagggaaatagctgttatcgcggttatcttgctgaatatcctgacagcccagtgtacaaacaacttctta

SEQ ID NO: 157608 - DNA, 75 bp, synthetic construct
  source 1..75: mol_type = other DNA
gctggatatactcggcgaaacccgtgctacatctgccacggcattgattgaagaaataattgcctactgtgagag

SEQ ID NO: 157609 - DNA, 75 bp, synthetic construct
  source 1..75: mol_type = other DNA
gaagacccatattccgactacgaacctacaagtgatcttctatggtcagtcgacgtccgtaaagttgacctgacc

SEQ ID NO: 157610 - DNA, 75 bp, synthetic construct
  source 1..75: mol_type = other DNA
tcacttcgtgtgctgaccgccgaatcagggatttatcctcaaaagggctaagcagaatcctggcaaactacccgg

SEQ ID NO: 157611 - DNA, 75 bp, synthetic construct
  source 1..75: mol_type = other DNA
cactacgcaaaccctcgtaatctggtaagggctgcaatgatggcactcgcgaaaaccctgacacatgagttgccg

SEQ ID NO: 157612 - DNA, 75 bp, synthetic construct
  source 1..75: mol_type = other DNA
tggatgacgccattgcttttgcagggccaagatatacttcaatgctggatgttgtgacgaatgctcatgttggtc

SEQ ID NO: 157613 - DNA, 75 bp, synthetic construct
  source 1..75: mol_type = other DNA
taggcacatcagaaagcacaggcaaaatgttgttcctgaaaaaccacagaagcagcgctcaagtgctgttaaatg

SEQ ID NO: 157614 - DNA, 75 bp, synthetic construct
  source 1..75: mol_type = other DNA
tttaacccttacaaaacaatcagggactggcaatcgttttgttttacagaactcaggtaatgcagaactaccgtt

SEQ ID NO: 157615 - DNA, 75 bp, synthetic construct
  source 1..75: mol_type = other DNA
taacacagagcgcggcataatctatgctggtcctaacactgattcgcttggcgaagttcgcatcagggcaaagac

SEQ ID NO: 157616 - DNA, 75 bp, synthetic construct
  source 1..75: mol_type = other DNA
gtgaaggcctgtataaaggggggcaggggcgttatgtggacggcaattttgatgaaacttttgtcgccgaatggt

SEQ ID NO: 157617 - DNA, 75 bp, synthetic construct
  source 1..75: mol_type = other DNA
ttaaaaataaaagaaaatatcgattttaattatgtcggtgcagttaacggatattgcgatattcctgaacctgaa

SEQ ID NO: 157618 - DNA, 75 bp, synthetic construct
  source 1..75: mol_type = other DNA
ctggatagcggtgtgacggtgggcggcaaaacaacattttctgaccttgccacatttaacgcaggtattgcggga

SEQ ID NO: 157619 - DNA, 75 bp, synthetic construct
  source 1..75: mol_type = other DNA
gcagctgcagccggtatttttcttggcgcagcggcgatggttcactgcggcgagaccagtggtgcagaaacctgg

SEQ ID NO: 157620 - DNA, 75 bp, synthetic construct
  source 1..75: mol_type = other DNA
ttcatggcgaggcagtacgcctgtttttacagcaatatcgcgctacccggcattaagaatggtgttatttaacgc

SEQ ID NO: 157621 - DNA, 75 bp, synthetic construct
  source 1..75: mol_type = other DNA
caccttgctgcccctgatgccagaattattaaacgaagagacgtatgcaaatgtcattgatgctaatgacagcgc

SEQ ID NO: 157622 - DNA, 75 bp, synthetic construct
  source 1..75: mol_type = other DNA
gcggcaaaagagatatctctgtcagaggcaccgaactttgccgaggccatcattaataaccagatccagggtcgc

SEQ ID NO: 157623 - DNA, 75 bp, synthetic construct
  source 1..75: mol_type = other DNA
aagcctggcagcgactggtcgccgatttaccggaatcattctatacccaggcggcaaaagagatatctctgtcag

SEQ ID NO: 157624 - DNA, 75 bp, synthetic construct
  source 1..75: mol_type = other DNA
aaataaatttagaccagatatatacttagcatgcgcatcttctactaaaaatataaataccgatcttgattttat

SEQ ID NO: 157625 - DNA, 75 bp, synthetic construct
  source 1..75: mol_type = other DNA
ggttcgcaccatcaaagtttttatgagtttggtgccacgcgcatattgaacgttgggatcagtaaacgctttttt

SEQ ID NO: 157626 - DNA, 75 bp, synthetic construct
  source 1..75: mol_type = other DNA
agtacaaaatcactacagcctgctctatcgcgcttctgaagaggccgggatccttgattattgccgacaaaataa

SEQ ID NO: 157627 - DNA, 75 bp, synthetic construct
  source 1..75: mol_type = other DNA
atgtggcggcctttaccaacaaggaagagtaagggcctcaatctctgggataccgcagcagtatatggtatgggg

SEQ ID NO: 157628 - DNA, 75 bp, synthetic construct
  source 1..75: mol_type = other DNA
ggtcaaatagaaaaaatacagaaaaaaaatgataatgatgtttatcatttttcgatatatcagaatggattgacc

SEQ ID NO: 157629 - DNA, 75 bp, synthetic construct
  source 1..75: mol_type = other DNA
atggctttaatcccaataaaaaataaatttaatttattttgtcaaataaaatatctaattttgaaactgaagagt

SEQ ID NO: 157630 - DNA, 75 bp, synthetic construct
  source 1..75: mol_type = other DNA
gcgacgggcgggtgacagaacagctaaacccggcaggcttaagctacacgtatcagtatgagaaagaccgcatca

SEQ ID NO: 157631 - DNA, 75 bp, synthetic construct
  source 1..75: mol_type = other DNA
gtcactaaagctaaaagcattattgtgaaggactcggggacgtccacatttgataggtcaatcctttctgaaaaa

SEQ ID NO: 157632 - DNA, 75 bp, synthetic construct
  source 1..75: mol_type = other DNA
ctgaacggctttatctcccgcttcgaaaatctgtccaaaaatgcccgtgataacgtgcagtatatcggggatatg

SEQ ID NO: 157633 - DNA, 75 bp, synthetic construct
  source 1..75: mol_type = other DNA
tttatgactgatgccgtccgtaaacgctacgacgcgcaatatggcgccggggacagagctgaacaactccgaaat

SEQ ID NO: 157634 - DNA, 75 bp, synthetic construct
  source 1..75: mol_type = other DNA
atgtttaattcattttttttagaaaacatgattaaacttcaggataatttcttcaactattgcattgtcaaaggt

SEQ ID NO: 157635 - DNA, 75 bp, synthetic construct
  source 1..75: mol_type = other DNA
ccagtacagttgatttgacctttacggacgctcttacaaagactactaattggtcagtgccgcttaaagtgactg

SEQ ID NO: 157636 - DNA, 75 bp, synthetic construct
  source 1..75: mol_type = other DNA
ttatcttttagcgctcctgtttatgtcgatggacaaattgctggtacggcaaagtttgataaggctatggtaggc

SEQ ID NO: 157637 - DNA, 75 bp, synthetic construct
  source 1..75: mol_type = other DNA
agtcgtggtatccccccaaaaaaactgctgaatgaaatgattgagcaggcgtaccaggactttgtggcaaatgag

SEQ ID NO: 157638 - DNA, 75 bp, synthetic construct
  source 1..75: mol_type = other DNA
caaacaccttgaaagtattgcccggagtcgtggtctcctcccaaaaaaactgctgaatgaaatgattgagcaggc

SEQ ID NO: 157639 - DNA, 75 bp, synthetic construct
  source 1..75: mol_type = other DNA
caaacatcttgaaagtattgcccggagtcgtggtctccccccaaaaaaactgctgaatgaaatgattgagcaggc

SEQ ID NO: 157640 - DNA, 75 bp, synthetic construct
  source 1..75: mol_type = other DNA
gatttgtctgttatcctgccagcaggtgcagcagctccacgcggggaggtgaattacagccagccatctaaccag

SEQ ID NO: 157641 - DNA, 75 bp, synthetic construct
  source 1..75: mol_type = other DNA
atgaatattggattaactgaaatattatcatttgctgcattaattgtatcggcattcagtatgctgtatgcaaaa

SEQ ID NO: 157642 - DNA, 75 bp, synthetic construct
  source 1..75: mol_type = other DNA
agtcgtggtctccacccaaaaaaactgctgaatgaaatgattgagcaggcgtaccaggactttgtggcaaatgag

SEQ ID NO: 157643 - DNA, 75 bp, synthetic construct
  source 1..75: mol_type = other DNA
acgatgctgttaaacagtttgagtgtggaaatctcgccatgctgattatgtatctcaatttgtttaacgatgttg

SEQ ID NO: 157644 - DNA, 75 bp, synthetic construct
  source 1..75: mol_type = other DNA
ctgtcctttttttgcccgtactctacggaggaaaggttgtgataaagaattactagatataatttatcatggttg

SEQ ID NO: 157645 - DNA, 75 bp, synthetic construct
  source 1..75: mol_type = other DNA
gttcctgagcatcttgatgatgctataaaaaacttaataaccaaagtaagtgattttacatatgcaacaaaagat

SEQ ID NO: 157646 - DNA, 75 bp, synthetic construct
  source 1..75: mol_type = other DNA
agcagggttgcggtctgtaccattcgctgatttgccattatgaaaatggcgtaccggttatgctggaagaccgac

SEQ ID NO: 157647 - DNA, 75 bp, synthetic construct
  source 1..75: mol_type = other DNA
tgttcacctgcttcgtgaacagcgtaaacaatatcggcaaagtgacatctgtgacgctgccaaaactgacccgga

SEQ ID NO: 157648 - DNA, 75 bp, synthetic construct
  source 1..75: mol_type = other DNA
acgttgtggccacgcgggcctacgactcaggaaccgccagaaccatttcgggggcgctgctgcatgtcgggaact

SEQ ID NO: 157649 - DNA, 75 bp, synthetic construct
  source 1..75: mol_type = other DNA
ccaacgcgtggcgctggagcgtcaactggacagcgaagaacgcgcattactgattgaacgttcgcaaacggttat

SEQ ID NO: 157650 - DNA, 75 bp, synthetic construct
  source 1..75: mol_type = other DNA
gttttacgcgtatgacagtctccggaagacggttgttgcgcacgtattcggtgaaggcattcacacctgtatgct

SEQ ID NO: 157651 - DNA, 75 bp, synthetic construct
  source 1..75: mol_type = other DNA
actttccggttaccgctggggcgtgtcgcgtaaagcgcaactgctgcgccgcgaagctgaaaatgaggagaggta

SEQ ID NO: 157652 - DNA, 75 bp, synthetic construct
  source 1..75: mol_type = other DNA
atgcagttagtttgtaccatcgataaaaaatatatggataaatttatggctatactgttttcaggagtgttacat

SEQ ID NO: 157653 - DNA, 75 bp, synthetic construct
  source 1..75: mol_type = other DNA
ttcccgtaatgagcttattgtcacgaacggtgcaatagtgatccacacccaacgcctgaaatcagatccaggggg

SEQ ID NO: 157654 - DNA, 75 bp, synthetic construct
  source 1..75: mol_type = other DNA
atggctatgattgaccctcgtacgcctgagggccgcatgactctccgttaccgtggctaccggactgaagtcctc

SEQ ID NO: 157655 - DNA, 75 bp, synthetic construct
  source 1..75: mol_type = other DNA
ttaccacgttatgcacgaaaacagcgcattaccagtgaaccatgcgttaggtatgcaagtgaagatcaccatcac

SEQ ID NO: 157656 - DNA, 75 bp, synthetic construct
  source 1..75: mol_type = other DNA
agatggtcgatttagcgccaatcttccaggctctgccggaacgtaactatcttatgaatgctctcgacctcttcg

SEQ ID NO: 157657 - DNA, 75 bp, synthetic construct
  source 1..75: mol_type = other DNA
actcttgattttacggattctgtaggggttacatctcataaagtagctgtttcccagcttgtcgaaagcaacgaa

SEQ ID NO: 157658 - DNA, 75 bp, synthetic construct
  source 1..75: mol_type = other DNA
ctggagatggcaaagtgcaaagataaattacgtcctgtcgatgcgcggcctggttcctttatcatttcttttaaa

SEQ ID NO: 157659 - DNA, 75 bp, synthetic construct
  source 1..75: mol_type = other DNA
taacggcgaatgtgacactcgcctataactctgccacgggcaccgcattctccgggatgccggagggggtgcaac

SEQ ID NO: 157660 - DNA, 75 bp, synthetic construct
  source 1..75: mol_type = other DNA
ggcgcggctgaatattacagctatgcgtttagtccagcacgtaacgatgctgtaaacgtagttaccgagaatagc

SEQ ID NO: 157661 - DNA, 75 bp, synthetic construct
  source 1..75: mol_type = other DNA
ttttttatcaggaggtattcgcacaatacagcggaccgctgccaccggtgttatgggtcctcaaccaggtggata

SEQ ID NO: 157662 - DNA, 75 bp, synthetic construct
  source 1..75: mol_type = other DNA
gccgcaggttgcacgttgcgcgctccggacagtcacacacaccgtggcccgtgctgcccggaccgtctggtcctt

SEQ ID NO: 157663 - DNA, 75 bp, synthetic construct
  source 1..75: mol_type = other DNA
cgttgtgacgtccgcccgcctgatttacccgggttcgcgttatcagttatttggccgttttaccagtcacggcta

SEQ ID NO: 157664 - DNA, 75 bp, synthetic construct
  source 1..75: mol_type = other DNA
agcctttataaccagccgactgcaaggttctccaacgaacataacgtaacatcccgtcaaagcggtaaagaatac

SEQ ID NO: 157665 - DNA, 75 bp, synthetic construct
  source 1..75: mol_type = other DNA
gcacctgcggaagtgtatagttggagcttcgaaagcgagcgcggaaacgcgattaatgtgatctcggaaaattcg

SEQ ID NO: 157666 - DNA, 75 bp, synthetic construct
  source 1..75: mol_type = other DNA
ttacaggcggagcgtattgcgcagaaacggcaggctgtggcacgtcagttgcagatagcagaaatagatattctg

SEQ ID NO: 157667 - DNA, 75 bp, synthetic construct
  source 1..75: mol_type = other DNA
gagcttcataaaattgctatgcaaactattggccgtacagaacggcgtgatgcccaaatgaatgggattattcgt

SEQ ID NO: 157668 - DNA, 75 bp, synthetic construct
  source 1..75: mol_type = other DNA
atgtctgtgctcggcgtcaccatcggtaataccgacggcaatatcatcgacttcgtggtgttcggtattttgcat

SEQ ID NO: 157669 - DNA, 75 bp, synthetic construct
  source 1..75: mol_type = other DNA
atcgttatttggaatgcggtctgatgtctgtgcttgaggattatgatgtcattattgccagagagtttttcactc

SEQ ID NO: 157670 - DNA, 75 bp, synthetic construct
  source 1..75: mol_type = other DNA
ctggtactgaacagttgaatatcacccttggtgcagataaaggtatcacagcccgttcggttaagccttatgatt

SEQ ID NO: 157671 - DNA, 75 bp, synthetic construct
  source 1..75: mol_type = other DNA
atgaagaaaaaattactgatagcttcagtattagcaatggcaaccgtatcaggttctgttttggctgctgttaca

SEQ ID NO: 157672 - DNA, 75 bp, synthetic construct
  source 1..75: mol_type = other DNA
cgggacagttttaccgatcctcagtcatatataaaacgtcttaaacgcaacgcgattattaagaaaaatgcttac

SEQ ID NO: 157673 - DNA, 75 bp, synthetic construct
  source 1..75: mol_type = other DNA
atgccatttaaaaaactctcccgacgcaccttcctgacggcaagctcggtgcttgccttcctccatacccctttc

SEQ ID NO: 157674 - DNA, 75 bp, synthetic construct
  source 1..75: mol_type = other DNA
tactaacggcaaaatcaactggggcatcggcataggtcttgcgggaagcacttatgataataattacccggaaga

SEQ ID NO: 157675 - DNA, 75 bp, synthetic construct
  source 1..75: mol_type = other DNA
ctggcctgcccggaaaatgaaacggtcgatatgttcgaggtgaatttttcgtttccgaacgggatttgcggattt

SEQ ID NO: 157676 - DNA, 75 bp, synthetic construct
  source 1..75: mol_type = other DNA
tgccgtcggcttacagatattgaagatgtcaggaaatcagaggatatactgaacagactggagtttatcgacaga

SEQ ID NO: 157677 - DNA, 75 bp, synthetic construct
  source 1..75: mol_type = other DNA
tttttcagatcacggtctggagtatgacccgacaaaagaacatgcctattttcatggtggaataaaacccagtca

SEQ ID NO: 157678 - DNA, 75 bp, synthetic construct
  source 1..75: mol_type = other DNA
gtcgaccatcatcgcgaatgctcacgccgcaacgggtggatgatttcacgctgacggtgccgtacaacgacgacc

SEQ ID NO: 157679 - DNA, 75 bp, synthetic construct
  source 1..75: mol_type = other DNA
ggtcggggacagtactgcccagattaatttcaaccattccagcgaagattttatcctggcagcagatatcgttgg

SEQ ID NO: 157680 - DNA, 75 bp, synthetic construct
  source 1..75: mol_type = other DNA
catctgagtgattttgatgacccattgaagattgaccagacttcaccagccattgagccagtccgactggtgttc

SEQ ID NO: 157681 - DNA, 75 bp, synthetic construct
  source 1..75: mol_type = other DNA
gcagcatcactaggaagcctttgctgcaagaagaaagaagaagtcgttcgaaaaaatagaagtatttattacaaa

SEQ ID NO: 157682 - DNA, 75 bp, synthetic construct
  source 1..75: mol_type = other DNA
aagcgagcgggggatttgcgcgatattgctgggcgatgatgacgcgacactaatcagcgagttgcagcagatgtt

SEQ ID NO: 157683 - DNA, 75 bp, synthetic construct
  source 1..75: mol_type = other DNA
ctatgtagcgcaattaatgagagggagcgttgaaatattcgtagagctggaagacctcaatttaaccgtatccat

SEQ ID NO: 157684 - DNA, 75 bp, synthetic construct
  source 1..75: mol_type = other DNA
ggtgttgtgcttggcaccattcatgtcgggcagccgctgcgagcgctgaatatgctattccgtgtcggcagttct

SEQ ID NO: 157685 - DNA, 75 bp, synthetic construct
  source 1..75: mol_type = other DNA
gggctgctaaacattcgcttccgggaaaattatgaataccgctattactatgctcaacgtattgggccggtaacc

SEQ ID NO: 157686 - DNA, 75 bp, synthetic construct
  source 1..75: mol_type = other DNA
atcgctaatattgctggtacatatggacattacatgtccaggctaaatggcagggctttgactcagttaaatctt

SEQ ID NO: 157687 - DNA, 75 bp, synthetic construct
  source 1..75: mol_type = other DNA
tggtactccggatcagatcaatcaggatgctttacaagttactgattacggtacaaccggtgtagcaaaaggtgt

SEQ ID NO: 157688 - DNA, 75 bp, synthetic construct
  source 1..75: mol_type = other DNA
ccgtcgtggtttcgtttgcttatgtgctggtcaacctggtggtggatttgctctatttgtggattgatccgcgta

SEQ ID NO: 157689 - DNA, 75 bp, synthetic construct
  source 1..75: mol_type = other DNA
atgccggtaagatgagatgttgcaacgcattgaagaagacttcaccgttgccttcaagcagcgcatcgagcagat

SEQ ID NO: 157690 - DNA, 75 bp, synthetic construct
  source 1..75: mol_type = other DNA
gaaaatattcgccagcaactgggactggaccagccactgtacgtacagttttaccgctacgtcagcgacctgttt

SEQ ID NO: 157691 - DNA, 75 bp, synthetic construct
  source 1..75: mol_type = other DNA
atgaacacaaactataataaattcaaaaagcttataaaaaatcctggattattttttagggattacttactaaaa

SEQ ID NO: 157692 - DNA, 75 bp, synthetic construct
  source 1..75: mol_type = other DNA
gtgtacaaggtgagcctgtcggtgataggagtcgttcaacgttttgtcagtatcacaagggaatgttcaggtatc

SEQ ID NO: 157693 - DNA, 75 bp, synthetic construct
  source 1..75: mol_type = other DNA
aaacaatcaggccaaatcgaagagaataaaaagcaatattgccgcgagttactcaaagtggcattgcgttattca

SEQ ID NO: 157694 - DNA, 75 bp, synthetic construct
  source 1..75: mol_type = other DNA
gcgcgacgttccatctacaacgttgcagccgttgcgaacgcccgtttgccccgcaaaaaccatcgcactggctgc

SEQ ID NO: 157695 - DNA, 75 bp, synthetic construct
  source 1..75: mol_type = other DNA
aaatcgccgctaaaaaagcagaactggacaagttaaaaacctggaagcagggcctgctccagcaaatgtttgtat

SEQ ID NO: 157696 - DNA, 75 bp, synthetic construct
  source 1..75: mol_type = other DNA
gagctgttgatatcgatgatatttatgattttcttatggctgaaaccattctaatgatgaaaaaggaatgtaatt

SEQ ID NO: 157697 - DNA, 75 bp, synthetic construct
  source 1..75: mol_type = other DNA
agctatgcccctgagccgccgctgcctgagccggtgacgcgcccggtcgagctgtacgttaatggcgaactggtg

SEQ ID NO: 157698 - DNA, 75 bp, synthetic construct
  source 1..75: mol_type = other DNA
atgaaagctatattttttatattctgtattttttttatgggaaattcattgttatattcagaggctaaagccagt

SEQ ID NO: 157699 - DNA, 75 bp, synthetic construct
  source 1..75: mol_type = other DNA
aatgggcctgtgtcgttagcgaataccaaattcccgttgaatgtggcggctgcggtggcaatgccgattgccgcc

SEQ ID NO: 157700 - DNA, 75 bp, synthetic construct
  source 1..75: mol_type = other DNA
aacctgcttgcccggctggatgaagtgacactggatctccttgccagtggcggggcatataacgaccacacgctt

SEQ ID NO: 157701 - DNA, 75 bp, synthetic construct
  source 1..75: mol_type = other DNA
ttattgaacatatgattgcctgtgctctggctgataaatacaaccccggactgaatgctgccagttatgaagttt

SEQ ID NO: 157702 - DNA, 75 bp, synthetic construct
  source 1..75: mol_type = other DNA
atgctcgatgaagcacgcgcagtgggcgcggaattcaaccgtatcgccggggaaaactgtctctacttcgaaacc

SEQ ID NO: 157703 - DNA, 75 bp, synthetic construct
  source 1..75: mol_type = other DNA
gacaagcgcaagttgatgagcgcgctcaaccagatggatgcgctggtgttcagttctcgcgtcgataactacccg

SEQ ID NO: 157704 - DNA, 75 bp, synthetic construct
  source 1..75: mol_type = other DNA
tgtcgctattcaagacatccatggagaaggtaaaataattgctcctgtgcgtaaaggaacgagtaaggggccaga

SEQ ID NO: 157705 - DNA, 75 bp, synthetic construct
  source 1..75: mol_type = other DNA
caccgctgttgctttccaccggcggcggtagtcatgtggcgctcttctctttctaccttctgctttccgtcggta

SEQ ID NO: 157706 - DNA, 75 bp, synthetic construct
  source 1..75: mol_type = other DNA
ggaatcagtcaggtaacagccatccagtaccacccagggaagtacgcctacgacgacgccacctatcccggcgac

SEQ ID NO: 157707 - DNA, 75 bp, synthetic construct
  source 1..75: mol_type = other DNA
cccagacatgattatgcgacaaatgaaaaaatactataaatctcttgggcgcataggtgaagtgcatattaaaga

SEQ ID NO: 157708 - DNA, 75 bp, synthetic construct
  source 1..75: mol_type = other DNA
atttaatggaaaaaattggttctctttgtggtgacgtaataatttgcttgcatgaagatgatgctaaaatagcac

SEQ ID NO: 157709 - DNA, 75 bp, synthetic construct
  source 1..75: mol_type = other DNA
caatgcaggctttcatcaattatttcagaaagatttttatgtgttctcccggttatcaaaaccggaatgttgacc

SEQ ID NO: 157710 - DNA, 75 bp, synthetic construct
  source 1..75: mol_type = other DNA
atgccctcttgccggactatgtcaactcgggcgcccgtggcaagcgcagaaagccgaaccaggccaagctgggca

SEQ ID NO: 157711 - DNA, 75 bp, synthetic construct
  source 1..75: mol_type = other DNA
cggccaggcgaggagatgccaaggggatcgtcgagcgttatttccggacggtgcaggagcgtttcaagccctatg

SEQ ID NO: 157712 - DNA, 75 bp, synthetic construct
  source 1..75: mol_type = other DNA
gtaacaagattctcagttgatgatccaacggtaatgacagttgaaatgtttgttgttatggggagagggcgtttt

SEQ ID NO: 157713 - DNA, 75 bp, synthetic construct
  source 1..75: mol_type = other DNA
ctactgcatggggttattgtggatagacatcgacgctgacccgagagtgcctgagaactggcataaatcgccgcg

SEQ ID NO: 157714 - DNA, 75 bp, synthetic construct
  source 1..75: mol_type = other DNA
tggtattctttatctgcattggaaatgcattagctgacgataacatgaaccgcagtgttaatcttggtagtcaat

SEQ ID NO: 157715 - DNA, 75 bp, synthetic construct
  source 1..75: mol_type = other DNA
aatggagaatcaattaacgagaataaagaatatggtggactaatatgtaagaagcaaggtgaatatttccccatg

SEQ ID NO: 157716 - DNA, 75 bp, synthetic construct
  source 1..75: mol_type = other DNA
atgaaaaaatatatatttttagttttatttttattgtgtggttgttctccagtggacatagagccagctagacaa

SEQ ID NO: 157717 - DNA, 75 bp, synthetic construct
  source 1..75: mol_type = other DNA
tgacggtggagcagatgcaaaaccagatggacccggtgtacacgccggcgcgaaaaatccacctgtaccactgcg

SEQ ID NO: 157718 - DNA, 75 bp, synthetic construct
  source 1..75: mol_type = other DNA
caaagagccataggttcggatatgcaacattttaaatttaatggcgagttaagtcagatcgtagtgggtgaaaac

SEQ ID NO: 157719 - DNA, 75 bp, synthetic construct
  source 1..75: mol_type = other DNA
ttatgttaatcttgtaaacatcataacaaaaaaggaaaattgggaaaaaataacttcaagattcataaaatttcg

SEQ ID NO: 157720 - DNA, 75 bp, synthetic construct
  source 1..75: mol_type = other DNA
aaactacttactggacccctggcagtgaattctttgactatgccactacggattctgtttctgcgctggagatgc

SEQ ID NO: 157721 - DNA, 75 bp, synthetic construct
  source 1..75: mol_type = other DNA
taacggcgaatgtgacgcttgcctataacagcgccacgggaacggccttttccggcatgccggagggggtgcaac

SEQ ID NO: 157722 - DNA, 75 bp, synthetic construct
  source 1..75: mol_type = other DNA
gtatggttttagtgaccgctttgcctgggggttacttgctaaccagaaaaatataatttcaaatgaacaaggaaa

SEQ ID NO: 157723 - DNA, 75 bp, synthetic construct
  source 1..75: mol_type = other DNA
aggaagcctatcaactggccttcgacgtcctcagctcaaacggattttcagccgcacacgccgacgctatcgccc

SEQ ID NO: 157724 - DNA, 75 bp, synthetic construct
  source 1..75: mol_type = other DNA
gcgccggtggggagcctcggccccggctggaaaatgcctgcggatatccgcttacagctgcgcgataacacactg

SEQ ID NO: 157725 - DNA, 75 bp, synthetic construct
  source 1..75: mol_type = other DNA
cgcattaatttcagagatagcaccgcaatctgatggaacatgtcaggtaacggcaaaagagtatcgcgacacttt

SEQ ID NO: 157726 - DNA, 75 bp, synthetic construct
  source 1..75: mol_type = other DNA
gcttgcctggtgaaccgcttgaaacgcatgaacacggttccatcacaattcaccaatggctgattaaaaaagtag

SEQ ID NO: 157727 - DNA, 75 bp, synthetic construct
  source 1..75: mol_type = other DNA
ggcgaacggcagacggtggagaacccggagacgggggaactgctgtggcagcatgagacgaaacacgcctacaac

SEQ ID NO: 157728 - DNA, 75 bp, synthetic construct
  source 1..75: mol_type = other DNA
agccacagcgacttcagctacgatgcgctggaccggttggtacagcagggcggctttgacgggcggacgcaacgt

SEQ ID NO: 157729 - DNA, 75 bp, synthetic construct
  source 1..75: mol_type = other DNA
atacacccccgcaggccagttacagagccagcacctgaacagcctggtgtatgaccgtgactacgggtggaatga

SEQ ID NO: 157730 - DNA, 75 bp, synthetic construct
  source 1..75: mol_type = other DNA
tatcctgatggggtgaaggccaaaacaggtttgcctgtaagcgctaactaccattcaaaaacgtcagactcagcc

SEQ ID NO: 157731 - DNA, 75 bp, synthetic construct
  source 1..75: mol_type = other DNA
ggtcgaggagttgttcccggaacaagagtggccgttgaagctgatttccttcaaatccaataccatgtccagcgc

SEQ ID NO: 157732 - DNA, 75 bp, synthetic construct
  source 1..75: mol_type = other DNA
ccgtttaagcgccaggcccgccagctggccagcgcccgtttacgtgacgacttccgctatgttgtggtggcgcca

SEQ ID NO: 157733 - DNA, 75 bp, synthetic construct
  source 1..75: mol_type = other DNA
caccgtgagtcactcagggcgagttatttaccagaaaaaagtcctaccaggtccgtttatcattgatgaccttaa

SEQ ID NO: 157734 - DNA, 75 bp, synthetic construct
  source 1..75: mol_type = other DNA
ggtattgcacaaaccaatgccacggtgacgatcagtcaatcaggccgcgtcatctaccagaaaaaagtcccgcca

SEQ ID NO: 157735 - DNA, 75 bp, synthetic construct
  source 1..75: mol_type = other DNA
acaaaaaattgactggaaaaagaacggtgaccaaaccattccgtgtattaatgatttactggtagataaatttgg

SEQ ID NO: 157736 - DNA, 75 bp, synthetic construct
  source 1..75: mol_type = other DNA
cgcctggtgttctacacgcggatacagcatggcgagccgcaggtggagagccgctatctctatgacccgctgggc

SEQ ID NO: 157737 - DNA, 75 bp, synthetic construct
  source 1..75: mol_type = other DNA
gccgggaagcttcacgccgctcatccgggtcgagacagagaacggcgagcgggaaaaagcgcagcggcgcagcct

SEQ ID NO: 157738 - DNA, 75 bp, synthetic construct
  source 1..75: mol_type = other DNA
gttccggtaaagacgttaacaccatcattcgcaccgccaacggccatttcccacctctcggtgccgatatccggc

SEQ ID NO: 157739 - DNA, 75 bp, synthetic construct
  source 1..75: mol_type = other DNA
acgggggagaaaagggtatgctgaccgactcggtaaaaaatattactggatcgccttacatcgactactgggcat

SEQ ID NO: 157740 - DNA, 75 bp, synthetic construct
  source 1..75: mol_type = other DNA
ctgacgacgcccaaaagtgaaattaagtttttcgactcggataccgtaagttgcatagccaatctttcccgtctt

SEQ ID NO: 157741 - DNA, 75 bp, synthetic construct
  source 1..75: mol_type = other DNA
gcactctgctgccggataataacctgaattatagcgttcaggtcggtaacacccacgggggtaatacatcgtctg

SEQ ID NO: 157742 - DNA, 75 bp, synthetic construct
  source 1..75: mol_type = other DNA
ccgcaggcaatatgctggttgaccacgttcaccagattgtccagtggccggagcgcggctggctggcggagatca

SEQ ID NO: 157743 - DNA, 75 bp, synthetic construct
  source 1..75: mol_type = other DNA
gtatggagctcttgttcaaagttaatatgggtagaaaagaagcgtctaatcgctgaattttatcaaaacattgat

SEQ ID NO: 157744 - DNA, 75 bp, synthetic construct
  source 1..75: mol_type = other DNA
ccttggatattgtcggtagacacggaactacttacaccattgtttataatagtgattctgacaccgcttatgtta

SEQ ID NO: 157745 - DNA, 75 bp, synthetic construct
  source 1..75: mol_type = other DNA
aaacaggctgttgccgtgggtgttggttaccgtttcaatgagcagacagcagcgaaagcaggtgtggcagcgagt

SEQ ID NO: 157746 - DNA, 75 bp, synthetic construct
  source 1..75: mol_type = other DNA
aatctcgactgcaattctcctgatgtggcggcgtcacgcggttaagcatggcaactatctgactgatggcgtaat

SEQ ID NO: 157747 - DNA, 75 bp, synthetic construct
  source 1..75: mol_type = other DNA
gggctcgatcaatatgatcagcaagcagccgcgcaatgattccggcattgacgcctccgccagtattggcagcgc

SEQ ID NO: 157748 - DNA, 75 bp, synthetic construct
  source 1..75: mol_type = other DNA
ccgggcgtggggcaattctccggactgaaaacagcggtctggctggaagtcgaaggcgcagcgcattatctgcct

SEQ ID NO: 157749 - DNA, 75 bp, synthetic construct
  source 1..75: mol_type = other DNA
gatgatgaaggctcttgatgcgtatgagaagcatcaggatgaagtgccagagactggaatgctcaatgcattttt

SEQ ID NO: 157750 - DNA, 75 bp, synthetic construct
  source 1..75: mol_type = other DNA
ttactccggatacgtgcgccatgagagcatggaaagggcgacatgcgtttatcagttttgcgcattcaggccaga

SEQ ID NO: 157751 - DNA, 75 bp, synthetic construct
  source 1..75: mol_type = other DNA
gcggtgttatggcggcaattggctggtttggtgcggcattggtgggggctgcaatctcgactgcaattctcctga

SEQ ID NO: 157752 - DNA, 75 bp, synthetic construct
  source 1..75: mol_type = other DNA
cctggttctgtaacgatgccgaccattgaaaaatctgcgtatgatgccgcagcgaatctctctgcagttacgcgt

SEQ ID NO: 157753 - DNA, 75 bp, synthetic construct
  source 1..75: mol_type = other DNA
gagcgaattagatgttgcctggcgttctgccgtggaaaaaaccgaggccagatcggtggctgataaagccaggcg

SEQ ID NO: 157754 - DNA, 75 bp, synthetic construct
  source 1..75: mol_type = other DNA
cgctgtcgcgtaaaccggaggtgacatggtacgggtgggacggtgacaggctgacgacgatacagaccggcacca

SEQ ID NO: 157755 - DNA, 75 bp, synthetic construct
  source 1..75: mol_type = other DNA
acatttttagagaagagtaataagtatggggttaatgttcacatttatcgcaataaatataataaggggccgcaa

SEQ ID NO: 157756 - DNA, 75 bp, synthetic construct
  source 1..75: mol_type = other DNA
aaaatcgtaaacaacattcacctgaattttacagtgaagatctgataggtgttgctggtaatgcggatagaggag

SEQ ID NO: 157757 - DNA, 75 bp, synthetic construct
  source 1..75: mol_type = other DNA
tgtaagttttaatagcacagatggtaatggctggtctggaaatattctccgtgtaattactcctggcgataatgt

SEQ ID NO: 157758 - DNA, 75 bp, synthetic construct
  source 1..75: mol_type = other DNA
aacggacgcacgatggttgaaggtgaagtggtggtgaaaagtgatttttatgcaaaaggcgaggtgacggataaa

SEQ ID NO: 157759 - DNA, 75 bp, synthetic construct
  source 1..75: mol_type = other DNA
attctgcaatttcgggacgttacactgttcaggcaccttataaagcgggtgccgggatttgcaccccggaattgc

SEQ ID NO: 157760 - DNA, 75 bp, synthetic construct
  source 1..75: mol_type = other DNA
ggcagacttttgataaaacagtctaccccctgcttgcagtcgcttatccgtctggtgtgatccctgatatgcgtg

SEQ ID NO: 157761 - DNA, 75 bp, synthetic construct
  source 1..75: mol_type = other DNA
atattgaacggcattctgatatggtttcagaggtagatcttgatactcttcctgttttattagtccaaaaaaata

SEQ ID NO: 157762 - DNA, 75 bp, synthetic construct
  source 1..75: mol_type = other DNA
aatttggggaagccgtattcgcctggcgtatatggaggaataagctgcccctaccgtgcctgcccaggctggaga

SEQ ID NO: 157763 - DNA, 75 bp, synthetic construct
  source 1..75: mol_type = other DNA
atcgccaatatatataataaaaaagatgaaaagcaaaggaatgacaatcatatccatagaaaagacaaaagaaga

SEQ ID NO: 157764 - DNA, 75 bp, synthetic construct
  source 1..75: mol_type = other DNA
ggcatattccgtgtgctgacttctctggtttcctgggttgtatcgtttattcctcgccgcccggagcggagcgaa

SEQ ID NO: 157765 - DNA, 75 bp, synthetic construct
  source 1..75: mol_type = other DNA
cagcagtttattctgccggtgagcatcttgaactctgctgtggtaaggcaaggctggtgctgacgaaggacggaa

SEQ ID NO: 157766 - DNA, 75 bp, synthetic construct
  source 1..75: mol_type = other DNA
gttgttgcagtcctcacaggtagggctgcataaatcactgatggtgggaatgggctacagcgtcaatgtggggaa

SEQ ID NO: 157767 - DNA, 75 bp, synthetic construct
  source 1..75: mol_type = other DNA
tatcagcgtggatgcgccacgcctggaccgtctccgccgtcttgttccccgtactgctcaacgtcgaataccgtc

SEQ ID NO: 157768 - DNA, 75 bp, synthetic construct
  source 1..75: mol_type = other DNA
ctgatcatgatggtttcgaacttcaaccaaaaccaacagagggaacatattacagagtaaggaaacagagagatg

SEQ ID NO: 157769 - DNA, 75 bp, synthetic construct
  source 1..75: mol_type = other DNA
ctggacaggctgatgcgattcgcacaaaagcccaggctgaagccgatgctattcgtttacgcggtgaagctctgc

SEQ ID NO: 157770 - DNA, 75 bp, synthetic construct
  source 1..75: mol_type = other DNA
actggccgcaacgccgaaagcggtcaagacagcctatgaccttgctaacgggaaatataccgcacaggacgccac

SEQ ID NO: 157771 - DNA, 75 bp, synthetic construct
  source 1..75: mol_type = other DNA
gacggcacgaaaaggaatagtccagctcagtagcgtcactaacagtgattctgaaacgcttgccgcgactccgaa

SEQ ID NO: 157772 - DNA, 75 bp, synthetic construct
  source 1..75: mol_type = other DNA
cacccgtacgactgaaagtggtcaagatgataagtcttctggtttaagggttgtcacattgaacatcactggaga

SEQ ID NO: 157773 - DNA, 75 bp, synthetic construct
  source 1..75: mol_type = other DNA
aattactttaagcaaaccagctaaaggtggtgaggcattaaagtggtatgcctccctgcctgttgttgttagtta

SEQ ID NO: 157774 - DNA, 75 bp, synthetic construct
  source 1..75: mol_type = other DNA
ctgctggtaaggatggtttttacgggcaagacggtattagcccacaaatcgactatagtggtgctgtcgatttag

SEQ ID NO: 157775 - DNA, 75 bp, synthetic construct
  source 1..75: mol_type = other DNA
ctgtatgctgccaaatcaggcgatgcattctatggtggtgtaggtaaaaatagtgacggagttatggctagttcc

SEQ ID NO: 157776 - DNA, 75 bp, synthetic construct
  source 1..75: mol_type = other DNA
aagaaactggtcttaataagggagttaaaggtgctcttgcaaaattcatattgcataaaatgagaatttgggatg

SEQ ID NO: 157777 - DNA, 75 bp, synthetic construct
  source 1..75: mol_type = other DNA
taggccttgataaaggcattaaatcatatatagcacggatgcttttgcataaaattagattatgggattgccgta

SEQ ID NO: 157778 - DNA, 75 bp, synthetic construct
  source 1..75: mol_type = other DNA
aaagatttaacaacgaaattttaaattatattactgacaagtacgaatcattcaaattgaaaggtacgtctgggg

SEQ ID NO: 157779 - DNA, 75 bp, synthetic construct
  source 1..75: mol_type = other DNA
tctttcaagtagtcatgctgtagcaaaaggagttttgactgggcctgatcaattgcatattagttatgttcattc

SEQ ID NO: 157780 - DNA, 75 bp, synthetic construct
  source 1..75: mol_type = other DNA
aagagttgatctcattgttgaggcgtttagtcatatgcccgataaacaattagttgttataggcgatggttctga

SEQ ID NO: 157781 - DNA, 75 bp, synthetic construct
  source 1..75: mol_type = other DNA
tattatttcaagcagccatgcagtagccaaaggaatattaactggcccggatcagttacatattagctatgttca

SEQ ID NO: 157782 - DNA, 75 bp, synthetic construct
  source 1..75: mol_type = other DNA
tgggcgaaacaggtggcaataaacagatctcaaattgggacatggtattaaatcagtttaaactaattcagggaa

SEQ ID NO: 157783 - DNA, 75 bp, synthetic construct
  source 1..75: mol_type = other DNA
ttcagtgcgctggcgagccagtgtgaacaggagctggttattatcactccgtggatccgtcggggtggtaaacaa

SEQ ID NO: 157784 - DNA, 75 bp, synthetic construct
  source 1..75: mol_type = other DNA
ttagtttcgcgagccctgtcgattgctgatggcaaggatcaaaacttcggtatgctggtgacctcaacagcaata

SEQ ID NO: 157785 - DNA, 75 bp, synthetic construct
  source 1..75: mol_type = other DNA
ttggctttggacgtgatggtgaaatttatgaggatactgaactcaagcagcggttgaattttttcgaggcgtcga

SEQ ID NO: 157786 - DNA, 75 bp, synthetic construct
  source 1..75: mol_type = other DNA
catgctccagtacaagcagctaatactgacgtattgccagaggccgtggaaacaccaccgctgaatttgcagcgg

SEQ ID NO: 157787 - DNA, 75 bp, synthetic construct
  source 1..75: mol_type = other DNA
cgtgttttgaaatcaatccttgtttggatgaaaaatctgttatcaatcttcttcagcaatttgctaacgtacttg

SEQ ID NO: 157788 - DNA, 75 bp, synthetic construct
  source 1..75: mol_type = other DNA
aaaaatctcagcaacgtagacgaaatcatcatcatcggccattcgttatcatctgtagatgttccctacttttct

SEQ ID NO: 157789 - DNA, 75 bp, synthetic construct
  source 1..75: mol_type = other DNA
tcaggaaactgagcgtgaagcacatcatacaacattatgtgagattggcattaaatctcccaaactgatttcagt

SEQ ID NO: 157790 - DNA, 75 bp, synthetic construct
  source 1..75: mol_type = other DNA
caattggcaatcgggaattacccgaccgtatcgttatctcacgcacgcaaacgcaggcagcaattcagagcatgg

SEQ ID NO: 157791 - DNA, 75 bp, synthetic construct
  source 1..75: mol_type = other DNA
ggaactggtaagctgctgattaactggtcgccggcaggtctgctctataaagcctttgcagctgcgctgaaatat

SEQ ID NO: 157792 - DNA, 75 bp, synthetic construct
  source 1..75: mol_type = other DNA
tcagctatgagcaactaacccgaatagcggaaaaaaatatccgtgaatgtgggctggacagccagagcgccaggt

SEQ ID NO: 157793 - DNA, 75 bp, synthetic construct
  source 1..75: mol_type = other DNA
aatttagcaagcccttatttcctgttcacatttttacgttttcaaacgcattctgaaaacatctcccagccctgc

SEQ ID NO: 157794 - DNA, 75 bp, synthetic construct
  source 1..75: mol_type = other DNA
ggtcgagtacacgcgggaccggctgcaccgtgagacggtgcgcagcttcggcagcatggcaggcagtaatgcagc

SEQ ID NO: 157795 - DNA, 75 bp, synthetic construct
  source 1..75: mol_type = other DNA
atgacctgaccggaaaactcacgcagagtgaagatgaggggcttatcaccctctggcattacgatgcgtcagacc

SEQ ID NO: 157796 - DNA, 75 bp, synthetic construct
  source 1..75: mol_type = other DNA
cacaccacggcggcgaacctggatatcgatatcccgtatgcgacggacccggcaggaaaccggctgccggacccg

SEQ ID NO: 157797 - DNA, 75 bp, synthetic construct
  source 1..75: mol_type = other DNA
aagcactaggcaaaaagcgagacaaaattgaagtcgtttctgacgctatgggcctgaacgttcggctgtctactt

SEQ ID NO: 157798 - DNA, 75 bp, synthetic construct
  source 1..75: mol_type = other DNA
tctgcatgattatctcgaagatcaaaggcattggttgcaggtgtggcagaattatcttgaagggttagttgatgc

SEQ ID NO: 157799 - DNA, 75 bp, synthetic construct
  source 1..75: mol_type = other DNA
ctgtcacggaataccctgacctggtgatgccggatgcgctggcagcagaaggaagcagtaaacgggaatggaatc

SEQ ID NO: 157800 - DNA, 75 bp, synthetic construct
  source 1..75: mol_type = other DNA
aattagccagacaggtagtgaagctataaaagcaattattgctcaagctaattattctgacgcaatgccatcaat

SEQ ID NO: 157801 - DNA, 75 bp, synthetic construct
  source 1..75: mol_type = other DNA
atgaagctttcaaatatcgtcacagttataattcttgcaatttccagtacgctaacaccccaggcgatggcagaa

SEQ ID NO: 157802 - DNA, 75 bp, synthetic construct
  source 1..75: mol_type = other DNA
aatatttcaaaggtagatactcttccggtgtggccacttcaaaaacaagctcctccttgtgcatgttatttcaaa

SEQ ID NO: 157803 - DNA, 75 bp, synthetic construct
  source 1..75: mol_type = other DNA
tacgggacaaaaaaactctctgtgagatatatttcatcatctgctcgaccttacctctgattctggccctgccgc

SEQ ID NO: 157804 - DNA, 75 bp, synthetic construct
  source 1..75: mol_type = other DNA
aaaagaatgcttcagaaaatcaatgccagatggcctggcataggtacatcagccgcgatcccagaaacgctggca

SEQ ID NO: 157805 - DNA, 75 bp, synthetic construct
  source 1..75: mol_type = other DNA
gatttacgctgaatctgacgctggccacggatatttctgcaaaggggaaagccagtggcaagaaaaaaggcgtga

SEQ ID NO: 157806 - DNA, 75 bp, synthetic construct
  source 1..75: mol_type = other DNA
taggtgtagagcagcctacattgtattggcatgtaaaaaataagcgggctttgctcgacgccttagccattgaga

SEQ ID NO: 157807 - DNA, 75 bp, synthetic construct
  source 1..75: mol_type = other DNA
aggtgttctggattttgcaatgggtacattaacaaaagacatgccagttggagattttattgtggttgaattgtt

SEQ ID NO: 157808 - DNA, 75 bp, synthetic construct
  source 1..75: mol_type = other DNA
ataatgctggagaaaggatatcatttactgattgcgtaatctatggtggagggcaaggagctcatgtttttataa

SEQ ID NO: 157809 - DNA, 75 bp, synthetic construct
  source 1..75: mol_type = other DNA
tccaaggttaaacgtgtgcagaaagccggacgccagatgacgataacgttgccgtgcaggcccgcactgctgaaa

SEQ ID NO: 157810 - DNA, 75 bp, synthetic construct
  source 1..75: mol_type = other DNA
agtgagacgatggcgctgccaccaaaaggtgcggtgttaacgctgggactgggattcaacggaaacctggtcaat

SEQ ID NO: 157811 - DNA, 75 bp, synthetic construct
  source 1..75: mol_type = other DNA
tatcaatgcatatctttttgtttttgcaatgatgataagcaatattatttataaactacgtcttgcatgtcgtag

SEQ ID NO: 157812 - DNA, 75 bp, synthetic construct
  source 1..75: mol_type = other DNA
cggcccctcagggctccctttacacctcagggctccctttacattcgctgataaagactttgatgcatccgtccg

SEQ ID NO: 157813 - DNA, 75 bp, synthetic construct
  source 1..75: mol_type = other DNA
acgtcccggcgggaggccgcaggctacctggccggggaaggccacggagtgcaggcaggtgcggggcgggggtgc

SEQ ID NO: 157814 - DNA, 75 bp, synthetic construct
  source 1..75: mol_type = other DNA
ttcaggataagacgggctttgatacccgctcagtggggccagcgatcatggattggttgggcgttggtggtggta

SEQ ID NO: 157815 - DNA, 75 bp, synthetic construct
  source 1..75: mol_type = other DNA
ggctggctccctcggagtggggcagcgaattgttgacaaagggaatgaaaatcttgagcttgtccgtatgtcgga

SEQ ID NO: 157816 - DNA, 75 bp, synthetic construct
  source 1..75: mol_type = other DNA
gcgtctttgctggcctggactcatcagatgaaggccaaaaattggcaggagtggacacagcaggcagcgaaacaa

SEQ ID NO: 157817 - DNA, 75 bp, synthetic construct
  source 1..75: mol_type = other DNA
taaaaaatggggcgactccggttccttttgatattgctctccaaaactgtgttcgcgttggcgatatagagacaa

SEQ ID NO: 157818 - DNA, 75 bp, synthetic construct
  source 1..75: mol_type = other DNA
cgtttgaaggcttattagttatcgatatgacacatgtccttaatggacctttcggaactcaacttctttgtaata

SEQ ID NO: 157819 - DNA, 75 bp, synthetic construct
  source 1..75: mol_type = other DNA
cgaatcgtttagccgagaatggaagaataatcaaagaacgcttcaaagatcttaaggagatgatcggcaaagcac

SEQ ID NO: 157820 - DNA, 75 bp, synthetic construct
  source 1..75: mol_type = other DNA
ttgaaaaaatacaagtgcacaaggcaaaattaaaagacttaacgtttagcaaacacacatccggcatactggaac

SEQ ID NO: 157821 - DNA, 75 bp, synthetic construct
  source 1..75: mol_type = other DNA
atatattgagggcgatttagatcttgatagaaacaacgtctccagacatggaaaaactccaaaatgcggagggaa

SEQ ID NO: 157822 - DNA, 75 bp, synthetic construct
  source 1..75: mol_type = other DNA
gacattaaaacaagacgggaatattgctattgaacccggcgaatttaaagccaccagcacttttcaggttaccta

SEQ ID NO: 157823 - DNA, 75 bp, synthetic construct
  source 1..75: mol_type = other DNA
acacaaaatatattgcgtactttgctgaagggacgcaaaaggagggagtaactgatgataacggaaacacagaaa

SEQ ID NO: 157824 - DNA, 75 bp, synthetic construct
  source 1..75: mol_type = other DNA
gcagtgaagccctgaagcttgctgaacgcatcggtgttactgccgcagcccgtgaactcagcctgtatgaatcac

SEQ ID NO: 157825 - DNA, 75 bp, synthetic construct
  source 1..75: mol_type = other DNA
cagctggcagaacgggatgaagagctggctatcctccaaaaaggccgacgacatacttcgcgaaagcgcctgaaa

SEQ ID NO: 157826 - DNA, 75 bp, synthetic construct
  source 1..75: mol_type = other DNA
atcagccgtgaagagttgatagcgctcggcaagcgtttcggcgttacgccactcgccagtgcgctggcgctgtaa

SEQ ID NO: 157827 - DNA, 75 bp, synthetic construct
  source 1..75: mol_type = other DNA
gatgtttttggcataacaccaagagcagcagaggaaagggttaagaaattgctcgaaatggggttaattataaaa

SEQ ID NO: 157828 - DNA, 75 bp, synthetic construct
  source 1..75: mol_type = other DNA
tgaggaggatgtgttagagaattttgcatctcttattatcaagcagaagaataccagaacagcaggggcatcatt

SEQ ID NO: 157829 - DNA, 75 bp, synthetic construct
  source 1..75: mol_type = other DNA
acctgtcgctgagtgcctttacgatgctggctacatagtgtcagtcattaatcctgcgctgggaagcgcctcacc

SEQ ID NO: 157830 - DNA, 75 bp, synthetic construct
  source 1..75: mol_type = other DNA
ggcgcggggatgagtaccgtcagaacggctatcgcacggctggaagtagaaggctggttaacgcgtaaggcgcgt

SEQ ID NO: 157831 - DNA, 75 bp, synthetic construct
  source 1..75: mol_type = other DNA
tacgcttatagagagtttaggtgatgacctgatgcactacaccgatatgttcatgaacaacggtgcagaatataa

SEQ ID NO: 157832 - DNA, 75 bp, synthetic construct
  source 1..75: mol_type = other DNA
atgattgggatgcgcctttaccttgggaaatggaagaaacgccatctgatgaaaaggtagctaatgataatgagg

SEQ ID NO: 157833 - DNA, 75 bp, synthetic construct
  source 1..75: mol_type = other DNA
cataccagtagcttattggttagttaagattggatttgcgtattatgtagtcaaaacacaaaagttacatgttga

SEQ ID NO: 157834 - DNA, 75 bp, synthetic construct
  source 1..75: mol_type = other DNA
cagcgcagacagaaagctcgtcaacaagccgatgatgcacgttttaatgataaacctcgtgatacgaaggaaatg

SEQ ID NO: 157835 - DNA, 75 bp, synthetic construct
  source 1..75: mol_type = other DNA
atcgcaaactgcgttccgatgatattccattgattaaggcgcagaaatttaagtctgcacataccgaacttcgca

SEQ ID NO: 157836 - DNA, 75 bp, synthetic construct
  source 1..75: mol_type = other DNA
acattttaaaaagtgatggcagcagatgcggtccatataaggcaaagtttgcaggggatacagttatcgtaaacg

SEQ ID NO: 157837 - DNA, 75 bp, synthetic construct
  source 1..75: mol_type = other DNA
atggtcttccttattccttttcaaaagaaaggaataaaaatgactgggcggttatagcttcgggaagagataatc

SEQ ID NO: 157838 - DNA, 75 bp, synthetic construct
  source 1..75: mol_type = other DNA
ggacgttcacctgtacagcgttgtgttaatcatatttctgaaccggatacagaaattccgcctggtttcagagga

SEQ ID NO: 157839 - DNA, 75 bp, synthetic construct
  source 1..75: mol_type = other DNA
accagtttcaccaatggttattcggtaacggtgacacctgcggccagtaatgcaaaagtgaatgtttctgcgggg

SEQ ID NO: 157840 - DNA, 75 bp, synthetic construct
  source 1..75: mol_type = other DNA
gctgttgagttccagcgttcaattgaacagagtcttgaccaactatctcgtatctcgtcagagttcgaaccatca

SEQ ID NO: 157841 - DNA, 75 bp, synthetic construct
  source 1..75: mol_type = other DNA
agcgtcttgtcattctgcggtcgctggcggattacaacggcgaactgggcgaatccgtgcttcaggactgcctgg

SEQ ID NO: 157842 - DNA, 75 bp, synthetic construct
  source 1..75: mol_type = other DNA
gaacctgcttcattcgcctttcaaaggatctgtcatcgtcattaaataccagaattgtaactgtgaatagcatgg

SEQ ID NO: 157843 - DNA, 75 bp, synthetic construct
  source 1..75: mol_type = other DNA
agtggctgacgctggacgaggccgcagaagtcatccggcagcacaacatcacgttgctgcctgcagacctgatcc

SEQ ID NO: 157844 - DNA, 75 bp, synthetic construct
  source 1..75: mol_type = other DNA
ttgttttactcgctagtaattgaacagttggcgccagtgacaattattcacgggtatggtgggtataaatcagag

SEQ ID NO: 157845 - DNA, 75 bp, synthetic construct
  source 1..75: mol_type = other DNA
aaggggttggatctctctgttgttagcggattcatccgcgttggggaagagcaactacccaatcagatagattgc

SEQ ID NO: 157846 - DNA, 75 bp, synthetic construct
  source 1..75: mol_type = other DNA
gaattgctttatcattaatcggattgaactggaagataactttctgggtggtcagttgatttctgaagtgcaaaa

SEQ ID NO: 157847 - DNA, 75 bp, synthetic construct
  source 1..75: mol_type = other DNA
tgcaagggctacaagccatattcaacggtcagagatgaggatgttaaacactggatagggcatcagattaaggta

SEQ ID NO: 157848 - DNA, 75 bp, synthetic construct
  source 1..75: mol_type = other DNA
cccggtgaatagcatggatccattaggattatatgaatttaaatcaaaaaatatagatgatattggaatatttgc

SEQ ID NO: 157849 - DNA, 75 bp, synthetic construct
  source 1..75: mol_type = other DNA
ttaccgttacgacagcgacgggcgggtgacagaacagcttaacccggcaggcttaagctacacgtatcagtatga

SEQ ID NO: 157850 - DNA, 75 bp, synthetic construct
  source 1..75: mol_type = other DNA
agagaacggctgatggcaatgcagaagcaactggaaggagcacaggaatatatccgtacccagtgtataccgtga

SEQ ID NO: 157851 - DNA, 75 bp, synthetic construct
  source 1..75: mol_type = other DNA
aaagccgcgaaaaaggcacccgcgaaaaaacaagattcaccggtgaaacgagggcggggacgcccgaagaaagtc

SEQ ID NO: 157852 - DNA, 75 bp, synthetic construct
  source 1..75: mol_type = other DNA
accgagcacgcgagcaaaatcgatgcgattataagtcgcaatggcacaaatacggcacaagaggtgaacgtggtt

SEQ ID NO: 157853 - DNA, 75 bp, synthetic construct
  source 1..75: mol_type = other DNA
atgcacgcgccagaaagcatggtgctggcagccagctttaaaacgccgcgtcaggcgctggactgtttactggca

SEQ ID NO: 157854 - DNA, 75 bp, synthetic construct
  source 1..75: mol_type = other DNA
aatttttgccgctgaaacgacagcacaagaaaagtcagcaaaacagcagctaaatctactggaaaaacacgctga

SEQ ID NO: 157855 - DNA, 75 bp, synthetic construct
  source 1..75: mol_type = other DNA
acggtgacaattccgctagataaattactcacccacatttctgccgataaactgcgccagcaactggcaaaggat

SEQ ID NO: 157856 - DNA, 75 bp, synthetic construct
  source 1..75: mol_type = other DNA
aatcaccggcgtgacggatggtgccgggcgtcacttccaactggtactgaccacgcaggcgcagcgggcagaaga

SEQ ID NO: 157857 - DNA, 75 bp, synthetic construct
  source 1..75: mol_type = other DNA
acatttccagaacagagataggcatggtgattagtcatatttatagcaaagaatcaccaaacgttgaagcaatca

SEQ ID NO: 157858 - DNA, 75 bp, synthetic construct
  source 1..75: mol_type = other DNA
aaaaattcttaaaaattatgagtgatgttaatcataacatcacaaaaatccaatcagaagaagatgctaaaattc

SEQ ID NO: 157859 - DNA, 75 bp, synthetic construct
  source 1..75: mol_type = other DNA
ccgagtggcgtatcaccgcactagcgctgatagcagcagttagcgccaatgttaaagctattgacgaacggcagc

SEQ ID NO: 157860 - DNA, 75 bp, synthetic construct
  source 1..75: mol_type = other DNA
atgagtattgtaaaagatgagcataaagttgcgctgcgtaaatggcatgaagagttgcaggataaacgcggcgag

SEQ ID NO: 157861 - DNA, 75 bp, synthetic construct
  source 1..75: mol_type = other DNA
acaaactcttcaagtgaagcaaagcaatcaatatcagatgttagaaaaataatagataaaaaagaactgattaaa

SEQ ID NO: 157862 - DNA, 75 bp, synthetic construct
  source 1..75: mol_type = other DNA
tcacgccgaaatatatcggcaaccggcggattatcgaaaccgccgttgccacgctgccaaccgatcgcgcactgc

SEQ ID NO: 157863 - DNA, 75 bp, synthetic construct
  source 1..75: mol_type = other DNA
gtgtcgatgtgggttcaggcagcgtccgggctggggctttggatctccagggcacattacttgctcacgcggcac

SEQ ID NO: 157864 - DNA, 75 bp, synthetic construct
  source 1..75: mol_type = other DNA
tgattttagtgggatatgggatgattacattatttttggtaggtttatcctgttttatattaatgtaaagctgga

SEQ ID NO: 157865 - DNA, 75 bp, synthetic construct
  source 1..75: mol_type = other DNA
tagtcagtgaatttggtggcaccatcgttatgaatggtgataattcagtcgagacgaggggggcatattcagcgg

SEQ ID NO: 157866 - DNA, 75 bp, synthetic construct
  source 1..75: mol_type = other DNA
ttgcgggaacgctcgctgctaaagaacggcaccgccggaggatgacggcaccagcctaccagtggaagaggccag

SEQ ID NO: 157867 - DNA, 75 bp, synthetic construct
  source 1..75: mol_type = other DNA
aaatgggttgaggataatcaaacacactccgacatagcgttgattgcaaaactaatggaatcgaacgaccgattg

SEQ ID NO: 157868 - DNA, 75 bp, synthetic construct
  source 1..75: mol_type = other DNA
tggaatagaccattacactggggcaagtcgtaatctcgataaagaaattacgataaatacgttagcagccccaaa

SEQ ID NO: 157869 - DNA, 75 bp, synthetic construct
  source 1..75: mol_type = other DNA
tcgttgatggttcaaaacaggccgtagaaataaaaacgaatgccccagcgctgttcactgttaaaaatgctgatg

SEQ ID NO: 157870 - DNA, 75 bp, synthetic construct
  source 1..75: mol_type = other DNA
gctgaccgggtgagtgaggaaagccgccgctggctggcatcgtgcggcctgacggtggcgcagatgcaaagccag

SEQ ID NO: 157871 - DNA, 75 bp, synthetic construct
  source 1..75: mol_type = other DNA
atggctacggttggtatttgtttggtttttgaactacgaaaatttcgtagtgctatccatcaaggccatcgccgc

SEQ ID NO: 157872 - DNA, 75 bp, synthetic construct
  source 1..75: mol_type = other DNA
ggcaaataaagccaccggtacactggcgatgattattcatgccccgacccagcgtaaaatcaaaaatgcgaacgg

SEQ ID NO: 157873 - DNA, 75 bp, synthetic construct
  source 1..75: mol_type = other DNA
tgggaggatgcaaaatcgggggcatgtactaatggtctttgcggcacactatccgctatgataggtccagataaa

SEQ ID NO: 157874 - DNA, 75 bp, synthetic construct
  source 1..75: mol_type = other DNA
acctttcttcctcatggggaattgatgaccgtgatgacctgctgcgcacaattcaccgaatgatcgataacggtc

SEQ ID NO: 157875 - DNA, 75 bp, synthetic construct
  source 1..75: mol_type = other DNA
cgtattaccctaccttgtcctggcaaccactggctgactaccccacatgcccggaaacgcttaaggatatgagcg

SEQ ID NO: 157876 - DNA, 75 bp, synthetic construct
  source 1..75: mol_type = other DNA
aagcctgggattatgtccggatgggttttttaagccgaatgggcgtacttaataactggttgagcgaagaagaaa

SEQ ID NO: 157877 - DNA, 75 bp, synthetic construct
  source 1..75: mol_type = other DNA
tgggatactcccctatggatttggctattttgatgggggataagagaattattttttatttatatggttatattt

SEQ ID NO: 157878 - DNA, 75 bp, synthetic construct
  source 1..75: mol_type = other DNA
gacacgatctgccgtactggtggtcggcggccttgggcctgttctctttgcttagcctgcaggattacgtgttta

SEQ ID NO: 157879 - DNA, 75 bp, synthetic construct
  source 1..75: mol_type = other DNA
gcggctgccatcagcggcgactcaacgttaattattcagggcaccgcaggcaccggtgaagaacaaatgcgttat

SEQ ID NO: 157880 - DNA, 75 bp, synthetic construct
  source 1..75: mol_type = other DNA
aaaaatccacctgtaccactgcgaccatcgcggcctgccgctggcgctcatcagcacggaaggggcaacagcgtg

SEQ ID NO: 157881 - DNA, 75 bp, synthetic construct
  source 1..75: mol_type = other DNA
gcatgtacggggggagtttgtggtgttctttcacgtataataggaccaagtaaatttgatagtactgcagatgct

SEQ ID NO: 157882 - DNA, 75 bp, synthetic construct
  source 1..75: mol_type = other DNA
atatttattgcacatccgtaaaattattgtatccagatttaaatatcatcattggggtagctactgaaccgcgtg

SEQ ID NO: 157883 - DNA, 75 bp, synthetic construct
  source 1..75: mol_type = other DNA
agtcagagtaatacttacaactatggtgccagcggctccttgctggctcatccgggcggcgtaatcgtgtcccgg

SEQ ID NO: 157884 - DNA, 75 bp, synthetic construct
  source 1..75: mol_type = other DNA
ggcagtcaggggcagaccaggggcaataaaaacaaatcgtccaccacatctgactttctgagtctgaatgcgggt

SEQ ID NO: 157885 - DNA, 75 bp, synthetic construct
  source 1..75: mol_type = other DNA
ggcaacagctgaatttatatgttgcacagatttatatgaaaaaagcgggtgatatttcatcactccgtcagttct

SEQ ID NO: 157886 - DNA, 75 bp, synthetic construct
  source 1..75: mol_type = other DNA
cggctaatgccaatattggcgctgcacgcgcggcattttttccgtctataagcctgaccagcggaatatcgaccg

SEQ ID NO: 157887 - DNA, 75 bp, synthetic construct
  source 1..75: mol_type = other DNA
aaattataagctgaatgcaaaatctccgcgccattctgaatctgacgaaaaatggcgtccattacaggaaattaa

SEQ ID NO: 157888 - DNA, 75 bp, synthetic construct
  source 1..75: mol_type = other DNA
cttttgccgcgcaactggcggcggtaatgaaaaaggggcggtttactcgtttgttggcagtaaaaacgccggatg

SEQ ID NO: 157889 - DNA, 75 bp, synthetic construct
  source 1..75: mol_type = other DNA
gttaaagctattgatgaacggcagccttttgccgcgcagctggcggcggtaatgtcaaaggggcgttttactcgt

SEQ ID NO: 157890 - DNA, 75 bp, synthetic construct
  source 1..75: mol_type = other DNA
atgagtaccacaacacgaaaatttaaaaccgttatcaccgatacgggtgcaaaaaaattagctcaggcagccgca

SEQ ID NO: 157891 - DNA, 75 bp, synthetic construct
  source 1..75: mol_type = other DNA
acgacaccgttaaagacaacctcatcgcgtacattcgcaccctaccggtaaaccctcgtgcgccaatggtggtcg

SEQ ID NO: 157892 - DNA, 75 bp, synthetic construct
  source 1..75: mol_type = other DNA
actgccttgtggcttaagaccaaaaaaatggagcaaagaagtgcgcggcagagaatgccaggtacgtatttacgg

SEQ ID NO: 157893 - DNA, 75 bp, synthetic construct
  source 1..75: mol_type = other DNA
aatgtcaaaggggcgttttactcgcctgtcggcagtaaaaacaccggatgaattactgcgccagttacggcgcgc

SEQ ID NO: 157894 - DNA, 75 bp, synthetic construct
  source 1..75: mol_type = other DNA
cgacccgactaccgcacggaagctttataccgccgcgttcccgctggtggatatcactgtcggtgatgctgccaa

SEQ ID NO: 157895 - DNA, 75 bp, synthetic construct
  source 1..75: mol_type = other DNA
gcttacaaaagtaccgaccagagcctggtgctgtgcgacacagtccgccatctgcccgaatcttttgaaatccca

SEQ ID NO: 157896 - DNA, 75 bp, synthetic construct
  source 1..75: mol_type = other DNA
cctcgaaggtttaaatgtcggagaaaatgtcgtgctgtcgctgccggataagaaagagcccgaagaaaggattat

SEQ ID NO: 157897 - DNA, 75 bp, synthetic construct
  source 1..75: mol_type = other DNA
tctttattttcttggctagtcttttttcaccaaaagctttttgtgacatatattacggtgtattacatgggaata

SEQ ID NO: 157898 - DNA, 75 bp, synthetic construct
  source 1..75: mol_type = other DNA
cagccacgctgcactacaacccgatcgcactcgtattgtgtttaacgctaatgataaagctaccagtctgcgggt

SEQ ID NO: 157899 - DNA, 75 bp, synthetic construct
  source 1..75: mol_type = other DNA
caaccatgtcttttagtggtggtacaggatggttcaggctggcaactgtaaccatgccacaggccagttccgtgg

SEQ ID NO: 157900 - DNA, 75 bp, synthetic construct
  source 1..75: mol_type = other DNA
gatatttcagtgtctgtcggagaactggggtcgctgcttgatcactcaggacctcattcagaagccgaaaagtat

SEQ ID NO: 157901 - DNA, 75 bp, synthetic construct
  source 1..75: mol_type = other DNA
gtaatcaattttacctgggttacatggatgattacggcgcattacggatgaatactctgaactgtaacggacaat

SEQ ID NO: 157902 - DNA, 75 bp, synthetic construct
  source 1..75: mol_type = other DNA
taaggctaatgggaaacaaggtgttcttgatgagttagatgctatcagggatgacctgctttttaatagactaat

SEQ ID NO: 157903 - DNA, 75 bp, synthetic construct
  source 1..75: mol_type = other DNA
caacactatcgttttccggggaacgtgcgcgaactggaacatgctattcatcgggcggtagtgctggcgagagcc

SEQ ID NO: 157904 - DNA, 75 bp, synthetic construct
  source 1..75: mol_type = other DNA
cgtgatttctataatgaatgagtctcgtaagaaattgttaggacttaaatacccgcaaaaacaaaatactttaga

SEQ ID NO: 157905 - DNA, 75 bp, synthetic construct
  source 1..75: mol_type = other DNA
aattacgccaaatcccccagcaatgttatatttgaagggggacgtaaatattcttagtgagatgccaggagttgc

SEQ ID NO: 157906 - DNA, 75 bp, synthetic construct
  source 1..75: mol_type = other DNA
ctgatgatgcttcagcttgggttaagtctgcgcacaatgcggtactacgagagctgcattgaggcattccatgaa

SEQ ID NO: 157907 - DNA, 75 bp, synthetic construct
  source 1..75: mol_type = other DNA
actggcatcacgacacggggaaatacgggcgaaccattaccgggtgggatgaggataaaaacagcatccgcacgt

SEQ ID NO: 157908 - DNA, 75 bp, synthetic construct
  source 1..75: mol_type = other DNA
ggttaaatacgccagaagtcttgctgattacgctcgatggcagcgaagttcccgacgtgctggcggattatttgc

SEQ ID NO: 157909 - DNA, 75 bp, synthetic construct
  source 1..75: mol_type = other DNA
tttataaaaaggataaagcactgcccttgtattgggctatgcaaagtctgttgcaccaaacctataagaatttac

SEQ ID NO: 157910 - DNA, 75 bp, synthetic construct
  source 1..75: mol_type = other DNA
atacggcccattctttgcgcttattcctgaattattacctaagaatgtatctggtgcctctactgggttaattaa

SEQ ID NO: 157911 - DNA, 75 bp, synthetic construct
  source 1..75: mol_type = other DNA
acctacagcaaatctttcaaggcccaggtcattcaggagtgttctgaacccggtgcctccatcgcaaacatcgcc

SEQ ID NO: 157912 - DNA, 75 bp, synthetic construct
  source 1..75: mol_type = other DNA
gacatacagcgaccgttcatgcaaccgggaatacagaaaacaccgttaaaaatattgcgtttaactacattgtga

SEQ ID NO: 157913 - DNA, 75 bp, synthetic construct
  source 1..75: mol_type = other DNA
gatgttgttcaacataaatgaacccatcatttttggtttgccaattatgttcaacccggtgctaattgtaccatt

SEQ ID NO: 157914 - DNA, 75 bp, synthetic construct
  source 1..75: mol_type = other DNA
atgctgaaagcttttgcgatgcgcctgatgcatatcggcctgaaggtgcatgtggtcggcgatgtggtcacgcct

SEQ ID NO: 157915 - DNA, 75 bp, synthetic construct
  source 1..75: mol_type = other DNA
ctactgatcgtatttcaatcagagagatgccttctttcgagatacaactacctgatatacatacacaaaaaaaag

SEQ ID NO: 157916 - DNA, 75 bp, synthetic construct
  source 1..75: mol_type = other DNA
tgccacctttgtgactcagcgcgtctggtttggtgataagagcgaagtgaatctcggggcaggtgaagcgggctc

SEQ ID NO: 157917 - DNA, 75 bp, synthetic construct
  source 1..75: mol_type = other DNA
gaacaataatttcaataatgaccccgacacagaatagttatccagtcactatcggcgcaggtggggccggtggtg

SEQ ID NO: 157918 - DNA, 75 bp, synthetic construct
  source 1..75: mol_type = other DNA
agcaatggcttcactgaataaagtgttagcaaatccaaagatgaaagtaaacaaatctgataaggatgccattgt

SEQ ID NO: 157919 - DNA, 75 bp, synthetic construct
  source 1..75: mol_type = other DNA
cctgttggaggttgaatcatggatcattggtggcgttgttgctggagttgctattagtttattcggggctgtgtt

SEQ ID NO: 157920 - DNA, 75 bp, synthetic construct
  source 1..75: mol_type = other DNA
tgcagcgtacagaggcaaacgtgatctgccaggagtgccgcaacagcgcggcgatgagaagggtattgatggttt

SEQ ID NO: 157921 - DNA, 75 bp, synthetic construct
  source 1..75: mol_type = other DNA
acattcgcttcttgttgcccattacctatacggtatctctaaaagaaagctcgccaaggctagtaaaaaggatga

SEQ ID NO: 157922 - DNA, 75 bp, synthetic construct
  source 1..75: mol_type = other DNA
cactgacaccgaaagatattggtacgcttaactcaacaactatgtcattcagcggtggtgctggttggttcaaat

SEQ ID NO: 157923 - DNA, 75 bp, synthetic construct
  source 1..75: mol_type = other DNA
tgcggcgcttgagccagtgcgcgcgcgtggcgcgctggaaaccctgcgacgcctgacgcagcgaattaatgaggt

SEQ ID NO: 157924 - DNA, 75 bp, synthetic construct
  source 1..75: mol_type = other DNA
ccgatgggcgttttctatccagcggcagtagtgggggattgcttactgagttattcctttatgggtttaataacg

SEQ ID NO: 157925 - DNA, 75 bp, synthetic construct
  source 1..75: mol_type = other DNA
cttaatacgtttttgtctgaagacttagctctttggcttgatttatcgttaaaaggatatggttttggaaatctc

SEQ ID NO: 157926 - DNA, 75 bp, synthetic construct
  source 1..75: mol_type = other DNA
ctttttactttacaaaaaaattatcagaacatcattttatcgaggaatagtgttaatttgggcttaggctactca

SEQ ID NO: 157927 - DNA, 75 bp, synthetic construct
  source 1..75: mol_type = other DNA
tgctggcggccctgcgcaataacccagggctgaatagtgctcgtattgccagcatgatcggcatgaccacaaaaa

SEQ ID NO: 157928 - DNA, 75 bp, synthetic construct
  source 1..75: mol_type = other DNA
ttaccaccgccggagctgcaaaactggcggcggcgacggtgccgggtggtaaaaaagtgaaccttaccgcgatgg

SEQ ID NO: 157929 - DNA, 75 bp, synthetic construct
  source 1..75: mol_type = other DNA
actcaggtgaagcacaatcgcaagagagtattcaggacaaaatatctcaatgtaagttttctgtttgtccagaga

SEQ ID NO: 157930 - DNA, 75 bp, synthetic construct
  source 1..75: mol_type = other DNA
acacgactggattgcttcatttaaacaagccttcagcgaagggcaaacggtcgtcgtgcccgccggattggtttg

SEQ ID NO: 157931 - DNA, 75 bp, synthetic construct
  source 1..75: mol_type = other DNA
tggccgtgaaacccatcgatatgcgtgccggtatcgacaccctgccccagtacgttcagaacgaacttaacgcag

SEQ ID NO: 157932 - DNA, 75 bp, synthetic construct
  source 1..75: mol_type = other DNA
tttattatgaagaaaatatggagaaaaacgacagggaaaaaggagaaattctcaataaatgcggtaacttagaga

SEQ ID NO: 157933 - DNA, 75 bp, synthetic construct
  source 1..75: mol_type = other DNA
aattgagcctccccggttaattttctgtagttctgagagcgacctgtatcacgccattgtgtccgagatagtgcc

SEQ ID NO: 157934 - DNA, 75 bp, synthetic construct
  source 1..75: mol_type = other DNA
cacgttgccggacgggcagcatctcagtcatctttactacggcagcgggcatctgctccagacggcactggacgg

SEQ ID NO: 157935 - DNA, 75 bp, synthetic construct
  source 1..75: mol_type = other DNA
aacttgcgtgcaattgataatgtaatcaaaaatgaaatggtagaaggaggagtaagagtaaatcgttctgatgtg

SEQ ID NO: 157936 - DNA, 75 bp, synthetic construct
  source 1..75: mol_type = other DNA
ctaaagatgaaagtgctttcataaatggtgggtctgcaggtcttaacactgaagaaaataaacatgaaagtaaaa

SEQ ID NO: 157937 - DNA, 75 bp, synthetic construct
  source 1..75: mol_type = other DNA
cctttccatgaagcggtactccattccccggattttactaaaagctttagtgttcatacgcgctggattgagact

SEQ ID NO: 157938 - DNA, 75 bp, synthetic construct
  source 1..75: mol_type = other DNA
ctggctggtgaagcctgggcattacccgggtccagcccggcagagacttacctgaatatcgaacaactgatcgac

SEQ ID NO: 157939 - DNA, 75 bp, synthetic construct
  source 1..75: mol_type = other DNA
cgctggcccttatcagcaaggaagggacaacagaatggtgcgcagaatacgatgaatggggtaaccagctgaatg

SEQ ID NO: 157940 - DNA, 75 bp, synthetic construct
  source 1..75: mol_type = other DNA
acagaaatcagccacctgagtgaaggccaccgtgtggcggtccactacggctatgacgataaaggccgtctgacg

SEQ ID NO: 157941 - DNA, 75 bp, synthetic construct
  source 1..75: mol_type = other DNA
gggatccaggcagtgccttatggtcaacatgaagcggctcggtcactggggttacgctacgccaggtcattattc

SEQ ID NO: 157942 - DNA, 75 bp, synthetic construct
  source 1..75: mol_type = other DNA
taacttccgcggcggaatggttttaattcctgaactggcagccttaacgctggcactttcggtttatacctctgc

SEQ ID NO: 157943 - DNA, 75 bp, synthetic construct
  source 1..75: mol_type = other DNA
aatatcatcagtgtcagttgccatatatactcgtgtttcagttattgtccttggtttcttcttagataaagaaag

SEQ ID NO: 157944 - DNA, 75 bp, synthetic construct
  source 1..75: mol_type = other DNA
ttgaccactacagttgattactatgcgccggcgttccgctttgaagacgaagatgataatccgtggatcccttat

SEQ ID NO: 157945 - DNA, 75 bp, synthetic construct
  source 1..75: mol_type = other DNA
ttgattacagtttttgcggcaagaataatgtatgaaacaattgagattccatcacaaaaactagccagaaagctc

SEQ ID NO: 157946 - DNA, 75 bp, synthetic construct
  source 1..75: mol_type = other DNA
ttgcttttgttcaccttgaaccagtatatttatgtttgccgattattctaactggttttattccttgcgccttta

SEQ ID NO: 157947 - DNA, 75 bp, synthetic construct
  source 1..75: mol_type = other DNA
atgttaatgcactttttttttattattgcctgtgctatctcatgctttttcaatgcaatggatgtttttggtata

SEQ ID NO: 157948 - DNA, 75 bp, synthetic construct
  source 1..75: mol_type = other DNA
gtaaggcttattacgtcaacaatctatttaagagctattacttatattttgatagctatcccaatagttattgta

SEQ ID NO: 157949 - DNA, 75 bp, synthetic construct
  source 1..75: mol_type = other DNA
atcatgagtcgataaacagaattcaacatatacgatctcatgaagtgcaacaattgcagctaacggatcttttca

SEQ ID NO: 157950 - DNA, 75 bp, synthetic construct
  source 1..75: mol_type = other DNA
gcactatcacaaaaaaaattgctagagacatcaaggaattaaaattaaaacacaatctaaaacctgatttcgaaa

SEQ ID NO: 157951 - DNA, 75 bp, synthetic construct
  source 1..75: mol_type = other DNA
ggggcgaactgacagagcgcagggaccagcaactggagtggaatgcgcagggccagttaacgcgggtcatcagca

SEQ ID NO: 157952 - DNA, 75 bp, synthetic construct
  source 1..75: mol_type = other DNA
ccattatctgaagtggaaaaaaaagacttaaaagaaaaccaagcatatataaatgaatttttactaaaatcatta

SEQ ID NO: 157953 - DNA, 75 bp, synthetic construct
  source 1..75: mol_type = other DNA
gagagtatcctaacatagaacactttctttctaattgtgaagcatatttagcatttcatgatgatgaagaagtgt

SEQ ID NO: 157954 - DNA, 75 bp, synthetic construct
  source 1..75: mol_type = other DNA
gattcagaaattaacacctccagcccgatgttgggtgtgcgcgatgctgaatttcgcaagctgggtaaatcgcaa

SEQ ID NO: 157955 - DNA, 75 bp, synthetic construct
  source 1..75: mol_type = other DNA
gcccccgtgtttccgggatatttctttctgaaggcggactttaatatccattcggtttctgccatccgacagcac

SEQ ID NO: 157956 - DNA, 75 bp, synthetic construct
  source 1..75: mol_type = other DNA
aacgcgtttggacgctcggctatcgaagagaacgagatccgcgctgctggcgaactgcaaccactacctgagctt

SEQ ID NO: 157957 - DNA, 75 bp, synthetic construct
  source 1..75: mol_type = other DNA
ttggcattattccaccggctcagaatgaagaaatcactgtaggctggtctgatctgttggcgccgagccaggcag

SEQ ID NO: 157958 - DNA, 75 bp, synthetic construct
  source 1..75: mol_type = other DNA
gctatcgcttctgtcgataaattccgttcttctctgggtgcggtacagaaccagttgaattctgctatcaccaac

SEQ ID NO: 157959 - DNA, 75 bp, synthetic construct
  source 1..75: mol_type = other DNA
gaggttatgcagcgggtatgggcatttctggacaaatttaaggataagttccggcggtcactggaatactttcag

SEQ ID NO: 157960 - DNA, 75 bp, synthetic construct
  source 1..75: mol_type = other DNA
accgattgatcatctgatcgcaccagagcagttggttatcgataatatttaccgactgattgagtatcccggcgc

SEQ ID NO: 157961 - DNA, 75 bp, synthetic construct
  source 1..75: mol_type = other DNA
gcacagccatatgcgggagaactggcgcgaatacctggaacgggtgcgcgggaaagagccggcggaagaaaaaaa

SEQ ID NO: 157962 - DNA, 75 bp, synthetic construct
  source 1..75: mol_type = other DNA
gaagaaagtcatggatacagggaaaagaataccgccattactctgtagaaggtgatccggggcactacagtgaat

SEQ ID NO: 157963 - DNA, 75 bp, synthetic construct
  source 1..75: mol_type = other DNA
atgtttattgctattgacatggacaagttaaagcaaataaatgacaccctcggtcatcaggagggggatttagcg

SEQ ID NO: 157964 - DNA, 75 bp, synthetic construct
  source 1..75: mol_type = other DNA
tattttttgcgagggttcagaagatgaatcctcacaggctggcatcccgttcttgcgtgcaggctataacgacct

SEQ ID NO: 157965 - DNA, 75 bp, synthetic construct
  source 1..75: mol_type = other DNA
gcgtttttttaattgtagggcaggcgatttatcctagagcaagtgccctgtataatgaagatataattgcgtata

SEQ ID NO: 157966 - DNA, 75 bp, synthetic construct
  source 1..75: mol_type = other DNA
tgtatcttgtttttatgcagatgtgcaattatgctattcccttaattacgctaccttatttaacaagatgcttgg

SEQ ID NO: 157967 - DNA, 75 bp, synthetic construct
  source 1..75: mol_type = other DNA
ctatcatgatgcgaggcttttgttggactctgctgatgaggatggccgatatagaggttttgtcttggagcttcc

SEQ ID NO: 157968 - DNA, 75 bp, synthetic construct
  source 1..75: mol_type = other DNA
gattggtgatacacctgaagttattctccgtacgagtttgactgactaccaacgtggaaatgaacctgaaaatac

SEQ ID NO: 157969 - DNA, 75 bp, synthetic construct
  source 1..75: mol_type = other DNA
tttttatatttgttttcaacgaattgaaattgtgcagacactgtctgcacaattcaccagacactatctggcgaa

SEQ ID NO: 157970 - DNA, 75 bp, synthetic construct
  source 1..75: mol_type = other DNA
taaccacggaatatctgaagaaccttcaggcgatgaaaacccattacgtcgccgtaggtttgccagcgggcaagg

SEQ ID NO: 157971 - DNA, 75 bp, synthetic construct
  source 1..75: mol_type = other DNA
agtttatgcctttcattttctcagtgaaaatcctgaagcattaaatttaaagttattaactaactctggttttat

SEQ ID NO: 157972 - DNA, 75 bp, synthetic construct
  source 1..75: mol_type = other DNA
gggcgaagaacgtttctcccaggggcgttttgacgatgccgcacgcttgatggaacagatcaccacttccgatga

SEQ ID NO: 157973 - DNA, 75 bp, synthetic construct
  source 1..75: mol_type = other DNA
tccaaaaatgcagtatctgttggtgatgctattactcaattgcctggcgcgacggcagccgatgcaccagtaacc

SEQ ID NO: 157974 - DNA, 75 bp, synthetic construct
  source 1..75: mol_type = other DNA
tctttaagttagaagacgctaatggcaaagatactggttcatttgcgttgattggtgatgacggtaaacagtatg

SEQ ID NO: 157975 - DNA, 75 bp, synthetic construct
  source 1..75: mol_type = other DNA
gcgtgaatgtgctggcgaaagacggttcgatgaagattcaggttggcgcgaatgacgggcagaccatctctatcg

SEQ ID NO: 157976 - DNA, 75 bp, synthetic construct
  source 1..75: mol_type = other DNA
cagcaggctaccagcaaatccacgacggcattattcatctggtcgatagcgcccgaacggaaacggtacgtagcg

SEQ ID NO: 157977 - DNA, 75 bp, synthetic construct
  source 1..75: mol_type = other DNA
tgcttcagcaaacgtgcatatcccccccatcaccaaagccactcctgatgttgaaacttcccctgagagtaaaaa

SEQ ID NO: 157978 - DNA, 75 bp, synthetic construct
  source 1..75: mol_type = other DNA
gcctggaatatttaagcaaagcctgtcaaaaacatcccgctgcggctcttgccgcttatgctactttgctggcaa

SEQ ID NO: 157979 - DNA, 75 bp, synthetic construct
  source 1..75: mol_type = other DNA
aagacctgatttctcacacaaaaaaagcttatattttaaatgtgagttaaaatttattcttttggggcgtgacag

SEQ ID NO: 157980 - DNA, 75 bp, synthetic construct
  source 1..75: mol_type = other DNA
cggcttcaccctcgcgccctgccacgattttccccacccggcggcacagcgctgctatcaggtgctggcggccct

SEQ ID NO: 157981 - DNA, 75 bp, synthetic construct
  source 1..75: mol_type = other DNA
ccaccggtaaaaatgccattgctttaggaggtaacgccagagcagaaaaagataatgccgttgcagttggtgctg

SEQ ID NO: 157982 - DNA, 75 bp, synthetic construct
  source 1..75: mol_type = other DNA
aatttattatttcctgattttgttgaccacatacaatcgccgttaccacttgcatcaacacttttagagagaatt

SEQ ID NO: 157983 - DNA, 75 bp, synthetic construct
  source 1..75: mol_type = other DNA
acaagctgaattacctgaagataaaacattaggtttcaaacgtcaattgcaatttttcagtttaggggatgagaa

SEQ ID NO: 157984 - DNA, 75 bp, synthetic construct
  source 1..75: mol_type = other DNA
cattgcggtcaggtatcgcaaagcgttgatacccgtcatcggatttcttcgccggtaaaaggcgtcactacagag

SEQ ID NO: 157985 - DNA, 75 bp, synthetic construct
  source 1..75: mol_type = other DNA
aaaaagatatgagtatttgttgggtttttactatagcagcattaattatacatatcaacttgaacaaattcagtt

SEQ ID NO: 157986 - DNA, 75 bp, synthetic construct
  source 1..75: mol_type = other DNA
agtgattattctgtcccagaagaattgttgcacaaagtaacaattgaagatataaaagcgtgtaaaagatcaagt

SEQ ID NO: 157987 - DNA, 75 bp, synthetic construct
  source 1..75: mol_type = other DNA
ttttcttcaagcaggccatggatagcggcctgctgcacatgccgttttatcagtcaattagcgttgaaataattg

SEQ ID NO: 157988 - DNA, 75 bp, synthetic construct
  source 1..75: mol_type = other DNA
cctacgagcagcagagcatacgtcgaacgttgtgcgcaggctgcacgaaggagctatcagacgatgaggcccacg

SEQ ID NO: 157989 - DNA, 75 bp, synthetic construct
  source 1..75: mol_type = other DNA
ataccatttaatttattaagcaatgtaataactttaattgataatgaaagaccattagagtattcttattatatg

SEQ ID NO: 157990 - DNA, 75 bp, synthetic construct
  source 1..75: mol_type = other DNA
ttgacagccatggtaacctgcgcgtgcgcaggggaatgtggttggcgctgttcctgctggcccatccgtggtggc

SEQ ID NO: 157991 - DNA, 75 bp, synthetic construct
  source 1..75: mol_type = other DNA
tgtggtcagcaagccgataatgattgacgataaacccttcccgcttaccttgagtattggcatcagctacgacgt

SEQ ID NO: 157992 - DNA, 75 bp, synthetic construct
  source 1..75: mol_type = other DNA
tcgaggggatgagtcgggagctgcagctggagaaaaaagacggcagtaaaatctggacccgttttgcgctatcga

SEQ ID NO: 157993 - DNA, 75 bp, synthetic construct
  source 1..75: mol_type = other DNA
tgcaggatcaaggaaatatcgtttcaactctgccaagttcttctgcagggattccggtaagacgaaacggtcatt

SEQ ID NO: 157994 - DNA, 75 bp, synthetic construct
  source 1..75: mol_type = other DNA
cacgggtgaaaatatctggattaaagcgtctatcagtccggtctatgacgtgcttgctcatctacaaaatctggt

SEQ ID NO: 157995 - DNA, 75 bp, synthetic construct
  source 1..75: mol_type = other DNA
tcgaaggaatgagccgggaattgcagctggagaaaaaagatggcagtaaaatatggacacgatttgccctgtcaa

SEQ ID NO: 157996 - DNA, 75 bp, synthetic construct
  source 1..75: mol_type = other DNA
gccagcggtatgcaacccgatacgctacttaacattcctgattacccgaccgataaccgcattcgcttacagcaa

SEQ ID NO: 157997 - DNA, 75 bp, synthetic construct
  source 1..75: mol_type = other DNA
attgtgagcaatatttaattaataatcattgtttctcccctgacaaggttaacgaaatctgcgaacaagccagac

SEQ ID NO: 157998 - DNA, 75 bp, synthetic construct
  source 1..75: mol_type = other DNA
ttaaaaccttcagaagaagttgatgtttttatcaaaatttttgaaagttgggtaacaaaattaccatcaatatca

SEQ ID NO: 157999 - DNA, 75 bp, synthetic construct
  source 1..75: mol_type = other DNA
ttatcagctataccggtggaaataaatgaaaaggcacgatacaaacccggcatcgctaactatcacaatatcatc

SEQ ID NO: 158000 - DNA, 75 bp, synthetic construct
  source 1..75: mol_type = other DNA
atggaaaagaaagaagacaaaccaatggtaattggtgctgtggctgttccgtttaagtttgaactgtcacaactg

SEQ ID NO: 158001 - DNA, 75 bp, synthetic construct
  source 1..75: mol_type = other DNA
tgagtcaatgctggaagcaacagaagatgatcgtcatcctggttgtccggtatttgccggtatgaaattaccgga

SEQ ID NO: 158002 - DNA, 75 bp, synthetic construct
  source 1..75: mol_type = other DNA
gatctattaccaatgaaatgatactcctacagtacaatctttcagttgagcatttcagtctgaatagttcactta

SEQ ID NO: 158003 - DNA, 75 bp, synthetic construct
  source 1..75: mol_type = other DNA
agcgttaaatatcaaattaacactccgggaatacgcagatcatcaaaaagcaatggacgcgcttgcagaaggtga

SEQ ID NO: 158004 - DNA, 75 bp, synthetic construct
  source 1..75: mol_type = other DNA
catcccaatttaaaggtgctggaaaatccttactcgcccccctattctatgacggatgaaaatggctcggttcgg

SEQ ID NO: 158005 - DNA, 75 bp, synthetic construct
  source 1..75: mol_type = other DNA
atgaataattatggcaaccacccgcaacaaggtgatgtggcaggaagggatgctgatgcgcccacaccatttcca

SEQ ID NO: 158006 - DNA, 75 bp, synthetic construct
  source 1..75: mol_type = other DNA
atgatactttggtctatgaaaaaagaaaccgatatccgacgtggaaggcattgtgttttcctgaggcatgttcac

SEQ ID NO: 158007 - DNA, 75 bp, synthetic construct
  source 1..75: mol_type = other DNA
aacgaacagcatgaggccaaaaagccgtatcaaattcgcctgctgacgggggcgtcaatcagcgccgccgctgac

SEQ ID NO: 158008 - DNA, 75 bp, synthetic construct
  source 1..75: mol_type = other DNA
tttcagtccctcaaatacaacaagttatgcaaaaattccctgtatttcaacggaatattgatctaacaggaggat

SEQ ID NO: 158009 - DNA, 75 bp, synthetic construct
  source 1..75: mol_type = other DNA
gctgatgtacgccgtttcccgcgtgaggcgcgatgttaaagtcgtgaccaaccggatgctgacccaccttgagcc

SEQ ID NO: 158010 - DNA, 75 bp, synthetic construct
  source 1..75: mol_type = other DNA
gatgtgttattcagtcggcagtgctacgcgccaggggagcagttcgccgacccggtttatcggccagtcggctat

SEQ ID NO: 158011 - DNA, 75 bp, synthetic construct
  source 1..75: mol_type = other DNA
agcgcctggcggtgcgtctggctgattatcctggtgcaagtgtacttgatatgggctgcggagcaggcatgccag

SEQ ID NO: 158012 - DNA, 75 bp, synthetic construct
  source 1..75: mol_type = other DNA
aatgtttgaacgtcaggatgtgacatttgttcaggataatcccgatgctgatttacacgcctgctttgtcgctat

SEQ ID NO: 158013 - DNA, 75 bp, synthetic construct
  source 1..75: mol_type = other DNA
tccaaaatctaaaaatctcataacaaaaaaaatacacactttattgttttactcatcagagtatatatttttacc

SEQ ID NO: 158014 - DNA, 75 bp, synthetic construct
  source 1..75: mol_type = other DNA
attttctgctaaatacccagtctgttgcatcagtgggtcgtgaaggtgttaaaccctggaccggggctatcaccc

SEQ ID NO: 158015 - DNA, 75 bp, synthetic construct
  source 1..75: mol_type = other DNA
atgatttgtatgagcgggctaaaattaagaacatggatgattggcttgaaaatgctttaaatgatatagaattaa

SEQ ID NO: 158016 - DNA, 75 bp, synthetic construct
  source 1..75: mol_type = other DNA
tgtcagcgtaccggacccgacgcgacacgggtaacggcaacctgccggatattgaaagccgtattcagaaggctg

SEQ ID NO: 158017 - DNA, 75 bp, synthetic construct
  source 1..75: mol_type = other DNA
tgccggtacctgctccccaaggttatctggttaccccgtataaacagggagacaccatgaccgaatccagcgatt

SEQ ID NO: 158018 - DNA, 75 bp, synthetic construct
  source 1..75: mol_type = other DNA
caatgagtaccgggtgattgaccagtcgaaccaggttgttgtctctgatgacctttttaagcggatcatgacctg

SEQ ID NO: 158019 - DNA, 75 bp, synthetic construct
  source 1..75: mol_type = other DNA
aagactattgatgctctccgccatcgcgttatcatacaagacccctgtactctataatctgttcaccagactgat

SEQ ID NO: 158020 - DNA, 75 bp, synthetic construct
  source 1..75: mol_type = other DNA
agtggatacccggggtctaccgtacggtatttacgatgtggaagttgaggtgatcgttaacggtcacgtgatcag

SEQ ID NO: 158021 - DNA, 75 bp, synthetic construct
  source 1..75: mol_type = other DNA
atgatactttggtctgtgaaaaaagaaaccgatatccggcgtggaaggcattgtgttttcctgaggcatgttcac

SEQ ID NO: 158022 - DNA, 75 bp, synthetic construct
  source 1..75: mol_type = other DNA
atgatactttggtctctgaaaaaagaaaccgatatccgccgtggaaggcattgtgttttcctgaggcatgttcac

SEQ ID NO: 158023 - DNA, 75 bp, synthetic construct
  source 1..75: mol_type = other DNA
atgatactttggtctttgaaaaaagaaaccgatatccgtcgtggaaggcattgtgttttcctgaggcatgttcac

SEQ ID NO: 158024 - DNA, 75 bp, synthetic construct
  source 1..75: mol_type = other DNA
aaagaccttggagttaattatcttcagggatattatttcggaaggccagaaaaactgatttcattctgtaatcaa

SEQ ID NO: 158025 - DNA, 75 bp, synthetic construct
  source 1..75: mol_type = other DNA
gccctggattgagcaggcacgtaaagatgtcagtgacctccgtcatcttaaactcctgcaacatgtaaagacgaa

SEQ ID NO: 158026 - DNA, 75 bp, synthetic construct
  source 1..75: mol_type = other DNA
cgatcaccgttaccaataaccagatccagaacattggccttaatcagatacagacggttggtgtcaaccaggtgg

SEQ ID NO: 158027 - DNA, 75 bp, synthetic construct
  source 1..75: mol_type = other DNA
tcatgccaatgcaggcgcttatattggcggcccagtggctgaaggtgatccagatgtctgggatcgtgtgttaaa

SEQ ID NO: 158028 - DNA, 75 bp, synthetic construct
  source 1..75: mol_type = other DNA
ccagaaaacgtgtgccattcatctgccggaacatctggaagatgtgactaagcgcctgattttaccctgtcatta

SEQ ID NO: 158029 - DNA, 75 bp, synthetic construct
  source 1..75: mol_type = other DNA
gcaaacaggttgatgcgaccaacagcaccatctcattggcagcctatcgcttctccgatcgccattttcacagct

SEQ ID NO: 158030 - DNA, 75 bp, synthetic construct
  source 1..75: mol_type = other DNA
gtttttgcgttataatagtcgatacagaaaagcgcaaaatgaatataaaaagttttcctgtccatagccataaag

SEQ ID NO: 158031 - DNA, 75 bp, synthetic construct
  source 1..75: mol_type = other DNA
tacgcgaccgtcttggcgctgtaccgccagaaatcaatattggcactttcgatgaacatcccatgctgggatttc

SEQ ID NO: 158032 - DNA, 75 bp, synthetic construct
  source 1..75: mol_type = other DNA
cctacgagatgtctccagtagggaaaacaatagcaacacaagtagaaataaaggaactgaaataggcacagaaag

SEQ ID NO: 158033 - DNA, 75 bp, synthetic construct
  source 1..75: mol_type = other DNA
cgacagagttgcagcgattccgccttcatgctccagcacggaccatgccgttgatggaacctttacgtcaggcgg

SEQ ID NO: 158034 - DNA, 75 bp, synthetic construct
  source 1..75: mol_type = other DNA
ccaacctggattgatcccaaaggctgccagcactttgagctggtccctctgaatgacgactaccccgtgattaat

SEQ ID NO: 158035 - DNA, 75 bp, synthetic construct
  source 1..75: mol_type = other DNA
atgaggacgctgtgagtcttgcagatcgcgtaaaacagaaaagagctgaactagggctaactcaggtagaagctg

SEQ ID NO: 158036 - DNA, 75 bp, synthetic construct
  source 1..75: mol_type = other DNA
attaatcattccgctcgcagccttaagcttaacaaaactgatacattagggttgattgttcccaacatatccaac

SEQ ID NO: 158037 - DNA, 75 bp, synthetic construct
  source 1..75: mol_type = other DNA
ggggaaaacgccagactccaaaaccatcatcatctctattaccaccctggcggtcacggttttaggttccgtgct

SEQ ID NO: 158038 - DNA, 75 bp, synthetic construct
  source 1..75: mol_type = other DNA
cgatggtaaagagattacaggagtaactaaaaatatctcctcactgacctggtcagcgcagagcaataccttatt

SEQ ID NO: 158039 - DNA, 75 bp, synthetic construct
  source 1..75: mol_type = other DNA
ttatttaccgctatgtccatgagaaaaacgttgcttcatttaatgaactggctgagttgatgagcgtttcgcata

SEQ ID NO: 158040 - DNA, 75 bp, synthetic construct
  source 1..75: mol_type = other DNA
aatgattctgatgttctaattgtcgatgatgatatacacttaatagagttgcctggtttcaaaaattatttatca

SEQ ID NO: 158041 - DNA, 75 bp, synthetic construct
  source 1..75: mol_type = other DNA
atatggcagataaaactggcgtatcaaaagaagcgctctttgatatgtgccaggaattaatggcggtcgctaaag

SEQ ID NO: 158042 - DNA, 75 bp, synthetic construct
  source 1..75: mol_type = other DNA
tcctggcgttacggtaatgtgtgtgtccagcgtggtgtgcagttgcgcagtgaggatgacgtggctgacgacgct

SEQ ID NO: 158043 - DNA, 75 bp, synthetic construct
  source 1..75: mol_type = other DNA
cgaaaccgatctgattgatgctctgcaaaataacatcattgctggtgcggcactggacgtttatgccaacgaacc

SEQ ID NO: 158044 - DNA, 75 bp, synthetic construct
  source 1..75: mol_type = other DNA
agcaaaagtgctaagggatgagttgggggcaggaaataggttttccccaggcttgttaaactcttctgttgctct

SEQ ID NO: 158045 - DNA, 75 bp, synthetic construct
  source 1..75: mol_type = other DNA
gggagttccaggatggtgtacgcgcaatcattttaatatcaaaaatgccaggaattacctgaccgatcacggcct

SEQ ID NO: 158046 - DNA, 75 bp, synthetic construct
  source 1..75: mol_type = other DNA
tcacccttgaacatatccgccagtgggcagccttagacaagcatgtgcgaaaaccggttggttatttagaaaagt

SEQ ID NO: 158047 - DNA, 75 bp, synthetic construct
  source 1..75: mol_type = other DNA
ttgtttcgacaacacgtgatacaccgacagacccagcaggtaagttcgcacagtcccttgataaattaatggctg

SEQ ID NO: 158048 - DNA, 75 bp, synthetic construct
  source 1..75: mol_type = other DNA
tgtctgttttttcctgtgctgtattcatgttatcaggttgttcatctaatagatttgcctccagggatgcaaatg

SEQ ID NO: 158049 - DNA, 75 bp, synthetic construct
  source 1..75: mol_type = other DNA
cagcgaaaccaataacgttagtgaggcgatggccgcaacaccgaaggctgtcaaaatagtaatggataatgccaa

SEQ ID NO: 158050 - DNA, 75 bp, synthetic construct
  source 1..75: mol_type = other DNA
taacaggacaacgtcgcgaagacataacgaatatgcggttcagtgatatttatgatgatcgtctccacatcaggc

SEQ ID NO: 158051 - DNA, 75 bp, synthetic construct
  source 1..75: mol_type = other DNA
tttaaaaaaaggatttttctcatttcctgatgcaataaactatattgataatatagaatttatcagaatgaaatc

SEQ ID NO: 158052 - DNA, 75 bp, synthetic construct
  source 1..75: mol_type = other DNA
attgacctgtcctttttttctaaaaaaggtggggttttgcctggtgtttatgaacttacagtttttgttaatgat

SEQ ID NO: 158053 - DNA, 75 bp, synthetic construct
  source 1..75: mol_type = other DNA
tatcggtgccgggttggcgcgtcgactggaaaaagattacagcgtcaaactcatcgaacgtaatcagcaacgtgc

SEQ ID NO: 158054 - DNA, 75 bp, synthetic construct
  source 1..75: mol_type = other DNA
ttactggttttaccgcgacgataaatttgtcttcgactacaaacttaaagcggaagatgagcgcgatgccctgtt

SEQ ID NO: 158055 - DNA, 75 bp, synthetic construct
  source 1..75: mol_type = other DNA
tgcgtgaacagctcgatattccccttttcgacagcgatctgatcggtttgtattttgcctgtgcgctggagcggc

SEQ ID NO: 158056 - DNA, 75 bp, synthetic construct
  source 1..75: mol_type = other DNA
actgatgtttcggctgctactggaaagaccgctaccacgaatgatggcggtgctaccagtaaaaagaacaccgga

SEQ ID NO: 158057 - DNA, 75 bp, synthetic construct
  source 1..75: mol_type = other DNA
cttgatgccgtgattcagcgtgtcgaaatgtacaacgcatcgcttctcgttccgctttcaccggctgaatgtcgg

SEQ ID NO: 158058 - DNA, 75 bp, synthetic construct
  source 1..75: mol_type = other DNA
ttgcaggaaaagaaaaacattttattcgagtgattgataaaaacacgcttcagttaagagatgatgagaacgctt

SEQ ID NO: 158059 - DNA, 75 bp, synthetic construct
  source 1..75: mol_type = other DNA
gactcattattacgttatattttaaaacagcgtatttcaatagcgtacttaccaaaagtattagtgaaaatgcgt

SEQ ID NO: 158060 - DNA, 75 bp, synthetic construct
  source 1..75: mol_type = other DNA
gacaagttggcggcacactagctgaaaatctggttggcgaaaacaacgatattactgttgtcgataccaacggtg

SEQ ID NO: 158061 - DNA, 75 bp, synthetic construct
  source 1..75: mol_type = other DNA
ctaacttcaaaaaggaagtacgagctacatcgtgaagttacgatatacctcgatccaatagattatcctgatagt

SEQ ID NO: 158062 - DNA, 75 bp, synthetic construct
  source 1..75: mol_type = other DNA
ttcagcgtgtcgaaatgtacaacgcatcgcttcctgttccgctttcaccagctgaatgccgggctattggcagga

SEQ ID NO: 158063 - DNA, 75 bp, synthetic construct
  source 1..75: mol_type = other DNA
aacgcagaggccgttgccgaagacaaaaagcaggtggcgttactggcatcatctgccacacaggatgcggcccgc

SEQ ID NO: 158064 - DNA, 75 bp, synthetic construct
  source 1..75: mol_type = other DNA
aagagaatattgtgtcggtgatatttcggtttacgacgactcaaagcccggcacactgaacgactttctgactgc

SEQ ID NO: 158065 - DNA, 75 bp, synthetic construct
  source 1..75: mol_type = other DNA
tgtaataatagttgtgcttacaatatcatttggagcgaattggatttcgcataaatggttggtagcatctacaaa

SEQ ID NO: 158066 - DNA, 75 bp, synthetic construct
  source 1..75: mol_type = other DNA
tttcttacgaaaaaggccgcagagtttcacccctgcggcctggtccgggcgcaaattgccattacggcagcctga

SEQ ID NO: 158067 - DNA, 75 bp, synthetic construct
  source 1..75: mol_type = other DNA
ttcaggagatgcccgtttcgtgagaattactgacataaataaagacgggaagctatcgaaagaaaacccaatgta

SEQ ID NO: 158068 - DNA, 75 bp, synthetic construct
  source 1..75: mol_type = other DNA
aattgctggatggggttgaggttgagtggaagacacttgggcaaacttgcaaaattgaaacaggaaagcttaatg

SEQ ID NO: 158069 - DNA, 75 bp, synthetic construct
  source 1..75: mol_type = other DNA
ccggtgcgcctgcatgggcgtctgaacatcagtccacgctgagcgtggggtatcttcatgccccgacgaacgttc

SEQ ID NO: 158070 - DNA, 75 bp, synthetic construct
  source 1..75: mol_type = other DNA
ccgccaatcgtcgcattgaggcgtcgggttactggttttaccgaaatgatgaatttgttttcgactacaaactta

SEQ ID NO: 158071 - DNA, 75 bp, synthetic construct
  source 1..75: mol_type = other DNA
gattaatcagtgacgacgacagggagaagctgaaagcgtaccgcatttacgcgaaatcgctgcaggcgatggatt

SEQ ID NO: 158072 - DNA, 75 bp, synthetic construct
  source 1..75: mol_type = other DNA
cccgacccggttgccgaaggggataagctgaaggtaccgcgcagcggcgattttgttcgccagagcccgggggtg

SEQ ID NO: 158073 - DNA, 75 bp, synthetic construct
  source 1..75: mol_type = other DNA
ctacgaaaaatcgtagtgagtacttggatgatgttttatcgagtttattgacttggaaacgagatgattttgaag

SEQ ID NO: 158074 - DNA, 75 bp, synthetic construct
  source 1..75: mol_type = other DNA
tccaagtattatgcaatttcataatttggttcgttttgctaaaactttatttgatagtaatggtgaatcaggacg

SEQ ID NO: 158075 - DNA, 75 bp, synthetic construct
  source 1..75: mol_type = other DNA
gagtgaggaaagccgccgctggctggcatcgtgcggcctgaccgtggagcagatgcaaaaccagatggacccggt

SEQ ID NO: 158076 - DNA, 75 bp, synthetic construct
  source 1..75: mol_type = other DNA
gggatgcactgagcagccgcttcttttatgacgcctttccgggaatgcgtctgcgccacccggtgactgacgata

SEQ ID NO: 158077 - DNA, 75 bp, synthetic construct
  source 1..75: mol_type = other DNA
cgcccagtacattctgcgccgccgcgatgattatctggagctgttcgacagggatgcactgagcagccgcttctt

SEQ ID NO: 158078 - DNA, 75 bp, synthetic construct
  source 1..75: mol_type = other DNA
gactgtgagtttattgtttttggcggaggtcaggaatcgcgagccattcctggacgcgtcaggcggcggatctcc

SEQ ID NO: 158079 - DNA, 75 bp, synthetic construct
  source 1..75: mol_type = other DNA
acagtgacccttccctctcagctctgttgaccgattttcgcatcgcagaggatcctaccgtagcaaggttgagct

SEQ ID NO: 158080 - DNA, 75 bp, synthetic construct
  source 1..75: mol_type = other DNA
tggcctcaaagaagcgctgctggatatcctcgatgagcagggatttggtgtgttacgttcatcaaggattgcttc

SEQ ID NO: 158081 - DNA, 75 bp, synthetic construct
  source 1..75: mol_type = other DNA
acaagcctggaaaggggaacataaattatcggatattctactgttgactatttgtgccgttatttctggtgcaga

SEQ ID NO: 158082 - DNA, 75 bp, synthetic construct
  source 1..75: mol_type = other DNA
tggttcttcgcacatggtatcagcgttcggaagagccggatgagtgcggacgtcacgccactgcgatcaaaggtg

SEQ ID NO: 158083 - DNA, 75 bp, synthetic construct
  source 1..75: mol_type = other DNA
ctgagacgtcgtggaattggggtttttgggctgaggagtgccgaaccgcatcatgacggcacgccgcactggcat

SEQ ID NO: 158084 - DNA, 75 bp, synthetic construct
  source 1..75: mol_type = other DNA
ggtcacccttccccctcctcccccacctggagcaatacctgaagtcccacagggggaaccctcatggggtgatat

SEQ ID NO: 158085 - DNA, 75 bp, synthetic construct
  source 1..75: mol_type = other DNA
atgcgctggttctggtgcctgcgctgatgtatgccagctataaggcgagtgattatgtggaggagaaacagaacc

SEQ ID NO: 158086 - DNA, 75 bp, synthetic construct
  source 1..75: mol_type = other DNA
atgctgtttgtcgctaaagaacgacgccctacaggcatgtttgcctatcagctttctccagatctgctgagtgca

SEQ ID NO: 158087 - DNA, 75 bp, synthetic construct
  source 1..75: mol_type = other DNA
tagcgggtaacagtagctttggctactccgccaatacccccgttaacgaaccaggaagaacattctggggcaaaa

SEQ ID NO: 158088 - DNA, 75 bp, synthetic construct
  source 1..75: mol_type = other DNA
ccatttttgataataacagaacattttatacaaaacttataggtgagcgaaattcaagcctggcgcatgtgacat

SEQ ID NO: 158089 - DNA, 75 bp, synthetic construct
  source 1..75: mol_type = other DNA
ccagcaggcagcggcgtgacgcaggccagagggctggctaaatctgtcgctgatgcgtttcctgaagggcttgcg

SEQ ID NO: 158090 - DNA, 75 bp, synthetic construct
  source 1..75: mol_type = other DNA
atgactggactgtataatcgcaaaattttaacccctgaactggaacagcggttgcagaaactggtgcaatccggt

SEQ ID NO: 158091 - DNA, 75 bp, synthetic construct
  source 1..75: mol_type = other DNA
acgtcagtctgttccgtcacggaataacatctatgtcggaaggacgagtgttactgcgatatctgaagcaacagg

SEQ ID NO: 158092 - DNA, 75 bp, synthetic construct
  source 1..75: mol_type = other DNA
atggaaattgatttttcatactctcctgagacgatagaaagaagattcgaaataattggatgcataactatttca

SEQ ID NO: 158093 - DNA, 75 bp, synthetic construct
  source 1..75: mol_type = other DNA
gctcacgatttagatgcccgcctccgttttgcgcctgcttacccgctcagattgatgcgttctatctctatgttc

SEQ ID NO: 158094 - DNA, 75 bp, synthetic construct
  source 1..75: mol_type = other DNA
gccgagccgatttggatcgcgtagcaactgagcttcaggcagcaacggaaaccatggagaagttcccatcaatta

SEQ ID NO: 158095 - DNA, 75 bp, synthetic construct
  source 1..75: mol_type = other DNA
cgatgcagaggaggttttacttccaggtttcgcgcaggctatggggatcaatctcgaccagcttgggattacggt

SEQ ID NO: 158096 - DNA, 75 bp, synthetic construct
  source 1..75: mol_type = other DNA
ttgctgaactactggagagccgcattgcggttatctgcttatcgcttgggctgcccgtagcctggccgaacatac

SEQ ID NO: 158097 - DNA, 75 bp, synthetic construct
  source 1..75: mol_type = other DNA
ctatctaggtttagcgcatacagaagattgccggtaaagggcatgccaagcaagtcgatgctgcatatgcaaaag

SEQ ID NO: 158098 - DNA, 75 bp, synthetic construct
  source 1..75: mol_type = other DNA
ttttggcaaggaaaacggcaattcattctgcttggccgtttcccagagttgtcactcgcgcaggcaagacagcaa

SEQ ID NO: 158099 - DNA, 75 bp, synthetic construct
  source 1..75: mol_type = other DNA
taataatattgagttttattcctgggtattacttgggtgtgtttcgttttaaaaggctcaactattattgcgttc

SEQ ID NO: 158100 - DNA, 75 bp, synthetic construct
  source 1..75: mol_type = other DNA
ctggctaatggagcaaaagcgacaggcaggtgaagacgtgtattacgttttcatggatacaggggcagagcaccc

SEQ ID NO: 158101 - DNA, 75 bp, synthetic construct
  source 1..75: mol_type = other DNA
ctgatgctgccggggaaaggcgtaacgaaaaaacagcctccgttaccggacagcaagaaggctgaatgaagttta

SEQ ID NO: 158102 - DNA, 75 bp, synthetic construct
  source 1..75: mol_type = other DNA
ctgatgctgccggggaaaggcgtaacgaaaaaacagcctccgttaccggaaagcaagcaggctgaatgaagttta

SEQ ID NO: 158103 - DNA, 75 bp, synthetic construct
  source 1..75: mol_type = other DNA
gtggcatatgtcagaagcgatgagcgcttaaagcaataccccgccgtgagcgacattcagcgccaaatctacggt

SEQ ID NO: 158104 - DNA, 75 bp, synthetic construct
  source 1..75: mol_type = other DNA
agacaaccgctgggtgtctggctggatgtgtacaccacgtctacaggcagagacggaaaccacggaataccgtga

SEQ ID NO: 158105 - DNA, 75 bp, synthetic construct
  source 1..75: mol_type = other DNA
gtggcagccgacaaaagcaaacttcttcggacacctgaaaaagccgcagattatcgcagccctgaatgatgccgg

SEQ ID NO: 158106 - DNA, 75 bp, synthetic construct
  source 1..75: mol_type = other DNA
tggcgattgtgctgttgtgtttttgattactgcaataccactctctacccgttcaggatacagattgaagagaat

SEQ ID NO: 158107 - DNA, 75 bp, synthetic construct
  source 1..75: mol_type = other DNA
cggtcaggtctggcgctggcagcgtgccggaagccgggccgttattctggaggtcagtggacgctggatggaagc

SEQ ID NO: 158108 - DNA, 75 bp, synthetic construct
  source 1..75: mol_type = other DNA
ccaatgttagttgctgacttatcatatgcgaaagagacagtaggaacatatgataaagtaacatttattgatatt

SEQ ID NO: 158109 - DNA, 75 bp, synthetic construct
  source 1..75: mol_type = other DNA
atggtctggcgattgtgctgttgtgtttttgactactgcaatacaactctccacccgttcgggatgcatattgaa

SEQ ID NO: 158110 - DNA, 75 bp, synthetic construct
  source 1..75: mol_type = other DNA
tcaacggcactatatctaacgaaacatccctactttgcaatgcccgcgatctgcacgcttttttaggtgttaaaa

SEQ ID NO: 158111 - DNA, 75 bp, synthetic construct
  source 1..75: mol_type = other DNA
accaattgatcatctgatagcaccagagcagttggttatcgataatatttaccggctgattgaatatcccggcgc

SEQ ID NO: 158112 - DNA, 75 bp, synthetic construct
  source 1..75: mol_type = other DNA
gtcgccgaatttaacgccttcaagcatctgacggaagaaatgcgccgtaaattgctggatatttcccgcacatcg

SEQ ID NO: 158113 - DNA, 75 bp, synthetic construct
  source 1..75: mol_type = other DNA
atgttgctcttccaggcggtatttaatttcttcgtgacgtccggttctggtcaggcggcgttaaccatgccgtta

SEQ ID NO: 158114 - DNA, 75 bp, synthetic construct
  source 1..75: mol_type = other DNA
ctgcgcattgagcaaggcgatcacgtaattatgttcctcacagataaaaagtttattaccgacgtcgaaagactc

SEQ ID NO: 158115 - DNA, 75 bp, synthetic construct
  source 1..75: mol_type = other DNA
ctacatcgtcggtgtgagcaaatgcctgcgtgatatccagacccacgcggagtacatcaacgacaaggcagggtt

SEQ ID NO: 158116 - DNA, 75 bp, synthetic construct
  source 1..75: mol_type = other DNA
ctgatgctgccggggaaaggcgtaacgaaaaaacagcctccgttaccggacagcaaggaggctgaatggagttta

SEQ ID NO: 158117 - DNA, 75 bp, synthetic construct
  source 1..75: mol_type = other DNA
ctgatgctgccggggaaaggcgtaacgaaaaaacagcctccgttaccggacagcaagcaggctgaatgcagttta

SEQ ID NO: 158118 - DNA, 75 bp, synthetic construct
  source 1..75: mol_type = other DNA
ctgatgctgccggggaaaggcgtaacgaaaaaacagcctccgttaccggacagcaagtaggctgaatgtagttta

SEQ ID NO: 158119 - DNA, 75 bp, synthetic construct
  source 1..75: mol_type = other DNA
ttctcggataaccatccctacgccacgatgaactatgttgatagaaatacattgcagcttgatacctccgtctta

SEQ ID NO: 158120 - DNA, 75 bp, synthetic construct
  source 1..75: mol_type = other DNA
taaaattccttgtgatattcaaaggtataagcaggctcttttaaaacatgggcctattattgtgtctgtaaatta

SEQ ID NO: 158121 - DNA, 75 bp, synthetic construct
  source 1..75: mol_type = other DNA
ctgatgctgccggggaaaggcgtaacgaaaaaacagcctccgttaccggagagcaagcaggctgaatggagttta

SEQ ID NO: 158122 - DNA, 75 bp, synthetic construct
  source 1..75: mol_type = other DNA
aagccgccagcacatcgaacagctaatccagtttgatccgatgaccggtctgccaaatcgcaataatctgcacaa

SEQ ID NO: 158123 - DNA, 75 bp, synthetic construct
  source 1..75: mol_type = other DNA
tcggttaataacggtggtgaagttaatgctcgtgaacatattagcctgggttattacgaccaacgttctggtgat

SEQ ID NO: 158124 - DNA, 75 bp, synthetic construct
  source 1..75: mol_type = other DNA
aatttccaaaagggatgttatgcctggcggtgatggttgcggtttgtgccattctgggctcactggcgatgggga

SEQ ID NO: 158125 - DNA, 75 bp, synthetic construct
  source 1..75: mol_type = other DNA
gaatgttgcaacgccgtttgtgctggtaggattaggactgatattcccgctgctggcgcgtaaagcgaatagtaa

SEQ ID NO: 158126 - DNA, 75 bp, synthetic construct
  source 1..75: mol_type = other DNA
ttgttaaagcaattctttatattattttattttttttttttttttttttttttgcattggcgatcaaagtatttt

SEQ ID NO: 158127 - DNA, 75 bp, synthetic construct
  source 1..75: mol_type = other DNA
atatttggcttaaaaaccgtaaaagaatttgttaaagcaattctttatattattttatttttttttttttttttt

SEQ ID NO: 158128 - DNA, 75 bp, synthetic construct
  source 1..75: mol_type = other DNA
ttgttaaagcaattctttatattattttatttttttttttttttttttgcattggcgatcaaagtattttgaagt

SEQ ID NO: 158129 - DNA, 75 bp, synthetic construct
  source 1..75: mol_type = other DNA
cgtcacggtaagcgcagaaacgagctatggtggggcgcaaacagtagatataacgctggtggcaggcccggcaga

SEQ ID NO: 158130 - DNA, 75 bp, synthetic construct
  source 1..75: mol_type = other DNA
gtacgtttgctcgaggttttgataatgtccgccagggtgatgaactggatgtcccggcacaagttagtaaaaaaa

SEQ ID NO: 158131 - DNA, 75 bp, synthetic construct
  source 1..75: mol_type = other DNA
aaatgacgaacggcggtcaagccgtgacgaacgaacagggtaaggctaccgtcacttataccaatacccgctcct

SEQ ID NO: 158132 - DNA, 75 bp, synthetic construct
  source 1..75: mol_type = other DNA
tcgcgccagactataccgatgatgaaatttacgaatggatgtgcgggaagatacgcgccattaatgacatgaagc

SEQ ID NO: 158133 - DNA, 75 bp, synthetic construct
  source 1..75: mol_type = other DNA
tacccttaagggcacggttttgggtgttcatacagccgaagccatactgcttaacggtaaaagcgatacgaaaat

SEQ ID NO: 158134 - DNA, 75 bp, synthetic construct
  source 1..75: mol_type = other DNA
cccctgcatcaggtaaccctcagcgtttcgccgagtgaaggcgtgaccctcagtaataacggtataaatactacc

SEQ ID NO: 158135 - DNA, 75 bp, synthetic construct
  source 1..75: mol_type = other DNA
acagttttcttctacgtactcagattatatataatatacaaaattacaggaatattatctcagcgcatggtgcat

SEQ ID NO: 158136 - DNA, 75 bp, synthetic construct
  source 1..75: mol_type = other DNA
cgacgatgatgtttgccgtgcagccaacacttttcacccgcatgttcggtaccaaagtacgatataccggccttt

SEQ ID NO: 158137 - DNA, 75 bp, synthetic construct
  source 1..75: mol_type = other DNA
ggctggctacgcctcgacaaactcactgtgagtgctttggacacggtagaaagtttgttgtttacagcaatcacc

SEQ ID NO: 158138 - DNA, 75 bp, synthetic construct
  source 1..75: mol_type = other DNA
cgccaacattcttatataaggcaacttcaccatcatcaacagaatacagcgagttaaaaagcaaaatatccgata

SEQ ID NO: 158139 - DNA, 75 bp, synthetic construct
  source 1..75: mol_type = other DNA
aatcaagatgttgccatcacaatcaaagtttatacgaagtttgctttgataattattctggcgcggttaaaggac

SEQ ID NO: 158140 - DNA, 75 bp, synthetic construct
  source 1..75: mol_type = other DNA
aggatttaatattataaatacatatcctgtggtaaacatctcacgaattcgctattgccacagttgtattctgga

SEQ ID NO: 158141 - DNA, 75 bp, synthetic construct
  source 1..75: mol_type = other DNA
tgaaaaaaacagagccttcctgcgccagtttaacgccatttccaatgcaatttataatattttccggctggtaga

SEQ ID NO: 158142 - DNA, 75 bp, synthetic construct
  source 1..75: mol_type = other DNA
actgagattgtcgtagcatacaaaacaagaaagagggctggttctgtaaaacctcaaaacagaaaattgccagga

SEQ ID NO: 158143 - DNA, 75 bp, synthetic construct
  source 1..75: mol_type = other DNA
aaataaaatctattgttaaaattattgaaaactgggaaaggccaaattttacatgggatgctgtatgtttggctt

SEQ ID NO: 158144 - DNA, 75 bp, synthetic construct
  source 1..75: mol_type = other DNA
ctagatttaggctttgccaaaatggcagaacacaatggtccgcgaaaagccattatatttaccgaatccaagcgt

SEQ ID NO: 158145 - DNA, 75 bp, synthetic construct
  source 1..75: mol_type = other DNA
tatctgaaattatgcgggtggcttttttctttctttgcactgatgagcacagagatacagggctaaatattcttg

SEQ ID NO: 158146 - DNA, 75 bp, synthetic construct
  source 1..75: mol_type = other DNA
cagtttaacgccatttccaatgcaatttataatattttccggctggtagaaggtgaccaggcgacaagcactaaa

SEQ ID NO: 158147 - DNA, 75 bp, synthetic construct
  source 1..75: mol_type = other DNA
aaatggcactccagtggagggtcaggtcatcaactttagcgtaacgccagaaggtgcgacgttaagtggcggaaa

SEQ ID NO: 158148 - DNA, 75 bp, synthetic construct
  source 1..75: mol_type = other DNA
tctcggacaaggcggttccgccattactgacatcaacggcaaggctgaagttacactgagcggtacaaaatccgg

SEQ ID NO: 158149 - DNA, 75 bp, synthetic construct
  source 1..75: mol_type = other DNA
gacattcaaaaatgtcggagatagaaatgctgtaataatcacggcgaccccaagatcaggtggcgctatttacca

SEQ ID NO: 158150 - DNA, 75 bp, synthetic construct
  source 1..75: mol_type = other DNA
tggtcgttcaggcacctacgctaagccagaaagattcctcggtatcgttaagtacccaaacattgaacgcggatt

SEQ ID NO: 158151 - DNA, 75 bp, synthetic construct
  source 1..75: mol_type = other DNA
ctccagtcgttctgaccagcaataaagtcggtacatatacggtgactgcatcgttccataacggcgtaacaatac

SEQ ID NO: 158152 - DNA, 75 bp, synthetic construct
  source 1..75: mol_type = other DNA
cttgctgaaaatttttgcagtagcaatggctacacacttccccgtgcagatcatttaaaccatagtcgttcccga

SEQ ID NO: 158153 - DNA, 75 bp, synthetic construct
  source 1..75: mol_type = other DNA
attactaataatggttttgacttcaaacaaactatcagtactaatctatccataggagaaactaaatttacaggt

SEQ ID NO: 158154 - DNA, 75 bp, synthetic construct
  source 1..75: mol_type = other DNA
atgcagataccactggtactcaagaaaaaaataactaaagacaaagatattgtgttcacaaatgggggaaatgtc

SEQ ID NO: 158155 - DNA, 75 bp, synthetic construct
  source 1..75: mol_type = other DNA
atcagttaaccggaagcaataacagtctgtcggtcgatatacagaaagtgggaaataataactcaggattaaacg

SEQ ID NO: 158156 - DNA, 75 bp, synthetic construct
  source 1..75: mol_type = other DNA
agcgcaacgctaactgcaacggttaaagatcagttcgacaatgaggtgaacaatcttccggtaacattcagctca

SEQ ID NO: 158157 - DNA, 75 bp, synthetic construct
  source 1..75: mol_type = other DNA
tgatgccacagctgaacggtgtggatgcggctaaagcccccgccgtggtgaatatcatttctgtttcgtcatccc

SEQ ID NO: 158158 - DNA, 75 bp, synthetic construct
  source 1..75: mol_type = other DNA
agaaatccttgtgacaagcaccattgctggaacgaaagtagttacagctaatttggcaatcgcacctaccgaagc

SEQ ID NO: 158159 - DNA, 75 bp, synthetic construct
  source 1..75: mol_type = other DNA
agtggttgctgacggcaatgacagcgtcacaatgaccgcgaccgtccgggatgcaaaaggcaacctgctcaatga

SEQ ID NO: 158160 - DNA, 75 bp, synthetic construct
  source 1..75: mol_type = other DNA
tatcgagtaaacggggatgatttcacctttaaaggtgccggtgttgatacaagaaacggcagcaccgttgagtgg

SEQ ID NO: 158161 - DNA, 75 bp, synthetic construct
  source 1..75: mol_type = other DNA
ctctatcacagtatgggcaatccgctgaccaccaccggtagaccctcgctaaaccaggactggattgacctggcc

SEQ ID NO: 158162 - DNA, 75 bp, synthetic construct
  source 1..75: mol_type = other DNA
tcagcacaattgattacactcaaaatttatacggtgagtataaagccactgttacaggcggcggagagggtatcg

SEQ ID NO: 158163 - DNA, 75 bp, synthetic construct
  source 1..75: mol_type = other DNA
agtttccgcggaacctccgtcacgctaagcagcaccagcgttgaaacggatgatcggggtttcgctgaaattctt

SEQ ID NO: 158164 - DNA, 75 bp, synthetic construct
  source 1..75: mol_type = other DNA
ctctcggacaaggcggttccgccattactgacatcaacggcaaggctgaagttacactgagcggtacaaaatccg

SEQ ID NO: 158165 - DNA, 75 bp, synthetic construct
  source 1..75: mol_type = other DNA
ccctcagcgtttcgccgagtgaaggcgtgaccctcagtaataacggtataaatactaccaaccacgacggctatt

SEQ ID NO: 158166 - DNA, 75 bp, synthetic construct
  source 1..75: mol_type = other DNA
aaagctaccgtcacttataccaatacccgctcctcgagagaaacaggagcgagaccggataccattgaagctagc

SEQ ID NO: 158167 - DNA, 75 bp, synthetic construct
  source 1..75: mol_type = other DNA
ttcagtgcagagccatcctcgcaaatgatcatcagccagaatacggtctctactaatacgcagggtgtagccgag

SEQ ID NO: 158168 - DNA, 75 bp, synthetic construct
  source 1..75: mol_type = other DNA
ctggctaatactggtgccagcgacaacaaaactgtgcattttattggcgacacagcggcggcaaaaattatcgag

SEQ ID NO: 158169 - DNA, 75 bp, synthetic construct
  source 1..75: mol_type = other DNA
catgccacaggacgtggcggcaaactttacccttgaaaataacggtattgccatcactcaggccaatggggaagc

SEQ ID NO: 158170 - DNA, 75 bp, synthetic construct
  source 1..75: mol_type = other DNA
tggcgtggatgagacgactctgacagcaacagtgaaagatccttttgataacgtggttaaaaatctgtcagtagt

SEQ ID NO: 158171 - DNA, 75 bp, synthetic construct
  source 1..75: mol_type = other DNA
tagacttaaaagacgtggcttggcggacttagttattatcgctgcgaatgattatgatatgacagcgggttctgt

SEQ ID NO: 158172 - DNA, 75 bp, synthetic construct
  source 1..75: mol_type = other DNA
cagttggcagcaaaaccgtcgcaggaggataagagtgggaacgccgactgtaccgccacttctggtaaactgaca

SEQ ID NO: 158173 - DNA, 75 bp, synthetic construct
  source 1..75: mol_type = other DNA
gataatcttaattactcaaggagtacgctagataatttgaggggtgaccttgaccaagctacaatttcatccagt

SEQ ID NO: 158174 - DNA, 75 bp, synthetic construct
  source 1..75: mol_type = other DNA
atggcaccttcagaactggatacagaacacaaggctttgaaagatataccagaatatcatgggggaggtagtgct

SEQ ID NO: 158175 - DNA, 75 bp, synthetic construct
  source 1..75: mol_type = other DNA
ttttattgtaaaaatggatgtggtcaggggaccttcccattctgaaagagtactcagttggcttgaaaaccatct

SEQ ID NO: 158176 - DNA, 75 bp, synthetic construct
  source 1..75: mol_type = other DNA
ttccagctaactggctggtggtggcggtcaatctgctgttctgtgcgctggtgatatgcgttcgcggaaatgtct

SEQ ID NO: 158177 - DNA, 75 bp, synthetic construct
  source 1..75: mol_type = other DNA
acaggagataaaaatggacttttatttaataataaattaagtgaacttgtgtctcagataagagaaataattaat

SEQ ID NO: 158178 - DNA, 75 bp, synthetic construct
  source 1..75: mol_type = other DNA
ctttgagaaacagggcgacatcctggtaatcaatcacggtcgcggcggcgtggagatcaaccttacgcggcctga

SEQ ID NO: 158179 - DNA, 75 bp, synthetic construct
  source 1..75: mol_type = other DNA
ttccatttgacgatctgccaccctggcacctggactgggatgttgaccagcgcgaaagcgcgacaaatccagcaa

SEQ ID NO: 158180 - DNA, 75 bp, synthetic construct
  source 1..75: mol_type = other DNA
cgtgatgttcaaggaagagatcaggcactcaatttattacagcaaataatacaaaccattattgatactgatagc

SEQ ID NO: 158181 - DNA, 75 bp, synthetic construct
  source 1..75: mol_type = other DNA
gcatggacgacttgcaaagctttattattatcatcgttcaatctacgtatctcatgggtggtcttgcatttataa

SEQ ID NO: 158182 - DNA, 75 bp, synthetic construct
  source 1..75: mol_type = other DNA
gatcatgtcttttatgttaaagatattttatcgtttaaatcaatatttgcatcttataagattgcaaaaatttta

SEQ ID NO: 158183 - DNA, 75 bp, synthetic construct
  source 1..75: mol_type = other DNA
atcctttaatcgttatttttctgtttcgacagattacagacctaaacttgaagcactattagcatgttcacaaat

SEQ ID NO: 158184 - DNA, 75 bp, synthetic construct
  source 1..75: mol_type = other DNA
tcaagttgttgcacataacggaaatggtggaagagaacgcataggcgaaacggggacagttttaggtcttaacgc

SEQ ID NO: 158185 - DNA, 75 bp, synthetic construct
  source 1..75: mol_type = other DNA
atatctggactaaagccgctaactaccactccagaacgccctattacaatcagatttaccgtagcatgataatcc

SEQ ID NO: 158186 - DNA, 75 bp, synthetic construct
  source 1..75: mol_type = other DNA
gttcgttgtgatgcaggaatgaaagagaaacatgtaaactcactggatatatttacacatagttatccagaaatt

SEQ ID NO: 158187 - DNA, 75 bp, synthetic construct
  source 1..75: mol_type = other DNA
atggcaacgggaataaataaggttcgttatgatgcaggaatggaagagaaatatgtaaatacactggatatattt

SEQ ID NO: 158188 - DNA, 75 bp, synthetic construct
  source 1..75: mol_type = other DNA
ccacgcgcgctcaacgtgcatctccgcggcggaaagtgcgaaatctcctccccggcctgggggctgaacagcccc

SEQ ID NO: 158189 - DNA, 75 bp, synthetic construct
  source 1..75: mol_type = other DNA
aacggtcaggttacttataccagtatatatgatgatgtggaggggaacggcctgcctgataagtctcatattatg

SEQ ID NO: 158190 - DNA, 75 bp, synthetic construct
  source 1..75: mol_type = other DNA
tttctctggtgtgggccacaccaggagttgcagatgttacattgcctgttacgggggaaggtaatcgtcgggttg

SEQ ID NO: 158191 - DNA, 75 bp, synthetic construct
  source 1..75: mol_type = other DNA
gaacatttgttttcagaatgcaggctgtgggggtattacgtcatgtgcagaatggacaaccgatatatgcaggtt

SEQ ID NO: 158192 - DNA, 75 bp, synthetic construct
  source 1..75: mol_type = other DNA
atcaagtatcaaatccccgctaatcttatgctggccgtcgcagaacaagaaggcggtaaacctgggcttgaaaat

SEQ ID NO: 158193 - DNA, 75 bp, synthetic construct
  source 1..75: mol_type = other DNA
actgattatttagatgatagtgtaagggctttttttgtcccgacattatgtagaaatatatcgctcatagaggat

SEQ ID NO: 158194 - DNA, 75 bp, synthetic construct
  source 1..75: mol_type = other DNA
tatcatgttcagccagatttactcgattataagaacaaaataatcatccttttggttaaatttcttaatcatatt

SEQ ID NO: 158195 - DNA, 75 bp, synthetic construct
  source 1..75: mol_type = other DNA
atgtgcaagaaatgcaaagcgatagctgatgaacaaaacgccttattcgaagaaatggatgctaatgaactggtc

SEQ ID NO: 158196 - DNA, 75 bp, synthetic construct
  source 1..75: mol_type = other DNA
acagccttgttcgaactatttgatacgcaagattttgagttgattctgcatcgtctatggattgcaactcaagta

SEQ ID NO: 158197 - DNA, 75 bp, synthetic construct
  source 1..75: mol_type = other DNA
gtgcgttgcagatcctcgacctgttcaacgagcaggccaccgagcttaagatcaccgacatcagcaaactgatgg

SEQ ID NO: 158198 - DNA, 75 bp, synthetic construct
  source 1..75: mol_type = other DNA
acgagtggggaaacctgctgggcgaaaccagcgcgcagcaactgcaacagccgtaccgtctgccggggcagcagt

SEQ ID NO: 158199 - DNA, 75 bp, synthetic construct
  source 1..75: mol_type = other DNA
cttgttcaagatttcctcttttatggtgttatcaaaactggtggtagtgcttatcctggggttgatgatggtcag

SEQ ID NO: 158200 - DNA, 75 bp, synthetic construct
  source 1..75: mol_type = other DNA
ctgatgaacaaaacgccctattcgaagaaatggatgctaatgaacttgtcaaaatgttaggtattgttcggggaa

SEQ ID NO: 158201 - DNA, 75 bp, synthetic construct
  source 1..75: mol_type = other DNA
caatcacgattggtggggccgtttccggcagccttcgtggtgcatttggaactgtaaagaaaaataccgtcgaga

SEQ ID NO: 158202 - DNA, 75 bp, synthetic construct
  source 1..75: mol_type = other DNA
ggcggtggcggaacataaggaaatattaaactcagggcgagatccatcgatcgtaaaaagaatgcacctttcccg

SEQ ID NO: 158203 - DNA, 75 bp, synthetic construct
  source 1..75: mol_type = other DNA
gacaagaagtgaaataaggcggggattatcagatttgtcgataaaaatgctcagggaggtattatcctcccatga

SEQ ID NO: 158204 - DNA, 75 bp, synthetic construct
  source 1..75: mol_type = other DNA
ttcaaaattggtcgaactcttgccgacgaacattatgaaaaatcgcgcgtaacagtgttggatgtcggggatcct

SEQ ID NO: 158205 - DNA, 75 bp, synthetic construct
  source 1..75: mol_type = other DNA
cggcagcctccgtggtgcgtttggtacggtggagaaatccaccataaagattggcgcagcgattaagcacatgtc

SEQ ID NO: 158206 - DNA, 75 bp, synthetic construct
  source 1..75: mol_type = other DNA
gccactgaccatgcactgaaattccagaaagcacaggacgcattaaagtatgccgctttgctgcatagccggacg

SEQ ID NO: 158207 - DNA, 75 bp, synthetic construct
  source 1..75: mol_type = other DNA
cagacccgcactgccatcgatgagctgtaccagatgctgtcggtgatcctgcttcgcaatatcaatgagtacttt

SEQ ID NO: 158208 - DNA, 75 bp, synthetic construct
  source 1..75: mol_type = other DNA
aacgggtggcggaagtggcggcccgcttttccctggacggcatgcccggtaaacagatgagtatcgatgctgatt

SEQ ID NO: 158209 - DNA, 75 bp, synthetic construct
  source 1..75: mol_type = other DNA
acgaaatattatcggacagttgctgaataatccctttgtactggttgtggcggcggtgctgaccgtcagtatggg

SEQ ID NO: 158210 - DNA, 75 bp, synthetic construct
  source 1..75: mol_type = other DNA
atgagagatacagactggtcatctatcccgttcgatgatttgccaccgtggcatctggattgggatgtggaccaa

SEQ ID NO: 158211 - DNA, 75 bp, synthetic construct
  source 1..75: mol_type = other DNA
tatatgaaaacggcattgtcacccgtaagctcacgcttcatcgacctgtcagtgatgacaggcctgcaggcgttc

SEQ ID NO: 158212 - DNA, 75 bp, synthetic construct
  source 1..75: mol_type = other DNA
aaaggcgttattgaataccagcctgtctttaattgcctgacgtgcagagaaaccactatttatttctctcgctaa

SEQ ID NO: 158213 - DNA, 75 bp, synthetic construct
  source 1..75: mol_type = other DNA
gagcgcgtactgatagaggcgactgccgaggtaattgccacggtacgcatggagcaccggggagacatccgccgg

SEQ ID NO: 158214 - DNA, 75 bp, synthetic construct
  source 1..75: mol_type = other DNA
ggagcaccgcggcgacatccgccgggcgaggactcttgcgaacgcactgtttgatgagctcgaggctgagtgcgc

SEQ ID NO: 158215 - DNA, 75 bp, synthetic construct
  source 1..75: mol_type = other DNA
gtgagacggcccgcagcttcggcggggcgggcagtacagcgggggacgaacaggccacggcgtacaccctcacag

SEQ ID NO: 158216 - DNA, 75 bp, synthetic construct
  source 1..75: mol_type = other DNA
caaagactaacggaaaaattctttgatctattatcagatgagtcaattataaaaaaattaaagtacccggatcaa

SEQ ID NO: 158217 - DNA, 75 bp, synthetic construct
  source 1..75: mol_type = other DNA
ggtgccaaccagtgacaacgtggatgactgggaggcggcagcgcagaaacatcaggacggggtgctcggtggatg

SEQ ID NO: 158218 - DNA, 75 bp, synthetic construct
  source 1..75: mol_type = other DNA
ggtgccaaccagtgacaacgtggacgactgggaagcggcagcgcaaaaacaacaggacggggtgctcggtggatg

SEQ ID NO: 158219 - DNA, 75 bp, synthetic construct
  source 1..75: mol_type = other DNA
tcggcctgagcctttatgggttcagttcgttgagccaggccgagaacctgatgcaagtttatcagcaagcacgcc

SEQ ID NO: 158220 - DNA, 75 bp, synthetic construct
  source 1..75: mol_type = other DNA
gcgccttatccgacctacggttcaggcctgtaggcatgataagacgcgtcagcgtcgcatcaggcatcggcgcac

SEQ ID NO: 158221 - DNA, 75 bp, synthetic construct
  source 1..75: mol_type = other DNA
tatcaggatcacagtgagcatcgggtgattgccgggatcatgcagcagattctggcaagtcaccaggtcacgctg

SEQ ID NO: 158222 - DNA, 75 bp, synthetic construct
  source 1..75: mol_type = other DNA
ctggaaaaaacatccatattacgcttgattctccagtgcagggtgatgctcccgttacatggaaagcttccctgc

SEQ ID NO: 158223 - DNA, 75 bp, synthetic construct
  source 1..75: mol_type = other DNA
aattatgatgggcaaaatggaactgcccatgctccggatatagaagatttttctgatcttgatgcaacttattca

SEQ ID NO: 158224 - DNA, 75 bp, synthetic construct
  source 1..75: mol_type = other DNA
tatacgcagctaaagctggcgatggattctttgggggactaccaaccagttcttctaatgttaatactagtgttg

SEQ ID NO: 158225 - DNA, 75 bp, synthetic construct
  source 1..75: mol_type = other DNA
aattactagcatttggcagtcgagagcatgaagctgcattagaatcatgtgataaaataattagttctcatgcgg

SEQ ID NO: 158226 - DNA, 75 bp, synthetic construct
  source 1..75: mol_type = other DNA
ttgtgacttgttacaattagataaatataagaatgaagttttattacgatattattcttcatgtgaggtctcggc

SEQ ID NO: 158227 - DNA, 75 bp, synthetic construct
  source 1..75: mol_type = other DNA
cgttcttctttattttaaataccttattaaagttaaaaaatatgaacaagcatatgccctttcaaaaaaaataaa

SEQ ID NO: 158228 - DNA, 75 bp, synthetic construct
  source 1..75: mol_type = other DNA
gccaacgcctttttaccaatcgagaacagaacggcggcgctgaccgctacgaaacactgagggttaagcctttcc

SEQ ID NO: 158229 - DNA, 75 bp, synthetic construct
  source 1..75: mol_type = other DNA
ctctgccggtgcgctaatggatgattatgactggctggaaccggggcaacaacactggagcgattggtcacatca

SEQ ID NO: 158230 - DNA, 75 bp, synthetic construct
  source 1..75: mol_type = other DNA
ttattgtgttaatttatctaagccagtatgcaagtgcatcttcagaatttaatttctcacctgacagtgtttttg

SEQ ID NO: 158231 - DNA, 75 bp, synthetic construct
  source 1..75: mol_type = other DNA
caagctgggcgacgtcagggcatgggatgatttattagcggatatgcggcgcgggagggctagctattgcggtga

SEQ ID NO: 158232 - DNA, 75 bp, synthetic construct
  source 1..75: mol_type = other DNA
atgcgcatacatcaaaatcacttaacaaacatgccagccgaaaacatgaatcaggggcgccttttttgcgggtcc

SEQ ID NO: 158233 - DNA, 75 bp, synthetic construct
  source 1..75: mol_type = other DNA
cagccagtgaaatcgctaggcgtattggtgtcagtcgtgcggtattgtataaatggaaagatgaaattatcggca

SEQ ID NO: 158234 - DNA, 75 bp, synthetic construct
  source 1..75: mol_type = other DNA
atcaggccagatatcatcaaaatcggtgcatcctttgtcagccgaatgacggaagataaagaaacatggattgtt

SEQ ID NO: 158235 - DNA, 75 bp, synthetic construct
  source 1..75: mol_type = other DNA
atgacgcacttcaattattgagagagcactatggcgcgataccagaatgcgaacagcgtcgataccctgaaggtt

SEQ ID NO: 158236 - DNA, 75 bp, synthetic construct
  source 1..75: mol_type = other DNA
agaaaagacgcgcgaagaaatggcacagatgctgaatggtattcaggacgccgccatcaaatttaaggttgatga

SEQ ID NO: 158237 - DNA, 75 bp, synthetic construct
  source 1..75: mol_type = other DNA
tatcacccgtcagctggccattgattatgaagagaagggccgtaaggtgcgctacgacttcaccctgccgggtgg

SEQ ID NO: 158238 - DNA, 75 bp, synthetic construct
  source 1..75: mol_type = other DNA
cagtccttacaaaggaggaactaaatgaaccaaaacaccaaaacaattgccgaagcaaaagcgcaatgcctcaat

SEQ ID NO: 158239 - DNA, 75 bp, synthetic construct
  source 1..75: mol_type = other DNA
aggtagcaattgatgctttatatagccaacgtcggcgtaaatcgccgggtgatgaaagtgaaacacttacccgta

SEQ ID NO: 158240 - DNA, 75 bp, synthetic construct
  source 1..75: mol_type = other DNA
attgtcagataaccatacaacgagatgaactccttagattgattcgcactaatactctgcaggatgccgcaattc

SEQ ID NO: 158241 - DNA, 75 bp, synthetic construct
  source 1..75: mol_type = other DNA
catcaaccatatttcggtgctcaacccgcagcgaattctgaaagagatcgaggatgttctgaactacttaaccaa

SEQ ID NO: 158242 - DNA, 75 bp, synthetic construct
  source 1..75: mol_type = other DNA
cattccgtgtatcagtggcacccgtaagtccaatgctgccacatacctgcccaccattttcggtctgtctgccgc

SEQ ID NO: 158243 - DNA, 75 bp, synthetic construct
  source 1..75: mol_type = other DNA
gttttattttttttacagatcaatttattgctgaatttagtccgcaggaatttgtggataattgtgagcaatatt

SEQ ID NO: 158244 - DNA, 75 bp, synthetic construct
  source 1..75: mol_type = other DNA
ctgaatcttattgaggttagttcaggcgattatttaggtgaggatgatattgtacggcaaaaagaacgctacaga

SEQ ID NO: 158245 - DNA, 75 bp, synthetic construct
  source 1..75: mol_type = other DNA
cagtagcctgaatctgcaggcttctgatggaaaaattcataaaaactataaccgctgggtgcgtaacctggataa

SEQ ID NO: 158246 - DNA, 75 bp, synthetic construct
  source 1..75: mol_type = other DNA
aaatattctaatgacgcgtgtaatgagacagttgctaaaggatatgccatcggtgtagccatgcatcggactgta

SEQ ID NO: 158247 - DNA, 75 bp, synthetic construct
  source 1..75: mol_type = other DNA
ttaacccgaccgaatccgtggccattgatattacttatgaaggctccggcagtggcgactggcgcactgacggtt

SEQ ID NO: 158248 - DNA, 75 bp, synthetic construct
  source 1..75: mol_type = other DNA
cgaaaaaattcagagcattgaggtaaagagagaagaaaaatttattcaaggttattatgatggctatacaaaagg

SEQ ID NO: 158249 - DNA, 75 bp, synthetic construct
  source 1..75: mol_type = other DNA
atgtgtgctgatttatgtcagacgggattttgcttatcaattattgagaacagaaattttcctgaatcatcaata

SEQ ID NO: 158250 - DNA, 75 bp, synthetic construct
  source 1..75: mol_type = other DNA
ggaaatccgcccaccttgccgggcgccggtgctgtgtggaaatccgcccaccctttccgggcgccggtgccgtgt

SEQ ID NO: 158251 - DNA, 75 bp, synthetic construct
  source 1..75: mol_type = other DNA
tccgcccaccttaccgggcgccggtgctgtgtggaaatccgctcactttgccgggcgccggtgccgtgtgggaat

SEQ ID NO: 158252 - DNA, 75 bp, synthetic construct
  source 1..75: mol_type = other DNA
tgataaaaaaaataatggtgaaacgtatgcctgtaaggtggctgtaacttacaagggggagcgttctaactatat

SEQ ID NO: 158253 - DNA, 75 bp, synthetic construct
  source 1..75: mol_type = other DNA
gcttagagttaggtataatttatacctaaacagcctaggtacacctatatataaatttgtcccagttgaggattt

SEQ ID NO: 158254 - DNA, 75 bp, synthetic construct
  source 1..75: mol_type = other DNA
gagggaatgaagaaacgtactcctgtaaagtggctgtaacctacaatggaaagcgctctaactatatgggggata

SEQ ID NO: 158255 - DNA, 75 bp, synthetic construct
  source 1..75: mol_type = other DNA
ccatattgcacggatacgaaaagatcaaatggccggatgcgcctgaatgggcgaggcgggcaacgtggattgaag

SEQ ID NO: 158256 - DNA, 75 bp, synthetic construct
  source 1..75: mol_type = other DNA
aaaatggcggcgaaagtcgccacacgaagcaccaccttccaccgggataatggccttatataaccgtggcgatcg

SEQ ID NO: 158257 - DNA, 75 bp, synthetic construct
  source 1..75: mol_type = other DNA
ataagttctggcgcacatgccgccgtgatggtctgggaaaacgggtatacctgataaaaggtgacagtacccgtc

SEQ ID NO: 158258 - DNA, 75 bp, synthetic construct
  source 1..75: mol_type = other DNA
taaagaaaaacccaaagcttttctttaatgacatgatgaaaaaacgaaagtctaaagtgactaatatcaaaaaat

SEQ ID NO: 158259 - DNA, 75 bp, synthetic construct
  source 1..75: mol_type = other DNA
ctgacggccggggcagaaaaacgccgtcgccggaagaaaaaactgcgtacggagcgtgcggaagataatccatgg

SEQ ID NO: 158260 - DNA, 75 bp, synthetic construct
  source 1..75: mol_type = other DNA
gcaccgtatgtgattgaccccatgaactgcctgtcgtcccgtgagtttgatgcggttgtttttgttggtcctgcc

SEQ ID NO: 158261 - DNA, 75 bp, synthetic construct
  source 1..75: mol_type = other DNA
ctttccgcgaagattgtggcagataagcgaacgaactcacttattatcagcgggccggaaaaggcacgtcagcgc

SEQ ID NO: 158262 - DNA, 75 bp, synthetic construct
  source 1..75: mol_type = other DNA
ctattcaaaacgccgtgctggtcaaaaccggtgaaacggtggtcctgggcggattgctggatgatttttctaaag

SEQ ID NO: 158263 - DNA, 75 bp, synthetic construct
  source 1..75: mol_type = other DNA
gctgcctgttggcagcactactaatgccttgtgcagggcatgccgagaacgaacaatacggcgccaatttcaata

SEQ ID NO: 158264 - DNA, 75 bp, synthetic construct
  source 1..75: mol_type = other DNA
gcagggctgatgtactgatgcagcgggcggaggactacggtaaacgtctggtaccaccgaaggtgcgttttctgc

SEQ ID NO: 158265 - DNA, 75 bp, synthetic construct
  source 1..75: mol_type = other DNA
tcgtgatggccttggtaaacgtatttacctgtttaagggcgacagcatccggcgcgcaaaactgatcacccgtac

SEQ ID NO: 158266 - DNA, 75 bp, synthetic construct
  source 1..75: mol_type = other DNA
agcagggtagcaataacgcgcgtgactcgatgtactggcaagcgttgcgtggtcgcttgttggctcggccaacat

SEQ ID NO: 158267 - DNA, 75 bp, synthetic construct
  source 1..75: mol_type = other DNA
aacatcagtggcgaaagctttagtggtcagcagcaggccgcttcccaacaacagcaaagccaacgcacagtaaac

SEQ ID NO: 158268 - DNA, 75 bp, synthetic construct
  source 1..75: mol_type = other DNA
tggatgataaccaggcacaaatccagatggtttcaccgcatcagcatgtacgcgccgcgctggaagcagcgcttc

SEQ ID NO: 158269 - DNA, 75 bp, synthetic construct
  source 1..75: mol_type = other DNA
tccggtgacgttaacgcatcctgacatcacacgttatttcatgaccattcctgaggcagcacagcttgttattca

SEQ ID NO: 158270 - DNA, 75 bp, synthetic construct
  source 1..75: mol_type = other DNA
acattaggactgcttacaaaaacaggacgagactggaacacgcagcatactgataacattaataaatttatacca

SEQ ID NO: 158271 - DNA, 75 bp, synthetic construct
  source 1..75: mol_type = other DNA
cattagctgttgggcaaggaggtacaggtgcgacaacagtagaagatgcgcgaaacaacttaagtcttggcgaaa

SEQ ID NO: 158272 - DNA, 75 bp, synthetic construct
  source 1..75: mol_type = other DNA
cgataatagttgtgtggagaactgtttaaaagggaagtttaaagaggtaggccgcgttattctgtattgcctgat

SEQ ID NO: 158273 - DNA, 75 bp, synthetic construct
  source 1..75: mol_type = other DNA
aaggattatttcaaggccatacgtgactttgagcgcagtgaaattgaaatcataaagaaaaaggcaaaaacattt

SEQ ID NO: 158274 - DNA, 75 bp, synthetic construct
  source 1..75: mol_type = other DNA
gaagttgcacctgctatagtttcaacttcaggtgctgtaaataatgcgtataataaaaacagcatatatacagct

SEQ ID NO: 158275 - DNA, 75 bp, synthetic construct
  source 1..75: mol_type = other DNA
attacgcctccttacaggtctggcgtgtggtattgttatgcgcaggtcttggatgctggctttgcccgctcattc

SEQ ID NO: 158276 - DNA, 75 bp, synthetic construct
  source 1..75: mol_type = other DNA
gttcgcaagatattgctaaatgcacctaccgcgtttaatcctactgatgatatctgtgacttactttggaaagaa

SEQ ID NO: 158277 - DNA, 75 bp, synthetic construct
  source 1..75: mol_type = other DNA
ataaattttgaaaattctaaagataacaaagtgcgatttgacgaagatacatatgactttaatatcaatgggaaa

SEQ ID NO: 158278 - DNA, 75 bp, synthetic construct
  source 1..75: mol_type = other DNA
tgccgtcggacggatcgtcgcagtcttcacgccctatggcgttgcggcattattaacacattatgggtcgatcac

SEQ ID NO: 158279 - DNA, 75 bp, synthetic construct
  source 1..75: mol_type = other DNA
ccgagccaaagcatttgcactggctgcaacacttgcttgtgtcactgcaactggaagcagtgttgctggatcgcg

SEQ ID NO: 158280 - DNA, 75 bp, synthetic construct
  source 1..75: mol_type = other DNA
ttgtctgacagaacctcaaaagggcttgcacttggtcttttaggtggctttgatgtctcatatcgcggttcagtc

SEQ ID NO: 158281 - DNA, 75 bp, synthetic construct
  source 1..75: mol_type = other DNA
atcatgagacgaaaaaagagaaccgtcgtcttattcttgatgggggcgtggacacaacaaatgatataagcctgc

SEQ ID NO: 158282 - DNA, 75 bp, synthetic construct
  source 1..75: mol_type = other DNA
tgtggatgtgggtaaatcgttctccggtaaggactggaaagtgactgcccgtgccggtgtcggttatcagtttga

SEQ ID NO: 158283 - DNA, 75 bp, synthetic construct
  source 1..75: mol_type = other DNA
cggaaccctgacattaacaggcacccctacagaaaataataaatacagcccggcaatctatatgtcagatggata

SEQ ID NO: 158284 - DNA, 75 bp, synthetic construct
  source 1..75: mol_type = other DNA
gaaaaaatgggttgtcgccggaactgcatggggtatttattactattccaatggaaaaacgcatactgcatatag

SEQ ID NO: 158285 - DNA, 75 bp, synthetic construct
  source 1..75: mol_type = other DNA
ggggccgtctgtgcgcgtgaatgaattgttcagcgcgtatgcgatggcgggtgtgtcttacagccgtgtgtcgac

SEQ ID NO: 158286 - DNA, 75 bp, synthetic construct
  source 1..75: mol_type = other DNA
aaccaaagttgtgtctgtgactttaagcaaacaaaaggcttatgatttttatcaatccttaaaaagtatgtttga

SEQ ID NO: 158287 - DNA, 75 bp, synthetic construct
  source 1..75: mol_type = other DNA
ccagacaggcatccttgaagttatctctctgtggttacaggaaggcattaaaccaacgacaatgctgcaaaaagg

SEQ ID NO: 158288 - DNA, 75 bp, synthetic construct
  source 1..75: mol_type = other DNA
gtggacacaacaaatgatataagcctgcgtaatacacaactgtccatgcagggacatgccactgaacatgctatt

SEQ ID NO: 158289 - DNA, 75 bp, synthetic construct
  source 1..75: mol_type = other DNA
tcacctttaaaggtgctggtattgacacaagaaacggtagcaccgttgaatggaatatacggtatgacaataaag

SEQ ID NO: 158290 - DNA, 75 bp, synthetic construct
  source 1..75: mol_type = other DNA
aaatgggatcagaacgctgttgataccataaagaaaacatttagccacaatgttgatatgaccaatcaacaggaa

SEQ ID NO: 158291 - DNA, 75 bp, synthetic construct
  source 1..75: mol_type = other DNA
acaaaactgtgcattttattggcgacacagcggcggcaaaaattatcgagttgacgcctgtcccagacagcataa

SEQ ID NO: 158292 - DNA, 75 bp, synthetic construct
  source 1..75: mol_type = other DNA
gaaaaatgaagtggtcgctgacggcaatgactgcgccaccatgaccgcgacagtccgggatgcaaaaggcaacct

SEQ ID NO: 158293 - DNA, 75 bp, synthetic construct
  source 1..75: mol_type = other DNA
tactggtgaagatcgccactctttactatcttgaggggcgaaaacagtctgacatcgcccaacttctctcgcttt

SEQ ID NO: 158294 - DNA, 75 bp, synthetic construct
  source 1..75: mol_type = other DNA
cagaatgaacagcgggaagggcgcttccaaaaactgagcggctatctggtacttgccagtaaagtgtacggcagt

SEQ ID NO: 158295 - DNA, 75 bp, synthetic construct
  source 1..75: mol_type = other DNA
gcaaccagtcaccttcgtggcggataaggacagcgcggttgtcgttctgcaaactgaaccgccccgggtttcctg

SEQ ID NO: 158296 - DNA, 75 bp, synthetic construct
  source 1..75: mol_type = other DNA
tatcgacactcgcgctgattcaatcagcaatgatgatcaggcatccgatattattactaatcagcgccagattca

SEQ ID NO: 158297 - DNA, 75 bp, synthetic construct
  source 1..75: mol_type = other DNA
gaatggcggtatgggctaccccgccgagtatttgcgaaaatggaaacgtgaccacgaatcactaatgaaggagtg

SEQ ID NO: 158298 - DNA, 75 bp, synthetic construct
  source 1..75: mol_type = other DNA
gcggcgcatatctgcgcggcgagccctggcggaccgcgctatgacatgtctcagtcagaaacagagcggaagagc

SEQ ID NO: 158299 - DNA, 75 bp, synthetic construct
  source 1..75: mol_type = other DNA
aggagcaccgaaatgtccttcgtgatattcgtaagatgctcgaagaacttaacgcgggtaatgctgccaacttac

SEQ ID NO: 158300 - DNA, 75 bp, synthetic construct
  source 1..75: mol_type = other DNA
atgatctggcagcctgagttcacagataaaacactctccaggaaacccggggcggttcacaatttcacactgaat

SEQ ID NO: 158301 - DNA, 75 bp, synthetic construct
  source 1..75: mol_type = other DNA
tgaagacgatgcaaccgaggggatatatcccgataaaggaaacggtacaacacaagctctccatttccaggccac

SEQ ID NO: 158302 - DNA, 75 bp, synthetic construct
  source 1..75: mol_type = other DNA
acgagaaaattgctctgcgggtgatccatttattggaagacaagagttctctttatctgccatatgctcaagagg

SEQ ID NO: 158303 - DNA, 75 bp, synthetic construct
  source 1..75: mol_type = other DNA
gcttcagtccggaaactttcgggaaaacaagaattcgtcaaccaataattttcgggaaatcgcggaaacgtcaac

SEQ ID NO: 158304 - DNA, 75 bp, synthetic construct
  source 1..75: mol_type = other DNA
gttcaatccggatgctccggatgagcgttgggtaacggatataacctacagtgtgcccggagttcagggcgggca

SEQ ID NO: 158305 - DNA, 75 bp, synthetic construct
  source 1..75: mol_type = other DNA
tttgttaatcatgcagatcatgtttttagcttcggtccgaccgtagctgatgtctggtatcaaattagccaattc

SEQ ID NO: 158306 - DNA, 75 bp, synthetic construct
  source 1..75: mol_type = other DNA
agaggatagaaggaagcaagccttggctatgttgcgaggagactcaagtttggagtcccaatctgtgtatatcgc

SEQ ID NO: 158307 - DNA, 75 bp, synthetic construct
  source 1..75: mol_type = other DNA
tggctcaccggccattcgcgacggcgctaactggcatgcgttttatggtggtgaagagagtgacgacctgaaagc

SEQ ID NO: 158308 - DNA, 75 bp, synthetic construct
  source 1..75: mol_type = other DNA
caaccaataattttcgggaaatcgcggaaacgtcaaccaactctccggtaattcctgatgaggtgttgtccgcaa

SEQ ID NO: 158309 - DNA, 75 bp, synthetic construct
  source 1..75: mol_type = other DNA
gtatgggagtgcaaccggagtggcattttccgggataccggagggaacacaacgcctggcgctggctcaccgtgg

SEQ ID NO: 158310 - DNA, 75 bp, synthetic construct
  source 1..75: mol_type = other DNA
ataaagtcggtacatatacggtgactgcatcgttccataacggcgtaacaatacagacacagacaaccgtgaaag

SEQ ID NO: 158311 - DNA, 75 bp, synthetic construct
  source 1..75: mol_type = other DNA
aatggagcctcacttgagaaacaactggaggctattgatgaaaaactgacactcacggcgtccagtccgcttatc

SEQ ID NO: 158312 - DNA, 75 bp, synthetic construct
  source 1..75: mol_type = other DNA
ttttatgaaaatcgttcagcgagtaccgatgttgagaaacttgaaacgccagtgagtttcagatggctcgctggt

SEQ ID NO: 158313 - DNA, 75 bp, synthetic construct
  source 1..75: mol_type = other DNA
aaaaaggtaattagagaacacagatcttttgaagaaattgagggcttatatagagattctttttcaattgaaatg

SEQ ID NO: 158314 - DNA, 75 bp, synthetic construct
  source 1..75: mol_type = other DNA
tacgtccgtcactgaaccaccacggttgattttctgtgattcatcacgtgtggggtatgacgccgtgatagaaga

SEQ ID NO: 158315 - DNA, 75 bp, synthetic construct
  source 1..75: mol_type = other DNA
atccgccgtgtggaggtgagcttcggcggtgagggaaatgtcatgttgacgcttttgggcgtgaataacgaaaca

SEQ ID NO: 158316 - DNA, 75 bp, synthetic construct
  source 1..75: mol_type = other DNA
ggggcatatgccgccgggggagaagggaatatgtctgcatccgcgacggagacaaacgccagagtattctcgctg

SEQ ID NO: 158317 - DNA, 75 bp, synthetic construct
  source 1..75: mol_type = other DNA
caaggccagaatggaaaattaacagggattcgttctgaatacgttaatcaaggtatagctttgtcagcgttgaag

SEQ ID NO: 158318 - DNA, 75 bp, synthetic construct
  source 1..75: mol_type = other DNA
aggattgggcgcacgtcttaggaatccgtacagattttgatttaccagatagccataaaacggttgtttctgatt

SEQ ID NO: 158319 - DNA, 75 bp, synthetic construct
  source 1..75: mol_type = other DNA
taaacgttattttgatattggagttttccatgaatgtgaaccatggatacgtcataacttcggtggtgctggggg

SEQ ID NO: 158320 - DNA, 75 bp, synthetic construct
  source 1..75: mol_type = other DNA
atggggtttgaattttcaatcatatccagtaatgagtttaatcatggcggtacaagaaatttattagctgccgat

SEQ ID NO: 158321 - DNA, 75 bp, synthetic construct
  source 1..75: mol_type = other DNA
atggcatcagatgatagatacagtattaacttcacgctatctgttttggaaaaaacagaagcaagcaaattgata

SEQ ID NO: 158322 - DNA, 75 bp, synthetic construct
  source 1..75: mol_type = other DNA
ttcctttgttcaatgaagaggaaactccagagtcttattttgcttcggtgaagaaggttgtagagcagcacaaac

SEQ ID NO: 158323 - DNA, 75 bp, synthetic construct
  source 1..75: mol_type = other DNA
gcacgggcagggcgtgacggcgtaacattttcggttccggtcacgcctcacacgtttcgccacagttacgccatg

SEQ ID NO: 158324 - DNA, 75 bp, synthetic construct
  source 1..75: mol_type = other DNA
atgatgagcggactcaccggtaccattacgacagtcagcaccggctggtgcactacacgcggacacaatatgaag

SEQ ID NO: 158325 - DNA, 75 bp, synthetic construct
  source 1..75: mol_type = other DNA
tcactacgtattgttgatgaattaccagaacagctttatgaaaccctttgctcggaaatcccgatggaatttgct

SEQ ID NO: 158326 - DNA, 75 bp, synthetic construct
  source 1..75: mol_type = other DNA
tttattgatctagctgtgaaagatccaggttgtcctggccgttacttaattggcatagagtgtgatggtgcggct

SEQ ID NO: 158327 - DNA, 75 bp, synthetic construct
  source 1..75: mol_type = other DNA
tgtgtcaaaaggtcggttctccaatcaacacaatattgaagaagcccaagcagttgctgaggccgtacttcatca

SEQ ID NO: 158328 - DNA, 75 bp, synthetic construct
  source 1..75: mol_type = other DNA
aaattgtcctcgaatttcgcggatatgttcgcattcatcgatgaaggtgctgattctcctctggtagatgcaaac

SEQ ID NO: 158329 - DNA, 75 bp, synthetic construct
  source 1..75: mol_type = other DNA
tagtcagggtgttattttgagaaccttcgcatatatcgaccatgcaattgcacacgaagaagcattcctagtagt

SEQ ID NO: 158330 - DNA, 75 bp, synthetic construct
  source 1..75: mol_type = other DNA
atgccgtggggcgacaacagtaccgttagctataacggcaactatggcagtgggacggacagcagccaggtcggt

SEQ ID NO: 158331 - DNA, 75 bp, synthetic construct
  source 1..75: mol_type = other DNA
cttgctggacgctatcagtccgaacagtgtcgtattccattaagccctctttgtctcgcagcaggagtgacgttg

SEQ ID NO: 158332 - DNA, 75 bp, synthetic construct
  source 1..75: mol_type = other DNA
aacaacttttaccacaacttttaggtgttggaaagctaaaacataaagttgtaatctctcctaatacagggggta

SEQ ID NO: 158333 - DNA, 75 bp, synthetic construct
  source 1..75: mol_type = other DNA
gtcccgaactactagcaaaactacaaagtaaatctcccgaagaagaatctataaataaagatgatccactagaag

SEQ ID NO: 158334 - DNA, 75 bp, synthetic construct
  source 1..75: mol_type = other DNA
ggcgctgcgatatacctgtcatcttctgcatcagattttgttaatggtcatattatttatgtagacggtggtatt

SEQ ID NO: 158335 - DNA, 75 bp, synthetic construct
  source 1..75: mol_type = other DNA
atggggaaaacctgaagaactggtaggcgctgcgatatacctgtcatcttctgcatcagattttgttaatggtca

SEQ ID NO: 158336 - DNA, 75 bp, synthetic construct
  source 1..75: mol_type = other DNA
aacaacctgccggaaaacgccgaagtcacccagtccgtggtgcaggccacgcttaccgaaggggccattggctac

SEQ ID NO: 158337 - DNA, 75 bp, synthetic construct
  source 1..75: mol_type = other DNA
gtcaaaccggcgattcaggaacagacacagcgggtgacgccaacggaacccccgacttcaatttcagtaaaccag

SEQ ID NO: 158338 - DNA, 75 bp, synthetic construct
  source 1..75: mol_type = other DNA
ggtaaagccgtcgtttctgacgttaacaattattatcgcaatcaggcgtatatcgacctcaacaaattgccggaa

SEQ ID NO: 158339 - DNA, 75 bp, synthetic construct
  source 1..75: mol_type = other DNA
acggcaactatggcagtgggacggacagcagccaggtcggttattttagccgtgtcgatgacgcgactcactatc

SEQ ID NO: 158340 - DNA, 75 bp, synthetic construct
  source 1..75: mol_type = other DNA
tatggtggactaatatgtaagaagcaaggtgaatatttacccatgaatccgataagttcaaatgataatgatagt

SEQ ID NO: 158341 - DNA, 75 bp, synthetic construct
  source 1..75: mol_type = other DNA
tacaaacgtggccctgcaaatgtatatgaatgatggtacaacgaccatcacgccagacacagaaaccgggaacat

SEQ ID NO: 158342 - DNA, 75 bp, synthetic construct
  source 1..75: mol_type = other DNA
atgaaaaaaagtgtattgacggcgtttataactgtggtatgtgcaacgtccagtgctatggcggctgatgataat

SEQ ID NO: 158343 - DNA, 75 bp, synthetic construct
  source 1..75: mol_type = other DNA
cccgggtgtacggtgtgacgactgcggcggccgaggtcctggactcaaccagcaccacggatattgcctacaggc

SEQ ID NO: 158344 - DNA, 75 bp, synthetic construct
  source 1..75: mol_type = other DNA
gtgaagatgtgattcgtccttctgatgttcaaggcaagcgtaagcctggcactgattttcaggaaacactcactg

SEQ ID NO: 158345 - DNA, 75 bp, synthetic construct
  source 1..75: mol_type = other DNA
gttgagccgctgttcgagtccgagtttgtgctggtagccagtaagtcccgaacatgcaccggcaccaccacgctg

SEQ ID NO: 158346 - DNA, 75 bp, synthetic construct
  source 1..75: mol_type = other DNA
tgaaaatgattttgctatgaatgcacggcctaaactcacaaattggttaaaacagtcagttaatgaaaaaatgcc

SEQ ID NO: 158347 - DNA, 75 bp, synthetic construct
  source 1..75: mol_type = other DNA
aaaagtgcgtttatcgttgcagtcgctgaactgttacgtgatccgttgcagaagcgacaggcgctggcgtccaga

SEQ ID NO: 158348 - DNA, 75 bp, synthetic construct
  source 1..75: mol_type = other DNA
cgcaccgggaatatgccagcccgtctgcttgtgatgaacgggaaaagtctggcgaccactgctgatgccgccctg

SEQ ID NO: 158349 - DNA, 75 bp, synthetic construct
  source 1..75: mol_type = other DNA
aagtttgctaaaggctctaatgtatatcagaacatctacggggctgcttccagcacttttgaactgattaatgcc

SEQ ID NO: 158350 - DNA, 75 bp, synthetic construct
  source 1..75: mol_type = other DNA
tatggattgcaacagaaaataggtgatttagattatagagataactatatagcaacaacaaaaaatgataaggcg

SEQ ID NO: 158351 - DNA, 75 bp, synthetic construct
  source 1..75: mol_type = other DNA
ggttttaatgcatatgcttgtaaacaacactgaagctgatgtgtttgttattggcttgattggcgaacgtggaag

SEQ ID NO: 158352 - DNA, 75 bp, synthetic construct
  source 1..75: mol_type = other DNA
gagccaaagttattccctttattgatcgtttagaacgcgatcggaatgcaaatttacaagccctagtcagcaaag

SEQ ID NO: 158353 - DNA, 75 bp, synthetic construct
  source 1..75: mol_type = other DNA
gctgaaagccgccggctacagccgtacgttctggcagtacagctccagcagcaaatacgccgctatctcggcatt

SEQ ID NO: 158354 - DNA, 75 bp, synthetic construct
  source 1..75: mol_type = other DNA
gtcgaagcctcactggatcaggcggtaaataacggcctcattgctccgggtgtctggaacggtggcccgattggc

SEQ ID NO: 158355 - DNA, 75 bp, synthetic construct
  source 1..75: mol_type = other DNA
ggtgttcccgccggtgctggtgcagatgctcgaccggccggaaagtgaaatcctggctgaccgggtgagtgagga

SEQ ID NO: 158356 - DNA, 75 bp, synthetic construct
  source 1..75: mol_type = other DNA
ggggattaaactgatcggcgcaatcctggtcggcattttgatgatctcgctgctgattggtcagtcgccagcgat

SEQ ID NO: 158357 - DNA, 75 bp, synthetic construct
  source 1..75: mol_type = other DNA
aactaaaaaacgaccatatggctagttcaaggctcatttctttatgggcgatcatgtatgcgcgtgcaccgcgtg

SEQ ID NO: 158358 - DNA, 75 bp, synthetic construct
  source 1..75: mol_type = other DNA
cgtatggaacggtggcccgattgggcagctggattccggcgacacgctgacaaaaggctattacgtctacgcgca

SEQ ID NO: 158359 - DNA, 75 bp, synthetic construct
  source 1..75: mol_type = other DNA
tggcgttacgcgcctcctttccaatgtcgaacagtcgatggatcagtctgtcacaaacgggctggtggctgccgg

SEQ ID NO: 158360 - DNA, 75 bp, synthetic construct
  source 1..75: mol_type = other DNA
acgttgtaaacgttgatgtgatcatctcgccgaaagcggctactggtcgtaacttcggcgcattgctaatccttg

SEQ ID NO: 158361 - DNA, 75 bp, synthetic construct
  source 1..75: mol_type = other DNA
gcgtcgtaaacgtgcaggtcacgctcgccgttcgcgcggcgctcgggcgtaattttggcgcgctgctggtgcttg

SEQ ID NO: 158362 - DNA, 75 bp, synthetic construct
  source 1..75: mol_type = other DNA
gtatcgctaatgtgacggtgacgctttctgctcgggccgcgcaggggcgcaattttggctcaatgctcatcctgg

SEQ ID NO: 158363 - DNA, 75 bp, synthetic construct
  source 1..75: mol_type = other DNA
aattaccgctgaaagggatatttcagggaatcaaactactcggcgcaattctggtcggcattttgatgatatcgc

SEQ ID NO: 158364 - DNA, 75 bp, synthetic construct
  source 1..75: mol_type = other DNA
tccgcgcaaccggtgtgggaaccgccgtggcggttgggcgtcttggagcaatgagtggtccgttgctggccggga

SEQ ID NO: 158365 - DNA, 75 bp, synthetic construct
  source 1..75: mol_type = other DNA
ttgatgccgccgcagaattttttggtgtcacgacgcccatacggcagtcgtcatttaatgtggattacgatttac

SEQ ID NO: 158366 - DNA, 75 bp, synthetic construct
  source 1..75: mol_type = other DNA
actttcttgagccggtgttttgagttgattggccagagcctgcaatggtttgtcatccataatttaactttcttc

SEQ ID NO: 158367 - DNA, 75 bp, synthetic construct
  source 1..75: mol_type = other DNA
acggctaccgcccggaaacagagcggttccggtgggacagccgggaccagctgaccgggtattgcagcgcacagg

SEQ ID NO: 158368 - DNA, 75 bp, synthetic construct
  source 1..75: mol_type = other DNA
tttctgaaagattgtgacttgagaaatttatcatttacttataatgattcagctagctttgaaaaagccctagat

SEQ ID NO: 158369 - DNA, 75 bp, synthetic construct
  source 1..75: mol_type = other DNA
gcagtgctcaccgaaaccgtttttgcctggcccggaatgggtgcatgggtagtaacatcaatacaggcgctcgac

SEQ ID NO: 158370 - DNA, 75 bp, synthetic construct
  source 1..75: mol_type = other DNA
gcccgcaaactctattacagcatcaagcaagcgcgtaaacctttcggtagcggtaaaggcggcacttactttggc

SEQ ID NO: 158371 - DNA, 75 bp, synthetic construct
  source 1..75: mol_type = other DNA
cgcgtcagcgtgctgcgtgacgggcaatacgttggcagcctgacccgcgacaatctcaacgccggggaactggtg

SEQ ID NO: 158372 - DNA, 75 bp, synthetic construct
  source 1..75: mol_type = other DNA
cccacggcgggctggtgcagcgtaaagagatgctggtgcaggcgcaaaaagtgatcgaccgcctcggcgcgcagt

SEQ ID NO: 158373 - DNA, 75 bp, synthetic construct
  source 1..75: mol_type = other DNA
gctatgggtggagacaccgttcaggagttcattaagcgtgtcagcaatgactaccttatcggctatttcgacccg

SEQ ID NO: 158374 - DNA, 75 bp, synthetic construct
  source 1..75: mol_type = other DNA
caaaggtgagatcatcaaactccggcgccagcaggaaatcgatgctgatgatgccagggaaatgtgggatgaggc

SEQ ID NO: 158375 - DNA, 75 bp, synthetic construct
  source 1..75: mol_type = other DNA
ggactccagcaaactggaagaagtcgaaaagtattacgaagagtgcgcaaacgcaggcaccaatgagtggcaaat

SEQ ID NO: 158376 - DNA, 75 bp, synthetic construct
  source 1..75: mol_type = other DNA
gtgctgtatctctttttgtgatgcggtattttcttataaaccagaacattccacacacatagattcaaaaaaata

SEQ ID NO: 158377 - DNA, 75 bp, synthetic construct
  source 1..75: mol_type = other DNA
gctggggcaaacgctgggtttagttgtggcctatattctgtttgcggtcgccggggtatgtattattgccggagc

SEQ ID NO: 158378 - DNA, 75 bp, synthetic construct
  source 1..75: mol_type = other DNA
tgggcggcaccggcggtgagcgcatccgactttacgcaaaacgcccactcgtttcgtgagcaggcgctggggcaa

SEQ ID NO: 158379 - DNA, 75 bp, synthetic construct
  source 1..75: mol_type = other DNA
ttgtagcactgggcttggtttccgggctggcgcaggccggtgaaaaggaaatccagtttgtgggctctgtcagta

SEQ ID NO: 158380 - DNA, 75 bp, synthetic construct
  source 1..75: mol_type = other DNA
tccccgaacgtcctccggcaagcctgcccgtgcggaagcgaaaaaacgttatcagaaggcttatgctgccagtct

SEQ ID NO: 158381 - DNA, 75 bp, synthetic construct
  source 1..75: mol_type = other DNA
gattcactcagcctgtatccacagcggtgagtttttccatggaccttttgagatcactgatgcgaacacaccatt

SEQ ID NO: 158382 - DNA, 75 bp, synthetic construct
  source 1..75: mol_type = other DNA
tgtgggcgaggcctggacccgcgccacagagcaggaaaaacgccgcgagggcaacaccacagaactgctggtgac

SEQ ID NO: 158383 - DNA, 75 bp, synthetic construct
  source 1..75: mol_type = other DNA
gactcgaaggcgtgttaagccgctggctgctgctgaagaataacgtcatgccagaggcggcaaccggtaccacgg

SEQ ID NO: 158384 - DNA, 75 bp, synthetic construct
  source 1..75: mol_type = other DNA
tgttattcatacgaacaaatattatgctgatgttgaggcacgactcgcagacgcagctaaggctaatgggaaaca

SEQ ID NO: 158385 - DNA, 75 bp, synthetic construct
  source 1..75: mol_type = other DNA
acgcagtggttgcggtctgggcagcaccggcggttagcgcatccgactttacgcaaaatgctcactcgtttcgtg

SEQ ID NO: 158386 - DNA, 75 bp, synthetic construct
  source 1..75: mol_type = other DNA
ggcgcattatttcgtggtcatgcgcgggcaaattaatctcgacgagctgtacaccgcagcaggtgattttaaata

SEQ ID NO: 158387 - DNA, 75 bp, synthetic construct
  source 1..75: mol_type = other DNA
acattgctgggcgtggtaagtgtcacgaacggtgcaatagtgatccacacccaacgcctgaaatcagatccaggg

SEQ ID NO: 158388 - DNA, 75 bp, synthetic construct
  source 1..75: mol_type = other DNA
gctgtgatattcgacctggaaggcaatcaaatagccgtgggacaggcggagtggcggcacctggcagtaccggac

SEQ ID NO: 158389 - DNA, 75 bp, synthetic construct
  source 1..75: mol_type = other DNA
ttgaaacattgatgagatcaggctttactagtgaggtaatgcgttcacccgagccaccaaaaaaatgggatatcc

SEQ ID NO: 158390 - DNA, 75 bp, synthetic construct
  source 1..75: mol_type = other DNA
cttcaacttcctctgttgatgaaaaggtcgggagcacaggtaattttcataaatttataactcctgaatatttcg

SEQ ID NO: 158391 - DNA, 75 bp, synthetic construct
  source 1..75: mol_type = other DNA
tcattcttattggtaatttagggcaagatcctgaaatccgctatatgcccaatggtggtgcggtagcgaatctat

SEQ ID NO: 158392 - DNA, 75 bp, synthetic construct
  source 1..75: mol_type = other DNA
tctctgttcaaccatcctacaagccgttttagctctgagcataacgttactaaacgtgaaaacgcggaagagtgg

SEQ ID NO: 158393 - DNA, 75 bp, synthetic construct
  source 1..75: mol_type = other DNA
agactacttctcgtttttatcagcctgatgtggatgggctaagaacggtagctgttttattggtgcttttattcc

SEQ ID NO: 158394 - DNA, 75 bp, synthetic construct
  source 1..75: mol_type = other DNA
acggtgggtgtggcttaccagacgacggtaggcggcattatgaatacctcggtggcgttgttgcagtcctcacag

SEQ ID NO: 158395 - DNA, 75 bp, synthetic construct
  source 1..75: mol_type = other DNA
actgatgtgataaacaaccatgctgaaaccattggcaacaatcagatgattgcggttaccaacaatcagatacag

SEQ ID NO: 158396 - DNA, 75 bp, synthetic construct
  source 1..75: mol_type = other DNA
aggcgccatgatgttacagccctctgatgtggcggttgagcagcggctggttgcgcactggcccgcggggcagca

SEQ ID NO: 158397 - DNA, 75 bp, synthetic construct
  source 1..75: mol_type = other DNA
cggcgggggaaaaaaaggagaaggcggatcaccctggtatgcctgctgccctgcttgtccctcatccgaccggga

SEQ ID NO: 158398 - DNA, 75 bp, synthetic construct
  source 1..75: mol_type = other DNA
cttatgggtgacagctttgcaaggcaatatgcccatgcaatagatgtaaattctcaaggtcataaattcattaca

SEQ ID NO: 158399 - DNA, 75 bp, synthetic construct
  source 1..75: mol_type = other DNA
taaaatttattaactgcaattttttcaatgttgatatgataagagttaatttcagtaaatgtctttttcatgact

SEQ ID NO: 158400 - DNA, 75 bp, synthetic construct
  source 1..75: mol_type = other DNA
attaaggccaagctgaaagtagaccttatccttctcctgcaccgctatggcttccccccggtagccaatgatgag

SEQ ID NO: 158401 - DNA, 75 bp, synthetic construct
  source 1..75: mol_type = other DNA
actttgaagatgtccagcagtcactgattgaagtgcgtaaccacctgcatttgcttgctcaggttttccatacgt

SEQ ID NO: 158402 - DNA, 75 bp, synthetic construct
  source 1..75: mol_type = other DNA
ggtacgcgcgggcgggctttccggcggcaatcagcaaaaactgttgatctcccgctgggtggcgattggcccgcg

SEQ ID NO: 158403 - DNA, 75 bp, synthetic construct
  source 1..75: mol_type = other DNA
cggcggcaaagtgcagccgagcagtctgctggtgcgttccggcgaaattgtcggcctcgcagggctggtgggtgc

SEQ ID NO: 158404 - DNA, 75 bp, synthetic construct
  source 1..75: mol_type = other DNA
gatttgacggtctacccaggcgagatccatgccctgatgggggaaaacggtgccgggaaaagcacgctgatgaag

SEQ ID NO: 158405 - DNA, 75 bp, synthetic construct
  source 1..75: mol_type = other DNA
ttttcttatttgttggccagggtggtggtaaggaaaatttagagaaaatgtgctctaccctcaatttggaaaatg

SEQ ID NO: 158406 - DNA, 75 bp, synthetic construct
  source 1..75: mol_type = other DNA
atattggcaataacgtgttctccaattatggcgcctctgcaatattttgccgcaactcgagtgaaatgtttatat

SEQ ID NO: 158407 - DNA, 75 bp, synthetic construct
  source 1..75: mol_type = other DNA
atcagggttgtggaatttcaacatctgtaagtaataatgaattttatcattctatgaaaaatataacaatagcta

SEQ ID NO: 158408 - DNA, 75 bp, synthetic construct
  source 1..75: mol_type = other DNA
cagttcaagaaccctaagtccaacttcaaaattgccattgtggtggacatgtggctgactggttttgatgtgccc

SEQ ID NO: 158409 - DNA, 75 bp, synthetic construct
  source 1..75: mol_type = other DNA
ctgctggcgattggcgactgccatctggtgattcagaagcgtggcgccgcggatgcggtgttgccttccaagctg

SEQ ID NO: 158410 - DNA, 75 bp, synthetic construct
  source 1..75: mol_type = other DNA
aatctgttgatgctctcatttctggtattgaaaaatgtggtaatgactccaacttattgatagtgttttatgttc

SEQ ID NO: 158411 - DNA, 75 bp, synthetic construct
  source 1..75: mol_type = other DNA
agatggtcgatttagcgccaatcttccaggctctgccggaacgtaactatcttatgaatgccctcgacctattcg

SEQ ID NO: 158412 - DNA, 75 bp, synthetic construct
  source 1..75: mol_type = other DNA
gactgaatcagctggacctgaaatcactaaaaaaatggtgcgagaaaggacaacaaaaaaattaccttcgaaatt

SEQ ID NO: 158413 - DNA, 75 bp, synthetic construct
  source 1..75: mol_type = other DNA
atggatagtttagaaaaaaagaatcgactgaatcagctggacctgaaatcactaaaaaaatggtgcgagaaagga

SEQ ID NO: 158414 - DNA, 75 bp, synthetic construct
  source 1..75: mol_type = other DNA
tattatcattctctgttggggcggttacagggtctttactccccggcgtaacaacgtttcacatggtgatacccg

SEQ ID NO: 158415 - DNA, 75 bp, synthetic construct
  source 1..75: mol_type = other DNA
ggcggttacagggtctttactccccggcgtaacaacgtttcacatggtgatacccgtttaatttcccagcgtata

SEQ ID NO: 158416 - DNA, 75 bp, synthetic construct
  source 1..75: mol_type = other DNA
tcttccgtggtgaccaaagactacacctttaaacgccccggctgggccggacgttttgaacaggaaggccagcac

SEQ ID NO: 158417 - DNA, 75 bp, synthetic construct
  source 1..75: mol_type = other DNA
gaagaggctgaactggggcttcgtttattggaacatggctataaattgcatcgcctgaatattccttatttccgc

SEQ ID NO: 158418 - DNA, 75 bp, synthetic construct
  source 1..75: mol_type = other DNA
catgaatcgctttcgtgcatagttatgcagccccctgaaaacaattctggcgcgtttttttggtctggcctgttg

SEQ ID NO: 158419 - DNA, 75 bp, synthetic construct
  source 1..75: mol_type = other DNA
tgatgctctttaacagtgaaggtaaaaccgtctggcggccgggacagaccagcctgtgggggctggcactcagcc

SEQ ID NO: 158420 - DNA, 75 bp, synthetic construct
  source 1..75: mol_type = other DNA
caggtgctattaaaaacgatttcctaagaaaaatgttagccaataatatgatcagcactcaatgcttaatttcaa

SEQ ID NO: 158421 - DNA, 75 bp, synthetic construct
  source 1..75: mol_type = other DNA
agccatccagagcaccagaacgcgattttctggtgtctgtaatggttgggtacatattggcccttaaaacgcact

SEQ ID NO: 158422 - DNA, 75 bp, synthetic construct
  source 1..75: mol_type = other DNA
cggaaagattgcttccgggacaaaattcattacagtcatgaaaagtagagaaattaaaggaaacctaaagcgaaa

SEQ ID NO: 158423 - DNA, 75 bp, synthetic construct
  source 1..75: mol_type = other DNA
atgaatgacgttacagttgtcacatcggttacttccccatcacccgagtcgttggctctggtggctgatgtgcaa

SEQ ID NO: 158424 - DNA, 75 bp, synthetic construct
  source 1..75: mol_type = other DNA
tatggttttgaagccgactggtcggaattttatactacaacacgtaaaccatctgcgggagatgttggggcatat

SEQ ID NO: 158425 - DNA, 75 bp, synthetic construct
  source 1..75: mol_type = other DNA
cgcaggcagaatgtaactcaaggtttattacaggtattcgcctgggcggtctgtcatctgtccagacatggaatg

SEQ ID NO: 158426 - DNA, 75 bp, synthetic construct
  source 1..75: mol_type = other DNA
aagaagacctgaaagaaagactgaaagaaatcaaggaagatatcctggaagaaaaccagtcagcaagccagagtg

SEQ ID NO: 158427 - DNA, 75 bp, synthetic construct
  source 1..75: mol_type = other DNA
attcgcctggctcatttcattggcttccattgtcttttaaattaaataatgaatatgggaaatggaaggagaaat

SEQ ID NO: 158428 - DNA, 75 bp, synthetic construct
  source 1..75: mol_type = other DNA
cacttctgctttccgggtctgtctgtgccgatcaaattcagggactcgttattcgtgtgctggacggagatttgt

SEQ ID NO: 158429 - DNA, 75 bp, synthetic construct
  source 1..75: mol_type = other DNA
ctcggctaccggttcgctccgcgcatccgcgacctgccatccaaacggctctacgcgttcaatccgtcggccgcc

SEQ ID NO: 158430 - DNA, 75 bp, synthetic construct
  source 1..75: mol_type = other DNA
attcagcgtgcttaaagggaaacgtctgtttgcaatactgcgtcttgccgatggctctcagcccccgtttggtgc

SEQ ID NO: 158431 - DNA, 75 bp, synthetic construct
  source 1..75: mol_type = other DNA
aaaccacacccattagacaaaaatattgaaagatataaaatatttgaatcacaaaatgtgaaactcgttaccgat

SEQ ID NO: 158432 - DNA, 75 bp, synthetic construct
  source 1..75: mol_type = other DNA
aattacggggcttggcattgtcggtgaagttgatggcgatgatccggcagtattcagaccaatacaaaagttaat

SEQ ID NO: 158433 - DNA, 75 bp, synthetic construct
  source 1..75: mol_type = other DNA
caaaacacatgcctcgctggcgcatctggcgcaggcggacgatatcagcttcgaatggattgttgtcgatggcgg

SEQ ID NO: 158434 - DNA, 75 bp, synthetic construct
  source 1..75: mol_type = other DNA
cggtggcatgtcgagggcgaagcctatgaccgggcgctggccatggtggtcgaggcacaggcagcgttacccatg

SEQ ID NO: 158435 - DNA, 75 bp, synthetic construct
  source 1..75: mol_type = other DNA
gggagtgggccaatgtttatagtgcaatttcgaaacaatgcattggtatattcattgtcataaccggctttctct

SEQ ID NO: 158436 - DNA, 75 bp, synthetic construct
  source 1..75: mol_type = other DNA
aactcgctcctgactgggagtgggccaatatttacagcgcaatatcgaaacaatgcattggtattttcattgtca

SEQ ID NO: 158437 - DNA, 75 bp, synthetic construct
  source 1..75: mol_type = other DNA
tctggcgtcagtccttgcggggagcgggctttcgtaatcttgccctgggtaggaggccctccagggatgttagtc

SEQ ID NO: 158438 - DNA, 75 bp, synthetic construct
  source 1..75: mol_type = other DNA
cttctaacgtggtgtacggccagaaaaccggtaatacgccggacggtcgtcgcgccggaacaccgttcgcgccgg

SEQ ID NO: 158439 - DNA, 75 bp, synthetic construct
  source 1..75: mol_type = other DNA
atgcaataggaatacccgttccaaagataagcgttccatttgcaagttatttaatgctctatgtttttgcaggat

SEQ ID NO: 158440 - DNA, 75 bp, synthetic construct
  source 1..75: mol_type = other DNA
tacaggattgtatttgctctcctttcattgacactttccgttgttaccatttatgttaataaagggatagttcat

SEQ ID NO: 158441 - DNA, 75 bp, synthetic construct
  source 1..75: mol_type = other DNA
ttttcaaaaaaaatcatgacatatcatttctaatagccagagaagagaatgtcttaatgaatcatattgtcatcg

SEQ ID NO: 158442 - DNA, 75 bp, synthetic construct
  source 1..75: mol_type = other DNA
tacttttcaaaggtatgtgctgattttgaagctgaactggttgaaatggatggcgaaccagatcacgtccatttg

SEQ ID NO: 158443 - DNA, 75 bp, synthetic construct
  source 1..75: mol_type = other DNA
aagaaaataaaatgtgcttaccacctttgcaaaaaagacgttgaagaaagcaaagctattgaaagaatgcttcac

SEQ ID NO: 158444 - DNA, 75 bp, synthetic construct
  source 1..75: mol_type = other DNA
agatgcggggtgaagccgaattattaaatgcacaaagtcaaatggaattctggcgagaaccctatggtgcttttt

SEQ ID NO: 158445 - DNA, 75 bp, synthetic construct
  source 1..75: mol_type = other DNA
tccaggcgatcgatttcccggtgcgctggaaacaagtcaaggttttactctcagacgctccgcttaccgacaatg

SEQ ID NO: 158446 - DNA, 75 bp, synthetic construct
  source 1..75: mol_type = other DNA
gctgtgtatatcagtggatctgatgcaccacaggatttacgtgagttacttgactatcttgctgatagattgcgt

SEQ ID NO: 158447 - DNA, 75 bp, synthetic construct
  source 1..75: mol_type = other DNA
cgctattatgacccgctgcaggggaggtatatcactcaggatccgattggactgaaggggggatggaatttttat

SEQ ID NO: 158448 - DNA, 75 bp, synthetic construct
  source 1..75: mol_type = other DNA
tggctggacggagcatcaaacagtggtgttattgcatacggtaaagtacctgccgccggtgaacacacccacacc

SEQ ID NO: 158449 - DNA, 75 bp, synthetic construct
  source 1..75: mol_type = other DNA
ttcacccaactggacagctcggtaaacagtagcagtgaggcgaaagctgcaacaccaaaagcagtaaaaacactg

SEQ ID NO: 158450 - DNA, 75 bp, synthetic construct
  source 1..75: mol_type = other DNA
gcaggctcttgttgaggaatacaacgagatagctagccgtgtcggcatggatgagttcaatgtcatacttcgtgg

SEQ ID NO: 158451 - DNA, 75 bp, synthetic construct
  source 1..75: mol_type = other DNA
gcagcctgcctatcagccgcagcctgaacagccgttgcagcagccagtttcgccacaggtcgcgtcagcgccgca

SEQ ID NO: 158452 - DNA, 75 bp, synthetic construct
  source 1..75: mol_type = other DNA
ctgaccattgcgtctcatacggcagatggggtaacgggcatgggtttagactggccccctgaatctccagacaac

SEQ ID NO: 158453 - DNA, 75 bp, synthetic construct
  source 1..75: mol_type = other DNA
tggcggcagccgtatcgacaaagatgacatccgcgttgaggcctatggcacggtggatgaactgatttcccagct

SEQ ID NO: 158454 - DNA, 75 bp, synthetic construct
  source 1..75: mol_type = other DNA
attgattgcatgcgcgccgcaggcgcattcgcctgctttgtggtgcatgatattctgccattacgccgcccggag

SEQ ID NO: 158455 - DNA, 75 bp, synthetic construct
  source 1..75: mol_type = other DNA
tttaaaagacaaatacagactgccggatgaatttatcctaacgctggcgatgattgagccacggaaaaacatcga

SEQ ID NO: 158456 - DNA, 75 bp, synthetic construct
  source 1..75: mol_type = other DNA
gccaccaatagcacgtctgaaaagctcgcagcgacgcctaaggctgttaaggctgcatatgacctggctaacgct

SEQ ID NO: 158457 - DNA, 75 bp, synthetic construct
  source 1..75: mol_type = other DNA
atggaagaacgcaacgttataccactcgccgtggaaatatgtacgtccgctgccttgcggcaagctgggatgcat

SEQ ID NO: 158458 - DNA, 75 bp, synthetic construct
  source 1..75: mol_type = other DNA
acgccatgcagaagatgctgtttgtactgggtgcggaactcgccagcgatgagaaaggactcgcgcgcttacaac

SEQ ID NO: 158459 - DNA, 75 bp, synthetic construct
  source 1..75: mol_type = other DNA
gtggcgacgataatcaaaaatatagcaatcaaaggtctttttaaacggaaggacattgattggagtttaaaagat

SEQ ID NO: 158460 - DNA, 75 bp, synthetic construct
  source 1..75: mol_type = other DNA
aaaacagaaaatcaggtgttgatttacgatcgtaaaacaaaaatcacaccaacactggatttaccgcttgtggtc

SEQ ID NO: 158461 - DNA, 75 bp, synthetic construct
  source 1..75: mol_type = other DNA
aaaacagaaaatcaggtgttgatttacgatcgtaaaacaaaaatcacaccaacactggatttgccgctcgtggtt

SEQ ID NO: 158462 - DNA, 75 bp, synthetic construct
  source 1..75: mol_type = other DNA
ttaaaattatgaactgtgtgaccataggtgataatgttgccattcatgcgaatacagtgattaaagaaggcacta

SEQ ID NO: 158463 - DNA, 75 bp, synthetic construct
  source 1..75: mol_type = other DNA
ggctttcatcagttacttattttagtgcggcacataatcaactagggaaggtgcgaataagcgggggaattcttc

SEQ ID NO: 158464 - DNA, 75 bp, synthetic construct
  source 1..75: mol_type = other DNA
aggctttcatcagttacttattttagtgcggcacataatcaactagagtttgtgcaattagaatcttgcgaatga

SEQ ID NO: 158465 - DNA, 75 bp, synthetic construct
  source 1..75: mol_type = other DNA
gcggcacgtgctgcttacctgaaagcaaaagccagataccatccctcgaccccagtcgatttgttaaaggctgct

SEQ ID NO: 158466 - DNA, 75 bp, synthetic construct
  source 1..75: mol_type = other DNA
atggttaatgatgcttacgcccctgagctgctgtgttcccttttcctgtatgacccggtgacaggccgcctgcac

SEQ ID NO: 158467 - DNA, 75 bp, synthetic construct
  source 1..75: mol_type = other DNA
cgggcagcgtgttcctgatccgcaacaccaacacggtgagctacggcacctcgctgcacctgcgcatcaccgatc

SEQ ID NO: 158468 - DNA, 75 bp, synthetic construct
  source 1..75: mol_type = other DNA
cagttagcccgaaatgtatcttcctgtacatgcgaatatgtgatcaatacaaccaaaggcgggaaagtcatagct

SEQ ID NO: 158469 - DNA, 75 bp, synthetic construct
  source 1..75: mol_type = other DNA
cctcggcttgttcaccactgaggcagcagcacgagccgcctatctccgagccaaacggcactatcacccatcaac

SEQ ID NO: 158470 - DNA, 75 bp, synthetic construct
  source 1..75: mol_type = other DNA
ctgggatgcaaatcgaccatatcaacgcgatacgcgatgacaaccgccttatcaatctccgcacggttacgccac

SEQ ID NO: 158471 - DNA, 75 bp, synthetic construct
  source 1..75: mol_type = other DNA
cggcaccgtcgccgccacagaaaccaaaccgctttggggcggcctgccggttgctgagttgctgcccggcgtgaa

SEQ ID NO: 158472 - DNA, 75 bp, synthetic construct
  source 1..75: mol_type = other DNA
tttcctgggtgattttgggataggaaatggcatggcaaaaggcgaagcccgcaaaaaagcagctaaccggctaaa

SEQ ID NO: 158473 - DNA, 75 bp, synthetic construct
  source 1..75: mol_type = other DNA
aacgtcaccggtccagaatcttccgcaatggattgcaaagcggtagctctggaaatcgccaaaacgcgcagtgta

SEQ ID NO: 158474 - DNA, 75 bp, synthetic construct
  source 1..75: mol_type = other DNA
tgctggtaccatgctgtcgtggtggttcggcatttacccagggcgcggaggggacattcagtgcggacacggggg

SEQ ID NO: 158475 - DNA, 75 bp, synthetic construct
  source 1..75: mol_type = other DNA
tcagcgttctgacagcgatgcgcaaagcctgattactggcgcttttccgcctacagcgacggtaatgttgccaga

SEQ ID NO: 158476 - DNA, 75 bp, synthetic construct
  source 1..75: mol_type = other DNA
ggaactctaaaactgtcagctatgacagcgctacgggcttccttacctggaacaacaccgacagctgcgcgctgg

SEQ ID NO: 158477 - DNA, 75 bp, synthetic construct
  source 1..75: mol_type = other DNA
gtatgaacaggcaaaaaatattcacgcggcactgcaaaacaatactgacgcggcaagactactcaaccacccgga

SEQ ID NO: 158478 - DNA, 75 bp, synthetic construct
  source 1..75: mol_type = other DNA
tcccttggtggaacagttccgttatccactatggcaggctaaaccggtcgagccgcagcaaggggtaaaactgta

SEQ ID NO: 158479 - DNA, 75 bp, synthetic construct
  source 1..75: mol_type = other DNA
gaatcgccggtcacatatcaattggtagttattcggtaattaaggctaaatcaggtgtaagccattcttgtcctg

SEQ ID NO: 158480 - DNA, 75 bp, synthetic construct
  source 1..75: mol_type = other DNA
aaaccgataatagttgtgtggagaactgtttaaaagggaagtttaaagaggtaaggccgcgttattctgtattgc

SEQ ID NO: 158481 - DNA, 75 bp, synthetic construct
  source 1..75: mol_type = other DNA
tgcgcaatatcgcaaccggattcgacacaggtgaatggccagcgccaatcactgctgactacaccgacgaactga

SEQ ID NO: 158482 - DNA, 75 bp, synthetic construct
  source 1..75: mol_type = other DNA
ggcatccgctgaactactggagctgggtatgctcgagtaccgcaaagcgatgcgcaatatcgcaaccggattcga

SEQ ID NO: 158483 - DNA, 75 bp, synthetic construct
  source 1..75: mol_type = other DNA
cggctattttaatgtctccaacggcggcaaaatccatgttaagggcaccagccgtctgacctatttgcagggaaa

SEQ ID NO: 158484 - DNA, 75 bp, synthetic construct
  source 1..75: mol_type = other DNA
ttgattttggcaaggccgatcaaaacatcgattaccgtattacggttactgataatgctaatctggttatcgacg

SEQ ID NO: 158485 - DNA, 75 bp, synthetic construct
  source 1..75: mol_type = other DNA
tctcgacagttgggcgcagtacagctggtttgataacacagtgaaaggggatgacttacaaagtgaatcctataa

SEQ ID NO: 158486 - DNA, 75 bp, synthetic construct
  source 1..75: mol_type = other DNA
cggaacgaatggtatatccagccacaagcacagattacctggatgggagtaaaagctgataagcatcgcgaaagc

SEQ ID NO: 158487 - DNA, 75 bp, synthetic construct
  source 1..75: mol_type = other DNA
aagaaaatcaccttaaaccacacggataaaaacgcgactatttccgcggatattgtcagtggcagcgagggcctg

SEQ ID NO: 158488 - DNA, 75 bp, synthetic construct
  source 1..75: mol_type = other DNA
cgatacaacacttgctgtttcggaaggtggtaaaatctctgcgccgactattagtttaagcaccaactctgagtt

SEQ ID NO: 158489 - DNA, 75 bp, synthetic construct
  source 1..75: mol_type = other DNA
ttctccttcgatgagtttgcttatacagactggttccagggttcactggcgttccagaacacgacatttaacctg

SEQ ID NO: 158490 - DNA, 75 bp, synthetic construct
  source 1..75: mol_type = other DNA
ggtaataaatacatcccttacgggaaaatggctttctggctggttgagtggaaaaatgccactgaaacgcaatgg

SEQ ID NO: 158491 - DNA, 75 bp, synthetic construct
  source 1..75: mol_type = other DNA
tggcaccagcagccatattagcaattttgcgttttgttgtgctgttgccaactgaaaccgtattgcttgcatctg

SEQ ID NO: 158492 - DNA, 75 bp, synthetic construct
  source 1..75: mol_type = other DNA
ctgatgatttatatgagtcttactctaatattacccacgatagaggctattttaatgtctccaacggcggcaaaa

SEQ ID NO: 158493 - DNA, 75 bp, synthetic construct
  source 1..75: mol_type = other DNA
gtatctcgtgatattgactctgcgttatcgctcactgaagtcgatgatggtaacagcgccattaagctggttgat

SEQ ID NO: 158494 - DNA, 75 bp, synthetic construct
  source 1..75: mol_type = other DNA
acggggagcggagagctgaatattcagggcggcacgctggatatcgcgggcgataacagcaacctgacggcgaat

SEQ ID NO: 158495 - DNA, 75 bp, synthetic construct
  source 1..75: mol_type = other DNA
tgccacattaacgacattaacagcggtgaccgatcaaaacggaatcgcgacaacaagcgtgaaaggagcgatgac

SEQ ID NO: 158496 - DNA, 75 bp, synthetic construct
  source 1..75: mol_type = other DNA
tcgaaacggatgctcagggtaaagcagaaatccttgtgacaagcaccattgcaggaacgaaagtagttacagcta

SEQ ID NO: 158497 - DNA, 75 bp, synthetic construct
  source 1..75: mol_type = other DNA
gtaactttcagctcagcttcttcaggcctcaccctgaccccaggggagagtaataccaatgaggctggcatcgcg

SEQ ID NO: 158498 - DNA, 75 bp, synthetic construct
  source 1..75: mol_type = other DNA
aataacacgccaatcttctttatccaggatgcgcataaattccccgattttgttcatgcggtaaaaccagaaccg

SEQ ID NO: 158499 - DNA, 75 bp, synthetic construct
  source 1..75: mol_type = other DNA
agaaatccttgtgacaagcaccattgctggaacgaaagtagtaacagctaatctggcaaatgcacctaccgaagc

SEQ ID NO: 158500 - DNA, 75 bp, synthetic construct
  source 1..75: mol_type = other DNA
gccggggtttatcaagtgacggcaaccctcgacaatggcgattcgatgcaacaaacagtgacctatgtgccgaac

SEQ ID NO: 158501 - DNA, 75 bp, synthetic construct
  source 1..75: mol_type = other DNA
caccgataacgccgggcataccggcattggtgaagcgccaggcggagaggtgatttatcagacattggtcgatgc

SEQ ID NO: 158502 - DNA, 75 bp, synthetic construct
  source 1..75: mol_type = other DNA
gaaaaaattaattattccgcacaggatagcgacattttaacgaccatcggattcaggcctgacgcggcttcggtg

SEQ ID NO: 158503 - DNA, 75 bp, synthetic construct
  source 1..75: mol_type = other DNA
gttgatggtagcttgagctactctcacttcaacaacgacctgtctgcaaccatgagcaacggtacttacgttgac

SEQ ID NO: 158504 - DNA, 75 bp, synthetic construct
  source 1..75: mol_type = other DNA
cggcaatagcagcaaaggcgcggcgcagtatctgctgcaacagggctacgatgtggtctatagcattgacggcgg

SEQ ID NO: 158505 - DNA, 75 bp, synthetic construct
  source 1..75: mol_type = other DNA
tacgtagtttccctggcaacaggtgatcaaagcgtatttgaaaagcttgggtttgcttatgcgacatgttataaa

SEQ ID NO: 158506 - DNA, 75 bp, synthetic construct
  source 1..75: mol_type = other DNA
cctgggtcgatgttgatgctaccggtaaagtgacatttaaaaatgtcggcagcaattcggaaaggattacggcga

SEQ ID NO: 158507 - DNA, 75 bp, synthetic construct
  source 1..75: mol_type = other DNA
tctgcgccgggtattcttgttgcggggttggcggtgtttattttgatgagccggagatcaagaatgcagccgtgc

SEQ ID NO: 158508 - DNA, 75 bp, synthetic construct
  source 1..75: mol_type = other DNA
ggatgccatgctggggctgggtcttgccggaaaaggcaaagtggcacaactggcaacggcgttcgaacgtagcgg

SEQ ID NO: 158509 - DNA, 75 bp, synthetic construct
  source 1..75: mol_type = other DNA
tagaaccggaatcggtcgaggcgctggtggcggggatccgtcaggcgcttctgctacccaaacacaacacggtgg

SEQ ID NO: 158510 - DNA, 75 bp, synthetic construct
  source 1..75: mol_type = other DNA
cacagaactggggcagctttgcgaaacctttccgggcattgcggtttgcgtagaaccggaatcggtcgaggcgct

SEQ ID NO: 158511 - DNA, 75 bp, synthetic construct
  source 1..75: mol_type = other DNA
ttgaactgcgcggtgaaaagcagattgaaatcaaatccggtgcaaaacgtccgtctggctgttcctgctgggcgt

SEQ ID NO: 158512 - DNA, 75 bp, synthetic construct
  source 1..75: mol_type = other DNA
ttggatgcttcgatgacctggacgaagctatctcagcatcaatgatggcaagagcagaaaattttggagagtttg

SEQ ID NO: 158513 - DNA, 75 bp, synthetic construct
  source 1..75: mol_type = other DNA
ccttcgtaaccagcttggcctgccggataacaaaaaaatcattctttactccggcaatattggtgaaaagcaggg

SEQ ID NO: 158514 - DNA, 75 bp, synthetic construct
  source 1..75: mol_type = other DNA
tcctgaaattcaccctcggtccactggagctgtgggcactgaactcctctcctaaagacagcgccctgcgacgtg

SEQ ID NO: 158515 - DNA, 75 bp, synthetic construct
  source 1..75: mol_type = other DNA
atgcgtgagacttatgacggtcacgaccacgaccacggcggtgatgcaggcacaacgcagaaacctaatcagcaa

SEQ ID NO: 158516 - DNA, 75 bp, synthetic construct
  source 1..75: mol_type = other DNA
atttattcggatgaaggaagcaacattattctgaagcgcggaaaaataattgaagtaaactgcgatgaatatata

SEQ ID NO: 158517 - DNA, 75 bp, synthetic construct
  source 1..75: mol_type = other DNA
ccatgctggggctgggccttgccggaaaaggcaaaggcggcaaagtggcacagctggcaacggcgttcgaacgta

SEQ ID NO: 158518 - DNA, 75 bp, synthetic construct
  source 1..75: mol_type = other DNA
tgttgcatctcggcagttttgccgtcagcagttttttcccgttgatggcgcaacgtcgctggaagccggatcgca

SEQ ID NO: 158519 - DNA, 75 bp, synthetic construct
  source 1..75: mol_type = other DNA
aaccgctgatttttgccattgtcgggcagggcggcggcaaagcgcggctggaaaaaatggcgcaacagcgtggac

SEQ ID NO: 158520 - DNA, 75 bp, synthetic construct
  source 1..75: mol_type = other DNA
gcgctcaataaagacggcatcatccgcaccatttacgacccaacagcgggaaccggcggctttctctcctccggc

SEQ ID NO: 158521 - DNA, 75 bp, synthetic construct
  source 1..75: mol_type = other DNA
gatgggcgtttcaccggaagactggcagcgttcggttgatcccctgctgaaacccgtcattttttctgtgctgaa

SEQ ID NO: 158522 - DNA, 75 bp, synthetic construct
  source 1..75: mol_type = other DNA
ttctggactgttctgagtccatgattggtgaaaacctgaaaaggatgaatgatggcttgcagaagattgtgggcg

SEQ ID NO: 158523 - DNA, 75 bp, synthetic construct
  source 1..75: mol_type = other DNA
tgcaatttcaattgtgatcacggaaataatagttgtattattaatgatgattgccatcataaggctaaaaattaa

SEQ ID NO: 158524 - DNA, 75 bp, synthetic construct
  source 1..75: mol_type = other DNA
caaatgcttgcaataacacattcaccttttgtttttaataatgaactgaaatcccaagtaacatctttgaaagtt

SEQ ID NO: 158525 - DNA, 75 bp, synthetic construct
  source 1..75: mol_type = other DNA
agtttctttgggaaccactttaagtatcagctgtcttattcttgcattattgtcaatattcgtaactattatagg

SEQ ID NO: 158526 - DNA, 75 bp, synthetic construct
  source 1..75: mol_type = other DNA
gtacgcagtatctgagggactacccggaaagcgttcttaagtcagcaaatactctctggttactgcgctacaaac

SEQ ID NO: 158527 - DNA, 75 bp, synthetic construct
  source 1..75: mol_type = other DNA
ctgtctgcataatgaccatcatggcctccacgtggggaaaaacacgtgaaatatgcacacgaaaccaggccattc

SEQ ID NO: 158528 - DNA, 75 bp, synthetic construct
  source 1..75: mol_type = other DNA
gcaaaacgttgatgacacttatgtcgtgtttatcatcggtgaaaccacgcgttgggaccatatgggcattttcgg

SEQ ID NO: 158529 - DNA, 75 bp, synthetic construct
  source 1..75: mol_type = other DNA
catgtattccctgagtggcgaaatgaaactaaacctacacaacataagaaacctacacttcgaattgttgcataa

SEQ ID NO: 158530 - DNA, 75 bp, synthetic construct
  source 1..75: mol_type = other DNA
aacgcggttatgatggatcaggtgtttcctgagtggcgaaatggcaataaacctacacaacataagaaacctaca

SEQ ID NO: 158531 - DNA, 75 bp, synthetic construct
  source 1..75: mol_type = other DNA
ctgcccaggtgagccattaacaaattatgatatctcctggagtgacagccgtgttgaacacagtaaggttttgaa

SEQ ID NO: 158532 - DNA, 75 bp, synthetic construct
  source 1..75: mol_type = other DNA
agaacttaacttcacccttgatttactgaccaccaatggagtttatcatggggagtattatcagaatgtcgacca

SEQ ID NO: 158533 - DNA, 75 bp, synthetic construct
  source 1..75: mol_type = other DNA
acgatatgttagtgcgtgttgataccagtaacaggcaggcaatagactccacgtgtcgctttcagtatgtattga

SEQ ID NO: 158534 - DNA, 75 bp, synthetic construct
  source 1..75: mol_type = other DNA
cattacacgaattatcagaatgaaaaagagagttatattgtcacgtttaaccagtatcttgaatcattaaggtta

SEQ ID NO: 158535 - DNA, 75 bp, synthetic construct
  source 1..75: mol_type = other DNA
gttatagctaccgcgctaactattcaaaacgttttgaatctaccggtagccagctcactttcgctggttaccgtt

SEQ ID NO: 158536 - DNA, 75 bp, synthetic construct
  source 1..75: mol_type = other DNA
ttgcataatcaggataaagaaacgggttatagctaccgcgctaactattcaaaacgttttgaatctaccggtagc

SEQ ID NO: 158537 - DNA, 75 bp, synthetic construct
  source 1..75: mol_type = other DNA
cggacatgcttactggaatctgagtgggatggatcagtacatggcgatgattaacttctataagaatgtcagtat

SEQ ID NO: 158538 - DNA, 75 bp, synthetic construct
  source 1..75: mol_type = other DNA
cgtctgattgatgtagctcataagcgtgccgatcgtatagccggcgtggatatgccaagttatggcggggtgctg

SEQ ID NO: 158539 - DNA, 75 bp, synthetic construct
  source 1..75: mol_type = other DNA
ttttctacgcggcggatcacggtgagtcgattaacgagcgcgaacacttgcatggtacaccacgcgaatatgcac

SEQ ID NO: 158540 - DNA, 75 bp, synthetic construct
  source 1..75: mol_type = other DNA
ccttacaggcgattataccgatttgtataagtgcccgggggttctcaatattgatccagataccaactggagttg

SEQ ID NO: 158541 - DNA, 75 bp, synthetic construct
  source 1..75: mol_type = other DNA
gtcttttggggttgttactcctgaattcggcagcgaaggcagataccacatttaagaatgtacaaacatacgcag

SEQ ID NO: 158542 - DNA, 75 bp, synthetic construct
  source 1..75: mol_type = other DNA
ttaacttctataagaatgtcagtattgccggtggtttgtcacttctcgcattcaccgggcctggccgatactctt

SEQ ID NO: 158543 - DNA, 75 bp, synthetic construct
  source 1..75: mol_type = other DNA
atgccagaacgatgaccagcaggcgaatgggggaatgtctcgggcgacatcatgacagcatccgctgccgggcac

SEQ ID NO: 158544 - DNA, 75 bp, synthetic construct
  source 1..75: mol_type = other DNA
atgatgaaattacaacccatggggcgaaaagatcaggcgcctgctcatgtctgcgcgtggacacctgaagaagat

SEQ ID NO: 158545 - DNA, 75 bp, synthetic construct
  source 1..75: mol_type = other DNA
gaaaaggtcaggcacctgctcatgtccgtgcgtggacacctgaagaagatgcgctgctgattgcgctttatccat

SEQ ID NO: 158546 - DNA, 75 bp, synthetic construct
  source 1..75: mol_type = other DNA
tactcagtattgatgctaacgaacggtccattacctttcgctttgcgatgtacctccagctatctttccccggtt

SEQ ID NO: 158547 - DNA, 75 bp, synthetic construct
  source 1..75: mol_type = other DNA
ctggggggtgagcagacttaccggtatgtgccgaatccgtgtgggtatgttgatccgctggggctagttggttgt

SEQ ID NO: 158548 - DNA, 75 bp, synthetic construct
  source 1..75: mol_type = other DNA
gacccgcgcggggaactggacccggaagccgaccccggcctgctgtatgcaggacagtggcaggatgcggaatcg

SEQ ID NO: 158549 - DNA, 75 bp, synthetic construct
  source 1..75: mol_type = other DNA
aaagatattacccgctataacagcgcatggaacacgctggtcaacctggcaactctggttgtgatggctaacggc

SEQ ID NO: 158550 - DNA, 75 bp, synthetic construct
  source 1..75: mol_type = other DNA
ctattggctacgccaaacttgatacccgcaagggctaccaaatcataggggttattcgcctggcagatggtagtc

SEQ ID NO: 158551 - DNA, 75 bp, synthetic construct
  source 1..75: mol_type = other DNA
ctgcttcgtggtatgactcttccgatcgaaataattcctggagcgtttctgcttcaggcgacaatgatgaattca

SEQ ID NO: 158552 - DNA, 75 bp, synthetic construct
  source 1..75: mol_type = other DNA
cggagagttacgccccggcacgcgcatatctgatgatgatgtacgtcttatacgtgcgctgcgtgattccgatta

SEQ ID NO: 158553 - DNA, 75 bp, synthetic construct
  source 1..75: mol_type = other DNA
acggcagcagaaacgggacacagtacgatgcgtggggaaaagccatctgtaccacgcagggcggtctgacgcgca

SEQ ID NO: 158554 - DNA, 75 bp, synthetic construct
  source 1..75: mol_type = other DNA
acaatcggggggcatggtacccccacatctattgaatccgcaacgcgcagtatcatgacagctaaagatctagca

SEQ ID NO: 158555 - DNA, 75 bp, synthetic construct
  source 1..75: mol_type = other DNA
tatgacccgctgcgggggcgatatatcactcaggatccgattgggctgaaagggggatggaatttttatcagtat

SEQ ID NO: 158556 - DNA, 75 bp, synthetic construct
  source 1..75: mol_type = other DNA
tgctgcacacaatcgacggtgacttttcatattcagcagcttgaacaggagttctcagtacaattgtttgagaaa

SEQ ID NO: 158557 - DNA, 75 bp, synthetic construct
  source 1..75: mol_type = other DNA
gatggataggcaaggatatttttttgatagactttggagtaatgttccgaataatgttggtgatccggaatcttt

SEQ ID NO: 158558 - DNA, 75 bp, synthetic construct
  source 1..75: mol_type = other DNA
gcaggaatgaaaaataaaattttagaagctatggcaacaggattgccaattatatcatccgacgttggagttgaa

SEQ ID NO: 158559 - DNA, 75 bp, synthetic construct
  source 1..75: mol_type = other DNA
aaaaacatttaatatattatttttagggaattttgattataatcctaatgcggacgccgcaaggtttttatgtaa

SEQ ID NO: 158560 - DNA, 75 bp, synthetic construct
  source 1..75: mol_type = other DNA
gggaacggaaaggcggtggcctactgttctgaagtgctgatggggctggagatgatgcgccgtcaggttgcggcc

SEQ ID NO: 158561 - DNA, 75 bp, synthetic construct
  source 1..75: mol_type = other DNA
gcgattgacgcagcaggatacgaaccaggcgctggatgcctcgctgtttagcggcgacggtacgctggtgaatgc

SEQ ID NO: 158562 - DNA, 75 bp, synthetic construct
  source 1..75: mol_type = other DNA
aaacttgctgcaaaacagcaatatcgatctgcagagttgctcctcagattatccattctaatattatctcgcacc

SEQ ID NO: 158563 - DNA, 75 bp, synthetic construct
  source 1..75: mol_type = other DNA
gacaagatttcgcatcaagaataacagaagatgaaagtgatttttttaaatggaaaaaaaataagagagttggca

SEQ ID NO: 158564 - DNA, 75 bp, synthetic construct
  source 1..75: mol_type = other DNA
cgggtatctcccgtaagtgttactgcctggcaccgtgctgcaggaacgctttctggttgtggagaggagaccgga

SEQ ID NO: 158565 - DNA, 75 bp, synthetic construct
  source 1..75: mol_type = other DNA
gtcgcagtgaaaaagcgatgattgtcggagatcctctgcaaatagaacctatcagaaatttttctgaaaaccttc

SEQ ID NO: 158566 - DNA, 75 bp, synthetic construct
  source 1..75: mol_type = other DNA
gcacaacaggtagttgcgagagcactggctgttgctgacggaaaagaccagaatctggggatgctggtaacgtcc

SEQ ID NO: 158567 - DNA, 75 bp, synthetic construct
  source 1..75: mol_type = other DNA
aatattccattctgggataattaccacaaatttgttcgccatcagtcagacgattacccgcataaccccaacact

SEQ ID NO: 158568 - DNA, 75 bp, synthetic construct
  source 1..75: mol_type = other DNA
taagcgtagcgcatcaggcatttgtcaccattgccggatgcggcgtgaacgccttatccggcctacgagtggcgc

SEQ ID NO: 158569 - DNA, 75 bp, synthetic construct
  source 1..75: mol_type = other DNA
tgaatgccttatccggcctacgaatggcgcaagaatctgtaggcctgataagcgtagcgcatcaggcatttgtca

SEQ ID NO: 158570 - DNA, 75 bp, synthetic construct
  source 1..75: mol_type = other DNA
gagatgatgacagagcagcatgacgccaccggaggcgataacaccacctacggcgaagcctaccactatgctgac

SEQ ID NO: 158571 - DNA, 75 bp, synthetic construct
  source 1..75: mol_type = other DNA
gcaacccggaccgaccttatattgcaggcgtaaaacacgactcggcacacactgaccatgtgaccattcagaact

SEQ ID NO: 158572 - DNA, 75 bp, synthetic construct
  source 1..75: mol_type = other DNA
atgcggcgtgaacgccttatccggcctacgaatggcgcaagaatctgtaggcctgataagcgtagcgcatcaggc

SEQ ID NO: 158573 - DNA, 75 bp, synthetic construct
  source 1..75: mol_type = other DNA
gaagagttgcgcgttagttacttcgctcaacaacttggtacgccttatccgatttcagataagcgtattttgcag

SEQ ID NO: 158574 - DNA, 75 bp, synthetic construct
  source 1..75: mol_type = other DNA
gagcgcgagttacggcggatgaccggcgttaccgttgaccgcgaagactggcactgggatcaggtgcccgatcac

SEQ ID NO: 158575 - DNA, 75 bp, synthetic construct
  source 1..75: mol_type = other DNA
tctgatgattgaccttgaaacaatgggaaaaaatcctgatgcgccaataaactctatagccggtaagttttttga

SEQ ID NO: 158576 - DNA, 75 bp, synthetic construct
  source 1..75: mol_type = other DNA
aagcgatgggtaaagccaattctgttgaactggcggcacgaattgatatcagccgtgaagaagttctcaacgaac

SEQ ID NO: 158577 - DNA, 75 bp, synthetic construct
  source 1..75: mol_type = other DNA
actcgcttgaacaaatcattcccggtacagctgctgaatttgatttcaatcatcagcaacttaatttgagcattc

SEQ ID NO: 158578 - DNA, 75 bp, synthetic construct
  source 1..75: mol_type = other DNA
ggtcttcgccgtctactgctgctgaatattccatcgccaatcaaatatttacatgaaaagttaccgaacaaagcc

SEQ ID NO: 158579 - DNA, 75 bp, synthetic construct
  source 1..75: mol_type = other DNA
aagatggacttaagccggacgaacagcgcttgctggagctctaccgccagttaccggaagaagagcagcagaaca

SEQ ID NO: 158580 - DNA, 75 bp, synthetic construct
  source 1..75: mol_type = other DNA
cgctaccagtcgtaatattgatgaaaaatataaaaactattacacagcgttaactgaactgattgattatctagg

SEQ ID NO: 158581 - DNA, 75 bp, synthetic construct
  source 1..75: mol_type = other DNA
tctttttctgacggaggtaatacttttatcgttactgcgggtaatcacgcagtcggcgttcttgcgtgtgcatct

SEQ ID NO: 158582 - DNA, 75 bp, synthetic construct
  source 1..75: mol_type = other DNA
acttaacgacggtaatgtttatttatcagcacaaacagcagcgcctgccacaactaacggtatatacaatacgct

SEQ ID NO: 158583 - DNA, 75 bp, synthetic construct
  source 1..75: mol_type = other DNA
aacatgctccgcatctttgccattcgcctgaaagagttggacgagttgtatgagaaatacatgaaggggcgtatt

SEQ ID NO: 158584 - DNA, 75 bp, synthetic construct
  source 1..75: mol_type = other DNA
cgatacttgtcgaacgcctttcagagctgaacgggcgcggtatgaccaaatccgatatggccagggttgctgggg

SEQ ID NO: 158585 - DNA, 75 bp, synthetic construct
  source 1..75: mol_type = other DNA
ttgataaggaaaatttcatggctcttttaagccgaacagataagaaatatgagaataaagaagaggcaagggtta

SEQ ID NO: 158586 - DNA, 75 bp, synthetic construct
  source 1..75: mol_type = other DNA
aagtccacaccagaatggtgaaagaggttctgaaagccgtcgccagaaccagtaatcatccttatcagtccgtat

SEQ ID NO: 158587 - DNA, 75 bp, synthetic construct
  source 1..75: mol_type = other DNA
gaaataataaagaacaatctatcttattcgtcaaaagattatttgttattcaagcattattaactttatttatca

SEQ ID NO: 158588 - DNA, 75 bp, synthetic construct
  source 1..75: mol_type = other DNA
gaggactacatcgcacgttagtcgcagtacgctgaatatggttttgccttcagtattaaaagagatgcctgatgt

SEQ ID NO: 158589 - DNA, 75 bp, synthetic construct
  source 1..75: mol_type = other DNA
cctgctgatcgagcaaaaaatggtgaggagatagacatcccgctagctgatcctgttatcgaatggatcaaggaa

SEQ ID NO: 158590 - DNA, 75 bp, synthetic construct
  source 1..75: mol_type = other DNA
cggataaccgtatcgcccgtgacgcgcactatctttaccggtatgaccgttacggcaggctgacggagaaaaccg

SEQ ID NO: 158591 - DNA, 75 bp, synthetic construct
  source 1..75: mol_type = other DNA
tctccaggagtcggcgaactaatttaattaatacggtccgatactctgggactgagtatattaaaaatgatatca

SEQ ID NO: 158592 - DNA, 75 bp, synthetic construct
  source 1..75: mol_type = other DNA
aaagagcagcttatcgatcgcaaagcggttgccacagtcatcagcaacgttggtgaaggcgcgttttacgatggc

SEQ ID NO: 158593 - DNA, 75 bp, synthetic construct
  source 1..75: mol_type = other DNA
cggattatggtgacagagttgttttccgtaatcaccatgaccgcaatgcgctggcagataaactggatttgattg

SEQ ID NO: 158594 - DNA, 75 bp, synthetic construct
  source 1..75: mol_type = other DNA
acacggcgaatgcggtggcaaccgttatttatactcgtgccatgcaaccacaacttgctgtggtgatggcggcat

SEQ ID NO: 158595 - DNA, 75 bp, synthetic construct
  source 1..75: mol_type = other DNA
gataaagaagatgcaaagagatgcgatgttcctaagaaacacccccgaccttgattgtcatggcatcttcaccaa

SEQ ID NO: 158596 - DNA, 75 bp, synthetic construct
  source 1..75: mol_type = other DNA
ttgcggccgttctctggtctgtcgccgacctgttacgcggcgattttaaacaatcacaatatggccgaattattc

SEQ ID NO: 158597 - DNA, 75 bp, synthetic construct
  source 1..75: mol_type = other DNA
aatccgaagccggatccaaaaccagacccaaaaccggatccgaaaccagacccgactcccgagccaacgccgaca

SEQ ID NO: 158598 - DNA, 75 bp, synthetic construct
  source 1..75: mol_type = other DNA
gcaatactggcggtttcgttgatcttgggacctatgagtatgtcctgaaaagcgatggcaacagcaactggaacc

SEQ ID NO: 158599 - DNA, 75 bp, synthetic construct
  source 1..75: mol_type = other DNA
tctgctggatgctattgtcgcgttgccgaccgatatgttctacaacaccgggattgcgacttacatctgggtact

SEQ ID NO: 158600 - DNA, 75 bp, synthetic construct
  source 1..75: mol_type = other DNA
ggtaaaactttcactctgaatgaaaatgcctgggtacagtcttatgtacggacaacggcattcagggcaaatgca

SEQ ID NO: 158601 - DNA, 75 bp, synthetic construct
  source 1..75: mol_type = other DNA
aagagtccattctcaccttattttgatgaagaatggtttatttctattaatgttgatatggttaagtcttatgga

SEQ ID NO: 158602 - DNA, 75 bp, synthetic construct
  source 1..75: mol_type = other DNA
gaatgatatttacggcaatggtgtacccctgcatcaggtaagcctcagcgtttcgccgagtgaaggcgtgaccct

SEQ ID NO: 158603 - DNA, 75 bp, synthetic construct
  source 1..75: mol_type = other DNA
tgtcacgctgaaaggtaaaaaagcgggcacgcatacggttaccgcaacgctgggtaataacaataccagtgattc

SEQ ID NO: 158604 - DNA, 75 bp, synthetic construct
  source 1..75: mol_type = other DNA
cgaggcctacaacgatttcatttcggtagttgcttacgcccaggcggaatacgactgggaacaccgtaccggctg

SEQ ID NO: 158605 - DNA, 75 bp, synthetic construct
  source 1..75: mol_type = other DNA
ctaatcaacaggtgatttttatcggtgatcaaagtactgctgccctgaccctcagtgtgccctcaggcgagatca

SEQ ID NO: 158606 - DNA, 75 bp, synthetic construct
  source 1..75: mol_type = other DNA
acggtgaacttcaccatgccacaggacgtggcggcaaactttaccctcgaaaataacggtattgccatcacccag

SEQ ID NO: 158607 - DNA, 75 bp, synthetic construct
  source 1..75: mol_type = other DNA
agtcgctgatacagagggcaatgcgatagccaacactgaggtaacatttactctgccggaagatgtgaaggcgaa

SEQ ID NO: 158608 - DNA, 75 bp, synthetic construct
  source 1..75: mol_type = other DNA
ttattaactgtggttcgtcttcgattaaggaaggtgcgaataagcaggtcatttcttcccaagctgactcgctga

SEQ ID NO: 158609 - DNA, 75 bp, synthetic construct
  source 1..75: mol_type = other DNA
ttcgccactccgccattctccctgacaattttcttgtggaacaaagtgttatttaagcaacaagcaaatcattct

SEQ ID NO: 158610 - DNA, 75 bp, synthetic construct
  source 1..75: mol_type = other DNA
atatcacaaaacgattacgccatgacggactgcaggctactcaatatctggctcgattagcgtattggcatgatt

SEQ ID NO: 158611 - DNA, 75 bp, synthetic construct
  source 1..75: mol_type = other DNA
cagttgtctacttacttactgacggccgaccgacagatgacatttcagctgaggttaagcgctggaacgaatttt

SEQ ID NO: 158612 - DNA, 75 bp, synthetic construct
  source 1..75: mol_type = other DNA
ttcagcaggtaaaagacctggtcctttctggctaccacctgaatgatattcatggcctggcttgcccgaccgcat

SEQ ID NO: 158613 - DNA, 75 bp, synthetic construct
  source 1..75: mol_type = other DNA
gtgaagacgcgccgcaggtcatcagcacccgcaacgccgttaaagcgctgcaggcgcaaattgacgccgagcaga

SEQ ID NO: 158614 - DNA, 75 bp, synthetic construct
  source 1..75: mol_type = other DNA
acaccttaaggttgtcaaggtgcataaatgcaaagccccgcaagtgtcgttaccactcgcagggcttataaccac

SEQ ID NO: 158615 - DNA, 75 bp, synthetic construct
  source 1..75: mol_type = other DNA
tggtgatagtgtgttgttggtcatgatactgccctgtaaagcaatgcgccgtagtacctcacaccacggcgctga

SEQ ID NO: 158616 - DNA, 75 bp, synthetic construct
  source 1..75: mol_type = other DNA
caaaaattcatttgcagggtaaggagcaggttaatggtgactcactgttgattaactggaactgtgcagcctcga

SEQ ID NO: 158617 - DNA, 75 bp, synthetic construct
  source 1..75: mol_type = other DNA
tttatcatcagtaaatttttctggagcagtgcttgatgatacagatctcaggatgagtgatttgtctcaggctgt

SEQ ID NO: 158618 - DNA, 75 bp, synthetic construct
  source 1..75: mol_type = other DNA
attttcgcgaagcgtttagccacagcgggctcgattttcttaatcatcttagcaaggatgaaaccgcagaaggct

SEQ ID NO: 158619 - DNA, 75 bp, synthetic construct
  source 1..75: mol_type = other DNA
ggacaacaacaacgttctggatccacaggcacaggcacaggcggcgagcacgttagtgaatacgctgatgggcca

SEQ ID NO: 158620 - DNA, 75 bp, synthetic construct
  source 1..75: mol_type = other DNA
actatctaaaattaagcagtaacggctatttgcgactgaccaactggcgcagcgcacctgaactggacaacgatt

SEQ ID NO: 158621 - DNA, 75 bp, synthetic construct
  source 1..75: mol_type = other DNA
atgtatacgaaatccgtgtgaagagttggtgggtgaacgccggcgatgctttcatgatatacagccttgctgaaa

SEQ ID NO: 158622 - DNA, 75 bp, synthetic construct
  source 1..75: mol_type = other DNA
ggtgttcatacagccgaagccacactgcctaacggcaatagcgattcgaagacagttaatattgctcccgatgcc

SEQ ID NO: 158623 - DNA, 75 bp, synthetic construct
  source 1..75: mol_type = other DNA
gcatcgaagatcggcggtgggttgagcagcaactcaccgacgagaaagagaagtggatcgacgaccgggcgaaag

SEQ ID NO: 158624 - DNA, 75 bp, synthetic construct
  source 1..75: mol_type = other DNA
aggtggcgctatttaccaaacgcaagtacgggtgaagggctggtgggtgaatcatggtaataacctcatgcaatt

SEQ ID NO: 158625 - DNA, 75 bp, synthetic construct
  source 1..75: mol_type = other DNA
tcgctgatgaaggaagcaacccaatcaatgatcataccgtcacgtttgcggtattaagcggatcggcaacttcct

SEQ ID NO: 158626 - DNA, 75 bp, synthetic construct
  source 1..75: mol_type = other DNA
attcttgttgctggcctggcagtgtttattttgatgagccggagatcacgaatgcagccgtgtgccgatgcctga

SEQ ID NO: 158627 - DNA, 75 bp, synthetic construct
  source 1..75: mol_type = other DNA
agtgtgacccgatgtacaaaaatttcatgagcatcaaaaagaaaaaaaaggggtcgtttttacccgatcacaccg

SEQ ID NO: 158628 - DNA, 75 bp, synthetic construct
  source 1..75: mol_type = other DNA
gtcaggcgctgcgtcgtggcggctgtcaggtgctgtatgcggaagataacgtggtggtatttgtccgcgtgctga

SEQ ID NO: 158629 - DNA, 75 bp, synthetic construct
  source 1..75: mol_type = other DNA
gagagattttttattttcaacactctggtgcaacatacctcgcatcactacatctttggttatttatacgctacc

SEQ ID NO: 158630 - DNA, 75 bp, synthetic construct
  source 1..75: mol_type = other DNA
aagtcggccgcacggctcatcgacagcggcaagatcgacaaagccaaagcagaactcgcccgagcactgaacacg

SEQ ID NO: 158631 - DNA, 75 bp, synthetic construct
  source 1..75: mol_type = other DNA
gctgcaagccgcgttgagcgcgaacatcgtcagcgcaaaggcggagtggcccagaaggtggattttgatgaaacc

SEQ ID NO: 158632 - DNA, 75 bp, synthetic construct
  source 1..75: mol_type = other DNA
ggacagaacgtgggtgcaggatgttcatgtgattgctacccacggtccactcaccatggctgagggtttcgcctg

SEQ ID NO: 158633 - DNA, 75 bp, synthetic construct
  source 1..75: mol_type = other DNA
catgttcgtgaatggctggaagcgagagcacctcatccggtcattgttcagatcggaatgttacgtccggagaaa

SEQ ID NO: 158634 - DNA, 75 bp, synthetic construct
  source 1..75: mol_type = other DNA
tattgcggtaatattaactgtattgaaaccttcatttccggcaccgggtttgcccgtcgtttcccggctgaattg

SEQ ID NO: 158635 - DNA, 75 bp, synthetic construct
  source 1..75: mol_type = other DNA
gcacgctcaatcagcccagtgccattcagcgtagggatcgggttgccgggtgccatcgacccgcaaagcgggcta

SEQ ID NO: 158636 - DNA, 75 bp, synthetic construct
  source 1..75: mol_type = other DNA
cgttacgcctatggcaacccggcaggaaaaatggcaacgaccgatgatgcgaattcgtttgaaatcggtgaaaaa

SEQ ID NO: 158637 - DNA, 75 bp, synthetic construct
  source 1..75: mol_type = other DNA
aggcgattaaagtatccggggacagcaatatcaccaccacagcaatcactgccaatggagataaggggttaaaaa

SEQ ID NO: 158638 - DNA, 75 bp, synthetic construct
  source 1..75: mol_type = other DNA
acgctaccggtgcccggcaggatgcgaaaatggccgcaacgggggttatcttcggaccggaaggaactgtgaaag

SEQ ID NO: 158639 - DNA, 75 bp, synthetic construct
  source 1..75: mol_type = other DNA
tcctccagtatgcagggtgcaggtttcgcactgaaagactctgatgataaggaagtgaaacagtctcttgggcag

SEQ ID NO: 158640 - DNA, 75 bp, synthetic construct
  source 1..75: mol_type = other DNA
gatattgcactcatttataactcaaaaaacaaatattttagaggcaaaagataatattgctaatcttcttaatct

SEQ ID NO: 158641 - DNA, 75 bp, synthetic construct
  source 1..75: mol_type = other DNA
ttcagacgccgttaaggggaattcacgtcaatggagttataggaaagggtaataaagggccgctaactcaaatcg

SEQ ID NO: 158642 - DNA, 75 bp, synthetic construct
  source 1..75: mol_type = other DNA
cattgctgaagccataaaccagtctggctggaaaattaaagcggataaagataccggtggtgttatcgagggaaa

SEQ ID NO: 158643 - DNA, 75 bp, synthetic construct
  source 1..75: mol_type = other DNA
aggaagcatcgcgtaaaaacgcattaacgcatttgcaactgtcggcgcttttccagtatgttgctaaagatttta

SEQ ID NO: 158644 - DNA, 75 bp, synthetic construct
  source 1..75: mol_type = other DNA
aagctggcagagcttcacctggccggggaatacttactatcctggtgtgtcgctcagctggcggagtgtaagcag

SEQ ID NO: 158645 - DNA, 75 bp, synthetic construct
  source 1..75: mol_type = other DNA
gccctgacgtctgaagccgcgggtccacgttttcgtgggacggcagtgagcctgatgtattgcggtgtccccatt

SEQ ID NO: 158646 - DNA, 75 bp, synthetic construct
  source 1..75: mol_type = other DNA
aagcaaattggccagcggaatgctgagtccgggttatatcaggagatgcttaagcgcgtggccagcaactggcct

SEQ ID NO: 158647 - DNA, 75 bp, synthetic construct
  source 1..75: mol_type = other DNA
cagcactgacgaagtcgttcctggaatgtttacgcgtcaggcctgggaagagcaggtacaggatgcgattgacga

SEQ ID NO: 158648 - DNA, 75 bp, synthetic construct
  source 1..75: mol_type = other DNA
tcaggaaacccacggcaccaattacagcgatggattcagccgcgacaactggtttaaccaatacgaatttgacgc

SEQ ID NO: 158649 - DNA, 75 bp, synthetic construct
  source 1..75: mol_type = other DNA
tttatttaaatggtctcgtatctggcgataaagttattgaggctaccactgaaaatgacatgcgagagcttgctc

SEQ ID NO: 158650 - DNA, 75 bp, synthetic construct
  source 1..75: mol_type = other DNA
cgctggcgcaactgggatgcacttccattgcccagttagggccgcatttgctgcgttttcagcctgctatggcgg

SEQ ID NO: 158651 - DNA, 75 bp, synthetic construct
  source 1..75: mol_type = other DNA
gtgctgacagatgctacgcaacgggatttatccgtcacgctgtgtggacagaagctggctgcgcccttgtttatc

SEQ ID NO: 158652 - DNA, 75 bp, synthetic construct
  source 1..75: mol_type = other DNA
attgctgtgttccaggccttctcacgggtgatccgtgaagcgggtaaacggtttgtcgtcatggatacggcaccg

SEQ ID NO: 158653 - DNA, 75 bp, synthetic construct
  source 1..75: mol_type = other DNA
tctttacgacccgctgtgccgcagggtggcaaaacgggtatggcgacgtgaacgggacctgacgggctggatgtc

SEQ ID NO: 158654 - DNA, 75 bp, synthetic construct
  source 1..75: mol_type = other DNA
cgataaaattattgaggctactactgaaaatgatatgcgggagttagctcgtatttttttaagctatacaaatta

SEQ ID NO: 158655 - DNA, 75 bp, synthetic construct
  source 1..75: mol_type = other DNA
tatcaacatgttaaagacaattgctactattctgatattaatgtaataaagccaacaggggcgaattttgatgta

SEQ ID NO: 158656 - DNA, 75 bp, synthetic construct
  source 1..75: mol_type = other DNA
aacttgacgaagaatatgaagatgaagatgaagatgaagatgaagatgaagatgaagactcgaatataaactcga

SEQ ID NO: 158657 - DNA, 75 bp, synthetic construct
  source 1..75: mol_type = other DNA
ggatatgacggtcagcagtaccgagaacagtatttcaattaatgctgctaaagaacttatattgaattgtaatgg

SEQ ID NO: 158658 - DNA, 75 bp, synthetic construct
  source 1..75: mol_type = other DNA
catcagcgccacagaaaaagccgcaacgccggtcattcctcctgctgatgacaacgcctttaacggcagcctgag

SEQ ID NO: 158659 - DNA, 75 bp, synthetic construct
  source 1..75: mol_type = other DNA
ggagggtatttaaaacggaggcgtctgtgcagaggtgcaatgtatgttagattaacaacaatgcgaatgttagat

SEQ ID NO: 158660 - DNA, 75 bp, synthetic construct
  source 1..75: mol_type = other DNA
aaaaccttacgttaatttgcaattttttgtccctgttataccgctcagcgatataatggcaaaaaatgatggtgt

SEQ ID NO: 158661 - DNA, 75 bp, synthetic construct
  source 1..75: mol_type = other DNA
ttgaatatggcggcagcgtatacgatattgataatttacgaattgttacccccagactacacgatgagattcact

SEQ ID NO: 158662 - DNA, 75 bp, synthetic construct
  source 1..75: mol_type = other DNA
tgagtttgtaaaaagatggaacgagcagatagtggcgaatggtggttcaatggccagacgttctgtttgtaaaga

SEQ ID NO: 158663 - DNA, 75 bp, synthetic construct
  source 1..75: mol_type = other DNA
caggctgctatcccgctggtattacacggcggctcagggattagcgatgccgatttccgccgcgccatcgaactg

SEQ ID NO: 158664 - DNA, 75 bp, synthetic construct
  source 1..75: mol_type = other DNA
ctataaaaatatcgtcatcgacgactatgtcgcggcccttcatgcattgcttctgcattttggaaagccagtaga

SEQ ID NO: 158665 - DNA, 75 bp, synthetic construct
  source 1..75: mol_type = other DNA
cacacattctatctcgaagcggattacacgcagagtaacctctttgatcagaagcaagtcaacggaggatatcgc

SEQ ID NO: 158666 - DNA, 75 bp, synthetic construct
  source 1..75: mol_type = other DNA
tacgggaaagcatatttcggcagcttgatgcagccagaccaagtcagagtagtgtggatacatggagccagcgcg

SEQ ID NO: 158667 - DNA, 75 bp, synthetic construct
  source 1..75: mol_type = other DNA
agagcgctatcgccgctttgtgctggaaaatcagggcaaaggattagacgctgagggactagcagtgctggagga

SEQ ID NO: 158668 - DNA, 75 bp, synthetic construct
  source 1..75: mol_type = other DNA
atactttggatttaccgaaacttgcctcactggtagatgaactcagcctgacaggtaaaggtctggtaatggcaa

SEQ ID NO: 158669 - DNA, 75 bp, synthetic construct
  source 1..75: mol_type = other DNA
gacgaaggtgattatcgtgacgcttgccgaaacgacacctgtactggaagcagcaaacctgcaacaggatttgcg

SEQ ID NO: 158670 - DNA, 75 bp, synthetic construct
  source 1..75: mol_type = other DNA
agtatgcaaagcgcattgcattagcagcactgcaaaatgaagaacccgtaggtacggctctgctggaaaaaatgg

SEQ ID NO: 158671 - DNA, 75 bp, synthetic construct
  source 1..75: mol_type = other DNA
ctgcgaaaccgtcctcaccgttcctggtaacccgagccagtcgcgaactgccgctgataaatgacgttacagagc

SEQ ID NO: 158672 - DNA, 75 bp, synthetic construct
  source 1..75: mol_type = other DNA
ttgccatcaatggtgtgctgccgccgtttgcgggtgaggatgatccactggcgcaaagcattctggctcgggaag

SEQ ID NO: 158673 - DNA, 75 bp, synthetic construct
  source 1..75: mol_type = other DNA
acccggatatccgagctggatgtgtatgaaagcgcctgtaatgaaggggcaggggtacatgacgttagccgggca

SEQ ID NO: 158674 - DNA, 75 bp, synthetic construct
  source 1..75: mol_type = other DNA
catgctcgtcacccagggtgaaaattcgcatggtattgatatgcaaattgagtctggtggtggtgacttaacagt

SEQ ID NO: 158675 - DNA, 75 bp, synthetic construct
  source 1..75: mol_type = other DNA
aataccggggaaatttcagcctcagatattggaataaattttaacactggagtgcaaggcgatgttttcaatgct

SEQ ID NO: 158676 - DNA, 75 bp, synthetic construct
  source 1..75: mol_type = other DNA
tcagttactgggaaagagtttccgggatttatatttgatgcgacaggatcttttggtagtgaatttcttggtgga

SEQ ID NO: 158677 - DNA, 75 bp, synthetic construct
  source 1..75: mol_type = other DNA
acgtcggaattgcgatgggtggtgcattctttaccgatggtccaaatacaggctctattggaggggctgctgccg

SEQ ID NO: 158678 - DNA, 75 bp, synthetic construct
  source 1..75: mol_type = other DNA
tatggattgagccaacctggtagtgaaaatcagtcatgggattataaaggtagcgcatcttcattcatgacaggg

SEQ ID NO: 158679 - DNA, 75 bp, synthetic construct
  source 1..75: mol_type = other DNA
atggtaatctgaatgcaggtaaaaatctttattttacaggcgaaaatggcattattgatttaaaagataatgtta

SEQ ID NO: 158680 - DNA, 75 bp, synthetic construct
  source 1..75: mol_type = other DNA
gaaattttatagtatccgaaaaaggtttaagactaattgacctttcaggtaaaaaaacaaccgctgttttaaaag

SEQ ID NO: 158681 - DNA, 75 bp, synthetic construct
  source 1..75: mol_type = other DNA
tccaattttcagtattccttatcataaagctttttcccagaatttcgtttctggtattctggatatactcatttc

SEQ ID NO: 158682 - DNA, 75 bp, synthetic construct
  source 1..75: mol_type = other DNA
tcttgcctctccagtatttcaggaataggtaacctgtattatgcttgttcacaggcatttcctgtcgcgcttgat

SEQ ID NO: 158683 - DNA, 75 bp, synthetic construct
  source 1..75: mol_type = other DNA
ggctgtcattcaatggctggtatctcgataccatgcgctgccagttgcacaatccgcttcagcaacatgtcgagt

SEQ ID NO: 158684 - DNA, 75 bp, synthetic construct
  source 1..75: mol_type = other DNA
ggctgtcatttaatggctggtatctcgataccacacgctgccagctacacaatccgcgacagcaacttgttgagc

SEQ ID NO: 158685 - DNA, 75 bp, synthetic construct
  source 1..75: mol_type = other DNA
ggctggacttccgtcggggctcgtccctgatgccaggcagccgctggcagaagatgagtccctcgagggattctt

SEQ ID NO: 158686 - DNA, 75 bp, synthetic construct
  source 1..75: mol_type = other DNA
cggaaagcaaagcggaaaagtaaaagcatctttttaaaaaaaacaaaaagtgaactcatcttaggtgagaacata

SEQ ID NO: 158687 - DNA, 75 bp, synthetic construct
  source 1..75: mol_type = other DNA
caaaagcattgacaaaatggtggaacgatacagcatcacaaagaatatttgactctctaatattgaataatccgg

SEQ ID NO: 158688 - DNA, 75 bp, synthetic construct
  source 1..75: mol_type = other DNA
caatgagtttgagattcttacttccgtaattgagggcgcccgaattgtcggcattggcgagggcgctcattttgt

SEQ ID NO: 158689 - DNA, 75 bp, synthetic construct
  source 1..75: mol_type = other DNA
atcttgatttgatggctcagcgcactcctggtattgaaggagtcgacgagaaagaggcatttagccgtttattac

SEQ ID NO: 158690 - DNA, 75 bp, synthetic construct
  source 1..75: mol_type = other DNA
atgatgactaaaataaagttattgatgctcattatattttatttaatcatttcggccagcgcccatgctgccgga

SEQ ID NO: 158691 - DNA, 75 bp, synthetic construct
  source 1..75: mol_type = other DNA
ggttacagaaacggttgattatttgaaaaactctgagaaaaaaagcaggtgtgttttagtatatgcaacttcgga

SEQ ID NO: 158692 - DNA, 75 bp, synthetic construct
  source 1..75: mol_type = other DNA
agaggtaagatccattttagatggacatatatatttgagcagaaatctagcccaaaaaggacaatttcctgcaat

SEQ ID NO: 158693 - DNA, 75 bp, synthetic construct
  source 1..75: mol_type = other DNA
atggatgacaaggagttgcacgattacctgcacagtatgagcaaaaaagaacgccgggaactggcagcaaggtta

SEQ ID NO: 158694 - DNA, 75 bp, synthetic construct
  source 1..75: mol_type = other DNA
gccggggcagcagtatgatgaggagtccggcctgtattataaccgccaccgctattatgacccgctgcgggggag

SEQ ID NO: 158695 - DNA, 75 bp, synthetic construct
  source 1..75: mol_type = other DNA
aaccggatctaccggaatgcacagagatgtaccacgggaagacgtgaccatcattagcgtcgaaattgaagaacc

SEQ ID NO: 158696 - DNA, 75 bp, synthetic construct
  source 1..75: mol_type = other DNA
ccgaattttttaggactgaaggacataaagtagcgctttttattgattcattaacaaggtatgccagagcattac

SEQ ID NO: 158697 - DNA, 75 bp, synthetic construct
  source 1..75: mol_type = other DNA
ctgtgagcggtgaacttatcgcaggtgcaatcgcgaaggttttatatccggatgagaaagacctgtcgaagctga

SEQ ID NO: 158698 - DNA, 75 bp, synthetic construct
  source 1..75: mol_type = other DNA
tgcacgtttacaaataaataaaaaaggaattgcatatgttataaattcaataaagcatccagaagaggtgtataa

SEQ ID NO: 158699 - DNA, 75 bp, synthetic construct
  source 1..75: mol_type = other DNA
tcattaccggctttaaacatctctcatcgtcacaggacgaagcccgttacgaagtacggctggagccgcgtatgg

SEQ ID NO: 158700 - DNA, 75 bp, synthetic construct
  source 1..75: mol_type = other DNA
ccgggagaatataacgttaaggccggatattacgggcgtaaaccaaaggcgaagctgacgccggagctgatggcg

SEQ ID NO: 158701 - DNA, 75 bp, synthetic construct
  source 1..75: mol_type = other DNA
aaccgtacttgatcacctgcctcacggcagcttcttccacgccacgggcggcagtgtcggcatgctgatccatga

SEQ ID NO: 158702 - DNA, 75 bp, synthetic construct
  source 1..75: mol_type = other DNA
ttgatagaatccggcgcggcaaacaccatcgctgaaactgtggtgaaaaaagtgggggaaagccgggcgctttta

SEQ ID NO: 158703 - DNA, 75 bp, synthetic construct
  source 1..75: mol_type = other DNA
cttatgaatttcattcagaatcaataactaatgatgaaaaaaaccaaggaaaggtgcttttcgaaccttttattg

SEQ ID NO: 158704 - DNA, 75 bp, synthetic construct
  source 1..75: mol_type = other DNA
gaaaggcttactcatttttgaaactgttgccagagactggcactcaagcaacagaacctggtcagacagtcacag

SEQ ID NO: 158705 - DNA, 75 bp, synthetic construct
  source 1..75: mol_type = other DNA
gaaatgcgaaacctactgaaaagcccgtcaagttaacagatggggatggtatgcatctcctggttcaccctacgg

SEQ ID NO: 158706 - DNA, 75 bp, synthetic construct
  source 1..75: mol_type = other DNA
atatcgcttggacattaccctcaaacgacacttgtggatgctcggaggaaacgagatgcagccagaagattgctg

SEQ ID NO: 158707 - DNA, 75 bp, synthetic construct
  source 1..75: mol_type = other DNA
gcggtagaactgtcaggacggcttgaggttgcttcacgattacaacagcgaaccacggcaattatgcgctatgcc

SEQ ID NO: 158708 - DNA, 75 bp, synthetic construct
  source 1..75: mol_type = other DNA
acaaccctgctcaggagatggcaggagctattgcggtagctaaaagagtccacaggccagctttgccattcgaac

SEQ ID NO: 158709 - DNA, 75 bp, synthetic construct
  source 1..75: mol_type = other DNA
gcgttgatcgaatcgggaaaatggtcaagggatgctgttgaacggcagatgagccaccaagagcgaaactccgtt

SEQ ID NO: 158710 - DNA, 75 bp, synthetic construct
  source 1..75: mol_type = other DNA
ggcattgaggtggtgaacagcggtgcgccgtcgggtgttattcctgatgtccagcctgatcacggtgaaacggtg

SEQ ID NO: 158711 - DNA, 75 bp, synthetic construct
  source 1..75: mol_type = other DNA
acatgcgttgcactattttatttttatggcaatcaaatttaatctatgcggcaaaaacactttatttgggtagtt

SEQ ID NO: 158712 - DNA, 75 bp, synthetic construct
  source 1..75: mol_type = other DNA
atttaatcaacaggaatacagactgcagcacgggtgttcctgaccaggttaacgcactggtggctaccatggcgg

SEQ ID NO: 158713 - DNA, 75 bp, synthetic construct
  source 1..75: mol_type = other DNA
tggccgtttcatatggttatctttggtgttgtatatattttggttggcatgtcttttatgcttatgttttctttt

SEQ ID NO: 158714 - DNA, 75 bp, synthetic construct
  source 1..75: mol_type = other DNA
gttgaaaatccatcatcaacgggcactgagattggatgtgcattattcttacagtttttaggactgttattatat

SEQ ID NO: 158715 - DNA, 75 bp, synthetic construct
  source 1..75: mol_type = other DNA
atgtcgggaacctgtgatgatcattctaggtggtgatccgtcaggggcatacactctttgcgccaatgtattccc

SEQ ID NO: 158716 - DNA, 75 bp, synthetic construct
  source 1..75: mol_type = other DNA
cagcacctttgaactgattaatgccgctcctgctgaggtttatagctatagctatgaatcttctcgtggtgatgc

SEQ ID NO: 158717 - DNA, 75 bp, synthetic construct
  source 1..75: mol_type = other DNA
tgttaacgttgttacagagaatagccaaatggttgtaaaccacggcgttggcttctctgttcaaatcactgtgaa

SEQ ID NO: 158718 - DNA, 75 bp, synthetic construct
  source 1..75: mol_type = other DNA
gccggtacaggggatgccggtgcaggtccccctgcgcaccctgcacggcgtcatcaccggctttaaacacctctc

SEQ ID NO: 158719 - DNA, 75 bp, synthetic construct
  source 1..75: mol_type = other DNA
ctcaacgttgtttcaccgagtgaatatgctgtcggtaagatgcaaatacactcacaaaatttttcgcatcttgct

SEQ ID NO: 158720 - DNA, 75 bp, synthetic construct
  source 1..75: mol_type = other DNA
gtcggcacgcattttacggtgttctctgcctactcccggaatgagtgggcgaccgtgatgaaagacatccctccc

SEQ ID NO: 158721 - DNA, 75 bp, synthetic construct
  source 1..75: mol_type = other DNA
gtgaagatgtgatccgtccttctgatgttcaaggcaaacgtaagcctggcactgatttccaggaaacactcactg

SEQ ID NO: 158722 - DNA, 75 bp, synthetic construct
  source 1..75: mol_type = other DNA
ggatgcctggagaaagcgaaaaacggtgacgatatcccggataaggtgaagtttctgaacaccgtgggagcagcc

SEQ ID NO: 158723 - DNA, 75 bp, synthetic construct
  source 1..75: mol_type = other DNA
ttattacaatgaggcaataagagaggaaccgagaggctttctggacagaaccttttcctccagctcatggccttt

SEQ ID NO: 158724 - DNA, 75 bp, synthetic construct
  source 1..75: mol_type = other DNA
gtgattgagttaagtgcccatcacaatatgatcactgaccttatattacacaatcatcccaggatgaaaacaatc

SEQ ID NO: 158725 - DNA, 75 bp, synthetic construct
  source 1..75: mol_type = other DNA
acgccggcgcgaaaaatccacctgtaccactgcgaccatcgcggcctgccgctggcgcttgtcagcacggaaggg

SEQ ID NO: 158726 - DNA, 75 bp, synthetic construct
  source 1..75: mol_type = other DNA
cagcaagctgcgcgcagctggtgctgaagaagctgctgtcaaatttgctgatgctctcggtggcgcagttgctac

SEQ ID NO: 158727 - DNA, 75 bp, synthetic construct
  source 1..75: mol_type = other DNA
gccgtcggtgctccggaacgtcgcaacatcctcatggttggtgatggttccttccagctgacggctcaggaagtc

SEQ ID NO: 158728 - DNA, 75 bp, synthetic construct
  source 1..75: mol_type = other DNA
ataacccacattgatactaataatacatccgatattggaactttattccccataataaaacagagcaaaacttaa

SEQ ID NO: 158729 - DNA, 75 bp, synthetic construct
  source 1..75: mol_type = other DNA
acatccagaaaaaaatgaacttaactggatgctcgaattaaataaatggaaagcagaacgtatacttacaggtga

SEQ ID NO: 158730 - DNA, 75 bp, synthetic construct
  source 1..75: mol_type = other DNA
agggcagcgggtttaatgaactgaagtttgacgatgcgacagggaaagaacaggtctacatccacgcgcagaaga

SEQ ID NO: 158731 - DNA, 75 bp, synthetic construct
  source 1..75: mol_type = other DNA
atgaaattcccttcaatatttaacaaaataaaaccacaatccatacagcaacatccagaaaaaaatcaacttaac

SEQ ID NO: 158732 - DNA, 75 bp, synthetic construct
  source 1..75: mol_type = other DNA
attctttcgcctggtgcatttgaagatcactctgacggattagatgtggataacgaattgtttcactatactatt

SEQ ID NO: 158733 - DNA, 75 bp, synthetic construct
  source 1..75: mol_type = other DNA
cttaaattttttaaatgtttctgggaagaacaattgccctactatccagctcatgttatttaatttgttttcccc

SEQ ID NO: 158734 - DNA, 75 bp, synthetic construct
  source 1..75: mol_type = other DNA
ccagcaacaagcgctggagtgaagaccatcgatctcgcgttcttcgatatcttgagctttatatcttccctcata

SEQ ID NO: 158735 - DNA, 75 bp, synthetic construct
  source 1..75: mol_type = other DNA
gcaacaaacgcgcgaagtgctggagaaaatcgacacattacttgctgaagctggcagtgataaatttcatctctt

SEQ ID NO: 158736 - DNA, 75 bp, synthetic construct
  source 1..75: mol_type = other DNA
aagccgaccccggcctgctgtatgcaggacagtggcaggatgcggaatcagggctgtgctataaccggttccggt

SEQ ID NO: 158737 - DNA, 75 bp, synthetic construct
  source 1..75: mol_type = other DNA
gccattcagaaaggtttgattaaatataatccggcattcgatctggatggtgttgtaaccccggttgttgctcaa

SEQ ID NO: 158738 - DNA, 75 bp, synthetic construct
  source 1..75: mol_type = other DNA
gatgatgcagtggtggtcagattatcttgatgcaaaccgtgaaggatatattgcaccctatatatatgtacgcca

SEQ ID NO: 158739 - DNA, 75 bp, synthetic construct
  source 1..75: mol_type = other DNA
tctccctctctgatgcgcgacagcagcgtgaaggtgtccgtaaaatgctggcgctgaatatcaacccggtacagc

SEQ ID NO: 158740 - DNA, 75 bp, synthetic construct
  source 1..75: mol_type = other DNA
atagctaatcatgactttgtgttttttggcgttgaaatctctagccatcagaaaaaacaccccctgaatacaaaa

SEQ ID NO: 158741 - DNA, 75 bp, synthetic construct
  source 1..75: mol_type = other DNA
tgaggatgggacgctgaacacatatcgcagattctccagtgacaagtctccagtagacatccttacaccatggtt

SEQ ID NO: 158742 - DNA, 75 bp, synthetic construct
  source 1..75: mol_type = other DNA
cttgcggtacattacgctcgtttttcagggaactcatggaactcacaatggcagtcagttgtatttagaacactt

SEQ ID NO: 158743 - DNA, 75 bp, synthetic construct
  source 1..75: mol_type = other DNA
ccaggttagggggttagcttttacctctctttcggatttttgtgagcctcaacctttttggtgcatcactaacgg

SEQ ID NO: 158744 - DNA, 75 bp, synthetic construct
  source 1..75: mol_type = other DNA
catccaaaaaaggaaaataaaaaggttaggagttagagattcagatactgacatatacgatgatgtcatcttagg

SEQ ID NO: 158745 - DNA, 75 bp, synthetic construct
  source 1..75: mol_type = other DNA
cgtcgaactgtggaaagtgttcaacgtcgcgggcgcgaaaaccgaagccacccagggaattgtggtgatcttaca

SEQ ID NO: 158746 - DNA, 75 bp, synthetic construct
  source 1..75: mol_type = other DNA
tgccgggatcaccactgcgccgatggcctgttttgtcgccgctgtacgtgcactggcggagatcgtcgcaaagga

SEQ ID NO: 158747 - DNA, 75 bp, synthetic construct
  source 1..75: mol_type = other DNA
ggccatgttattgctgataggtcactggtatgccaacagagaatcagtggccgtcggtcagaccgttgcagaggt

SEQ ID NO: 158748 - DNA, 75 bp, synthetic construct
  source 1..75: mol_type = other DNA
acgtccagacatggacaaggcgaacgctctatgaaaaccaaagctcccctggctacgcagacgacccggacccga

SEQ ID NO: 158749 - DNA, 75 bp, synthetic construct
  source 1..75: mol_type = other DNA
atgggattaatggcctcattcgaacgtggaatggaacgttttcttgttccagttgctatcaagttaaactcacaa

SEQ ID NO: 158750 - DNA, 75 bp, synthetic construct
  source 1..75: mol_type = other DNA
gatactgacggtgcaggttccggcctggcacgtaggtgtactgaaaatcgatggtgaaacgcaggcgctgttacc

SEQ ID NO: 158751 - DNA, 75 bp, synthetic construct
  source 1..75: mol_type = other DNA
tactggcgtgtagaggatgatttgacactggtgcggatgaatacgcagcaagtccaggtacaaacggaggtgatg

SEQ ID NO: 158752 - DNA, 75 bp, synthetic construct
  source 1..75: mol_type = other DNA
ttttgaagagttaaatgttaatcttgatatgttttataaagtattatggcgacatattgtaattatggaattatt

SEQ ID NO: 158753 - DNA, 75 bp, synthetic construct
  source 1..75: mol_type = other DNA
gccgctgtcgccggaaatgctgagcgagtcgctggcgcgcgagtgggacgaatggctgccgggccacgtctgggt

SEQ ID NO: 158754 - DNA, 75 bp, synthetic construct
  source 1..75: mol_type = other DNA
ttattaggttctgcagagcgttgttctcttcaggtagcagaagataatcatgataaaattaataaatttggtgca

SEQ ID NO: 158755 - DNA, 75 bp, synthetic construct
  source 1..75: mol_type = other DNA
gcgcagaacctgacaagtgccgataacgaaaagatgtggcaggcgcaggggcgaatgctcaccgcacaaagcctg

SEQ ID NO: 158756 - DNA, 75 bp, synthetic construct
  source 1..75: mol_type = other DNA
ggggagctatggcgtaattttgttgttaatccttctttagcgagcccaattgttcgaggtgatgaagtagattca

SEQ ID NO: 158757 - DNA, 75 bp, synthetic construct
  source 1..75: mol_type = other DNA
tatcgctggcagcaggcttcggagcgtatggctgaacggctgggggagatacagaaacgggtaatcactgtctgt

SEQ ID NO: 158758 - DNA, 75 bp, synthetic construct
  source 1..75: mol_type = other DNA
atgcacacttttgccagtctgatgtacgatgtttacgagtccttcggcctgttccagaaaggggctcgccaagca

SEQ ID NO: 158759 - DNA, 75 bp, synthetic construct
  source 1..75: mol_type = other DNA
cctgtatcgcagggcgcgttaatggcgaactggttgatgcttgcgatctgattgaaaacgacgcacaactgtcca

SEQ ID NO: 158760 - DNA, 75 bp, synthetic construct
  source 1..75: mol_type = other DNA
gtgtcgtttcagtaacacttcttcttcgtaaagaaactaatgagaaacttgttgcagctgcaaaagcagcagggc

SEQ ID NO: 158761 - DNA, 75 bp, synthetic construct
  source 1..75: mol_type = other DNA
tgagcccaaattcgtttatcttgactccagtttgcttgggggaatagctgaattatctaaagagatatctacaga

SEQ ID NO: 158762 - DNA, 75 bp, synthetic construct
  source 1..75: mol_type = other DNA
tgtctttagaaaaatcaaattatggtggaagtatcgtttcacgatcaaatctaaaaggattaaaacataatacag

SEQ ID NO: 158763 - DNA, 75 bp, synthetic construct
  source 1..75: mol_type = other DNA
cttcctgtttatcgcgtaattgaaaacatccgtgagagttcatcacagaaagcaggtgcgctgaatgctcccata

SEQ ID NO: 158764 - DNA, 75 bp, synthetic construct
  source 1..75: mol_type = other DNA
tggataatcagacacgttctgtctgtatcgcagaatttaatcagaattttgaacggctggattatcacgaatata

SEQ ID NO: 158765 - DNA, 75 bp, synthetic construct
  source 1..75: mol_type = other DNA
attcctgctgttattcaagttgctgtactaagggcgaaagtcaataataatattaaagacagcgatattaccttg

SEQ ID NO: 158766 - DNA, 75 bp, synthetic construct
  source 1..75: mol_type = other DNA
ccgcctgcggtagcgcgttcatttaaagttttattgccaatatttttgtcatggtgttcttttccgcacttaatt

SEQ ID NO: 158767 - DNA, 75 bp, synthetic construct
  source 1..75: mol_type = other DNA
tctaccgacttaatgttatcccgataactctgccaccgctgcgtgaacgtcaggaagatattgaactactggtgc

SEQ ID NO: 158768 - DNA, 75 bp, synthetic construct
  source 1..75: mol_type = other DNA
aaggaacattagtaatagatctatcaacaaagaacaaggagataatatcgcaagctgctgcaatggaacaaatcg

SEQ ID NO: 158769 - DNA, 75 bp, synthetic construct
  source 1..75: mol_type = other DNA
tattgcgactgctgatggcgcgggtggcggaacagtacggtaaaaacgaaatggcgctcctgctgctggaagaac

SEQ ID NO: 158770 - DNA, 75 bp, synthetic construct
  source 1..75: mol_type = other DNA
cacatatcgatgattttggtgaattactgcgtcgtgaaggttgtcgtggattttttgttcacaccgggcgtacgg

SEQ ID NO: 158771 - DNA, 75 bp, synthetic construct
  source 1..75: mol_type = other DNA
caggggaatgcgggttatccgcaattcccgctacagcggcgacggagggctggacggacaggtgctgattgacgg

SEQ ID NO: 158772 - DNA, 75 bp, synthetic construct
  source 1..75: mol_type = other DNA
gacggtcgttcgtaatgcgtcttacagcggagatggcggcactgacggacaggtcattattgatgacgaatgctg

SEQ ID NO: 158773 - DNA, 75 bp, synthetic construct
  source 1..75: mol_type = other DNA
aaatcaggcagatccatctgttaccgtttcatcagtacggcgaaccgaaataccgcctgctggggaaaacatggt

SEQ ID NO: 158774 - DNA, 75 bp, synthetic construct
  source 1..75: mol_type = other DNA
gcagatataagtaacagcgtcgtcaatcagtatctggaaagggagtgtgaactgacggagtatacaccgacaaaa

SEQ ID NO: 158775 - DNA, 75 bp, synthetic construct
  source 1..75: mol_type = other DNA
cgttatcgtgccacggcctcacgggtaatgaagcggctgaacgaattgcagggcgatgcccggcggctgaaatat

SEQ ID NO: 158776 - DNA, 75 bp, synthetic construct
  source 1..75: mol_type = other DNA
gtcaggggaataagagtggggttgccgatatgactatagtcaatagtacgcaaaagactcatagtattgatgaga

SEQ ID NO: 158777 - DNA, 75 bp, synthetic construct
  source 1..75: mol_type = other DNA
cagacatgggtggatcgaatgaatctggcgttgccggatctgatggtcgctcagactcacacccgcgcgtcttta

SEQ ID NO: 158778 - DNA, 75 bp, synthetic construct
  source 1..75: mol_type = other DNA
tgttaacgttgttacagagaatagccagatggttgtaaaccacggtgtaggcttctccgttcaaatcactgttaa

SEQ ID NO: 158779 - DNA, 75 bp, synthetic construct
  source 1..75: mol_type = other DNA
ccgcgaacgtaacgaagttgaacaggatgtagaagttgcggtgcgtgaaaaaaatcgcgatgcgctaccgcacac

SEQ ID NO: 158780 - DNA, 75 bp, synthetic construct
  source 1..75: mol_type = other DNA
aatggctgccgacactcattcacatgcctgttttgatatgccaagatgggatgaactaaatacatttcctcatgg

SEQ ID NO: 158781 - DNA, 75 bp, synthetic construct
  source 1..75: mol_type = other DNA
catatgaccttgctaacgggaaatataccgctcaggacgctacgacagcacaaaaagggattgtccagctaagca

SEQ ID NO: 158782 - DNA, 75 bp, synthetic construct
  source 1..75: mol_type = other DNA
aatacgaatagataattgtctggagaagcttgacctgctaacgggttatttgtatgaaatacagaatgctgatgg

SEQ ID NO: 158783 - DNA, 75 bp, synthetic construct
  source 1..75: mol_type = other DNA
tgatgcagaaaaagccagacagcatgctgaaaaggccaggctgacgcaggagagcgccggagagatccttaagcg

SEQ ID NO: 158784 - DNA, 75 bp, synthetic construct
  source 1..75: mol_type = other DNA
agcaaagggagagcgcggtgagaccggacctgcggggccgaaaggggaacccggggaacgtggtccgcaaggatt

SEQ ID NO: 158785 - DNA, 75 bp, synthetic construct
  source 1..75: mol_type = other DNA
ctgagtgaagttaagattattcttgaaaagggatacaaggatgcgctaaaagcattcgcagataatgaaaataaa

SEQ ID NO: 158786 - DNA, 75 bp, synthetic construct
  source 1..75: mol_type = other DNA
ctgagcctggtgtactggaacagacggcccgggcttacattgaatcctatggtgccattgaacgtcatcttgggt

SEQ ID NO: 158787 - DNA, 75 bp, synthetic construct
  source 1..75: mol_type = other DNA
gtatcctgaagtgctgtcgttggtatttgatgcagctaacacatacaacgctgagcctggtgtactggaacagac

SEQ ID NO: 158788 - DNA, 75 bp, synthetic construct
  source 1..75: mol_type = other DNA
ataaccctaaaaaactaaatcttatcatagatattgatcagagagttgccaatacttcggatatgattgattcct

SEQ ID NO: 158789 - DNA, 75 bp, synthetic construct
  source 1..75: mol_type = other DNA
tgcggcgcacttcatgatgtcgggtggaaacattctggccttacaaaaaattctcggacaccacgatataaaaat

SEQ ID NO: 158790 - DNA, 75 bp, synthetic construct
  source 1..75: mol_type = other DNA
caggcgcacgctggcgagaagcaataaaccttacccgatcacaggtgactaaataccgaattacctttgtaagaa

SEQ ID NO: 158791 - DNA, 75 bp, synthetic construct
  source 1..75: mol_type = other DNA
gggccggttggtccggcaggtcctgcgggtaaaacggggccacagggccctgccggagggcgagggccgatggga

SEQ ID NO: 158792 - DNA, 75 bp, synthetic construct
  source 1..75: mol_type = other DNA
cgtgacttcagagccagcgctcaatcgtaaaagacctaaaacgcttgatgattatcctgtgatgccacctgcatc

SEQ ID NO: 158793 - DNA, 75 bp, synthetic construct
  source 1..75: mol_type = other DNA
accgatcgcggtgacacagaatactatttccagaatatggctgtttattgtgaaccaggggatgtggcatctatt

SEQ ID NO: 158794 - DNA, 75 bp, synthetic construct
  source 1..75: mol_type = other DNA
tccgggaccattttctgactggcttggtatcgcgtttgctgtcgatgtttctgactttatttcctcgccagtcat

SEQ ID NO: 158795 - DNA, 75 bp, synthetic construct
  source 1..75: mol_type = other DNA
ggtaatagaatttattttattccatatttgcttcttataacagcaattgttgtttcaaccccaatcgcaataaat

SEQ ID NO: 158796 - DNA, 75 bp, synthetic construct
  source 1..75: mol_type = other DNA
ttcttttgcttttttttattggtttaactattcttcatttaaatcaatatacactagtatcagatgacatttggt

SEQ ID NO: 158797 - DNA, 75 bp, synthetic construct
  source 1..75: mol_type = other DNA
aatgaaagccaaacgagagcacattgttcctttatcaccccaagctttagatattttggaagtgatgaagcccat

SEQ ID NO: 158798 - DNA, 75 bp, synthetic construct
  source 1..75: mol_type = other DNA
gtgttgaaagaacaaaaaaatggagataaaggaacgggaaaagtgaataagagtcgaaataatgatgtaagtgat

SEQ ID NO: 158799 - DNA, 75 bp, synthetic construct
  source 1..75: mol_type = other DNA
atatgatatgtaaatataaaacacattcagtttcccggttgttgcgcccaatgccactggataaagagaatgttg

SEQ ID NO: 158800 - DNA, 75 bp, synthetic construct
  source 1..75: mol_type = other DNA
cttccggaaagtgtcctgagattagctcagaatgccttcgtaaatgttgcaggtaatccattgtctggccatacc

SEQ ID NO: 158801 - DNA, 75 bp, synthetic construct
  source 1..75: mol_type = other DNA
tttcgataatgataccggcgctctgctctccctgggcagggaaatgttccgcctcgaaattctggaggacattgc

SEQ ID NO: 158802 - DNA, 75 bp, synthetic construct
  source 1..75: mol_type = other DNA
atggcgacagtacgccagccgggcgttacaggaactgggggcgggtaaacgggcgattcatgatgttgccgatct

SEQ ID NO: 158803 - DNA, 75 bp, synthetic construct
  source 1..75: mol_type = other DNA
acgaaagagcagatcgcctggatgcgcaggcttagagaggaaggttactacgtcgttcttgcgtatggtgcagaa

SEQ ID NO: 158804 - DNA, 75 bp, synthetic construct
  source 1..75: mol_type = other DNA
ccctgacagggattataagcgacaagcacctgccgtttataacggaaagaaaaaagtggcccatggcgatagtta

SEQ ID NO: 158805 - DNA, 75 bp, synthetic construct
  source 1..75: mol_type = other DNA
gatgattgtaatgaagttgtacgcagaggatatgcatctggagtaggcgtatcaggtcgagtcatatatgaagga

SEQ ID NO: 158806 - DNA, 75 bp, synthetic construct
  source 1..75: mol_type = other DNA
actgattgagtggcaacttctcacatggtgtcacgaacggtgcaatagtgatccacacccaacgcctgaaatcag

SEQ ID NO: 158807 - DNA, 75 bp, synthetic construct
  source 1..75: mol_type = other DNA
gtgcgttggatcggaagagaagattgtcggtattcacggcattggctttggtatggacgaaatgttgcagggctt

SEQ ID NO: 158808 - DNA, 75 bp, synthetic construct
  source 1..75: mol_type = other DNA
ttggcctgctctccttccagaatattacggcggacaacgccccatcccgcgcctatctggaactgatggccgaag

SEQ ID NO: 158809 - DNA, 75 bp, synthetic construct
  source 1..75: mol_type = other DNA
ggattgtgaaagccttaaaattagtggcaaaaagcaataccttacgacgcatgtattacaccgctgcactcgtag

SEQ ID NO: 158810 - DNA, 75 bp, synthetic construct
  source 1..75: mol_type = other DNA
tgcttgccaatggcattgatcctcaaatccataacaacgataaagctaatgccttaaagaatgctactgaacaca

SEQ ID NO: 158811 - DNA, 75 bp, synthetic construct
  source 1..75: mol_type = other DNA
cccattaaggagattcgccctaaaatgcttaaacagcatttagaccccatagaaaaacgaggtgtccttgaaaca

SEQ ID NO: 158812 - DNA, 75 bp, synthetic construct
  source 1..75: mol_type = other DNA
gtggcacggacaacacgcccccttaccaacaccgaagttcttcgcgctaaagcgttagagaaggatctaactctg

SEQ ID NO: 158813 - DNA, 75 bp, synthetic construct
  source 1..75: mol_type = other DNA
agcaagtactgcaatgaatgaagcaggttttaatgcagatgttattgaagcggctttagcccatagtgataaaaa

SEQ ID NO: 158814 - DNA, 75 bp, synthetic construct
  source 1..75: mol_type = other DNA
catcgtgaatatgttttcccaagtagaaataatcctaagcaaccaatgaatagtcagacagctaatgctgcatta

SEQ ID NO: 158815 - DNA, 75 bp, synthetic construct
  source 1..75: mol_type = other DNA
gtcaccaaaaagcgcaccaaaaccagccttggcccttacccggtcgttacactggccatggctcgcgaaactcgc

SEQ ID NO: 158816 - DNA, 75 bp, synthetic construct
  source 1..75: mol_type = other DNA
tcaacttaccttgaacaacgtatagacttgatgaattggtggggtgaatttgtgcacaaccgccaccgcctcatg

SEQ ID NO: 158817 - DNA, 75 bp, synthetic construct
  source 1..75: mol_type = other DNA
tagaaaaagatgtattccctgccatcggtgagatcccagttcagcaaatcaaagcccgaacacttgttgaagccc

SEQ ID NO: 158818 - DNA, 75 bp, synthetic construct
  source 1..75: mol_type = other DNA
tgcaccagatcaggattatgggcctaagggaagcgtttttgcaccttttttctcggtaaaaaaagcagcctcaac

SEQ ID NO: 158819 - DNA, 75 bp, synthetic construct
  source 1..75: mol_type = other DNA
aaataaagcgatgattaatcggcgtaatttatctggttttgttcatgcattgaaagctggtgaagccgtgtggtt

SEQ ID NO: 158820 - DNA, 75 bp, synthetic construct
  source 1..75: mol_type = other DNA
ggcgaaataaaagaacaaacaaatatagaaattaaatatattagaaatactaataatatgaatggtgcgtactcg

SEQ ID NO: 158821 - DNA, 75 bp, synthetic construct
  source 1..75: mol_type = other DNA
tggcttgcaaataaagaccctgccgacgacataaaaaaaatcaataacctaattaaaaaattaaaaaacatatct

SEQ ID NO: 158822 - DNA, 75 bp, synthetic construct
  source 1..75: mol_type = other DNA
gttttgtcggtacaactttattaagacaacgtcgtttcgatgcacaatatcgctcaaccaacatcggcgaaattg

SEQ ID NO: 158823 - DNA, 75 bp, synthetic construct
  source 1..75: mol_type = other DNA
attctccgtgctcctgagcaatacctgtggatgcatcgcaggttcaaaacgcgtcctgaaggcgaagtctcttta

SEQ ID NO: 158824 - DNA, 75 bp, synthetic construct
  source 1..75: mol_type = other DNA
cgttggcggtgctacagttttagaggttctcaagaagcttaacgggcgtaagatcgacatagtcgagaaagctaa

SEQ ID NO: 158825 - DNA, 75 bp, synthetic construct
  source 1..75: mol_type = other DNA
ttccggtggccaggtagacgaaaagttatcgatcatcaaagtgggtcgacactttgccgccaaagatagaaaaat

SEQ ID NO: 158826 - DNA, 75 bp, synthetic construct
  source 1..75: mol_type = other DNA
caggatgatttcacgcgggtgagaatagtccgtgaaacggcaaccgcccttgaacgctgggaaccccgactggcc

SEQ ID NO: 158827 - DNA, 75 bp, synthetic construct
  source 1..75: mol_type = other DNA
ggttaaagcggctcgtggcctggttgctcccgcaaaatggccgacgctcggatatagcgaggctgccttctgggg

SEQ ID NO: 158828 - DNA, 75 bp, synthetic construct
  source 1..75: mol_type = other DNA
ggcaatggcctctgccgctgcgagtaagcgaaatattgatttacccgcacgagagcggctggcgattcgtctcga

SEQ ID NO: 158829 - DNA, 75 bp, synthetic construct
  source 1..75: mol_type = other DNA
tgatagcagcgctgagagaacaaacagcagcacagagagagcagacggaagcgataaaccgcctggctgaatcta

SEQ ID NO: 158830 - DNA, 75 bp, synthetic construct
  source 1..75: mol_type = other DNA
atctgggccataaccccggtcagtaacggcattaccgttaataatgaccaacctcatgcgggtcagcataccctg

SEQ ID NO: 158831 - DNA, 75 bp, synthetic construct
  source 1..75: mol_type = other DNA
aagagtggtctgacagccaaaaggcggaggacaggcaggaaaaaactctgcaacaggcacaatcccacagccccg

SEQ ID NO: 158832 - DNA, 75 bp, synthetic construct
  source 1..75: mol_type = other DNA
agcgggcagcactggaaaaactccgcaaggaaaaagagatggcgcatgatgccattgtcacccacagacccacgc

SEQ ID NO: 158833 - DNA, 75 bp, synthetic construct
  source 1..75: mol_type = other DNA
ttctatagcaatgcaatagcggataaagaagtcttagcattttactcggcctattggtctggtgttgccacatca

SEQ ID NO: 158834 - DNA, 75 bp, synthetic construct
  source 1..75: mol_type = other DNA
tgcaggagttcagggaaaattgacgtttcagactgttaacgattatggctcggtaacccccgtcagagaggtgag

SEQ ID NO: 158835 - DNA, 75 bp, synthetic construct
  source 1..75: mol_type = other DNA
tggcaccagaagccttacgttaccaatgattcgccgtcttcataatcaatttggtatccccttggaaagcctggt

SEQ ID NO: 158836 - DNA, 75 bp, synthetic construct
  source 1..75: mol_type = other DNA
caggtacgcgaaatggccgacattatcagcgaactgaacagcctgagcgataaaatccagaaactgtctgacgat

SEQ ID NO: 158837 - DNA, 75 bp, synthetic construct
  source 1..75: mol_type = other DNA
cccattaagccttactgcaaatacaattaaaactgatacaaacggaatacctgcagcacagttagttcagcttgg

SEQ ID NO: 158838 - DNA, 75 bp, synthetic construct
  source 1..75: mol_type = other DNA
actgatgatgagggatgcaccgaaacattttttagtgataaagaagaaattgaaattgagattttacttggtgtt

SEQ ID NO: 158839 - DNA, 75 bp, synthetic construct
  source 1..75: mol_type = other DNA
cgctttaaacaggagtattcacaggcagcctccgttttagtcggcgatattaaaaccttacttatggatagctag

SEQ ID NO: 158840 - DNA, 75 bp, synthetic construct
  source 1..75: mol_type = other DNA
caggggcataaagtcgcattgctggacattccggctaatggtgaaattattcgttatggcgaggtgattggttac

SEQ ID NO: 158841 - DNA, 75 bp, synthetic construct
  source 1..75: mol_type = other DNA
gtcaggaaactttaaccgctgataaaattctgcaaacttgtaattccacaatcaactcaattattttaggcagcc

SEQ ID NO: 158842 - DNA, 75 bp, synthetic construct
  source 1..75: mol_type = other DNA
agccttaatagaaaagaggcagacgttacagaatgaaaaaacaaaattaaataaaagagtgagtagtatgcctac

SEQ ID NO: 158843 - DNA, 75 bp, synthetic construct
  source 1..75: mol_type = other DNA
gaaagtaactctaggcggttttgattatataggccgagggcaagtaccaccaaaccctgcggagctactgatgca

SEQ ID NO: 158844 - DNA, 75 bp, synthetic construct
  source 1..75: mol_type = other DNA
cacagatcagggtaaagatactgggatgctaaatttaactttggttggtgaagatccaaatcagattactaatat

SEQ ID NO: 158845 - DNA, 75 bp, synthetic construct
  source 1..75: mol_type = other DNA
aagcatacctctttcagagtggcttactaaaaactctagtaagataaaactgaaaaaaaatgaatctgaaaagct

SEQ ID NO: 158846 - DNA, 75 bp, synthetic construct
  source 1..75: mol_type = other DNA
aaaattatgatttaattataatagatacacctccaattttggcagtgacagatgctgcgattattggtcgatatg

SEQ ID NO: 158847 - DNA, 75 bp, synthetic construct
  source 1..75: mol_type = other DNA
atctggttatcatagatactcccccaatattagccgttactgatgctgcaattattggtagatatgcaggtacga

SEQ ID NO: 158848 - DNA, 75 bp, synthetic construct
  source 1..75: mol_type = other DNA
gatttatcgctagaagcaaaatcagttcttgatcaaattgttaatgtagacaatcagttaaatgaattaacattt

SEQ ID NO: 158849 - DNA, 75 bp, synthetic construct
  source 1..75: mol_type = other DNA
ggggagttattacaaaacaatgatgtaattataaaagtagatagaataaattcagaagcgggtaatgaatttaaa

SEQ ID NO: 158850 - DNA, 75 bp, synthetic construct
  source 1..75: mol_type = other DNA
attatgatattgtaattttagacacgcctccaatccttgctgtaacagatgctgcaattatcggtaactatgctg

SEQ ID NO: 158851 - DNA, 75 bp, synthetic construct
  source 1..75: mol_type = other DNA
attgccgcatataatcgcgcagattatcttgcagaacgagtggttctcatgcagtggtggagtgattatgtgcaa

SEQ ID NO: 158852 - DNA, 75 bp, synthetic construct
  source 1..75: mol_type = other DNA
tgcaagcatccccgtttcagaagaatatgctaagaaagcagataaaactcggaattggagtaagaataagcttga

SEQ ID NO: 158853 - DNA, 75 bp, synthetic construct
  source 1..75: mol_type = other DNA
tttcgatctcacatttaaatatgcccctatctgagaataacgatcaaccaatagaattgacgctaaaggtattag

SEQ ID NO: 158854 - DNA, 75 bp, synthetic construct
  source 1..75: mol_type = other DNA
tgctgcgtgtggagcgggcactggaaaggtgtgtaaagcaacagccgccacagaaggtgtatgacgctacggtgt

SEQ ID NO: 158855 - DNA, 75 bp, synthetic construct
  source 1..75: mol_type = other DNA
cagcttcacacctccgtggaagggctgaaactgattgccgattacgaaggttgtcgtctgcagccgtatcagtgc

SEQ ID NO: 158856 - DNA, 75 bp, synthetic construct
  source 1..75: mol_type = other DNA
cgccgctttattcaggcggggatgagcgagcgcgagatagccgctgaactggagtggtttatgcgccagcagggc

SEQ ID NO: 158857 - DNA, 75 bp, synthetic construct
  source 1..75: mol_type = other DNA
ctgatgatctatatgaatcaaactctggcatgagacatgataagggctattttaatgtctctaacggtggcaaag

SEQ ID NO: 158858 - DNA, 75 bp, synthetic construct
  source 1..75: mol_type = other DNA
tgcttaacctcaatggcgggagtctgactcttgctaacggagggcgttcggccggttcgctaacaggaaatggtg

SEQ ID NO: 158859 - DNA, 75 bp, synthetic construct
  source 1..75: mol_type = other DNA
cggatgcgtgccgacaattgccgcgctgggtttatgtaaaaggtgtttttaatcaggggctggataaccgccgtg

SEQ ID NO: 158860 - DNA, 75 bp, synthetic construct
  source 1..75: mol_type = other DNA
tatcccggtagcagaaacattcaccaaaagtgtagtacagaaaaaagggtggagtaaaaagtctactgacgaaat

SEQ ID NO: 158861 - DNA, 75 bp, synthetic construct
  source 1..75: mol_type = other DNA
aatggagaaaagaaaaactctccaggatgaaaaagcaaaactcaataaacgcgtatcagctatgccggaaacgca

SEQ ID NO: 158862 - DNA, 75 bp, synthetic construct
  source 1..75: mol_type = other DNA
tctcagacagggaaaaaagtattgtttattgatacagatatgcgcaaaggctacacgcatagattgttcaatgaa

SEQ ID NO: 158863 - DNA, 75 bp, synthetic construct
  source 1..75: mol_type = other DNA
ttgatgttaaggcagcacaaagttctattaatcatgtaataatggggagtgcttcttttggcaagaaaatggatg

SEQ ID NO: 158864 - DNA, 75 bp, synthetic construct
  source 1..75: mol_type = other DNA
ttgttgctctgggcaacggcagtaggtgcagtcattgttgcggaatattttcgtccagaatttcattcttttgcc

SEQ ID NO: 158865 - DNA, 75 bp, synthetic construct
  source 1..75: mol_type = other DNA
ttcgcggtttgcgtaccagccttcatttcgccatgatggaggcgaggaataatgtactgatgatatctggtgcga

SEQ ID NO: 158866 - DNA, 75 bp, synthetic construct
  source 1..75: mol_type = other DNA
gcggattaagaacaagtttacattttgcaatgatggaagcacaaaataaagtgctaatgattactagtgcaagtc

SEQ ID NO: 158867 - DNA, 75 bp, synthetic construct
  source 1..75: mol_type = other DNA
tgctgtgaatgagcaaggcaaagatacaggtatgttaagtctaacattgattggtgaaaaccctaagttaatcgc

SEQ ID NO: 158868 - DNA, 75 bp, synthetic construct
  source 1..75: mol_type = other DNA
gtgtcaattttaagttttattctgggaataatattatctattggatatgtgcttctgaaaactttccttagaaga

SEQ ID NO: 158869 - DNA, 75 bp, synthetic construct
  source 1..75: mol_type = other DNA
gttacaatctagaatgattctaggtaaaacagtagatgatttaggattgcaaacccagataaaacagaagttttt

SEQ ID NO: 158870 - DNA, 75 bp, synthetic construct
  source 1..75: mol_type = other DNA
cttctcccgtagattccgatgacatcgatttaggccgtttaattggtgaattgattgatcatcgcaagttaatag

SEQ ID NO: 158871 - DNA, 75 bp, synthetic construct
  source 1..75: mol_type = other DNA
aaaatgtttcagagtcagatgagattgagctcggtcgtctcattggcgagttggttgaccatcgaaaattgataa

SEQ ID NO: 158872 - DNA, 75 bp, synthetic construct
  source 1..75: mol_type = other DNA
ggaatattaacattaacattgagaggtgaagaccctaagcatttagaacaggttttagatagcattagtgataat

SEQ ID NO: 158873 - DNA, 75 bp, synthetic construct
  source 1..75: mol_type = other DNA
gttttattagatagtgatggaatagctttaaagattgatcgtatagatgcaaatgaaggttcagagttcactgtc

SEQ ID NO: 158874 - DNA, 75 bp, synthetic construct
  source 1..75: mol_type = other DNA
actccaatctatcaggctgatgctttattgcaggtagaacaaaagcaaggtaatgccatccttaatagcctaagt

SEQ ID NO: 158875 - DNA, 75 bp, synthetic construct
  source 1..75: mol_type = other DNA
attgctgtcagcattaagcggtttgaacaaagtggtgttcatgttaaaggctgtattttgaatggtatggtaaag

SEQ ID NO: 158876 - DNA, 75 bp, synthetic construct
  source 1..75: mol_type = other DNA
ttaaaatctcaaggctctatatatcaggggcaacagatgaggacgatgctgaagtaaatctcagagttattagta

SEQ ID NO: 158877 - DNA, 75 bp, synthetic construct
  source 1..75: mol_type = other DNA
atgtaaaagataatgaagagattgatttgggaaggttaattggagaaataattgatcacagaaaaataattatct

SEQ ID NO: 158878 - DNA, 75 bp, synthetic construct
  source 1..75: mol_type = other DNA
aaagttatgacatcgttatattagatacgccaccaatactagcggttacagatgctgctattattgggaattatg

SEQ ID NO: 158879 - DNA, 75 bp, synthetic construct
  source 1..75: mol_type = other DNA
taaaagagttactgttgcagggtttgattatatatcccgtggtatggtaccaccaaatccagcagaacttttgat

SEQ ID NO: 158880 - DNA, 75 bp, synthetic construct
  source 1..75: mol_type = other DNA
cattcctttatcagaatggttagaaagtaataaaaaaacaaagcatggtgatagcagaaatctgcttgctataga

SEQ ID NO: 158881 - DNA, 75 bp, synthetic construct
  source 1..75: mol_type = other DNA
actggtaaaaaaatattatttatagatgctgatctccgaaaaggctatgtccataaaatgttagggtttagtgaa

SEQ ID NO: 158882 - DNA, 75 bp, synthetic construct
  source 1..75: mol_type = other DNA
gagtatacctatttctgagacttttgctaataaggctcttcaaaatacaaaattgagaagaaaagcaggcagtga

SEQ ID NO: 158883 - DNA, 75 bp, synthetic construct
  source 1..75: mol_type = other DNA
ttgtatactaaatggtgtagtgaaaaaagccagtagttattatagctatggctatagccactatggttattccta

SEQ ID NO: 158884 - DNA, 75 bp, synthetic construct
  source 1..75: mol_type = other DNA
agaagttgcagatcaaggtaaaaatactggtatgttaggaatttcattaacaggtgataatccagtattaataga

SEQ ID NO: 158885 - DNA, 75 bp, synthetic construct
  source 1..75: mol_type = other DNA
gtttaagaaccagcctgcattttgcaatgatggaggcaaaaaataatgtactaatgatttctggagccagtccga

SEQ ID NO: 158886 - DNA, 75 bp, synthetic construct
  source 1..75: mol_type = other DNA
gtaggagaattggtcgaaaagaatggaatgtcgattttagttacagcgattgaggctgagcctggtagtaaattt

SEQ ID NO: 158887 - DNA, 75 bp, synthetic construct
  source 1..75: mol_type = other DNA
gtcaaggatggtattaggtaaaacagtagacgatcttaaattacagactatagtaacaaataattattttcctat

SEQ ID NO: 158888 - DNA, 75 bp, synthetic construct
  source 1..75: mol_type = other DNA
gatctttctatggaagcaaaaactgttttagatcagatagtaaacgttgacaatcaacttaatgaattaacattc

SEQ ID NO: 158889 - DNA, 75 bp, synthetic construct
  source 1..75: mol_type = other DNA
cataccgttagcagaaactttcacaaagaacaatttgcaagggaaaggtagtactaaaaaagtatttaataaaat

SEQ ID NO: 158890 - DNA, 75 bp, synthetic construct
  source 1..75: mol_type = other DNA
aaaaaatgcacgcgctgctgagcgtaaacgctgcgcccgtattttcggcagtaagcatgcagctgcgaatccttc

SEQ ID NO: 158891 - DNA, 75 bp, synthetic construct
  source 1..75: mol_type = other DNA
ttcaccacaaaaaatcaccggcatgttggtgcgatcgcgctgacggaggacatcgtgaccgaaagcgaaatgaaa

SEQ ID NO: 158892 - DNA, 75 bp, synthetic construct
  source 1..75: mol_type = other DNA
aaaatcgacggtgtcacgcagggccagcttcacattatgccgggcatctgtagcgaagtgatccccggaccagct

SEQ ID NO: 158893 - DNA, 75 bp, synthetic construct
  source 1..75: mol_type = other DNA
cactgcctggatcacagtctctggcgctgagttgcccgtgtaacgaaatcctgttcgaaggcactcgcggcccgg

SEQ ID NO: 158894 - DNA, 75 bp, synthetic construct
  source 1..75: mol_type = other DNA
ccgtcgacagagcctcatgattacccgatagtcaatctggaaacacagtaccgtagtattcctgcaattggtgaa

SEQ ID NO: 158895 - DNA, 75 bp, synthetic construct
  source 1..75: mol_type = other DNA
tgagctacgctgggtgtggccgactggcgaagaactgctgttccgcttcgggaaagaagagggtgattactggga

SEQ ID NO: 158896 - DNA, 75 bp, synthetic construct
  source 1..75: mol_type = other DNA
ctttgccgggatcccaatctctctccctgagttgcccatgcaacgaaattctctacgagggtacacgtgggccag

SEQ ID NO: 158897 - DNA, 75 bp, synthetic construct
  source 1..75: mol_type = other DNA
agggagttggcctggtgggagataatggtatcgtcctggtaattagaagttccaattccaaaaatacacttgagg

SEQ ID NO: 158898 - DNA, 75 bp, synthetic construct
  source 1..75: mol_type = other DNA
atatatttattattgcgggaaacatagtttttagcgttttatacaatgaacatcttgagttcccatgccgctgcc

SEQ ID NO: 158899 - DNA, 75 bp, synthetic construct
  source 1..75: mol_type = other DNA
acggtcactattgagtgtgaaaacctggggatactgaataccgatgatatcagtacgtctttttatgctaccgaa

SEQ ID NO: 158900 - DNA, 75 bp, synthetic construct
  source 1..75: mol_type = other DNA
gtaaaagcgcctgacgcggtgctgacggacacgaatttttctgcttacgcaaccttacgggtggattaccaatga

SEQ ID NO: 158901 - DNA, 75 bp, synthetic construct
  source 1..75: mol_type = other DNA
ggctgccgacgaggatatcactttccatggcacgctgatgtcgccgcccgcctgtatcatcagcgacgggaaaac

SEQ ID NO: 158902 - DNA, 75 bp, synthetic construct
  source 1..75: mol_type = other DNA
atgaaaaaactcacgcttattttactgtgcgcctgctggggcgcggcgctggctgccgacgaggacatcactttc

SEQ ID NO: 158903 - DNA, 75 bp, synthetic construct
  source 1..75: mol_type = other DNA
cgttatgctgtcagcgtggcgacccgtaacaaggctgaatctctgcgtctggcacgattgctgtatcagcaagaa

SEQ ID NO: 158904 - DNA, 75 bp, synthetic construct
  source 1..75: mol_type = other DNA
aactatcaacgcatcgctaactatggcccgtatgtgggtaaagatgaggctgtttgcttctcaaagcacttatct

SEQ ID NO: 158905 - DNA, 75 bp, synthetic construct
  source 1..75: mol_type = other DNA
gataaaactaaactagtcaccgcaaatgaatcgatatacattccccttggcgcagcgtatagtcttgagaatccg

SEQ ID NO: 158906 - DNA, 75 bp, synthetic construct
  source 1..75: mol_type = other DNA
cgacagtgctggcgaacatgcggcggtgctgtactcgctgatcggcacatgccgtctgaacaatgtggaaccgga

SEQ ID NO: 158907 - DNA, 75 bp, synthetic construct
  source 1..75: mol_type = other DNA
aaacctttatagacagtctgcccgtcaacaaggctgaaaaagaggccatcgcatttcgcaatgcagaacgtttac

SEQ ID NO: 158908 - DNA, 75 bp, synthetic construct
  source 1..75: mol_type = other DNA
atgaatatttaccatcgtcatcttagcccggatggcagcggcccggcgttattcagcctggcgaatatggtgaaa

SEQ ID NO: 158909 - DNA, 75 bp, synthetic construct
  source 1..75: mol_type = other DNA
ggtacagagaacgcaagctggatttttcgtagtcgtggcaagaaagacgtacaaaatgttaataaggccctggcc

SEQ ID NO: 158910 - DNA, 75 bp, synthetic construct
  source 1..75: mol_type = other DNA
agcaagttgaatgattcatggcttaccaaacctgatactgtaaatgttcaggtcggtacgatacacggcttccaa

SEQ ID NO: 158911 - DNA, 75 bp, synthetic construct
  source 1..75: mol_type = other DNA
agaatctccctgttcgtttagtttctgcgaattcgatgctatgccgataaatctcatcaaatttccggtcagtaa

SEQ ID NO: 158912 - DNA, 75 bp, synthetic construct
  source 1..75: mol_type = other DNA
atgtctgcaattaaattaaacagaaaactagaatctgtcggagtttatgatcttcgttgtcgtcgtgtatttagt

SEQ ID NO: 158913 - DNA, 75 bp, synthetic construct
  source 1..75: mol_type = other DNA
acggcgagatgaaattaactttcgatggatatgagcaagcgttattcactgctaagggccaagcatggataacta

SEQ ID NO: 158914 - DNA, 75 bp, synthetic construct
  source 1..75: mol_type = other DNA
agaagttgatcgtctggcgctggaaaacaaggaattagcgccaaaagcggctgtctgtgatgcgattgtaaaaaa

SEQ ID NO: 158915 - DNA, 75 bp, synthetic construct
  source 1..75: mol_type = other DNA
gcttcagaaacataccgttccggttccgaccgccaccgcgccttcccctcagccaacaaccaccacggccagaaa

SEQ ID NO: 158916 - DNA, 75 bp, synthetic construct
  source 1..75: mol_type = other DNA
attagaaaacgatttttgcaaagctggtttatctctgccctcacaaaaaaccatgcgacgctggtttaaggttga

SEQ ID NO: 158917 - DNA, 75 bp, synthetic construct
  source 1..75: mol_type = other DNA
tcagcatccacctaccgggctaatttcaccagtcgtaaccgcatgctggtggaatggtcctatcgttcatcctag

SEQ ID NO: 158918 - DNA, 75 bp, synthetic construct
  source 1..75: mol_type = other DNA
gtgtggctgcctctgctgtagtatccggttcctcaatggcagctgtaggagaatggacgccagggggtgaaggtg

SEQ ID NO: 158919 - DNA, 75 bp, synthetic construct
  source 1..75: mol_type = other DNA
tctcagccagcaagccctgataaggttctccaccaaaataaccgatgaccggcagaagcaggcactgctgatgca

SEQ ID NO: 158920 - DNA, 75 bp, synthetic construct
  source 1..75: mol_type = other DNA
atccttttaatcattgcttcagagacattgagccttatgagcttcttgagaatttagatagcgccattgataacc

SEQ ID NO: 158921 - DNA, 75 bp, synthetic construct
  source 1..75: mol_type = other DNA
ttatatggggggcttctgacaaaaagaaaattatcatcaagaggaaaatactcattcttacagaaaaatcagtat

SEQ ID NO: 158922 - DNA, 75 bp, synthetic construct
  source 1..75: mol_type = other DNA
atgacatatataaacgtctgcctgctgtatttctgcacggtggtttgttgtctgttgcttgtcagcggtggttat

SEQ ID NO: 158923 - DNA, 75 bp, synthetic construct
  source 1..75: mol_type = other DNA
atccgcgacggcgtccggggcaaagataaactggatgtgcccattaagttcatctggaactacgcgggaaatacc

SEQ ID NO: 158924 - DNA, 75 bp, synthetic construct
  source 1..75: mol_type = other DNA
atgatgtatgctgaaacccgcaatatgacaccatatggtaatgtgggtatcgcaaataaaacccagaactttgaa

SEQ ID NO: 158925 - DNA, 75 bp, synthetic construct
  source 1..75: mol_type = other DNA
agctcttggcgggtatcactacaatgaatacagcaaatttgctggtggtgatacagctgaagcatggacatttgg

SEQ ID NO: 158926 - DNA, 75 bp, synthetic construct
  source 1..75: mol_type = other DNA
atggtgaagccggggactttcgatcctgaaatgaaggatttcactacgccgggcgtcactatattcatgcaggta

SEQ ID NO: 158927 - DNA, 75 bp, synthetic construct
  source 1..75: mol_type = other DNA
atgaaacgactcgcacttttcctgatttggggtgcctgcgggggcgctctggcctcaccggatatcacctttcac

SEQ ID NO: 158928 - DNA, 75 bp, synthetic construct
  source 1..75: mol_type = other DNA
ggacgggcacgcaaaccagctacaacgacgcagccatcgaaaccgatgttccgggattcggtattcagcttttgc

SEQ ID NO: 158929 - DNA, 75 bp, synthetic construct
  source 1..75: mol_type = other DNA
ccgggattcgggattcagcttttgcaaaacgggcaacgttttcagcttaataccccactgaccatcaatgccacg

SEQ ID NO: 158930 - DNA, 75 bp, synthetic construct
  source 1..75: mol_type = other DNA
tgccggtaaaagccagcgacgcggcgctcagtgaagggaatttttctgcctgggcaaccttaacggtggattacc

SEQ ID NO: 158931 - DNA, 75 bp, synthetic construct
  source 1..75: mol_type = other DNA
tgtggggcttttgctcgatggcactctcaaacgtctcttttcacggttatttagtgcagccgcctaactgcacga

SEQ ID NO: 158932 - DNA, 75 bp, synthetic construct
  source 1..75: mol_type = other DNA
atgaaaaagtatattattcccttcgttgcgacaacgttgatgtttagcgcaacaaccttcgccaaggatgtcgat

SEQ ID NO: 158933 - DNA, 75 bp, synthetic construct
  source 1..75: mol_type = other DNA
gaagatgaggggggcgatacagagcagacaatgcctctgcctgttctggctaagggggatgaatgtcgtcttgtt

SEQ ID NO: 158934 - DNA, 75 bp, synthetic construct
  source 1..75: mol_type = other DNA
ttttattgcagatgcgccgcatgatgaagatgaggggggcgatacagagcagacaatgcctctgcctgttctggc

SEQ ID NO: 158935 - DNA, 75 bp, synthetic construct
  source 1..75: mol_type = other DNA
tggcgtctgtcaggtattaaatcgatcctggaaaaaggtctggataaacaacctgttcaggatccaaaaccagat

SEQ ID NO: 158936 - DNA, 75 bp, synthetic construct
  source 1..75: mol_type = other DNA
tcgcagatccgccatctgttgcaacagttagagagcaatctggcagagctgcgtggcggcagcgattacgcgcaa

SEQ ID NO: 158937 - DNA, 75 bp, synthetic construct
  source 1..75: mol_type = other DNA
aaaaactgaaggaaaagcttcaggaattactggtgagtactaatagcaatcctgaaaatgatgaaagtaaggaat

SEQ ID NO: 158938 - DNA, 75 bp, synthetic construct
  source 1..75: mol_type = other DNA
atgcaaccagaagttgaagtattaaccgatcataatgagctaatttgttcgagctttattgaacacattgccaac

SEQ ID NO: 158939 - DNA, 75 bp, synthetic construct
  source 1..75: mol_type = other DNA
catcggacgcatcctggagcgctccgttgatcgtgcagcggcagatcaggagattgcggcaatcgtcgaggagtc

SEQ ID NO: 158940 - DNA, 75 bp, synthetic construct
  source 1..75: mol_type = other DNA
cttcagcaaaaccgaagagtaccgcggcggcaatgccaatatgcacgcagtggaagctttcttaattgtttatga

SEQ ID NO: 158941 - DNA, 75 bp, synthetic construct
  source 1..75: mol_type = other DNA
ttttattgtcgccgatcagaacgatacgccgattacgcctaacgatctcaatagcgttattcctttccgtctgga

SEQ ID NO: 158942 - DNA, 75 bp, synthetic construct
  source 1..75: mol_type = other DNA
attcaagatttaacactgcgcttatattagccgttacagtctatattattttgtcatttattacggcgattgatt

SEQ ID NO: 158943 - DNA, 75 bp, synthetic construct
  source 1..75: mol_type = other DNA
aacagtgataatgtctatgacctaagtgttcccgattcaaaacttaattttactcacgactattctccagttggt

SEQ ID NO: 158944 - DNA, 75 bp, synthetic construct
  source 1..75: mol_type = other DNA
attaaactaaagctggaaaacaatgaaaatgtgttttctgaaactaaaaaattatcgaataaaaataatgacgat

SEQ ID NO: 158945 - DNA, 75 bp, synthetic construct
  source 1..75: mol_type = other DNA
tcctcaaatactcacagccatatgttccaaaggactacaatcttgcaaatgaatttcatagacgccttatatgct

SEQ ID NO: 158946 - DNA, 75 bp, synthetic construct
  source 1..75: mol_type = other DNA
cgaatccccgcctcaccgccatttgcatccgtagctcagctggatagagtactcggctacgaaccgagcggtcgg

SEQ ID NO: 158947 - DNA, 75 bp, synthetic construct
  source 1..75: mol_type = other DNA
taacggaagcgggttctaaggaaggtgcgaataagcaggtcatttcttcccaagctgactcgctgattaaaattt

SEQ ID NO: 158948 - DNA, 75 bp, synthetic construct
  source 1..75: mol_type = other DNA
tcacttcagccaggtagaacacgtagtgttatttcagaaacgccgccaaatgactgtatggaatcacataattta

SEQ ID NO: 158949 - DNA, 75 bp, synthetic construct
  source 1..75: mol_type = other DNA
acgcaaggtcatccagcactgcctcagaagtcactgccggacgtgctgggctggaaatattcaggcaaccgcatt

SEQ ID NO: 158950 - DNA, 75 bp, synthetic construct
  source 1..75: mol_type = other DNA
aatcgttgacactaacgctgcctggctggccgatttttctttcatcaggggctgccattatctcgccgcaatacg

SEQ ID NO: 158951 - DNA, 75 bp, synthetic construct
  source 1..75: mol_type = other DNA
ttatcgggcgcatttgataaatatcccaacctgcaggtaatcagtggccactggggggagatgttacccttctgg

SEQ ID NO: 158952 - DNA, 75 bp, synthetic construct
  source 1..75: mol_type = other DNA
tgtgagggtgtcaaggacttcatattatgttcttatttcaataatatcattagaaaaacattttgtgttaaacct

SEQ ID NO: 158953 - DNA, 75 bp, synthetic construct
  source 1..75: mol_type = other DNA
gttgcagtggtgggccgattaccttgacatccttagaatacgacaagtttcaccatttgattttaaaaagactta

SEQ ID NO: 158954 - DNA, 75 bp, synthetic construct
  source 1..75: mol_type = other DNA
tcgataccgggacgctcggcttcagcgatattcacaacgaagctgatttcaaaactcagcactcgggtatcagca

SEQ ID NO: 158955 - DNA, 75 bp, synthetic construct
  source 1..75: mol_type = other DNA
tcagcctgtcgcttaccacccagaaatcgaaatcacaacaacattctgaaagtgacacagtatccggcagtacgc

SEQ ID NO: 158956 - DNA, 75 bp, synthetic construct
  source 1..75: mol_type = other DNA
cacgctaacgagaaccttccaggaacacgtttacgttaccccgtcatatgctaacactgccgcacttccagttta

SEQ ID NO: 158957 - DNA, 75 bp, synthetic construct
  source 1..75: mol_type = other DNA
tttggcaattggtatgctttgcatctatggattagagtttgttgaagcggtatatggaagtcagaaatttcatga

SEQ ID NO: 158958 - DNA, 75 bp, synthetic construct
  source 1..75: mol_type = other DNA
cagtgagattattgagctgaaaaaaatcattaataacataagtgataaatacaaagaacgaatggagcggttact

SEQ ID NO: 158959 - DNA, 75 bp, synthetic construct
  source 1..75: mol_type = other DNA
aaatatttcagtaattttttaaataaactgggtggtgattctgatattttattcatggaacaaaacaaaaggatt

SEQ ID NO: 158960 - DNA, 75 bp, synthetic construct
  source 1..75: mol_type = other DNA
cggtagaacataagaagcgggtgctgcgttatttcgagctttacgtctttcctacgaacggcagttgcgacatca

SEQ ID NO: 158961 - DNA, 75 bp, synthetic construct
  source 1..75: mol_type = other DNA
gactcaattcaacctgtcgtaacagacttccttgaaaaaatcaggcaatctcaaaggggaaaaagaatcagactt

SEQ ID NO: 158962 - DNA, 75 bp, synthetic construct
  source 1..75: mol_type = other DNA
tattatttgtctaagaaatatttatgttcataaaattgctatttgcgaaacttttgtgggggaaaatgtatcaaa

SEQ ID NO: 158963 - DNA, 75 bp, synthetic construct
  source 1..75: mol_type = other DNA
cgtggcaagaaatctgggcgcagtaagctgttaatttctgcgctggtttgcgggtggaatgttgtcgtcgtttgg

SEQ ID NO: 158964 - DNA, 75 bp, synthetic construct
  source 1..75: mol_type = other DNA
cggctgtgacactgtcccagctcctgcagagccaggaaagttgcaggactcatctgcgggagatgataaatttaa

SEQ ID NO: 158965 - DNA, 75 bp, synthetic construct
  source 1..75: mol_type = other DNA
caatgacggcctcctgactattgcgtcacatacggcagatggggtaacaggcatgggttcgagtgaagtcaccat

SEQ ID NO: 158966 - DNA, 75 bp, synthetic construct
  source 1..75: mol_type = other DNA
aatcggctcaactccatccttatcgaaaacggtgacaagatggacgagaatctggcaggtattggcgagatactg

SEQ ID NO: 158967 - DNA, 75 bp, synthetic construct
  source 1..75: mol_type = other DNA
gtaatgcccttgcgattgaccgcgatggggctgacttcttggatgctctccgtaacaaagaggtttgggcaacat

SEQ ID NO: 158968 - DNA, 75 bp, synthetic construct
  source 1..75: mol_type = other DNA
tacgcttccatcatgcagcagtacggcacaaaagaagaagctggggcatttgtgttgatgtcgttggagtccggc

SEQ ID NO: 158969 - DNA, 75 bp, synthetic construct
  source 1..75: mol_type = other DNA
acgtattgaagttctgcgtggtccggcagctgcgcgttacggcaacggcgcggcgggcggcgtggttaacataat

SEQ ID NO: 158970 - DNA, 75 bp, synthetic construct
  source 1..75: mol_type = other DNA
tttacacattgagtggtatgttgttgtttttatcgattttattgccgacaacattatcaattgtaaagattgtat

SEQ ID NO: 158971 - DNA, 75 bp, synthetic construct
  source 1..75: mol_type = other DNA
tgacgtatcggatgtatacgttacgcatccaattcttgagtcaaataagtctaacgaaaatgaagatgattctga

SEQ ID NO: 158972 - DNA, 75 bp, synthetic construct
  source 1..75: mol_type = other DNA
gaagtattaccgccgcctcgacgcactgtatcgttgtgcaaaagagaaaataggtcttctttcagataaccggga

SEQ ID NO: 158973 - DNA, 75 bp, synthetic construct
  source 1..75: mol_type = other DNA
attgtaaaaacgccgcatgatttattacgtgaaagttcagacatgttagctgaagctcttgcagtgatttccaat

SEQ ID NO: 158974 - DNA, 75 bp, synthetic construct
  source 1..75: mol_type = other DNA
atgatgatataaagaaccaagcggatgaagtgctgaagctgatgaatatcagtcaaactcaggctattgcggctt

SEQ ID NO: 158975 - DNA, 75 bp, synthetic construct
  source 1..75: mol_type = other DNA
tattgcgacgggcgtggatgatgtgtttgcgctggcgggtctggataagccgaatattggattgttgtcagacga

SEQ ID NO: 158976 - DNA, 75 bp, synthetic construct
  source 1..75: mol_type = other DNA
taatgaagacgacaaaccgctgtttgaatggcagcttgaaacggtagtaaaagggttctttaaccgcgaactgct

SEQ ID NO: 158977 - DNA, 75 bp, synthetic construct
  source 1..75: mol_type = other DNA
gactggcagctaaaaacggtggtgcagggcttctttaaccgtgcgcttcttctcgattacattcgttattttgtg

SEQ ID NO: 158978 - DNA, 75 bp, synthetic construct
  source 1..75: mol_type = other DNA
aatatttacaatgagtttactgtatattataagaaattaaataacattgaactcgattgtaataaaatgctggca

SEQ ID NO: 158979 - DNA, 75 bp, synthetic construct
  source 1..75: mol_type = other DNA
ctttaagaaacacatcctcacaaataaattagatataaatgacatcccttatctcatagaaaattatggcacatt

SEQ ID NO: 158980 - DNA, 75 bp, synthetic construct
  source 1..75: mol_type = other DNA
ttacctttatatcaggtgtcgttctcattggatgtgataatgcgaaaggtaatgcaggtagtgagaagcgattcg

SEQ ID NO: 158981 - DNA, 75 bp, synthetic construct
  source 1..75: mol_type = other DNA
acaaagccttccatcatctgctgctcgacggtgtgcccgttgagtacaagcaggaagacaaggttatccacgata

SEQ ID NO: 158982 - DNA, 75 bp, synthetic construct
  source 1..75: mol_type = other DNA
cgttcgaagcctgtcagacgaacaaagcagcgtggatgaaccgtaaagctgaactggccgctacagagctggaat

SEQ ID NO: 158983 - DNA, 75 bp, synthetic construct
  source 1..75: mol_type = other DNA
ttattctgcacaggataacgacattttaacggccatcggatacaggcctgacgcgccttcgcgggatgataatcg

SEQ ID NO: 158984 - DNA, 75 bp, synthetic construct
  source 1..75: mol_type = other DNA
acaccatgtatatcgacaaaccgatgcgcggccataacctgatgcaggcgattgcccgcgttaaccgtgtgttcc

SEQ ID NO: 158985 - DNA, 75 bp, synthetic construct
  source 1..75: mol_type = other DNA
ctgtttgaaaacgatggcaaacggcttatcaaaaagattgccgcataccatcagttccacgcggtgcgtgaagcg

SEQ ID NO: 158986 - DNA, 75 bp, synthetic construct
  source 1..75: mol_type = other DNA
gtcaatcaggtggcgattcagggcataaaacaggtacgtcgcccggatgtgattggctatatcaacggcctgccg

SEQ ID NO: 158987 - DNA, 75 bp, synthetic construct
  source 1..75: mol_type = other DNA
tgcgacgattatgaaaatcgaggctggattactatctaagactcaggcaattagcgagatgggcggtaacgcaaa

SEQ ID NO: 158988 - DNA, 75 bp, synthetic construct
  source 1..75: mol_type = other DNA
tgttcattcccgaaacaatgggccaagaacgcggtattcccgaaatggtagccagtacaaaactaatggatgatc

SEQ ID NO: 158989 - DNA, 75 bp, synthetic construct
  source 1..75: mol_type = other DNA
aagttcagcccggtcagttaccgtgcacacaacctacctacgtcagaaaatctgctggagctgaatttttacgcc

SEQ ID NO: 158990 - DNA, 75 bp, synthetic construct
  source 1..75: mol_type = other DNA
ttgaaatgagagatggatcagtcaaaggtgctgttttgtttagcatttccaacaaaactactccagaaaaaatat

SEQ ID NO: 158991 - DNA, 75 bp, synthetic construct
  source 1..75: mol_type = other DNA
gccgcgatgaagcaggctgaaattgcgctggatgatcttgcagccattcttccacacggcaacggttcggcagtg

SEQ ID NO: 158992 - DNA, 75 bp, synthetic construct
  source 1..75: mol_type = other DNA
attcagaaactaaacccaagaagattaaacaggaacgttccttaaaacaaagtaccttaaaacgagatctacagg

SEQ ID NO: 158993 - DNA, 75 bp, synthetic construct
  source 1..75: mol_type = other DNA
gctgcaattgctgcaccgctgccacaatgggcgaatgccccagcggtaacgccagttgcccaattatctttacag

SEQ ID NO: 158994 - DNA, 75 bp, synthetic construct
  source 1..75: mol_type = other DNA
gcccaggtacaacaggccgaagggcaacaaaaaatctccgcctcgcaggtcgaacaggcaaaactggatgtatta

SEQ ID NO: 158995 - DNA, 75 bp, synthetic construct
  source 1..75: mol_type = other DNA
ggcatgctgctcactgcaggagggatgccgtgtctggtatggcagccgccacagtcagtgtcaccggccagctca

SEQ ID NO: 158996 - DNA, 75 bp, synthetic construct
  source 1..75: mol_type = other DNA
gatgaaggctggctgtatctggcagtggtcattgacctgtggtcacgtgccgttattggctggtcaatgtcgcca

SEQ ID NO: 158997 - DNA, 75 bp, synthetic construct
  source 1..75: mol_type = other DNA
ggtcaaaacagcgttacggtgcaccacgcctgacggatgaactgtgtgctcagggttaccactttaacgtaaaaa

SEQ ID NO: 158998 - DNA, 75 bp, synthetic construct
  source 1..75: mol_type = other DNA
cgaacaggcaaaactggatgtgctgcaacgggcgtcggtggcgtatgccaactggaccggtgcacggggtcgtga

SEQ ID NO: 158999 - DNA, 75 bp, synthetic construct
  source 1..75: mol_type = other DNA
tattcagtggcctgttgtaacccatggggatcccaagtcactggaggtgcagagcggcaggctgatgccatggcg

SEQ ID NO: 159000 - DNA, 75 bp, synthetic construct
  source 1..75: mol_type = other DNA
ccagtgacgatgcatattacgcgaccttaccctggcaaccactggctgactaccccacatgcccggaaacgctta

SEQ ID NO: 159001 - DNA, 75 bp, synthetic construct
  source 1..75: mol_type = other DNA
atgaattattccaggaaacctataaacacgaacaattaatcacccagaaaattaacgaactggctcatgctgcaa

SEQ ID NO: 159002 - DNA, 75 bp, synthetic construct
  source 1..75: mol_type = other DNA
gggaaatacgactgtttccgtgggcaggcgctgagagagcctctgcagaccattacgaaaacccacggctacgcg

SEQ ID NO: 159003 - DNA, 75 bp, synthetic construct
  source 1..75: mol_type = other DNA
gacggcgaactggcgcagcaactggtggccgggctgggttacgctgttgatcatcgtgagctgcgcgcctgcgac

SEQ ID NO: 159004 - DNA, 75 bp, synthetic construct
  source 1..75: mol_type = other DNA
cgcagtaccgccgccgttcgctcgtgcgctggttgaggcaaatcttcctgagttctgttctgacaaccagcagga

SEQ ID NO: 159005 - DNA, 75 bp, synthetic construct
  source 1..75: mol_type = other DNA
taccggcaaatgcaactggtcagtcagacagtcgcccgaatgcacgcctttattttgtcagaaggattgccggat

SEQ ID NO: 159006 - DNA, 75 bp, synthetic construct
  source 1..75: mol_type = other DNA
aagccggaaagacttcgctgaatgtgaatgtattggtgagaaattgtgtaaagatcattatgcgtccggaatcga

SEQ ID NO: 159007 - DNA, 75 bp, synthetic construct
  source 1..75: mol_type = other DNA
attgtccagctcagtagtgcaaccaacagcacatctgaaacgcttgctgcgacaccgaaagcagtgaaagcagct

SEQ ID NO: 159008 - DNA, 75 bp, synthetic construct
  source 1..75: mol_type = other DNA
caatttactcctgttgttcgatgttggtggatttggtcaacacaagcagtcttttgctactacagccacacaagc

SEQ ID NO: 159009 - DNA, 75 bp, synthetic construct
  source 1..75: mol_type = other DNA
tgcagatggcgaaaagcgagctggccgccctgctgaacctgccgtccaccaccgacttcaccttacaggacgtcg

SEQ ID NO: 159010 - DNA, 75 bp, synthetic construct
  source 1..75: mol_type = other DNA
cgcctatggccgcgtgctgaactcggtaggcatcgacctgctgccggaaaaggtgaccagcagcgatctgccgac

SEQ ID NO: 159011 - DNA, 75 bp, synthetic construct
  source 1..75: mol_type = other DNA
aatacagtgttactgagggggaagctatggcgctttataacgctatggcgcaattcaggaaaaatccatcatctt

SEQ ID NO: 159012 - DNA, 75 bp, synthetic construct
  source 1..75: mol_type = other DNA
tgactcattgacttaccgcgtgggtaatgactccaacttattgatagtgttttatgttcagataatgcccgatga

SEQ ID NO: 159013 - DNA, 75 bp, synthetic construct
  source 1..75: mol_type = other DNA
atggccacttccacgggggccactccggcctacctgctggcccctgaagtgagcgccctgctccattacgtcccg

SEQ ID NO: 159014 - DNA, 75 bp, synthetic construct
  source 1..75: mol_type = other DNA
tcacgattgctatatgtgaaggcctgaatgcgattctaagtagtggtaagccggtaagaagtgatacaccagagg

SEQ ID NO: 159015 - DNA, 75 bp, synthetic construct
  source 1..75: mol_type = other DNA
tgcgccggttacttcgtaaaacgtcaggcctggacattatggttctgcggctgtcagtgattttcatcttcgccc

SEQ ID NO: 159016 - DNA, 75 bp, synthetic construct
  source 1..75: mol_type = other DNA
tgattttgctggccttgcagggatgttcatcatttgatgagaagttttcgtcagaaaaatttctggcagaaaatg

SEQ ID NO: 159017 - DNA, 75 bp, synthetic construct
  source 1..75: mol_type = other DNA
agaggagctatgatattcggtggggaatacaaccgtgaaaatagtgataataccatagctatggtggtcgggata

SEQ ID NO: 159018 - DNA, 75 bp, synthetic construct
  source 1..75: mol_type = other DNA
ccgttaatagcattattatgtctggcatcgctatgctgcaacttacttctactgactctggatgagtataattat

SEQ ID NO: 159019 - DNA, 75 bp, synthetic construct
  source 1..75: mol_type = other DNA
caaatgttaatagacctgggcgctaccaagagccagctacgccaggaagagatcgcgcatgaacagcaggttctg

SEQ ID NO: 159020 - DNA, 75 bp, synthetic construct
  source 1..75: mol_type = other DNA
taaggtcgccaacggaatccgtcaggttggtgatgttggtggtgttggttgccacattatcgttagtggttttga

SEQ ID NO: 159021 - DNA, 75 bp, synthetic construct
  source 1..75: mol_type = other DNA
atccgatactacgattgaaacagataaggttattacgggctcaagttttatactgacaccacggatcctttctga

SEQ ID NO: 159022 - DNA, 75 bp, synthetic construct
  source 1..75: mol_type = other DNA
tatctaaaagattttgcatcagtatgtcagcccaaaaagaaatatcaacaagcatatggtgatgctgccaactta

SEQ ID NO: 159023 - DNA, 75 bp, synthetic construct
  source 1..75: mol_type = other DNA
atattattaacaattgtgaggatgaaagtgttaagagcaaagcgcaggcatatattgaactcttaaccgataatt

SEQ ID NO: 159024 - DNA, 75 bp, synthetic construct
  source 1..75: mol_type = other DNA
aatatatgcatatgcattcgactaccatgaaaagggtaatgtaacggacgcagaaatttattataaatttttgtg

SEQ ID NO: 159025 - DNA, 75 bp, synthetic construct
  source 1..75: mol_type = other DNA
tgtctgatatgtttcgcgaggccattgttgaaggacgtatatctcaaaatccagtaacgccaacaagagcaccga

SEQ ID NO: 159026 - DNA, 75 bp, synthetic construct
  source 1..75: mol_type = other DNA
tggttgttatgccacctaaattcgctttaccagccggtagtagcaaaactgtgcgctttgttgcaatggaaccag

SEQ ID NO: 159027 - DNA, 75 bp, synthetic construct
  source 1..75: mol_type = other DNA
aatgaagttcagtacatcaaggcgacagtattccgtatcgataatccatctacgcctcaggaaaatgaagttgag

SEQ ID NO: 159028 - DNA, 75 bp, synthetic construct
  source 1..75: mol_type = other DNA
gtaggcactaaaaatatcgctggtaattttactgatattgatggaaatcctgttgttatcaatataaaagattcc

SEQ ID NO: 159029 - DNA, 75 bp, synthetic construct
  source 1..75: mol_type = other DNA
attatgacgttttcatcggtcgtccgttttcaaaaccggcgggttttatgacgagtgatgtgacagccggtttta

SEQ ID NO: 159030 - DNA, 75 bp, synthetic construct
  source 1..75: mol_type = other DNA
taaaaaaatccatatcgtgtttactaattgaaattaagataaccacatctcaaatcaaaaagaaacacctcaaag

SEQ ID NO: 159031 - DNA, 75 bp, synthetic construct
  source 1..75: mol_type = other DNA
gatagctccctgataccttgcgatggctctctgctcatctgtaggttagatggtgagctaaagataaagcgcttc

SEQ ID NO: 159032 - DNA, 75 bp, synthetic construct
  source 1..75: mol_type = other DNA
gatgcatctctatctccatgcgacggctcattacttgtttgcagaatggaaggtgagctgaggattaagcgatat

SEQ ID NO: 159033 - DNA, 75 bp, synthetic construct
  source 1..75: mol_type = other DNA
atcttagaatacaacgatatttagaaaaagatactggtaagcctgttaattattattatcttgaaggcacggatg

SEQ ID NO: 159034 - DNA, 75 bp, synthetic construct
  source 1..75: mol_type = other DNA
caaacccagtctgatagactgggtttgtattaacgtcaggcataactattctattaacttaccaacatcccggta

SEQ ID NO: 159035 - DNA, 75 bp, synthetic construct
  source 1..75: mol_type = other DNA
gtgggctgtacgctgaactggatgcgttataccgccgggttaacgaccaaaatcgcgggtaaaacgctggacttg

SEQ ID NO: 159036 - DNA, 75 bp, synthetic construct
  source 1..75: mol_type = other DNA
gctgtcatgaacatttcagcacagcatggtgtggatggcggaaatttattatttgatggtaattcgacattaaac

SEQ ID NO: 159037 - DNA, 75 bp, synthetic construct
  source 1..75: mol_type = other DNA
ctcgcttgcacattaaagaacccggcaactctccggtaactcctgatggttggataagctgtagtgagcgaatgc

SEQ ID NO: 159038 - DNA, 75 bp, synthetic construct
  source 1..75: mol_type = other DNA
ggtcagggcggtatcagaacagcgaagggtaaccctcctggctgacgggtgccgttgcgacagccttgctcccta

SEQ ID NO: 159039 - DNA, 75 bp, synthetic construct
  source 1..75: mol_type = other DNA
gtcgggcaaaggccctcagtcagaaaccggcttacttctgggtctggctggtcgcgctgatactggtactgctga

SEQ ID NO: 159040 - DNA, 75 bp, synthetic construct
  source 1..75: mol_type = other DNA
aaactgattgaagtcataaagcgcgttgatgtcatcggcacagagaagcagcaaattattcatctggaagtctcc

SEQ ID NO: 159041 - DNA, 75 bp, synthetic construct
  source 1..75: mol_type = other DNA
tgagcagctggtttatccgcaatggctgcatgacctgcaacaaggtaaagaggttacggcgaaacctgtcggtga

SEQ ID NO: 159042 - DNA, 72 bp, synthetic construct
  source 1..72: mol_type = other DNA
atgaaaaagataagaggtttgtgtcttccggtaatgctgggggcagtgttaatgtctcagcatgtacatgca

SEQ ID NO: 159043 - DNA, 75 bp, synthetic construct
  source 1..75: mol_type = other DNA
ctgcttgcagcagcttatccctctggtgtactccccgatatgcgtggctggacaatcaagggcaaacccgccagt

SEQ ID NO: 159044 - DNA, 75 bp, synthetic construct
  source 1..75: mol_type = other DNA
aaaccattatcaccgatacgggtgccaaaaaattagcgcaggcagccgcaccagatggtaaacccgtccgcctga

SEQ ID NO: 159045 - DNA, 75 bp, synthetic construct
  source 1..75: mol_type = other DNA
cagttgcgcagcctgaatggcgaatggcgctttgcctggtttccccccccccccacccgcagggggggggggggg

SEQ ID NO: 159046 - DNA, 75 bp, synthetic construct
  source 1..75: mol_type = other DNA
ggcccgcaccgatcgcccttcccggcagttgcgcagcctgaatggtgagtggcgctttgcctggtttccggcacc

SEQ ID NO: 159047 - DNA, 75 bp, synthetic construct
  source 1..75: mol_type = other DNA
actcaacgacattaattcttatgtgttaagttcaggaaacgccgtatcgaaaatctttcaatctgcttttgatga

SEQ ID NO: 159048 - DNA, 75 bp, synthetic construct
  source 1..75: mol_type = other DNA
ccggcgcggatctcatgacttatgacgaatttgctgaatgctacggctacagcattcgcactgtaaaacagatgg

SEQ ID NO: 159049 - DNA, 75 bp, synthetic construct
  source 1..75: mol_type = other DNA
gcatggaccgttggtgctaaatacgacgctaataacgtttacttagcagctatgtatgctgaaccccgtaacatg

SEQ ID NO: 159050 - DNA, 75 bp, synthetic construct
  source 1..75: mol_type = other DNA
taggtgacactatagaatactcaagcttgcatgcctgcaggtcgactctagaggatccccgggtaccgagctcga

SEQ ID NO: 159051 - DNA, 75 bp, synthetic construct
  source 1..75: mol_type = other DNA
gcccaacgtgatattcagcagaatgggcaaaaagcggccgtcggcacttacgactatcgtctgacgagtgggtaa

SEQ ID NO: 159052 - DNA, 75 bp, synthetic construct
  source 1..75: mol_type = other DNA
atgggcaaaaagcggccgtcggcacttacgactatcgtctgacgagtggggtaaacaatgacggtctgtatatcg

SEQ ID NO: 159053 - DNA, 75 bp, synthetic construct
  source 1..75: mol_type = other DNA
ggttgcagaacccgtagcggcaccgcagcctgaacctgtaaatgaaccggcgcctgtcatggataagccgaaacg

SEQ ID NO: 159054 - DNA, 75 bp, synthetic construct
  source 1..75: mol_type = other DNA
gccgggaaaacgtcgtcaggcacacgccaggagggcgcgtctgacggtaataaggccataagcgaaacagagcgt

SEQ ID NO: 159055 - DNA, 75 bp, synthetic construct
  source 1..75: mol_type = other DNA
gagtttgcttatacagactggttccagggttcactggcgttccagaacacgacatttaacctggaaaagaatgct

SEQ ID NO: 159056 - DNA, 75 bp, synthetic construct
  source 1..75: mol_type = other DNA
gtgggtttttatcgagttattatgaaaaatggttcagataacttccgtgagtctgccgttatggatatcatccgt

SEQ ID NO: 159057 - DNA, 75 bp, synthetic construct
  source 1..75: mol_type = other DNA
gtacaaggctcagtaggtatgtctacggggtggttagcgaataccagtacagatggtaatcatagccattcactg

SEQ ID NO: 159058 - DNA, 75 bp, synthetic construct
  source 1..75: mol_type = other DNA
tgcccgccattaccacttatggcgaaccggaagggaacctgctgacagggccgtggcagcctcgcgtcagctacc

SEQ ID NO: 159059 - DNA, 75 bp, synthetic construct
  source 1..75: mol_type = other DNA
tttttacctcttttttcaacatgttgaaattcgccagacagtgtctggcgaattaacacctgccctggtccacct

SEQ ID NO: 159060 - DNA, 75 bp, synthetic construct
  source 1..75: mol_type = other DNA
gagcgacataatctgaatctgagacaacatctggcaaggctgggacggaagtcactgaaccgccccgggaatcct

SEQ ID NO: 159061 - DNA, 75 bp, synthetic construct
  source 1..75: mol_type = other DNA
tgctgaaattacggggctgaacactaaagatataatcagaggtgtctgtctggatagaagaattggtgattatta

SEQ ID NO: 159062 - DNA, 75 bp, synthetic construct
  source 1..75: mol_type = other DNA
caaaattaattatccattcgtgataccaggcggatgcaaagaaagtactgctggccaaagagctgcaaaatctga

SEQ ID NO: 159063 - DNA, 75 bp, synthetic construct
  source 1..75: mol_type = other DNA
ttagcatatctatctgctgagtaccggatgaatcaaagcagtgaagaaggtgattggttctgtgatcagggggaa

SEQ ID NO: 159064 - DNA, 75 bp, synthetic construct
  source 1..75: mol_type = other DNA
atcaggcgaagccgcgcccactaaataaacccgctcacactattctgaagcaatcgcgcagttgcctggtggctc

SEQ ID NO: 159065 - DNA, 75 bp, synthetic construct
  source 1..75: mol_type = other DNA
gcgggcgcggtggctcaggctctggcggttataaaactgaacaaggcggagacggttcagacggacaggcgggcc

SEQ ID NO: 159066 - DNA, 75 bp, synthetic construct
  source 1..75: mol_type = other DNA
tcctcaccagcgttagcggaatgagctatgcctcctgcgccggcagcggcatcgtttatggcacaccgattacca

SEQ ID NO: 159067 - DNA, 75 bp, synthetic construct
  source 1..75: mol_type = other DNA
cgcgaacggataaagaaaaagatctacggaacgcgggaagaagtccgcagcgatatttttgtgtcaatgacggat

SEQ ID NO: 159068 - DNA, 75 bp, synthetic construct
  source 1..75: mol_type = other DNA
tcttgaattgattatggggggatatcgtaataatcaagcatctattcttgaacggcgtcatgatgtgttgatgtt

SEQ ID NO: 159069 - DNA, 75 bp, synthetic construct
  source 1..75: mol_type = other DNA
acaccctgctccccaaactcatctccggcgagctatccctggaagatcttccggatctcaccaccgatacagaag

SEQ ID NO: 159070 - DNA, 75 bp, synthetic construct
  source 1..75: mol_type = other DNA
aaaaatttagcacccctttattccatcgctttagtaaaaatagaaaatgtggagtctcactaacagccctccgag

SEQ ID NO: 159071 - DNA, 75 bp, synthetic construct
  source 1..75: mol_type = other DNA
tggtcatttttcttcccctgagttttgtgaatgtacgtttaacagtaaaattatctcgttgtattttatgggaat

SEQ ID NO: 159072 - DNA, 75 bp, synthetic construct
  source 1..75: mol_type = other DNA
tcttgctgtggacaggaaagcaatttgcgttataccggttttcttaaggaaaaattggtgatgctgccaacttac

SEQ ID NO: 159073 - DNA, 75 bp, synthetic construct
  source 1..75: mol_type = other DNA
agacttcaaaggggccggagtctctgttcatgagactgcagaaaggcatttctatcgacagagtgaattattaat

SEQ ID NO: 159074 - DNA, 75 bp, synthetic construct
  source 1..75: mol_type = other DNA
cagatgaaagcctgcgctttaagcttgatggtagccaaaatgtgaactggacccaagacgaaattattaatggat

SEQ ID NO: 159075 - DNA, 75 bp, synthetic construct
  source 1..75: mol_type = other DNA
ctgggaaattggccgacggattgtcgaatttgaacaaggtggtgaggccagagcagcttatggtgcacagttgat

SEQ ID NO: 159076 - DNA, 75 bp, synthetic construct
  source 1..75: mol_type = other DNA
ggtgatactgcaacgaataactattatctggatctgcctgatatgggtgtttcagacattgtgaataaatcgtca

SEQ ID NO: 159077 - DNA, 75 bp, synthetic construct
  source 1..75: mol_type = other DNA
tagattatgaatttaatcttgcaccagataaatattgccaacatatcgcaaaaataaacactcttatattaagta

SEQ ID NO: 159078 - DNA, 75 bp, synthetic construct
  source 1..75: mol_type = other DNA
atctgaaagacccccttcttatcgatggggataataatttcattactccagagcatgctgaaaagctcaaaaact

SEQ ID NO: 159079 - DNA, 75 bp, synthetic construct
  source 1..75: mol_type = other DNA
atcgtatttttctaaagttttctttaaatatttaaatacataccctcagaacataaggaagaaaaatagtcggta

SEQ ID NO: 159080 - DNA, 75 bp, synthetic construct
  source 1..75: mol_type = other DNA
tgtcaggaggtaaggatagcgctgcgctggcagtgtatatgcgtgatgcctatccccatctcgatatagattatt

SEQ ID NO: 159081 - DNA, 75 bp, synthetic construct
  source 1..75: mol_type = other DNA
gctcaccatttacatggacacaaggagaatctctttctgaacttgaaaaaccagagagaataatacaaatattca

SEQ ID NO: 159082 - DNA, 75 bp, synthetic construct
  source 1..75: mol_type = other DNA
ggttatgcttctaaacataaaaatctaagaattgctcttcctttccgtgataatggtattgataaggctgctgtt

SEQ ID NO: 159083 - DNA, 75 bp, synthetic construct
  source 1..75: mol_type = other DNA
atgaagccctggcgcaatgaacatgtatcagatgaaccggaaacgcctgaaaagcgcaaggaaactcacaatcgc

SEQ ID NO: 159084 - DNA, 75 bp, synthetic construct
  source 1..75: mol_type = other DNA
ccgacgacgccagagaatgacgaagaagaacgtcagcgcattgttcaggtattgcgagaaaccaatggcattgtt

SEQ ID NO: 159085 - DNA, 75 bp, synthetic construct
  source 1..75: mol_type = other DNA
gatgagggaagcctgtccaggattgcactgggaataagcactttcatggctggcgtggttgcttcgttttttatc

SEQ ID NO: 159086 - DNA, 75 bp, synthetic construct
  source 1..75: mol_type = other DNA
attaaacaagaacatcgaagaggtagtgtctgatacgcaaggatacactaatgatgctaattattcttttttcta

SEQ ID NO: 159087 - DNA, 75 bp, synthetic construct
  source 1..75: mol_type = other DNA
atgctgactactatgtctctcggtgcacttgggccagaaaaggcgtttgctgttcaggataagatggttggtcgc

SEQ ID NO: 159088 - DNA, 75 bp, synthetic construct
  source 1..75: mol_type = other DNA
ggaagggaaaccgcgcccatctggctgacacttggaaaatatcctgatctgagtctcaaatcagcgagagagatg

SEQ ID NO: 159089 - DNA, 75 bp, synthetic construct
  source 1..75: mol_type = other DNA
atgagcaaagaatctgtaatcgcggcattgaaaaaagcgcgtgaagcgcgtgaaggcaatatcttcggtggtact

SEQ ID NO: 159090 - DNA, 75 bp, synthetic construct
  source 1..75: mol_type = other DNA
ctggcggcgcactattccccgcgtagatggcattcgcaagcctgccacacctttattaccaggcactacgctggc

SEQ ID NO: 159091 - DNA, 75 bp, synthetic construct
  source 1..75: mol_type = other DNA
acagccgactgcgccgctggcgcgctacacgtacacggccggtggtgaactgcgggcggtgtatgaccgcagcgg

SEQ ID NO: 159092 - DNA, 75 bp, synthetic construct
  source 1..75: mol_type = other DNA
ccccggcatcacgctccggctacaggaaatgtcgcaggagaaaatcgaagatctgctttgccgcgacgagctgga

SEQ ID NO: 159093 - DNA, 75 bp, synthetic construct
  source 1..75: mol_type = other DNA
cgttgggattgccttcgcgcctgtgcattcgccggagctggaggcaattcctttactgacagaaagtttagcgtt

SEQ ID NO: 159094 - DNA, 75 bp, synthetic construct
  source 1..75: mol_type = other DNA
aatagtggggttttaggttgttttgtgtttataacctatgtgatgatcaccacaatggtcataataaagaaaaca

SEQ ID NO: 159095 - DNA, 75 bp, synthetic construct
  source 1..75: mol_type = other DNA
aaatacgccgggaatatgatgaattgggccgtctgattcaggaaactgcccctgacggcgatatcatccgctacc

SEQ ID NO: 159096 - DNA, 75 bp, synthetic construct
  source 1..75: mol_type = other DNA
gtggatttcaaatttcatgaccttcctgaaaaggttaaaaaaaagctgcattatgcaggttttgatattttctat

SEQ ID NO: 159097 - DNA, 75 bp, synthetic construct
  source 1..75: mol_type = other DNA
agaggcagactactcgccgattatcataaggtaaaagtctcatttatgatgagttccattggatttacttatagg

SEQ ID NO: 159098 - DNA, 75 bp, synthetic construct
  source 1..75: mol_type = other DNA
gcacggtcgctcatgccagaaccagcgcctatgaagccccatcggttaagcgctcatggtatcagtgccagaatc

SEQ ID NO: 159099 - DNA, 75 bp, synthetic construct
  source 1..75: mol_type = other DNA
gcattgtccaccacaggccattgcacatcatcaacaactcgaacagcaggcactggcatcgctgcaaaactgggg

SEQ ID NO: 159100 - DNA, 75 bp, synthetic construct
  source 1..75: mol_type = other DNA
aatcaaacaaagcacaaatgccggaaaaacaacagcaaactctcaaccgctatggctccgcgtcaaagctgtcaa

SEQ ID NO: 159101 - DNA, 75 bp, synthetic construct
  source 1..75: mol_type = other DNA
tttgtcgagagatatttagatcttgaagttcgcatcactcacaaaaatggagatgatatgtatgtagtacataca

SEQ ID NO: 159102 - DNA, 75 bp, synthetic construct
  source 1..75: mol_type = other DNA
cgttaataattgtacggttcctgtactgatcattgtgcttgctattgtggcaagtgctgcccgatcttcaagcga

SEQ ID NO: 159103 - DNA, 75 bp, synthetic construct
  source 1..75: mol_type = other DNA
atcaaaatatggacacttaaataatggcggatatggagcgagacccaacaaaccgcctacgcccgatccaagtaa

SEQ ID NO: 159104 - DNA, 75 bp, synthetic construct
  source 1..75: mol_type = other DNA
ttttatgaatgatttttttatgaaaaacactgagatgattaattggtacttccctcggttacttaagagctatga

SEQ ID NO: 159105 - DNA, 75 bp, synthetic construct
  source 1..75: mol_type = other DNA
tatcttagtaccagtttaaagaaactctactatacgaatagcgtagtaattagattgatgcaaatttacaaaagt

SEQ ID NO: 159106 - DNA, 75 bp, synthetic construct
  source 1..75: mol_type = other DNA
gcttagcaaagaaactcctcacctggctgttttttatcgcggtgattgtgttgctggtggtctacgccaaaaaag

SEQ ID NO: 159107 - DNA, 75 bp, synthetic construct
  source 1..75: mol_type = other DNA
cgccaggaacaggtaaaacaatgtcagctctcatgctggctactgaacttcgtttgccgctttatactattgtcc

SEQ ID NO: 159108 - DNA, 75 bp, synthetic construct
  source 1..75: mol_type = other DNA
gaacgtccagaccagttgtgggtggctgattttacctgggtaagcacatggcagggcttcgtttatgtggcgttc

SEQ ID NO: 159109 - DNA, 75 bp, synthetic construct
  source 1..75: mol_type = other DNA
gtttgcttaaaccagaacatctttactcgatgttaagagcctacatcatcgaacacgcaccctttgcgctgtcaa

SEQ ID NO: 159110 - DNA, 75 bp, synthetic construct
  source 1..75: mol_type = other DNA
aaatatgcagatacaacgttgaatgggtatgtctctgcgttatcacattcagctaaagaacatgtttatggtact

SEQ ID NO: 159111 - DNA, 75 bp, synthetic construct
  source 1..75: mol_type = other DNA
aaactcccttattttacaggggtagatcgtgccgcgttaactgcactgacaagtgttggtcgtgcaattcttagt

SEQ ID NO: 159112 - DNA, 75 bp, synthetic construct
  source 1..75: mol_type = other DNA
actacgttgagcaacgcatatcgctcgacgagacgttaatcagcaaaccatcggcaacgtacttcatgcggtcag

SEQ ID NO: 159113 - DNA, 75 bp, synthetic construct
  source 1..75: mol_type = other DNA
tggttccggcaggagctggagccggcgctgaagcgcaggggatggtggggaccgcgtgacacgactgacccggta

SEQ ID NO: 159114 - DNA, 75 bp, synthetic construct
  source 1..75: mol_type = other DNA
agcttaaaatgcaaagtttgcaagaaagagcttctgtttcaagacgacaagggaattatcactatatggcaaaga

SEQ ID NO: 159115 - DNA, 75 bp, synthetic construct
  source 1..75: mol_type = other DNA
gatgattatttaaccctgccgcctcttagaggcattgaaggtatcaggaaaaaccagcaaactgagatgttagtt

SEQ ID NO: 159116 - DNA, 75 bp, synthetic construct
  source 1..75: mol_type = other DNA
aattgatgtaaaaaatcttcgtgtactgaaccgccccgggtttcctggagagtattttatctgtgaactcaggct

SEQ ID NO: 159117 - DNA, 75 bp, synthetic construct
  source 1..75: mol_type = other DNA
atgaagttgaattggttctgcataaacatacgagtagctgttacatggatgcagagctggcggcaattatcctta

SEQ ID NO: 159118 - DNA, 75 bp, synthetic construct
  source 1..75: mol_type = other DNA
gggcagattgttgtcttaccagaaaaatcagggtgggtaggagtaacagccatctgtccggtaggaactctggtg

SEQ ID NO: 159119 - DNA, 75 bp, synthetic construct
  source 1..75: mol_type = other DNA
cagtatatggacagaaaaaaagaagctatgaactggtggtacgactatctgaataagctaattagtggtgacggt

SEQ ID NO: 159120 - DNA, 75 bp, synthetic construct
  source 1..75: mol_type = other DNA
cgcctggcctgccagcgttttcttgatgatctgaagtacggcgaagagcgggggatttatttcagtgaaccccgt

SEQ ID NO: 159121 - DNA, 75 bp, synthetic construct
  source 1..75: mol_type = other DNA
cataataagctttttctgcttctgccggaggagtatggcccagcctttccagcaatcgtcgattgttataccagt

SEQ ID NO: 159122 - DNA, 75 bp, synthetic construct
  source 1..75: mol_type = other DNA
ctaattgtgatcggctttcacgtggtacatacgatgctgtaaaattatctcattttattagttctataaatagtg

SEQ ID NO: 159123 - DNA, 75 bp, synthetic construct
  source 1..75: mol_type = other DNA
atgatatttacacgattgagatttatcaatttgtacgcttttgaggatgcagagcttaacctgtcctatccaagg

SEQ ID NO: 159124 - DNA, 75 bp, synthetic construct
  source 1..75: mol_type = other DNA
gaaagtaacgtagccggtaaaatgagcagcggtggagccgccaatggcagttaccacagcaacgggctgggcggt

SEQ ID NO: 159125 - DNA, 75 bp, synthetic construct
  source 1..75: mol_type = other DNA
cctggcctgtaagtatcactggattaaaaccaacagaaggcccatttagtgcacggggatatctgcgagtggatt

SEQ ID NO: 159126 - DNA, 75 bp, synthetic construct
  source 1..75: mol_type = other DNA
gctgcagccagtgtgacgattcatgcctggcctgtaagtatcactggattaaaaccaacagaaggcccatttagt

SEQ ID NO: 159127 - DNA, 75 bp, synthetic construct
  source 1..75: mol_type = other DNA
ctttgaagtggattttgcgacagagaacttcttgcatcacaggttgtatgttcgctttgctgcaaatgaaacagg

SEQ ID NO: 159128 - DNA, 75 bp, synthetic construct
  source 1..75: mol_type = other DNA
aggccagttacagagccagcacctgaacagcctggtgtatgaccgtgactacgggtggaatgacaacggcgacct

SEQ ID NO: 159129 - DNA, 75 bp, synthetic construct
  source 1..75: mol_type = other DNA
gacctgaccggaaaactcacgcagagtgaagatgaggggcttgtcaccctctggcactacgatgcgtcggaccgc

SEQ ID NO: 159130 - DNA, 75 bp, synthetic construct
  source 1..75: mol_type = other DNA
agcggacccaccactaccactacgacagccagcaccgtctggtgttctacacgcggatacagcacggtgagccgc

SEQ ID NO: 159131 - DNA, 75 bp, synthetic construct
  source 1..75: mol_type = other DNA
tgtataattacccactgaatccgataataaggatggatcctttgggtttgtataatttatatcaattattatatg

SEQ ID NO: 159132 - DNA, 75 bp, synthetic construct
  source 1..75: mol_type = other DNA
taaatttgatagtactgcagatgctgcgttagatgctttgaaagaaacgcagaatagatctctatgtaatgatat

SEQ ID NO: 159133 - DNA, 75 bp, synthetic construct
  source 1..75: mol_type = other DNA
tgggggtgtattcagcaatgttaccacttgctacgctctggtcatttattccaatcactctaagcataagtatat

SEQ ID NO: 159134 - DNA, 75 bp, synthetic construct
  source 1..75: mol_type = other DNA
cgatatccagtcagcgaccaaacgatatctccccgactatcatttctcaggcacataactatttcattcaccggt

SEQ ID NO: 159135 - DNA, 75 bp, synthetic construct
  source 1..75: mol_type = other DNA
aagtccaatactctggccgcgctttatcagcatggctatgaggccctgaaaaacctactaggcgaaggattcaga

SEQ ID NO: 159136 - DNA, 75 bp, synthetic construct
  source 1..75: mol_type = other DNA
caatttccagtcaacgccctaatgatatatcgtcgacaatcatatcccaagcacacaattattttattcatcgcc

SEQ ID NO: 159137 - DNA, 75 bp, synthetic construct
  source 1..75: mol_type = other DNA
gaggcggaatacatcccggagaggaaacttcatctttaccactgtgaccaccgtggactgccgcaggcgctcatc

SEQ ID NO: 159138 - DNA, 75 bp, synthetic construct
  source 1..75: mol_type = other DNA
gtaatgatatggaatactctggtattgtctgtaaagatactaatggaaaatattttgcatctaaggcagaaactg

SEQ ID NO: 159139 - DNA, 75 bp, synthetic construct
  source 1..75: mol_type = other DNA
ttgcaggggcggtatattactcaggacccgatggggttgaaagggggatggaatttatatcagtatcctttaaat

SEQ ID NO: 159140 - DNA, 75 bp, synthetic construct
  source 1..75: mol_type = other DNA
aatcatccgattataaaatccataaaaaagaatataacatcctctttattccatggccttttattgtgaaagagg

SEQ ID NO: 159141 - DNA, 75 bp, synthetic construct
  source 1..75: mol_type = other DNA
tggggcaacgtgatgtacattcctgcggcaccgatgtgcgagaaaaatcttgcctacgcgcacaaggtgaaggcc

SEQ ID NO: 159142 - DNA, 75 bp, synthetic construct
  source 1..75: mol_type = other DNA
tatttcatacaaaaaaatttttggtagcttagatataaaaaatatgccaactgattatgtccatgttcgtgaaga

SEQ ID NO: 159143 - DNA, 75 bp, synthetic construct
  source 1..75: mol_type = other DNA
ttgaaatctgtgatgatgactatgcggggatcagcatcggcgggcgcgtgctggcggtgaacagccagacgcgga

SEQ ID NO: 159144 - DNA, 75 bp, synthetic construct
  source 1..75: mol_type = other DNA
catttggtaaaagcattgccgcgctgggtagtgactccaacttactgatagtgttttatgttcagataatgcccg

SEQ ID NO: 159145 - DNA, 75 bp, synthetic construct
  source 1..75: mol_type = other DNA
aacgcactggcgacgttaccaatcgataccagatttaaggaaagaacctcactactcaaaacaatctatagtggt

SEQ ID NO: 159146 - DNA, 75 bp, synthetic construct
  source 1..75: mol_type = other DNA
aaatatcctttttactgcaatgacaagaactaaagcatggcttcgtgtatgtggtgtgggttcttcctttgatgg

SEQ ID NO: 159147 - DNA, 75 bp, synthetic construct
  source 1..75: mol_type = other DNA
acgttttaaacggtggattacatcggaggtaattccctcaattcgtaaaacggggaattactgtcttaccacaat

SEQ ID NO: 159148 - DNA, 75 bp, synthetic construct
  source 1..75: mol_type = other DNA
cggaagatgatcctgtcgaaaaaacagtaaatggctggaagataaaaattgaacgttcagtaatgaagactacat

SEQ ID NO: 159149 - DNA, 75 bp, synthetic construct
  source 1..75: mol_type = other DNA
ttactatcccaatcccctgcccgaataatccggaaaaatcccttgccatccagtctgaaatcgttcggattctgg

SEQ ID NO: 159150 - DNA, 75 bp, synthetic construct
  source 1..75: mol_type = other DNA
ggcaaggtgattaccagggctgcgcggtcatgaactattgctcagttgatgtcccgtatacgcgcattaccgaac

SEQ ID NO: 159151 - DNA, 75 bp, synthetic construct
  source 1..75: mol_type = other DNA
aaatgtgtttatacggattaaggataaaagaacaccttgcggtaattactttttccgtttggataagttggactg

SEQ ID NO: 159152 - DNA, 75 bp, synthetic construct
  source 1..75: mol_type = other DNA
aattggtcaatgtggaatgatatcgcgattttatttaaaactgtgggtgttgtattaaaaagagacggtgcgtat

SEQ ID NO: 159153 - DNA, 75 bp, synthetic construct
  source 1..75: mol_type = other DNA
tagttagtatcacattggctttatcagatttcatttcattcattctttctttatacatagcgttggatgtgttgt

SEQ ID NO: 159154 - DNA, 75 bp, synthetic construct
  source 1..75: mol_type = other DNA
agcctttgaaaataaatactcaatgcgaatatatgaatggttactaaaggagctttcacaaagaaaaacgcatag

SEQ ID NO: 159155 - DNA, 75 bp, synthetic construct
  source 1..75: mol_type = other DNA
atgctgaccttgcaattccatgacatccttcccggctcatgtatttcaagagtttatcatgaaactgaaaaggaa

SEQ ID NO: 159156 - DNA, 75 bp, synthetic construct
  source 1..75: mol_type = other DNA
gttttactcgctgaaaaaatgacaactgtaatcagcgggcctaaaactacgatgacgctgatttatcactacaat

SEQ ID NO: 159157 - DNA, 75 bp, synthetic construct
  source 1..75: mol_type = other DNA
agaagatttacttcttaatgatgcctctgcaaaagaagaatgggaagctacatttaaattaaaaaatgatccgcg

SEQ ID NO: 159158 - DNA, 75 bp, synthetic construct
  source 1..75: mol_type = other DNA
gtgcaacaaatttctatcgcctcgacggtgccgattggcacgctgcatatgccgctcaaacagttgcacgacaaa

SEQ ID NO: 159159 - DNA, 75 bp, synthetic construct
  source 1..75: mol_type = other DNA
agcccgtagcgatggacaattacatgaggtgaagtacggtttgtcatccaatagtggggaaacactgaaacagct

SEQ ID NO: 159160 - DNA, 75 bp, synthetic construct
  source 1..75: mol_type = other DNA
cgatgcgtggggaaaggccgtccgtaccacgcagggcgggctgacgcgcagtatggaatacgatgctgccggacg

SEQ ID NO: 159161 - DNA, 75 bp, synthetic construct
  source 1..75: mol_type = other DNA
aacaatcaaattaatgtacaccgccagcacatcactgcctaaagacagagagagtgtgttctggtttaacgtact

SEQ ID NO: 159162 - DNA, 75 bp, synthetic construct
  source 1..75: mol_type = other DNA
ggatgcgtcgttcagcctcatctatttcgatctggacaggttcaaaccggtgaacgatctctggggacacgcaga

SEQ ID NO: 159163 - DNA, 75 bp, synthetic construct
  source 1..75: mol_type = other DNA
aattatggcgtagcaatatcaatagtttttactgaaactatcatatcattattacttacaatttttgctataaaa

SEQ ID NO: 159164 - DNA, 75 bp, synthetic construct
  source 1..75: mol_type = other DNA
ctcagctattcaatgtactgaagggagagatgagccttgtaggacctagaccaataataaccgcagagcttgaaa

SEQ ID NO: 159165 - DNA, 75 bp, synthetic construct
  source 1..75: mol_type = other DNA
atgaagtaatgatatttcgtgtgcaacaaaatttagcaaaactctcatcaagaattattaaaagacttttcgata

SEQ ID NO: 159166 - DNA, 75 bp, synthetic construct
  source 1..75: mol_type = other DNA
ggattgtggcaagttagtggtcgtagcgatgttgactatgaaacgagagtttaccttgatgcttggtatgtcaaa

SEQ ID NO: 159167 - DNA, 75 bp, synthetic construct
  source 1..75: mol_type = other DNA
taatactatttccttcaacgatttaatacctgagaggctgggagaggatgaccagagcgactacgtaataaccag

SEQ ID NO: 159168 - DNA, 75 bp, synthetic construct
  source 1..75: mol_type = other DNA
ttaaagattattctgcatttaaaaaactatctgcaaataagagattaaaacatcattctgttctgaatggacagg

SEQ ID NO: 159169 - DNA, 75 bp, synthetic construct
  source 1..75: mol_type = other DNA
gacgatcacagcaaactcttctttcctcaacctgacgctcactttgtgccgccaacggtaacggaagagagcatc

SEQ ID NO: 159170 - DNA, 75 bp, synthetic construct
  source 1..75: mol_type = other DNA
tatgttaaaaattggtcgatgtggaatgatattgcaatactcttcaaaactacaactgtcgtattgaagagagat

SEQ ID NO: 159171 - DNA, 75 bp, synthetic construct
  source 1..75: mol_type = other DNA
cacagctgtttaatgtgttaaaaggcgagatgagcctcgtcggaccgaggccgattattagcgctgagttagcaa

SEQ ID NO: 159172 - DNA, 75 bp, synthetic construct
  source 1..75: mol_type = other DNA
atactttagacttatggaaacgagatacatggattataggaaatggggttaatgccattgaagcatataaagcaa

SEQ ID NO: 159173 - DNA, 75 bp, synthetic construct
  source 1..75: mol_type = other DNA
tgatgagttgttagcttcagatcctgaagccaaacgtgaatgggatgcgacatttaagttgaaaaatgatccacg

SEQ ID NO: 159174 - DNA, 75 bp, synthetic construct
  source 1..75: mol_type = other DNA
ggatggacaatattacattggctcttgggtttttgctgtgttggttggtattcaatgagattgaggcattacttc

SEQ ID NO: 159175 - DNA, 75 bp, synthetic construct
  source 1..75: mol_type = other DNA
atttctacagaagatgtatataaagctgattcattcccgaagaacatagctgttattaagtgtgataatcaatgg

SEQ ID NO: 159176 - DNA, 75 bp, synthetic construct
  source 1..75: mol_type = other DNA
tatgacacttggtgccattttttgtatgatagccacgtcatcacctcgggcgttcccctctggatcattaccagc

SEQ ID NO: 159177 - DNA, 75 bp, synthetic construct
  source 1..75: mol_type = other DNA
ttgcacaagaaaagcaaacgctgctggcgcaacaaacagaagcgcaagaacagcagagcgctctgcaacagcaac

SEQ ID NO: 159178 - DNA, 75 bp, synthetic construct
  source 1..75: mol_type = other DNA
ataaaagcgcaggaagaaaagctcgcacaacatgccgatcaaaccgctgaactcacccttcaaaagcagcaggtt

SEQ ID NO: 159179 - DNA, 75 bp, synthetic construct
  source 1..75: mol_type = other DNA
ttaccgctattcgacacaaggtttttatacccttgatgatgttgcgtatcgtcgaatggaggggtacgaatatga

SEQ ID NO: 159180 - DNA, 75 bp, synthetic construct
  source 1..75: mol_type = other DNA
tctgactccagccctctgaggttgagcacaacacgaaatacacttggcgttggaggagccatattttcaaccaat

SEQ ID NO: 159181 - DNA, 75 bp, synthetic construct
  source 1..75: mol_type = other DNA
agttaattgtatttataatgttaaagcagattttcaggggtcaagtgcaagctattgttatataggatggaatgt

SEQ ID NO: 159182 - DNA, 75 bp, synthetic construct
  source 1..75: mol_type = other DNA
tctctctcttgcccagcaacatatcaattcgctgacatctgaagtggcattactgcaagaacagcttaatgaggc

SEQ ID NO: 159183 - DNA, 75 bp, synthetic construct
  source 1..75: mol_type = other DNA
aggcagcgagcaatcaccagagatgatgaacctgtacgatctttctggtaatgcctctgcgacaagacaagttca

SEQ ID NO: 159184 - DNA, 75 bp, synthetic construct
  source 1..75: mol_type = other DNA
aatcgtggcgagctctgtccgcaacagatggggagaccctgacattggcgggctgattattgctgcgtaccaggg

SEQ ID NO: 159185 - DNA, 75 bp, synthetic construct
  source 1..75: mol_type = other DNA
cggataaaggttatagccctagtgagcagtttgatactcgctggtatttgcaaacctatccggatgtggcccaag

SEQ ID NO: 159186 - DNA, 75 bp, synthetic construct
  source 1..75: mol_type = other DNA
cagcaggtatttgaactgaccacacatcagcagcagattagcgaacgggacctggcattggccgagcgttttagt

SEQ ID NO: 159187 - DNA, 75 bp, synthetic construct
  source 1..75: mol_type = other DNA
aattcgctgacatctgaggtggcattattgcaagaacagctcaatgaggcccaaacaaacttgagtgtatggtcg

SEQ ID NO: 159188 - DNA, 75 bp, synthetic construct
  source 1..75: mol_type = other DNA
ataggcagtcaggtggcggatattgccagaacggaaggacagatagctagaaagcgaagcggaacccggcagcac

SEQ ID NO: 159189 - DNA, 75 bp, synthetic construct
  source 1..75: mol_type = other DNA
ctgaaaaaggcacacacatcaatatatgggattactcgcagggtaaaggccctggaaaagcggtgaagcaagtca

SEQ ID NO: 159190 - DNA, 75 bp, synthetic construct
  source 1..75: mol_type = other DNA
tgtaggtaatttaggagcggactctaagccagttatcggacgtttggaagtcagcgctggtaatgggaaagtcat

SEQ ID NO: 159191 - DNA, 75 bp, synthetic construct
  source 1..75: mol_type = other DNA
aggcggatgctgaccgcgaagctcaatatcaagcgtcccgtgaaaggttgttcgatatgggtgagccaaccgacc

SEQ ID NO: 159192 - DNA, 75 bp, synthetic construct
  source 1..75: mol_type = other DNA
atcctgcagtgcttcaggccgaggcgatgttatcccgtgaacaaccctacccggaagattttacgctggcagagc

SEQ ID NO: 159193 - DNA, 75 bp, synthetic construct
  source 1..75: mol_type = other DNA
gtcggtattgcttgtggcgatttttctgccaaatgtagcgatgcatgtattgaaaaatataacactgggcaactc

SEQ ID NO: 159194 - DNA, 75 bp, synthetic construct
  source 1..75: mol_type = other DNA
ttgctgaaattatcaaacagaccaccccggacggtgcgggacgtgtggccgcccatgccgtggtaaatgctgcac

SEQ ID NO: 159195 - DNA, 75 bp, synthetic construct
  source 1..75: mol_type = other DNA
actgtgtatggctgtatagcgatatcgagcacccgatgcactctgaggcttactggaaagcgtattgccagcggc

SEQ ID NO: 159196 - DNA, 75 bp, synthetic construct
  source 1..75: mol_type = other DNA
gcccgcaggattaacaatgtgctgtttgatggcagcagcgatatcaccatcaacaccaccgattccggcgctgtg

SEQ ID NO: 159197 - DNA, 75 bp, synthetic construct
  source 1..75: mol_type = other DNA
gaaaagttcggtactggtagtgatatccagcgtggcattcaggcggcaacggccgcgcttcagggcctggcgggc

SEQ ID NO: 159198 - DNA, 75 bp, synthetic construct
  source 1..75: mol_type = other DNA
ggtggcgaagggcagtacactgaccgcaggtaataacctcagtattcaggccaccggctccggcgtgaagggcgt

SEQ ID NO: 159199 - DNA, 75 bp, synthetic construct
  source 1..75: mol_type = other DNA
ggtgaaacggtgaaagtggatgccggtcgccatctgacactgaccagtgagcaggacagtgaccgttatgacagt

SEQ ID NO: 159200 - DNA, 75 bp, synthetic construct
  source 1..75: mol_type = other DNA
gcttatacggttggcggacatcactggatctattccgatagcggtctggttctggttaaccaggagagtggggga

SEQ ID NO: 159201 - DNA, 75 bp, synthetic construct
  source 1..75: mol_type = other DNA
aggtcctcacaccaccagaggcagagctatacgcgctgggaagcgatgggcaggtgacgcagtttatcggcggtg

SEQ ID NO: 159202 - DNA, 75 bp, synthetic construct
  source 1..75: mol_type = other DNA
gcggactttttccttcagcagaagggctggctgctttcagtcccagccccatcaagctttctcaggcgttcattg

SEQ ID NO: 159203 - DNA, 75 bp, synthetic construct
  source 1..75: mol_type = other DNA
gctctttatcactgcctgaaactattaacagcaaaatcatttcaacagagaataattgataattttgagttgcaa

SEQ ID NO: 159204 - DNA, 75 bp, synthetic construct
  source 1..75: mol_type = other DNA
ctatctagtgatgagattagcttgcaagctcttacgatggatgaccaaggacgaatccatcctgataatatacgg

SEQ ID NO: 159205 - DNA, 75 bp, synthetic construct
  source 1..75: mol_type = other DNA
ccgcaccgtacacttccaccattgttttcctggtacgtaagggtaatccgaagcagatccatgactggaacgatc

SEQ ID NO: 159206 - DNA, 75 bp, synthetic construct
  source 1..75: mol_type = other DNA
aaagtatatctggctcatgacagacacctagctcatgacttggtgattaaagaaatagaaaaaaaagaaaacact

SEQ ID NO: 159207 - DNA, 75 bp, synthetic construct
  source 1..75: mol_type = other DNA
cggctatttgcgactgaccaactggcgcagcgcacctgaactggacaacgattatgaagcacgcccggccaatgg

SEQ ID NO: 159208 - DNA, 75 bp, synthetic construct
  source 1..75: mol_type = other DNA
tcctctggtgacaagctatatggagaggattttacatggctgtgcttcgtacgttaccgagcagaatcaaaacac

SEQ ID NO: 159209 - DNA, 75 bp, synthetic construct
  source 1..75: mol_type = other DNA
aaaaaatgatgtctggttcaggatgcatcttgtgcaaggactatgttaccgcaatctataaaactctttgggcag

SEQ ID NO: 159210 - DNA, 75 bp, synthetic construct
  source 1..75: mol_type = other DNA
atgcaatatacctgtagtcttctatgcggaaaatgaagcagatgaagataaaaaaatgatgtctggttcaggatg

SEQ ID NO: 159211 - DNA, 75 bp, synthetic construct
  source 1..75: mol_type = other DNA
attggaactcaactaattctatctgtatttagtattggggcgccattatggtttgcttggttatcaactaaacaa

SEQ ID NO: 159212 - DNA, 75 bp, synthetic construct
  source 1..75: mol_type = other DNA
cagagcgccggggccgcagccggaaacgcacagcagacggcgcaggatgtggcggcagccgcaacggcccgtgat

SEQ ID NO: 159213 - DNA, 75 bp, synthetic construct
  source 1..75: mol_type = other DNA
atgatgccgccagttaaagttgtgattatcactttggtgatgatagtgattgcgagaatcatgtctggtgaaatt

SEQ ID NO: 159214 - DNA, 75 bp, synthetic construct
  source 1..75: mol_type = other DNA
tggacagaggcgacgctactttgaacaaggagagcgttcatttagtattatttgtggaaagttacgcggaattgt

SEQ ID NO: 159215 - DNA, 75 bp, synthetic construct
  source 1..75: mol_type = other DNA
gaccggtggggatttcagcgccctgtactcccaccggaacgcatatagtatacccacaatatttcattacgggat

SEQ ID NO: 159216 - DNA, 75 bp, synthetic construct
  source 1..75: mol_type = other DNA
actttttacggcattaacggccccatttatcacgcctgctgccggcttttatctggatttctgactgactgggtg

SEQ ID NO: 159217 - DNA, 75 bp, synthetic construct
  source 1..75: mol_type = other DNA
ctgatgtgatgacaggaaacgatggtgaatactgtttccatgcgcggactggaaaatatggtgtgtatctgaaac

SEQ ID NO: 159218 - DNA, 75 bp, synthetic construct
  source 1..75: mol_type = other DNA
aagcggctgctgaaaaggcagcagctgataagaaagcagcggcagaaaaagccgccgcagacaaaaaagcggcag

SEQ ID NO: 159219 - DNA, 75 bp, synthetic construct
  source 1..75: mol_type = other DNA
ataatgattctgaatacaatttgtcgtttagtgagcttaagtttgataataagtcaattgatataaacaaacagc

SEQ ID NO: 159220 - DNA, 75 bp, synthetic construct
  source 1..75: mol_type = other DNA
acagcattttatttcaatgttgcggttgcgatcttgttttatgtaggcctttatttatcaacaccattaattgca

SEQ ID NO: 159221 - DNA, 75 bp, synthetic construct
  source 1..75: mol_type = other DNA
cggggattatctccgcgtaactgacaacaaggggaaaacgcacgatgtgctgaccggaagtgatgacggtcgcca

SEQ ID NO: 159222 - DNA, 75 bp, synthetic construct
  source 1..75: mol_type = other DNA
ctttataaagaactgcgcggaagcccaccgccgaaaggcatgctgccattctcaaccgactggtttatgacctag

SEQ ID NO: 159223 - DNA, 75 bp, synthetic construct
  source 1..75: mol_type = other DNA
gcggacactttattgtttattctggctaccgaaacggatggtttcaggtcattgatcccgctaagggaaaactca

SEQ ID NO: 159224 - DNA, 75 bp, synthetic construct
  source 1..75: mol_type = other DNA
ttggcctgaagattatgccaatgagccatgaacaaagtattaattatgttagagcgacattttctcgtgattcaa

SEQ ID NO: 159225 - DNA, 75 bp, synthetic construct
  source 1..75: mol_type = other DNA
tatgttttaccttatctatttgttattattttaactaattcaagagtacaaggtaaatacagacattcattctgg

SEQ ID NO: 159226 - DNA, 75 bp, synthetic construct
  source 1..75: mol_type = other DNA
cgtgaagaatacagtttatggagcgctggctttagactggccaaaagataaattacatgtctggcttcttgatga

SEQ ID NO: 159227 - DNA, 75 bp, synthetic construct
  source 1..75: mol_type = other DNA
ttaaaggtgtgataaaactagcagatggacggtgctatccctgttctgttattgatttctccgaaggtggcctgg

SEQ ID NO: 159228 - DNA, 75 bp, synthetic construct
  source 1..75: mol_type = other DNA
tattggcgcaactttggctgtttctattgaacaaaagcaggtgcgtttttctccccgtattgatgtttctttcaa

SEQ ID NO: 159229 - DNA, 75 bp, synthetic construct
  source 1..75: mol_type = other DNA
cggaagatgcgcatacatcgctacgcttgcatcgtgcagggtacagctccgcatatcttcgctatcctctggccg

SEQ ID NO: 159230 - DNA, 75 bp, synthetic construct
  source 1..75: mol_type = other DNA
tattaccctcgatgtggtggaagggattgtcaagctcaaagacgaactcaacccagaaattatacgggtggtttt

SEQ ID NO: 159231 - DNA, 75 bp, synthetic construct
  source 1..75: mol_type = other DNA
ggaatgccggtggtgacaacgaccgcggaggtgcatgataatctgacgggaacaacccgcaaagtaccggcctac

SEQ ID NO: 159232 - DNA, 75 bp, synthetic construct
  source 1..75: mol_type = other DNA
ggagaaaaacacgttttatagcgatggcggaaatctgagcgtgaaatatttaacatcagggaaattaacctggta

SEQ ID NO: 159233 - DNA, 75 bp, synthetic construct
  source 1..75: mol_type = other DNA
catctgaatcttcaagataatgggtctagacgatacattatggttcaacttcctgagctgatcagtgcgagctcc

SEQ ID NO: 159234 - DNA, 75 bp, synthetic construct
  source 1..75: mol_type = other DNA
ataactttaaagacaatatcaaaaattacaaagagattaccggtcaggtggatggtgacggtcgaagcttatcaa

SEQ ID NO: 159235 - DNA, 75 bp, synthetic construct
  source 1..75: mol_type = other DNA
aattactgacgaaaaatcagaggcattcaaagctggttataaaaccatctcggatatcagcaaagaacgcattcg

SEQ ID NO: 159236 - DNA, 75 bp, synthetic construct
  source 1..75: mol_type = other DNA
cttatccgcagcgaggatgaggggctggtcacccactggcactatgacgaagcagaccgcctcacgcaccgcacc

SEQ ID NO: 159237 - DNA, 75 bp, synthetic construct
  source 1..75: mol_type = other DNA
ccgcacaggacgcgaccacagcgcgaaaaggccttgtccagctcagcagcgccaccaatagcacttctgaaacgc

SEQ ID NO: 159238 - DNA, 75 bp, synthetic construct
  source 1..75: mol_type = other DNA
atatcagcgtcagcggtgaaggcggaacatcgcactggggcggcggtggacgcgcaggcgctggcggtggtgtta

SEQ ID NO: 159239 - DNA, 75 bp, synthetic construct
  source 1..75: mol_type = other DNA
actggtctaatgattctttagaaacatgtaagatgaagtgctccggaaataacattggacgttttattagatttg

SEQ ID NO: 159240 - DNA, 75 bp, synthetic construct
  source 1..75: mol_type = other DNA
aactgtttaaaagggaagtttaaagaggtaaggccgcgttattctgtattgcctgatatattcacacctataaat

SEQ ID NO: 159241 - DNA, 75 bp, synthetic construct
  source 1..75: mol_type = other DNA
ttcaggaactaattgattgtggtgatattagtgctaaagatgcaaaaagcacacagaaagcctggaattgtcgtc

SEQ ID NO: 159242 - DNA, 75 bp, synthetic construct
  source 1..75: mol_type = other DNA
gctcagatgagaacaatacttgcaatagtttattaggcataaaaataaaaaacattgtcacacaaaaacacctgt

SEQ ID NO: 159243 - DNA, 75 bp, synthetic construct
  source 1..75: mol_type = other DNA
atgattgaaaaagacacatccagaaaatggcgtataaatatgatagctgataaattcaatatttcggagatatcc

SEQ ID NO: 159244 - DNA, 75 bp, synthetic construct
  source 1..75: mol_type = other DNA
agaatatctccatcatttacctgcaatttcatcccgccatgctgcagcagaggattcgaccatgtcaccgcgttc

SEQ ID NO: 159245 - DNA, 75 bp, synthetic construct
  source 1..75: mol_type = other DNA
cgtcagcggtgaaggcggtgcatcgtattggggaggcggtggacgcgcaggcgctggcggtggtgttagcggtaa

SEQ ID NO: 159246 - DNA, 75 bp, synthetic construct
  source 1..75: mol_type = other DNA
ttccagtcaatcatactttataaaattatttaaagattattacgggataacacctaaacaatttattatttactt

SEQ ID NO: 159247 - DNA, 75 bp, synthetic construct
  source 1..75: mol_type = other DNA
tatattgctatatggctataaacttaatgaatcaatattggatagaaaaataactgacaaaataattagtgtgag

SEQ ID NO: 159248 - DNA, 75 bp, synthetic construct
  source 1..75: mol_type = other DNA
gagggtaatgcgcgtgaaaatcaggcgctatttgattgccagggaaaagtattgccgtcggtaaaagtatttaat

SEQ ID NO: 159249 - DNA, 75 bp, synthetic construct
  source 1..75: mol_type = other DNA
cggtggttaatgtgcctgaccagcgtggtaaaggtattttctattgggaaccaacatggattgccgtgccgggaa

SEQ ID NO: 159250 - DNA, 75 bp, synthetic construct
  source 1..75: mol_type = other DNA
atgataaaacggacgttattagcggcggccatttttagcacattgcccgcttatgccgggttaacttccattacc

SEQ ID NO: 159251 - DNA, 75 bp, synthetic construct
  source 1..75: mol_type = other DNA
gtgggcgaagtcaaacatcagaatggaaggcatccagggatcagcaaagaaacagcgctggcgctttatattgat

SEQ ID NO: 159252 - DNA, 75 bp, synthetic construct
  source 1..75: mol_type = other DNA
gagttatcagagcggtaactaagcggtatgcgcctttacttcagaaagtctctggtgagtgcaccgaagatattg

SEQ ID NO: 159253 - DNA, 75 bp, synthetic construct
  source 1..75: mol_type = other DNA
gtaccgtatgacgtgattggtctgtcgatgtacacctactggaatgggccgatcagcgccctgaaggccaatatg

SEQ ID NO: 159254 - DNA, 75 bp, synthetic construct
  source 1..75: mol_type = other DNA
ttgctaatgttattaatttttttcctgcaatgtattttgtttttaaaattcttgattcaagtattgttgttttcc

SEQ ID NO: 159255 - DNA, 75 bp, synthetic construct
  source 1..75: mol_type = other DNA
tttgttgcacacattgatcacatgaacagtttcagtgaaattgcgcataaaagcggcaaagaggcagggagttag

SEQ ID NO: 159256 - DNA, 75 bp, synthetic construct
  source 1..75: mol_type = other DNA
aaccagctcgccagccagcaggccaatcagctcttgcagattcgcaccatgttgaccgcccaacacaacgcggag

SEQ ID NO: 159257 - DNA, 75 bp, synthetic construct
  source 1..75: mol_type = other DNA
caggaaaacaatggtataatactccagttgatacataccataacttacaaggaattgctgatataacttggtatt

SEQ ID NO: 159258 - DNA, 75 bp, synthetic construct
  source 1..75: mol_type = other DNA
accgatgcagacagtgccctgcatgctgccgatatcgcgatgtatcaggagaaaaaacataaacagaaaacacct

SEQ ID NO: 159259 - DNA, 75 bp, synthetic construct
  source 1..75: mol_type = other DNA
gcaagaaagcaggagaaaaggtcgaactgcagttacaggtcagccagcagggcaaccaactgacactgaaaaatc

SEQ ID NO: 159260 - DNA, 75 bp, synthetic construct
  source 1..75: mol_type = other DNA
ccgatccgcagggttttaaacaacttcgtcaggcgtatgaggatgcgctacggattgcgcagtcccctgctaaat

SEQ ID NO: 159261 - DNA, 75 bp, synthetic construct
  source 1..75: mol_type = other DNA
agccgccttgatgcagaagatcgttgtccactggaagcattaattattcgtcgattattaattcaggcggcgaat

SEQ ID NO: 159262 - DNA, 75 bp, synthetic construct
  source 1..75: mol_type = other DNA
ctcgttctacaacatggaaaggatatagagcacatcatattataccgaaagaattatggaatcatccggtcttac

SEQ ID NO: 159263 - DNA, 75 bp, synthetic construct
  source 1..75: mol_type = other DNA
tggtatgccgtcagcgcagaaagcctggcgctgagcatattaaatgaaaatctgaaaaatgaagaacatacaccg

SEQ ID NO: 159264 - DNA, 75 bp, synthetic construct
  source 1..75: mol_type = other DNA
atgaaaaattgctggaagatcctcaacatagaggaaacgactgatgtcgatattatccgccgcgcttatctggcg

SEQ ID NO: 159265 - DNA, 75 bp, synthetic construct
  source 1..75: mol_type = other DNA
cggagccgcaaccgcagccaatgcccgttgacgatggtgggccgggctgtctgggcatcattaaaattattttct

SEQ ID NO: 159266 - DNA, 75 bp, synthetic construct
  source 1..75: mol_type = other DNA
taagattgcttgatgaacgtattgataaagtttacggttcattgctaggaccaatgaaaaggaaaaaatatagat

SEQ ID NO: 159267 - DNA, 75 bp, synthetic construct
  source 1..75: mol_type = other DNA
atgacagattcaataaatgccaatgttgtagtgagtatgccttcgcaactcttcactatggctcgttcttttaaa

SEQ ID NO: 159268 - DNA, 75 bp, synthetic construct
  source 1..75: mol_type = other DNA
acgactaatcttgccgacatcgagtttgacggcattacgatacacgcacttgcaaatggtgcaaaagggtttgtt

SEQ ID NO: 159269 - DNA, 75 bp, synthetic construct
  source 1..75: mol_type = other DNA
taccggtatgtgccgaatccgtgtgggtatgttgatccgctggggctagttggttgttcaaccaagcttgggaaa

SEQ ID NO: 159270 - DNA, 75 bp, synthetic construct
  source 1..75: mol_type = other DNA
atgtgccgaatccaaatgagtatattgactctctggggttagtaggttgccctcgtattttagcaaaaaatatga

SEQ ID NO: 159271 - DNA, 75 bp, synthetic construct
  source 1..75: mol_type = other DNA
ccgctgatgctctttaacagtgaaggtaaaaccgtctggcgaccgggacagaccagcctgtgggggctggcactc

SEQ ID NO: 159272 - DNA, 75 bp, synthetic construct
  source 1..75: mol_type = other DNA
taacaaggttctggcgtgttatcaacgtgaagctaacaaggaagtggtgcttctattaaataatcatcagttgaa

SEQ ID NO: 159273 - DNA, 75 bp, synthetic construct
  source 1..75: mol_type = other DNA
aagagaagcccaagtgtacgaccgattagatgaatatgagctatcaataaaatcgatcagatttgcaattgaaat

SEQ ID NO: 159274 - DNA, 75 bp, synthetic construct
  source 1..75: mol_type = other DNA
agggataattgaaacaggagatgattatattaattccttcttgaacttgtaccttagggcgctagtatgttcggt

SEQ ID NO: 159275 - DNA, 75 bp, synthetic construct
  source 1..75: mol_type = other DNA
ccaacgtaatcattatgtttcacttagtaaacaggaaaaagataatgttgaccggttaataatccaattactagc

SEQ ID NO: 159276 - DNA, 75 bp, synthetic construct
  source 1..75: mol_type = other DNA
aatttgattaagacaggaaaaaccaatttagcatccacgttatttcaatcgatgtccggtcatgctgacacaatt

SEQ ID NO: 159277 - DNA, 75 bp, synthetic construct
  source 1..75: mol_type = other DNA
aaaaagaaaagtatgcgattgcgagcattaaaaagaatggctatctttcaggtggttatcctagctcatttataa

SEQ ID NO: 159278 - DNA, 75 bp, synthetic construct
  source 1..75: mol_type = other DNA
gcatggcgtaagaaatcatttatcagatgatgaattatattttaggcatttagcatattcatatttagagcgttc

SEQ ID NO: 159279 - DNA, 75 bp, synthetic construct
  source 1..75: mol_type = other DNA
cccatacgctaaaaaatgaaaattgcgtcaaagatgttctgttagccgcacaagctgcggatgtggcgattgtcg

SEQ ID NO: 159280 - DNA, 75 bp, synthetic construct
  source 1..75: mol_type = other DNA
tgccgctgcaatgaaaggcggttatatcaacgcactggttaccgatcaggatacagcagcggcgatattacgggt

SEQ ID NO: 159281 - DNA, 75 bp, synthetic construct
  source 1..75: mol_type = other DNA
aattatctcaacagaaagcaaagcacatattttttcaaaatcgggatgacttagaattatttttacgacacaagg

SEQ ID NO: 159282 - DNA, 75 bp, synthetic construct
  source 1..75: mol_type = other DNA
ttattcgcgtacagattaattctcgctttgaaggctgtctggaatatgaaacacaattacgtcgtcagttttcgc

SEQ ID NO: 159283 - DNA, 75 bp, synthetic construct
  source 1..75: mol_type = other DNA
tatatcagccagggcgaacagttaatgattggccgaaaaggggcggttggcgacattttaggctacttttttgat

SEQ ID NO: 159284 - DNA, 75 bp, synthetic construct
  source 1..75: mol_type = other DNA
cttacctttaagcgcgctgaagaccatacccgtccgggttggcgtgcagggggagaaaataaagccgaagcaatt

SEQ ID NO: 159285 - DNA, 75 bp, synthetic construct
  source 1..75: mol_type = other DNA
atttgtgatgttccaatttgggagttataccatatattagataagttagtcgaaaataatattttaaaaacatca

SEQ ID NO: 159286 - DNA, 75 bp, synthetic construct
  source 1..75: mol_type = other DNA
taaatcactttcattggcagagttaaataaccatctttattcaatacctgaacaaccagatgctataccttacat

SEQ ID NO: 159287 - DNA, 75 bp, synthetic construct
  source 1..75: mol_type = other DNA
ggcaccatgcgattcaatgtaagcctgggccgtctgttccagtacaccaagctcagcgttgtatgtgttagctgc

SEQ ID NO: 159288 - DNA, 75 bp, synthetic construct
  source 1..75: mol_type = other DNA
gaagcggttttacactgctggatacctcggttgatgcctaccgacaacagcaactgcggcgggaaaactcccggc

SEQ ID NO: 159289 - DNA, 75 bp, synthetic construct
  source 1..75: mol_type = other DNA
tacacctttgttaatgataattgtagtattcatagggttggattcagtcgcatatataagcggttatttcaaaaa

SEQ ID NO: 159290 - DNA, 75 bp, synthetic construct
  source 1..75: mol_type = other DNA
atttgccatccatccatggctaataatgaattatcgggcccaacagttgcaacatttttagcaagagagttatca

SEQ ID NO: 159291 - DNA, 75 bp, synthetic construct
  source 1..75: mol_type = other DNA
tgccatattcaggtggttctgccgctatgtactataaatggcgtaacgtgctgtcggacaatattactttgaagc

SEQ ID NO: 159292 - DNA, 75 bp, synthetic construct
  source 1..75: mol_type = other DNA
caaaaaagtgctcttttcacatcctggcagtaacgatctcgacgcgaccgttgtttacggcgtcaatcaggatca

SEQ ID NO: 159293 - DNA, 75 bp, synthetic construct
  source 1..75: mol_type = other DNA
atattacgccggtcattaaatatgaatttaaccatccagatacggcaataagttttattcgccagggattaggaa

SEQ ID NO: 159294 - DNA, 75 bp, synthetic construct
  source 1..75: mol_type = other DNA
atgatccagattgatcttcccacgctggtaaaacggctgaacctgttctcccgccaggcgctggagatggccgcc

SEQ ID NO: 159295 - DNA, 75 bp, synthetic construct
  source 1..75: mol_type = other DNA
tccgttcctctcgaaccaaccttctatcgacagatttcgttgctggctaaagaaaagccggtagaaggcagtcca

SEQ ID NO: 159296 - DNA, 75 bp, synthetic construct
  source 1..75: mol_type = other DNA
aactgtatgacgcagatgtttcaccggcactgatatcaaaggttaccgatgccgcgatggagcaggttgtagaat

SEQ ID NO: 159297 - DNA, 75 bp, synthetic construct
  source 1..75: mol_type = other DNA
taatgttaacaatggctatcttagtactagtttatctaggctaaactatatacatagagtcgcttcatacttatc

SEQ ID NO: 159298 - DNA, 75 bp, synthetic construct
  source 1..75: mol_type = other DNA
cagcgatacggtcaaagcacgttatatcgataaagaactcagtaatcgctacgttccccgcggcaatcgccgcaa

SEQ ID NO: 159299 - DNA, 75 bp, synthetic construct
  source 1..75: mol_type = other DNA
aaaaaggtctacctttcttccgccgactggatgacgcgcaatattgattatcgtattgaagtggcgacgccgctg

SEQ ID NO: 159300 - DNA, 75 bp, synthetic construct
  source 1..75: mol_type = other DNA
tcatccgcgggaactgggcgcagaaaaatggctatgtcaaagctggccctgccggctatctcgacgaaattacgc

SEQ ID NO: 159301 - DNA, 75 bp, synthetic construct
  source 1..75: mol_type = other DNA
acactactctgtcgcggtttagcggatgggccagcagcattccctcagcagatagcattgcgcggaccggcattc

SEQ ID NO: 159302 - DNA, 75 bp, synthetic construct
  source 1..75: mol_type = other DNA
acgcaacgcaacgcaacgcaacgcaacgcaacgcaacgcaacgcaacgcaacgcaacgcaacgcaacgcaacgca

SEQ ID NO: 159303 - DNA, 75 bp, synthetic construct
  source 1..75: mol_type = other DNA
ctagaaataaactaaatcacaattttaaaacaatctacacagatcctaaacttgctcctgttagggcggtgatcc

SEQ ID NO: 159304 - DNA, 75 bp, synthetic construct
  source 1..75: mol_type = other DNA
ccgtaaacagtaacctgactatgggtacctgcagtgctcaggttctggattccagcaataaagcgacagataccg

SEQ ID NO: 159305 - DNA, 75 bp, synthetic construct
  source 1..75: mol_type = other DNA
tcaagcagagcagcagtcgaagtatggacgactacaagccccgaaggaactggcagtgagcaattcaattgttat

SEQ ID NO: 159306 - DNA, 75 bp, synthetic construct
  source 1..75: mol_type = other DNA
atggtgtcaccgcaaaactctcgccgtctgttatatgaaatggtagaccgcgaaatcgccaacgcgcagcaaggg

SEQ ID NO: 159307 - DNA, 75 bp, synthetic construct
  source 1..75: mol_type = other DNA
acaagttaaataaaattctcaatgccaaaagagcgtcaggctatacggaacctatagaggttttaccgcgtcctc

SEQ ID NO: 159308 - DNA, 75 bp, synthetic construct
  source 1..75: mol_type = other DNA
ttcgtggtgcagggaatacgaaaataccgctactgattaacggtagcctgaatattcttaatattattattagcg

SEQ ID NO: 159309 - DNA, 75 bp, synthetic construct
  source 1..75: mol_type = other DNA
agcagcaacgccagagtactttgcaagatatggcaaaccccgccatcctcatgatctgcttaatcatcaatgtgt

SEQ ID NO: 159310 - DNA, 75 bp, synthetic construct
  source 1..75: mol_type = other DNA
atatcgtccaacagggctttgacgctggcgttcgacttagtggcatcgtcgaaaaagatatgatcagcgtggcga

SEQ ID NO: 159311 - DNA, 75 bp, synthetic construct
  source 1..75: mol_type = other DNA
gcggagaatttgttgaagggattagcgacccgaatgattcgaaatggattcccggtcatcatatctcctcaaatg

SEQ ID NO: 159312 - DNA, 75 bp, synthetic construct
  source 1..75: mol_type = other DNA
gatttttctttgcccgagatagcgagattcaacattcctgatgggctggatgctgtaagtgatgcgctgcgaaga

SEQ ID NO: 159313 - DNA, 75 bp, synthetic construct
  source 1..75: mol_type = other DNA
cgtacagcgccgggtgaaaggcgtggtgacctggtttgaactcggggagaacgacaaaaaccagatgctgtacag

SEQ ID NO: 159314 - DNA, 75 bp, synthetic construct
  source 1..75: mol_type = other DNA
ggactgcattggctcctacaacgccggttttgctcccggcaatgccgggctgcgtcagcgttatgcccgggatat

SEQ ID NO: 159315 - DNA, 75 bp, synthetic construct
  source 1..75: mol_type = other DNA
gttcaagtattctcagttcttgatcactatagcttatcaacccgccaagatgtctcgcttaccccagctgagacg

SEQ ID NO: 159316 - DNA, 75 bp, synthetic construct
  source 1..75: mol_type = other DNA
ctcttggggttactgcttatttataaaatacgggcattccaatagatgcccgtataagcagagtatgattctggc

SEQ ID NO: 159317 - DNA, 75 bp, synthetic construct
  source 1..75: mol_type = other DNA
aaaagattgagtcaaagaaaatcagcagttactatcccattgaagaaactcataaagaagctgtatatcaacatt

SEQ ID NO: 159318 - DNA, 75 bp, synthetic construct
  source 1..75: mol_type = other DNA
gaagaaggaaaacaggatgatgaagaaaaaccgcaaccatcttgcgcaatggcagatgaacaggcaacggctgaa

SEQ ID NO: 159319 - DNA, 75 bp, synthetic construct
  source 1..75: mol_type = other DNA
acgctacatggagacgcatcatgacgtacaaaaacggtttatccccgctggcgcggggaacacactactgtcggt

SEQ ID NO: 159320 - DNA, 75 bp, synthetic construct
  source 1..75: mol_type = other DNA
aaaaaattgaaacaaaaaaaaattatcagctactaccctgtagtggatgcccacaaagaagctatatatcagcat

SEQ ID NO: 159321 - DNA, 75 bp, synthetic construct
  source 1..75: mol_type = other DNA
ttattgccgacgcacgggattgtttgttgaacaggttaaagaatggcgggctatctcaattcaggcgcatgaaaa

SEQ ID NO: 159322 - DNA, 75 bp, synthetic construct
  source 1..75: mol_type = other DNA
gagcatggatgaaagacaacaatcacgaacagatagaacttcttaacagaagactatctgaaagtgtcccatgca

SEQ ID NO: 159323 - DNA, 75 bp, synthetic construct
  source 1..75: mol_type = other DNA
aagaggtccttaaagacttaaaaaaagatttggcgacatatggagcgctgcttaataacaatgaaaatggattaa

SEQ ID NO: 159324 - DNA, 75 bp, synthetic construct
  source 1..75: mol_type = other DNA
accggtaatatttacattcggatgcttgatgcagaatggaacccagccagtccaacatggagtgcatggagagtt

SEQ ID NO: 159325 - DNA, 75 bp, synthetic construct
  source 1..75: mol_type = other DNA
cgcaatcgacgcatcatcatcaacccattacttcaaaaataatgaagaaagttatcgggagatgttttcaaaatt

SEQ ID NO: 159326 - DNA, 75 bp, synthetic construct
  source 1..75: mol_type = other DNA
gccgggggatttaaatctgacatgtttttttcattataaagatggacagtggcgggttatttcttattttttctg

SEQ ID NO: 159327 - DNA, 75 bp, synthetic construct
  source 1..75: mol_type = other DNA
tctttgcctggatggaacaaattgatcaggcaacacctgtaacgccaggtgcagttacggcgaatgcaacctacg

SEQ ID NO: 159328 - DNA, 75 bp, synthetic construct
  source 1..75: mol_type = other DNA
ggacgaggtcgtcgactcatcacctttacagacagtcgacaagggacagcccgaatggcggtgcgtatgcagcaa

SEQ ID NO: 159329 - DNA, 75 bp, synthetic construct
  source 1..75: mol_type = other DNA
tttgtttatggccatgcagcgcggacatatgaacgttattaatactatttttaacgcattacccactctgtttaa

SEQ ID NO: 159330 - DNA, 75 bp, synthetic construct
  source 1..75: mol_type = other DNA
aaataaagaggttattaaagacttaaaaaagatctggcagtatatggagcactacttgatagcaatgcaagtgga

SEQ ID NO: 159331 - DNA, 75 bp, synthetic construct
  source 1..75: mol_type = other DNA
taaaaaataaggagcaacctgatgatggttttcatgctaaattaaattcgctttttgaaactaacttattaaagt

SEQ ID NO: 159332 - DNA, 75 bp, synthetic construct
  source 1..75: mol_type = other DNA
aattaaaaagtgtagcacttgaacatgcaaaaagtgaagttattaacagtttaactatcgaggagcttaatgtat

SEQ ID NO: 159333 - DNA, 75 bp, synthetic construct
  source 1..75: mol_type = other DNA
cgggcagcggcccggcgatggaagcgacaccggtaaaaaattcagcgacaacgctcagttcaggcgactttaccg

SEQ ID NO: 159334 - DNA, 75 bp, synthetic construct
  source 1..75: mol_type = other DNA
tttgcctctgtagaaaacaaggtttttgcttctcttcctgctgatgttgagtgcggcgacttgatcaccagcact

SEQ ID NO: 159335 - DNA, 75 bp, synthetic construct
  source 1..75: mol_type = other DNA
atgattattgatttagacgctctatttccaagtcgaaagacttttacagatctggtggcttattgtactgatccg

SEQ ID NO: 159336 - DNA, 75 bp, synthetic construct
  source 1..75: mol_type = other DNA
agctgtattcccatcttcaccctcttgatttaccccaagccaaaaatatgattgccgaaatccggctacagcatc

SEQ ID NO: 159337 - DNA, 75 bp, synthetic construct
  source 1..75: mol_type = other DNA
atgactggctttcggtgttatttaaaagtttcaccagccttcgtgccaactttaacttatttcaggaacgcatcc

SEQ ID NO: 159338 - DNA, 75 bp, synthetic construct
  source 1..75: mol_type = other DNA
gacaccggtaaaaaattcagcgacaacgctcagttcaggcgactttaccgccggggcgacactggtggtggatta

SEQ ID NO: 159339 - DNA, 75 bp, synthetic construct
  source 1..75: mol_type = other DNA
tgccttgcggcaagctgggatgcatcaaatccacagtgggaaccgtggttaagagtcggtcatcagtcagagagt

SEQ ID NO: 159340 - DNA, 75 bp, synthetic construct
  source 1..75: mol_type = other DNA
taatagataactctatatctaacaaaccaaggagcgtcaatggaggatcatatgttaataactatgcatacgata

SEQ ID NO: 159341 - DNA, 75 bp, synthetic construct
  source 1..75: mol_type = other DNA
gatatgaccaatattcccgatgggatggaatggggcgtcattgatactaacctgataaatatcactgttggcccc

SEQ ID NO: 159342 - DNA, 75 bp, synthetic construct
  source 1..75: mol_type = other DNA
atgaatgcactgaccgccgtacaaaacaacgctgtcgattcaggccaggactatagcggattcactctcatcccg

SEQ ID NO: 159343 - DNA, 75 bp, synthetic construct
  source 1..75: mol_type = other DNA
gcacgtcaattgacctgaattctttaggtggtgcggaacacctgggaatatggcgcaatagcagtacatcaatag

SEQ ID NO: 159344 - DNA, 75 bp, synthetic construct
  source 1..75: mol_type = other DNA
ggctttgacaacccatcgtttaatggcacatcaggagctgccgggaatcatgcccacacggtagatattggcgca

SEQ ID NO: 159345 - DNA, 75 bp, synthetic construct
  source 1..75: mol_type = other DNA
gcggaaagttcttttaccctcagccgaaatgcctgccgttgctagacattgccagccagtgcccgtcactccctg

SEQ ID NO: 159346 - DNA, 75 bp, synthetic construct
  source 1..75: mol_type = other DNA
atcaacgacatgcttttatatttaatttttttggctttaatgatataaataacattgtatcagtttattattata

SEQ ID NO: 159347 - DNA, 75 bp, synthetic construct
  source 1..75: mol_type = other DNA
taatcttttcctattgtatttatctgtggcagcactccctcttttaaatattagattgatatttatttgcttctt

SEQ ID NO: 159348 - DNA, 75 bp, synthetic construct
  source 1..75: mol_type = other DNA
gcggggatcgacatcaccatcgacatgccggacggtacgccgcagccgggcgtaaaaatagaccttcaggagtaa

SEQ ID NO: 159349 - DNA, 75 bp, synthetic construct
  source 1..75: mol_type = other DNA
agaagcgcacaagccatgtgggctcttggcgcaggtgcaaatgcaggaattggttccatggtagatagttcagtt

SEQ ID NO: 159350 - DNA, 75 bp, synthetic construct
  source 1..75: mol_type = other DNA
taaaggggattatggtctttcaaaagaaatgaaaccaagcaaagtttctagctcatttggtgacgtaggtggttc

SEQ ID NO: 159351 - DNA, 75 bp, synthetic construct
  source 1..75: mol_type = other DNA
cgccgtctcttttattacaccactccgtttttttcatcgcttctggcccttcataaggggccccggctgaatgat

SEQ ID NO: 159352 - DNA, 75 bp, synthetic construct
  source 1..75: mol_type = other DNA
agcgggagagaatatttaaaagaaatgacaggaaaatgcagtaaacatttgtgttggccggaaggttattataac

SEQ ID NO: 159353 - DNA, 75 bp, synthetic construct
  source 1..75: mol_type = other DNA
ctaaaagaggtttttagtataacaagccactcttcagaaataaagagtcacccttcatatttccttctcatgacg

SEQ ID NO: 159354 - DNA, 75 bp, synthetic construct
  source 1..75: mol_type = other DNA
gtacacccggaagacaaagagaaactggagaagctcattcaccgcccgggagcagcccttcagatggcagcaaaa

SEQ ID NO: 159355 - DNA, 75 bp, synthetic construct
  source 1..75: mol_type = other DNA
ttagcagatttagttgttgtgccttctcaggtagaagaggctttttgtatggtagctgttgaagcgatggcggca

SEQ ID NO: 159356 - DNA, 75 bp, synthetic construct
  source 1..75: mol_type = other DNA
ggtaaacctgttcttgccagtcaaaaaggtggtattagcgagtttgttctggaggggataacgggctatcacctt

SEQ ID NO: 159357 - DNA, 75 bp, synthetic construct
  source 1..75: mol_type = other DNA
aaattatctgctttatcgggcacaaaaagagcgcgatgaaacattctatgttggaacgcgtttcgacaaagttcg

SEQ ID NO: 159358 - DNA, 75 bp, synthetic construct
  source 1..75: mol_type = other DNA
atggtaatcaaagtttgttcatgctctcagggcttcgacaacccatccaaattccgcgaagagtgggataagcaa

SEQ ID NO: 159359 - DNA, 75 bp, synthetic construct
  source 1..75: mol_type = other DNA
tgaatcgggacgaactggtgatcccgatccaggatctacgcataccggatgaatactcgcatgaatcccgttgcc

SEQ ID NO: 159360 - DNA, 75 bp, synthetic construct
  source 1..75: mol_type = other DNA
taatcggcggcgaacagcaaattgccgatttacatcggcggcgaacagcaaattgccgatttacaacagcaagat

SEQ ID NO: 159361 - DNA, 75 bp, synthetic construct
  source 1..75: mol_type = other DNA
gtcacgcacccgtcacttaatcagcaactgccagataagcgaaactgaaccgccccggttttcctggagagtgtt

SEQ ID NO: 159362 - DNA, 75 bp, synthetic construct
  source 1..75: mol_type = other DNA
tacatcaccgcattagccagtttctctttcacgaagccagtctgctggatgactggaaatttcgtgactggctgg

SEQ ID NO: 159363 - DNA, 75 bp, synthetic construct
  source 1..75: mol_type = other DNA
tgaagaccctgctaaaccgcgctgaaggtgcgttgttgatcaatgcggtgggtgtcgatgatgtgaagcaagcgg

SEQ ID NO: 159364 - DNA, 75 bp, synthetic construct
  source 1..75: mol_type = other DNA
ttccatatcctaaagatcacgaaaaatcacttaaggaacaagctcgtatcgtcgcaatactcgataaattcgaca

SEQ ID NO: 159365 - DNA, 75 bp, synthetic construct
  source 1..75: mol_type = other DNA
ctgattgaatttctcgatacctttgtcgggaagaacaatatggcaccaagtttttacacgatttcactgaatttc

SEQ ID NO: 159366 - DNA, 75 bp, synthetic construct
  source 1..75: mol_type = other DNA
cagggactgatatcgaaggatacaacaagctctctcacttcactattaccggaggtgaagctaattatgttgtgc

SEQ ID NO: 159367 - DNA, 75 bp, synthetic construct
  source 1..75: mol_type = other DNA
ggcgggaaagctgacacgacaattatatcctccgggagctggcaggttgttgagaaagatggtacggcaactggc

SEQ ID NO: 159368 - DNA, 75 bp, synthetic construct
  source 1..75: mol_type = other DNA
ttaaaggcgcgacgcttgccgacaataaaacgcagttggatcgctatgtgcgtgaaggtttggcacagtcaggag

SEQ ID NO: 159369 - DNA, 75 bp, synthetic construct
  source 1..75: mol_type = other DNA
cggagcggtcacgggcgatggagggcggctatcgtgatgacgatgaggcatatcatgaatttgatcgggggtgct

SEQ ID NO: 159370 - DNA, 75 bp, synthetic construct
  source 1..75: mol_type = other DNA
gtgaacgtgcggcccgtggcaccggaaaagtgctgcgctttaccggcacaccggaatttaacgcactgacggaaa

SEQ ID NO: 159371 - DNA, 75 bp, synthetic construct
  source 1..75: mol_type = other DNA
acgtatctgttacgtcacgaatcagccgtggtcgccggaagcggaaaaagcctggcgtgatggcctgtaccggaa

SEQ ID NO: 159372 - DNA, 75 bp, synthetic construct
  source 1..75: mol_type = other DNA
cggtcgcgggccatggagggcggttatcgtgatgacgatgaggcatatcatgaatttgatcgggggtgctggtag

SEQ ID NO: 159373 - DNA, 75 bp, synthetic construct
  source 1..75: mol_type = other DNA
taccggtctgacatgggccgaagcgggccgcaatgtcatgacggcagcaaagccgcgtcgccgtggcggtcgcaa

SEQ ID NO: 159374 - DNA, 75 bp, synthetic construct
  source 1..75: mol_type = other DNA
ctaatttgctcatcaaagcatggtgttgtcattttccatttcaatgaggaaagagagttaacccaagatgatatt

SEQ ID NO: 159375 - DNA, 75 bp, synthetic construct
  source 1..75: mol_type = other DNA
cctttctaacaaaaaattgtctgatttgaaaaagaaacttcttagtgtaatggaattaccagtattgttgttaat

SEQ ID NO: 159376 - DNA, 75 bp, synthetic construct
  source 1..75: mol_type = other DNA
ataccactatcttaagtggtaatcttgctgcaaacactcaggttaaaattcctgtttatatgtaccatagaggag

SEQ ID NO: 159377 - DNA, 75 bp, synthetic construct
  source 1..75: mol_type = other DNA
gaaatatcaggctattttaagttgggttgaggagcagggcggcttcaggtgctgctggaaaaactgcaaagtggc

SEQ ID NO: 159378 - DNA, 75 bp, synthetic construct
  source 1..75: mol_type = other DNA
tggtgttgttgagtgcgggatgtgtctcgctcgatcctcactacagtacgcctgaatccccaatcccggcgacct

SEQ ID NO: 159379 - DNA, 75 bp, synthetic construct
  source 1..75: mol_type = other DNA
aaactcggttcagtcagggttccattaaaattcttagaaaatcagctatttgacctgaaatttgaaggcgaaact

SEQ ID NO: 159380 - DNA, 75 bp, synthetic construct
  source 1..75: mol_type = other DNA
ggcatcattaaaattattttctatatttttatctttgctggtttgatagggaaaatactccatctgttcgggtga

SEQ ID NO: 159381 - DNA, 75 bp, synthetic construct
  source 1..75: mol_type = other DNA
ttatctctggcacggaagccgggctgccggtcgcccgtggtggtatcgccactttacggaagcgccccgtcgctg

SEQ ID NO: 159382 - DNA, 75 bp, synthetic construct
  source 1..75: mol_type = other DNA
atgaaacgcgaaggcttctggcgggatgtcaccccgccactgaatatttatggtgtcccgttgccgtttaccatg

SEQ ID NO: 159383 - DNA, 75 bp, synthetic construct
  source 1..75: mol_type = other DNA
atggcagaagcattttacatcctgataggatttctgattatggcggcgattatcgtcatggctgtcctttacctc

SEQ ID NO: 159384 - DNA, 75 bp, synthetic construct
  source 1..75: mol_type = other DNA
atggccagtatcaacaccattgtgaaacgcaagcagtacctgtggctggggattgtggttgtcggtgcagcctcc

SEQ ID NO: 159385 - DNA, 75 bp, synthetic construct
  source 1..75: mol_type = other DNA
atgaacagcatatttaccgccacaagacgaaccctgctgacgcatttcaccgatgccgcgggccgcgagttcatg

SEQ ID NO: 159386 - DNA, 75 bp, synthetic construct
  source 1..75: mol_type = other DNA
ggtttaccctccgtctggtgctggcgaaacgccgttatcgctgtgtacgtgagtccagttttttggggttatgtg

SEQ ID NO: 159387 - DNA, 75 bp, synthetic construct
  source 1..75: mol_type = other DNA
ccacgatgaactatgttgatagaaatacattgcagcttgatacctccgtcttattcgacatgccaagccctgcaa

SEQ ID NO: 159388 - DNA, 75 bp, synthetic construct
  source 1..75: mol_type = other DNA
taccgctgtgtcgggagcatcacaacgagcttcatgcggatccgctggcgttcgaagaaaagcatggttctcagg

SEQ ID NO: 159389 - DNA, 75 bp, synthetic construct
  source 1..75: mol_type = other DNA
aaatccccgttcccgcttcagcttcggggaagactttgcccgcaccggtgacctctcctgctttgtgctgctgga

SEQ ID NO: 159390 - DNA, 75 bp, synthetic construct
  source 1..75: mol_type = other DNA
cagactccatttcatcaataataaacttggtttcctgtgctgactatgtcacggttctggcgaaacctatgggtg

SEQ ID NO: 159391 - DNA, 75 bp, synthetic construct
  source 1..75: mol_type = other DNA
catggagggactacaaagccgtcactcgcgacctgaaagcgatttatcaggctcccacggaagaggcaggccagc

SEQ ID NO: 159392 - DNA, 75 bp, synthetic construct
  source 1..75: mol_type = other DNA
atgccagagggatgactacccgcgaaattacctcagccttcaaagaaatgtacgatgcagacgtctctccggcgc

SEQ ID NO: 159393 - DNA, 75 bp, synthetic construct
  source 1..75: mol_type = other DNA
agtttagggattttaatttttttaaaaaaatcctaataagcatcaggcgaagaaattatatgggaattttgaaag

SEQ ID NO: 159394 - DNA, 75 bp, synthetic construct
  source 1..75: mol_type = other DNA
tgaatttactcaatatccactggtgatggggttgattctcggcaccggcgttggcggcgggctgattttcaacgg

SEQ ID NO: 159395 - DNA, 75 bp, synthetic construct
  source 1..75: mol_type = other DNA
aaagcaaacgcagcgctgatgatgcttgatcggattgaaacggtagaccctgttgatgatgaccgtatcgacagc

SEQ ID NO: 159396 - DNA, 75 bp, synthetic construct
  source 1..75: mol_type = other DNA
gcgtctcgagggaatcagcagtatcgaagcagccaatgcttggctggataccttcatcgctgacttcaatcgtcg

SEQ ID NO: 159397 - DNA, 75 bp, synthetic construct
  source 1..75: mol_type = other DNA
tgattgtgcgcagaaccttaattccggcactcggcggcatgcttaccatgatgctggccaacttcttgttgttct

SEQ ID NO: 159398 - DNA, 75 bp, synthetic construct
  source 1..75: mol_type = other DNA
gcgcagctgctgcacgtcgcgatttccagcgccgccggattggcgatgatgttattggtgacgttctttcctgtg

SEQ ID NO: 159399 - DNA, 75 bp, synthetic construct
  source 1..75: mol_type = other DNA
gtatcaaaatatttatgaacaactattgaatacagttcaaaaagcagaaagaaaaaatgttccgtgccagattat

SEQ ID NO: 159400 - DNA, 75 bp, synthetic construct
  source 1..75: mol_type = other DNA
attaagaccgggctggtcaggggctgtccgtgggcttccgtccccatgaatacacctttctggacggaggcggac

SEQ ID NO: 159401 - DNA, 75 bp, synthetic construct
  source 1..75: mol_type = other DNA
atgatgctaagcgaggaaacgtccgccgtacgcccacaaaaacaaacgcgatttaacggtgcaaaactggtatgg

SEQ ID NO: 159402 - DNA, 75 bp, synthetic construct
  source 1..75: mol_type = other DNA
aagaggtgcattgtttacttaaagcggctgcggaaaatcaatactcagttcgtgattactgcatgataagtatgg

SEQ ID NO: 159403 - DNA, 75 bp, synthetic construct
  source 1..75: mol_type = other DNA
agcgcagaagattattggatattttttctgatatcgttaataaaatttcctgagactgcagaggaactcctgaaa

SEQ ID NO: 159404 - DNA, 75 bp, synthetic construct
  source 1..75: mol_type = other DNA
gagacacttttcatactaataaatctaataatataatagaaatctatgtgcctgataggtatttatttcagggga

SEQ ID NO: 159405 - DNA, 75 bp, synthetic construct
  source 1..75: mol_type = other DNA
tagaatgaagttcacgaataataatgcaagcggaaacccacctgcaggtgaatattcatccattatcaatgtaac

SEQ ID NO: 159406 - DNA, 75 bp, synthetic construct
  source 1..75: mol_type = other DNA
gcgaattgtgctgacggggcatccgcaggcgaacctgaaccgggaatggcaggtggtggcgagcgatcttcacgg

SEQ ID NO: 159407 - DNA, 75 bp, synthetic construct
  source 1..75: mol_type = other DNA
ccacgggcagaactttgcccgctggcagatggatggctggcgcaacaacgcagaagtggcgcgcggaacaagccg

SEQ ID NO: 159408 - DNA, 75 bp, synthetic construct
  source 1..75: mol_type = other DNA
taagatcattatgaataactttgaaaagctcaagtcccggaaagctatcccagaaaatatgagtcctgaagagta

SEQ ID NO: 159409 - DNA, 75 bp, synthetic construct
  source 1..75: mol_type = other DNA
caataaaagatattatcaaaaatatgatggatagtggaaagtacgatgacgccctcatttgggttgaaaaattga

SEQ ID NO: 159410 - DNA, 75 bp, synthetic construct
  source 1..75: mol_type = other DNA
atcaggccattgcgctggtagtggccgagaccttcgaacaggcacgagcggcggcctcgctggtgcaggcgcact

SEQ ID NO: 159411 - DNA, 75 bp, synthetic construct
  source 1..75: mol_type = other DNA
gcatcagagagctgcgtcaggatgccgctctgctcgtatcattcgacgcgaaagacctggctgaactctcctaca

SEQ ID NO: 159412 - DNA, 75 bp, synthetic construct
  source 1..75: mol_type = other DNA
agaaaacttccacctggctgaatatatggcccgatgaaatctatggtagtaccgaaacaggtattctcgcatggc

SEQ ID NO: 159413 - DNA, 75 bp, synthetic construct
  source 1..75: mol_type = other DNA
gtgagagacagaacgcgcagctataccaccgacctgccccgcatagggttgccattcctttcgcacatgcgtagc

SEQ ID NO: 159414 - DNA, 75 bp, synthetic construct
  source 1..75: mol_type = other DNA
ctcactgtggggactggtgctgctgtcgctcatccgcggcattccgtttctctccccggtgctagggccgggtgc

SEQ ID NO: 159415 - DNA, 75 bp, synthetic construct
  source 1..75: mol_type = other DNA
gcgttttgctggtgctggatgacgaagctcgcctgcaatggcagaacggcggcgggcatagccaggaaatggcct

SEQ ID NO: 159416 - DNA, 75 bp, synthetic construct
  source 1..75: mol_type = other DNA
agttccatctgatggggcggcgcggacgcatcgttaagattgaagaaaaacgtatttctttgcaggaagtggaac

SEQ ID NO: 159417 - DNA, 75 bp, synthetic construct
  source 1..75: mol_type = other DNA
gagggccgtgttttatcccgctggggcgatgccggttgggggcggacggttgccgacaacaaacatgccgggcgt

SEQ ID NO: 159418 - DNA, 75 bp, synthetic construct
  source 1..75: mol_type = other DNA
gcggaaacttcatctttaccactgcgaccaccggggactgccgcaggcgctcatcagcccggaaggggaaacggc

SEQ ID NO: 159419 - DNA, 75 bp, synthetic construct
  source 1..75: mol_type = other DNA
tggtcccgataataaaatacttaatgaattaggtccgagagatggcattgacggtttgggttcacaaaacatgaa

SEQ ID NO: 159420 - DNA, 75 bp, synthetic construct
  source 1..75: mol_type = other DNA
tccccccgcaaaattatattcgcatgggaacagatcctaacgtttcgcaaaaccttccgttcggggtgatggatt

SEQ ID NO: 159421 - DNA, 75 bp, synthetic construct
  source 1..75: mol_type = other DNA
ttcagacttgctgctgctagacgaaccgactaaccacctcgatctcgatgccgttatcctgtctcttatacacat

SEQ ID NO: 159422 - DNA, 75 bp, synthetic construct
  source 1..75: mol_type = other DNA
ggaaagacttggtttagagctcctgttcgctaccaaatggatctagagcatattcgtaaaattacagagattcgt

SEQ ID NO: 159423 - DNA, 75 bp, synthetic construct
  source 1..75: mol_type = other DNA
cgatgacgtctcgaaaacagctgcggtatctttaccgcgactcattacgtcattgatcccaaccaacctcttcct

SEQ ID NO: 159424 - DNA, 75 bp, synthetic construct
  source 1..75: mol_type = other DNA
cattggaaaaattgggggttccaaatacgattgctaatattgcagcgtcttttggttccagcatgggacaaaatg

SEQ ID NO: 159425 - DNA, 75 bp, synthetic construct
  source 1..75: mol_type = other DNA
ttgcggtgttcttcaatatgaacggcaagacagtagcgttacgaatggatgctgagcagaagcggatcgtcgcat

SEQ ID NO: 159426 - DNA, 75 bp, synthetic construct
  source 1..75: mol_type = other DNA
caccaacagcgccagcctgaatggcgataaacaagttacgctgatctatctgcaaacgctggcttcacagcatgg

SEQ ID NO: 159427 - DNA, 75 bp, synthetic construct
  source 1..75: mol_type = other DNA
atgcattccgctacccgcagggcgttaagctcgatcaggaaaacagccgtattttttctgccgaaactgggctgg

SEQ ID NO: 159428 - DNA, 75 bp, synthetic construct
  source 1..75: mol_type = other DNA
atgcaagcgctgccacgactcagtgaagcaacgcatggagaagggaggaactgtcactgagttcgacaatgatgg

SEQ ID NO: 159429 - DNA, 75 bp, synthetic construct
  source 1..75: mol_type = other DNA
aaaaacgtttgtcccaacgttcagacataaattccacgatttacgctgcacctacgccactttgcgtttgcaaca

SEQ ID NO: 159430 - DNA, 75 bp, synthetic construct
  source 1..75: mol_type = other DNA
gcaaagatttaacgaattcttatatgaatggaatgggaaaaaagaatacagtagttacttgggaacaccaaataa

SEQ ID NO: 159431 - DNA, 75 bp, synthetic construct
  source 1..75: mol_type = other DNA
tgcagccacagggggatgactgtaatacctctgatcaccacagtcagtcatctgtaaatgttaaatacctcacag

SEQ ID NO: 159432 - DNA, 75 bp, synthetic construct
  source 1..75: mol_type = other DNA
tgagctggcacggttaacgcaaaccagtcaggcgtcggtgacgcgttttgcccgtgcactggggtgcaaagatgt

SEQ ID NO: 159433 - DNA, 75 bp, synthetic construct
  source 1..75: mol_type = other DNA
ctttcttaatgatttgaatgatgcttgcgagtacccgattacttatcaggatgttttcgaattcccctcattcgt

SEQ ID NO: 159434 - DNA, 75 bp, synthetic construct
  source 1..75: mol_type = other DNA
cctttcatcacaaggtagaacgttatgttgcattccccactatgataaagctatttctatagataataatctcgt

SEQ ID NO: 159435 - DNA, 75 bp, synthetic construct
  source 1..75: mol_type = other DNA
aacgggtatggcggcgggagcgtgacctgacggggtggatgtcgctgtcgcgtaaaccggaggagacctggtacg

SEQ ID NO: 159436 - DNA, 75 bp, synthetic construct
  source 1..75: mol_type = other DNA
ctcaacgtcgctggattgacttgaacacccgcagcaacatgctgcaaagtgaaaccatgcgccttacgcacattt

SEQ ID NO: 159437 - DNA, 75 bp, synthetic construct
  source 1..75: mol_type = other DNA
ttagtgcggcagggccggggaatcgaccagctggcgtcatgccgcaaaccaagagcattgcggtcaaatgtacga

SEQ ID NO: 159438 - DNA, 75 bp, synthetic construct
  source 1..75: mol_type = other DNA
gaaaaagcggaaaatttcatgtcagcaggctataaaaattttcttgctgaagtcaacaacctgaacaaacgtatg

SEQ ID NO: 159439 - DNA, 75 bp, synthetic construct
  source 1..75: mol_type = other DNA
acgggacagccggagatttgtataaaacaactttttacggtccgacacagtattatctgctgaaaaagcccaaat

SEQ ID NO: 159440 - DNA, 75 bp, synthetic construct
  source 1..75: mol_type = other DNA
cgtgtggcacaggcgtgggcaggcaccggttttggccacctggcgataccgcgtgtgggtcaggaggtgattgta

SEQ ID NO: 159441 - DNA, 75 bp, synthetic construct
  source 1..75: mol_type = other DNA
ttcaaatacctatttaaacagtcaaactccgacaaaaagccagggagtggttttgaatataacaaattgttcgcc

SEQ ID NO: 159442 - DNA, 75 bp, synthetic construct
  source 1..75: mol_type = other DNA
tatttaagtgatatcgttacagtcaggattccgcgtttatttgatccagataacacactccccgctaatgaaata

SEQ ID NO: 159443 - DNA, 75 bp, synthetic construct
  source 1..75: mol_type = other DNA
ccgatgggccagcaacagcagggatagatgatttgggtgaaattttagctaagatgaaacagagaacatcgagag

SEQ ID NO: 159444 - DNA, 75 bp, synthetic construct
  source 1..75: mol_type = other DNA
tcctgtacgctgaacctgactaacggcaacgttaatttaggggacatcgacgtcacaaataccagtttaggttct

SEQ ID NO: 159445 - DNA, 75 bp, synthetic construct
  source 1..75: mol_type = other DNA
tgtctgcggaatactaatttatttgatttgaaaattgaaagtatttctgatgagaatatttccttagttaagggg

SEQ ID NO: 159446 - DNA, 75 bp, synthetic construct
  source 1..75: mol_type = other DNA
atcaaatgtggcgagatgcaaatatagggggggggggcaatgatgcaggtaatgcatacggcattcttattaatg

SEQ ID NO: 159447 - DNA, 75 bp, synthetic construct
  source 1..75: mol_type = other DNA
cgtggccgaggccattctgaccatcaacagcggtatcgatcggctcaataccaacctggaagactcgaagaaaaa

SEQ ID NO: 159448 - DNA, 75 bp, synthetic construct
  source 1..75: mol_type = other DNA
cgtggccgaggccattctgactatcaacagtggtatcgatcggctcaatgccaacctggaagactcgaagaaaaa

SEQ ID NO: 159449 - DNA, 75 bp, synthetic construct
  source 1..75: mol_type = other DNA
tcatgaaagtgctcggctggctcgatggcggatcgtcggcgatggacgatatcaagtccgggtcctcattcctga

SEQ ID NO: 159450 - DNA, 75 bp, synthetic construct
  source 1..75: mol_type = other DNA
aaataatggcggatatggagcgagacccaacaaaccgcctacgcccgatccaagtaaattgccggacatagcgaa

SEQ ID NO: 159451 - DNA, 75 bp, synthetic construct
  source 1..75: mol_type = other DNA
atgccagaggtaaaatcaccagccatcgggcaagagccactatagccagtcagctttacaacgccagggaaccac

SEQ ID NO: 159452 - DNA, 75 bp, synthetic construct
  source 1..75: mol_type = other DNA
ctgctgttgccgtggctgttcgaaagcaaagttgtggcgatgacggtgctcggcctggcaatggcctgctggatt

SEQ ID NO: 159453 - DNA, 75 bp, synthetic construct
  source 1..75: mol_type = other DNA
tgatcaaaacgttggtctggtgcgataacgaatggggctttgctaaccgaatgcttgacacgacgttagcgatga

SEQ ID NO: 159454 - DNA, 75 bp, synthetic construct
  source 1..75: mol_type = other DNA
ttccggtcgatactaaactggccgccggtatcacacgattttttccgcaatttaacgatcgctttgaagcgattg

SEQ ID NO: 159455 - DNA, 75 bp, synthetic construct
  source 1..75: mol_type = other DNA
ggatatcccgtaaggatgcatgccaaaaatatagtgttaataatggttatctaagtatcagtatatctaggttga

SEQ ID NO: 159456 - DNA, 75 bp, synthetic construct
  source 1..75: mol_type = other DNA
ggatgatgaaaagagtgtccatgaacgagtggataatgcccgtattgatttacgctcaaaatactatgttaaacc

SEQ ID NO: 159457 - DNA, 75 bp, synthetic construct
  source 1..75: mol_type = other DNA
ggatatcgacttaggcattcggttgttactgtatgcgagaactttgacggtgaaattaacgttctgtatgacggg

SEQ ID NO: 159458 - DNA, 75 bp, synthetic construct
  source 1..75: mol_type = other DNA
tgaaactggagcctgagttgcgtgccgagtttatggctgaagccgccagtgaggatcggccagcatctcagatca

SEQ ID NO: 159459 - DNA, 75 bp, synthetic construct
  source 1..75: mol_type = other DNA
gtttaatgccttctggcagcaaaataaactgatcgaaatgcgccgcagcgagaagaacgaacagtacgttcgtta

SEQ ID NO: 159460 - DNA, 75 bp, synthetic construct
  source 1..75: mol_type = other DNA
gcggcggttttggtttctcttatcattactccaattgtggcaacccgacacgtgttggcggcgtgctgccggaaa

SEQ ID NO: 159461 - DNA, 75 bp, synthetic construct
  source 1..75: mol_type = other DNA
accaggaatggcaactcacaagccgacattaaaatttgatggcaatgtggttggtagtgcattgtggcgtgacac

SEQ ID NO: 159462 - DNA, 75 bp, synthetic construct
  source 1..75: mol_type = other DNA
gcattcaatatttacaactatctaaaggtaagtttgaatcatttgacggattatttaatatacaatctttattga

SEQ ID NO: 159463 - DNA, 75 bp, synthetic construct
  source 1..75: mol_type = other DNA
ccttcatgtccgtattgggaaaaaagaatctgaatatatggaaatacagaagttgtctaaactatctgatttgat

SEQ ID NO: 159464 - DNA, 75 bp, synthetic construct
  source 1..75: mol_type = other DNA
cagaacgttgggttctgcatggagatgtatctcctgatgtattaaataaattcgcatatctcggacgaaaattat

SEQ ID NO: 159465 - DNA, 75 bp, synthetic construct
  source 1..75: mol_type = other DNA
cgtccgcaggctgaaacagcacgccggcttcgaactgaacaaaacgcactggcgtcccgccatcagcacggagaa

SEQ ID NO: 159466 - DNA, 75 bp, synthetic construct
  source 1..75: mol_type = other DNA
aaaaatatcatcaataattttgatgacaacatgttaaacgttgctgccatgagtgatgaagaaaagaaactattt

SEQ ID NO: 159467 - DNA, 75 bp, synthetic construct
  source 1..75: mol_type = other DNA
atgagaattgattatagtattagcaatgaacacgcagagaaatttattagtcttttagtgttgggtgttttatat

SEQ ID NO: 159468 - DNA, 75 bp, synthetic construct
  source 1..75: mol_type = other DNA
ttcaactgataaacccaaattttgtgcctggtgaaaccttcggagaactcatcacgttgtcagtcaacgagctgg

SEQ ID NO: 159469 - DNA, 75 bp, synthetic construct
  source 1..75: mol_type = other DNA
gtttttgactatttcaacaatatcgtatggttgcgaaatattctttgtgcaaaatattttttttctcacatatga

SEQ ID NO: 159470 - DNA, 75 bp, synthetic construct
  source 1..75: mol_type = other DNA
gctgtttgcaatatgtgcgaccttttatagataacaatccgacgctatataaagttttttctcaatattggttgt

SEQ ID NO: 159471 - DNA, 75 bp, synthetic construct
  source 1..75: mol_type = other DNA
ccttgggcgccgcgtgacgccagaaatgctcgataagtgggagctctatcgcatcgcccagcgctgcgaccagaa

SEQ ID NO: 159472 - DNA, 75 bp, synthetic construct
  source 1..75: mol_type = other DNA
ttactgaagtgatcgatgctcgcctgcgatatccacacacagcgctgctgtacgtgtcctttaacgcaaagtcat

SEQ ID NO: 159473 - DNA, 75 bp, synthetic construct
  source 1..75: mol_type = other DNA
acagtggaagcgtggaaataacgagtgggtaaacgtacctgaaaccgggttgcgaaatatcgaagtgcctggcat

SEQ ID NO: 159474 - DNA, 75 bp, synthetic construct
  source 1..75: mol_type = other DNA
aaagaaacgttggaagaagaaaaggccaccgacatcaaactgactgatctggcccttaataacgtaaataagaaa

SEQ ID NO: 159475 - DNA, 75 bp, synthetic construct
  source 1..75: mol_type = other DNA
attgcagcagaaacaggcagaagctattgcagcagaagcgaacagccgtcttgccaggcaacaaatggaacaaat

SEQ ID NO: 159476 - DNA, 75 bp, synthetic construct
  source 1..75: mol_type = other DNA
gacatcctggagaacgctgacgggctggctcaggccgaagtgaagatcgacgagatttctgtgtcgatggacggc

SEQ ID NO: 159477 - DNA, 75 bp, synthetic construct
  source 1..75: mol_type = other DNA
taccaggaaacgctggcgctgtaccagggcaaacttgatgggtacaccgaacatgatcctacccacgtaatatgg

SEQ ID NO: 159478 - DNA, 75 bp, synthetic construct
  source 1..75: mol_type = other DNA
tgtgccactcatactggcatgtcacaaactgaggataatattaatgcagtcgctatgaagattactgcagatatt

SEQ ID NO: 159479 - DNA, 75 bp, synthetic construct
  source 1..75: mol_type = other DNA
aaagcctggatgtttaatacccgtctctatcgggttaatttcgatgaggctaacgtgcagggaatgggcatttcc

SEQ ID NO: 159480 - DNA, 75 bp, synthetic construct
  source 1..75: mol_type = other DNA
acgttcgctatcatggaatattaatcagaagtacaataaccataaccattacggcttttcaggaagtgcagttct

SEQ ID NO: 159481 - DNA, 75 bp, synthetic construct
  source 1..75: mol_type = other DNA
tttagattcggaggcaattgatagcagtggcaggaagaattcaactagcataggaattaataagttgataaataa

SEQ ID NO: 159482 - DNA, 75 bp, synthetic construct
  source 1..75: mol_type = other DNA
aattccaaccaacggagcgatagtagaaggtaagtttagaacaagtgaaggacaaaaaactttagtaaggataac

SEQ ID NO: 159483 - DNA, 75 bp, synthetic construct
  source 1..75: mol_type = other DNA
ccgtgggcgttggctgatagatcgccgagcagtatttgtgggtcctggtgaaacaggaattgcgccggaaattca

SEQ ID NO: 159484 - DNA, 75 bp, synthetic construct
  source 1..75: mol_type = other DNA
atgctggtacctgaggcgctacgctatcagacctacaaaacctgcacgttagccctttgtaggccagatgcgcca

SEQ ID NO: 159485 - DNA, 75 bp, synthetic construct
  source 1..75: mol_type = other DNA
gatatggaatactctggtattgtctgtaaagatactaatggaaaatattttgcatctaaggcagaaactgataat

SEQ ID NO: 159486 - DNA, 75 bp, synthetic construct
  source 1..75: mol_type = other DNA
tgtgccactcatactggcatgtcacaaactgaggataatcttcatgcagtcgctatgaagattactgcagatatt

SEQ ID NO: 159487 - DNA, 75 bp, synthetic construct
  source 1..75: mol_type = other DNA
gggggccaggtaaagcaagtaatgatacaaaagaagctgctggccgttgtgacctcgttgaaaccgataatagtt

SEQ ID NO: 159488 - DNA, 75 bp, synthetic construct
  source 1..75: mol_type = other DNA
tggagcggatgaaagagagactgccactgtatctcattatggttctggaaaaccaatacaaccgactgaatgagc

SEQ ID NO: 159489 - DNA, 75 bp, synthetic construct
  source 1..75: mol_type = other DNA
tttatcttttacaacaatctcagtgctgccggtggcagtgtgaaactcaaccccggtcaccagcacgcagtcgtt

SEQ ID NO: 159490 - DNA, 75 bp, synthetic construct
  source 1..75: mol_type = other DNA
tcggctctatcagcgatgaaaaattatacgataacttactggaagaatttagaccgtggatagatgaaacaaaaa

SEQ ID NO: 159491 - DNA, 75 bp, synthetic construct
  source 1..75: mol_type = other DNA
tctcggttaccaactcaatcaacgaggtaaaaaacctgttcgtgggaaatgcaatcccgcaagagggtgaggttc

SEQ ID NO: 159492 - DNA, 75 bp, synthetic construct
  source 1..75: mol_type = other DNA
cggacgacgagcggacccaccactaccactacgacagccagcaccgcctggttttctacccgcggatacagcatg

SEQ ID NO: 159493 - DNA, 75 bp, synthetic construct
  source 1..75: mol_type = other DNA
ttgaataccagataaacgccacgctttacctttaccctggtcccgaaagcgaacccatccgcgccgccgccgtga

SEQ ID NO: 159494 - DNA, 75 bp, synthetic construct
  source 1..75: mol_type = other DNA
tatggtgatagatggcagtgatacgataagcggcctcgcgcagctgaaactttctgctgaaagtcaggccacctt

SEQ ID NO: 159495 - DNA, 75 bp, synthetic construct
  source 1..75: mol_type = other DNA
gtatgcgaacggaattcgtttggggcaaacgcatgcagttcatgctgaaggtgattgtagtacatgcttatctga

SEQ ID NO: 159496 - DNA, 75 bp, synthetic construct
  source 1..75: mol_type = other DNA
catgagggggcatgtggtgttttacgactggatgcaattgaacacaaaacagcgcaatacgaaatatctgtattt

SEQ ID NO: 159497 - DNA, 75 bp, synthetic construct
  source 1..75: mol_type = other DNA
ttgaaaacatggctgaacttatgctagaacatgattttgcgattggtgcaatgggcgggacaacatgggaacgtt

SEQ ID NO: 159498 - DNA, 75 bp, synthetic construct
  source 1..75: mol_type = other DNA
atggcgaaccattgccagggtctcaggacagccaatcgcaacagtgatggcggtgtatatccaccttctggtgag

SEQ ID NO: 159499 - DNA, 75 bp, synthetic construct
  source 1..75: mol_type = other DNA
tttgtctctaacaattctcctcactatataactttagccggagtaaagataaatggagtcaatataagatccgat

SEQ ID NO: 159500 - DNA, 75 bp, synthetic construct
  source 1..75: mol_type = other DNA
cgctataccggcaagacgccgaaagaatattacctcgatgcgcgtctggatctggcgctatcgctattaaagcaa

SEQ ID NO: 159501 - DNA, 75 bp, synthetic construct
  source 1..75: mol_type = other DNA
cgtgagcttccgtcacaaattcgttccggcgatatcaccggcacaaccggtaaaaatgcagctgttgcttcattt

SEQ ID NO: 159502 - DNA, 75 bp, synthetic construct
  source 1..75: mol_type = other DNA
tcctcttgtttatgatgaatatatattatggttccatgaccttttcaggttggttgaatcagttgtcagtagata

SEQ ID NO: 159503 - DNA, 75 bp, synthetic construct
  source 1..75: mol_type = other DNA
agccccccgcaacagaagaagtcagtattgctaatgcgacgggcagcaatgttgtcgattacccaatgagtgcgg

SEQ ID NO: 159504 - DNA, 75 bp, synthetic construct
  source 1..75: mol_type = other DNA
gggtataacgcaggtcttaaggccgtgaccactgaccggggcaccagtgcggtggcgggcgatacgctgatgatt

SEQ ID NO: 159505 - DNA, 75 bp, synthetic construct
  source 1..75: mol_type = other DNA
agaacgtcttgagcgcgatcagcatctgcttattgcgaataaaccggggttcgttcgcgatacggaaagcatgtc

SEQ ID NO: 159506 - DNA, 75 bp, synthetic construct
  source 1..75: mol_type = other DNA
gctacgcgtcttatcatgccgacaaaaccgcactcacccgtaggccggataaggcgttcacgccgcatccggcgg

SEQ ID NO: 159507 - DNA, 75 bp, synthetic construct
  source 1..75: mol_type = other DNA
tcggtaccagcggtgaaaagatccccctgttgagtacggctaacacatggagtgcgcgccagactttcaacggcg

SEQ ID NO: 159508 - DNA, 75 bp, synthetic construct
  source 1..75: mol_type = other DNA
cgctaaaccgaaaattcagggggattgttgacccgggattttatgccggtttcttacctaagcctggcggtggga

SEQ ID NO: 159509 - DNA, 75 bp, synthetic construct
  source 1..75: mol_type = other DNA
ggaactgaccagccccgcacagaatattgttatcagcgatgtgcagtcagcgtactgcacatcgttttcggtcag

SEQ ID NO: 159510 - DNA, 75 bp, synthetic construct
  source 1..75: mol_type = other DNA
gcgcgtgatggttatggctttgaagctaactggtcagagttttacaccacaacccgcaaaccctctgcgggggat

SEQ ID NO: 159511 - DNA, 75 bp, synthetic construct
  source 1..75: mol_type = other DNA
tgtcttgcaggtgctgtggtggaagttattggcactcgcggcgcaatgaccatacgcgttactacgccgagcacg

SEQ ID NO: 159512 - DNA, 75 bp, synthetic construct
  source 1..75: mol_type = other DNA
aaggggcattcaatcacccatactggatgtgcaaatgttcatggtcatacggcaataataaaattattaccgata

SEQ ID NO: 159513 - DNA, 75 bp, synthetic construct
  source 1..75: mol_type = other DNA
ctttgctccgtagatgaatcagtaaaattttatattgaccataaaaaaggttttgattttaaaacagcccttgaa

SEQ ID NO: 159514 - DNA, 75 bp, synthetic construct
  source 1..75: mol_type = other DNA
cttcgggcattcgctgaacaaaaacacttggttataggggcaagggttttttttaaaactattatcaatgatcaa

SEQ ID NO: 159515 - DNA, 75 bp, synthetic construct
  source 1..75: mol_type = other DNA
aacgacgggaaccagctgacggcggtggtgtccccggacgggctggagagccgccgggaatatgatgaaccgggc

SEQ ID NO: 159516 - DNA, 75 bp, synthetic construct
  source 1..75: mol_type = other DNA
tgccgggaacaaagacgcagatgaccatccgctccaaaacgtacatgggcagcggatttaatgagctgaagtttg

SEQ ID NO: 159517 - DNA, 75 bp, synthetic construct
  source 1..75: mol_type = other DNA
ttccacatcagaaatggctacaagtttaacaatcctccctttgagcacgaggttgtttctatacaatatcaggga

SEQ ID NO: 159518 - DNA, 75 bp, synthetic construct
  source 1..75: mol_type = other DNA
caccgcgaaaccgtaaaaaatgaccagacggtcacgatccaggaaggtaaccgccttcttacggtggaaaaaggc

SEQ ID NO: 159519 - DNA, 75 bp, synthetic construct
  source 1..75: mol_type = other DNA
cccgaacggagggctataacgtgggatttccgtcgccagcagcagactatgtagaaggtcgtctaaccgttgata

SEQ ID NO: 159520 - DNA, 75 bp, synthetic construct
  source 1..75: mol_type = other DNA
aaccaaagcaaggagataccgttttaattcgttacggcggcggcactgattttgcaaaaattatgggccgggcat

SEQ ID NO: 159521 - DNA, 75 bp, synthetic construct
  source 1..75: mol_type = other DNA
accagtttgtgaagctactgggtcaggcactgataacggaagagggtgaggcgatcgaaggagaagccttgaatg

SEQ ID NO: 159522 - DNA, 75 bp, synthetic construct
  source 1..75: mol_type = other DNA
gctaccgctatctttatgagcaggaccgcatcaccgtcaccgacagcctgaaccggcgtgaggtgctgcatacag

SEQ ID NO: 159523 - DNA, 75 bp, synthetic construct
  source 1..75: mol_type = other DNA
aaaacctataagggcagcgggtttaatgaactgaagtttgacgatgcgacagggaaagaacaggtctacatccac

SEQ ID NO: 159524 - DNA, 75 bp, synthetic construct
  source 1..75: mol_type = other DNA
tggaagtggacggcctgccaccggatgcttttgcggtggtttcctttcatctgaaccagtcactctcttcgctct

SEQ ID NO: 159525 - DNA, 75 bp, synthetic construct
  source 1..75: mol_type = other DNA
actaccactacgacagccagcaccgactggtgttcgacacgcggatacagcaaggggagccacaggtcgagagcc

SEQ ID NO: 159526 - DNA, 75 bp, synthetic construct
  source 1..75: mol_type = other DNA
actaccactacgacagccagcaccgactggtgttctacacgcggatacagcaaggggagccactggtcgagagcc

SEQ ID NO: 159527 - DNA, 75 bp, synthetic construct
  source 1..75: mol_type = other DNA
actaccactacgacagccagcaccgactggtgttcaacacgcggatacagcaaggggagccacgggtcgagagcc

SEQ ID NO: 159528 - DNA, 75 bp, synthetic construct
  source 1..75: mol_type = other DNA
actaccactacgacagccagcaccggctggtgttcgacacgcggatacagcaaggggagccacgggtcgagagcc

SEQ ID NO: 159529 - DNA, 75 bp, synthetic construct
  source 1..75: mol_type = other DNA
actaccactacgacagccagcaccgcctggtgttcgacacgcggatacagcaaggggagccaccggtcgagagcc

SEQ ID NO: 159530 - DNA, 75 bp, synthetic construct
  source 1..75: mol_type = other DNA
actaccactacgacagccagcaccgcctggtgttccacacgcggatacagcaaggggagccacgggtcgagagcc

SEQ ID NO: 159531 - DNA, 75 bp, synthetic construct
  source 1..75: mol_type = other DNA
aaaatgggagtggtgtaatgggagaatttggaggtatgtcccatggtgaggattactcatcagcaccaaatagca

SEQ ID NO: 159532 - DNA, 75 bp, synthetic construct
  source 1..75: mol_type = other DNA
gatggtattggtgctggcaatggtgacctatattccgcaaatcagtatggcattgccaaaagcactgggctactg

SEQ ID NO: 159533 - DNA, 75 bp, synthetic construct
  source 1..75: mol_type = other DNA
cggcaggcgaggaaatcttctgcgacgaacatggtcgcgtgcgggtgaagttcaactgggaccgttataacccgg

SEQ ID NO: 159534 - DNA, 75 bp, synthetic construct
  source 1..75: mol_type = other DNA
tcaccgtcaccgacagcctgaaccggcgtgaggtgctgcatacagaaggcggggccgggctgaagcgggtggtga

SEQ ID NO: 159535 - DNA, 75 bp, synthetic construct
  source 1..75: mol_type = other DNA
tgtggccggataaccgcatcgcggaggatgcgcactatgtctaccgccacgatgaatacggcaggctgacggaga

SEQ ID NO: 159536 - DNA, 75 bp, synthetic construct
  source 1..75: mol_type = other DNA
gggttagcgggaggatggaacctgtatcaatacccattaaatccgatcactaatatagatccgttaggattatca

SEQ ID NO: 159537 - DNA, 75 bp, synthetic construct
  source 1..75: mol_type = other DNA
ccaccggatcaggttatgtggtgattagccgtgaaagtgcgcacattctggtggattcgcgctattacgcggatg

SEQ ID NO: 159538 - DNA, 75 bp, synthetic construct
  source 1..75: mol_type = other DNA
cgattcgccccggcgtgcgttgccagcaggttgacgacgccgcgcgccgggtgattacagaggcaggttttagcg

SEQ ID NO: 159539 - DNA, 75 bp, synthetic construct
  source 1..75: mol_type = other DNA
gcaggttgacgacgccgcgcgtcgggtgattaccgaggcaggatttggcgactattttggtcacaacaccggtca

SEQ ID NO: 159540 - DNA, 75 bp, synthetic construct
  source 1..75: mol_type = other DNA
cccaataacaccacgcaccgccccgccacccttcagcacttgcgtatcggtactgaccagagcgggaaaatcacc

SEQ ID NO: 159541 - DNA, 75 bp, synthetic construct
  source 1..75: mol_type = other DNA
tagggatgagaatgaacggattttgctgaaatcgggactcctgtcccgcagccgctacatctggcagcgctcaac

SEQ ID NO: 159542 - DNA, 75 bp, synthetic construct
  source 1..75: mol_type = other DNA
taacacaaacagaagaggtcttcttagagttgaggtggatgatgagaatggtcgtgccatgttcgattatttagg

SEQ ID NO: 159543 - DNA, 75 bp, synthetic construct
  source 1..75: mol_type = other DNA
cagcaagattttctatttccgctattacgtggaaaaagggaaaaagaaagattcattcaattgggtatatggcct

SEQ ID NO: 159544 - DNA, 75 bp, synthetic construct
  source 1..75: mol_type = other DNA
tttgcacgaccgaagaactgtccaattggctcgcgattatagtctcaaaataccagttacattcaatttggttta

SEQ ID NO: 159545 - DNA, 75 bp, synthetic construct
  source 1..75: mol_type = other DNA
taatcgggaaaaatataatttatggtggagaaaatatttacactcatattctttatacgtatcaagctaaatctc

SEQ ID NO: 159546 - DNA, 75 bp, synthetic construct
  source 1..75: mol_type = other DNA
agctgcatttgcttgacgcgacgaacacgcttaccactatcgtcaatcaaatcattgccgatgagcagttgcaaa

SEQ ID NO: 159547 - DNA, 75 bp, synthetic construct
  source 1..75: mol_type = other DNA
ccgccgtccctgatgtctggcacgcgcgaatctacgtgatgctgttgtgcatggtactggtggctatgttgcttt

SEQ ID NO: 159548 - DNA, 75 bp, synthetic construct
  source 1..75: mol_type = other DNA
gcggtggctacctcaacggcggtgatgatatttaacgccggctgggtcagctatcgaaactggcgggcaggcagg

SEQ ID NO: 159549 - DNA, 75 bp, synthetic construct
  source 1..75: mol_type = other DNA
tttttgctggggctactacaaaccagcttcgcgcccaaaaatcacggtcgttgggatgatatctggcaagacgga

SEQ ID NO: 159550 - DNA, 75 bp, synthetic construct
  source 1..75: mol_type = other DNA
cggcaacagcacgccgttatttgtggcgcaggggaatcagttgttcatgaacgatgtgttcctgaagcgactgtt

SEQ ID NO: 159551 - DNA, 75 bp, synthetic construct
  source 1..75: mol_type = other DNA
gtgatgtttggtaacaacccggcagaaacccgcatgagcggcggtgcatcacttatcttcttgaaaaagcgcgcg

SEQ ID NO: 159552 - DNA, 75 bp, synthetic construct
  source 1..75: mol_type = other DNA
taactcgatctgcaatgtcggcccaaacacgctagttttcgagcgatctggcggttacgttgtgctggatatctc

SEQ ID NO: 159553 - DNA, 75 bp, synthetic construct
  source 1..75: mol_type = other DNA
atatgtcgtttgatgggcgtaacagatcgtggtttacgtgcatggaaacgccgtcctccatcactgcgccagcgt

SEQ ID NO: 159554 - DNA, 75 bp, synthetic construct
  source 1..75: mol_type = other DNA
ggttattcgcgcgtcaggattttgacgatcgtgtctttaccaatccatatgagcccgttgatttggaacgcgtca

SEQ ID NO: 159555 - DNA, 75 bp, synthetic construct
  source 1..75: mol_type = other DNA
cctgctcgccctagatcgcggtgaatatactcttctcgaaaaagcgatcgcccagcttcgtgaaaacctcgatat

SEQ ID NO: 159556 - DNA, 75 bp, synthetic construct
  source 1..75: mol_type = other DNA
ggtcatggccaacggcaatcgcgaagaagctgatcgcgatttccattttctccttgcagctgccagttatcacct

SEQ ID NO: 159557 - DNA, 75 bp, synthetic construct
  source 1..75: mol_type = other DNA
gattcgttgctggctttattggttccccgtcaatgaatttgatagatgcggttgtacgtgaggaagacggtaaac

SEQ ID NO: 159558 - DNA, 75 bp, synthetic construct
  source 1..75: mol_type = other DNA
ttttatccgtttgaaccagacacgctcccggcgaattggcgtgaaatcctcagaggttggctgcttgggcatccg

SEQ ID NO: 159559 - DNA, 75 bp, synthetic construct
  source 1..75: mol_type = other DNA
gacaatcagcaggagttgagccttgcaaccgcatggcgtctagtcagagatggtcagacagtgttgatctattgc

SEQ ID NO: 159560 - DNA, 75 bp, synthetic construct
  source 1..75: mol_type = other DNA
tattctgagatgtttagccggtgggaggcgtgccattgtcgtgaccccgcttcgcgctctatctgcgcaaaccga

SEQ ID NO: 159561 - DNA, 75 bp, synthetic construct
  source 1..75: mol_type = other DNA
gctggacagcagcgccagtgcagccgataaagccggtgccgtgggttcccttgccggaagtatcgccggtggcgc

SEQ ID NO: 159562 - DNA, 75 bp, synthetic construct
  source 1..75: mol_type = other DNA
cagccgggaatagccatgtcggtggattcatgtatgaaccatatcaggcgaacaatctttacccgctaagtgtgg

SEQ ID NO: 159563 - DNA, 75 bp, synthetic construct
  source 1..75: mol_type = other DNA
atatgccgacacagtctcgtttaatacatatatccctggaactgaccgttttaacgtttatacgaatacaagcgg

SEQ ID NO: 159564 - DNA, 75 bp, synthetic construct
  source 1..75: mol_type = other DNA
agtttaacaacaacctttacgagaaaaacggctgtcgtttcttcgaagtcagcgagctggaagcgatggaagaca

SEQ ID NO: 159565 - DNA, 75 bp, synthetic construct
  source 1..75: mol_type = other DNA
gtccatacatggtgggcgtgaggctatggctggcgcgctaggcatgaccttaacgcagttcaataacaaccttta

SEQ ID NO: 159566 - DNA, 75 bp, synthetic construct
  source 1..75: mol_type = other DNA
gcgccgccgccccctaagaacggagcgtgcgagtttccccgcactccgctcaagcctttataagtgctttcggtg

SEQ ID NO: 159567 - DNA, 75 bp, synthetic construct
  source 1..75: mol_type = other DNA
atattattattacttgatgctggtatgtctcaagtcatgccaagagatttcgctcaaaaaaaggatgatgctaaa

SEQ ID NO: 159568 - DNA, 75 bp, synthetic construct
  source 1..75: mol_type = other DNA
gctggcaactctccggtaattccggatggttggataagctgtagtgagcgaatgccagaaattagacaaacagtt

SEQ ID NO: 159569 - DNA, 75 bp, synthetic construct
  source 1..75: mol_type = other DNA
cagcaagccagactgccaagctgtcattccaggaatggttgtcagaacaaaaagaaaaaatagacgttgattgcg

SEQ ID NO: 159570 - DNA, 75 bp, synthetic construct
  source 1..75: mol_type = other DNA
cagacaacggttcagcctaccgttctcatcagacgcgtcagttcgccagaatggtaggactggagccaaaacata

SEQ ID NO: 159571 - DNA, 75 bp, synthetic construct
  source 1..75: mol_type = other DNA
ccacctatggttatcgtcgggtatgggcactgctgcgcagacaatcagaaactgacgacatggcggtgatcaatg

SEQ ID NO: 159572 - DNA, 75 bp, synthetic construct
  source 1..75: mol_type = other DNA
cctcctggaatcagtatgctgatgccaataatctcaccccggaacagaagcaggcaggactggataaacttgcca

SEQ ID NO: 159573 - DNA, 75 bp, synthetic construct
  source 1..75: mol_type = other DNA
gagagatggtggtccatggcatagctactgacactatcattaacagcggtggtcttcaggctgtttccggtggag

SEQ ID NO: 159574 - DNA, 75 bp, synthetic construct
  source 1..75: mol_type = other DNA
attaacgatgtctcaggtacaacagggaaatacggtgccgggataagcactcaactgacgccgaacacgggggtg

SEQ ID NO: 159575 - DNA, 75 bp, synthetic construct
  source 1..75: mol_type = other DNA
agttcagtcgtgaacggcaccaatgataaaggcagttttagtatcataggcggcagagcaaccaatatgttactg

SEQ ID NO: 159576 - DNA, 75 bp, synthetic construct
  source 1..75: mol_type = other DNA
ctcgctgtaatattttacaaaataataaattgcaaccagaagaagtttacaaagaatcacaacaaaccgcgaaac

SEQ ID NO: 159577 - DNA, 75 bp, synthetic construct
  source 1..75: mol_type = other DNA
atgaaatatacaaagaaattagttgcattgcacaaaggtttaagtctgattgaatcagcaatggttttagctata

SEQ ID NO: 159578 - DNA, 75 bp, synthetic construct
  source 1..75: mol_type = other DNA
gagctttcatatcctatacagataacagtattagtcataaccgtggtggtaggagtacagtaggaagtatcggcg

SEQ ID NO: 159579 - DNA, 75 bp, synthetic construct
  source 1..75: mol_type = other DNA
atgaaatataagtttttagtcgctgcaatgttagcagctatgccattcatggccacttcatccacatctgcggat

SEQ ID NO: 159580 - DNA, 75 bp, synthetic construct
  source 1..75: mol_type = other DNA
atggcgtaaatcttggttactgggctcaagaatatatattatttggaggtgaaggtgcagagcaattaaaaaata

SEQ ID NO: 159581 - DNA, 75 bp, synthetic construct
  source 1..75: mol_type = other DNA
atcatggtgcatcaccgccgccacctggcagctcgggaagaagagattgccgcaattatcacgttgtttgcacgc

SEQ ID NO: 159582 - DNA, 75 bp, synthetic construct
  source 1..75: mol_type = other DNA
gaatgaaaatacctggattcagccttatatccgtagtacagcattcatggcagaggcacaggatatcagtctgga

SEQ ID NO: 159583 - DNA, 75 bp, synthetic construct
  source 1..75: mol_type = other DNA
aattcgctcgaattaagaaccatattagtggaaatttctgaggtttatcagagagcctatggcggggtagtaact

SEQ ID NO: 159584 - DNA, 75 bp, synthetic construct
  source 1..75: mol_type = other DNA
cgaaggtatcctcatccgaaaatttggttggttgtcctacgcttgaaacaccattgcgtctaaattttactgaag

SEQ ID NO: 159585 - DNA, 75 bp, synthetic construct
  source 1..75: mol_type = other DNA
gcacaaaaatatctgaacaaatttaattctatttctgttagagaaaaatcaggagtagacatttgtaatagtgta

SEQ ID NO: 159586 - DNA, 75 bp, synthetic construct
  source 1..75: mol_type = other DNA
cagaccagaacagtcccttgtcgtgagtggatttaccacaaatgacgcagacgaaaaccgcatcatcctcatcac

SEQ ID NO: 159587 - DNA, 75 bp, synthetic construct
  source 1..75: mol_type = other DNA
agatagtaccggatattcaggaagcccccggaaatattagtctgcaactctcggccacagacaggaaacaaaaac

SEQ ID NO: 159588 - DNA, 75 bp, synthetic construct
  source 1..75: mol_type = other DNA
tttcttcaactattgcattgtcaaaggtgttacagagattaatgatgagttacgaataaactaccttaaaaatgt

SEQ ID NO: 159589 - DNA, 75 bp, synthetic construct
  source 1..75: mol_type = other DNA
aacaaattgcatttgatttagcatgcagaactatacagcagaatactccacaaaaaatattgattttattaatct

SEQ ID NO: 159590 - DNA, 75 bp, synthetic construct
  source 1..75: mol_type = other DNA
aacgataccagagcttcttatccagacacgaggcaatcagaccgaagtggcgaggatgctttcctgcgcaagagg

SEQ ID NO: 159591 - DNA, 75 bp, synthetic construct
  source 1..75: mol_type = other DNA
cgctgccaacgtttgtcgtcaggtaagcttcgttggaagataaaatttaatgtatcccattattgtgatgtcatg

SEQ ID NO: 159592 - DNA, 75 bp, synthetic construct
  source 1..75: mol_type = other DNA
tcggacagcagcaagtggacacaggctgcgatgctggatgagtacaaaaaagttgtgaactcaggggatggtgat

SEQ ID NO: 159593 - DNA, 75 bp, synthetic construct
  source 1..75: mol_type = other DNA
ttgtgaatacgggggacggtgatgcgatcaaaggggatgaagcaggtcgtcaggttaccggggaggaggggcagc

SEQ ID NO: 159594 - DNA, 75 bp, synthetic construct
  source 1..75: mol_type = other DNA
cagcctgacgctatctccagaaactctccgcaggatgataaagtattcagtctgtgttgaatctctggccacgtc

SEQ ID NO: 159595 - DNA, 75 bp, synthetic construct
  source 1..75: mol_type = other DNA
aagagcgcttcgtgcagtctgtctcggaaagaaaaactttatgttctttggcagcgatcacggcggcgagcgtgg

SEQ ID NO: 159596 - DNA, 75 bp, synthetic construct
  source 1..75: mol_type = other DNA
cgcaatataaaacgaaaaaacagactgtttttcaaaagattagcgcatttattgaaaaatttaagggggtgggtg

SEQ ID NO: 159597 - DNA, 75 bp, synthetic construct
  source 1..75: mol_type = other DNA
agcagcttataagtgagtggaaatctaatatctccgatgtaaaaaacttacttgtcaacataggtgaagaatttg

SEQ ID NO: 159598 - DNA, 75 bp, synthetic construct
  source 1..75: mol_type = other DNA
ccaacaagaagagaacaagaacagtcaacacctgttaatcaaaggggataatctcgaagtattgaagcatatggt

SEQ ID NO: 159599 - DNA, 75 bp, synthetic construct
  source 1..75: mol_type = other DNA
tacacgcaaaaatgaaagaattattaacctttgtcagagaatccatcgaactaacaggcgaattgccgcaattct

SEQ ID NO: 159600 - DNA, 75 bp, synthetic construct
  source 1..75: mol_type = other DNA
aaacacttccacagccccggctgtacctggtggaggagggcgctgaagaacagacgaaagccgcacctttgccgg

SEQ ID NO: 159601 - DNA, 75 bp, synthetic construct
  source 1..75: mol_type = other DNA
gctgtttctgatcggttgtgccggactggtgaaacctacccggacgacgcagtatccgccatatccggcgctggt

SEQ ID NO: 159602 - DNA, 75 bp, synthetic construct
  source 1..75: mol_type = other DNA
aataccacctatcaggtcatgctgtggaaagataaaaacagcaacggctcctacgatacgggtgaagaggttacc

SEQ ID NO: 159603 - DNA, 75 bp, synthetic construct
  source 1..75: mol_type = other DNA
ccaaacagatcagtgaattagcatacaagggccaatgggagcctctgttaaacgtactagaaaactacccctctt

SEQ ID NO: 159604 - DNA, 75 bp, synthetic construct
  source 1..75: mol_type = other DNA
ccaaagcgaccatcaaatccccctgtcagataagttcctgaaaaggaaaaaacgatctcctgtagctgaagataa

SEQ ID NO: 159605 - DNA, 75 bp, synthetic construct
  source 1..75: mol_type = other DNA
aatcttccagaattattcttaacaaaaatagatactgatacgtttttctctcagtggtcaaccaaaaccaagaaa

SEQ ID NO: 159606 - DNA, 75 bp, synthetic construct
  source 1..75: mol_type = other DNA
aaatagtcgatgcactgagaagccagtttatttacgacccggaagcgggggttttcttcaacagaaaaacaagcc

SEQ ID NO: 159607 - DNA, 75 bp, synthetic construct
  source 1..75: mol_type = other DNA
caaccgcttacggaacctggttaaattaccaaaagagcagcaccgcgccctacatgcaaaaatgaaagaattatt

SEQ ID NO: 159608 - DNA, 75 bp, synthetic construct
  source 1..75: mol_type = other DNA
ttttcttattcaatgaatatgatgtatttgagctgggacataatgatagaaatcgattcttgtctgcattttctg

SEQ ID NO: 159609 - DNA, 75 bp, synthetic construct
  source 1..75: mol_type = other DNA
tggggagtggcgcaactcaaccttgagtatgttttgtaatatcgctaagggaaaagctctaagcgctagtgattt

SEQ ID NO: 159610 - DNA, 75 bp, synthetic construct
  source 1..75: mol_type = other DNA
tgggataaggcgatttcggtgacggaaaagctgctcgccaatagtcagcagcagaaaaaagccctgatgcagcaa

SEQ ID NO: 159611 - DNA, 75 bp, synthetic construct
  source 1..75: mol_type = other DNA
tccatgtgtaaaagaacaacaaaaaatcgccacagtcctgtccgcagccgatgctgaaatctccacacttgagaa

SEQ ID NO: 159612 - DNA, 75 bp, synthetic construct
  source 1..75: mol_type = other DNA
atggtgcctaaggggtggacgcttctccaagtgtcagatatttgtaagttacaaaatggtaatagtttcaagcca

SEQ ID NO: 159613 - DNA, 75 bp, synthetic construct
  source 1..75: mol_type = other DNA
tgaaagacgagaaaaaagccctgatgcaacagctactgactggcaaacgtcgtgttaaggtcgatgaggcggttg

SEQ ID NO: 159614 - DNA, 75 bp, synthetic construct
  source 1..75: mol_type = other DNA
ttcgtaacttgtccatcaagtctatcaaatctacagagatcctcactcctcctcttcccgaacaaaagaaaatcg

SEQ ID NO: 159615 - DNA, 75 bp, synthetic construct
  source 1..75: mol_type = other DNA
gcctttaagactatccgattttgatcgtaataaaaattgcttccaccttcttgatgcccctccaaccggttccaa

SEQ ID NO: 159616 - DNA, 75 bp, synthetic construct
  source 1..75: mol_type = other DNA
gggttacacggtgtgatctatgtctggcattggaactcaatcaaaaatgaatatgaatggaacttgagaatttca

SEQ ID NO: 159617 - DNA, 75 bp, synthetic construct
  source 1..75: mol_type = other DNA
ggcctgttcagtggaggggtagcggcctcagccggtgggtggggcctgaacttagttttttcagggcaagtgatt

SEQ ID NO: 159618 - DNA, 75 bp, synthetic construct
  source 1..75: mol_type = other DNA
gacaatctaatcgattatttttatcagttgctactgagccttcaggataaaatatactctttacaaagcgggggg

SEQ ID NO: 159619 - DNA, 75 bp, synthetic construct
  source 1..75: mol_type = other DNA
gaaaaatatagtgatgttattgatagggtaagtttaaattatcaaaaatactcagactttgctcaaagaataagt

SEQ ID NO: 159620 - DNA, 75 bp, synthetic construct
  source 1..75: mol_type = other DNA
cgctcttcgagatttgaataagcgagacattgctcttattcgtgcgtatgggttcgaaaatacggattcacaagc

SEQ ID NO: 159621 - DNA, 75 bp, synthetic construct
  source 1..75: mol_type = other DNA
gtcaaatggttcccgtggtgatgttgagtggaaaattattacagacttaggaggtgaaagtcatccgttccacta

SEQ ID NO: 159622 - DNA, 75 bp, synthetic construct
  source 1..75: mol_type = other DNA
ttttcttctgcctgctgggctactggaaaagtgactctctgctctctattaccatttttgctgcttgcgtaggct

SEQ ID NO: 159623 - DNA, 75 bp, synthetic construct
  source 1..75: mol_type = other DNA
tgttaatcttggctctattattaatatatccaaaggagttcaaattaacaaaaatactttgtctgaggatggcca

SEQ ID NO: 159624 - DNA, 75 bp, synthetic construct
  source 1..75: mol_type = other DNA
gtgcgcatcggtgccccaaccggcgtggcctgttcggtgtgccccggcggagtgacgtccggccatccggtcaat

SEQ ID NO: 159625 - DNA, 75 bp, synthetic construct
  source 1..75: mol_type = other DNA
aagagctgtaaaaaataaagattacattgattttagacgattcattgagcaatccatttgctataataatgaaat

SEQ ID NO: 159626 - DNA, 75 bp, synthetic construct
  source 1..75: mol_type = other DNA
gtgtctgttttattgcttttaatcagtaatttgacaaataagattgtatgtcaattttatcattatggtgagaat

SEQ ID NO: 159627 - DNA, 75 bp, synthetic construct
  source 1..75: mol_type = other DNA
cctgcctgagagatgagaaaaaagccctgatgcaacagctactgactggcaaacgtcgtgttaaggtcgatgagg

SEQ ID NO: 159628 - DNA, 75 bp, synthetic construct
  source 1..75: mol_type = other DNA
agatgagaaaaaagccctgatgcagcagctactgactggcaaacgtcgtgttaaggtcgatgaggcggttgccga

SEQ ID NO: 159629 - DNA, 75 bp, synthetic construct
  source 1..75: mol_type = other DNA
acaaaaaatcgccgccgtcctttccgctgcagacgccgaaatctccacactggagaaaaaactcgcctgcctgag

SEQ ID NO: 159630 - DNA, 75 bp, synthetic construct
  source 1..75: mol_type = other DNA
ctaagttttacgtttcatttactgaaatataatgaactgaagattatggggttgcgtgtaggatctggtctccct

SEQ ID NO: 159631 - DNA, 75 bp, synthetic construct
  source 1..75: mol_type = other DNA
aaatctccacacttgagaaaaaactcgcctgcctgaaagacgagaagaaagccttgatgcagcaactgctgaccg

SEQ ID NO: 159632 - DNA, 75 bp, synthetic construct
  source 1..75: mol_type = other DNA
gtgacggaaaagcttctcaccaacagtcagcagcagaaaaaagccctgatgcagcaattacttactggaaagaag

SEQ ID NO: 159633 - DNA, 75 bp, synthetic construct
  source 1..75: mol_type = other DNA
ggggtgagcagacttaccggtatgtgccaaatccgtgtgggtgggttgatccgctgggattggctgcaagttcta

SEQ ID NO: 159634 - DNA, 75 bp, synthetic construct
  source 1..75: mol_type = other DNA
gtgagtgatccgctggggttgctggggggtgagcagacttaccggtatgtgccaaatccgtgtgggtgggttgat

SEQ ID NO: 159635 - DNA, 75 bp, synthetic construct
  source 1..75: mol_type = other DNA
gtgagtgatccgctggggttgctgggcggggagcagacttaccggtatgtgccgaatccttgtgggtgggttgat

SEQ ID NO: 159636 - DNA, 75 bp, synthetic construct
  source 1..75: mol_type = other DNA
acgtggttcccaccaaaggggcgttggttctggcggagttcaatgcccatgcgggagcaagggtattaatgaaaa

SEQ ID NO: 159637 - DNA, 75 bp, synthetic construct
  source 1..75: mol_type = other DNA
tcttagggtgcttgcatggtatagcctatctcaacccaccactcatgtacggcagtgaaatcccagttacgatac

SEQ ID NO: 159638 - DNA, 75 bp, synthetic construct
  source 1..75: mol_type = other DNA
taggacgtttatctagggaggaacacgttctaaatgaaatattaaaaagtaaaaatttattcaatgaggcggaaa

SEQ ID NO: 159639 - DNA, 75 bp, synthetic construct
  source 1..75: mol_type = other DNA
ccttgatttatatcatcccggtgaaaatgcaacttacctacgcctggaaacaggcctggtatatgtttcctgttg

SEQ ID NO: 159640 - DNA, 75 bp, synthetic construct
  source 1..75: mol_type = other DNA
tgaagtagcgattattgaagttctcctcccccacgtattcaacgcgaatgaaaaggctgcgtgccaacttattga

SEQ ID NO: 159641 - DNA, 75 bp, synthetic construct
  source 1..75: mol_type = other DNA
ttatttcttatctatagcagctatacagtgtgggaacgacacagcacatgggattatactttcccggggccaggt

SEQ ID NO: 159642 - DNA, 75 bp, synthetic construct
  source 1..75: mol_type = other DNA
aaacggcgtggttacaaaccacagccacttaagcgggtttatatacctaagtcaaatgggaagtctcgtcccctt

SEQ ID NO: 159643 - DNA, 75 bp, synthetic construct
  source 1..75: mol_type = other DNA
tgcgcttcagcagtccggcggtgaagacggtggcagtgtggtgttcccgccggtgctggtgcagatgctcgaccg

SEQ ID NO: 159644 - DNA, 75 bp, synthetic construct
  source 1..75: mol_type = other DNA
tatggaaactttttgaatctgtaggcttagcaataagctgttttcttaacgggatggatttaattaaacagcaag

SEQ ID NO: 159645 - DNA, 75 bp, synthetic construct
  source 1..75: mol_type = other DNA
taccgcaactcgacgcgagatttgcgcaaccaaaatggtatgaaatcggctggggcgataaaggcttttatcagg

SEQ ID NO: 159646 - DNA, 75 bp, synthetic construct
  source 1..75: mol_type = other DNA
tgctgttgtgcagcattctcggcagcacgacgctgatttccggctgtgccctggtacgcaaggattctgcgcctc

SEQ ID NO: 159647 - DNA, 75 bp, synthetic construct
  source 1..75: mol_type = other DNA
cttatcgctggagtgtggaatattagcgaaagctatcaggctgcatgatatatatttccatgagcatgtaggctt

SEQ ID NO: 159648 - DNA, 75 bp, synthetic construct
  source 1..75: mol_type = other DNA
tctattttcggcttcgggcaaatccgataaaaactattctcgacaatcaaaaacgcctggacagtaaagggaata

SEQ ID NO: 159649 - DNA, 75 bp, synthetic construct
  source 1..75: mol_type = other DNA
atagatcttttacagcaaggtattgggccagccaaatcgatgggatgtggtttgctatctttggctccactgtga

SEQ ID NO: 159650 - DNA, 75 bp, synthetic construct
  source 1..75: mol_type = other DNA
gccaggtgaccagatactggaaaaactggtagggcagaagtcaggtgttaacccgaatattttttaccttccggc

SEQ ID NO: 159651 - DNA, 75 bp, synthetic construct
  source 1..75: mol_type = other DNA
taatgccgacagtggccgctctttgcgtacaaccataccgactttaataccaagaaaatcaacgagttcacccaa

SEQ ID NO: 159652 - DNA, 75 bp, synthetic construct
  source 1..75: mol_type = other DNA
atgttgctcttatatatcacccaatgggtaatatttcaggaaaaatggtatatcaggctgagttgtcaaagtttg

SEQ ID NO: 159653 - DNA, 75 bp, synthetic construct
  source 1..75: mol_type = other DNA
tatatttcatatccctgagtgcatatcctggagatgaaaatgcatacatatatggtaacgatggaacaattgaag

SEQ ID NO: 159654 - DNA, 75 bp, synthetic construct
  source 1..75: mol_type = other DNA
cccacaatgggaaacatcgttcagcactcacgataaggggtatagcgttgtccttactattaaggtcccagatga

SEQ ID NO: 159655 - DNA, 75 bp, synthetic construct
  source 1..75: mol_type = other DNA
agatattgtggcgaagagcgacagtacggtgttgatttgcggtgaaaccggaaccggcaaagaggtgatcgccag

SEQ ID NO: 159656 - DNA, 75 bp, synthetic construct
  source 1..75: mol_type = other DNA
tggtcgattattcgcgtcacgccgtccttctcggcagtagtggaatggcggagctacgctttattcgcacccacg

SEQ ID NO: 159657 - DNA, 75 bp, synthetic construct
  source 1..75: mol_type = other DNA
ggaatacgacctcgccggacgcatcaccacgctgaccaacgagaacggcagccggagtgagtttacctacgatgc

SEQ ID NO: 159658 - DNA, 75 bp, synthetic construct
  source 1..75: mol_type = other DNA
agtaatgatccctattggtatgaaaaaagaatttacaaaaatcattactaccagtggattaataggcctactgat

SEQ ID NO: 159659 - DNA, 75 bp, synthetic construct
  source 1..75: mol_type = other DNA
ccacagccatcgtcgcgatatggatgtaacgatcgttgttcattcgcctggtcgcatcggttcaataccatcagt

SEQ ID NO: 159660 - DNA, 75 bp, synthetic construct
  source 1..75: mol_type = other DNA
gtgccgattgccggacgcggcgtaaacgccttatccggcccaccgctccaacaccgactgtaggcctgataagac

SEQ ID NO: 159661 - DNA, 75 bp, synthetic construct
  source 1..75: mol_type = other DNA
gctgtcggtaataacgtaacagatctggatgcaacccttgaagccgggcaaaaagatgtaacaattaatgtgacc

SEQ ID NO: 159662 - DNA, 75 bp, synthetic construct
  source 1..75: mol_type = other DNA
tgaagtcgaacctgatttactggggcggcgaagattcaggggctgtcagaagtccgcttgattacgcccgtgcag

SEQ ID NO: 159663 - DNA, 75 bp, synthetic construct
  source 1..75: mol_type = other DNA
agccttttgaccggcaaattgtgatcccggcagtggctttcagcggcgctaaacatgagagagagcataacgata

SEQ ID NO: 159664 - DNA, 75 bp, synthetic construct
  source 1..75: mol_type = other DNA
gaactggaaaaaatttctgatgcatttgaggctattggatatttcaatgcaattgatgttgctaaaagtaaatta

SEQ ID NO: 159665 - DNA, 75 bp, synthetic construct
  source 1..75: mol_type = other DNA
atccgggctggcaacgcttggtctgggagggcttttagggttctccagtatggctacaggggttggcgttgctgt

SEQ ID NO: 159666 - DNA, 75 bp, synthetic construct
  source 1..75: mol_type = other DNA
atgaggtgaacggtatggagaaaacggtgctgacatcactcccggcagaccgctacaaagcaaaagaggtagcgg

SEQ ID NO: 159667 - DNA, 75 bp, synthetic construct
  source 1..75: mol_type = other DNA
atgcatcctgtcgaactggcagagaaaactaacacacccgtatacctgtctggatcactggcaatgagcaagctt

SEQ ID NO: 159668 - DNA, 75 bp, synthetic construct
  source 1..75: mol_type = other DNA
agttgggcaataaacagcgatttcctctggcgttatatctgttgctgctctccagatctggtagtggtaagtcaa

SEQ ID NO: 159669 - DNA, 75 bp, synthetic construct
  source 1..75: mol_type = other DNA
atgagtaacaaaaatgaaattaatcatgagcttaacctgaagtttgatattctgccatgtcatatcaggcgatgg

SEQ ID NO: 159670 - DNA, 75 bp, synthetic construct
  source 1..75: mol_type = other DNA
tcgactatcaaactagggttgtttacctgcttggcaaaatagaaggcatgatcgccctgcgcaaacagcatctgc

SEQ ID NO: 159671 - DNA, 75 bp, synthetic construct
  source 1..75: mol_type = other DNA
acctgtaataatgtcctctggtgctaagttacttttactattaagtatttttatttttgtaaaagaccgagcaga

SEQ ID NO: 159672 - DNA, 75 bp, synthetic construct
  source 1..75: mol_type = other DNA
gtttgtctctgcaatagggttaattatttctggatgggctgtgaagtcgatctctggttatgagttattattgat

SEQ ID NO: 159673 - DNA, 75 bp, synthetic construct
  source 1..75: mol_type = other DNA
aatccctcgccatcaacgcttccaacatctcaacgaccacaatcaacggccaggaacactacgtcattcgtggtg

SEQ ID NO: 159674 - DNA, 75 bp, synthetic construct
  source 1..75: mol_type = other DNA
cagtgccagaccagcaccgggctgaaccctgcattccagggtaacggcgcacaaagcgaaatccttaccatggag

SEQ ID NO: 159675 - DNA, 75 bp, synthetic construct
  source 1..75: mol_type = other DNA
tatcaccgcgaagcgccaggcggtgaaagccaagttcccgttcatgaccgaagcggcgatcaactcgctggctgg

SEQ ID NO: 159676 - DNA, 75 bp, synthetic construct
  source 1..75: mol_type = other DNA
acggtatcgagcgtgacccgcagccctattttaaacgggctaacacgaaaaaccctgaacggggcggcgcaaaaa

SEQ ID NO: 159677 - DNA, 75 bp, synthetic construct
  source 1..75: mol_type = other DNA
cataaaccgtccgagttttggaaagccgctgacacgtttgaacgtgccaacggctgtacctaccgcgaaattgaa

SEQ ID NO: 159678 - DNA, 75 bp, synthetic construct
  source 1..75: mol_type = other DNA
cttaacccattacaagcccgctgccgcagatattcccgtggcgagcgataacccagcgcactatgcggatgccat

SEQ ID NO: 159679 - DNA, 75 bp, synthetic construct
  source 1..75: mol_type = other DNA
aaagttgaacgagaagctgctataaacttgttgaacaaaggcatgctgttaatcttggggttgacgattccttca

SEQ ID NO: 159680 - DNA, 75 bp, synthetic construct
  source 1..75: mol_type = other DNA
atgagtacacaacccaccattatcgagttaggcagctatcgctggcccagacatctcgcaatacacgaagcaggt

SEQ ID NO: 159681 - DNA, 75 bp, synthetic construct
  source 1..75: mol_type = other DNA
atcagatcatcgctgtgattaagtcagttgaagccggacgaaccgttaaagtgatcttacccagcaatagtggac

SEQ ID NO: 159682 - DNA, 75 bp, synthetic construct
  source 1..75: mol_type = other DNA
tcgttcagatgagcagattcaaagagcattaaccgcagtgtcgcagatggcttctaagggtcaggtgatggctga

SEQ ID NO: 159683 - DNA, 75 bp, synthetic construct
  source 1..75: mol_type = other DNA
gatatctcttacagggtacgaggtttctttgatgaggtgacattagcttatcgtggtttaaccgatgagcaaaag

SEQ ID NO: 159684 - DNA, 75 bp, synthetic construct
  source 1..75: mol_type = other DNA
gcgtggcggtgaaaacgtctgccgaagctttgcaacaagccattgacgataatttctggcaagccgaataccgcg

SEQ ID NO: 159685 - DNA, 75 bp, synthetic construct
  source 1..75: mol_type = other DNA
cttcatttggtgcaagtgcaaaaaatacgatgggtcttgaagggtcagaagagttatttaaaaaccttacaggtt

SEQ ID NO: 159686 - DNA, 75 bp, synthetic construct
  source 1..75: mol_type = other DNA
tttacgggctatctgctaaagctgggtcaatggataattctaagtttaatgaagcccttgctaaactaaattcaa

SEQ ID NO: 159687 - DNA, 75 bp, synthetic construct
  source 1..75: mol_type = other DNA
cactggcgctttctcgtgcagcactgcgtgccagagtggaagagtgctggcatttaactgaacaaaatgccatgt

SEQ ID NO: 159688 - DNA, 75 bp, synthetic construct
  source 1..75: mol_type = other DNA
atggctgcgaatgataacaaggaatttctcacatccttatctaatataatgagatacaaaatagatgctggactt

SEQ ID NO: 159689 - DNA, 75 bp, synthetic construct
  source 1..75: mol_type = other DNA
ctggatgaccttatggatctggagctcctggatgacccggtactcctggagcgcgtgaaggtacaggaggacctg

SEQ ID NO: 159690 - DNA, 75 bp, synthetic construct
  source 1..75: mol_type = other DNA
gttgggcctgtgcggcgtgagcgcggctatcgccaacgcggtgtataacgccaccggtattcgggtacgggatta

SEQ ID NO: 159691 - DNA, 75 bp, synthetic construct
  source 1..75: mol_type = other DNA
atcggaaggtggtgcactggagtggagctttaacagcagcaccggagctggtgcgctgacacagggaagtaccac

SEQ ID NO: 159692 - DNA, 75 bp, synthetic construct
  source 1..75: mol_type = other DNA
ctgaaggtaacgcgctggtcgccaccggcagtccgtttaatccggtggtatggaaagataaaatctaccctatcg

SEQ ID NO: 159693 - DNA, 75 bp, synthetic construct
  source 1..75: mol_type = other DNA
gcggaccttcagtctcagtatcagaccggggatatcagtgaggatttttacagacaggcgctggcgcagaatgca

SEQ ID NO: 159694 - DNA, 75 bp, synthetic construct
  source 1..75: mol_type = other DNA
tggcagtgcttacaacaccattatgaaagataaggaatggttgttgagttttgattgcaaactgaaattcatttt

SEQ ID NO: 159695 - DNA, 75 bp, synthetic construct
  source 1..75: mol_type = other DNA
accgctggtatgacgaaaacggtaacccgcaaaagggtaagttcgccctgatgtttgaggaagaatacgatcgcg

SEQ ID NO: 159696 - DNA, 75 bp, synthetic construct
  source 1..75: mol_type = other DNA
ggtaaaatccgcgcgcgaattgtcggcggctaccagaataacgactcatggctggaccgctacaacagtgaaaag

SEQ ID NO: 159697 - DNA, 75 bp, synthetic construct
  source 1..75: mol_type = other DNA
aacttcaggataatttcttcaactattgcattgtcaaaggtgttacagagattaatgatgagttacgaataaact

SEQ ID NO: 159698 - DNA, 75 bp, synthetic construct
  source 1..75: mol_type = other DNA
gccgggttactggctgaggcttcagtggtgatccgccgcatgaaggggcttaaacgggcaacggtgaaaaaagta

SEQ ID NO: 159699 - DNA, 75 bp, synthetic construct
  source 1..75: mol_type = other DNA
atgctctcagtcgtggcgctgccggtagtcggacaattagccagatgttgcgccagagtggtgttaatgcaggcc

SEQ ID NO: 159700 - DNA, 75 bp, synthetic construct
  source 1..75: mol_type = other DNA
ataaaaaaaatcaataacaataagaatattaacctgcatattaaatctaaaatgcaattatatataatatctaaa

SEQ ID NO: 159701 - DNA, 75 bp, synthetic construct
  source 1..75: mol_type = other DNA
gtgttattatcccagtttataatgaagagaagaatgttattaatattcttcaatctcttgaatgccagtctttaa

SEQ ID NO: 159702 - DNA, 75 bp, synthetic construct
  source 1..75: mol_type = other DNA
tgaacaataaaaaaagcccgatcagtgccaaaatcgaaattgatgctcgcctgaagaatggcagcatcaagcgca

SEQ ID NO: 159703 - DNA, 75 bp, synthetic construct
  source 1..75: mol_type = other DNA
tttaaagagctgtacgaaaacgttgcctttgactatttcacttacgattccagtaagctgtcggatgtgcgtaac

SEQ ID NO: 159704 - DNA, 75 bp, synthetic construct
  source 1..75: mol_type = other DNA
ggcagattcagctaaaagtgaaccattcgatttgcctaaaaatgagcaaaaaatttcttttgtttaccccaataa

SEQ ID NO: 159705 - DNA, 75 bp, synthetic construct
  source 1..75: mol_type = other DNA
agtaatcaaatagctactgaaagattatctcatgacatatcttcaataagagatgcaatcaacgcattacctgac

SEQ ID NO: 159706 - DNA, 75 bp, synthetic construct
  source 1..75: mol_type = other DNA
gaaaccgccatgcgcgtggcggcaggggcgattgccaaaaaatatctcgccgagaaatttggtattgaaatccgc

SEQ ID NO: 159707 - DNA, 75 bp, synthetic construct
  source 1..75: mol_type = other DNA
gggacatcgcgctataccacccagcgccgcgagccggatcaggtcaaaatactctccggtgtttttgaaggcgtt

SEQ ID NO: 159708 - DNA, 75 bp, synthetic construct
  source 1..75: mol_type = other DNA
cgttcctgttattcacgcgcttgaggtcatgctcagtaacggcgagcggcacagtgtaaccggtgaacaggcaga

SEQ ID NO: 159709 - DNA, 75 bp, synthetic construct
  source 1..75: mol_type = other DNA
tcgataacgacccgcttgttatccggctgcgcgaggtcatgcgcaacgcgaacggagggcaggactggcggcctg

SEQ ID NO: 159710 - DNA, 75 bp, synthetic construct
  source 1..75: mol_type = other DNA
ggaactggaaaaaactgggacacaaagttcggctgttgcaagctcgcttcgttaaagcattcgtcatgggcaaca

SEQ ID NO: 159711 - DNA, 75 bp, synthetic construct
  source 1..75: mol_type = other DNA
acttggctatgatgacagactcaaatgttcctgttattggaaaattaggcgtgtcgacaggaaatatattctcat

SEQ ID NO: 159712 - DNA, 75 bp, synthetic construct
  source 1..75: mol_type = other DNA
actatcggaaaacgagtatgggtctgtgcagagtcttttatcggacctggtgtgactttaaatgatggttgtatt

SEQ ID NO: 159713 - DNA, 75 bp, synthetic construct
  source 1..75: mol_type = other DNA
acacagcgttgagcggtctggtttatgttagcggagtcttaatctggttgattaaaaggccaaaccgctcaacgc

SEQ ID NO: 159714 - DNA, 75 bp, synthetic construct
  source 1..75: mol_type = other DNA
ccatttggccgcatttaaaatccggtggaaccctggtctatgccacctgttcggtgttaccggaagagaatagcc

SEQ ID NO: 159715 - DNA, 75 bp, synthetic construct
  source 1..75: mol_type = other DNA
caattgcagtctgaaattctcgacgccatttggccacatttaaaatccggtggaaccctggtctatgccacctgt

SEQ ID NO: 159716 - DNA, 75 bp, synthetic construct
  source 1..75: mol_type = other DNA
acgtgctaaatcacagctttatgcgaccaggcttagtcaacgtcattgtttcggttaccgttggcttaattattg

SEQ ID NO: 159717 - DNA, 75 bp, synthetic construct
  source 1..75: mol_type = other DNA
aagggaagaaacacaatatttttaagccagatatcgacccattgcaggtgaatattaatattgctgcgcttggcg

SEQ ID NO: 159718 - DNA, 75 bp, synthetic construct
  source 1..75: mol_type = other DNA
gcaatagctggtgctacaggtaatgccagtaaggataccgggaatgataatagctgggatattggtggtggttgt

SEQ ID NO: 159719 - DNA, 75 bp, synthetic construct
  source 1..75: mol_type = other DNA
aattccggcgaactatatactttggcaatgggattgataaacaatctggcgcacctcaatgaatacagaaaagtg

SEQ ID NO: 159720 - DNA, 75 bp, synthetic construct
  source 1..75: mol_type = other DNA
gcttgttgacggcaaggcctggcacgatctccagcgcgtgttctgggcgggtgtcctgctcgccggggcgtccgg

SEQ ID NO: 159721 - DNA, 75 bp, synthetic construct
  source 1..75: mol_type = other DNA
agagaggtttgtgatattgagaaaatttattgcaatgatgtgaataaaattggggtggatattacttgtgattat

SEQ ID NO: 159722 - DNA, 75 bp, synthetic construct
  source 1..75: mol_type = other DNA
tccccccaggcactggaagccagacgtaaggtcatcaaagagacgctccttagctggcttttggttgatccttca

SEQ ID NO: 159723 - DNA, 75 bp, synthetic construct
  source 1..75: mol_type = other DNA
atgaggatgggcgtgacaaaacggtaattgcagtaatgaaagccatcagggccgcaggaatcaaagaaaagaatt

SEQ ID NO: 159724 - DNA, 75 bp, synthetic construct
  source 1..75: mol_type = other DNA
catcctttggcacttcccacgaaaggcggtgaagcaatggtgagtcgtgcagccactgtgccgcccgctcaacgg

SEQ ID NO: 159725 - DNA, 75 bp, synthetic construct
  source 1..75: mol_type = other DNA
gcgcggtcatcgataaccgtgcaaacctgaattatcttctgacccattccggtctggactataaacgcaatattc

SEQ ID NO: 159726 - DNA, 75 bp, synthetic construct
  source 1..75: mol_type = other DNA
catcacccccaaaaaacctggcgaagcgattcttcatgcttttaatgccacctaccagcagatcagagaaaatat

SEQ ID NO: 159727 - DNA, 75 bp, synthetic construct
  source 1..75: mol_type = other DNA
ggaaaaggcaggaatgaaaggattcctgcatgctaattatcctgatgcagtccgcctggaaatacccgcgcccgt

SEQ ID NO: 159728 - DNA, 75 bp, synthetic construct
  source 1..75: mol_type = other DNA
ctatctggccacatttgaaatcaggcggaacgttggtgtatgccacttgctcgatattgccggaagagaatagcc

SEQ ID NO: 159729 - DNA, 75 bp, synthetic construct
  source 1..75: mol_type = other DNA
gcatatattaatgacaaaaacattgagatcttattactttcttgttttgccgaggtcgatcaaaaagcaatccag

SEQ ID NO: 159730 - DNA, 75 bp, synthetic construct
  source 1..75: mol_type = other DNA
tatacagtcgtattgactttaacaaagaacaatatatatcctttataaaggacgcgtttcttcatttttatgatt

SEQ ID NO: 159731 - DNA, 75 bp, synthetic construct
  source 1..75: mol_type = other DNA
atatttgtagcgtaagtgtggatatgacaaagggaacgcaatgcatgattcacttgatggtgaatgaagaagttt

SEQ ID NO: 159732 - DNA, 75 bp, synthetic construct
  source 1..75: mol_type = other DNA
tagaaacaagttctcatggcatcggtggagtcagttttattcttatgaaattaattgctgcagaacttatctttg

SEQ ID NO: 159733 - DNA, 75 bp, synthetic construct
  source 1..75: mol_type = other DNA
cccaatcactaggtatcacggcgagatacgctcacaggccgctgcttaaggatcttctccctgttgtggactgca

SEQ ID NO: 159734 - DNA, 75 bp, synthetic construct
  source 1..75: mol_type = other DNA
tcaatgatggttgctttattaaatatagtcattttaatgacgtggcattaataaagcaaaacataagtaatccta

SEQ ID NO: 159735 - DNA, 75 bp, synthetic construct
  source 1..75: mol_type = other DNA
gctcgtctatatttaaatcagtgtttagatcataacaacagttctgagtgttataaactgttcgataaagcacat

SEQ ID NO: 159736 - DNA, 75 bp, synthetic construct
  source 1..75: mol_type = other DNA
gacaagcattagaggtaaaaaataagaatagttacaagataagtaaatttacatggggaacgtatggtgatatcg

SEQ ID NO: 159737 - DNA, 75 bp, synthetic construct
  source 1..75: mol_type = other DNA
aaaccaactgagtacgaagtcaaaaccaacggagaaacaaacccgatgaaagagaagatgatcgccgcgctcaat

SEQ ID NO: 159738 - DNA, 75 bp, synthetic construct
  source 1..75: mol_type = other DNA
atgcgttgtgcttttatgataataaagcatgaggagttcagtggaatatcttttcccttgggtgattttaatatg

SEQ ID NO: 159739 - DNA, 75 bp, synthetic construct
  source 1..75: mol_type = other DNA
aaaacactactcaatgatggttgctttattaaatatagtcattttaatgacgtggcattaataaagcaaaacata

SEQ ID NO: 159740 - DNA, 75 bp, synthetic construct
  source 1..75: mol_type = other DNA
ggtcgatcaaaaagcaatccagaggtatgttcctcagccacaagatgcggaaaaattttggagtaatttacagta

SEQ ID NO: 159741 - DNA, 75 bp, synthetic construct
  source 1..75: mol_type = other DNA
agccgctggcgctgacgaccggcgtgcgtatggacgatcacgaaacctacggtgaacactggagtccgcgtgcct

SEQ ID NO: 159742 - DNA, 75 bp, synthetic construct
  source 1..75: mol_type = other DNA
ttacccaaacaaattcccggagaaacgctccaggcagggaatgttaataccagtttgacagtcgaggtgacctat

SEQ ID NO: 159743 - DNA, 75 bp, synthetic construct
  source 1..75: mol_type = other DNA
ctcgcgtttacgacaatttaaaacgccttggtatgaaggcaaccgtgaaacaaggtgatggccgctacccttccc

SEQ ID NO: 159744 - DNA, 75 bp, synthetic construct
  source 1..75: mol_type = other DNA
atgtcaaccggattacgtttcacgctggaagtggacggcctgccaccggacgcttttgcggtggtttcctttcat

SEQ ID NO: 159745 - DNA, 75 bp, synthetic construct
  source 1..75: mol_type = other DNA
ccgaatctcacccgctgtttaacgtctatcaaattgtcctgcaggcacagctcgcagcaatctccgcgattcgcc

SEQ ID NO: 159746 - DNA, 75 bp, synthetic construct
  source 1..75: mol_type = other DNA
ggggctttactacatgggtgaagaaggctggctggaaggggttgaatccagcgttaccgttttccgtaacgatgt

SEQ ID NO: 159747 - DNA, 75 bp, synthetic construct
  source 1..75: mol_type = other DNA
cattcataatgaaaccatgacactgacatgggacaggtttcgccaggatggttctgtcgtatccagctcacctct

SEQ ID NO: 159748 - DNA, 75 bp, synthetic construct
  source 1..75: mol_type = other DNA
atgcgttatattgcgtttaaacggcatcgaattttaattagttttgatgtagtgattgcaggcaaaaaaatcccc

SEQ ID NO: 159749 - DNA, 75 bp, synthetic construct
  source 1..75: mol_type = other DNA
atgggagtttgttaacctcatgccgtaagttattacagatagctcgccttcatggcataaatatgaaagatgtct

SEQ ID NO: 159750 - DNA, 75 bp, synthetic construct
  source 1..75: mol_type = other DNA
aagcagctgctgtgctggattttgatttcccctgctccatgcaacacccgacgttgcggggggtactcgataatc

SEQ ID NO: 159751 - DNA, 75 bp, synthetic construct
  source 1..75: mol_type = other DNA
gtatatcactcaggatccgattgggctgaaggggggatggaatttttatcagtatccgttgaatccggtcataaa

SEQ ID NO: 159752 - DNA, 75 bp, synthetic construct
  source 1..75: mol_type = other DNA
cacgggtaacgctgttgggcgattatgcccatactcatggttatgatgttgttgcctatggtaataccggaacgc

SEQ ID NO: 159753 - DNA, 75 bp, synthetic construct
  source 1..75: mol_type = other DNA
aataaagattctaatttttagagtattacccagattaatgcctcaatcgttgttatttatgatttataaaaatag

SEQ ID NO: 159754 - DNA, 75 bp, synthetic construct
  source 1..75: mol_type = other DNA
tctacgacccgctgggacggcgaatggcgaaacgggtatggcggcgggaacgggacctgacgggctggatgtcgc

SEQ ID NO: 159755 - DNA, 75 bp, synthetic construct
  source 1..75: mol_type = other DNA
cctgaatgactccgagaaaggacaatccttcgaagacggcaccgcaaataatacctggaactttggcgtgcaggt

SEQ ID NO: 159756 - DNA, 75 bp, synthetic construct
  source 1..75: mol_type = other DNA
gggtattaacatggttagaaaacgtagaggtatgagttattttaaaagtgaaattcagctttttaaactgaaaag

SEQ ID NO: 159757 - DNA, 75 bp, synthetic construct
  source 1..75: mol_type = other DNA
aatatgatgaggaaatgcaagtcctgagaggaacgcgttttacaaaagaaaaacatgctgatattgtcaaatatg

SEQ ID NO: 159758 - DNA, 75 bp, synthetic construct
  source 1..75: mol_type = other DNA
gaaatcgagatgtccctaaatgtcattctgaaataaaaaaatacataactatgcgaaatccattcaatcatatga

SEQ ID NO: 159759 - DNA, 75 bp, synthetic construct
  source 1..75: mol_type = other DNA
attctggccgagcagaaaagagccgcagaacaacgccgcttggctaatgagaagaagcgccatccatccggcctg

SEQ ID NO: 159760 - DNA, 75 bp, synthetic construct
  source 1..75: mol_type = other DNA
cccaaatgcggaagtcagcctcgataatacgcaggggttaggcagaggaaatattgccaatgacggtctgggtga

SEQ ID NO: 159761 - DNA, 75 bp, synthetic construct
  source 1..75: mol_type = other DNA
cgtctgggtgagccgcagtatacagattcactgcattctcagggttcggcaagcagtatgtggatgcgtcatgtc

SEQ ID NO: 159762 - DNA, 75 bp, synthetic construct
  source 1..75: mol_type = other DNA
atgactcggagtgaaataaacgtctgggataagagacgaggcaccaatagtcatcgtgtggaggagattcgatct

SEQ ID NO: 159763 - DNA, 75 bp, synthetic construct
  source 1..75: mol_type = other DNA
ggtagctcttaactactgtatgcaggattacggtggttttgaaggaaacggtcagacgcttcgcattctctcgaa

SEQ ID NO: 159764 - DNA, 75 bp, synthetic construct
  source 1..75: mol_type = other DNA
gtggccttgccgcgatacttcagatgccgatcaggggacttcttatctgtttaaagagaagtttgataccctgaa

SEQ ID NO: 159765 - DNA, 75 bp, synthetic construct
  source 1..75: mol_type = other DNA
catcgacacaccatgaagagcgcgacgcattaattcgactacgggcaagtcatcaccagcagtgggccgcactgt

SEQ ID NO: 159766 - DNA, 75 bp, synthetic construct
  source 1..75: mol_type = other DNA
attcgatctggaaatgctggatgcgccatgtggtggatggcgattacaccccgcattcagccgtcgatatttttg

SEQ ID NO: 159767 - DNA, 75 bp, synthetic construct
  source 1..75: mol_type = other DNA
ctacaggaaagaatccgccaacggcgacaggggcggtttatccccgctggcgcggggaacacgctgcgagatatc

SEQ ID NO: 159768 - DNA, 75 bp, synthetic construct
  source 1..75: mol_type = other DNA
ggtagcagaacatgaaattctgctcgcctttcgcgcgttacttgcctctgatagcgaacgttttctgccctccgc

SEQ ID NO: 159769 - DNA, 75 bp, synthetic construct
  source 1..75: mol_type = other DNA
cagcatcacgaatttatggaagattataatttatggttaagaatatttgctgctgggtataaggttgaaaatcta

SEQ ID NO: 159770 - DNA, 75 bp, synthetic construct
  source 1..75: mol_type = other DNA
catttatatatggaagattataatctttggttgagagtattagcttctggtggttgtatttgtaacttacctaag

SEQ ID NO: 159771 - DNA, 75 bp, synthetic construct
  source 1..75: mol_type = other DNA
ctgctcgacgggcaatataccccctacaaggacacactaatggccattaaattcctgggtaatgctggcagccat

SEQ ID NO: 159772 - DNA, 75 bp, synthetic construct
  source 1..75: mol_type = other DNA
tgtcattatgactcagaaaggaaagttttaaccagtcatcacggaataataagagatgaagaaaatgcatgttat

SEQ ID NO: 159773 - DNA, 75 bp, synthetic construct
  source 1..75: mol_type = other DNA
atgatcttgaatgagttgcatcaacatgtttttttaaaaggcgatgcgattaccccttgtatcttccttggggat

SEQ ID NO: 159774 - DNA, 75 bp, synthetic construct
  source 1..75: mol_type = other DNA
cgaggatgaggggcttatcaccctctggcactacgacgaatcggaccgtatcacacaccgcatggtgaacggcga

SEQ ID NO: 159775 - DNA, 75 bp, synthetic construct
  source 1..75: mol_type = other DNA
ccgttgcaggggcggtatatcactcaggacccgatagggctggaggggggggatagagtctgtatgcgtacccgc

SEQ ID NO: 159776 - DNA, 75 bp, synthetic construct
  source 1..75: mol_type = other DNA
aggacccgatagggggggatgggggatgggggatggaatctgtaccaatatccgctgaatccagtgcaacacgtt

SEQ ID NO: 159777 - DNA, 75 bp, synthetic construct
  source 1..75: mol_type = other DNA
tcgcgccaaaagatcatcgtcgttgggatgatatctgggaagacggactggaagctgaaaagctacgggaagcat

SEQ ID NO: 159778 - DNA, 75 bp, synthetic construct
  source 1..75: mol_type = other DNA
ccgatgaccacgctgattgaattacaggaatatcagggcaatcaacaaactcccttgtggcgcaaaatgtggctc

SEQ ID NO: 159779 - DNA, 75 bp, synthetic construct
  source 1..75: mol_type = other DNA
agacggatgcagcaggccggacaacagaatacagtccgaatgtggtgacgggactcgtcacgtgcatcaccacgc

SEQ ID NO: 159780 - DNA, 75 bp, synthetic construct
  source 1..75: mol_type = other DNA
accacgcagggcgggctgacgcgcagtatggaatacgaccttgccggacgcatcaccacgctgaccaacgagaac

SEQ ID NO: 159781 - DNA, 75 bp, synthetic construct
  source 1..75: mol_type = other DNA
agcagcacagttcgcagccgttaagcgcgctctggcaggtgctgccggaagatgttcgcctgagtccgcatgtgt

SEQ ID NO: 159782 - DNA, 75 bp, synthetic construct
  source 1..75: mol_type = other DNA
cagacggtggagaacccggagacgggggaactgctgtggcagcatgagacgaaacacgcatacaacgaacagggg

SEQ ID NO: 159783 - DNA, 75 bp, synthetic construct
  source 1..75: mol_type = other DNA
gtggtggaaatatgttttgtgtaggaaatgaggactgtgcggttgttcatagctgtcgtgaaatagttaatgctc

SEQ ID NO: 159784 - DNA, 75 bp, synthetic construct
  source 1..75: mol_type = other DNA
cacgcagggcgggctgacgcgcagtatggagtacgatgctgccggacgtgtcatcagtctgactaacgagaacgg

SEQ ID NO: 159785 - DNA, 75 bp, synthetic construct
  source 1..75: mol_type = other DNA
tcgcgtaaaccggaggtgacgtggtatggctgggacggagacaggctgacgacggtacagacagaccagacccgt

SEQ ID NO: 159786 - DNA, 75 bp, synthetic construct
  source 1..75: mol_type = other DNA
tatcgtgagcgcaaccgccaggacagatgtagagctggatggcgataatagccgctttgtggggcaattcaacat

SEQ ID NO: 159787 - DNA, 75 bp, synthetic construct
  source 1..75: mol_type = other DNA
acgtctacacgctggctaaagggaaggggaatgacgagaaaaactggtatctgaccagtaaatgggacggcgtaa

SEQ ID NO: 159788 - DNA, 75 bp, synthetic construct
  source 1..75: mol_type = other DNA
gtcagcatcaccacgggggggatgtgggaggtcaataagaatgtctataccaccattggtgttgcgggcgtcgga

SEQ ID NO: 159789 - DNA, 75 bp, synthetic construct
  source 1..75: mol_type = other DNA
gaaggcccatcagtggttcgtccggaagccgggagctatatcagcaacatagccgcagccaatacgctgtttagc

SEQ ID NO: 159790 - DNA, 75 bp, synthetic construct
  source 1..75: mol_type = other DNA
tgggtgtgaaagattccgaccatacccggaaagacggaacgcgcattgaaacggaaggcgacggaaatgtgcaaa

SEQ ID NO: 159791 - DNA, 75 bp, synthetic construct
  source 1..75: mol_type = other DNA
tcgacggtaacggtcgcctgaccggagctcgtactgcgcagacagcgccttacgatagctatacctgccatctgt

SEQ ID NO: 159792 - DNA, 75 bp, synthetic construct
  source 1..75: mol_type = other DNA
gatgacgaccaaaaattacggtgcgaattatgccatgtggcagcatcccttaacgccttaccgtataccacttaa

SEQ ID NO: 159793 - DNA, 75 bp, synthetic construct
  source 1..75: mol_type = other DNA
gctcttttgggcttgatgtcactcaaaaactatggtgttcaatacgtcatgtggcgccatcctctaacaccttac

SEQ ID NO: 159794 - DNA, 75 bp, synthetic construct
  source 1..75: mol_type = other DNA
gctaaaaaatgtgaccggcgaactgcgtaatagcataagcgggaagggtatcgtggagcgcaaccgccaggacag

SEQ ID NO: 159795 - DNA, 75 bp, synthetic construct
  source 1..75: mol_type = other DNA
ggaggaaaaccggggaatgtactgaccgttaacggcaactataccggaaacaatggcctgatgacgttcaacgcg

SEQ ID NO: 159796 - DNA, 75 bp, synthetic construct
  source 1..75: mol_type = other DNA
tcacaccgacgggatccggcttaaactgacgtaccatgccagcggctacctgaaagccattcaccgcacggataa

SEQ ID NO: 159797 - DNA, 75 bp, synthetic construct
  source 1..75: mol_type = other DNA
gctgggacagttaaaacccatactgacactaagctggggaatttccgtcattgggatgatgttctttgctgtcgg

SEQ ID NO: 159798 - DNA, 75 bp, synthetic construct
  source 1..75: mol_type = other DNA
tttccatgggggaagccatccatatgggcaacgcagaggcgctgaattttacgctgcagcctgatgatgagcagg

SEQ ID NO: 159799 - DNA, 75 bp, synthetic construct
  source 1..75: mol_type = other DNA
gcccaccgagggcgacggagaaaaaatggaagaattaaaagcgctcattcagcaaatgctggatctgcttaaaag

SEQ ID NO: 159800 - DNA, 75 bp, synthetic construct
  source 1..75: mol_type = other DNA
atgatttactattattatccattcgatgacgatgagagttttcgggaattattagatgaaaaaatttttattaga

SEQ ID NO: 159801 - DNA, 75 bp, synthetic construct
  source 1..75: mol_type = other DNA
gtggaaaggttttgctcaaagaaattagtccattaatgcctggatatagaacatggattgaaatttcattgatcg

SEQ ID NO: 159802 - DNA, 75 bp, synthetic construct
  source 1..75: mol_type = other DNA
ggcatcgtttaatgaatcgtcagcggtggcttgattactggcaaaatatttattcgcgctcgcttagcgttcttc

SEQ ID NO: 159803 - DNA, 75 bp, synthetic construct
  source 1..75: mol_type = other DNA
atgttcaaaatggattacttgaatttttctttaactcaagtaatggtaattttttttacaatgatactaacatca

SEQ ID NO: 159804 - DNA, 75 bp, synthetic construct
  source 1..75: mol_type = other DNA
ggtttgtcagaggagcgataggaaaaagctcagcaataaaacttgccgatgcgctaggcgtaagtcttgagtggg

SEQ ID NO: 159805 - DNA, 75 bp, synthetic construct
  source 1..75: mol_type = other DNA
gctgcaggcgtttctggccgcactggatactcgcggtagcgcagaattaattcatcccgttttcggctccatgac

SEQ ID NO: 159806 - DNA, 75 bp, synthetic construct
  source 1..75: mol_type = other DNA
agctgatcaccctggtggaaggcggcagcgccgctgccactggcgagggcacagcagacacgccggaagaagcaa

SEQ ID NO: 159807 - DNA, 75 bp, synthetic construct
  source 1..75: mol_type = other DNA
cgcgctgaaagtggaaacccgcgaggacggtaaaacccgtctttacgcgcgactggtccctaatcagtacctgat

SEQ ID NO: 159808 - DNA, 75 bp, synthetic construct
  source 1..75: mol_type = other DNA
gcgctagatgagattgtagccatcctatatgcagccttacgaggtgataactcacagcatatggatgcgttggtg

SEQ ID NO: 159809 - DNA, 75 bp, synthetic construct
  source 1..75: mol_type = other DNA
ggattgacctcactccctgaaaatttgcctccacttctgatgaaattttactgcaataataacgtgttgtccgcg

SEQ ID NO: 159810 - DNA, 75 bp, synthetic construct
  source 1..75: mol_type = other DNA
ctgatgattgcctgcaaaaggaacaactaaaaagctggtttagtgccgtgcgtagcctcaataatcctattgcat

SEQ ID NO: 159811 - DNA, 75 bp, synthetic construct
  source 1..75: mol_type = other DNA
ataacggcataacactgattaaaactgaggaatttattcctcaaggctcaatttacgatatagatggtggagacc

SEQ ID NO: 159812 - DNA, 75 bp, synthetic construct
  source 1..75: mol_type = other DNA
ggatgacccggaactcctggagcgcgtgaaggtacaggaggacctggaactcctgaatcagctgaaccgccccgg

SEQ ID NO: 159813 - DNA, 75 bp, synthetic construct
  source 1..75: mol_type = other DNA
gttcatgatggtcgccgaatggtgccaatgggctatggagcgggatggtttgcaagaaaacctgcaaaaaaacct

SEQ ID NO: 159814 - DNA, 75 bp, synthetic construct
  source 1..75: mol_type = other DNA
gctgccgcccaaactaataatttactactgtggagaaaacaagtttaaaacggtacaggtgccacagccccagag

SEQ ID NO: 159815 - DNA, 75 bp, synthetic construct
  source 1..75: mol_type = other DNA
cgtagggataataattatcagtttattgtgacaattaatagtaaaaattacggctgctatcttgataataccgat

SEQ ID NO: 159816 - DNA, 75 bp, synthetic construct
  source 1..75: mol_type = other DNA
aacccgctacgggggagacttacccgaaatctgatttattcaacaaagccgatgaagttctcaacgtattgctaa

SEQ ID NO: 159817 - DNA, 75 bp, synthetic construct
  source 1..75: mol_type = other DNA
tgtgttgccctttgtccgaattgccatagagaattgcactatagtaaaaatgcaaaagaactaatcgagatgctt

SEQ ID NO: 159818 - DNA, 75 bp, synthetic construct
  source 1..75: mol_type = other DNA
ggcctgaggtaaccgctccctggacgtcttaccagcatgaaaaaaacagaaatgaacttatgcctttgagtagaa

SEQ ID NO: 159819 - DNA, 75 bp, synthetic construct
  source 1..75: mol_type = other DNA
tgcagcattgtttatttacttaataatatgacagtaaatgataatgctaatgatgttgcagttactgagtcgtac

SEQ ID NO: 159820 - DNA, 75 bp, synthetic construct
  source 1..75: mol_type = other DNA
atttctccaattgttcacctgttgatcccacaagtaccagaccaacctattttggcgataccgatggctcagtcg

SEQ ID NO: 159821 - DNA, 75 bp, synthetic construct
  source 1..75: mol_type = other DNA
tctctataaatatgaatgatgcaattcctcgtgatgagaaagggatcaccgttagaatagataatgtggtgatgc

SEQ ID NO: 159822 - DNA, 75 bp, synthetic construct
  source 1..75: mol_type = other DNA
aacgctatcaatctcttcatcatcgtcgatatgaggcctataagcagttgcagcatactgcaaaattactcagag

SEQ ID NO: 159823 - DNA, 75 bp, synthetic construct
  source 1..75: mol_type = other DNA
ttgcagagttagcggatgaagattttattcgcattggtcatcatattgtttctcccggaacaccttgtggaaatg

SEQ ID NO: 159824 - DNA, 75 bp, synthetic construct
  source 1..75: mol_type = other DNA
ataggttgggtttctcttctgctctttattattacagccaaaggcgctttaaaaaaaattcattactctgaaata

SEQ ID NO: 159825 - DNA, 75 bp, synthetic construct
  source 1..75: mol_type = other DNA
atttttatttagtagtattgtatgttatgtttataaattaaaacttgatgtttcaatatttttaatttcggttag

SEQ ID NO: 159826 - DNA, 75 bp, synthetic construct
  source 1..75: mol_type = other DNA
attgtcgggatctgcacagccattttcgttgccagcgtattgtggttaagttcgttagccgccagtcgtataagc

SEQ ID NO: 159827 - DNA, 75 bp, synthetic construct
  source 1..75: mol_type = other DNA
tactggggagggattatcaggaatcggcggagcagagcgacccgctgcgtttgttgtgccagacagtaacgcacc

SEQ ID NO: 159828 - DNA, 75 bp, synthetic construct
  source 1..75: mol_type = other DNA
atgcttttaatggtgttctgcaattagatgttattgagttatgtaatgatatagctaatggcgtgaggagatggc

SEQ ID NO: 159829 - DNA, 75 bp, synthetic construct
  source 1..75: mol_type = other DNA
cggggaacaccgccagcagcacagcaacagcgaggtaaccaacggtttatccccgctggcgcggggaacactcta

SEQ ID NO: 159830 - DNA, 75 bp, synthetic construct
  source 1..75: mol_type = other DNA
tcaattatcgaagagtatgaaaagaataatgaaaaaattaaatcttttagaaatactaaaaaaggagtgaaaaac

SEQ ID NO: 159831 - DNA, 75 bp, synthetic construct
  source 1..75: mol_type = other DNA
cactaccgacgaaatgcttcacaaggatgtgacgcttcgcgagctgacatcacgggatgttatcgaatcacaact

SEQ ID NO: 159832 - DNA, 75 bp, synthetic construct
  source 1..75: mol_type = other DNA
atggaaaccgttgcttacgctgattttgcgcgactggaaatgcgcgtcgggaaaattgtggaagtgaaacgccat

SEQ ID NO: 159833 - DNA, 75 bp, synthetic construct
  source 1..75: mol_type = other DNA
gggttgatggtaaaatatcactcggggcttttctctatctgccgttcagccaatgcctgagacagacagcctcaa

SEQ ID NO: 159834 - DNA, 75 bp, synthetic construct
  source 1..75: mol_type = other DNA
caatttatttaacttaaatatatccagggattcacaaaaaaaggtgttttcctctatcaaaagtgaatggctaaa

SEQ ID NO: 159835 - DNA, 75 bp, synthetic construct
  source 1..75: mol_type = other DNA
aaggcggtggaacagttgttatgataacacatgatacaaatctaattacaaaagatatgaaggttatatcgcttt

SEQ ID NO: 159836 - DNA, 75 bp, synthetic construct
  source 1..75: mol_type = other DNA
aacgtgagcgccggtgaaacaccggctggcgtgacatggcaacccgtggttgaaagcctcaaggatatcgccctg

SEQ ID NO: 159837 - DNA, 75 bp, synthetic construct
  source 1..75: mol_type = other DNA
aaaaggtccgcactaccgtcagccggaaagctgttgccgcaggcgacagcgtaaaccgccagttcgtggcagaac

SEQ ID NO: 159838 - DNA, 75 bp, synthetic construct
  source 1..75: mol_type = other DNA
gttcgtggcagaacgtcctgaccagctgtgggtggcggattttacttacgtcagcacatggcagggcttcgtctg

SEQ ID NO: 159839 - DNA, 75 bp, synthetic construct
  source 1..75: mol_type = other DNA
gatgtttgtaaaattaaatcaatacttattgaaggcaaacaattcagattacaaaaaaggttcaaagattttata

SEQ ID NO: 159840 - DNA, 75 bp, synthetic construct
  source 1..75: mol_type = other DNA
gaaaacggggtgaccgaatggagtccgctgttcagcgagccgcatccttcccgtgagttttgtgtccagtacggt

SEQ ID NO: 159841 - DNA, 75 bp, synthetic construct
  source 1..75: mol_type = other DNA
ggcaatcaaatatcacggaacgcagcaattacgggcgcatattgcaaaaacagtaatccgttcagggctggtttc

SEQ ID NO: 159842 - DNA, 75 bp, synthetic construct
  source 1..75: mol_type = other DNA
caggcaaacaattctaagaaatttattatcggttatagagttaaaaaacaaaatgagtatagccatgcggtttta

SEQ ID NO: 159843 - DNA, 75 bp, synthetic construct
  source 1..75: mol_type = other DNA
caggcaaacaattctaagaaatttattatcggttatagagttaaaaaaacaaaatgagtatagccatgcggtttt

SEQ ID NO: 159844 - DNA, 75 bp, synthetic construct
  source 1..75: mol_type = other DNA
ctcatgcaatagaagatggctatcgcggaaccgatgatgcaaaaaaaatgaccgttgatttcgcaaataccatgc

SEQ ID NO: 159845 - DNA, 75 bp, synthetic construct
  source 1..75: mol_type = other DNA
ttagctgaaggtggttctccagtaatttattttgatgcaaaaaatattaaaacatctgacattaacatcgttatt

SEQ ID NO: 159846 - DNA, 75 bp, synthetic construct
  source 1..75: mol_type = other DNA
tgaaatagagaatgatgttaatggtctgaaaataaaagttcaggatatcgacggtaaggtatcagagataatcgt

SEQ ID NO: 159847 - DNA, 75 bp, synthetic construct
  source 1..75: mol_type = other DNA
atggcggattcgaatctcaatgttccggtaatcattcaggctacacggctcgatacatcaatccttccacgcaat

SEQ ID NO: 159848 - DNA, 75 bp, synthetic construct
  source 1..75: mol_type = other DNA
tcatgcctgatgatgaaatcatgcagcaccgacgtatggcgctgctggagttaattcaaaaacatattcgtcaac

SEQ ID NO: 159849 - DNA, 75 bp, synthetic construct
  source 1..75: mol_type = other DNA
attctgagaacggagctgcatgaagagttaagaaaaactcgaaaaacagccataatgaaccgccccggaaatcct

SEQ ID NO: 159850 - DNA, 75 bp, synthetic construct
  source 1..75: mol_type = other DNA
acaacaggaacagggacatcgctgattggttcgtttaacgcaaaccaggcttataccgttagctctacatacact

SEQ ID NO: 159851 - DNA, 75 bp, synthetic construct
  source 1..75: mol_type = other DNA
tccagactatagccaatgctctaattgctgagcgtcggcgcactaaggctttggaagacgccttgcgtgcacatg

SEQ ID NO: 159852 - DNA, 75 bp, synthetic construct
  source 1..75: mol_type = other DNA
ataatgtggcattcgaagagaagtatggctcccagctggagctgatatttcgttttatcgaccgtgcgttggcaa

SEQ ID NO: 159853 - DNA, 75 bp, synthetic construct
  source 1..75: mol_type = other DNA
aaccattgctaccagaaaataaatcagcaggattcttacctgaaaaaattctgcatgagatcaaacgtcgccagc

SEQ ID NO: 159854 - DNA, 75 bp, synthetic construct
  source 1..75: mol_type = other DNA
atgataaagcgacttatacttttcgcaattatcgttccagttggggtggttggttttatattttcggttacagga

SEQ ID NO: 159855 - DNA, 75 bp, synthetic construct
  source 1..75: mol_type = other DNA
gtgctgatgccgggtaaagtgcatgccgatgacacgccggtaaatgtactggagccgggtcagggtaaacccgta

SEQ ID NO: 159856 - DNA, 75 bp, synthetic construct
  source 1..75: mol_type = other DNA
caccacaggaaaagacggtggtcagcattgccgttgatccggagtcaccggaatctttcatgaaacgacctaaac

SEQ ID NO: 159857 - DNA, 75 bp, synthetic construct
  source 1..75: mol_type = other DNA
cagtatctccagcgccagaaatcacaacgggaagagatgcctgtatacacgcgttgggtaaaacgcagaaatgca

SEQ ID NO: 159858 - DNA, 75 bp, synthetic construct
  source 1..75: mol_type = other DNA
gagttacgcaaactcaaccaatttcgtacgtttgctcgaggttttgataatgtccgccagggtgatgaactggat

SEQ ID NO: 159859 - DNA, 75 bp, synthetic construct
  source 1..75: mol_type = other DNA
tttacctaaatggattttacattggatttcaacttctgatttcaaaaaacatgttgaagaaaatcaaagtggctc

SEQ ID NO: 159860 - DNA, 75 bp, synthetic construct
  source 1..75: mol_type = other DNA
ttggtaatttatttttcatcgatgttccattctggaccgttgacaccattttttatacggaaattgatgaagcac

SEQ ID NO: 159861 - DNA, 75 bp, synthetic construct
  source 1..75: mol_type = other DNA
atgctggttaactccacaaaacctctgcccaaaacgttgttatacgaattggcaccacatacccatggtcgtttg

SEQ ID NO: 159862 - DNA, 75 bp, synthetic construct
  source 1..75: mol_type = other DNA
ctaaaggatataattgagtcagacctatctaaaacatggcaaataagtgattttgcaaaaattctacatatgtca

SEQ ID NO: 159863 - DNA, 75 bp, synthetic construct
  source 1..75: mol_type = other DNA
cattccgccgggtttttgcgttgaccatatcaaccgtgacggcactgataaccgactggttaaccttcgaattgt

SEQ ID NO: 159864 - DNA, 75 bp, synthetic construct
  source 1..75: mol_type = other DNA
aacatgtggttgcaactaaaaaaataattaatgaatggccggaatggaaaaaaaatatgttaggaggagatgatt

SEQ ID NO: 159865 - DNA, 75 bp, synthetic construct
  source 1..75: mol_type = other DNA
gctggcgcggggaacacatatcctccagaacacgcgcctcatttcgactcggtttatccccgctggcgcggggaa

SEQ ID NO: 159866 - DNA, 75 bp, synthetic construct
  source 1..75: mol_type = other DNA
aacgaaaaaatgggatgaactgacaaatgatgtttttactatgacatcaaacaaaaacaagttgatatcaagcta

SEQ ID NO: 159867 - DNA, 75 bp, synthetic construct
  source 1..75: mol_type = other DNA
atgagtgactcaatgctcgctggtggttcgctaaccagacaaaatatcaccaaaaagaatgtcattattggctta

SEQ ID NO: 159868 - DNA, 75 bp, synthetic construct
  source 1..75: mol_type = other DNA
agtgataaaagcaggttttagttttgccattatcgttatgttgttggtggctctggtcaccgggctggtgggagg

SEQ ID NO: 159869 - DNA, 75 bp, synthetic construct
  source 1..75: mol_type = other DNA
tggtgtggatgtttctgctctactggctgtataacccgattctggaacttatggatagcctgcaggcgtatcagg

SEQ ID NO: 159870 - DNA, 75 bp, synthetic construct
  source 1..75: mol_type = other DNA
aaaccgggctgagatggggttttctgcgttcctggggaaaatgggcattagtatgaatgacagggcgcgggcaac

SEQ ID NO: 159871 - DNA, 75 bp, synthetic construct
  source 1..75: mol_type = other DNA
actattccccaaaatcgccaggcctgactgatgcatccgcctcgacgtcaaaagatgtgctgagcatcactgatg

SEQ ID NO: 159872 - DNA, 75 bp, synthetic construct
  source 1..75: mol_type = other DNA
attaacactgatgttcttgatgactggttgcgtgttactgataaaagtgatcgggaacttattaataagctgaca

SEQ ID NO: 159873 - DNA, 75 bp, synthetic construct
  source 1..75: mol_type = other DNA
tttgcggagccggggggctaacccatgggttaaagcaatcaggcattgatgttgtagcaggttatgatattgaag

SEQ ID NO: 159874 - DNA, 75 bp, synthetic construct
  source 1..75: mol_type = other DNA
aattccgtaagccagaagggaaaatgaccgtgtccgggatggtgaaggtcaaagaatccatcaaagtgctatgca

SEQ ID NO: 159875 - DNA, 75 bp, synthetic construct
  source 1..75: mol_type = other DNA
tcgtacgcttttgaggattatgcccgcagcgcagcgagtaaaaagcagtgcccttgttgctatggggaaaaattt

SEQ ID NO: 159876 - DNA, 75 bp, synthetic construct
  source 1..75: mol_type = other DNA
aatgatttttatttgttggcagaacggaaaacattacgttttgtccatacttatatcatgcttatcgaatatatc

SEQ ID NO: 159877 - DNA, 75 bp, synthetic construct
  source 1..75: mol_type = other DNA
gtgatctgatccttcaactcagcaaaagttcgatttattcaacaaagccgttcgatgcctgggaaactgatgacc

SEQ ID NO: 159878 - DNA, 75 bp, synthetic construct
  source 1..75: mol_type = other DNA
ttacttctagtttcaggtttaggggataataaggatctaggcacagctctggactattatttttcaatcccaagg

SEQ ID NO: 159879 - DNA, 75 bp, synthetic construct
  source 1..75: mol_type = other DNA
gccagtatgggcaaagtgtacgaaaggtgtgtatccgtcttactgggaagaatggaaaaaagtcagggaggtggt

SEQ ID NO: 159880 - DNA, 75 bp, synthetic construct
  source 1..75: mol_type = other DNA
ctgcacaacgtaaagcgaaagatcgtattgatttagagcgacattatggtattaagaatgaggttaaagatctcg

SEQ ID NO: 159881 - DNA, 75 bp, synthetic construct
  source 1..75: mol_type = other DNA
tattgaaaatggtgaagtacgcattattgatctttcaggaaaacgggcatctgcacaacgtaaagcgaaagatcg

SEQ ID NO: 159882 - DNA, 75 bp, synthetic construct
  source 1..75: mol_type = other DNA
gatttaatcatgtcaaaacattcaccaaaattatatttatttttctgtattggtttttaatgataacgaatctaa

SEQ ID NO: 159883 - DNA, 75 bp, synthetic construct
  source 1..75: mol_type = other DNA
agaccgctttcgatttgatgaccaggaagggcgggaacgtggttctgtaaccagtgcggggcaggtgatggcctg

SEQ ID NO: 159884 - DNA, 75 bp, synthetic construct
  source 1..75: mol_type = other DNA
aaatagagagactacctgaaaaggatgttgacagactgtacccgctgatgagatacagagtcttcatcagtatat

SEQ ID NO: 159885 - DNA, 75 bp, synthetic construct
  source 1..75: mol_type = other DNA
atgcagatggtgtttcaggacccgctctcttcgctcaatccgcgcttaccggtgtggcgcatcatcacagaaccg

SEQ ID NO: 159886 - DNA, 75 bp, synthetic construct
  source 1..75: mol_type = other DNA
gcgacgtccatatcaatttcccggcccgtaaaaactggcttggtaaaactacggaacatgttcatgccatcaatg

SEQ ID NO: 159887 - DNA, 75 bp, synthetic construct
  source 1..75: mol_type = other DNA
atatcatcgggagggcgaggggcgttttaattaatcacacgcgggatatagatatttatgagcctgacgggccga

SEQ ID NO: 159888 - DNA, 75 bp, synthetic construct
  source 1..75: mol_type = other DNA
taatcatctggagtccgacatggcaggaaggctgatggtacatgccctgaaactggctgcaggatacgacgatat

SEQ ID NO: 159889 - DNA, 75 bp, synthetic construct
  source 1..75: mol_type = other DNA
atgagcaaaaagcagagttccaccccacacgatgcgctgttcaaactctttttacgccaaccggagacggcacgc

SEQ ID NO: 159890 - DNA, 75 bp, synthetic construct
  source 1..75: mol_type = other DNA
agaccaaaagtacaaaaaacggtaacggtgaaagaatgcattggtggattacctccattagaggcaggccagacg

SEQ ID NO: 159891 - DNA, 75 bp, synthetic construct
  source 1..75: mol_type = other DNA
atgagcacagaactaacagaaaacaacgacatagctaattttgatagcaccacgcaggaaaaaaggcgcgtaggc

SEQ ID NO: 159892 - DNA, 75 bp, synthetic construct
  source 1..75: mol_type = other DNA
ttaggggattcatcagcgctatgtattccgatgggtgaaatagagacgtttggagaattgttaaatagcaatccg

SEQ ID NO: 159893 - DNA, 75 bp, synthetic construct
  source 1..75: mol_type = other DNA
gtggcatcatccgggtttggtgttgattcacacggtgggagttgaaacgcctcagcctgaactgaccgaggcggt

SEQ ID NO: 159894 - DNA, 75 bp, synthetic construct
  source 1..75: mol_type = other DNA
atgccgattcagcaacttccgcttatgaaaggtgtcggcaaagactttagaaacgccgactatatcgactatctg

SEQ ID NO: 159895 - DNA, 75 bp, synthetic construct
  source 1..75: mol_type = other DNA
tttgcgtgaatggtataacaaagcgccaacagaacgttcattaaccatcatccgtcctactgttatcttcggtga

SEQ ID NO: 159896 - DNA, 75 bp, synthetic construct
  source 1..75: mol_type = other DNA
gccgtttcggccgtgaggatgattattacgtcctcaacctgctgaccggcagtattgacaggttcgtgaacctgg

SEQ ID NO: 159897 - DNA, 75 bp, synthetic construct
  source 1..75: mol_type = other DNA
gctggacgtcctgacaggaagtggcctgtcctttacctgcgatccacagcttgcaaaacagcttcttggataccc

SEQ ID NO: 159898 - DNA, 75 bp, synthetic construct
  source 1..75: mol_type = other DNA
gtggatattgctttgatatcctgagcaaaattacgggcaaaaaatacgctgtcagctctgtgcgcgtgaaaaaat

SEQ ID NO: 159899 - DNA, 75 bp, synthetic construct
  source 1..75: mol_type = other DNA
gtgcagtacacttctctctattatgatgtcaacgttcagggtacccgcaatgtgctggcggccatggaaaaaaat

SEQ ID NO: 159900 - DNA, 75 bp, synthetic construct
  source 1..75: mol_type = other DNA
aggtagcggaactttaccattcacgatgggaaatcgaagtcgggttcagaaacctgaaaagcagcctgctgaaca

SEQ ID NO: 159901 - DNA, 75 bp, synthetic construct
  source 1..75: mol_type = other DNA
gaatatcgcggcagaaacagaagaaagttacggtcccggagacaggcttctgaaactgaaggtgtcactgcaggc

SEQ ID NO: 159902 - DNA, 75 bp, synthetic construct
  source 1..75: mol_type = other DNA
cgcgtgggggccgccctggtggaatggctcttccgccagaccgcacagacatggggctcggaacgttacctgaag

SEQ ID NO: 159903 - DNA, 75 bp, synthetic construct
  source 1..75: mol_type = other DNA
cggttaaaactatatccaggactcctgcgtcaacacaggaaatgttgacctataagggagcaccacagaatacgc

SEQ ID NO: 159904 - DNA, 75 bp, synthetic construct
  source 1..75: mol_type = other DNA
aatctgggaagccacattttgctgaatgccgtgaccgcgccttaccggcggagcgaaaccgtgccggctcactcc

SEQ ID NO: 159905 - DNA, 75 bp, synthetic construct
  source 1..75: mol_type = other DNA
gttcataacaaaacgcccccgaccatcaaggccgagggcagttaagatatcaaaaacccgttatccggtgaaacg

SEQ ID NO: 159906 - DNA, 75 bp, synthetic construct
  source 1..75: mol_type = other DNA
cgacgaagggggcagtggtccgggccgggttcaggacccgcgtgggtggtcgtgcactggtgagcctgacccgtc

SEQ ID NO: 159907 - DNA, 75 bp, synthetic construct
  source 1..75: mol_type = other DNA
gtaaccgtacaatacttacagaccgacagatataaccgtattctcggcagagtctataccgctgacggcactgaa

SEQ ID NO: 159908 - DNA, 75 bp, synthetic construct
  source 1..75: mol_type = other DNA
gttaaccgctggctggtacagcatggtgcagcctgggtatatcctgatttcaacacagattacaccctgccgaca

SEQ ID NO: 159909 - DNA, 75 bp, synthetic construct
  source 1..75: mol_type = other DNA
attctcgtggacaaccgaaaggggataattataaaaagggagaaacttggcgcgttcgctataataatttttttg

SEQ ID NO: 159910 - DNA, 75 bp, synthetic construct
  source 1..75: mol_type = other DNA
agggacttatggtgaagtgactgggatgtatagttatagcagcaacatacgtcagatgaacgtcggaatgtcagg

SEQ ID NO: 159911 - DNA, 75 bp, synthetic construct
  source 1..75: mol_type = other DNA
gtgccattcaccacacctgctatctctgtacgtgaaggatatctgaaatataacgtcactgcagggcaatatcgt

SEQ ID NO: 159912 - DNA, 75 bp, synthetic construct
  source 1..75: mol_type = other DNA
taagctgctgcatctggcgtccaaaccgaccttcgccaacctcgacgcgtgggtgaatgcgatgctggagcaaga

SEQ ID NO: 159913 - DNA, 75 bp, synthetic construct
  source 1..75: mol_type = other DNA
ttttccagaaatacccgctggtgttaacccagaagcggctggtgacctttattgccgataactttcgcctgatgg

SEQ ID NO: 159914 - DNA, 75 bp, synthetic construct
  source 1..75: mol_type = other DNA
tggttgctgaagttgaacaaagtctgaacaaaaagatcccttctatgcacttgccttacccactaggaatgctgg

SEQ ID NO: 159915 - DNA, 75 bp, synthetic construct
  source 1..75: mol_type = other DNA
agtaaaagacgggactccaggtgtcattgctggagcagtgacaaacctgttgactcttggtgttaattttgtgac

SEQ ID NO: 159916 - DNA, 75 bp, synthetic construct
  source 1..75: mol_type = other DNA
gttaacgttcagaaatttatcgtacttatcatctcccgcaaaacaagaactccagtaggtttatacctaaaagat

SEQ ID NO: 159917 - DNA, 75 bp, synthetic construct
  source 1..75: mol_type = other DNA
aaactgagacgttcgaggatgtgttaggcgaatatgggatgggaaaagaaaccggctttttgccgtggaacagag

SEQ ID NO: 159918 - DNA, 75 bp, synthetic construct
  source 1..75: mol_type = other DNA
gggatgcccaagggcaacgtttctcgctctggcggatagcggttatctgaagaatgtaaaacaacatcatgggga

SEQ ID NO: 159919 - DNA, 75 bp, synthetic construct
  source 1..75: mol_type = other DNA
aatatgtatcggtattcaatggtgaacatgatgttccagttatgactttaccggaagagcctctactgacaggaa

SEQ ID NO: 159920 - DNA, 75 bp, synthetic construct
  source 1..75: mol_type = other DNA
attaatggctatttttcatctgcggccaataccattgattcactcagcagaacacttattcttgactatgctgaa

SEQ ID NO: 159921 - DNA, 75 bp, synthetic construct
  source 1..75: mol_type = other DNA
tcgctcaggctaaaacgaacttttatcttttcagtatcaatgctcgtggcaatcacgcgggaaagatcaaacttt

SEQ ID NO: 159922 - DNA, 75 bp, synthetic construct
  source 1..75: mol_type = other DNA
tcgatctggctaaaacgaacttttatcttttcagtatcaatgctcatggcaaacccgcaggaaggatcaaacttt

SEQ ID NO: 159923 - DNA, 75 bp, synthetic construct
  source 1..75: mol_type = other DNA
agaatgtaaaaccactgcatggggagaaaaagggcggtaagttgtaccaaagggcaattgaagttgcgaatctga

SEQ ID NO: 159924 - DNA, 75 bp, synthetic construct
  source 1..75: mol_type = other DNA
gcgacggaaaaaatgccagtacctcatggcaatcgtttagaaaagatgccagtaaaaagcgctggaaaaactttg

SEQ ID NO: 159925 - DNA, 75 bp, synthetic construct
  source 1..75: mol_type = other DNA
agggtaaagaactctcggagcacagcggcaacggcacaatcattggaagagatgactatgttaacggcctgaaaa

SEQ ID NO: 159926 - DNA, 75 bp, synthetic construct
  source 1..75: mol_type = other DNA
aatctttcaaaagatatatctttggttactgactatttggtaactggctatatgaaaactgtcaatgcagatatt

SEQ ID NO: 159927 - DNA, 75 bp, synthetic construct
  source 1..75: mol_type = other DNA
gtgttgaaaagaaatataaaacaataattattgttattggtgaaagtgtccggcgggattatctttcagtctatg

SEQ ID NO: 159928 - DNA, 75 bp, synthetic construct
  source 1..75: mol_type = other DNA
atcgcaggtatacccattatttattttattatctcattgatgatagttatgttcactgtctggttctggcgtaca

SEQ ID NO: 159929 - DNA, 75 bp, synthetic construct
  source 1..75: mol_type = other DNA
accgagctcacgctggaagcaacccaggaactgatgcatagcaaagatgtttcgctgattctggctaccggtggt

SEQ ID NO: 159930 - DNA, 75 bp, synthetic construct
  source 1..75: mol_type = other DNA
cttttttatttgtggtaaatgggcggctggtggggttggcggcacctgtcagtcctttgcttatgtgttgatgat

SEQ ID NO: 159931 - DNA, 75 bp, synthetic construct
  source 1..75: mol_type = other DNA
cgtggtgcgcctcgtccgttacctgacacgctggcgacaatgacgccgcaggcttataacagtattcaatacgac

SEQ ID NO: 159932 - DNA, 75 bp, synthetic construct
  source 1..75: mol_type = other DNA
gcattgcttctcttttttctcaggcggcattcacggcagattctgatattgccgacgggcaaacccagcgttttg

SEQ ID NO: 159933 - DNA, 75 bp, synthetic construct
  source 1..75: mol_type = other DNA
tgctgattgatgatgatgctgacgtgctggacgcctatcggattgataatccgacaccgtattacgtgactgtaa

SEQ ID NO: 159934 - DNA, 75 bp, synthetic construct
  source 1..75: mol_type = other DNA
actggcactgggtactaccctctatgatcccggggaccctatggggaagatgtttttaacgttctggcaaccttt

SEQ ID NO: 159935 - DNA, 75 bp, synthetic construct
  source 1..75: mol_type = other DNA
actggcgctgggtactaccctctatgatcccggggaccctatggggaagatgttttttaacgttctggcaacctt

SEQ ID NO: 159936 - DNA, 75 bp, synthetic construct
  source 1..75: mol_type = other DNA
ggtagttctcaagcttgaccgtttaggacgtgattgtatcgacctacagaaaacggttgatatgctcattgcaaa

SEQ ID NO: 159937 - DNA, 75 bp, synthetic construct
  source 1..75: mol_type = other DNA
ctgtattcaatggcgaacgtgacgttccggtaatgtctttgccagaagagcctgtactgaccggaaatgctgaat

SEQ ID NO: 159938 - DNA, 75 bp, synthetic construct
  source 1..75: mol_type = other DNA
cgctaaccgtttttatcaggctctgggaggcagaataaatgatcatatcgtcaattattacctccacgggagagc

SEQ ID NO: 159939 - DNA, 75 bp, synthetic construct
  source 1..75: mol_type = other DNA
gtgaggtataaattcatttttaatgatgccacgactgcggcaattaagaatcagctttgtggtaaatggcgttca

SEQ ID NO: 159940 - DNA, 75 bp, synthetic construct
  source 1..75: mol_type = other DNA
cgtacgaatcatgaatgtccttacccaacttgcagatcaggggttcatatcgtttatatgcgaaggtaagagagg

SEQ ID NO: 159941 - DNA, 75 bp, synthetic construct
  source 1..75: mol_type = other DNA
taaggtgttaggtcgtcctgtagctgtgaacactacagaggccgttttagagcataaggctaagggattgtcaca

SEQ ID NO: 159942 - DNA, 75 bp, synthetic construct
  source 1..75: mol_type = other DNA
cagcttgatcgtacctggtgggaagagggcttcatttcatgggaccaggcctcggaattgattactcccaacgcg

SEQ ID NO: 159943 - DNA, 75 bp, synthetic construct
  source 1..75: mol_type = other DNA
aatcagtttacagcagcgtattccaggagtgagtatgagtgagtattcagggggccagtcaggcagacgagttat

SEQ ID NO: 159944 - DNA, 75 bp, synthetic construct
  source 1..75: mol_type = other DNA
tggcattatggcggcagttaacaacatgctgattgatatgctggctactatggctcgtcaggattatgaaactcg

SEQ ID NO: 159945 - DNA, 75 bp, synthetic construct
  source 1..75: mol_type = other DNA
tgaaagagatacggaaaagtgaagggttaactcaagctgagtttgcagatgttactgggataaatctcggaacta

SEQ ID NO: 159946 - DNA, 75 bp, synthetic construct
  source 1..75: mol_type = other DNA
attgatggtattccatggaaaaatgaccgccactttcctgagtttcgtctgacggttgtcctgaaggatctgagt

SEQ ID NO: 159947 - DNA, 75 bp, synthetic construct
  source 1..75: mol_type = other DNA
atggtatcgtgcgcgttgcagaaagcgtcattcctgaaattaaacatcaggatgaggtacgggtaaaaattgcca

SEQ ID NO: 159948 - DNA, 75 bp, synthetic construct
  source 1..75: mol_type = other DNA
tcagctttcgacctgaataaacgacttacgggctggaaaaaactccctgagctggcctttcttgctgagggttac

SEQ ID NO: 159949 - DNA, 75 bp, synthetic construct
  source 1..75: mol_type = other DNA
tcattattctggtggtttgttacttgtactgtttgcaatgttatctggagtgatttatggcatggcatggatgtt

SEQ ID NO: 159950 - DNA, 75 bp, synthetic construct
  source 1..75: mol_type = other DNA
gtgagctacatcaagttggaatatcagtggaagaaattgcggctaaaattagtgcacttaatgtacctcaagtgc

SEQ ID NO: 159951 - DNA, 75 bp, synthetic construct
  source 1..75: mol_type = other DNA
gatgactggctcaaggttactgataaagataacgttgagttaatcagcaagctgactgagacggtcagtaaaggc

SEQ ID NO: 159952 - DNA, 75 bp, synthetic construct
  source 1..75: mol_type = other DNA
tttacgttatgatgcggcaaaacactcaaaacatgaacaaatagaaagatcaataaccccaccgcttaaaaatta

SEQ ID NO: 159953 - DNA, 75 bp, synthetic construct
  source 1..75: mol_type = other DNA
cgatacgttattagaaaaaccagcagaaatgatattgaatagtgatgctgatgtacgtttttgttttggttgggc

SEQ ID NO: 159954 - DNA, 75 bp, synthetic construct
  source 1..75: mol_type = other DNA
tccgtttactgagcaggaccaccagacctggcggaatatcctggccagttttgtcccgcgtgagacggtaacgga

SEQ ID NO: 159955 - DNA, 75 bp, synthetic construct
  source 1..75: mol_type = other DNA
tacaaaatcaaacttcgcgcatcggggtttcgtctggtatatcagatgagtgatgacatgttaattattgctgtt

SEQ ID NO: 159956 - DNA, 75 bp, synthetic construct
  source 1..75: mol_type = other DNA
tcagccaccgggcctgacgggctggaaatacgccgggaatatgatgaattgggccgtctgattcaggaaactgcc

SEQ ID NO: 159957 - DNA, 75 bp, synthetic construct
  source 1..75: mol_type = other DNA
ttactcagatcaccacaaacagatcattaacccctcttgtccggttgcgccgcaaccagaccctgaggtgttgat

SEQ ID NO: 159958 - DNA, 75 bp, synthetic construct
  source 1..75: mol_type = other DNA
tcagatctgaatgatggctggttttataaagagcacagcgagcttgcggcagagattcgcggcgtgagtgaagat

SEQ ID NO: 159959 - DNA, 75 bp, synthetic construct
  source 1..75: mol_type = other DNA
gctctgttggcggaggcttttattaatggaggagccattaaacttaatggtgcttatgcagcaggaacccaagcc

SEQ ID NO: 159960 - DNA, 75 bp, synthetic construct
  source 1..75: mol_type = other DNA
cagatcagtccttctctctcccctgatgggccagaaaacacatcgtcttctcaaaagccccgcaagactggtaca

SEQ ID NO: 159961 - DNA, 75 bp, synthetic construct
  source 1..75: mol_type = other DNA
gcgaactgcaacaggcttatgacttttttaactccgttctctttaatggagatttgcccgacatgttgttgacgt

SEQ ID NO: 159962 - DNA, 75 bp, synthetic construct
  source 1..75: mol_type = other DNA
tcgatcagtcagtgggatagttttaacggtcgcattgaagcggtggagagcgttcagcttcgccctcgcgtctcg

SEQ ID NO: 159963 - DNA, 75 bp, synthetic construct
  source 1..75: mol_type = other DNA
tctttattaccggcggcggatcgggattagggctggcgctggtcgagcgatttatcgaagaaggcgcgcaggttg

SEQ ID NO: 159964 - DNA, 75 bp, synthetic construct
  source 1..75: mol_type = other DNA
ctgatattacttttgttggaggtattgaaagagtaaatacattacttgcgaataaattttttagcgaaggatata

SEQ ID NO: 159965 - DNA, 75 bp, synthetic construct
  source 1..75: mol_type = other DNA
tcgtttggcggtgaaggtaaagagactgcgctcaaaaccttggatgatgttaatcacaggctgcctattctttcc

SEQ ID NO: 159966 - DNA, 75 bp, synthetic construct
  source 1..75: mol_type = other DNA
attgcctgcggtcgctcctctgccccgatgccgcaacgtgtaacagaagaaggaaaacaggatgatgaagaaaaa

SEQ ID NO: 159967 - DNA, 75 bp, synthetic construct
  source 1..75: mol_type = other DNA
cacgactacgctttcgacctacctgatggaaagcggcaaactctgcgatggcagtatttttgattccagaggggc

SEQ ID NO: 159968 - DNA, 75 bp, synthetic construct
  source 1..75: mol_type = other DNA
aagcgatggagcacttcgcctatttgccgaccggattgtatgtatttgcgtataaaaaagatgtttatttgcggg

SEQ ID NO: 159969 - DNA, 75 bp, synthetic construct
  source 1..75: mol_type = other DNA
caagcatagttttgtttttccgcccccaaaaattggggggtcttttttcgctgcatcagagcgtttttgacgcaa

SEQ ID NO: 159970 - DNA, 75 bp, synthetic construct
  source 1..75: mol_type = other DNA
atgaaaccagagcttctaaagatggtgttcagcgtagaagcggaaatccatcccgaaccggtatctggcagaccc

SEQ ID NO: 159971 - DNA, 75 bp, synthetic construct
  source 1..75: mol_type = other DNA
accggaggtttgtatgtcacggtgttaactcccaacgaggcggcctatggggtgtacaacgatgccataaggaag

SEQ ID NO: 159972 - DNA, 75 bp, synthetic construct
  source 1..75: mol_type = other DNA
agttatgttagccattctaaaacgttgcaattacaatccaatggttcaaccatcacgacaacgctttcgacctat

SEQ ID NO: 159973 - DNA, 75 bp, synthetic construct
  source 1..75: mol_type = other DNA
gcgtgagagggaaagaaagcgggaacaaaatggcgattgtcacggcgcgtcacgaaatgtcacgcacatgtcacg

SEQ ID NO: 159974 - DNA, 75 bp, synthetic construct
  source 1..75: mol_type = other DNA
actggttttgactgattatagacgtacggacacctcaaattgccctggtatcaatactcgtgtctttgtctgtgc

SEQ ID NO: 159975 - DNA, 75 bp, synthetic construct
  source 1..75: mol_type = other DNA
tcgcctctttttatgaggtatcagatcaacatgcatatggaatatatactggcccaacggatcatgctacggcat

SEQ ID NO: 159976 - DNA, 75 bp, synthetic construct
  source 1..75: mol_type = other DNA
tacgtcagccacaataaggcgttacagttgcaatccaatggctcgacaatcaccaccacgctttcgacctacctg

SEQ ID NO: 159977 - DNA, 75 bp, synthetic construct
  source 1..75: mol_type = other DNA
atttgaagataatttaaataatgtcactaataaaggtattgggagtgttaaatatatcttaaaggatttttttgg

SEQ ID NO: 159978 - DNA, 75 bp, synthetic construct
  source 1..75: mol_type = other DNA
cgacgagaaggacaagaaaaaaacggcggatgatgaggacgacgaggaagacaaggacaagaagaaaaccgccga

SEQ ID NO: 159979 - DNA, 75 bp, synthetic construct
  source 1..75: mol_type = other DNA
aatttattatagattaacgcagaatagtattacaacaaaaccaaaaattagtagcatcaaagatctcactttagt

SEQ ID NO: 159980 - DNA, 75 bp, synthetic construct
  source 1..75: mol_type = other DNA
attaataattccaagtttcaatatgttaatatacccatctctatttatgaagatggtggtatgtctagtatccat

SEQ ID NO: 159981 - DNA, 75 bp, synthetic construct
  source 1..75: mol_type = other DNA
aagcggcacttttgtggcgtgaatatgaaaacggcaggccttttgaagagacccgccgcttatatggactacatc

SEQ ID NO: 159982 - DNA, 75 bp, synthetic construct
  source 1..75: mol_type = other DNA
gcctgcccgttatgacggcgagtgccagatggttaatgccaatgcggaaaggattaagaacctgacctttaacgg

SEQ ID NO: 159983 - DNA, 75 bp, synthetic construct
  source 1..75: mol_type = other DNA
actcaatatgcccaacgataccggtcgcctcctatgatatctcctggagtgaaaattatgtcagtcataataaag

SEQ ID NO: 159984 - DNA, 75 bp, synthetic construct
  source 1..75: mol_type = other DNA
ctggtcgcggaggaactccccgccgaaaccgacgttgctgccgaccctgccgcttcgcccacctgtacaggtgca

SEQ ID NO: 159985 - DNA, 75 bp, synthetic construct
  source 1..75: mol_type = other DNA
ttatcgagcgttagccagcggtgttcggccaggtgtggcgaaagcggatgcgatatttatgatcaattataatta

SEQ ID NO: 159986 - DNA, 75 bp, synthetic construct
  source 1..75: mol_type = other DNA
acaggaaaatcacgggctgacttatgtgctgatttcacacaatgtctcggtgatacgtcatatgagcgatcgggt

SEQ ID NO: 159987 - DNA, 75 bp, synthetic construct
  source 1..75: mol_type = other DNA
cggttattcgctgcgctgcccggaagtgaagctcaacggccatgaggctcattgcagctatacagtctgccaaca

SEQ ID NO: 159988 - DNA, 75 bp, synthetic construct
  source 1..75: mol_type = other DNA
tgttactgatttgcttcctaacctgtctctcattaattctgaagatgcgagaatggcaataagcgaacatcgtga

SEQ ID NO: 159989 - DNA, 75 bp, synthetic construct
  source 1..75: mol_type = other DNA
atatatgatgatgaaccacgaagtgacattgattatgcaaatattccatatgctggaactacggaagagttaatt

SEQ ID NO: 159990 - DNA, 75 bp, synthetic construct
  source 1..75: mol_type = other DNA
atgccattattagcattagcaatatttcagatgataggcggaattactgacttttatcggtcgtggcgtggagtt

SEQ ID NO: 159991 - DNA, 75 bp, synthetic construct
  source 1..75: mol_type = other DNA
caggtcctgtaaatctctatatacctaccagattcaaagataagtatcttgaagtagagtcatattttgtcgaca

SEQ ID NO: 159992 - DNA, 75 bp, synthetic construct
  source 1..75: mol_type = other DNA
ctcgctgggtaagattattaggttataatactcgcaaggtcgctattgctggaagtatgcctgtaggaataagtt

SEQ ID NO: 159993 - DNA, 75 bp, synthetic construct
  source 1..75: mol_type = other DNA
ctggagtgttacgcaagttaggttacaatacacggcgagttgctgtcgtcggctcttcccctgctgctattagtt

SEQ ID NO: 159994 - DNA, 75 bp, synthetic construct
  source 1..75: mol_type = other DNA
cttgttctgttttgctaattcctgatattttcacttttaacatcctccagtcacgtacagaagaaattaatggtg

SEQ ID NO: 159995 - DNA, 75 bp, synthetic construct
  source 1..75: mol_type = other DNA
gctgatgttgcttacccctgcgctgggctatctcggcgtgcgaacccttgacggctttgcccgttacagcaaatc

SEQ ID NO: 159996 - DNA, 75 bp, synthetic construct
  source 1..75: mol_type = other DNA
atggatccgttaaccctttcaggcatcgcctctgttctgctgaaagccgggccggggctgattcgttccgtcggg

SEQ ID NO: 159997 - DNA, 75 bp, synthetic construct
  source 1..75: mol_type = other DNA
accccgatcgtctgctggaacaaactgccgcgccgcatcgggggaagctgaaagttttcttcggtgcctgtgcag

SEQ ID NO: 159998 - DNA, 75 bp, synthetic construct
  source 1..75: mol_type = other DNA
cggtaatcgcccgtagttgcagtttgctcgggccacagtgctttaattcgtccatccttatctgttttggcggta

SEQ ID NO: 159999 - DNA, 75 bp, synthetic construct
  source 1..75: mol_type = other DNA
cggtaatcgccagtagtcgcagtttgctcgggccacagtgccttaattcgtccatccttatctgttttggcggta

SEQ ID NO: 160000 - DNA, 75 bp, synthetic construct
  source 1..75: mol_type = other DNA
atggatccagtaaccatctctaccgttgccagcgttctgatgaaggcaggaccgtcgttactgcgtaccgtgggc

SEQ ID NO: 160001 - DNA, 75 bp, synthetic construct
  source 1..75: mol_type = other DNA
ctctctgtgtattcagctcttacgctaatgccgcttttactctcaatagtacgcggtatatatataatgaaggac

SEQ ID NO: 160002 - DNA, 75 bp, synthetic construct
  source 1..75: mol_type = other DNA
gacgccttaaataaaataaatagccaatctatttgcgaagataaagagttcgctggtttaatatgtaaggataat

SEQ ID NO: 160003 - DNA, 75 bp, synthetic construct
  source 1..75: mol_type = other DNA
catccgcagacggaagcactgctctggcagcatgagaccagacatgcgtacaacgcgcagggactggcgaaccgc

SEQ ID NO: 160004 - DNA, 75 bp, synthetic construct
  source 1..75: mol_type = other DNA
actggtccatcaactggcggacaccacctgttcggtgctgctgatccccgacgtctttaccttcaacattctcca

SEQ ID NO: 160005 - DNA, 75 bp, synthetic construct
  source 1..75: mol_type = other DNA
ccggtgagcgtaccacaaggtaaaaaaccaccacgctgggtaaataccgacgaacaaccacgttccgggacgcaa

SEQ ID NO: 160006 - DNA, 75 bp, synthetic construct
  source 1..75: mol_type = other DNA
atgtcgcgccagtgtacgcattatgggcgttggcctcaacacggttttacgtcacttaaaaaactcaggccgcag

SEQ ID NO: 160007 - DNA, 75 bp, synthetic construct
  source 1..75: mol_type = other DNA
atgacttgttatacatccgaggatggagcatctggttggatctaaagataatattcctcacggtcttcaaaggtt

SEQ ID NO: 160008 - DNA, 75 bp, synthetic construct
  source 1..75: mol_type = other DNA
tttattaagtctaggtattttttctcttttttcttctttcgatataagtttagcaatatttcttctgtggtattg

SEQ ID NO: 160009 - DNA, 75 bp, synthetic construct
  source 1..75: mol_type = other DNA
tgcctcttttcgatactccactaaatggaataaatatggttttaaagagagtagaagatatattcgtctcaagtt

SEQ ID NO: 160010 - DNA, 75 bp, synthetic construct
  source 1..75: mol_type = other DNA
aaacttatccgcagcgaggatgaggggctggtcacccactggtactatgacgaagcagaccgcctcactcaccgc

SEQ ID NO: 160011 - DNA, 75 bp, synthetic construct
  source 1..75: mol_type = other DNA
cagtagttcctttgtatgaatccccgttaagtgggatcaatatggtttttaagcggctagaagatataattgttt

SEQ ID NO: 160012 - DNA, 75 bp, synthetic construct
  source 1..75: mol_type = other DNA
tgagaaccttataaagagcattgtaagtcaattaactgatactacgtgctctgttttattgattcctgatatttt

SEQ ID NO: 160013 - DNA, 75 bp, synthetic construct
  source 1..75: mol_type = other DNA
atgggcaatgctgtcttcgcgcaaacattgaaggttatcaacaaacaagccgacggtgaaaaagtgattcaggtg

SEQ ID NO: 160014 - DNA, 75 bp, synthetic construct
  source 1..75: mol_type = other DNA
caggaacagcggcaccatcagcacgccgggcgggaagaccgtgctggctgcagcggaaagcgtcacgctgcagtt

SEQ ID NO: 160015 - DNA, 75 bp, synthetic construct
  source 1..75: mol_type = other DNA
ggcgctgcgggcagcaaacgcgaaagcagagattatcgtctacccggatgccgggcatgcattcaacgccgatta

SEQ ID NO: 160016 - DNA, 75 bp, synthetic construct
  source 1..75: mol_type = other DNA
aatgcggacaaggtggtgatgcagggcggcgcccgcattgacgtttctgcaacgcagcagggtaacggcggtacg

SEQ ID NO: 160017 - DNA, 75 bp, synthetic construct
  source 1..75: mol_type = other DNA
aaccgtgttgtgggtggcggtgaatcgcagattatgggtaacctgaaggcgaatggtcaggtgttcctggttaac

SEQ ID NO: 160018 - DNA, 75 bp, synthetic construct
  source 1..75: mol_type = other DNA
tcgccagcctgctcacccacggccagcagatcacccaccgtcagcatcaacgtggctggattgaaaccccggacg

SEQ ID NO: 160019 - DNA, 75 bp, synthetic construct
  source 1..75: mol_type = other DNA
gattaatcgttcagaggaatcacttaatagcgaaataacaggggtccgaaaagcgctcgctgccggacgtttccg

SEQ ID NO: 160020 - DNA, 75 bp, synthetic construct
  source 1..75: mol_type = other DNA
cgtattgaggatgatcaggataagatgagagatacactaagtaaactggaaacacaaatccatgaacttgatgtt

SEQ ID NO: 160021 - DNA, 75 bp, synthetic construct
  source 1..75: mol_type = other DNA
aagttaactttgcggttaatacgctggggttctcccgcagcttccatgtcttcgccgcaccaaaacaggatgctg

SEQ ID NO: 160022 - DNA, 75 bp, synthetic construct
  source 1..75: mol_type = other DNA
ttcccgccgctcgtgtaaatatcaagcttgatctgcatacaggcaatgctaaaaagaaagttgaactccccctca

SEQ ID NO: 160023 - DNA, 75 bp, synthetic construct
  source 1..75: mol_type = other DNA
atggctgagttttcgcctgcggttaatttaacagtagaagatacgctaaacggaaacggtaatgaacaaaatttc

SEQ ID NO: 160024 - DNA, 75 bp, synthetic construct
  source 1..75: mol_type = other DNA
taacaccatctctacagatggttatggagaggcagcactattccatttcgaaaatagtagtggtggcatttctgg

SEQ ID NO: 160025 - DNA, 75 bp, synthetic construct
  source 1..75: mol_type = other DNA
aggtctggaaccggatctcataattgatataaagcctccaacaaaaggaacgggaactcgttcaaagtttacgtg

SEQ ID NO: 160026 - DNA, 75 bp, synthetic construct
  source 1..75: mol_type = other DNA
gacaaatgggggcatcatatgggtgatcaagtcatagtaatggttaccagaataataaaaaaatccatcaggaaa

SEQ ID NO: 160027 - DNA, 75 bp, synthetic construct
  source 1..75: mol_type = other DNA
aaagcctgatactacaacatattcctgaagcctgtatactgggactctttgttgcccgaacaacccggggagctc

SEQ ID NO: 160028 - DNA, 75 bp, synthetic construct
  source 1..75: mol_type = other DNA
tttatatgtaaaaccatactcagagaagaaaatagatatcagcaacagaataataaaaaaatcaaatgggcaatg

SEQ ID NO: 160029 - DNA, 75 bp, synthetic construct
  source 1..75: mol_type = other DNA
aatgaatatataaaaagaaaaaatgtattagtcatcattccatcacttgtagaaaactcaccctatactgtttat

SEQ ID NO: 160030 - DNA, 75 bp, synthetic construct
  source 1..75: mol_type = other DNA
caatgttgacctcgcagcctccggcgtcgcgtacaaagagcggcttaaccaaccagtgatagcggagcaggtggc

SEQ ID NO: 160031 - DNA, 75 bp, synthetic construct
  source 1..75: mol_type = other DNA
cggttacgccgctcggtcctgaggatcaacaggatctgttctacgcgcacatcgataatgaaaactttgatgcag

SEQ ID NO: 160032 - DNA, 75 bp, synthetic construct
  source 1..75: mol_type = other DNA
gagcatcatgacggccaggtgtttctgcctcttgaagaagctattgaatatattaacgggctgaataacaacatg

SEQ ID NO: 160033 - DNA, 75 bp, synthetic construct
  source 1..75: mol_type = other DNA
atgcaggggacccgtgttcagattaaacactccaacatcaccgcgggcaactttgcgctgaatgcgacagtggcc

SEQ ID NO: 160034 - DNA, 75 bp, synthetic construct
  source 1..75: mol_type = other DNA
tggctaaagcaaaggtgatcatccatgacaccttcgctcactacctggacgcaagaaattttcctggcgggaacc

SEQ ID NO: 160035 - DNA, 75 bp, synthetic construct
  source 1..75: mol_type = other DNA
ggggatgagtccaagcttccggcgaaaccaatctggtggcagggaaatgaatatgccgcctggccatatcaactg

SEQ ID NO: 160036 - DNA, 75 bp, synthetic construct
  source 1..75: mol_type = other DNA
ttcgaaaatatggtgttgcattagttttattagcgttgcactggcatgtgataacttaatattattacactttat

SEQ ID NO: 160037 - DNA, 75 bp, synthetic construct
  source 1..75: mol_type = other DNA
gcgggttgtctgaaaccggaaagttaaaagcgcagtggggaatgaacagtaagtgttatgctgactaccgcctgc

SEQ ID NO: 160038 - DNA, 75 bp, synthetic construct
  source 1..75: mol_type = other DNA
atgataattacattctgaatggtgggaacaaaaatgattatttgccaatgataaaaaatatatattcaaaaattc

SEQ ID NO: 160039 - DNA, 75 bp, synthetic construct
  source 1..75: mol_type = other DNA
atgaaaggcagaacgccacacattgaacatcaagccaaccacttctcggatgttcgcaatgagatgattgccatt

SEQ ID NO: 160040 - DNA, 75 bp, synthetic construct
  source 1..75: mol_type = other DNA
gagggaacctcattctctgaaatattaagggagctgcgtatggagtcagcacgaaagatgattcttgaaaatacc

SEQ ID NO: 160041 - DNA, 75 bp, synthetic construct
  source 1..75: mol_type = other DNA
taatacgatggcgcacggtcgctattactatggtgaccataccaatgggatcgcctggcgtttaatctctcaggg

SEQ ID NO: 160042 - DNA, 75 bp, synthetic construct
  source 1..75: mol_type = other DNA
tggtgacagtgccaatgaaaatatcatgcagttcagtgatatttatctgacaacgcgaggttttttacccttcgc

SEQ ID NO: 160043 - DNA, 75 bp, synthetic construct
  source 1..75: mol_type = other DNA
aaagatgccttcaccttgtggctgaaccagaacgttcaggcggctgaactgctggcggagatggcgatttccagc

SEQ ID NO: 160044 - DNA, 75 bp, synthetic construct
  source 1..75: mol_type = other DNA
acttccgcacgctggtgaaacacggccacgtttacgttgctctgccaccgctctaccgcattgacctcgggaaag

SEQ ID NO: 160045 - DNA, 75 bp, synthetic construct
  source 1..75: mol_type = other DNA
aggaagtgcatgatatttcggtggcgatcggtattgatcctgacagcgacgatcttagccaactgcgttatggca

SEQ ID NO: 160046 - DNA, 75 bp, synthetic construct
  source 1..75: mol_type = other DNA
cggtctgaacgattacctggcggaagcggtaaacggtttaccgacgctgccggaaaaaccgtttatcggtaattt

SEQ ID NO: 160047 - DNA, 75 bp, synthetic construct
  source 1..75: mol_type = other DNA
aagatattccgctgtcgctggtttattctctttttgaagggataagaattgcagatgcttacactacgtcactaa

SEQ ID NO: 160048 - DNA, 75 bp, synthetic construct
  source 1..75: mol_type = other DNA
gcccagcgtcgtatgcgtgccgccaaaaaagtggtacgtaaaaagttgaccagtggaccggcattgccaggaaaa

SEQ ID NO: 160049 - DNA, 75 bp, synthetic construct
  source 1..75: mol_type = other DNA
gtggtgaactgctgaccgaaagctacgtcaacctgatcccaacgatgcagggcggtacgcacgttaacggtctgc

SEQ ID NO: 160050 - DNA, 75 bp, synthetic construct
  source 1..75: mol_type = other DNA
gaacaatattgaatacatgcactacgaagcggagctggtggtggtgattggcaagcaggcgcgtaacgtcagcga

SEQ ID NO: 160051 - DNA, 75 bp, synthetic construct
  source 1..75: mol_type = other DNA
aaaactacgtgggctaaaggactgctacaaaattaaacttcgtgcatcgggatttcgtctggtttatcaggtgat

SEQ ID NO: 160052 - DNA, 75 bp, synthetic construct
  source 1..75: mol_type = other DNA
tttccctaatccacagcagcagttgttaccgggtatgtttgttcgcgctcgtgtcgatgaaggcgtgatggaaaa

SEQ ID NO: 160053 - DNA, 75 bp, synthetic construct
  source 1..75: mol_type = other DNA
cggacatcacaggcggtaggcgttaatggtcaactggtcgagtatcgttatgatggcacggttaaaaccgtctca

SEQ ID NO: 160054 - DNA, 75 bp, synthetic construct
  source 1..75: mol_type = other DNA
tctggcagcggctggaggagaaaaagtgtcgcgccggtatgggccgttcatcgctgattatggtggcgcagggct

SEQ ID NO: 160055 - DNA, 75 bp, synthetic construct
  source 1..75: mol_type = other DNA
accgtctgaacagtgaaccggtggtgtttcgcggattcactacaccggagatggggcttgccgccctggccggtc

SEQ ID NO: 160056 - DNA, 75 bp, synthetic construct
  source 1..75: mol_type = other DNA
ctgccattttattaatggcaccgttagccttttccgcacaatcattggctgaatcattaaccgtggaacaacgcc

SEQ ID NO: 160057 - DNA, 75 bp, synthetic construct
  source 1..75: mol_type = other DNA
tgaccgggaaattgcaattcgatatatcttcacaatacgaaaaacaacaagagcatattttatattcccctctaa

SEQ ID NO: 160058 - DNA, 75 bp, synthetic construct
  source 1..75: mol_type = other DNA
gcaccgggctgggagaagtgcttgtgacgataaatttgcttaatgccctggtttggctggcgatcaatctggtta

SEQ ID NO: 160059 - DNA, 75 bp, synthetic construct
  source 1..75: mol_type = other DNA
aggtgattgatgatcaattagttatcgctgttgttgctgtagggaaacgtgaacgtagtgatgtttataatcttg

SEQ ID NO: 160060 - DNA, 75 bp, synthetic construct
  source 1..75: mol_type = other DNA
gaacacctgctgtttactccgttgttcaaagcggataacgccagatgctttgatctggaggtggaatcatccact

SEQ ID NO: 160061 - DNA, 75 bp, synthetic construct
  source 1..75: mol_type = other DNA
tatcgccagtaactttggccgttatgctggcgcaagtccatttaccacctttaatggtcgttattatggtgatca

SEQ ID NO: 160062 - DNA, 75 bp, synthetic construct
  source 1..75: mol_type = other DNA
tttaatggtaactatactgcacgactagcaaatcataaactctctgccggtgatacgtataacttaattaaaacg

SEQ ID NO: 160063 - DNA, 75 bp, synthetic construct
  source 1..75: mol_type = other DNA
aagttttaaccagtcatcacggaataataagagatgaagaaaaaaaaatgttattgtctcggtgctttgcaggtt

SEQ ID NO: 160064 - DNA, 75 bp, synthetic construct
  source 1..75: mol_type = other DNA
atatcatctatttcctgcaacatggtcactggagggtaaatgaacatagtcttcagatggagaaaatatggtttt

SEQ ID NO: 160065 - DNA, 75 bp, synthetic construct
  source 1..75: mol_type = other DNA
tacttcgctgctgattattcctgcagctacagcgcgtcgctttgcccgcacgccggaacagatggccggtgtcgc

SEQ ID NO: 160066 - DNA, 75 bp, synthetic construct
  source 1..75: mol_type = other DNA
ttaccggcaaattgcagttcgatatcagcagccagtatgggctacagcaagaacacctgttgtttacaccactct

SEQ ID NO: 160067 - DNA, 75 bp, synthetic construct
  source 1..75: mol_type = other DNA
cgcttcagggttgtcacaatctaaatttgccgatcttatttccgtaagcgtagacacgttgcgtaactgggagca

SEQ ID NO: 160068 - DNA, 75 bp, synthetic construct
  source 1..75: mol_type = other DNA
atggcttcattcgcatatgaaaataaaaaattggaaaaactctttactttattagatacgagagacatgatcttg

SEQ ID NO: 160069 - DNA, 75 bp, synthetic construct
  source 1..75: mol_type = other DNA
aaagaacacatggatgatcctctattccatctaatccgaagcaatactttgaaacccacacctgtatatgctaat

SEQ ID NO: 160070 - DNA, 75 bp, synthetic construct
  source 1..75: mol_type = other DNA
gtggcgcaggacgtttcgatcatttcgttgagtggtacatttacctccataagcgtactgtatcagatatctcaa

SEQ ID NO: 160071 - DNA, 75 bp, synthetic construct
  source 1..75: mol_type = other DNA
tcggtgctttgcaggttccatttaaacagatgaaaaatcctactgatcctgaggaattagcaaatatatttaata

SEQ ID NO: 160072 - DNA, 75 bp, synthetic construct
  source 1..75: mol_type = other DNA
ttccctgaagaaagcacttgataaaaataacaaaataatttattcctcagggcttagttgttttcaatctcatta

SEQ ID NO: 160073 - DNA, 75 bp, synthetic construct
  source 1..75: mol_type = other DNA
atgaaagtatttcacaatatatttaagtacatctcttcaaaccatcaagataagcattcagataaagttaataat

SEQ ID NO: 160074 - DNA, 75 bp, synthetic construct
  source 1..75: mol_type = other DNA
tttaccaaagcctattgcgatgaattaggtcaatataatattcaggtaaatggtattgccccaggatattacgct

SEQ ID NO: 160075 - DNA, 75 bp, synthetic construct
  source 1..75: mol_type = other DNA
aaatgattgaaaaacaaggcgttgaagtggacttcatgcaggtggatatcaccgcagaaggcgcgccgcagaaga

SEQ ID NO: 160076 - DNA, 75 bp, synthetic construct
  source 1..75: mol_type = other DNA
ttgcccctggctattatgcaacagatattacgctggcgacacgcagtaatccagaaaccaatcagcgcgttcttg

SEQ ID NO: 160077 - DNA, 75 bp, synthetic construct
  source 1..75: mol_type = other DNA
tgatgaagacgatcagcgtactgacgcgatgatggacatgctgctggcgaagaaacgctcggaagaccgccgtaa

SEQ ID NO: 160078 - DNA, 75 bp, synthetic construct
  source 1..75: mol_type = other DNA
aggaagtgcacgatatttcggttgcgatcggtattgatcctgacagcgatgatcttagccagctacgttacggca

SEQ ID NO: 160079 - DNA, 75 bp, synthetic construct
  source 1..75: mol_type = other DNA
gcgcagccgtattcctcgcaagcccggcatcgaattatgtgaatggtcatttgctggtggttgatggtggttatt

SEQ ID NO: 160080 - DNA, 75 bp, synthetic construct
  source 1..75: mol_type = other DNA
ttgatttgatggcttacctgttcggtgatttgctggcagtgacgccagaagatctcatctctattgcaattggcg

SEQ ID NO: 160081 - DNA, 75 bp, synthetic construct
  source 1..75: mol_type = other DNA
ccggcgggtccgtcggtggtgctatgtgcggcactgttatttattatcagtatgatgaaaaagcaggccagctaa

SEQ ID NO: 160082 - DNA, 75 bp, synthetic construct
  source 1..75: mol_type = other DNA
gtcagcctgatgtctaacattcgcgttgacttgatggcatacctgttcggtgatttgctggcagtgacgccggaa

SEQ ID NO: 160083 - DNA, 75 bp, synthetic construct
  source 1..75: mol_type = other DNA
ttcattgttctcttacttaggtggacaatggtcacctgcatattctgccactaaacatgctcttgccggattcac

SEQ ID NO: 160084 - DNA, 75 bp, synthetic construct
  source 1..75: mol_type = other DNA
gggcagcaatattcctcgcaagtccggcttcaaactatgttaatggtcatttgctggttgttgatggcggttatt

SEQ ID NO: 160085 - DNA, 75 bp, synthetic construct
  source 1..75: mol_type = other DNA
ttcctcgcaagtccggcatcgaattatgtcaacggacatttattagtggttgatggtggttatttagtgcgctaa

SEQ ID NO: 160086 - DNA, 75 bp, synthetic construct
  source 1..75: mol_type = other DNA
tacatggcgagactttatcgtctgctttggttcatcgacgattgaatatttctccctgacaggcgcaactacagt

SEQ ID NO: 160087 - DNA, 75 bp, synthetic construct
  source 1..75: mol_type = other DNA
aaacgttctgatgtgaatggtgtatcgcgcggtgtcgagtacaacatggcgcagaatgctgtttatcgcgtttgc

SEQ ID NO: 160088 - DNA, 75 bp, synthetic construct
  source 1..75: mol_type = other DNA
tttggtacatcgactattgaatatttctccctgactggtgcaaccacagttggtgctgctttgtatgtcgcacag

SEQ ID NO: 160089 - DNA, 75 bp, synthetic construct
  source 1..75: mol_type = other DNA
aagaaatccttaacagcagcggatatcttcgttcattcccgggcattgccaaacgttctgatgtgaacggagtat

SEQ ID NO: 160090 - DNA, 75 bp, synthetic construct
  source 1..75: mol_type = other DNA
gcagagtgctgtatatcgcgtgtgtgggggcaagctgtataagggcgaaagcgaagtcggtgatgttgccggaag

SEQ ID NO: 160091 - DNA, 75 bp, synthetic construct
  source 1..75: mol_type = other DNA
catgagttgctgattatccatcttccgcgccatgtcctcgtatacgacgcatcttcaagcgccaatgctccgcaa

SEQ ID NO: 160092 - DNA, 75 bp, synthetic construct
  source 1..75: mol_type = other DNA
cagcagccagtatgggctacagcaagaacacctgctgtttactccactcttcaaagcagataacgccagatgctt

SEQ ID NO: 160093 - DNA, 75 bp, synthetic construct
  source 1..75: mol_type = other DNA
agcctgacggaatcatcggcatcggtacatggcgagacttcatagtctgctttggttcgtcgacgattgaatatt

SEQ ID NO: 160094 - DNA, 75 bp, synthetic construct
  source 1..75: mol_type = other DNA
ccatcactgatggtgcagaaaggcattgccggaacctactgcaaaacgccgtttgctgactcgtatgcgttcatc

SEQ ID NO: 160095 - DNA, 75 bp, synthetic construct
  source 1..75: mol_type = other DNA
atggtcaactggtcgagtatcgctatgatggcacggttaaaaccgtctcaaactggcctgcagacagcggattta

SEQ ID NO: 160096 - DNA, 75 bp, synthetic construct
  source 1..75: mol_type = other DNA
atgacaatcgcgttttatggcgaaaagttggtcgagttagacgcctcattggatttaaattcagagttattgcaa

SEQ ID NO: 160097 - DNA, 75 bp, synthetic construct
  source 1..75: mol_type = other DNA
tgaccttgaattagaaacatcgggcggcgtgtgtgatagaatagataaaatatttatatcagccactacagatgg

SEQ ID NO: 160098 - DNA, 75 bp, synthetic construct
  source 1..75: mol_type = other DNA
actgaaattacacatcagccagaacgttccgggacaggtgctacaacaagctgatggcgaagtgctggcgattga

SEQ ID NO: 160099 - DNA, 75 bp, synthetic construct
  source 1..75: mol_type = other DNA
ggtcgggcaggttgagctgtcggcgcatattgtcaccattaatgaaaaaagtttgcgtgagttaggcgtgaaatg

SEQ ID NO: 160100 - DNA, 75 bp, synthetic construct
  source 1..75: mol_type = other DNA
cggacatcacaggcggttggcgttaacgggcaactggtcgagtatcgctatgatggcacggttagaaccgtctca

SEQ ID NO: 160101 - DNA, 75 bp, synthetic construct
  source 1..75: mol_type = other DNA
tataacatacaaataccgcgaccaaaacgttgtcgtgcctggagtcgtttccattctgaagacaatggcaagtaa

SEQ ID NO: 160102 - DNA, 75 bp, synthetic construct
  source 1..75: mol_type = other DNA
tcactattactggcaaggaacacctagttcggcctttataacggcaatgaaaaggacgggggttacacaagattt

SEQ ID NO: 160103 - DNA, 75 bp, synthetic construct
  source 1..75: mol_type = other DNA
tcaggttctgttagttccgctttcgtggaggcaatgaaaaagacgggagtaacccaggatctaaaaattagttaa

SEQ ID NO: 160104 - DNA, 75 bp, synthetic construct
  source 1..75: mol_type = other DNA
ggtatcaccaatcgccagcgcgagcattgagaaaatcctccgctcctacactgctgatgaactggctgatggcgt

SEQ ID NO: 160105 - DNA, 75 bp, synthetic construct
  source 1..75: mol_type = other DNA
tgttcctctctgcaaccactgacggcataaattacggacgtgagcagatgattgaacagaatgaaccgttcgttt

SEQ ID NO: 160106 - DNA, 75 bp, synthetic construct
  source 1..75: mol_type = other DNA
cctttttctctctgcaaccactgacggcatcaattacgggcgtgagcagatgattgagcagaatgaaccgttcgt

SEQ ID NO: 160107 - DNA, 75 bp, synthetic construct
  source 1..75: mol_type = other DNA
tctccctgactggtgcaaccactgttggggctgctttgtatgttgcacaaccatcgctgatggtgcagaaaggca

SEQ ID NO: 160108 - DNA, 75 bp, synthetic construct
  source 1..75: mol_type = other DNA
catgagttgctgattatccaccttccgcgccatgttcttgtttacgacgcatcttcaagcgccaatggtccgcaa

SEQ ID NO: 160109 - DNA, 75 bp, synthetic construct
  source 1..75: mol_type = other DNA
tgtcgggcgcatcaggaaaaacattggcttcaaattgcgcgttatcacgaagtcacctgtcactctgtctggctg

SEQ ID NO: 160110 - DNA, 75 bp, synthetic construct
  source 1..75: mol_type = other DNA
cagggcggctattcgcgttaccaggaaaatatgacgttgcgtgagactgccggaatggatatatcaccatgggag

SEQ ID NO: 160111 - DNA, 75 bp, synthetic construct
  source 1..75: mol_type = other DNA
gaattacgtgagcactatgtttctgttgaaacgatggctgacttaccgcaattgcttgccgacccggttgcggtg

SEQ ID NO: 160112 - DNA, 75 bp, synthetic construct
  source 1..75: mol_type = other DNA
tctcaatgtaccgcagaaaatcgcgcttgcagctgtgggagcgggttatctgcttggctcgcttaaccgcagtgt

SEQ ID NO: 160113 - DNA, 75 bp, synthetic construct
  source 1..75: mol_type = other DNA
atcgatgttcgggggcaaggccggagagtactggagtattcctctgccttacgggtacaacgttttcttcctgct

SEQ ID NO: 160114 - DNA, 75 bp, synthetic construct
  source 1..75: mol_type = other DNA
tgtacgttcacagatggctgaaggtgatgccggtccgacagcacaggagttaactgagcgtccgcgcctgcccgc

SEQ ID NO: 160115 - DNA, 75 bp, synthetic construct
  source 1..75: mol_type = other DNA
catgccatggagcatgttgtcacaccagcggaatatcagacgattatcaaaaccgtgctgaaaacccgcgacagt

SEQ ID NO: 160116 - DNA, 75 bp, synthetic construct
  source 1..75: mol_type = other DNA
ttatgcgtggtcaaaagacggcacggattcatggtttatcactgaccttgaagacgaatcgcatcctgaccgtta

SEQ ID NO: 160117 - DNA, 75 bp, synthetic construct
  source 1..75: mol_type = other DNA
gtggtcgcgtatcaatggcgcatggtcggacatcacaggcggtaggcgttaatggtcaactggtcgagtatcgct

SEQ ID NO: 160118 - DNA, 75 bp, synthetic construct
  source 1..75: mol_type = other DNA
aatgtcggcttcaaattgcgcgttatcacgaagtcacctgtcactctgtcaggctgccagataaggattgagtaa

SEQ ID NO: 160119 - DNA, 75 bp, synthetic construct
  source 1..75: mol_type = other DNA
catgagctgctgattatccatcttccgcgccatgttctcgtgtacgacgcatcttcaagcgccaatggtccgcaa

SEQ ID NO: 160120 - DNA, 75 bp, synthetic construct
  source 1..75: mol_type = other DNA
acgtatacttgatgacaactcgaatagtcttaccggaaaacgtcgggaacgagttcgtttgttacttgatattca

SEQ ID NO: 160121 - DNA, 75 bp, synthetic construct
  source 1..75: mol_type = other DNA
atggtcaacttttcgagtatcgctatgatggcacggttaaaaccgtctcaaactggcctgcagacagcggattta

SEQ ID NO: 160122 - DNA, 75 bp, synthetic construct
  source 1..75: mol_type = other DNA
ggacagaagaggtgcacctgtcattgttgcaattcacatgcgtgctaaaggggcggtagctgaggttaataagat

SEQ ID NO: 160123 - DNA, 75 bp, synthetic construct
  source 1..75: mol_type = other DNA
ggtggtacaggtcgcttcatttccaaaaccacggatgcggcggtgaaatcgctgaatggtattgatataccggag

SEQ ID NO: 160124 - DNA, 75 bp, synthetic construct
  source 1..75: mol_type = other DNA
agagagcggtgtggtggatgcctggcagaacgcctaccgttactacgttcccctgaaaggtcaggatgttgacgg

SEQ ID NO: 160125 - DNA, 75 bp, synthetic construct
  source 1..75: mol_type = other DNA
gccgcagctgctggcgcgtattgcaccgggagttatctgggttgcggcgctgctttcttcactgctggcgctgga

SEQ ID NO: 160126 - DNA, 75 bp, synthetic construct
  source 1..75: mol_type = other DNA
agacggcagatatgtttatgcggaatatccggtacgtcaggaggtttacgacgcgtttaaaggcgtgatgaaagc

SEQ ID NO: 160127 - DNA, 75 bp, synthetic construct
  source 1..75: mol_type = other DNA
tttatgacggaagcacagcgtgtcaggcgcatatttaaagacggcaggtatgttgatgctgaatatccggtacgt

SEQ ID NO: 160128 - DNA, 75 bp, synthetic construct
  source 1..75: mol_type = other DNA
gagcgttcttatcgcggctctgtagataaaatactctatcctgaagatattcgcaaggggccgtattactcccgt

SEQ ID NO: 160129 - DNA, 75 bp, synthetic construct
  source 1..75: mol_type = other DNA
ggagggaagcgttacgatccgccacagaaactttattcactgcgcaataaggacaataaggggagtaacctcttt

SEQ ID NO: 160130 - DNA, 75 bp, synthetic construct
  source 1..75: mol_type = other DNA
aaactggcgaacgaaggtgctgatgctgataccctggcaatgatagcgctgtatcgtagcgatattccggcgaag

SEQ ID NO: 160131 - DNA, 75 bp, synthetic construct
  source 1..75: mol_type = other DNA
gctgccggtaatgttgtcggcggtatcctgggggcattcagcccgatcggcagcgagacgtcggaaacgttgtcg

SEQ ID NO: 160132 - DNA, 75 bp, synthetic construct
  source 1..75: mol_type = other DNA
cggtgcaggagaatatccgtaaaactggcggaaaaatagatgacagcaataacgcctatatggctgaagaactct

SEQ ID NO: 160133 - DNA, 75 bp, synthetic construct
  source 1..75: mol_type = other DNA
aatactctatcctgaagatattcgcaaggggccgtattactcccgtaccagcagtctgacgccggaagagacaat

SEQ ID NO: 160134 - DNA, 75 bp, synthetic construct
  source 1..75: mol_type = other DNA
agtagggcgcatcaggaaaaatgtcggcttcaaattgcgcgttatcacgaagtcacctgtcactctgtctggctg

SEQ ID NO: 160135 - DNA, 75 bp, synthetic construct
  source 1..75: mol_type = other DNA
atgatctgggcattcgtaaaagcatactggaaacagttgcttatcgtgttgatgcttgctgctctgttcatcgtc

SEQ ID NO: 160136 - DNA, 75 bp, synthetic construct
  source 1..75: mol_type = other DNA
tgcgcaggcgaaagaagaccgcaaaaccgaagatgagagagttcgtcagcactacgaacaggagaaatcgatcaa

SEQ ID NO: 160137 - DNA, 75 bp, synthetic construct
  source 1..75: mol_type = other DNA
cacagccataccgacgccgaaacgaataatgcatccactcatgaacatgatttcgtcatcgacgatgaacatccg

SEQ ID NO: 160138 - DNA, 75 bp, synthetic construct
  source 1..75: mol_type = other DNA
ttcgcgctctcgtggctatcacgctgccttttgtcacccagatatgggaaatctacatcctgatcttcattcttc

SEQ ID NO: 160139 - DNA, 75 bp, synthetic construct
  source 1..75: mol_type = other DNA
aaatcgacgttcctgataacgcaacggacaatgatattgctgattttgtcgatgtcgagtatggggagtgcggaa

SEQ ID NO: 160140 - DNA, 75 bp, synthetic construct
  source 1..75: mol_type = other DNA
gccgttaatctatacacccacagtaggttatgcctgccagcattattctgaaatatggcgaaaaccccggggaat

SEQ ID NO: 160141 - DNA, 75 bp, synthetic construct
  source 1..75: mol_type = other DNA
gctggtcatgggtgtggatgactctatgggcggtgttgtccggcttaatggtacgctgtatcccgcgtttgccgt

SEQ ID NO: 160142 - DNA, 75 bp, synthetic construct
  source 1..75: mol_type = other DNA
ggcgttccatcacatggataaaacaaatccccatgcgcacatcatgctgaccacgagggctgtcggacctgctgg

SEQ ID NO: 160143 - DNA, 75 bp, synthetic construct
  source 1..75: mol_type = other DNA
atgatctgggcattcgtaaaagcatactggaaacagttgattatcgtggcagtgcttgctgttctggtcatatca

SEQ ID NO: 160144 - DNA, 75 bp, synthetic construct
  source 1..75: mol_type = other DNA
atagacaactggcagagtatgctgaccgggcagccgaagccggaagagtctgcgaaaaacagtatgacaccctga

SEQ ID NO: 160145 - DNA, 75 bp, synthetic construct
  source 1..75: mol_type = other DNA
acagacaactggcagagtatgctgaccgggcagccgaagccggaagagtctgcgaaaaacagtacgacaccctga

SEQ ID NO: 160146 - DNA, 75 bp, synthetic construct
  source 1..75: mol_type = other DNA
gaaatggataatcctgcgttctctgaagatgtggcaacggagaccattaacactctggctgacggagagcgtatt

SEQ ID NO: 160147 - DNA, 75 bp, synthetic construct
  source 1..75: mol_type = other DNA
cgaagcgacaggcggtgatggatgagctgaaggcgaagccgcgccctgaactgcttgaggaataccgaaaactca

SEQ ID NO: 160148 - DNA, 75 bp, synthetic construct
  source 1..75: mol_type = other DNA
cagggtggctattcacgctatcaggaaaacacggcattgcgtgagaccgccggaatggatgtgtcaccgtgggag

SEQ ID NO: 160149 - DNA, 75 bp, synthetic construct
  source 1..75: mol_type = other DNA
tggagaatgattatctggtcaatatccgtaaggcacctgagcacaacacagataacacctgggcttatccgacga

SEQ ID NO: 160150 - DNA, 75 bp, synthetic construct
  source 1..75: mol_type = other DNA
cctggctgaatgcgttctcaggtggcagccagtaccgttcaggcgcggtggatatcacaccggaatcgctgaaat

SEQ ID NO: 160151 - DNA, 75 bp, synthetic construct
  source 1..75: mol_type = other DNA
cttgccaaaaacatgacggtgaactttaaccgtcgtggtgagcagggggcgctgatgaactcgctgtacatgttc

SEQ ID NO: 160152 - DNA, 75 bp, synthetic construct
  source 1..75: mol_type = other DNA
acagccagttactgaacgactggcagcaacgtggtgtgccgcagcgttacggactgggattgtatcagggaatgt

SEQ ID NO: 160153 - DNA, 75 bp, synthetic construct
  source 1..75: mol_type = other DNA
gcgcaaccaggctctgtccctgaagcgtgcagaggcggttcgcgactggatgcgggatacgggcgatattcctca

SEQ ID NO: 160154 - DNA, 75 bp, synthetic construct
  source 1..75: mol_type = other DNA
acggttgtcgtacagccgtccggccctgtgtggccaggtcgtggtcatgctgggacttttaccggagcagcatac

SEQ ID NO: 160155 - DNA, 75 bp, synthetic construct
  source 1..75: mol_type = other DNA
gtggcttctgtatatggaacaaaaggagggatgaacaaagctaatagcctggataaagcaggtttgacgctttac

SEQ ID NO: 160156 - DNA, 75 bp, synthetic construct
  source 1..75: mol_type = other DNA
gtggtgactgacggcgaacgtattctggggcttggtgaccagggcatcggcgggatgggcattccgatcggtaaa

SEQ ID NO: 160157 - DNA, 75 bp, synthetic construct
  source 1..75: mol_type = other DNA
cggtaccgggttactggtccggtgcataccagccggaccagctgctgtgcggaccgcttcaggtggtcacaaaaa

SEQ ID NO: 160158 - DNA, 75 bp, synthetic construct
  source 1..75: mol_type = other DNA
tccatgtctctcaactggtcacgtaaccgctacatgggggaatatgacggaagatggtcgggaaaaacagaggac

SEQ ID NO: 160159 - DNA, 75 bp, synthetic construct
  source 1..75: mol_type = other DNA
ggaatgcctgcttttctgctgaactggcaggcaaatgcgagtcgtttagaataccgtggatatgggaaaagagtt

SEQ ID NO: 160160 - DNA, 75 bp, synthetic construct
  source 1..75: mol_type = other DNA
tcagtgctatgcggactacaaactgccactaaaaaagggaatgtcaggaatttttctgacccgtgcagtgtgtat

SEQ ID NO: 160161 - DNA, 75 bp, synthetic construct
  source 1..75: mol_type = other DNA
cagccggatcatctgttccgctcgctgggttttaatcgtacctgggacgaatggcggcgcgaggaagatgcacga

SEQ ID NO: 160162 - DNA, 75 bp, synthetic construct
  source 1..75: mol_type = other DNA
acggaacgcctctgccgtttggtgcggtggtgacagttgagggcgaagcgggtcaggctgcgggctcagccggtg

SEQ ID NO: 160163 - DNA, 75 bp, synthetic construct
  source 1..75: mol_type = other DNA
gcaccgggcgtgagtggtgcgtctgtgggtggctggccgggtgtgagaacggatttccgggggtatacgctggcc

SEQ ID NO: 160164 - DNA, 75 bp, synthetic construct
  source 1..75: mol_type = other DNA
ggaatttcggtgctatgtcactagataccatttattctcgagggcaacaaaagggatatgattatgaaacaggac

SEQ ID NO: 160165 - DNA, 75 bp, synthetic construct
  source 1..75: mol_type = other DNA
gagcaacagcatattttgatttttacaatcaacaactgaatctaagtatacctaatatggcattatatccaaaat

SEQ ID NO: 160166 - DNA, 75 bp, synthetic construct
  source 1..75: mol_type = other DNA
tgacacggtggccctggtggctgcaccgggtgtgaatggtgcctttgtggggggatggccgggtgtcagaacgga

SEQ ID NO: 160167 - DNA, 75 bp, synthetic construct
  source 1..75: mol_type = other DNA
tcattcttttgtgttttcgaatagaaaatgtaatcgcacatacattttcatttgatgcctctttattaaaccatg

SEQ ID NO: 160168 - DNA, 75 bp, synthetic construct
  source 1..75: mol_type = other DNA
tctgttgagggatggccaggagttaaaaccgattacagaggatatactttggctggttatatgtcggcatatcaa

SEQ ID NO: 160169 - DNA, 75 bp, synthetic construct
  source 1..75: mol_type = other DNA
accaggtagcaaatatgatgcagatacaggtcggttaaagttacgttggtctggaacctatggcgaattggcggg

SEQ ID NO: 160170 - DNA, 75 bp, synthetic construct
  source 1..75: mol_type = other DNA
ccggcggcgcggtggaccgccagttgcagccggtgttgcagggggaagcgcgggtgacctttcactcgccggatc

SEQ ID NO: 160171 - DNA, 75 bp, synthetic construct
  source 1..75: mol_type = other DNA
tggtataagtttctccaccactgaaaaacagtggcccaacattgaaagcaccttaagcgtgcgcaccgatggtga

SEQ ID NO: 160172 - DNA, 75 bp, synthetic construct
  source 1..75: mol_type = other DNA
ccggcggcgcggtggaccgtcagttacaaccagtgttgcagggcgaagcgcgggtgaccttccactcgccggatc

SEQ ID NO: 160173 - DNA, 75 bp, synthetic construct
  source 1..75: mol_type = other DNA
aaactcaccagtaacgccatgtcgatgatggcagatatgcaggcgacgcgcagacgctgggaagagctgaacacc

SEQ ID NO: 160174 - DNA, 75 bp, synthetic construct
  source 1..75: mol_type = other DNA
ccgatccggtcgatggttcaacgttgaccaatacctcagccgattacaaatacagctatggcggcaagacctggt

SEQ ID NO: 160175 - DNA, 75 bp, synthetic construct
  source 1..75: mol_type = other DNA
accgggaacgcggatgttcagtgtctctgacgggcggcagacccagctttcggcggtgatgctgtctgaggatga

SEQ ID NO: 160176 - DNA, 75 bp, synthetic construct
  source 1..75: mol_type = other DNA
cggcggtgatgttgtctgaggatgacaacgccgggcagtatcagacgcggctgaccaacgccctgcgccgcgtgg

SEQ ID NO: 160177 - DNA, 75 bp, synthetic construct
  source 1..75: mol_type = other DNA
catgtttccgggaacctatgcctatagtgccatgattgctgcactgaagattggtcatgtgggatatgatgaaga

SEQ ID NO: 160178 - DNA, 75 bp, synthetic construct
  source 1..75: mol_type = other DNA
acggcaacaacgacacgatggcaatttatcatctcagcatgaagattctttccagaagcaagggctacagcgccg

SEQ ID NO: 160179 - DNA, 75 bp, synthetic construct
  source 1..75: mol_type = other DNA
gcaagcggatggcatcagtttctccaccactgaaaaacagtggcctgatatcgagcgcaccttaagcgtgcgcac

SEQ ID NO: 160180 - DNA, 75 bp, synthetic construct
  source 1..75: mol_type = other DNA
taaatcagcatttatgccgctgaaaacctttgccgagccgtcacaggcggaccgcttagcgcaaagcctgcaaca

SEQ ID NO: 160181 - DNA, 75 bp, synthetic construct
  source 1..75: mol_type = other DNA
ctgaccaacgccctgcgccgcgtgggcgtgcagctgcatcagcaagcggatggcatcagtttctccaccaccgaa

SEQ ID NO: 160182 - DNA, 75 bp, synthetic construct
  source 1..75: mol_type = other DNA
ggaggcggcacggcttgaccagtcaagtttcgttatccagcgggccagaccaatgctgaaaagcctgcgggcaag

SEQ ID NO: 160183 - DNA, 75 bp, synthetic construct
  source 1..75: mol_type = other DNA
ccatctccccaattacccataaccagattcctgttattaccaccgagcttttggcacaactttatggcaccgaaa

SEQ ID NO: 160184 - DNA, 75 bp, synthetic construct
  source 1..75: mol_type = other DNA
ttgcttaatcttgaggcagaatccaaaatctttcgtaaggatcgtaaaggttggttcgtgactcaaccgcgattt

SEQ ID NO: 160185 - DNA, 75 bp, synthetic construct
  source 1..75: mol_type = other DNA
cacagcgtgagtttacgcaattgctcgcagtatcactggcctaccgtaaggttgagtgggagcacatcaaattcg

SEQ ID NO: 160186 - DNA, 75 bp, synthetic construct
  source 1..75: mol_type = other DNA
atgattaccctgttaaccaactttcttacagcttcatcgattgttggtgcgttatccatcggtctttccattcct

SEQ ID NO: 160187 - DNA, 75 bp, synthetic construct
  source 1..75: mol_type = other DNA
cgttacgctggtgtgcgctgcttggtgcgataggtcatggttcccgaatgatcttaatgaccagcgggttgaata

SEQ ID NO: 160188 - DNA, 75 bp, synthetic construct
  source 1..75: mol_type = other DNA
cccatctctcccaaaactcgctccctcatcctctggacagaacgcggcgcagcccgccatgccaaaatgctcgaa

SEQ ID NO: 160189 - DNA, 75 bp, synthetic construct
  source 1..75: mol_type = other DNA
aatgtcggattcaaattgcgcgttatcacgaagtcacctgtcactctgtctggctgccagataaggattgagtaa

SEQ ID NO: 160190 - DNA, 75 bp, synthetic construct
  source 1..75: mol_type = other DNA
aaacgttctgatgtgaacggtgtatctcgcggcgtcgagtacaacatggcgcagagtgctgtttatcgcgtgtgt

SEQ ID NO: 160191 - DNA, 75 bp, synthetic construct
  source 1..75: mol_type = other DNA
aaaatgcaaaagagaaactggatcggtggttaaaagatggcatcaccacgccgggtggaaaactcccttcagaaa

SEQ ID NO: 160192 - DNA, 75 bp, synthetic construct
  source 1..75: mol_type = other DNA
gttgatattaatgagccagacggaccaacgaacctttccgcatgggtaaggcttaagaacaaagagttgccgcct

SEQ ID NO: 160193 - DNA, 75 bp, synthetic construct
  source 1..75: mol_type = other DNA
ggaggtaacacgtctcgacatgtcaagttccgttatccagcgggccatgccaatgctgaaaagcctgcgggcaag

SEQ ID NO: 160194 - DNA, 75 bp, synthetic construct
  source 1..75: mol_type = other DNA
attgctggcgctgtttctcgatattctgccacgagatttattcttttgcgtccccgtggtttgtttggccccatg

SEQ ID NO: 160195 - DNA, 75 bp, synthetic construct
  source 1..75: mol_type = other DNA
actggcaacgcaggttgcaggcttacgctcgggcagtatttacaacatcagcaatcatcagccgcagaaattatc

SEQ ID NO: 160196 - DNA, 75 bp, synthetic construct
  source 1..75: mol_type = other DNA
gactggcaggtgcgccagcagctgcctgtcggagtcgggcctgacgaccggatgccgccaggcagccgggagccg

SEQ ID NO: 160197 - DNA, 75 bp, synthetic construct
  source 1..75: mol_type = other DNA
gaagacgatcaacttgccgacgtttgctctttacaacgttgagcgatcgcaaccctttaaccgcaacacaaaaga

SEQ ID NO: 160198 - DNA, 75 bp, synthetic construct
  source 1..75: mol_type = other DNA
ggcaaaggacttaagagtgtgccgatcagattgtcacgctcagcccttggtacagcagaaaggcgggacagcgag

SEQ ID NO: 160199 - DNA, 75 bp, synthetic construct
  source 1..75: mol_type = other DNA
tcacgggtcagacccaggggaacatcactgctggtgcttttactgctgattctgtcggcaatatctacgtgcaag

SEQ ID NO: 160200 - DNA, 75 bp, synthetic construct
  source 1..75: mol_type = other DNA
aagcaatgtcgctggaaaatcacctgcaactcaatgatgaaaccgaagagaatcagccagatagcggagaggaag

SEQ ID NO: 160201 - DNA, 75 bp, synthetic construct
  source 1..75: mol_type = other DNA
aagcaatgccgattgaaaatcatctgcaactcaacgatgaaaccgaagagaatcagccagatagcggagaggaag

SEQ ID NO: 160202 - DNA, 75 bp, synthetic construct
  source 1..75: mol_type = other DNA
gttttaacgtggcgccgaaaaattatccatgaggaaggactgagcagaacgacctggaataataaagtgactcat

SEQ ID NO: 160203 - DNA, 75 bp, synthetic construct
  source 1..75: mol_type = other DNA
aacacaatgacaaaattccgatacagaagacgtgttggcaaaaacgaaataggctgttctttaagtcatcaaaaa

SEQ ID NO: 160204 - DNA, 75 bp, synthetic construct
  source 1..75: mol_type = other DNA
cggttcggacgtggatcgccagaagttgcaggaaaaagtacgctcttcgctcaaccgtctgcgccgcttaggcat

SEQ ID NO: 160205 - DNA, 75 bp, synthetic construct
  source 1..75: mol_type = other DNA
cggttcagacgttgaccgccagaagttgcaggaaaaagtacgttcttcgctaaatcgtctgcgtcgtttgggcat

SEQ ID NO: 160206 - DNA, 75 bp, synthetic construct
  source 1..75: mol_type = other DNA
tgtttccactgacgggaagatcacgtcaggtggcgactatatgacggaagcacagcgtgccgggcgcgtatttaa

SEQ ID NO: 160207 - DNA, 75 bp, synthetic construct
  source 1..75: mol_type = other DNA
gcaactgttacgcactctgccaccctcacagatggacaaggcttctgcttatcgggtggtatcgggtgtgtatca

SEQ ID NO: 160208 - DNA, 75 bp, synthetic construct
  source 1..75: mol_type = other DNA
cggcgatattcatcccggacagggatatccgttaccgggagaagtggcgcgtacgccggatgaaaatcaggccgg

SEQ ID NO: 160209 - DNA, 75 bp, synthetic construct
  source 1..75: mol_type = other DNA
agcgacggtaaactgaaagggctggataacttatccgccctggctgtggtgaaagacagccggtctgccatgtct

SEQ ID NO: 160210 - DNA, 75 bp, synthetic construct
  source 1..75: mol_type = other DNA
aagtgggtggagagtgtaaagagcatccgcacaagcgtggcgggaatgctggaaggaaaagtgactgccggacgg

SEQ ID NO: 160211 - DNA, 75 bp, synthetic construct
  source 1..75: mol_type = other DNA
ttattcccgtaagggcgtgacccgcacacctgaaggcaatctcatttcggatgttaaccgcagtgcggaagccaa

SEQ ID NO: 160212 - DNA, 75 bp, synthetic construct
  source 1..75: mol_type = other DNA
agcattcagggaacggcaaatctggtgagaacgctcggacatcttaatggagagggacctttactggagcgcctt

SEQ ID NO: 160213 - DNA, 75 bp, synthetic construct
  source 1..75: mol_type = other DNA
gggtgaatttctggcacatatggcggagaaacagccgaataaattcgtggcggcatgggagcgtgttgttgccct

SEQ ID NO: 160214 - DNA, 75 bp, synthetic construct
  source 1..75: mol_type = other DNA
tgcagttgtgatgctgcttgatgccgtggataaaaatggcgatccggtggtgtcggcagtgcacatgaaggcgac

SEQ ID NO: 160215 - DNA, 75 bp, synthetic construct
  source 1..75: mol_type = other DNA
ctgaagcgcaattgggtaaccagaaccgcagcagcctgaacattaagcagccgggagaaaattactggcaggatt

SEQ ID NO: 160216 - DNA, 75 bp, synthetic construct
  source 1..75: mol_type = other DNA
ggaggctgcacggcttgaccagtcaagttttgtagtcaaacgggccataccaatgctgaaaagcctgcgggcaag

SEQ ID NO: 160217 - DNA, 75 bp, synthetic construct
  source 1..75: mol_type = other DNA
atgcaggatacccggaagagactgaaggatttgcgtaaacagcgtgatgccatttatgccgacagttctctcagt

SEQ ID NO: 160218 - DNA, 75 bp, synthetic construct
  source 1..75: mol_type = other DNA
tatgtggaaagtccgcgtcgtcaggctgatttgaaccgggcttatgactcgctgcatgacctggctgacgtgctg

SEQ ID NO: 160219 - DNA, 75 bp, synthetic construct
  source 1..75: mol_type = other DNA
tggtggcggataacatccctgacgggcggaccgttcgcgagaagctgcgtcacgagatcattcaccatgccatgg

SEQ ID NO: 160220 - DNA, 75 bp, synthetic construct
  source 1..75: mol_type = other DNA
gcagaacgcgacagcaccggtacgtgaagggctaccggctcctgacattgcgcgtaatgttcgtatgcctcagcc

SEQ ID NO: 160221 - DNA, 75 bp, synthetic construct
  source 1..75: mol_type = other DNA
cgtggacgtactggcacggtattaacggcggtattgcaggatcacggtacgcttgctgagcatgatatctatatc

SEQ ID NO: 160222 - DNA, 75 bp, synthetic construct
  source 1..75: mol_type = other DNA
gaaaaactggaagactgctatttcagccagggaaaaacaacacaaaccgaacagcagccgcagattcagccacaa

SEQ ID NO: 160223 - DNA, 75 bp, synthetic construct
  source 1..75: mol_type = other DNA
tggtgcccgtggtaagggtaaggcggcggcacactatgagccgggtgaggtggcaatcaacctgacaaaaggtaa

SEQ ID NO: 160224 - DNA, 75 bp, synthetic construct
  source 1..75: mol_type = other DNA
gcaaaaatgaagtgggtaacgccttcctgaaactggtacaggataatcccgacaaggattactggcaggtattca

SEQ ID NO: 160225 - DNA, 75 bp, synthetic construct
  source 1..75: mol_type = other DNA
agaaattaagccgcgataaccctcagtacagtgggctccaattgcccaaagaggagcgttcttatcgcggctctg

SEQ ID NO: 160226 - DNA, 75 bp, synthetic construct
  source 1..75: mol_type = other DNA
tgacggtgaactttaaccgtcgtggtgagcagggagcgctgatgaactcgctgtatatgtttgccaacgccagca

SEQ ID NO: 160227 - DNA, 75 bp, synthetic construct
  source 1..75: mol_type = other DNA
tccagaaaggacaagcaccggcaccggaaaacgccgctggtcgccagggggaaacactcgagggtgaaatggttc

SEQ ID NO: 160228 - DNA, 75 bp, synthetic construct
  source 1..75: mol_type = other DNA
gagaccagagatcagagaacactttgtgtcagtggaaacactggctgatttgcctcaacttctgacagatccggt

SEQ ID NO: 160229 - DNA, 75 bp, synthetic construct
  source 1..75: mol_type = other DNA
tgacgagaacaacggaaaattgttgatgaacgggcttatgcaggatacccggaagagactgaaggatttgcgcaa

SEQ ID NO: 160230 - DNA, 75 bp, synthetic construct
  source 1..75: mol_type = other DNA
atggctgctacccgatgggaagacctgcgcgatgcttcgttccggggcgtctcgttttatctggtcgataacgaa

SEQ ID NO: 160231 - DNA, 75 bp, synthetic construct
  source 1..75: mol_type = other DNA
ttactgcgttatttattcccaccggttggctgcctaacgaacatttcgccaaaattgtcggcccgatgattacct

SEQ ID NO: 160232 - DNA, 75 bp, synthetic construct
  source 1..75: mol_type = other DNA
gtcagcttgggaagaaatgacctgcttattcgcaccttccctaaatgttgaagaattatcccgactgctgaagaa

SEQ ID NO: 160233 - DNA, 75 bp, synthetic construct
  source 1..75: mol_type = other DNA
taacgtatataaaatcactggaagaagttgacgcgcagataccagcccatgttgaatggcttaaaaagggttact

SEQ ID NO: 160234 - DNA, 75 bp, synthetic construct
  source 1..75: mol_type = other DNA
attgaagcattgggtgatcgaggtctgatcaggaaaatgagttcaacttacatttttcagcctatagaaccactg

SEQ ID NO: 160235 - DNA, 75 bp, synthetic construct
  source 1..75: mol_type = other DNA
ctggcttgatgttgatttacctgagattgaggatatgcctgataaagtgtatagcgtgaatgcccggggaactga

SEQ ID NO: 160236 - DNA, 75 bp, synthetic construct
  source 1..75: mol_type = other DNA
aaactattatctatcaacaacagaatgagcaatcatatccgtctcaggaacatcttcttttgcaactttgtatgc

SEQ ID NO: 160237 - DNA, 75 bp, synthetic construct
  source 1..75: mol_type = other DNA
aaaagatctgaaagctgcaatggataaaaaagtgaatgagatcctggattcactgccggaagttatccgtcctat

SEQ ID NO: 160238 - DNA, 75 bp, synthetic construct
  source 1..75: mol_type = other DNA
cgatgagttagatcgtgacgctatctatatgcgtctgttgttcgctgtgtctaataatcttggtcacggtgcaag

SEQ ID NO: 160239 - DNA, 75 bp, synthetic construct
  source 1..75: mol_type = other DNA
cattaattgagcaggtttatcatatttttcgtcgttatccggtgccgcagcaatttgtggtttgttgtgaatatt

SEQ ID NO: 160240 - DNA, 75 bp, synthetic construct
  source 1..75: mol_type = other DNA
gacttgttcgcaccttccctaacgatccgttggttacacctgtttataccattagttttggtggccgggttgaag

SEQ ID NO: 160241 - DNA, 75 bp, synthetic construct
  source 1..75: mol_type = other DNA
tggtggaactgaaatatgcgcagaaacagatcccggtggaggtgttcgcagattatggcgtgaaccggatctggg

SEQ ID NO: 160242 - DNA, 75 bp, synthetic construct
  source 1..75: mol_type = other DNA
atccgcaggcagcgattgtcgtggttccggcgtggtgggatctggtgggacatcatctcgggaagggatttttcg

SEQ ID NO: 160243 - DNA, 75 bp, synthetic construct
  source 1..75: mol_type = other DNA
cggaaagctggccttaaccccattctggccgttactggttccggtggtcttggttccgtcagttcgtcaggtatt

SEQ ID NO: 160244 - DNA, 75 bp, synthetic construct
  source 1..75: mol_type = other DNA
tattgctggcccgggtgacagtgatgtcactgacagtgattttccttgctgctgacaggcgtttttttcatggga

SEQ ID NO: 160245 - DNA, 75 bp, synthetic construct
  source 1..75: mol_type = other DNA
ggaatcgcgtgaccgttaacgccggcgataacctgacggtagagggttcggatgtggtggctgaccgggatgtgt

SEQ ID NO: 160246 - DNA, 75 bp, synthetic construct
  source 1..75: mol_type = other DNA
gagaaatatattaaagcgattttactttataatagagttccagtattaaaattaaatcacaatttaaacaaaggg

SEQ ID NO: 160247 - DNA, 75 bp, synthetic construct
  source 1..75: mol_type = other DNA
actctgcgaagaaagtaaacaaggggggaaccttccccccttcacagttccaacagcaattgattaataactatc

SEQ ID NO: 160248 - DNA, 75 bp, synthetic construct
  source 1..75: mol_type = other DNA
cagcggattagaacacagtatcaaactgtacaggacaaggttttggctgattatttgaatacaccgattggagct

SEQ ID NO: 160249 - DNA, 75 bp, synthetic construct
  source 1..75: mol_type = other DNA
cgatccttgatggcggcaccggaacccgcattacgggtgatgatgcgacggccaacaacagcggcaataccaccg

SEQ ID NO: 160250 - DNA, 75 bp, synthetic construct
  source 1..75: mol_type = other DNA
ctgggaatacgggtccgtacggtgaataaacataccctcctcgagccagggagcacatcctggttccattttaat

SEQ ID NO: 160251 - DNA, 75 bp, synthetic construct
  source 1..75: mol_type = other DNA
aagcaacgccagtaaaaaattcagcgacaacgctcagttcaggcgactttaccgcaggggcgacactggtggtgg

SEQ ID NO: 160252 - DNA, 75 bp, synthetic construct
  source 1..75: mol_type = other DNA
tggaagcgcaggccgcaatttacgccggtagatgtgattgaaaccgatgtcattctgacctgctccccgttgatt

SEQ ID NO: 160253 - DNA, 75 bp, synthetic construct
  source 1..75: mol_type = other DNA
aaaaagcaacttgcactatcagggtgttaatactaaaaacatttcacgatggtcgttatagatttgtaattgaat

SEQ ID NO: 160254 - DNA, 75 bp, synthetic construct
  source 1..75: mol_type = other DNA
ccgcgccagacccggagttacagctacagcaccaccggcaggctgaccggcgttcacaccaccgcagcgaacctt

SEQ ID NO: 160255 - DNA, 75 bp, synthetic construct
  source 1..75: mol_type = other DNA
gaaccaaaaaccaacgtaagagtctaccatcgccgttcagtcccttcttcccatgcatttgcatcaacattgcaa

SEQ ID NO: 160256 - DNA, 75 bp, synthetic construct
  source 1..75: mol_type = other DNA
tgaagtagatggcgatgatgaagccatcttcaggccaatacaaaaatacatcaatggcacatggtataacgtcgc

SEQ ID NO: 160257 - DNA, 75 bp, synthetic construct
  source 1..75: mol_type = other DNA
aattataaagttgatactaatatagttaaaaaaattcatgaacagtataaaggaaaaaagattattttttcattg

SEQ ID NO: 160258 - DNA, 75 bp, synthetic construct
  source 1..75: mol_type = other DNA
aagatttttgggcatcctcgttttaacaagtatcaggactggtttatgtatgaccgtattgatcctgctcgcggg

SEQ ID NO: 160259 - DNA, 75 bp, synthetic construct
  source 1..75: mol_type = other DNA
tgcacaacgacggcacctacgtggaagagatcactgattacgtgctgatgatgaaaatcgacgagcaaaacatgc

SEQ ID NO: 160260 - DNA, 75 bp, synthetic construct
  source 1..75: mol_type = other DNA
taacctgaccgatcctgaaggctccgacagtgcgggctgggtaaatcttcttgaggatccgaaaaggatattcct

SEQ ID NO: 160261 - DNA, 75 bp, synthetic construct
  source 1..75: mol_type = other DNA
agacaacattgcaacttataaaatcccgctcactattgctatgaagaaagctcgtgaagcacaacaacaattaga

SEQ ID NO: 160262 - DNA, 75 bp, synthetic construct
  source 1..75: mol_type = other DNA
tgaacatagtaggctatgttgttccaacattagttgctattcctgcattgggctatttggctcggagtttgggtg

SEQ ID NO: 160263 - DNA, 75 bp, synthetic construct
  source 1..75: mol_type = other DNA
acgttaccaaaacgaatcagcactgcttatggcaggttgctgggctggataatgacggtatcgcgctgatggata

SEQ ID NO: 160264 - DNA, 75 bp, synthetic construct
  source 1..75: mol_type = other DNA
aacactggggtggcgtaatgcacttcgcgggcaggataatagtcgtgagcctggcgcaaaggctcaggttcggca

SEQ ID NO: 160265 - DNA, 75 bp, synthetic construct
  source 1..75: mol_type = other DNA
catcgccgatcgactgcgtgccgctccgcaagagtctttccacgaactaaacgatatcgtgtggaacgcgttgcg

SEQ ID NO: 160266 - DNA, 75 bp, synthetic construct
  source 1..75: mol_type = other DNA
gctcacctgactcgcccagcatttcttcgtgagttggaagaacaggccactgcatcgcgatgggtattaagtgcg

SEQ ID NO: 160267 - DNA, 75 bp, synthetic construct
  source 1..75: mol_type = other DNA
tttctttggctgaaaagcgcatcatttttgcagctattgctcagatgggtgggaaatatgcgccagtaaggatta

SEQ ID NO: 160268 - DNA, 75 bp, synthetic construct
  source 1..75: mol_type = other DNA
gtattcctctttttcgcattttgatttcgcttgtggtagtaattgttattattgaaatgtttgccgtggctttta

SEQ ID NO: 160269 - DNA, 75 bp, synthetic construct
  source 1..75: mol_type = other DNA
aaatgaccgcactgacgtaactgaagccaatggtgatggtttcggtttctccactacttatgagtatgaaggatt

SEQ ID NO: 160270 - DNA, 75 bp, synthetic construct
  source 1..75: mol_type = other DNA
caagaggctatgaagttcttatagcattttgtttattaaaactcatgtcggactttttgtctccgcttgaatatg

SEQ ID NO: 160271 - DNA, 75 bp, synthetic construct
  source 1..75: mol_type = other DNA
tcgtctgctcaacaaaaaaattaacccggtatggctgattttcgccctgtttggcttagggattatcggtaatgc

SEQ ID NO: 160272 - DNA, 75 bp, synthetic construct
  source 1..75: mol_type = other DNA
ctcttttggcgctgacccaacgggtggtatgacccgtttactttattcgccggaatggctggaaactcagcagca

SEQ ID NO: 160273 - DNA, 75 bp, synthetic construct
  source 1..75: mol_type = other DNA
ggatgcgccaaccccggttgacgacggcatggaggcgctgacctgccagattaagttttatggtctggatacaga

SEQ ID NO: 160274 - DNA, 75 bp, synthetic construct
  source 1..75: mol_type = other DNA
taactggaattaactacaacacctatgctggatatgagcagggaaaagtaaagatgtcttttgacgcaggcatga

SEQ ID NO: 160275 - DNA, 75 bp, synthetic construct
  source 1..75: mol_type = other DNA
tgaccgtatagaccctagccgaggtcagatcgccccggctcttgcacacactgggccagagacaacacaatctgg

SEQ ID NO: 160276 - DNA, 75 bp, synthetic construct
  source 1..75: mol_type = other DNA
aaacggcaagtaacggcaaattctatttcaatctgaaagccgctaatcatcaaattatcggctccagccagatgt

SEQ ID NO: 160277 - DNA, 75 bp, synthetic construct
  source 1..75: mol_type = other DNA
gcgcaatctcgtgaaaccggaattgcctccgttaaagccaatggcacaagccagacggtgaaagacaatacgtaa

SEQ ID NO: 160278 - DNA, 75 bp, synthetic construct
  source 1..75: mol_type = other DNA
tcaaacacaaagccggtttgctcaatctgctgaagaactcagcaacgtatcaaaagcctgtaaaatcatgggcgt

SEQ ID NO: 160279 - DNA, 75 bp, synthetic construct
  source 1..75: mol_type = other DNA
tcgagaatatgctcgatcaggcattcaaaaagcttaatgaaccgccccgggaatcctggagactaaacttcctga

SEQ ID NO: 160280 - DNA, 75 bp, synthetic construct
  source 1..75: mol_type = other DNA
ggcggcattgttagcgtaccgggcgtctacgctggatttattcacggtttcctgtttggcgacgcctttgataaa

SEQ ID NO: 160281 - DNA, 75 bp, synthetic construct
  source 1..75: mol_type = other DNA
atgattatgcccgggcattaatattgtggcagcatgcatatcatgctgccacgctgaccctcaacaaaaacctgg

SEQ ID NO: 160282 - DNA, 75 bp, synthetic construct
  source 1..75: mol_type = other DNA
taattttacctttattatctttaatcacatcatgttcgacagatatatataaaaatgtcaaagaaagctatgatg

SEQ ID NO: 160283 - DNA, 75 bp, synthetic construct
  source 1..75: mol_type = other DNA
cgctcttattcaggatgcgacgaaaattcctgtagaaaagaatttcaaacgttcgaatgtgggtaccgcgacgaa

SEQ ID NO: 160284 - DNA, 75 bp, synthetic construct
  source 1..75: mol_type = other DNA
gtacctatgtatccgaactgggaacatcatttaatgataacgtagcaacaacaactgcaaaaacagaaactataa

SEQ ID NO: 160285 - DNA, 75 bp, synthetic construct
  source 1..75: mol_type = other DNA
agacggcgagcatgtcgaggttaaatggtgggatgaatctgggtattggaatagttggacggaacttaactcaga

SEQ ID NO: 160286 - DNA, 75 bp, synthetic construct
  source 1..75: mol_type = other DNA
gttcaggaatacgttaagctggaacgattgcagaacgcactgtctggcaactctccggtaactccggatggttgg

SEQ ID NO: 160287 - DNA, 75 bp, synthetic construct
  source 1..75: mol_type = other DNA
gcgttatacctgcttattacggctttgtgagagttaatgggaataagcattatggttttatggagagtcttaaat

SEQ ID NO: 160288 - DNA, 75 bp, synthetic construct
  source 1..75: mol_type = other DNA
tcacccatctataccaggatttgcagcaagccctgatgggcttgttaatggtgatgggcttatcgaaattaagtg

SEQ ID NO: 160289 - DNA, 75 bp, synthetic construct
  source 1..75: mol_type = other DNA
ggtttgctgcgcgctgcggcaaggtcacagccagtcgcctggctgatgtcatggcccggactaagtcgggctact

SEQ ID NO: 160290 - DNA, 75 bp, synthetic construct
  source 1..75: mol_type = other DNA
cgtgagtttatgaatccttgccagcaatttcgggcactaggtattgaagtaccgaaaataatcagggaaggaatt

SEQ ID NO: 160291 - DNA, 75 bp, synthetic construct
  source 1..75: mol_type = other DNA
acgatcgtccgcagcagtgggtaatggaaagtattcgccagggagatgtcgattttggcatcgtcatcgatccag

SEQ ID NO: 160292 - DNA, 75 bp, synthetic construct
  source 1..75: mol_type = other DNA
attgatgggtgaatcgctgcatgaaattcttgatagaatagttggtgagtcaaaaattggagaaatcaacagaga

SEQ ID NO: 160293 - DNA, 75 bp, synthetic construct
  source 1..75: mol_type = other DNA
taattattatgatcttagaacttctgaaaaggatgctatcttgggtttttttgctgagaataatatgaagtatga

SEQ ID NO: 160294 - DNA, 75 bp, synthetic construct
  source 1..75: mol_type = other DNA
gttcgttcctttctgccggaagcaccgttgtgggtcgcggttaatgaacgggatcagccggttgggtttatgttg

SEQ ID NO: 160295 - DNA, 75 bp, synthetic construct
  source 1..75: mol_type = other DNA
atcagcaaagtcgtgaattgaacgatcaattaagtaaaacgcaaagcgaattaaaaacggttcagtcatggctgg

SEQ ID NO: 160296 - DNA, 75 bp, synthetic construct
  source 1..75: mol_type = other DNA
aacgatcgccagctactggaagcgtcaagccatggtatggcctatctgatcttgtgcaagtatcttttggcgttc

SEQ ID NO: 160297 - DNA, 75 bp, synthetic construct
  source 1..75: mol_type = other DNA
gttgaatgcggacgttacccggttgagattttcatgatgggcgaagaagcaaaactggcaggccagcaggaatat

SEQ ID NO: 160298 - DNA, 75 bp, synthetic construct
  source 1..75: mol_type = other DNA
cgctggggcaatggcttgttgaaagcgccggacacgctgaatcatcaatttactgggaagatccggaaacaggaa

SEQ ID NO: 160299 - DNA, 75 bp, synthetic construct
  source 1..75: mol_type = other DNA
aatacttctgttttgtattggcagtaggctataccaagatcagttttcctcgggaaatggtgatgaatactggct

SEQ ID NO: 160300 - DNA, 75 bp, synthetic construct
  source 1..75: mol_type = other DNA
gaattggcttaaaggtggccttgaagaggctaaaaggttaccagaattaggcaggtaccataaacagattacagg

SEQ ID NO: 160301 - DNA, 75 bp, synthetic construct
  source 1..75: mol_type = other DNA
ctgccgcaggcgcttatcagcccggaaggggaaacggcgtggcgcggggagtatgacgagtggggaaacctgctg

SEQ ID NO: 160302 - DNA, 75 bp, synthetic construct
  source 1..75: mol_type = other DNA
gtggatgtcgctgtcgcgtaaaccggaggtgacctggtacgggtgggacggcgacaggctgacgacggtacagac

SEQ ID NO: 160303 - DNA, 75 bp, synthetic construct
  source 1..75: mol_type = other DNA
accgtggccggttaatctcggtgaaagacgcacagggccatgaaacgcggtatgagtacaacgccgcaggcgacc

SEQ ID NO: 160304 - DNA, 75 bp, synthetic construct
  source 1..75: mol_type = other DNA
accgcagcaatacgcaggtgcgcgctttcacgtatgacgcgcagcatccgggccggatggtggcgcaccgttacg

SEQ ID NO: 160305 - DNA, 75 bp, synthetic construct
  source 1..75: mol_type = other DNA
aatttctcaaagcatcgagttagatgtataaatgaatttattaatcatcttgattcattggataaggatgacgag

SEQ ID NO: 160306 - DNA, 75 bp, synthetic construct
  source 1..75: mol_type = other DNA
cgcatcagcggcccgcgacagacgcgggaatatggctacagcgccacgggcaggctggagagcgtgcgcaccctt

SEQ ID NO: 160307 - DNA, 75 bp, synthetic construct
  source 1..75: mol_type = other DNA
gccggacagcctgccgcgggtggagtggctgacctacggcagcggttatcttgcggggatgaagctgggcgggac

SEQ ID NO: 160308 - DNA, 75 bp, synthetic construct
  source 1..75: mol_type = other DNA
tatgatgataagggccgcctggccggggagcgccagacggtgcataacccggagacgggggaactgctgtggcag

SEQ ID NO: 160309 - DNA, 75 bp, synthetic construct
  source 1..75: mol_type = other DNA
cacggcggcggcgaatggcactgccgccagtgccagcctgaccacggcgacgggctggatttactggccagcgtg

SEQ ID NO: 160310 - DNA, 75 bp, synthetic construct
  source 1..75: mol_type = other DNA
ccgggaatgccggtaattattcttactgcgcatggttctatccccgatgccgttgctgcaacacagcagggcgtt

SEQ ID NO: 160311 - DNA, 75 bp, synthetic construct
  source 1..75: mol_type = other DNA
gcatggatagattaaaagtggtcatttaccctatggctgaccgctcactggtgacctattttccagaatcgaatc

SEQ ID NO: 160312 - DNA, 75 bp, synthetic construct
  source 1..75: mol_type = other DNA
ttatgggtgttaggtggggaattattattattaattacattttacgctattgcagtattaattgttaagttcact

SEQ ID NO: 160313 - DNA, 75 bp, synthetic construct
  source 1..75: mol_type = other DNA
gtattggtatattggttcttgtattctatgttatcgtaaatttcgttatgggaatcgtcttttttaatgatggtt

SEQ ID NO: 160314 - DNA, 75 bp, synthetic construct
  source 1..75: mol_type = other DNA
tgaagaagtggccgcactggaggcgctgaaccggagttatacgcacgtcaccattggcggcaagcatcgtgtcgt

SEQ ID NO: 160315 - DNA, 75 bp, synthetic construct
  source 1..75: mol_type = other DNA
acgttacgcgttcatttttctgagcaaggcatccccattgccgctacgctggggctgatgagggaaagattccct

SEQ ID NO: 160316 - DNA, 75 bp, synthetic construct
  source 1..75: mol_type = other DNA
gggccgcagcggcgttgcgcttcccgacgcccttgagcggaagtatccgcgcgccgggcattcctggccgtggtt

SEQ ID NO: 160317 - DNA, 75 bp, synthetic construct
  source 1..75: mol_type = other DNA
ctgccgggatgtccaccagtctgctggtaaaaaaaatggttgaggaagcccagaagcgtggaatggaagcggaaa

SEQ ID NO: 160318 - DNA, 75 bp, synthetic construct
  source 1..75: mol_type = other DNA
ctccggatggttggataagctgtagtgagcgaatgccgaacgataaacagtatgtttggtgttggggtaagtctt

SEQ ID NO: 160319 - DNA, 75 bp, synthetic construct
  source 1..75: mol_type = other DNA
tctaaagatgagaaaattggcactgcaaaaacttctatctttgctgttgcactggtttcgaatgtttttagttcg

SEQ ID NO: 160320 - DNA, 75 bp, synthetic construct
  source 1..75: mol_type = other DNA
caacaacttccgtatttgtaattgcgcaagctagtaataaggctaccacaataaaggactcaggtattaattcaa

SEQ ID NO: 160321 - DNA, 75 bp, synthetic construct
  source 1..75: mol_type = other DNA
ggcagcctgagttcacagataaaacactctccaggaaacccggggcggttcagaagcagcttgctgcacaccctg

SEQ ID NO: 160322 - DNA, 75 bp, synthetic construct
  source 1..75: mol_type = other DNA
caaccctaacctctcatcttacacattacactttaatgacttatctggatatatatcaagtatatgggataatat

SEQ ID NO: 160323 - DNA, 75 bp, synthetic construct
  source 1..75: mol_type = other DNA
atggaaatatatgacagagagaacataaagatatacatgttaactaaaagaatattattttctttaatgctaata

SEQ ID NO: 160324 - DNA, 75 bp, synthetic construct
  source 1..75: mol_type = other DNA
gtcccgttcatattatcgatgaagtagcgttgaaacgcgccattgccaaagcgaaagaacttgccgatgcagagc

SEQ ID NO: 160325 - DNA, 75 bp, synthetic construct
  source 1..75: mol_type = other DNA
tctgacccgggttacacaggttcgtctgcgtctgcaacagattgccggctcttctgacccgcaggccatgatgca

SEQ ID NO: 160326 - DNA, 75 bp, synthetic construct
  source 1..75: mol_type = other DNA
acattcaatcctgcgtttctgaaagccataaataccctgagtgaaatagcggatgtggcgttcaccacaggtaac

SEQ ID NO: 160327 - DNA, 75 bp, synthetic construct
  source 1..75: mol_type = other DNA
gaaatacagaagttcacaaagaccctggaaattaaaagtggttctttgagtattgacacgcaagtcattcaacaa

SEQ ID NO: 160328 - DNA, 75 bp, synthetic construct
  source 1..75: mol_type = other DNA
ctctcgtacggaacgtgggaacctgtcgtctcgatgctaagggagcggcgcggagcagaggcactgcaagcgcct

SEQ ID NO: 160329 - DNA, 75 bp, synthetic construct
  source 1..75: mol_type = other DNA
ttatggaatgtaatcctattaaagaggcatttttaatgccatggactcttacagggatttgctatgaaatatcgc

SEQ ID NO: 160330 - DNA, 75 bp, synthetic construct
  source 1..75: mol_type = other DNA
tggctgttcagataatgaatttaaaaagaaatttactgatataggtgttagggttattacgatacctacattaaa

SEQ ID NO: 160331 - DNA, 75 bp, synthetic construct
  source 1..75: mol_type = other DNA
taaatacccggaaatgcgcgtgggcgcgctttcgtactctgctgacctggctggagatatgaacgctgatgtgca

SEQ ID NO: 160332 - DNA, 75 bp, synthetic construct
  source 1..75: mol_type = other DNA
tggtctgcgatgtatcagcagtcaccaaaacaggccggcggctcaatcttcaaagacgagtggatcaagtattac

SEQ ID NO: 160333 - DNA, 75 bp, synthetic construct
  source 1..75: mol_type = other DNA
agctatttttctggtgatttcctggatgaaagcatggctgagtatttctcacctgaattgccggaagaaatgagc

SEQ ID NO: 160334 - DNA, 75 bp, synthetic construct
  source 1..75: mol_type = other DNA
cacctaaagataaccttgggttcattagagaaaagaaatcacatgatggagattgttattctcacaaagaattac

SEQ ID NO: 160335 - DNA, 75 bp, synthetic construct
  source 1..75: mol_type = other DNA
gggagcctcggccccggctggaaaatgcctgcggatatccgcttacagctgcgcgataacacactgatactcagt

SEQ ID NO: 160336 - DNA, 75 bp, synthetic construct
  source 1..75: mol_type = other DNA
ggagtttactgttaagcgactacagctgcgcccgaccgtccagctcattccaatgaacagtgcttactcaccgat

SEQ ID NO: 160337 - DNA, 75 bp, synthetic construct
  source 1..75: mol_type = other DNA
atcacgcagtggcgggttccccctgtgaaggtcgcttcacagaccgctttgggcaggttcattacctgttgctgg

SEQ ID NO: 160338 - DNA, 75 bp, synthetic construct
  source 1..75: mol_type = other DNA
gcagatggggcgcttacgattgccccctggttaccccgtgatgaaacaacggcgctcaccgaggaggcattcatc

SEQ ID NO: 160339 - DNA, 75 bp, synthetic construct
  source 1..75: mol_type = other DNA
ttgagtggcatcattatacctgtgtgtatagccatctttacttcgctttttacagcggcggctacgtatttcatt

SEQ ID NO: 160340 - DNA, 75 bp, synthetic construct
  source 1..75: mol_type = other DNA
ctatatcgaccagttcgtccagccaaaagattttgaagaaggcgtgtggttgagcgagctttcggacgccattga

SEQ ID NO: 160341 - DNA, 75 bp, synthetic construct
  source 1..75: mol_type = other DNA
ccgcaactgtttgtgattttgcgtttactgcttttgtcgccatgttgtgtactccttacaaaaaacaaatgcagt

SEQ ID NO: 160342 - DNA, 75 bp, synthetic construct
  source 1..75: mol_type = other DNA
aagcggaagagttcagtaagttgcttcagtcacgcactcgagccgcaggctttgtagtggtcaacaaaaactggc

SEQ ID NO: 160343 - DNA, 75 bp, synthetic construct
  source 1..75: mol_type = other DNA
cgctatcaatggcaaccagtgcattagtcagtgctttactagacgatggacctgttttgattctggcaccttcta

SEQ ID NO: 160344 - DNA, 75 bp, synthetic construct
  source 1..75: mol_type = other DNA
aaaggagcgctaccagattttggatcagctattacattcgggtaatgttgagattcgcgtagtccctagggagcg

SEQ ID NO: 160345 - DNA, 75 bp, synthetic construct
  source 1..75: mol_type = other DNA
atatgctttgccgcgacgagttggacgttgggattgccttcgcgcctgtgcattcgccggagctggaggcaattc

SEQ ID NO: 160346 - DNA, 75 bp, synthetic construct
  source 1..75: mol_type = other DNA
aggatcatgattttttacatattgcatttatggctagacttgataaacaaaaaaatccattggagtttataagag

SEQ ID NO: 160347 - DNA, 75 bp, synthetic construct
  source 1..75: mol_type = other DNA
agttcatacaaactcaactaagccaggaataatagctagaatagccgctagattagccgggacaaaactcattat

SEQ ID NO: 160348 - DNA, 75 bp, synthetic construct
  source 1..75: mol_type = other DNA
tgagaagattactggcgggtaagaaagtctatgaagcacatgcaagtcattgttaccaaattcttgcccgtaaat

SEQ ID NO: 160349 - DNA, 75 bp, synthetic construct
  source 1..75: mol_type = other DNA
tctttggatggtgataccattgaaggtattaacaaaatggcaaagaaaacgatatttctatcatcgattgacaag

SEQ ID NO: 160350 - DNA, 75 bp, synthetic construct
  source 1..75: mol_type = other DNA
catagtggtctaggaattcttagcgatcaagcattgaaggcttataaacttccatttgatcaaatagcgactgaa

SEQ ID NO: 160351 - DNA, 75 bp, synthetic construct
  source 1..75: mol_type = other DNA
gagcggatggagtgagagctatacaaagcaggtcagatcagcactagagaaagatgtttaccccgtgctaggtaa

SEQ ID NO: 160352 - DNA, 75 bp, synthetic construct
  source 1..75: mol_type = other DNA
agaaagagcgcaccgcaccggagcaggcccggaaattacgccagcgtatcggggagatcttcaaatttgccgtta

SEQ ID NO: 160353 - DNA, 75 bp, synthetic construct
  source 1..75: mol_type = other DNA
aagttttaagaccgtggcggaggactggctgactactagggtgagcggttggtcagagtcctacacgaaacaggt

SEQ ID NO: 160354 - DNA, 75 bp, synthetic construct
  source 1..75: mol_type = other DNA
tggtacatcccaacggcagcaaatactggcgattccggtattggatggacaagaaagagtatttacaggccatcg

SEQ ID NO: 160355 - DNA, 75 bp, synthetic construct
  source 1..75: mol_type = other DNA
ttataaccaggcggcctacctgaaacagaggcgggcaatgatgcaggactacgcggacgccattgattcaatact

SEQ ID NO: 160356 - DNA, 75 bp, synthetic construct
  source 1..75: mol_type = other DNA
ggggagatcttcaaattcgccgttatcactgaactagtcagccgtaatccggtagcagatctggatacggcactg

SEQ ID NO: 160357 - DNA, 75 bp, synthetic construct
  source 1..75: mol_type = other DNA
aagatgtttaccccgtgctggggaagcgctcgatcgtggatataacggcccgtgacgtgctggccctgctccaga

SEQ ID NO: 160358 - DNA, 75 bp, synthetic construct
  source 1..75: mol_type = other DNA
acagagagccgatctctgattgctaatggaattaatccagtggaagaagcacgcaaggaaaaagccattgatgcg

SEQ ID NO: 160359 - DNA, 75 bp, synthetic construct
  source 1..75: mol_type = other DNA
tattcgtaatagatatgcaactctaacaagacaagatttatatgagttagcatctaatggtgctgaaactggctt

SEQ ID NO: 160360 - DNA, 75 bp, synthetic construct
  source 1..75: mol_type = other DNA
caatacgtttgcttatccttacggctttgaggaccgcagaactgcgtttaatgcgctgggagtgggtagatctgg

SEQ ID NO: 160361 - DNA, 75 bp, synthetic construct
  source 1..75: mol_type = other DNA
tggaaaagccactttcagccagtgccatccttaaggccctggagcgtatcggatacaagtcgatagccacgggcc

SEQ ID NO: 160362 - DNA, 75 bp, synthetic construct
  source 1..75: mol_type = other DNA
ggcattctacaaagcacttgagagagccgggagcgttcagattcaaacggcaatacgtttgcttatcctcaccgt

SEQ ID NO: 160363 - DNA, 75 bp, synthetic construct
  source 1..75: mol_type = other DNA
agcacgtcatctgcacggtgtgcggcaggggattaatctaccgttacggctggaaggtgaaattgtcggcgtaat

SEQ ID NO: 160364 - DNA, 75 bp, synthetic construct
  source 1..75: mol_type = other DNA
gtatgacggcagaaatgatgctggaacagtcacggttgatgcacctgctggcgcaggatagccgactgcgtgaag

SEQ ID NO: 160365 - DNA, 75 bp, synthetic construct
  source 1..75: mol_type = other DNA
cactatgcgcattatcgataccaatatcaatgtaatggatgctcgcgggcgaattatcggcagcggcgatcgtga

SEQ ID NO: 160366 - DNA, 75 bp, synthetic construct
  source 1..75: mol_type = other DNA
taccgtgtgcataccgacacggaagataacccgttcagcggtgggttgttcagccagtttggtctgtcagacaca

SEQ ID NO: 160367 - DNA, 75 bp, synthetic construct
  source 1..75: mol_type = other DNA
gtctggtcgtggagcaactgcgctgcattactaacggccaaagtacggacgcggcatttttactgcgcgttaaag

SEQ ID NO: 160368 - DNA, 75 bp, synthetic construct
  source 1..75: mol_type = other DNA
gaccaacttttggttacccgtgaaattcaagatgaaataaaatcaaagattcaagacaaaatagatgaactttct

SEQ ID NO: 160369 - DNA, 75 bp, synthetic construct
  source 1..75: mol_type = other DNA
ttcttactggcggtgatttaggcttaacgccaggactgaatcaaccgcgcgttacccagcgtgtggaacaggtgc

SEQ ID NO: 160370 - DNA, 75 bp, synthetic construct
  source 1..75: mol_type = other DNA
gaaaccattgcccgccagattggcgcggggatgagtaccgtcagaacggctatcgcacggctggaagcagaaggc

SEQ ID NO: 160371 - DNA, 75 bp, synthetic construct
  source 1..75: mol_type = other DNA
ataataccatccgcaaacttctgaatgattatagccgaggttattgctttagagattttttaaagaaccataaca

SEQ ID NO: 160372 - DNA, 75 bp, synthetic construct
  source 1..75: mol_type = other DNA
ttccttatcttattcagtcatgggtgatgaccccagataataaaaatcagcagactttattattacaccaccgct

SEQ ID NO: 160373 - DNA, 75 bp, synthetic construct
  source 1..75: mol_type = other DNA
tagtcttgatgcaataacaaccaacatcgttggtaattatgccagagatacattcctgagtttgattgataatga

SEQ ID NO: 160374 - DNA, 75 bp, synthetic construct
  source 1..75: mol_type = other DNA
tcaaacctcttctgggtcacacaagccctcttggcgccgaataatcccagatgattgggaaagcaaagtgactaa

SEQ ID NO: 160375 - DNA, 75 bp, synthetic construct
  source 1..75: mol_type = other DNA
gtttactataacaatgccaatggcgatttcgataccgtctttaaaggcgataccgttaacggtaccatttctact

SEQ ID NO: 160376 - DNA, 75 bp, synthetic construct
  source 1..75: mol_type = other DNA
gtaccatctgcatattgttgaaccagatcgcagcggtaagagaagttcatcatacttggcgcagttacgcgatgt

SEQ ID NO: 160377 - DNA, 75 bp, synthetic construct
  source 1..75: mol_type = other DNA
tcagaatgttgattacaaaccccatcaagatgattattcttcagctgaaaaatttctcactcacttcaaaaaaaa

SEQ ID NO: 160378 - DNA, 75 bp, synthetic construct
  source 1..75: mol_type = other DNA
catgggggaggtttattcgaaccgctggacccagaagaacggggccgcaccttcgaagctctggattgcacagat

SEQ ID NO: 160379 - DNA, 75 bp, synthetic construct
  source 1..75: mol_type = other DNA
tttatcattctatattttttgtttttttaggagaatatctttcttattatatgagagaaatgctcctttcattgt

SEQ ID NO: 160380 - DNA, 75 bp, synthetic construct
  source 1..75: mol_type = other DNA
atgtgattacctgttcagtgccctccgtcggctggagctacagggctacaggcaggagaggtgtaccgatacggg

SEQ ID NO: 160381 - DNA, 75 bp, synthetic construct
  source 1..75: mol_type = other DNA
gttccgggctggcctctcatgccacggcggcttataccagcaaactgtttgagaatatgaagagcgtggcggaag

SEQ ID NO: 160382 - DNA, 75 bp, synthetic construct
  source 1..75: mol_type = other DNA
ccggatggcattcagctacaggtcggcgaatcgacggtaatcaggctgtcgaaggatggcatcaccatcgtgggc

SEQ ID NO: 160383 - DNA, 75 bp, synthetic construct
  source 1..75: mol_type = other DNA
ttatcagcaggcactaccgttactgatcgagaaaacgcgtcagtgcgggattgcagcactggcaattaatcattg

SEQ ID NO: 160384 - DNA, 75 bp, synthetic construct
  source 1..75: mol_type = other DNA
ttagtgtctttaatggagagatctcttgagttcgcaaaccctgaccgtgtaaatgagggtcaatcaattacggtt

SEQ ID NO: 160385 - DNA, 75 bp, synthetic construct
  source 1..75: mol_type = other DNA
attaaaaataatcctagaggccgtttcaaagagaggaggcaatacctactcaaactctacttcagtcggttctgt

SEQ ID NO: 160386 - DNA, 75 bp, synthetic construct
  source 1..75: mol_type = other DNA
tgcaggggcagacttttgacaaatctgcctacccaaaacttgcagccgcttatccgtcaggcgtgatccctgata

SEQ ID NO: 160387 - DNA, 75 bp, synthetic construct
  source 1..75: mol_type = other DNA
actgcttcccggttgtagtgaagatattggtggtggcttgaaaccggatgaacagaaacccagtgcagaactgtg

SEQ ID NO: 160388 - DNA, 75 bp, synthetic construct
  source 1..75: mol_type = other DNA
acattgtgctgtgaataccagagatggtgctgctcctgatggaacacattttatcttttatgattatatcgatct

SEQ ID NO: 160389 - DNA, 75 bp, synthetic construct
  source 1..75: mol_type = other DNA
aagatgttgattctgaattaaaagttttgcttggagacagcggtgcatacagcatatcacaaagcacttcatcta

SEQ ID NO: 160390 - DNA, 75 bp, synthetic construct
  source 1..75: mol_type = other DNA
gccgtacaggcagcttagaaaatcctggcagaacaaccagtcagcagatccccgttcactgccgtacaggcagct

SEQ ID NO: 160391 - DNA, 75 bp, synthetic construct
  source 1..75: mol_type = other DNA
gaaaggtacgctcggaacacagcgggcagcactaacgttcactgccgtacaggcagcttagaaaaactggcgcga

SEQ ID NO: 160392 - DNA, 75 bp, synthetic construct
  source 1..75: mol_type = other DNA
ttttgaccttggagctacactggcacgtaaatttttggataattttcttaaggaagtttgcctgaaaaataaaga

SEQ ID NO: 160393 - DNA, 75 bp, synthetic construct
  source 1..75: mol_type = other DNA
tgcattgattattgatactgaaaactgggcattctcaaatatagcaaatcaaatagtcaatcatctgtcagattc

SEQ ID NO: 160394 - DNA, 75 bp, synthetic construct
  source 1..75: mol_type = other DNA
gtgtgggtattaacggtctgacaagcgcaaccggagatgccataaaagctctgcgtggcatcggtaacaacacca

SEQ ID NO: 160395 - DNA, 75 bp, synthetic construct
  source 1..75: mol_type = other DNA
caccatgcatttgtccgcagaggagcacggcgcatatttgttgctgatgttcaattactggcaaacagggaagcc

SEQ ID NO: 160396 - DNA, 75 bp, synthetic construct
  source 1..75: mol_type = other DNA
atcgcttcgtctttaccagtcaggaatgaaagtaggtacatgtggtgcaatatctttaatccatgatcaccccaa

SEQ ID NO: 160397 - DNA, 75 bp, synthetic construct
  source 1..75: mol_type = other DNA
tctaaatgggcgggagagttagaggatttcaaaggttaccattctttattaaagcctgcagttgagcaattacaa

SEQ ID NO: 160398 - DNA, 75 bp, synthetic construct
  source 1..75: mol_type = other DNA
ctatatgacatctactcatccatagttgagtatcctaagccatcagttcttgcggaagatggggttaatttaaaa

SEQ ID NO: 160399 - DNA, 75 bp, synthetic construct
  source 1..75: mol_type = other DNA
gatcaaaggttgcgcttgataggatttatgatcaatctcgtccagaatatattcagcttaactctgcgcttgagg

SEQ ID NO: 160400 - DNA, 75 bp, synthetic construct
  source 1..75: mol_type = other DNA
tatccagtaccagcaatacttattgctgaaagagaaggttcccctggtacgtatgaaataattgatggtttacag

SEQ ID NO: 160401 - DNA, 75 bp, synthetic construct
  source 1..75: mol_type = other DNA
ataaaacactctccaggaaacccggggcggttcagctggtcacctgcaaacagaacgaagtggagccggaggact

SEQ ID NO: 160402 - DNA, 75 bp, synthetic construct
  source 1..75: mol_type = other DNA
cgcgtacagcgaacaggggctggcgacccgtcaggagccggacggtctgccgccggtggagtggctgacgtatgg

SEQ ID NO: 160403 - DNA, 75 bp, synthetic construct
  source 1..75: mol_type = other DNA
tacgggtgggacggcgacaggctgacgacggtacagaccgacaccacgcgtatccagacggtataccagccgggg

SEQ ID NO: 160404 - DNA, 75 bp, synthetic construct
  source 1..75: mol_type = other DNA
ggaattatgattgatggatgtgtggcccggttgcggaaatataaaccagaagaatatgagctgatcattgctcac

SEQ ID NO: 160405 - DNA, 75 bp, synthetic construct
  source 1..75: mol_type = other DNA
cttctatacaaactatttattcatggtttactgaaggtaagatatttgttaatagacgttatcaacgaaaattag

SEQ ID NO: 160406 - DNA, 75 bp, synthetic construct
  source 1..75: mol_type = other DNA
agtcgtatagaggtgttatctcgggaaagaaaaggcgtattggaagtttagaagaatctcgcccatgggatttga

SEQ ID NO: 160407 - DNA, 75 bp, synthetic construct
  source 1..75: mol_type = other DNA
ggggcgaacagtttaataacgttgaacgcgaattgattaaatccgcagtgaagacgcgcgagattctattagtgg

SEQ ID NO: 160408 - DNA, 75 bp, synthetic construct
  source 1..75: mol_type = other DNA
tcataggcttgattaaagataactttattgatagcgccgatagcagtcatatctataattctcacaatacggtgg

SEQ ID NO: 160409 - DNA, 75 bp, synthetic construct
  source 1..75: mol_type = other DNA
tggaaaacgttttaatctggacgcttttcccacagcgaaaaatcgagcggatgaaggtaagtttgttgcagtgaa

SEQ ID NO: 160410 - DNA, 75 bp, synthetic construct
  source 1..75: mol_type = other DNA
taaagaaaataagaagattaataattataaaggtgtaaaagacaatcttaataatatagtcactcgactagatac

SEQ ID NO: 160411 - DNA, 75 bp, synthetic construct
  source 1..75: mol_type = other DNA
aattgtaatgatataccgttaataacaaacatgataacttattgtggtatcgaggctgaagattatcaaggttga

SEQ ID NO: 160412 - DNA, 75 bp, synthetic construct
  source 1..75: mol_type = other DNA
ggctaaacaatatacagacgatatcatttcagcattgcaatatttgaaaatacaatgtcgccttgagaacgagta

SEQ ID NO: 160413 - DNA, 75 bp, synthetic construct
  source 1..75: mol_type = other DNA
gcagtaaaagccattcagcagattaagaccgccgagcaggtggcgcttaaccgtgctgagaatcccgacctgacg

SEQ ID NO: 160414 - DNA, 75 bp, synthetic construct
  source 1..75: mol_type = other DNA
ctttactcgcgaccgtcacttttcgcgacggtgccgatctgtttgccgcgtctttctggttaggtgacggtgcga

SEQ ID NO: 160415 - DNA, 75 bp, synthetic construct
  source 1..75: mol_type = other DNA
cgtcaacagaccactggcttagtgccggttcgggtatcagcgcactttcttacaatatgatttttagtaagaaag

SEQ ID NO: 160416 - DNA, 75 bp, synthetic construct
  source 1..75: mol_type = other DNA
acagcttacactccctacaggaagtctctttcagtagtctcggttttaccgaacgtggcaatctgcaggaatggc

SEQ ID NO: 160417 - DNA, 75 bp, synthetic construct
  source 1..75: mol_type = other DNA
ttgctttcatgcgaataatccactccgagccgccatgattgtatttctcatgatgcaggaaaatcagaatggcta

SEQ ID NO: 160418 - DNA, 75 bp, synthetic construct
  source 1..75: mol_type = other DNA
tggcgctggttattctcgcggctattgtcgcgaaagccgtcgccaaacccgataccaaaacgcagacggcgatgg

SEQ ID NO: 160419 - DNA, 75 bp, synthetic construct
  source 1..75: mol_type = other DNA
ttaaaccctttacctgactactgcaatgatccgagagctgcatggcctgtaatcgcaaaacatcagatcagcata

SEQ ID NO: 160420 - DNA, 75 bp, synthetic construct
  source 1..75: mol_type = other DNA
aaccctttacctgactactgcaatgatccgagagctgcatggcctgtaatcgcaaaacatcagatcagcatatgt

SEQ ID NO: 160421 - DNA, 75 bp, synthetic construct
  source 1..75: mol_type = other DNA
ttgaaattaacaagcgagtatttaaagtgatagttggggcaaaaccattaggttatccgcacaacgcagatggac

SEQ ID NO: 160422 - DNA, 75 bp, synthetic construct
  source 1..75: mol_type = other DNA
ttgaaattaaccgaatggtaggagacataatttttaaaggcctttgggcatgtaagcctgaaacatcagggaata

SEQ ID NO: 160423 - DNA, 75 bp, synthetic construct
  source 1..75: mol_type = other DNA
cgagttttgatcattaccgaccgtacagaacttgatgaacagattgagaaagtgtttaacggcgtggaagaagac

SEQ ID NO: 160424 - DNA, 75 bp, synthetic construct
  source 1..75: mol_type = other DNA
ttgttaatgcacattcagttattaccgatgcaaataaatatgttgggaattattctgcaaaactacattctcttc

SEQ ID NO: 160425 - DNA, 75 bp, synthetic construct
  source 1..75: mol_type = other DNA
ttgtggcgatttttctgccaaatgtagcgatgcatgtattgaaaaatataacactgggcaactcttcgggttaga

SEQ ID NO: 160426 - DNA, 75 bp, synthetic construct
  source 1..75: mol_type = other DNA
gaagacggcaatacggcgtggcgcggggagtatgatgaatggggcaaccagcttaatgaggagaacccgcatcac

SEQ ID NO: 160427 - DNA, 75 bp, synthetic construct
  source 1..75: mol_type = other DNA
gaactggctgtactaccagaaaatggttttttatcatccatcacattggtaatgatagcatcagactcaattcat

SEQ ID NO: 160428 - DNA, 75 bp, synthetic construct
  source 1..75: mol_type = other DNA
tgctgctctggttctcgttcttttttggcatgtataacggtgcgatggtggcggccctgaccgaagtgatgccgg

SEQ ID NO: 160429 - DNA, 75 bp, synthetic construct
  source 1..75: mol_type = other DNA
agtatgcacgggagctactcaagattatcgattccctggatattttaatgaattgatggttttggcaaaaaagct

SEQ ID NO: 160430 - DNA, 75 bp, synthetic construct
  source 1..75: mol_type = other DNA
aacacaacgccagcctgcccgcactgctgagcgcagacgatattaaagcgctgcttgaagagtacaacgccaccc

SEQ ID NO: 160431 - DNA, 75 bp, synthetic construct
  source 1..75: mol_type = other DNA
tggtgcagcgcactgacgcaggcaccaatgccgacggcgggtatgtaactgaccgcggcgaaggcgcacaccaca

SEQ ID NO: 160432 - DNA, 75 bp, synthetic construct
  source 1..75: mol_type = other DNA
gtttagcatggaaaagcgccatgagctgggcctgcttttgcagttcacaaaggcctgggtagccacaccatatat

SEQ ID NO: 160433 - DNA, 75 bp, synthetic construct
  source 1..75: mol_type = other DNA
accgaggctcgcgccaatctgatgctggatgttgcgctggaagatgcaggtatcgaaacaggtcggggtaaggac

SEQ ID NO: 160434 - DNA, 75 bp, synthetic construct
  source 1..75: mol_type = other DNA
cgatattcataaagtcgtgaatgccgttaagaaagtcttccctgtcgatggaaaaatccctgaactcgcaacctt

SEQ ID NO: 160435 - DNA, 75 bp, synthetic construct
  source 1..75: mol_type = other DNA
agaaaaccatcgtcaaagagcgctcagcggtgctggacatgggcaacttggtgcatgcgctggcgttgcagcctg

SEQ ID NO: 160436 - DNA, 75 bp, synthetic construct
  source 1..75: mol_type = other DNA
tggggattggcataatcagctacatcaccatcaactatctggtgaagttcgacttccatttcctctatgtgctgg

SEQ ID NO: 160437 - DNA, 75 bp, synthetic construct
  source 1..75: mol_type = other DNA
gcagagcgccgtcgtgacggggccggagggtgaggaaatcttctgtgatgaacatggccgagtgcgggtgaaatt

SEQ ID NO: 160438 - DNA, 75 bp, synthetic construct
  source 1..75: mol_type = other DNA
cgagtttatatatgaagacgttcttactatgatacctggtgaatgtgcgctagataaagctgtggagattggaag

SEQ ID NO: 160439 - DNA, 75 bp, synthetic construct
  source 1..75: mol_type = other DNA
taagccgatgccgcagtaccacgccggggcgctggtgcgtgaaggcgacgcgaaaacttcaccggtcggcaagat

SEQ ID NO: 160440 - DNA, 75 bp, synthetic construct
  source 1..75: mol_type = other DNA
tgggttcaggcgaaggagcaatgaaggtttaccggaacgcctcacctctggccagaatcattcgctcctcgattt

SEQ ID NO: 160441 - DNA, 75 bp, synthetic construct
  source 1..75: mol_type = other DNA
taaatattggtatgacccaggttgttaaaggcaggcgaattattggttcacagtcatcaggtacgttagcaggct

SEQ ID NO: 160442 - DNA, 75 bp, synthetic construct
  source 1..75: mol_type = other DNA
catgttttgaatgccgattttgaatcaataaaaaaatggtctttatataggtgcctctatgccgagataaaagaa

SEQ ID NO: 160443 - DNA, 75 bp, synthetic construct
  source 1..75: mol_type = other DNA
atccgaaatctcgccgtttactacgggacagcatgggtgtactacgaccatttgctttatgaaaagccttcaaca

SEQ ID NO: 160444 - DNA, 75 bp, synthetic construct
  source 1..75: mol_type = other DNA
gctcgatggcttcgtgttctgggtgaaagcctcggtcctgtctgacgatccgaacaatgagccggatacggtgga

SEQ ID NO: 160445 - DNA, 75 bp, synthetic construct
  source 1..75: mol_type = other DNA
ccgaagaattttaaaacttttgattactatgatggtgcaacaaaaacagcaataagcgtcaagtctatggatacg

SEQ ID NO: 160446 - DNA, 75 bp, synthetic construct
  source 1..75: mol_type = other DNA
tgttcactggtgatggcgtgggtggcgactcagtatccaccgggtattgctacggttgtcgctacgttactggcg

SEQ ID NO: 160447 - DNA, 75 bp, synthetic construct
  source 1..75: mol_type = other DNA
ctcagtatccaccgggtattgctacggttgtcgctacgttactggcggggggggggggggggggggggggggggg

SEQ ID NO: 160448 - DNA, 75 bp, synthetic construct
  source 1..75: mol_type = other DNA
ccgggagattattcgttcggtcgattgcaaagtgatggataaacgagggctggggggcgcaatccacattcagtt

SEQ ID NO: 160449 - DNA, 75 bp, synthetic construct
  source 1..75: mol_type = other DNA
accggattgcaactggacgaagaaagtgtcacgaacggtgcaatagtgatccacacccaacgcctgaaatcagat

SEQ ID NO: 160450 - DNA, 75 bp, synthetic construct
  source 1..75: mol_type = other DNA
caactggacgaagaaaggaagcaagtgatgaaaattatgcagaaagtgtgggaagacgacagctggctgcattaa

SEQ ID NO: 160451 - DNA, 75 bp, synthetic construct
  source 1..75: mol_type = other DNA
catcaaagagtacaacgccaccctgccagcgcagattaaaaccagcggcagccgcgacgcactactcgaacaact

SEQ ID NO: 160452 - DNA, 75 bp, synthetic construct
  source 1..75: mol_type = other DNA
agggtgacatgacccgcaagggactggatattgtgcagggttcagcaggggggctgataggtgcgccgacaggag

SEQ ID NO: 160453 - DNA, 75 bp, synthetic construct
  source 1..75: mol_type = other DNA
gcgatgattattcacgccccgacccaacgaaaattaaaaacgcagacggtcagcagggaaacgttcttgttcgtt

SEQ ID NO: 160454 - DNA, 75 bp, synthetic construct
  source 1..75: mol_type = other DNA
ctaacgccatcacaatacagtagtggcggaaaatcaaagcttggcaggataacaaaagcgggtgatgcctatctg

SEQ ID NO: 160455 - DNA, 75 bp, synthetic construct
  source 1..75: mol_type = other DNA
atcgcatggcgggtaagaccgggaaaaatgatgcagctgatgcaatagctatttgtgaggcagtgcagcggccgc

SEQ ID NO: 160456 - DNA, 75 bp, synthetic construct
  source 1..75: mol_type = other DNA
ccgccatgctggataacggcgaggatctcatcacggtgaaggatgcgatgggtcatgccagcgtcaccaccaccc

SEQ ID NO: 160457 - DNA, 75 bp, synthetic construct
  source 1..75: mol_type = other DNA
caactggacgaagaaagaaaacaagtgatgaaaattatgcagaaagtgtgggaagacgacagctggctgcattaa

SEQ ID NO: 160458 - DNA, 75 bp, synthetic construct
  source 1..75: mol_type = other DNA
aagagcagaagattagtcagtctaccctggacgcccttgaaaacgagctttaccgcaatctgcgccccctgtatc

SEQ ID NO: 160459 - DNA, 75 bp, synthetic construct
  source 1..75: mol_type = other DNA
tgaaaattggcacggtgaatgcgctgcgaattttcaatgatgccttcggtcttattttccgtcgttcagaagatt

SEQ ID NO: 160460 - DNA, 75 bp, synthetic construct
  source 1..75: mol_type = other DNA
gcagaaaaaccggaaaccgtagtggagaccaccagcgatgtgcagatggaagcgactcagccagagaaagacaaa

SEQ ID NO: 160461 - DNA, 75 bp, synthetic construct
  source 1..75: mol_type = other DNA
ccacataaagccgaacaagaactggttaaaaatgtcggcaacggaatattcgatgttacggctttactgcagaac

SEQ ID NO: 160462 - DNA, 75 bp, synthetic construct
  source 1..75: mol_type = other DNA
catcatccgaattggttaactttcctgggcggttgcgggcatatatcaatgccaatctaaccgaaaatgaccact

SEQ ID NO: 160463 - DNA, 75 bp, synthetic construct
  source 1..75: mol_type = other DNA
ccactcagaaatccggcaagcaagatgcagtgatctggttcactgcgaaaagcgaagcccgcgccgccctgacgc

SEQ ID NO: 160464 - DNA, 75 bp, synthetic construct
  source 1..75: mol_type = other DNA
atcaccgaagactacaccgacgaactgaacgacttcgacctgcgccgccttgaagcgctgcgtactcaggcataa

SEQ ID NO: 160465 - DNA, 75 bp, synthetic construct
  source 1..75: mol_type = other DNA
cgtattcgccgacgagctgctggacgcctggcgagaaaatccgggcgacaagattctggtgacgcgccagcagct

SEQ ID NO: 160466 - DNA, 75 bp, synthetic construct
  source 1..75: mol_type = other DNA
atcatcaatcctgatttggtcgcacaggatgcgcagaaaccaacgccgctgaaagtctccggcagcaaagcagac

SEQ ID NO: 160467 - DNA, 75 bp, synthetic construct
  source 1..75: mol_type = other DNA
ctgcaaccggaaaacctcgaagcagagttcagcgtagaacctgagatcccggagggagctttcactaccaccgct

SEQ ID NO: 160468 - DNA, 75 bp, synthetic construct
  source 1..75: mol_type = other DNA
ctacgcagaaatctggcaaagaagatgcagtgatttggttcactgcgaaatctgaagcccgcgccaacctgcagc

SEQ ID NO: 160469 - DNA, 75 bp, synthetic construct
  source 1..75: mol_type = other DNA
catcgaaatgggtcgcggtaaggactacgccaaaccgattcgcacagattttcctgttgttgatgacctgccaga

SEQ ID NO: 160470 - DNA, 75 bp, synthetic construct
  source 1..75: mol_type = other DNA
ggaatacaacgccaatctgcctgcccaggtgaaaaccagtggtagccgtgatgccttactcgagcagctggcaat

SEQ ID NO: 160471 - DNA, 75 bp, synthetic construct
  source 1..75: mol_type = other DNA
ctggatactctggatttagagattgcctgcgccctgctcccaatggactttaaccatcttgaaatcccgggcagc

SEQ ID NO: 160472 - DNA, 75 bp, synthetic construct
  source 1..75: mol_type = other DNA
tacttgtgagtggttatattgtattaaccactcatccttatcatttctatagattacaccgttatgatgggcagt

SEQ ID NO: 160473 - DNA, 75 bp, synthetic construct
  source 1..75: mol_type = other DNA
gttgtggtcagtgacaatgatggggatgaagacattctgaatattgtcaggaagcggctgaaaaatcctgccaga

SEQ ID NO: 160474 - DNA, 75 bp, synthetic construct
  source 1..75: mol_type = other DNA
ataagagaacaattgatcacatgtaaattacgtgcatcagacatagttgaaacctatacgcgaaaccctcgttaa

SEQ ID NO: 160475 - DNA, 75 bp, synthetic construct
  source 1..75: mol_type = other DNA
gggttgccgctattgcgcactataaaataaaaataaaaagtaacatcttatcataccttggttttttattgataa

SEQ ID NO: 160476 - DNA, 75 bp, synthetic construct
  source 1..75: mol_type = other DNA
cattccagtttcccagatcactcaagtttcatggttcaccattgaagttcatgataaagttaataacaactgtaa

SEQ ID NO: 160477 - DNA, 75 bp, synthetic construct
  source 1..75: mol_type = other DNA
tgctttactaatgattataacaatatagaagattatgatacaagtgttatcattccagtttcccagatcactcaa

SEQ ID NO: 160478 - DNA, 75 bp, synthetic construct
  source 1..75: mol_type = other DNA
aaatcgcctgaaattaatgcgaaggttcaaacagtatattcaaattcactcatcttgaatgctcctgcggtcgtc

SEQ ID NO: 160479 - DNA, 75 bp, synthetic construct
  source 1..75: mol_type = other DNA
gttgcgcgcggtgaatgggatgatagtggaaccattctgaaaaacacatcgcttaatggtgctaagggggttggg

SEQ ID NO: 160480 - DNA, 75 bp, synthetic construct
  source 1..75: mol_type = other DNA
tgctaagggtgtagggttccagatttacaatggtaatgcaacgacaccgttaaagctgggcgataccctgatgaa

SEQ ID NO: 160481 - DNA, 75 bp, synthetic construct
  source 1..75: mol_type = other DNA
caaagctatgtgcaaggagatatcctccaaacataatgttgttgtaattgtaccatccgattacagaactagatt

SEQ ID NO: 160482 - DNA, 75 bp, synthetic construct
  source 1..75: mol_type = other DNA
gggtacgctggaagcctactggaaggcgaacctcgatctggcttcggtgacgcctgaactggacatgtacgacca

SEQ ID NO: 160483 - DNA, 75 bp, synthetic construct
  source 1..75: mol_type = other DNA
tttcgcgggcgtggcctgattcagattactctgcgcaataattacctcctttgcggtaaggcgctgggcctcgat

SEQ ID NO: 160484 - DNA, 75 bp, synthetic construct
  source 1..75: mol_type = other DNA
ggaaaataaccagcgggcattgtggcgaacgctgcgcgatttacggcaggccgtgattacggatgcccgcgagcg

SEQ ID NO: 160485 - DNA, 75 bp, synthetic construct
  source 1..75: mol_type = other DNA
tttcaggaaaaagagcgcctgcacattacgcttgtacgcttgattccatcggtgaagccgtggtctgtattgata

SEQ ID NO: 160486 - DNA, 75 bp, synthetic construct
  source 1..75: mol_type = other DNA
gtggcaacggacaaggcagttccatgatcatgaagatgaaagtggaccaatttttaacccaatcaaacattgacc

SEQ ID NO: 160487 - DNA, 75 bp, synthetic construct
  source 1..75: mol_type = other DNA
tttccagcgccggcagaaaataccagtctgacggtactcagcgctgcggataaggtcaaagctgcgctggcgaat

SEQ ID NO: 160488 - DNA, 75 bp, synthetic construct
  source 1..75: mol_type = other DNA
aacttatccatccgtggttcggcattcagaaggttcaggttggtaaggtgacgcaccgtctgagcactgaggaag

SEQ ID NO: 160489 - DNA, 75 bp, synthetic construct
  source 1..75: mol_type = other DNA
cttgtggctaacctgcccacgctaccggcagcactgaatcagtggatggacaggctgaaccattttaaggagatg

SEQ ID NO: 160490 - DNA, 75 bp, synthetic construct
  source 1..75: mol_type = other DNA
taaaacatgaaattactggccaggcggtgctccagatattacgcatgaagataaatttttcgttgcagactctta

SEQ ID NO: 160491 - DNA, 75 bp, synthetic construct
  source 1..75: mol_type = other DNA
attttagcaatagtgattcaggagggccaaaccgaagaacagcgacagctgacaataaaagtatgttcaatggta

SEQ ID NO: 160492 - DNA, 75 bp, synthetic construct
  source 1..75: mol_type = other DNA
aaccattcagaaacaagagaaaaacatctacaaaaaaaatcttatcatatacattagcattttcgttggtgttat

SEQ ID NO: 160493 - DNA, 75 bp, synthetic construct
  source 1..75: mol_type = other DNA
atcatgaatgcacaaaagtctataaaaccaggacataagcatctgatttttctgccagatatgccacatactaat

SEQ ID NO: 160494 - DNA, 75 bp, synthetic construct
  source 1..75: mol_type = other DNA
atcaaagcgttgatctggaaacgatccgcccagttgagggcatgtcgattgaagaatcaagaagacatgcacaaa

SEQ ID NO: 160495 - DNA, 75 bp, synthetic construct
  source 1..75: mol_type = other DNA
acctgcccaaaaacaggcagtttgattatgtgaatgaaagtaatgctgggaagatcgttgtcgactcgattaagt

SEQ ID NO: 160496 - DNA, 75 bp, synthetic construct
  source 1..75: mol_type = other DNA
tgtcaccagccagacggcgggcaccagtgcggtcaccgccagcatcaacagcagcagccagagccgggacgtgac

SEQ ID NO: 160497 - DNA, 75 bp, synthetic construct
  source 1..75: mol_type = other DNA
gcatcaacagcagcagcctgagccggaccgtgacgtttatcgccgatgtcaggacggcgcagatagcggatctgg

SEQ ID NO: 160498 - DNA, 75 bp, synthetic construct
  source 1..75: mol_type = other DNA
ttccattaaaagaacgcaaatgggtaaaatttggtaaaactaaagaaaataaactcatagataatccacaattga

SEQ ID NO: 160499 - DNA, 75 bp, synthetic construct
  source 1..75: mol_type = other DNA
gtattatcgaactggttaagcagcagggttatgtcagtactgaagagctggtagagcatttctccgtcagcccgc

SEQ ID NO: 160500 - DNA, 75 bp, synthetic construct
  source 1..75: mol_type = other DNA
gctggtgttttatacgcggatacagcatgaggagccactggtcgagagccgctatctctacgacccgctgggccg

SEQ ID NO: 160501 - DNA, 75 bp, synthetic construct
  source 1..75: mol_type = other DNA
gcgcactacctgtaccgctatgacaggtatggcaggctgacggagaagacggaccgcatcccgacgggtgtgata

SEQ ID NO: 160502 - DNA, 75 bp, synthetic construct
  source 1..75: mol_type = other DNA
gtttgtttcaatcatgattttgatctttttcaaagatatcaattctgttttttttagtaacaaaattgataatga

SEQ ID NO: 160503 - DNA, 75 bp, synthetic construct
  source 1..75: mol_type = other DNA
gcgcgaaaagttcatttttaccactgcgaccaccggggcctgccgctggcgctcatcagcgaagacggcaatact

SEQ ID NO: 160504 - DNA, 75 bp, synthetic construct
  source 1..75: mol_type = other DNA
gaagacgcgcactacctgtaccgttacgatgaatacggcaggctgacggagaagacggaccgcatcccggcgggt

SEQ ID NO: 160505 - DNA, 75 bp, synthetic construct
  source 1..75: mol_type = other DNA
atttccctgtgccggaaaaggtacagcaggagagtcgcatggctgatctggacaatggctatctgcgccttgcta

SEQ ID NO: 160506 - DNA, 75 bp, synthetic construct
  source 1..75: mol_type = other DNA
cgtgacggcaggcaacggcgcaacggttgctccggtggtcaccacgcagccggacggcacggtggagatctcagt

SEQ ID NO: 160507 - DNA, 75 bp, synthetic construct
  source 1..75: mol_type = other DNA
ttcgctctcaacgaccgcaaaacgggaagggatgtgaaccgcatttctgagccagataaaaccatcccaaccgga

SEQ ID NO: 160508 - DNA, 75 bp, synthetic construct
  source 1..75: mol_type = other DNA
acccggggcggttcaggtctgagaaagtcgaacatcataaatctggaatggcaacaaatcgacatgcagcgacga

SEQ ID NO: 160509 - DNA, 75 bp, synthetic construct
  source 1..75: mol_type = other DNA
gaatatccggacaacctgccagccgcgccgctggtacgctatggctggacgccgcgcggcgaactggcggcggtg

SEQ ID NO: 160510 - DNA, 75 bp, synthetic construct
  source 1..75: mol_type = other DNA
acaacaagccttaatgcatttccaatttttcctagatcgtgggttaacgatgaaatcttctgttcgagaacagat

SEQ ID NO: 160511 - DNA, 75 bp, synthetic construct
  source 1..75: mol_type = other DNA
ccattttgaaaaacacatcgcttaatggtgctaagggggttgggttccagatttataatggtaacgcaacaacac

SEQ ID NO: 160512 - DNA, 75 bp, synthetic construct
  source 1..75: mol_type = other DNA
aagtagacgatactataaccaccaatatcgacaagataaccatccggcgccccgctattagcatactaacagata

SEQ ID NO: 160513 - DNA, 75 bp, synthetic construct
  source 1..75: mol_type = other DNA
aagtagaccatactataaccaccaatatcgacaagataaccatcccgcgccccgctattagcatactaacagata

SEQ ID NO: 160514 - DNA, 75 bp, synthetic construct
  source 1..75: mol_type = other DNA
ttctgcggcagctaaagatttggggataccttataaaagagcatggctcttaattgacactttgaataagggaat

SEQ ID NO: 160515 - DNA, 75 bp, synthetic construct
  source 1..75: mol_type = other DNA
cgccacgctcgccgcagcccccgctggctgaacgtgagatggcatggcggttgatccgccagttatcttttaatt

SEQ ID NO: 160516 - DNA, 75 bp, synthetic construct
  source 1..75: mol_type = other DNA
ctcgactgtagattcaattggtcaacgcaacagttatgtgaaaacatggggttgcggaggttttttgaatgagac

SEQ ID NO: 160517 - DNA, 75 bp, synthetic construct
  source 1..75: mol_type = other DNA
atcccctataaaagggcgtggctcctgattgatacactcaataaaggcataggtaagccggtggtaattacatca

SEQ ID NO: 160518 - DNA, 75 bp, synthetic construct
  source 1..75: mol_type = other DNA
actgcttacatggtacgacaagttagaggctaaccttaacgagcaatcacagcaggacttgcaggagctcgaaaa

SEQ ID NO: 160519 - DNA, 75 bp, synthetic construct
  source 1..75: mol_type = other DNA
taattgacactttgaataaagggattggtcagccagttgtaaccacttccactggtggtaacaagggcggtggta

SEQ ID NO: 160520 - DNA, 75 bp, synthetic construct
  source 1..75: mol_type = other DNA
gaaaatgatggagtttttacatggctcccagatttttttccgcacgtagcggtggatatatcaatatccacaaat

SEQ ID NO: 160521 - DNA, 75 bp, synthetic construct
  source 1..75: mol_type = other DNA
aagatgaatctcttgtaagtaagcattacataaactatatggcaataccagaaaatgatggagtttttacatggc

SEQ ID NO: 160522 - DNA, 75 bp, synthetic construct
  source 1..75: mol_type = other DNA
gggggtaatcggccatcttttattgtgacaagcgatgactggaatatcacgatcagtgaagatggaaaagtaaca

SEQ ID NO: 160523 - DNA, 75 bp, synthetic construct
  source 1..75: mol_type = other DNA
atgagtttcgaccacgtttctccaccagaaatgctgttacgccagcatcttgagattttctctgccctgcaaaaa

SEQ ID NO: 160524 - DNA, 75 bp, synthetic construct
  source 1..75: mol_type = other DNA
atgaatgcactgaccgccgtacaaaacaacgctgtcgattcaggccaggactatagcggattcaccctcacccca

SEQ ID NO: 160525 - DNA, 75 bp, synthetic construct
  source 1..75: mol_type = other DNA
tacaaaaaaagtgtggtgtaaatatggtaaaataccagggcaaggggatagcgtaaatctttttttgttggtgaa

SEQ ID NO: 160526 - DNA, 75 bp, synthetic construct
  source 1..75: mol_type = other DNA
acaacgctgtcgattcaggccaggactatagcggattcaccctcaccccatcggcgcaatccctgcgtctgctgg

SEQ ID NO: 160527 - DNA, 75 bp, synthetic construct
  source 1..75: mol_type = other DNA
tttttcagttgggtattaatacagtaactgagtattccgacgggaaaaaagttattgaacaaaatgggcataaag

SEQ ID NO: 160528 - DNA, 75 bp, synthetic construct
  source 1..75: mol_type = other DNA
cactatgggatgaatatggtcgtctcatcgttcgcgccgatcgtggttcattattgttagtcggtcagcgttcat

SEQ ID NO: 160529 - DNA, 75 bp, synthetic construct
  source 1..75: mol_type = other DNA
agggccagaaagcacctgaaagagacgatgaaagaactctgccagattcaggtggatgacacttcccacgtctgc

SEQ ID NO: 160530 - DNA, 75 bp, synthetic construct
  source 1..75: mol_type = other DNA
cgacaggccatcattgacgccgttgacctgttacttcttcacccggaagcggcacatcaccttatggcagtagta

SEQ ID NO: 160531 - DNA, 75 bp, synthetic construct
  source 1..75: mol_type = other DNA
ctaccaaatgcgaaaacaacgaggattttgccgctcgctaccactttaagcaaatgaccggaaccaagttaaaac

SEQ ID NO: 160532 - DNA, 75 bp, synthetic construct
  source 1..75: mol_type = other DNA
actggcgggtggattacagcacaaaaaacaagcccacaacagcaagcctgacagtaaatggctgggagcgtgatg

SEQ ID NO: 160533 - DNA, 75 bp, synthetic construct
  source 1..75: mol_type = other DNA
agtccacagttaattgagtatcttcttgcaaagcactgtaagaaaggtgaccgtattcttgacccattctgtggg

SEQ ID NO: 160534 - DNA, 75 bp, synthetic construct
  source 1..75: mol_type = other DNA
ataatatttctgatataaaaattggtaacactcctggtgtttatactgggtataatggttttgctttaattcctc

SEQ ID NO: 160535 - DNA, 75 bp, synthetic construct
  source 1..75: mol_type = other DNA
gactggagcggagaagcactcagtcagaacagccccctgcccctgcatacagtatcgctcatctccggcaactgg

SEQ ID NO: 160536 - DNA, 75 bp, synthetic construct
  source 1..75: mol_type = other DNA
agttccgtgactccaaaaagtataaagatcgtctggcatcagcacagaaagaaaccggcgaaaaagacgcgctgg

SEQ ID NO: 160537 - DNA, 75 bp, synthetic construct
  source 1..75: mol_type = other DNA
gttttactgttgttgaagtggacgaactgccggaaggtgtgaatattgacggtaactggcagttttctgatggcc

SEQ ID NO: 160538 - DNA, 75 bp, synthetic construct
  source 1..75: mol_type = other DNA
gctgatttaccaacgaatgctggcggtggcaacgggcagcaaacgttgcttgtcgcgccttatcggcagattgct

SEQ ID NO: 160539 - DNA, 75 bp, synthetic construct
  source 1..75: mol_type = other DNA
gcaaaaaagaccgcgtgcatcggggggaagcgtttttgttgatattaatttccagccttattctgatcaatgggc

SEQ ID NO: 160540 - DNA, 75 bp, synthetic construct
  source 1..75: mol_type = other DNA
cgccaatgttatcaggctgacattttgtcattagaagtcgatgtgacagatgaagcgcaagtacaggcactctat

SEQ ID NO: 160541 - DNA, 75 bp, synthetic construct
  source 1..75: mol_type = other DNA
ccaatgcaaatacaggaacggcaaccagttctgtaggtgtaaacggtagtttttttaatgacgcaagattaaact

SEQ ID NO: 160542 - DNA, 75 bp, synthetic construct
  source 1..75: mol_type = other DNA
ttgcgtaatcgttttgaatttaaccaaaacaacgataaaaaaacatgggaaagaaactacacttatctagaaaaa

SEQ ID NO: 160543 - DNA, 75 bp, synthetic construct
  source 1..75: mol_type = other DNA
aaaaggaaataaacttgtaccatgtttatcaaaagaaaaactttcatctttgggtatcaacattaataataacga

SEQ ID NO: 160544 - DNA, 75 bp, synthetic construct
  source 1..75: mol_type = other DNA
tgccgtctacccggagacgcagctccagttgtgcatagtacatatggtacgcaacagcctgcggttagggcgtgg

SEQ ID NO: 160545 - DNA, 75 bp, synthetic construct
  source 1..75: mol_type = other DNA
cccgcttcggcgggtttttgtttttattttcaacgcgtttgaagttccggacggcgccggaatagaatcaaaaat

SEQ ID NO: 160546 - DNA, 75 bp, synthetic construct
  source 1..75: mol_type = other DNA
ggctgcggcaaacggttctttctgtagaaatgctggaagataaacacgatcagcaccagaccctgactgcggcgg

SEQ ID NO: 160547 - DNA, 75 bp, synthetic construct
  source 1..75: mol_type = other DNA
taaatctcaggatatagagggggggatattaaaaatctcaggtagttcaggtgcatccgtggatgtacaaaactt

SEQ ID NO: 160548 - DNA, 75 bp, synthetic construct
  source 1..75: mol_type = other DNA
cgtggtgttaggcgctctgctatcggacgaagatcccgcaatttcccttgatggactgacatggagccaatcagc

SEQ ID NO: 160549 - DNA, 75 bp, synthetic construct
  source 1..75: mol_type = other DNA
ttatggacaggtatgcgtccatccactcctgcgggtccgccactattaggacgggcgaagtatcaaaatctctgg

SEQ ID NO: 160550 - DNA, 75 bp, synthetic construct
  source 1..75: mol_type = other DNA
tccggattaaccattaagcgcacagccacactggccggatgcagcatcagccaggtcaaacgcgtctgggcaatc

SEQ ID NO: 160551 - DNA, 75 bp, synthetic construct
  source 1..75: mol_type = other DNA
ctgtgctctttcatatacttcattgtttgtgcttaaaatggcactgcatcagtcattaattattgcttttttatt

SEQ ID NO: 160552 - DNA, 75 bp, synthetic construct
  source 1..75: mol_type = other DNA
agtgacgcaggttttgccggtaaatgtgcgattgtgacgagctaccagccaaatgccagtgagattaaaggcgaa

SEQ ID NO: 160553 - DNA, 75 bp, synthetic construct
  source 1..75: mol_type = other DNA
acagcaaaatttgtcggccaaaatagtggtggctggaaaacacctgagatggaagaattcgtcagaaacgatttg

SEQ ID NO: 160554 - DNA, 75 bp, synthetic construct
  source 1..75: mol_type = other DNA
aattatccaggaataaacattgatgcaaaagagcgtgaaattagaaaatctattgaattcaggagcgaactgaat

SEQ ID NO: 160555 - DNA, 75 bp, synthetic construct
  source 1..75: mol_type = other DNA
taatgcagtccagcccgaatgatgaatatttgattgcggcttcgcctgtttatattgctgctgtccagaatgaca

SEQ ID NO: 160556 - DNA, 75 bp, synthetic construct
  source 1..75: mol_type = other DNA
aaagaaaagcagttgttctctggtcacaaaactgaggcgcaggtgctgacgtatgatcgcaaacctgcagtttct

SEQ ID NO: 160557 - DNA, 75 bp, synthetic construct
  source 1..75: mol_type = other DNA
atatgagcgtggatacgtgaagaataacccatgcaaaggagtcagaaaattctctcttaaagcccgcactgttta

SEQ ID NO: 160558 - DNA, 75 bp, synthetic construct
  source 1..75: mol_type = other DNA
atcaaggaatggtctccacgattacgaaccgcgatccagttagccagaaatgtatcttcaggcacatgtgaatat

SEQ ID NO: 160559 - DNA, 75 bp, synthetic construct
  source 1..75: mol_type = other DNA
atcatggtttatatatagctttgttcatgctcacagtgtgaaatttatagatttaatacaaacaaacttattaat

SEQ ID NO: 160560 - DNA, 75 bp, synthetic construct
  source 1..75: mol_type = other DNA
catcatgctgatctggtgaaggaatccgtctctgataaagatttaaaagtcaggacagtacgtatgtggcttctg

SEQ ID NO: 160561 - DNA, 75 bp, synthetic construct
  source 1..75: mol_type = other DNA
gaagaaattactcgccgcgttcgggaaaatgaaagccgacaacataaaacctgctcacgtgcggctgtatatgga

SEQ ID NO: 160562 - DNA, 75 bp, synthetic construct
  source 1..75: mol_type = other DNA
ccactttttacgggtatttcccggcagatacgcgcgcgtatgcactcccgccgcgggccggggatctggcaggat

SEQ ID NO: 160563 - DNA, 75 bp, synthetic construct
  source 1..75: mol_type = other DNA
gcgttgccggatacagccgcggagaaaggtggcctgcagggtcgtgtggatgcactggatggtatccaggtaccg

SEQ ID NO: 160564 - DNA, 75 bp, synthetic construct
  source 1..75: mol_type = other DNA
cgggcattgccctctaatgtatcaggagacttatatcctcaaccgtccatatttggtgataaggtatcttctgtt

SEQ ID NO: 160565 - DNA, 75 bp, synthetic construct
  source 1..75: mol_type = other DNA
tatgagcgagggtacgtgaaggctaacccatgtgcaggtgtaagtaaattcaaggccaaaaaccgcgaacgatat

SEQ ID NO: 160566 - DNA, 75 bp, synthetic construct
  source 1..75: mol_type = other DNA
aacacgaaaaattaccgccaaaggtatatcccaataaatatagttatgtatggaaaccaacatccagagaatctg

SEQ ID NO: 160567 - DNA, 75 bp, synthetic construct
  source 1..75: mol_type = other DNA
gtgcaatgacattcggtcgcttgtgggaaaaattcctcgccagcgcctattacagtgaccttagtccaagaacac

SEQ ID NO: 160568 - DNA, 75 bp, synthetic construct
  source 1..75: mol_type = other DNA
gaaaaagtacggctctcagattgagttaatttttcgttttcttgatcacgcctttgcgactggcgtgctcgggta

SEQ ID NO: 160569 - DNA, 75 bp, synthetic construct
  source 1..75: mol_type = other DNA
aagtatatctagtttagttgttattttcttggaaagcagtggttcaattgctgagttaggtgttttctgtaatat

SEQ ID NO: 160570 - DNA, 75 bp, synthetic construct
  source 1..75: mol_type = other DNA
tcctgaggcttttacgttttatgcccgcattaaacagcttgtgggtggcaatatataacgcccgacaccagttga

SEQ ID NO: 160571 - DNA, 75 bp, synthetic construct
  source 1..75: mol_type = other DNA
gatcctttggggctggctatatgtcagttagcccgctggacgaaatgggggagtgagcaaagcaacatatctgat

SEQ ID NO: 160572 - DNA, 75 bp, synthetic construct
  source 1..75: mol_type = other DNA
ctggcggcctcaatgtcgaccgtgatgtatctctttggtgtggtgggcaacatgggcggaggtctgattgaccag

SEQ ID NO: 160573 - DNA, 75 bp, synthetic construct
  source 1..75: mol_type = other DNA
gccaccgctattatgacccgctgcgggggaggtatatcactcaggatccgattgggctgaaggggggatggaatt

SEQ ID NO: 160574 - DNA, 75 bp, synthetic construct
  source 1..75: mol_type = other DNA
ttacataaagaattaacatttcataaagaacacagcatatgggatatttttaaatctaacaattggcatcttgtt

SEQ ID NO: 160575 - DNA, 75 bp, synthetic construct
  source 1..75: mol_type = other DNA
gctactaaatttagcttttttgataaagctaaagacccgtgggtaattgacacgaaaatttgttcttccaaagaa

SEQ ID NO: 160576 - DNA, 75 bp, synthetic construct
  source 1..75: mol_type = other DNA
ttttagtaagtggatccttactggttacatcgccccataacatcaaattattctatcgactccaccgttacgacg

SEQ ID NO: 160577 - DNA, 75 bp, synthetic construct
  source 1..75: mol_type = other DNA
tgtgatgatcgtcgctggggcgttaatgtacgctatagaaggcgcatcaaacggatttaactcgttgggtacagc

SEQ ID NO: 160578 - DNA, 75 bp, synthetic construct
  source 1..75: mol_type = other DNA
tttgttttatggttttggtagtattactgctaccatttaagattccagctataaatagatatgtaatgacaaaga

SEQ ID NO: 160579 - DNA, 75 bp, synthetic construct
  source 1..75: mol_type = other DNA
aacagaccgttcgcgaaaaactgccgccgggattccagcgcagtgaattcctgatcgagaaaggcgcgatcgaca

SEQ ID NO: 160580 - DNA, 75 bp, synthetic construct
  source 1..75: mol_type = other DNA
tcttcaggagagtcattgtggacacgactgctaaataatatgaatacgataaatcttgtttcattttcggttcca

SEQ ID NO: 160581 - DNA, 75 bp, synthetic construct
  source 1..75: mol_type = other DNA
atgtaatatcaatcaatctcttgattattaataatcaagaagctgagatgaaaattgttaatgagccttctcgtg

SEQ ID NO: 160582 - DNA, 75 bp, synthetic construct
  source 1..75: mol_type = other DNA
caaggttgtattaccatacctagatatccatgatagctattacttaattgcatcggagctatgctctaattctac

SEQ ID NO: 160583 - DNA, 75 bp, synthetic construct
  source 1..75: mol_type = other DNA
ggcctgggcgcggctgcagatctggatcgatgcagtccggggtgagacgcccgggccgctgttcacccgcatccg

SEQ ID NO: 160584 - DNA, 75 bp, synthetic construct
  source 1..75: mol_type = other DNA
gtcctgcagctggggcagcctgcggcgccatcacgtgatggccgtgaccgaactgctgcgcgacaccggccgggc

SEQ ID NO: 160585 - DNA, 75 bp, synthetic construct
  source 1..75: mol_type = other DNA
aaaatgacatagataaaatcacagaaattgcgaatgcaaattattccggttcaaagttgattgaaaataatctga

SEQ ID NO: 160586 - DNA, 75 bp, synthetic construct
  source 1..75: mol_type = other DNA
ttttattacagtacgttgattggtttgtttaaacgcaaagttactatagtttactttgtaatggcttttcttgtc

SEQ ID NO: 160587 - DNA, 75 bp, synthetic construct
  source 1..75: mol_type = other DNA
gctatggcgaaggcgatgagtcctatggctatgacagctgtggctacctgaaggcgcagtctgcgggcgggcacc

SEQ ID NO: 160588 - DNA, 75 bp, synthetic construct
  source 1..75: mol_type = other DNA
cgggtgacggaagaacgtgactggggcggcgtggtctggcgttaccgttatgacgctgatggcctgtgtaccgcc

SEQ ID NO: 160589 - DNA, 75 bp, synthetic construct
  source 1..75: mol_type = other DNA
ataattgatacatattcatcaacagtttgtaacaacatagttgtcaacgaaatagatttatcaagtatcgttgat

SEQ ID NO: 160590 - DNA, 75 bp, synthetic construct
  source 1..75: mol_type = other DNA
aacacctgaagcagcacttaactttatgcgggaaattgttccagcggcgcgtcaacgtgcgagcgatgaattagc

SEQ ID NO: 160591 - DNA, 75 bp, synthetic construct
  source 1..75: mol_type = other DNA
aactgatttctgaagctgagattaactccagaaatcgttctcaccttaatttgcatgaatctttttctgatccta

SEQ ID NO: 160592 - DNA, 75 bp, synthetic construct
  source 1..75: mol_type = other DNA
tgcccctgttactttatttatttatttcaacagcagaagctgctgttgaaacacttaatatttctgcaaccatcg

SEQ ID NO: 160593 - DNA, 75 bp, synthetic construct
  source 1..75: mol_type = other DNA
taatatcatatgatgtaaacatcgatgattttaatttttttaaacaaaaattggaagccgcaaccagagctatag

SEQ ID NO: 160594 - DNA, 75 bp, synthetic construct
  source 1..75: mol_type = other DNA
taccccagatgaattgactgaaagagaggtgttgtcttttggaataaaggtttcaagattaagagaacgctttaa

SEQ ID NO: 160595 - DNA, 75 bp, synthetic construct
  source 1..75: mol_type = other DNA
atgagcgtaactgggaaggattttattttttttgctggtaagtgcatttctcacaacgatgaaatcggttacaga

SEQ ID NO: 160596 - DNA, 75 bp, synthetic construct
  source 1..75: mol_type = other DNA
atgatgtgtaacttattgattttaatggtgccgataataggagtcgaacctacgaccttcgcattacgaatgcgt

SEQ ID NO: 160597 - DNA, 75 bp, synthetic construct
  source 1..75: mol_type = other DNA
gatctgggagagattgatatcacaaagtttgagaaagagcagacgccgattcaggcggggcaagggtttgctctg

SEQ ID NO: 160598 - DNA, 75 bp, synthetic construct
  source 1..75: mol_type = other DNA
gcacatactcactaagaaaaattattgaattatgtgaaaaaattaccggtcatcacctcgaaattcaggttaacc

SEQ ID NO: 160599 - DNA, 75 bp, synthetic construct
  source 1..75: mol_type = other DNA
ttttcacatgcaaaccgctcaggtcggcatcatgttgaccatttacgcatgggtagtagcgctaatgtcattgcc

SEQ ID NO: 160600 - DNA, 75 bp, synthetic construct
  source 1..75: mol_type = other DNA
cgttgggctaggggccggtgtgtttgatgaagtgcgccaccagcatcgtgaatctgtctatctgacctctacccg

SEQ ID NO: 160601 - DNA, 75 bp, synthetic construct
  source 1..75: mol_type = other DNA
tgaatgcctcctcaacgattataacatagcgctaatcttcgaaagagatattcgccttgtgctggaagaactcaa

SEQ ID NO: 160602 - DNA, 75 bp, synthetic construct
  source 1..75: mol_type = other DNA
cctagccactgacctcgagaaaaaggcaaatttccacagatatctaacagccctcaaggaagccaagaaaaatat

SEQ ID NO: 160603 - DNA, 75 bp, synthetic construct
  source 1..75: mol_type = other DNA
gtacctactcactgagaaaaattattgaattgtgtgaaaaaatcactggtcatcaccttgagattcaggttaacc

SEQ ID NO: 160604 - DNA, 75 bp, synthetic construct
  source 1..75: mol_type = other DNA
tgaactgaaagaatacaacgtgaacgtggatatttatgatccatgggttgatgttgaagaagcctattatgagta

SEQ ID NO: 160605 - DNA, 75 bp, synthetic construct
  source 1..75: mol_type = other DNA
caccgactggatggctatctcacagaatactcagcaggaatgggatgtcatctctgagttactgaaacgaaccga

SEQ ID NO: 160606 - DNA, 75 bp, synthetic construct
  source 1..75: mol_type = other DNA
gggcgtcgcgtaagccagaatgaagagcttgctttgacaattcaactaatcacgtttttgcgcagcagtattgag

SEQ ID NO: 160607 - DNA, 75 bp, synthetic construct
  source 1..75: mol_type = other DNA
ctggagtgtgctgctgatgagcttgccagcgcgaaatttcttcgctattcatgtgaaattgagacactcaaggct

SEQ ID NO: 160608 - DNA, 75 bp, synthetic construct
  source 1..75: mol_type = other DNA
tcacctcagacaacttcactctacgttaaattctgggaagataactacctggcgagacaatctgaccgtatccac

SEQ ID NO: 160609 - DNA, 75 bp, synthetic construct
  source 1..75: mol_type = other DNA
ccggggagatccatacaacgaaaactcgctcaatgcccgctggggcgaaatccgcaatgctgttcgcatcgactt

SEQ ID NO: 160610 - DNA, 75 bp, synthetic construct
  source 1..75: mol_type = other DNA
gcatgggtgccatcgcttgcggcgaagaaacgcggtggcccgacgctgcgcgataccggtgcgctggcacgttcg

SEQ ID NO: 160611 - DNA, 75 bp, synthetic construct
  source 1..75: mol_type = other DNA
gttgatagcgacggcaacctgaccacccgcgcaaaacgggtggtgctggcgacgattctgcgccatcttgaatca

SEQ ID NO: 160612 - DNA, 75 bp, synthetic construct
  source 1..75: mol_type = other DNA
gagaaaaaagaaatatctctttttatgttaactatggcacttattatcagccacacaggtcgtagacccttgcaa

SEQ ID NO: 160613 - DNA, 75 bp, synthetic construct
  source 1..75: mol_type = other DNA
cggtaacatcggcaggaagtaagaataaccttgatcattatgcaaaaggtgagtttttacacattaaagactatc

SEQ ID NO: 160614 - DNA, 75 bp, synthetic construct
  source 1..75: mol_type = other DNA
ccatatgttaacaaatatgctcctgtcggttcgccaagaagaaataagctcatcaaatattattataaagttcgc

SEQ ID NO: 160615 - DNA, 75 bp, synthetic construct
  source 1..75: mol_type = other DNA
gtcaccacaaacccagtgcttttctaaatgcctctattattaaaccactgcatgtcgggaaggctaatacttata

SEQ ID NO: 160616 - DNA, 75 bp, synthetic construct
  source 1..75: mol_type = other DNA
atactttctggtggcactatccattctataaacataccaagcctgaatataaagagtacgactgggaacaaattc

SEQ ID NO: 160617 - DNA, 75 bp, synthetic construct
  source 1..75: mol_type = other DNA
attgcaattttatgaaaataataagaataatatttattcttttcgttttttagttgcattattaataacctttgc

SEQ ID NO: 160618 - DNA, 75 bp, synthetic construct
  source 1..75: mol_type = other DNA
agcaatccaggaagacagactgaaaagtggcgatataaagctcaacacctataaacagaaagccaaaccagtatc

SEQ ID NO: 160619 - DNA, 75 bp, synthetic construct
  source 1..75: mol_type = other DNA
aagaatgttaattctgaaaatattaatgctaatttatgctccataaatcataatttattggactctatcaagggt

SEQ ID NO: 160620 - DNA, 75 bp, synthetic construct
  source 1..75: mol_type = other DNA
ttgcagagttcgcaaaagcatatgtatggcatgagtgctttcatgatttatctgtagctttcagagtgctgagat

SEQ ID NO: 160621 - DNA, 75 bp, synthetic construct
  source 1..75: mol_type = other DNA
gatgaacgaggtacaacaaataatgctcatatcatcaatcacggcaatcaggaggtatatggcgggatttctaat

SEQ ID NO: 160622 - DNA, 75 bp, synthetic construct
  source 1..75: mol_type = other DNA
atggcagtacagatttcaggcgtgctgaaagacggtacaggaaaagcggtgccgggatgtgtcatccggctgaag

SEQ ID NO: 160623 - DNA, 75 bp, synthetic construct
  source 1..75: mol_type = other DNA
ttacaaatggtagacagcctgggctggagtgaagcagcttttggcctcggcgcatcactttttttcatcggttat

SEQ ID NO: 160624 - DNA, 75 bp, synthetic construct
  source 1..75: mol_type = other DNA
gtttaccgggcacgtggcgtgcatgtggtccggtaatatggacatctgatgcaggtacaagacaggcaggattat

SEQ ID NO: 160625 - DNA, 75 bp, synthetic construct
  source 1..75: mol_type = other DNA
atgttaactggctgcccgggcatttttgcggtttttatctttattattcagtttgttgtgcgaaaaaatgttaac

SEQ ID NO: 160626 - DNA, 75 bp, synthetic construct
  source 1..75: mol_type = other DNA
tgtcgtcgatctgttttttgaccgtgtccgtggcctgattgacaacatcgtccttagtgatttcgcgaccacagt

SEQ ID NO: 160627 - DNA, 75 bp, synthetic construct
  source 1..75: mol_type = other DNA
aaagcaaaaaaagcaggtattcccgttatattaattaatcgcgaaatacctgtggatgatgttgcactggtgcaa

SEQ ID NO: 160628 - DNA, 75 bp, synthetic construct
  source 1..75: mol_type = other DNA
tcaccggcactcatttcgataatgacaagcctgcttcgaagattattcttttccttgctccttttacatacggag

SEQ ID NO: 160629 - DNA, 75 bp, synthetic construct
  source 1..75: mol_type = other DNA
gcatttacattgtttaccctgccattaaagtaataactgatgcaattccattggataaaactgcccatagcttaa

SEQ ID NO: 160630 - DNA, 75 bp, synthetic construct
  source 1..75: mol_type = other DNA
gccggacttcctatattctttataatgagcggatatttcctgcttaaccgtaaaacggaaaatctttggtctggt

SEQ ID NO: 160631 - DNA, 75 bp, synthetic construct
  source 1..75: mol_type = other DNA
gacccgctgcaggggcggtatatcactcaggatccgattggactgaaggggggatggaatttttatcagtatccg

SEQ ID NO: 160632 - DNA, 75 bp, synthetic construct
  source 1..75: mol_type = other DNA
ggcgcttgagctggtcaggcataagattttggtgaatgcagtcgcgcctggggctatcgccacgccaatgaatgg

SEQ ID NO: 160633 - DNA, 75 bp, synthetic construct
  source 1..75: mol_type = other DNA
gctaacaaatggggaactaaaatccataagatgtactgcgacttcattctattgtgtaaaaacaacctcagcatt

SEQ ID NO: 160634 - DNA, 75 bp, synthetic construct
  source 1..75: mol_type = other DNA
aagaataactgaaattatgcttttagaagatgattgcgaagttgtagtcaaagatatgaagggcatacccagata

SEQ ID NO: 160635 - DNA, 75 bp, synthetic construct
  source 1..75: mol_type = other DNA
gtctcacgatgaattaactgaactatcaagaaaggttttgaatactcatgttaataaaggcagttcaatctcgaa

SEQ ID NO: 160636 - DNA, 75 bp, synthetic construct
  source 1..75: mol_type = other DNA
tttataaatttatttctgaaaataaaaaaatttctaacaataaagatttcaaatgggaaaatccaagttggggga

SEQ ID NO: 160637 - DNA, 75 bp, synthetic construct
  source 1..75: mol_type = other DNA
gatgcgctacgcttatcaggccttgtattatccctccagtgcagagaaaatcggccagttttctctgcctgcagt

SEQ ID NO: 160638 - DNA, 75 bp, synthetic construct
  source 1..75: mol_type = other DNA
tgacggtcagatattatatcagttctgctgatttaaccgcagagaagttcgccacagcaatccgaaaccactggc

SEQ ID NO: 160639 - DNA, 75 bp, synthetic construct
  source 1..75: mol_type = other DNA
tgaaatcagcggtacgcaccagtacggcaccttttccattgccagcaatttagcgaccaatatgttgctggaaaa

SEQ ID NO: 160640 - DNA, 75 bp, synthetic construct
  source 1..75: mol_type = other DNA
ggcgtggtttatgaagtgtgtctgaatggagctaaagaatcgatgcagggtcgaaactcagcatgcgaaagcaaa

SEQ ID NO: 160641 - DNA, 75 bp, synthetic construct
  source 1..75: mol_type = other DNA
aggatctggcaattatcaaatatatccatgagatatccgaaagggatttaaaaaagtcagagcttaaggaattct

SEQ ID NO: 160642 - DNA, 75 bp, synthetic construct
  source 1..75: mol_type = other DNA
ggatattgacgataagtcaacgttcaacaacagcggcaaactcatccttgataacagcaaaaacgccattcgctt

SEQ ID NO: 160643 - DNA, 75 bp, synthetic construct
  source 1..75: mol_type = other DNA
tggtctttgtgtctcgccgatgcgcgccgggcgcagctttatgggctcccattaccgctgagccagtacaacacc

SEQ ID NO: 160644 - DNA, 75 bp, synthetic construct
  source 1..75: mol_type = other DNA
ccacacagggcgctgatgtacgcccggaagctgaattagaccgcgcagatcgcatcaaggcggccttaaaggcaa

SEQ ID NO: 160645 - DNA, 75 bp, synthetic construct
  source 1..75: mol_type = other DNA
taggtgccgctattgttgatattccattgcaaccggtcagtaaaaatatctttgatgtggattcttatcctcttt

SEQ ID NO: 160646 - DNA, 75 bp, synthetic construct
  source 1..75: mol_type = other DNA
gtggatgccgtcctggcccatgccagagataaaggagatgggcttaagatgctgaaaccctatgatcgttcaacg

SEQ ID NO: 160647 - DNA, 75 bp, synthetic construct
  source 1..75: mol_type = other DNA
tgtctgaacttgagcaatcaggtgaacgccttgcacgaacaggtcgaacgcttgagcagcgatctgagccgatta

SEQ ID NO: 160648 - DNA, 75 bp, synthetic construct
  source 1..75: mol_type = other DNA
gaggaggtggcgcttgccgcgctgcgcctgcgcgatgccggtgagcctgtcgacctcgcattactgctgaccacc

SEQ ID NO: 160649 - DNA, 75 bp, synthetic construct
  source 1..75: mol_type = other DNA
gtggaacctgggtacaactcgtgaaagacaataaagaaggcaacgggggggcggaatcccacattgcctcccttc

SEQ ID NO: 160650 - DNA, 75 bp, synthetic construct
  source 1..75: mol_type = other DNA
ttgtcgaacgtgatgatgtcgtgcgcggcaagccttatcccgatccttatctgcttgccgcagagcggtttcatc

SEQ ID NO: 160651 - DNA, 75 bp, synthetic construct
  source 1..75: mol_type = other DNA
caaacgcactggcgaagaagagaccattccggaggggattgatcccggctgggcgtacaaccccggaatctcccg

SEQ ID NO: 160652 - DNA, 75 bp, synthetic construct
  source 1..75: mol_type = other DNA
attccggtggtcaccacacgcaaaaggtttatgagttctgtaaagagcgccttgggcgacgcatctgggctatca

SEQ ID NO: 160653 - DNA, 75 bp, synthetic construct
  source 1..75: mol_type = other DNA
agggttttcctcgctactcagcaaaacacggtcgacgcccaaaggttgccaatacgcgcgagtcaattctttcta

SEQ ID NO: 160654 - DNA, 75 bp, synthetic construct
  source 1..75: mol_type = other DNA
atgcacgaacagggatttccgcgcaaagcacccgccggtaaaggtcgccgcccccgtgttgcaatgagcagaaaa

SEQ ID NO: 160655 - DNA, 75 bp, synthetic construct
  source 1..75: mol_type = other DNA
gtgttaatttatacattaaacccttttgatgcttttaatcgattgatttgcgggcttacagttggagttgtttat

SEQ ID NO: 160656 - DNA, 75 bp, synthetic construct
  source 1..75: mol_type = other DNA
ctttactctttcacctacaacgtaggagctggagcgtttagcagatcgacgctgctgaaaaaattaaattccggc

SEQ ID NO: 160657 - DNA, 75 bp, synthetic construct
  source 1..75: mol_type = other DNA
acggcatgccgtataccgggcgatttgcccggactgtggggccgaggcgctggataatcaccacgccgggtacca

SEQ ID NO: 160658 - DNA, 75 bp, synthetic construct
  source 1..75: mol_type = other DNA
tggtgataaaccttattttgttatggaattggcagagtgtaacttatatgaagccatccgcaatggtatgaatta

SEQ ID NO: 160659 - DNA, 75 bp, synthetic construct
  source 1..75: mol_type = other DNA
tgattacagttatcagcgactgcgcgaccatattcgttttgttctgattgagtgcccgcaaaggtttgaaaacta

SEQ ID NO: 160660 - DNA, 75 bp, synthetic construct
  source 1..75: mol_type = other DNA
cggctggcggctggagcggtttgatgagcgccgggccgtgttccgccacggcaaacgccagctgacgctgaaaat

SEQ ID NO: 160661 - DNA, 75 bp, synthetic construct
  source 1..75: mol_type = other DNA
caggctgagtacaaacgcgagtacatccagttccatgctgtgatgattaacgccttcggctacgcagtacagagg

SEQ ID NO: 160662 - DNA, 75 bp, synthetic construct
  source 1..75: mol_type = other DNA
agataataaagaaaaaacaagtaatacacgttggattagtacagatgaagaacagcttatgaaggatgtttatca

SEQ ID NO: 160663 - DNA, 75 bp, synthetic construct
  source 1..75: mol_type = other DNA
aaaacaaaatttaagcctaatcacatgggcacagatggatatcgagcacccgaaatacatgatagcggtcttttt

SEQ ID NO: 160664 - DNA, 75 bp, synthetic construct
  source 1..75: mol_type = other DNA
cggccccggctggaaaatgcctgcggataaccggcgttcacaccaccgcagcgaatctggatatccgcatcccgt

SEQ ID NO: 160665 - DNA, 75 bp, synthetic construct
  source 1..75: mol_type = other DNA
gtcctactttgaatggaatagaacggtaacgaccttcaagtactcactgcaaaatacagcaagatcaaaagagat

SEQ ID NO: 160666 - DNA, 75 bp, synthetic construct
  source 1..75: mol_type = other DNA
cgaggcgctacgccagttgatgtcgtgggactggccgggcaacgtgcgcgagctggaaaacgtgattgagcgagc

SEQ ID NO: 160667 - DNA, 75 bp, synthetic construct
  source 1..75: mol_type = other DNA
tttttgcaggctcaggtccaactggtcatgcagtcatgttacaaaatgcgaaagatcgctgccaccgtaaatata

SEQ ID NO: 160668 - DNA, 75 bp, synthetic construct
  source 1..75: mol_type = other DNA
aaattatcttgaaatgacaggacaaacagaagatggggtacgaatcaccacaaacgcagaaaccagtgggcgtta

SEQ ID NO: 160669 - DNA, 75 bp, synthetic construct
  source 1..75: mol_type = other DNA
ccaaggttacaccttgcacgtaatcttttgaccgaagacggcgtgatttttatttctatggacgattcggaaata

SEQ ID NO: 160670 - DNA, 75 bp, synthetic construct
  source 1..75: mol_type = other DNA
tctgcgggttactgtggagttccagtggatgggcagctgaccctttaggaacgattaatatcaatttgcacggta

SEQ ID NO: 160671 - DNA, 75 bp, synthetic construct
  source 1..75: mol_type = other DNA
gtgcaattgccacgccaatgaacggcatggatgacggcgatgtgaagcccaatgcagagccatcgattcccctgc

SEQ ID NO: 160672 - DNA, 75 bp, synthetic construct
  source 1..75: mol_type = other DNA
ttgctaacggtactgacctgacggcgcagcagattgccaacatgaaccacatcgttgtgaacaactacaccaacg

SEQ ID NO: 160673 - DNA, 75 bp, synthetic construct
  source 1..75: mol_type = other DNA
ttgtggttacactgtctttattatcattcagtagcgtcgccaaaacgattactgccgtcggttcaaccatcgaca

SEQ ID NO: 160674 - DNA, 75 bp, synthetic construct
  source 1..75: mol_type = other DNA
atgaatactatctgttctttaattgttgtgatgacagtgtctttattatccttcagtggcgtcgccaaaacgatt

SEQ ID NO: 160675 - DNA, 75 bp, synthetic construct
  source 1..75: mol_type = other DNA
tcattgccgctctgtctttattgtccttcagtagcgtcgctaaaactgttactgccgtcggttcaaccattgaca

SEQ ID NO: 160676 - DNA, 75 bp, synthetic construct
  source 1..75: mol_type = other DNA
gaaggcggtctgacgcgcagcatggggtatgacgctgccgggcgcatcactgtgctgaccaacgagaacggcagc

SEQ ID NO: 160677 - DNA, 75 bp, synthetic construct
  source 1..75: mol_type = other DNA
ctgctcggggtacacgacgcggtatgagtacgaccggtacggtcaacaaatcgccgttcaccgggaggaaggcat

SEQ ID NO: 160678 - DNA, 75 bp, synthetic construct
  source 1..75: mol_type = other DNA
ggtggtgggataaatgcggctatcacatattctgagaccaagtctttacctacatcgggagtcagcaattcagta

SEQ ID NO: 160679 - DNA, 75 bp, synthetic construct
  source 1..75: mol_type = other DNA
caatgaaattggtgtttcaggcggctcactgacggcattgacttcacccttaacctcaacaactcccgtcgccga

SEQ ID NO: 160680 - DNA, 75 bp, synthetic construct
  source 1..75: mol_type = other DNA
tatcaagattattcaggtcgatggtctgaatcgtggcggcgctgcgggtgatgcaaacacgggtaatgtgggggg

SEQ ID NO: 160681 - DNA, 75 bp, synthetic construct
  source 1..75: mol_type = other DNA
gtgggggccgttagaaccgtttgacgattccatgccggagctgcttaaaaaggcggggatctataccataagcgc

SEQ ID NO: 160682 - DNA, 75 bp, synthetic construct
  source 1..75: mol_type = other DNA
atataacaaacgtgttagtcgccttaccattgtgcaggcccaaaacatgctgcttaaagcggttgaatctggcgt

SEQ ID NO: 160683 - DNA, 75 bp, synthetic construct
  source 1..75: mol_type = other DNA
cccaatccttgaaggccgtagtgaagaagatttgctcacagagttaatgctaaagcgtggcattgacttgagtgt

SEQ ID NO: 160684 - DNA, 75 bp, synthetic construct
  source 1..75: mol_type = other DNA
tttagttcgccagctggcgcttaacggtaagacgcgcgcaatacgggaacaagcgatgagaaaacttgatgagtt

SEQ ID NO: 160685 - DNA, 75 bp, synthetic construct
  source 1..75: mol_type = other DNA
atggcttccgttcaggtggaaacgcagcatcttcaggatgaatatgctgagaataaccttcggctggttatcatt

SEQ ID NO: 160686 - DNA, 75 bp, synthetic construct
  source 1..75: mol_type = other DNA
cattgcccctgaagtcatggcgttactggcagaaaaaaatgtaccgcagaccattttctctgtgttgaaaaaact

SEQ ID NO: 160687 - DNA, 75 bp, synthetic construct
  source 1..75: mol_type = other DNA
agggatcaatacccgcaaactcacacaaggcttccgtcaattattcggtaatagtatttatggctggttgcagga

SEQ ID NO: 160688 - DNA, 75 bp, synthetic construct
  source 1..75: mol_type = other DNA
attatcggaattcaagagaataagtatgctgaagctatccctcacttaaaaatagcggcagaaaagggtcagcga

SEQ ID NO: 160689 - DNA, 75 bp, synthetic construct
  source 1..75: mol_type = other DNA
atcgcaaaggcacaaggcggcgataaatctgcgcaaaaaggattgggaattgtttaccaggaaggggtaacgggg

SEQ ID NO: 160690 - DNA, 75 bp, synthetic construct
  source 1..75: mol_type = other DNA
atgctttctacatcaggaattcagaagctaaaaatgtagtgctggaaaacgctggctcattaacagtcgtcactg

SEQ ID NO: 160691 - DNA, 75 bp, synthetic construct
  source 1..75: mol_type = other DNA
gcaaacaagacgattattaaagataaaggaacaatgtcagttttaaccaatgctaaagctgatgcgacccgaata

SEQ ID NO: 160692 - DNA, 75 bp, synthetic construct
  source 1..75: mol_type = other DNA
gaacaaaacaggctcggtcaaaattcacaaggaagatgggaaaattcaggaagaacgcacttatcagagaaaaga

SEQ ID NO: 160693 - DNA, 75 bp, synthetic construct
  source 1..75: mol_type = other DNA
gacgtttataaagggggtatcagcaatggaacgacaattaagggcggtacttcacgcatagagggggggactgca

SEQ ID NO: 160694 - DNA, 75 bp, synthetic construct
  source 1..75: mol_type = other DNA
agatagcaccagacttaataatggcggcgttctggaggttcaggacggtggtgaggctaagcatgttgagcaaca

SEQ ID NO: 160695 - DNA, 75 bp, synthetic construct
  source 1..75: mol_type = other DNA
taagagggttaaatgttaaaaaggatgtcctctgctcaagagtaaagtttgaaagctttcagcaccttaaaaaca

SEQ ID NO: 160696 - DNA, 75 bp, synthetic construct
  source 1..75: mol_type = other DNA
ctgcgctggatatctccgtgcaggcgcagatcctcaatttactggtaacgctacaggaaaatcacgggctgactt

SEQ ID NO: 160697 - DNA, 75 bp, synthetic construct
  source 1..75: mol_type = other DNA
aagaatttgtcgatgataaccgggtgaaaggtaagcgtaaactgaccgccgtatgtagccatcagacgagaattg

SEQ ID NO: 160698 - DNA, 75 bp, synthetic construct
  source 1..75: mol_type = other DNA
gcgaccaatatgttgctggaaaatggcggtaatttattggtattagcaggtaccgaagctcgcgactccacggtt

SEQ ID NO: 160699 - DNA, 75 bp, synthetic construct
  source 1..75: mol_type = other DNA
tgttccgtaaaatatcctcagagctggatactcagatttcactgcgtgtggctggcgaaattaaattcatgctta

SEQ ID NO: 160700 - DNA, 75 bp, synthetic construct
  source 1..75: mol_type = other DNA
tacctacaaaagaaaaagacctagcggaaatagagactaatcagagcgtgcttattatcggtgcgaatggctctg

SEQ ID NO: 160701 - DNA, 75 bp, synthetic construct
  source 1..75: mol_type = other DNA
ttcacgcatagagggggggactgcaaatggaacaatcattgatggtggcagccaacgagtaacaactcaggggca

SEQ ID NO: 160702 - DNA, 75 bp, synthetic construct
  source 1..75: mol_type = other DNA
tatccactattgaacgtgtagaggtcgtgcgtggccctatgtcatcactgtatggtgcggatgcgatggggggcg

SEQ ID NO: 160703 - DNA, 75 bp, synthetic construct
  source 1..75: mol_type = other DNA
gtcatcttctttcaaccagcataggtgcatcgttattttcatttcctgtgttcacttctgcacattcgacacttc

SEQ ID NO: 160704 - DNA, 75 bp, synthetic construct
  source 1..75: mol_type = other DNA
caatgtcttgcagcacccgaaaatggaattattgtcatagacgagcctgaaattcatcttcacaaatctgtacaa

SEQ ID NO: 160705 - DNA, 75 bp, synthetic construct
  source 1..75: mol_type = other DNA
cgctgggcgcttttatgggttattcccattcacatatcggttttgatcgcggaggacatggcagtgtgggcagtt

SEQ ID NO: 160706 - DNA, 75 bp, synthetic construct
  source 1..75: mol_type = other DNA
gacagtcaacgataatggcaaagcgacagatatcgtccagaacagcggtgccgctctccagacgagcacggctaa

SEQ ID NO: 160707 - DNA, 75 bp, synthetic construct
  source 1..75: mol_type = other DNA
gaatgttcatggcggggtatctaatggaagtcttattgaatctggtggatatcaagatgtaggaagtcataacaa

SEQ ID NO: 160708 - DNA, 75 bp, synthetic construct
  source 1..75: mol_type = other DNA
agcgggcatcttggggtggggtatagcaacggtgctggtgtggaatccccgtggaacgcggtagctggtgtgaac

SEQ ID NO: 160709 - DNA, 75 bp, synthetic construct
  source 1..75: mol_type = other DNA
gcattacgccttctacggcagccgtactcaatatggcagcaacattaccgttggtatttgatgctgagctaaaca

SEQ ID NO: 160710 - DNA, 75 bp, synthetic construct
  source 1..75: mol_type = other DNA
cggtttcgttgatcttgggacctatgagtatgtcctgaaaagtgacggcaacagcaactggaacctgaccaatga

SEQ ID NO: 160711 - DNA, 75 bp, synthetic construct
  source 1..75: mol_type = other DNA
tccagacggtataccagccggggagcttcacaccgctcatccgcatcgaaacggagaacggcgagcgggagaaag

SEQ ID NO: 160712 - DNA, 75 bp, synthetic construct
  source 1..75: mol_type = other DNA
ggataaccgcatcgcggaggatgcgcactatgtctaccgacacgatgaatacggcaggctgacggagaagacgga

SEQ ID NO: 160713 - DNA, 75 bp, synthetic construct
  source 1..75: mol_type = other DNA
gcacgctcacggcgtggccggataaccgcatcgcggaagatgcgcactatgtctaccgctacgatgaatacggca

SEQ ID NO: 160714 - DNA, 75 bp, synthetic construct
  source 1..75: mol_type = other DNA
gggcagctgttcagacccgtaagctatacgccacaccgccagtgccggtagtgccggaatttgaaacatggttta

SEQ ID NO: 160715 - DNA, 75 bp, synthetic construct
  source 1..75: mol_type = other DNA
gagaaagcgcagcgccgcagcctggcggagaagctgcagcaggaagggagcgaggacgggcacggtgtggtattt

SEQ ID NO: 160716 - DNA, 75 bp, synthetic construct
  source 1..75: mol_type = other DNA
gtctaccgctacgatgaatacggcaggctgacggagaagacggaccgcattccggaaggggttatccggatgcac

SEQ ID NO: 160717 - DNA, 75 bp, synthetic construct
  source 1..75: mol_type = other DNA
gttacaaaagatgttccggcgtggtctgtcgtggcaggcaatccagcgaaggttgtgaaagaaataccaagagat

SEQ ID NO: 160718 - DNA, 75 bp, synthetic construct
  source 1..75: mol_type = other DNA
tgctagacagcgcaccgggtttgatgcccgcagggttaaaattgattgaacaacgacccgttgttgatcctggca

SEQ ID NO: 160719 - DNA, 75 bp, synthetic construct
  source 1..75: mol_type = other DNA
actcagatgaagaaggggcaaaagataccgcgcgtgaggtggttagccacggcgtacgtgcggagatcgtgcagc

SEQ ID NO: 160720 - DNA, 75 bp, synthetic construct
  source 1..75: mol_type = other DNA
gacgagcgcacccaccactatcactacgacagccagcaccgcctggtgttccacacgcggatacagcacggcgaa

SEQ ID NO: 160721 - DNA, 75 bp, synthetic construct
  source 1..75: mol_type = other DNA
agcttgatgaatggctggctcactataataatgaagcgaacccatcagggaaaaatgtgcagtggccgaacgccg

SEQ ID NO: 160722 - DNA, 75 bp, synthetic construct
  source 1..75: mol_type = other DNA
cagcatgattatcagctttatctggcaataaacgacatagaacacacgaaaacgaagtcgatgtccccgcagacc

SEQ ID NO: 160723 - DNA, 75 bp, synthetic construct
  source 1..75: mol_type = other DNA
ttttttaacccagcatcagattataagtggaatatagttgatacactattatcaaacaataaaaacgtttatata

SEQ ID NO: 160724 - DNA, 75 bp, synthetic construct
  source 1..75: mol_type = other DNA
gcggcaatggactacgactgggacggcgcggtggatgtgctggtgtccaaacagtcgggcagcgtgttcctgagc

SEQ ID NO: 160725 - DNA, 75 bp, synthetic construct
  source 1..75: mol_type = other DNA
ggcagtatgttgaagtggtgatcaacggcaaaacctacacctctgaaccgggcggcgcggtagtggtcgatccgg

SEQ ID NO: 160726 - DNA, 75 bp, synthetic construct
  source 1..75: mol_type = other DNA
attcacaacaaacatttacaagagagtttaaaaaaaacacaggctacacccccctgcagtacagaaaaactgacc

SEQ ID NO: 160727 - DNA, 75 bp, synthetic construct
  source 1..75: mol_type = other DNA
ggggggtagggatgattactggaagtatatgcataatattcatacatggtctttacctatttatggtcttcagag

SEQ ID NO: 160728 - DNA, 75 bp, synthetic construct
  source 1..75: mol_type = other DNA
cctctacaatacagaaaaactgaccactggacattctgccaatcccacaaggataaaaaaggtaatctatcgctt

SEQ ID NO: 160729 - DNA, 75 bp, synthetic construct
  source 1..75: mol_type = other DNA
ggacggttcgacggcgaacacgctgcgggcgagggtgaccgatgcgttcggtaatacgcttgccgggcagacggt

SEQ ID NO: 160730 - DNA, 75 bp, synthetic construct
  source 1..75: mol_type = other DNA
aaattcaagattaaaaaatggtttactagtttaggtgctagcagtagtaatacctgggatatcataaatacttca

SEQ ID NO: 160731 - DNA, 75 bp, synthetic construct
  source 1..75: mol_type = other DNA
cctgcgcattcggatactgccgcgtcactgatcctgccgaacgttaaaactattccatataccctgggtgcgttg

SEQ ID NO: 160732 - DNA, 75 bp, synthetic construct
  source 1..75: mol_type = other DNA
ctgtaggattaactatcgtatattcatttgctcacattggcatttctgctgtgtgtaatgctttcaagtatcatt

SEQ ID NO: 160733 - DNA, 75 bp, synthetic construct
  source 1..75: mol_type = other DNA
aatcgatggtgacgcatatttacgattatcgggatgtacaacaggcatttgaagagtcagttaacaacaaacgcg

SEQ ID NO: 160734 - DNA, 75 bp, synthetic construct
  source 1..75: mol_type = other DNA
tcgacaccgtcgagctgtctatcgatacgacactggttatggcgacgcaggattatgttgacgataaactcgcag

SEQ ID NO: 160735 - DNA, 75 bp, synthetic construct
  source 1..75: mol_type = other DNA
cacgagaaatttaatcctgaaactggtatatcagagcttggaacaggaaagtcctctggcttgtgcgtagagtat

SEQ ID NO: 160736 - DNA, 75 bp, synthetic construct
  source 1..75: mol_type = other DNA
gaacgtgacatttatcgccgatgtcagcacggcgaagatcgctgatctggtggtcattaaggatggttcagaggc

SEQ ID NO: 160737 - DNA, 75 bp, synthetic construct
  source 1..75: mol_type = other DNA
gcgattaacactgctaaatttattaacgcaggcgtgtttctgccatctggccaatacgtggtaaatacagaaatt

SEQ ID NO: 160738 - DNA, 75 bp, synthetic construct
  source 1..75: mol_type = other DNA
gcgggtgaaggtcaccgatgcgttcggtaatgcgcttgccggccagacggtcagcgtgacggcagacaatggcgc

SEQ ID NO: 160739 - DNA, 75 bp, synthetic construct
  source 1..75: mol_type = other DNA
atatgtgggtgatggaatatatgaacgtacatatatggcctaccaagaaggagaaaatttaacttcatttatgga

SEQ ID NO: 160740 - DNA, 75 bp, synthetic construct
  source 1..75: mol_type = other DNA
ccggatggcacggtggagatcagtgtcaccagccagacggcgggcaccagtacagtcaccgccagcatcaacaac

SEQ ID NO: 160741 - DNA, 75 bp, synthetic construct
  source 1..75: mol_type = other DNA
ggtgtgctgacggtggctggcaccgacccgtcagaaacgggaagctgggttgaatcaggtggcgtgtataccaca

SEQ ID NO: 160742 - DNA, 75 bp, synthetic construct
  source 1..75: mol_type = other DNA
aattcttcaatggggtgacggtcaggactcaccaatacttcaaaaaatgattgacgatctaaccgcttttccaca

SEQ ID NO: 160743 - DNA, 75 bp, synthetic construct
  source 1..75: mol_type = other DNA
agctattattgatatcatgaacactatgccctttgatgcggtgtctgttggtaatcacgagttcgatcacggtgt

SEQ ID NO: 160744 - DNA, 75 bp, synthetic construct
  source 1..75: mol_type = other DNA
gcgccgtaggagatggtttagatcatcctcttagcgaaaagttcagcacattaagtgctgctcagatggtttatc

SEQ ID NO: 160745 - DNA, 75 bp, synthetic construct
  source 1..75: mol_type = other DNA
cgcagccggacggtacggtggagatctttgtcaccagccagacggcgggcaccagtgcggtcaccgccagcatca

SEQ ID NO: 160746 - DNA, 75 bp, synthetic construct
  source 1..75: mol_type = other DNA
aacgcttttagcagtacggattattggacaagtactcagctcatgggagtacacgagaaatttaatcctgaaact

SEQ ID NO: 160747 - DNA, 75 bp, synthetic construct
  source 1..75: mol_type = other DNA
ttagcgcagcggccaagcggtggggtagtaccgcgaaaagtaggtacgttgtggggcgaatatggtaatttaaaa

SEQ ID NO: 160748 - DNA, 75 bp, synthetic construct
  source 1..75: mol_type = other DNA
cagccagagccggaacgtgatgtttatcgccgatgtcaggacggcgcagatcgcggacctggtggtcattaagga

SEQ ID NO: 160749 - DNA, 75 bp, synthetic construct
  source 1..75: mol_type = other DNA
ttcaaacaattacactatcaaaccaggtgaagtgagtccgcttggttcacagcttcgtatacgagaagttttagt

SEQ ID NO: 160750 - DNA, 75 bp, synthetic construct
  source 1..75: mol_type = other DNA
ctgcaccgtttaatgtgtccagagcgattaacaaggccttcctctgtttcagtccgccagattatcaggcagccg

SEQ ID NO: 160751 - DNA, 75 bp, synthetic construct
  source 1..75: mol_type = other DNA
cggttttggccacctggcgataccgcgtgtgggtcaggaggtgattgtagacttcctcaacggcgatccggacta

SEQ ID NO: 160752 - DNA, 75 bp, synthetic construct
  source 1..75: mol_type = other DNA
tgccgggcagacggtcagcgtgttggcgggcaacagcgcaacggttgctccgacgatgaccacaaagccggatgg

SEQ ID NO: 160753 - DNA, 75 bp, synthetic construct
  source 1..75: mol_type = other DNA
gtggcagacggttcgacggcgaatacgctgcaggtgaaggtcaccgatgctaacggcaatgcgcttgccgggcag

SEQ ID NO: 160754 - DNA, 75 bp, synthetic construct
  source 1..75: mol_type = other DNA
ttcatgtagctatggtcaaatgccgtcatctttagaattagcgcagcggccaagcggtggggtagtaccgcgaaa

SEQ ID NO: 160755 - DNA, 75 bp, synthetic construct
  source 1..75: mol_type = other DNA
aggagccgtacgttcaggaggatggtctgaaaacgccggtgtttatactgctacatggtcggcgcaaatggcggg

SEQ ID NO: 160756 - DNA, 75 bp, synthetic construct
  source 1..75: mol_type = other DNA
ggtgtttatactgctacatggtcggcgcaaatggcgggagactctcaccacgcgacgctgaagttgtctgaatgg

SEQ ID NO: 160757 - DNA, 75 bp, synthetic construct
  source 1..75: mol_type = other DNA
taaccgtcgctgtgacgctgaaagacgcgcacggtaacctggttgaagggggcgagtccttattgtctggtgata

SEQ ID NO: 160758 - DNA, 75 bp, synthetic construct
  source 1..75: mol_type = other DNA
gcgaatacgctgcaggtgaaggtcaccgatgctaacggtaatacgcttgccggacagacggtcagcgtgttggcg

SEQ ID NO: 160759 - DNA, 75 bp, synthetic construct
  source 1..75: mol_type = other DNA
tcaaagaccagtataaactaacaaaaaatgattatttgaagaaaatacctttaactgcacaattaattgcaaaat

SEQ ID NO: 160760 - DNA, 75 bp, synthetic construct
  source 1..75: mol_type = other DNA
gcatttaaagagcatattcaatcaagcaatgaatcttgaaggaaaaataagcagaaaaaaatacaatgagatttt

SEQ ID NO: 160761 - DNA, 75 bp, synthetic construct
  source 1..75: mol_type = other DNA
acgaaagggatgattctaactaactgctcctgtgttaaaaccactttcaattgggcagatttatcagaaagtgat

SEQ ID NO: 160762 - DNA, 75 bp, synthetic construct
  source 1..75: mol_type = other DNA
acacgtccatttgattggcggtggcggcgaagcaggtcccacgacgcgcacgccggaagtggcgctaagtcgcct

SEQ ID NO: 160763 - DNA, 75 bp, synthetic construct
  source 1..75: mol_type = other DNA
tttaaatggatattccgaatttcttggtgtcgatggcaacagaactgaaggcattccatccttggcattcagtca

SEQ ID NO: 160764 - DNA, 75 bp, synthetic construct
  source 1..75: mol_type = other DNA
ccattcatggcctgttaacctggatgggtagcatggtggggtctgtggtttctggtgtggcttcaaaaatcactg

SEQ ID NO: 160765 - DNA, 75 bp, synthetic construct
  source 1..75: mol_type = other DNA
atgagtagtaatatacatggaattagttgcactgcaaataattatttgaaacaagcctggaacaataaaaaaatg

SEQ ID NO: 160766 - DNA, 75 bp, synthetic construct
  source 1..75: mol_type = other DNA
atggaatatattgaaaacattaatgcgtgtgatgatgttttttctgagtattgtttagatgatgaaaatatgagt

SEQ ID NO: 160767 - DNA, 75 bp, synthetic construct
  source 1..75: mol_type = other DNA
ttttaaaaaagaatttattgatagttgcttgaatgacaaaaaatgcatactgcatttacccgagtttatatttaa

SEQ ID NO: 160768 - DNA, 75 bp, synthetic construct
  source 1..75: mol_type = other DNA
ccacgggggtgtctgtacctccgcgtgacttcactgtgcgtctgtatgagtccggtgccacggttcagggctgct

SEQ ID NO: 160769 - DNA, 75 bp, synthetic construct
  source 1..75: mol_type = other DNA
ccataaaactacagctttatagactagtatttgttgtggattttatttcaaagaaaataacgatgataaagcgaa

SEQ ID NO: 160770 - DNA, 75 bp, synthetic construct
  source 1..75: mol_type = other DNA
ggtatctccgaactttaattctcaggggattgcaaaccagtctggctcatcaagcgactcttgggtgaaactgaa

SEQ ID NO: 160771 - DNA, 75 bp, synthetic construct
  source 1..75: mol_type = other DNA
gatgattttgccaaagatgtggaaagcatgaactgggtttgtgtcaaaaacatcccgccgtctgacggtagcgcc

SEQ ID NO: 160772 - DNA, 75 bp, synthetic construct
  source 1..75: mol_type = other DNA
attattttattgtgatgaaaggtgccgatcattggtatcatgctaaaggtgagttttttgaaaactatggtaccg

SEQ ID NO: 160773 - DNA, 75 bp, synthetic construct
  source 1..75: mol_type = other DNA
tcaatcagatcattaaggcttacagccaccgcattgcaaaattacccgagttcatacgcataatggagacgcatt

SEQ ID NO: 160774 - DNA, 75 bp, synthetic construct
  source 1..75: mol_type = other DNA
tgactgacgcgctgacgcacctgcagcgggcgatccagttagagcgaactgtcggtgtgaaaaaggatattgaac

SEQ ID NO: 160775 - DNA, 75 bp, synthetic construct
  source 1..75: mol_type = other DNA
tgctggcactgatgacaggccagcgcctttcagatatttgcaaaatgcaattttcggatatccgggatggttatc

SEQ ID NO: 160776 - DNA, 75 bp, synthetic construct
  source 1..75: mol_type = other DNA
tgtgaatctggctaaggttctgaaggaccgaggggatttcacatggtgggattacaacgatcagtgcctgtcctg

SEQ ID NO: 160777 - DNA, 75 bp, synthetic construct
  source 1..75: mol_type = other DNA
caggcgaaggcgcggcaccggagcctggcggaggtgttgcaggaggacacgggtgtgacgctcccggcggagctg

SEQ ID NO: 160778 - DNA, 75 bp, synthetic construct
  source 1..75: mol_type = other DNA
gaacaggaagaatatatccccaggaaaattaatgttggtgttataaacacaccaacattaatccgatctgattat

SEQ ID NO: 160779 - DNA, 75 bp, synthetic construct
  source 1..75: mol_type = other DNA
atcttgatggggtatcaaacacatttgatactggtgtcagtgatttgcagtcacaggtaacggaatcattggaca

SEQ ID NO: 160780 - DNA, 75 bp, synthetic construct
  source 1..75: mol_type = other DNA
ccgtcgtgatgcccgtgaagatccgtttgcgtcgtccgggaaaagagtttcagcccaactgcctgacggcgcatc

SEQ ID NO: 160781 - DNA, 75 bp, synthetic construct
  source 1..75: mol_type = other DNA
gatctctctctggtcagccagcagtttctctcccttgaattccagcagatcctcgacaaaatggcctacctgacg

SEQ ID NO: 160782 - DNA, 75 bp, synthetic construct
  source 1..75: mol_type = other DNA
acgacaaaaaccagatgctgtacagcatgaagtgtgatttttttttgactgaacagacacccgtttctgtaaagt

SEQ ID NO: 160783 - DNA, 75 bp, synthetic construct
  source 1..75: mol_type = other DNA
gtaactgcaatttcttcagaaaattcggctcagagtattttgccaataactgatgatatcatattaaattatagc

SEQ ID NO: 160784 - DNA, 75 bp, synthetic construct
  source 1..75: mol_type = other DNA
taaatatactggacgagttaaatgaaaatttaggcttttccatttgggaaatggaagtcaggtttgcaatataca

SEQ ID NO: 160785 - DNA, 75 bp, synthetic construct
  source 1..75: mol_type = other DNA
ttgaaaactgtttcaagtaaatataatttgcagccaatgattgttaatgataagttctgtgtagaggttacatat

SEQ ID NO: 160786 - DNA, 75 bp, synthetic construct
  source 1..75: mol_type = other DNA
aagcggaatgagagcaacgcaacaggaagcgagaagtcagttggtgcagagatttgctgataaattcggtgagta

SEQ ID NO: 160787 - DNA, 75 bp, synthetic construct
  source 1..75: mol_type = other DNA
ttattcgatgcagtgataaaaaatcgttaattgagtacgcttcaaatgaattgattataaatccaaactcaaata

SEQ ID NO: 160788 - DNA, 75 bp, synthetic construct
  source 1..75: mol_type = other DNA
taaaggatgcaaatcaggcgataatgcagcaggttgggttgattgtaaaatattcagtgctagatgtttccgatc

SEQ ID NO: 160789 - DNA, 75 bp, synthetic construct
  source 1..75: mol_type = other DNA
gtggatccagaaagctaccttcgccatgtgcctggcgtcatagcagactggccggtcaaccgggtcagcgaactg

SEQ ID NO: 160790 - DNA, 75 bp, synthetic construct
  source 1..75: mol_type = other DNA
atgccgcccggtttcacccgctcttttgccgacagacttaataagctttgccagatcggggttaaagaagccgaa

SEQ ID NO: 160791 - DNA, 75 bp, synthetic construct
  source 1..75: mol_type = other DNA
tgactcataatgatacttggtatgaaacatgttatttagatggccagtgggatggtaatgtcagagtaacaactt

SEQ ID NO: 160792 - DNA, 75 bp, synthetic construct
  source 1..75: mol_type = other DNA
aaaggggcacagcaggcgctgtttgaactcggccacctgacgctggtgttcaatggtgacctgaatccctgccat

SEQ ID NO: 160793 - DNA, 75 bp, synthetic construct
  source 1..75: mol_type = other DNA
caggttgataccgcaaagccaaaagatgaaccttacaaactctctgatggtgggggactttaccttttgattatt

SEQ ID NO: 160794 - DNA, 75 bp, synthetic construct
  source 1..75: mol_type = other DNA
tgggggactttaccttttgattattggcggcttaagtaccgtgttgctggcaaggagaagttgcttgctcttggg

SEQ ID NO: 160795 - DNA, 75 bp, synthetic construct
  source 1..75: mol_type = other DNA
tattgaaaacattactgcgtgtgatgatgttttttctgagtattgtttagatgataatgaaaatatgagtatcca

SEQ ID NO: 160796 - DNA, 75 bp, synthetic construct
  source 1..75: mol_type = other DNA
ctcggggacaccgtttcaggagtatgggatgtggtggcaggagggggagatacacggattacagtgacaatgaga

SEQ ID NO: 160797 - DNA, 75 bp, synthetic construct
  source 1..75: mol_type = other DNA
ctatctgtccgataacgtcaaacagcgctatcaccagtgcatgaacatcgagtgctcggccacgttccgcacgct

SEQ ID NO: 160798 - DNA, 75 bp, synthetic construct
  source 1..75: mol_type = other DNA
gagactatcgcagattttaaaggttattgttggcttaattttataaaatttattgaaagcttgtgtgatgatgtt

SEQ ID NO: 160799 - DNA, 75 bp, synthetic construct
  source 1..75: mol_type = other DNA
atatattgaaaacattaatgcgtgtgatgatgttttttctgagtattgtttagatgatgaaaatataagtgtcca

SEQ ID NO: 160800 - DNA, 75 bp, synthetic construct
  source 1..75: mol_type = other DNA
atattgatattgttagagtgtccttgccgggcagaggttcagagtctatcacagattttaaaggttattattggt

SEQ ID NO: 160801 - DNA, 75 bp, synthetic construct
  source 1..75: mol_type = other DNA
aatactattttactttgttatctctgctttatttcaggttctcgctcgtcattagttgccatggttatcgcgttt

SEQ ID NO: 160802 - DNA, 75 bp, synthetic construct
  source 1..75: mol_type = other DNA
agttccatatttctaaatgcctgaaatgtgattcgcactttaaatttgaacgcaatgatgactatataccgcccc

SEQ ID NO: 160803 - DNA, 75 bp, synthetic construct
  source 1..75: mol_type = other DNA
ggctgcccaggctagggattgtctggcgccgggccgcgcccactttgcacatccgcgatccccataaagagcaga

SEQ ID NO: 160804 - DNA, 75 bp, synthetic construct
  source 1..75: mol_type = other DNA
cagttttaattagcatttataaaaatgatctaccgcaattttttgaggtggctctacgctctatttttcacgatc

SEQ ID NO: 160805 - DNA, 75 bp, synthetic construct
  source 1..75: mol_type = other DNA
gtctaaaggccgtgacctgcacgctgcgggtggtgcagacaacccggcaggtgttgatgataaagatctggttaa

SEQ ID NO: 160806 - DNA, 75 bp, synthetic construct
  source 1..75: mol_type = other DNA
gtctataacattaccgccaatctctctgtgatctcttttgacgacgcaatcaaaattggtcgtatcgtgcgtgag

SEQ ID NO: 160807 - DNA, 75 bp, synthetic construct
  source 1..75: mol_type = other DNA
agtttcttatgtgcagtttacaactgaccaacgtaagccttggtatatacaggcactgcgtcccgatggttcgcc

SEQ ID NO: 160808 - DNA, 75 bp, synthetic construct
  source 1..75: mol_type = other DNA
cctggaacgtcatgcagtcctataacagtcgcgatgatgaagtcggcggtaatatgtcactgacttatgacggaa

SEQ ID NO: 160809 - DNA, 75 bp, synthetic construct
  source 1..75: mol_type = other DNA
gcgatacaagatgcaagtttggcagattcaggaattgtcggtgaccgtggcgaactttatctttctggtctacca

SEQ ID NO: 160810 - DNA, 75 bp, synthetic construct
  source 1..75: mol_type = other DNA
ggcaacaatactggcataccgatgatgtcgaacgattaatgcaatttggctacagcagtagctggaagcgtctct

SEQ ID NO: 160811 - DNA, 75 bp, synthetic construct
  source 1..75: mol_type = other DNA
gccgccgtagtaggtattccgcacaatattaaaggtcaggcgatctacgcctacgtcacgcttaatcacggggag

SEQ ID NO: 160812 - DNA, 75 bp, synthetic construct
  source 1..75: mol_type = other DNA
cgcaattccggctgaacagcctgcaacaagggttaagccgaaccaaaaacttgttagaacagctgcttctgcttg

SEQ ID NO: 160813 - DNA, 75 bp, synthetic construct
  source 1..75: mol_type = other DNA
ctcaattatggtatcaggggaggcattctggcgcacagtgaaggagtcacgttaagccaggaattgggtgaaaca

SEQ ID NO: 160814 - DNA, 75 bp, synthetic construct
  source 1..75: mol_type = other DNA
gacgacatcggaaagctcagtactcagtttagtgatgcgtatatttacggaagagagtgcccactcagatactgt

SEQ ID NO: 160815 - DNA, 75 bp, synthetic construct
  source 1..75: mol_type = other DNA
agttcactttggtggttcggcggcttcgacttgtatcagtaggcagtgcttcgccgcaccccaaagggaacttac

SEQ ID NO: 160816 - DNA, 75 bp, synthetic construct
  source 1..75: mol_type = other DNA
gccgtattcacgctggatgaaatccatctggttcagcccctgcaggagagtttccggcgcaatgacagtctgtgc

SEQ ID NO: 160817 - DNA, 75 bp, synthetic construct
  source 1..75: mol_type = other DNA
cgatatttattgaactggtcgggaaaaacaacgaagaaagcctgaaaaatgacatggcattattccgcaccctcc

SEQ ID NO: 160818 - DNA, 75 bp, synthetic construct
  source 1..75: mol_type = other DNA
attctgggaaaaggcgcagtctcaaagttggggcatgtactgaaaaaaatgatggatgaggctgttaaaaaattg

SEQ ID NO: 160819 - DNA, 75 bp, synthetic construct
  source 1..75: mol_type = other DNA
tgccgccagcctggcgcttatcctgactgacgggattgtgaaagctgctactgggatctcatttattcaggaagc

SEQ ID NO: 160820 - DNA, 75 bp, synthetic construct
  source 1..75: mol_type = other DNA
aagtacaggatgaagtagcggcattaaatcagaagattgctgacgatgacaataagatacgttctaagcttaata

SEQ ID NO: 160821 - DNA, 75 bp, synthetic construct
  source 1..75: mol_type = other DNA
agacagcaagtgattacctgccacagacaacttggccaacaactcaattaccaccaggatatacttgtgcagaac

SEQ ID NO: 160822 - DNA, 75 bp, synthetic construct
  source 1..75: mol_type = other DNA
aaccgccaccgctattatgacccgctgcaggggcggtatatcactcaggatccgattggactgaaggggggatgg

SEQ ID NO: 160823 - DNA, 75 bp, synthetic construct
  source 1..75: mol_type = other DNA
gccgtctgagagatgcgttccggtatatccggaagcactgggttgcgttgtgcaacttctgtgatgatggtctgg

SEQ ID NO: 160824 - DNA, 75 bp, synthetic construct
  source 1..75: mol_type = other DNA
ggttaccgaaatacgcgggttgccggtgtctgaacgcctggcggtcaggcaaatgcagagtaaaccgctactgac

SEQ ID NO: 160825 - DNA, 75 bp, synthetic construct
  source 1..75: mol_type = other DNA
tccgctgaatccggttcagtatatagattcaatgggactggcatcaaaatatggacacttaaataatggcggata

SEQ ID NO: 160826 - DNA, 75 bp, synthetic construct
  source 1..75: mol_type = other DNA
gcagcctggcggagaagctgcagcaggaagggagcgaggacgggcacggcgtggtatttccggctgaactggtgc

SEQ ID NO: 160827 - DNA, 75 bp, synthetic construct
  source 1..75: mol_type = other DNA
gactcatgcccgctcgcagtttgactacgacgataatgagagtggtcaatcgtatcgttttctctattccaaacg

SEQ ID NO: 160828 - DNA, 75 bp, synthetic construct
  source 1..75: mol_type = other DNA
tcgaataccttacctgcgggaacatacaaagttgatgtgatgatcaacggcatgctcttcgaacgccaggaagtt

SEQ ID NO: 160829 - DNA, 75 bp, synthetic construct
  source 1..75: mol_type = other DNA
ttaaataatggcggatatggagcgagacccaacaaaccgcctacgcccgatccaagtaagttgccagacatagcg

SEQ ID NO: 160830 - DNA, 75 bp, synthetic construct
  source 1..75: mol_type = other DNA
ccagcacctgaacagcctgcagtatgaccgcgattacacctggaacgacaacggcgaactcatccgcatcagcag

SEQ ID NO: 160831 - DNA, 75 bp, synthetic construct
  source 1..75: mol_type = other DNA
tggtggaccgcttcgggcgcacacagacgttccaccgcgaagccgccggtgaattcagcggcgaaatcaccggcg

SEQ ID NO: 160832 - DNA, 75 bp, synthetic construct
  source 1..75: mol_type = other DNA
tgggatggctttaatgccagaaacggaaaggttaatagtggaatggctcagtttatctagtaccccattaaatct

SEQ ID NO: 160833 - DNA, 75 bp, synthetic construct
  source 1..75: mol_type = other DNA
gtttcagcagaaaaatgattctggcgttgttatcagtaaagccgtgtcggctgacggggtcagtgtatcgaaatc

SEQ ID NO: 160834 - DNA, 75 bp, synthetic construct
  source 1..75: mol_type = other DNA
gaccgctgctatttatcatttcgtcaatttaaaaccaatcgtcgtcatcaacatgactattattttgacttcttt

SEQ ID NO: 160835 - DNA, 75 bp, synthetic construct
  source 1..75: mol_type = other DNA
ttttgatatcaaaaaaaacgagagtgagatttatgatgaaaatgacgatcagatgattaatagttttgaagactt

SEQ ID NO: 160836 - DNA, 75 bp, synthetic construct
  source 1..75: mol_type = other DNA
gagatttatgatgaaaatgacgatcagatgattaatagttttgaagacttgcctgtaaaaattgagttggtcttg

SEQ ID NO: 160837 - DNA, 75 bp, synthetic construct
  source 1..75: mol_type = other DNA
atggagtattgagtccagctcaaccactgataagaatatggacaggggaattaaatatttggttagataaagtca

SEQ ID NO: 160838 - DNA, 75 bp, synthetic construct
  source 1..75: mol_type = other DNA
gaacataatgtggttgaacagttgcttgggcacacattaggcggtgttgccggggtttataacagaagccagtat

SEQ ID NO: 160839 - DNA, 75 bp, synthetic construct
  source 1..75: mol_type = other DNA
ccacaacacagggagcgaataatgacaattgcagagcgaatttataatgatggatggctgttggggagggagaaa

SEQ ID NO: 160840 - DNA, 75 bp, synthetic construct
  source 1..75: mol_type = other DNA
ccacaacaaagggagcgaataatgacgattgcagagcgaattcataatgatggatggctgttagggatggaaaag

SEQ ID NO: 160841 - DNA, 75 bp, synthetic construct
  source 1..75: mol_type = other DNA
gcgatgcaggctggcaacaatactatcaggtcattgaactggcggttgcacgtaaaaataatccgcaggccacca

SEQ ID NO: 160842 - DNA, 75 bp, synthetic construct
  source 1..75: mol_type = other DNA
tgttggcgtggtgcagtctggttataacgatccagctgcggctctgattatcaccgatcttctcgatcgcattgc

SEQ ID NO: 160843 - DNA, 75 bp, synthetic construct
  source 1..75: mol_type = other DNA
ttattccaacgttgatgtggtttttactcctggagccccattggacttcaaaaagatgaatgaaattataaccag

SEQ ID NO: 160844 - DNA, 75 bp, synthetic construct
  source 1..75: mol_type = other DNA
catgttatggatgaagttaatgtatacacttcgttgtttgttttctttgcaacgaactattggaccggatatcac

SEQ ID NO: 160845 - DNA, 75 bp, synthetic construct
  source 1..75: mol_type = other DNA
atctgattcagcctttgcaggagacttttcgccgcaatgacagtctgtgtcgcctggttgaagacccggtcttca

SEQ ID NO: 160846 - DNA, 75 bp, synthetic construct
  source 1..75: mol_type = other DNA
caggcgggctttatccgggcccttccgcacttcagctgtatccgtgaagtcctgtctcctgggccctcagaggag

SEQ ID NO: 160847 - DNA, 75 bp, synthetic construct
  source 1..75: mol_type = other DNA
ctattaccgggcgcaggagggtgacgctgcttaccgatggtcggcgctgtgagcgactggcaccttgccgccttc

SEQ ID NO: 160848 - DNA, 75 bp, synthetic construct
  source 1..75: mol_type = other DNA
tgattcaggccattaccgggcgcagacgggtgacgctgattgcggaggggcgacgctgtgagcgcctggctccct

SEQ ID NO: 160849 - DNA, 75 bp, synthetic construct
  source 1..75: mol_type = other DNA
ccgctgagtttggcgtgtcggtacgcacgctgcggcgcgattttcgtgagcggctgatgtatctggacctggagt

SEQ ID NO: 160850 - DNA, 75 bp, synthetic construct
  source 1..75: mol_type = other DNA
tggaggattcgggaatgtctgttgttgcacctgctgtatacgttggaacctggcacaaatacaactgtggaagca

SEQ ID NO: 160851 - DNA, 75 bp, synthetic construct
  source 1..75: mol_type = other DNA
ttgcgatctaccgctttggcacaaagaacgtctacggtgaagcgcaattgcagttcgtcaggaagacgaatgtcg

SEQ ID NO: 160852 - DNA, 75 bp, synthetic construct
  source 1..75: mol_type = other DNA
aaaatcagctatgccataacctgcttctcgcatccccattgtttgagaaagcgaaagctgcggttaatgagaggg

SEQ ID NO: 160853 - DNA, 75 bp, synthetic construct
  source 1..75: mol_type = other DNA
gtcagagtagcggcgcggcactggtggcgctgatgctaaatcagttcggtgataatggtacgcacgtttcgctga

SEQ ID NO: 160854 - DNA, 75 bp, synthetic construct
  source 1..75: mol_type = other DNA
aggcgattgtcacccgcagcccgctgatgctgcgcttgctggaacaggcgcggctggtggcacaatcagacgtta

SEQ ID NO: 160855 - DNA, 75 bp, synthetic construct
  source 1..75: mol_type = other DNA
cagaaaggacgccatttctcaggccatcgaggccaacaactacatcgaccaaaattaccttccgtcagcgctgct

SEQ ID NO: 160856 - DNA, 75 bp, synthetic construct
  source 1..75: mol_type = other DNA
cacacctgtcccgccggatgatggcggcgacacacccgtcccgccggatgatggcggtgatacacccgtcccgcc

SEQ ID NO: 160857 - DNA, 75 bp, synthetic construct
  source 1..75: mol_type = other DNA
agaggaatatcagttacccattaatgaacatagttcaaaagccgctattcacgggctgcttgcctggcgagactg

SEQ ID NO: 160858 - DNA, 75 bp, synthetic construct
  source 1..75: mol_type = other DNA
ctattatcttaggagttgatactgctagaaatagtgtcgctgaggatgtgattctttctgaattggaaagagaat

SEQ ID NO: 160859 - DNA, 75 bp, synthetic construct
  source 1..75: mol_type = other DNA
ttgaaatcattattcagtcggttaacgggaaaagcggttagccggacagcttttgtcgaacatcttggtcatgaa

SEQ ID NO: 160860 - DNA, 75 bp, synthetic construct
  source 1..75: mol_type = other DNA
ccattagctatggatttagcccttgtaacaggacaacgtcgcgaagacggtgatgctgccaacttactgatttag

SEQ ID NO: 160861 - DNA, 75 bp, synthetic construct
  source 1..75: mol_type = other DNA
ttattcctttgttcttcgttgctgccatgtttaaaccgatagaaaaattaacttctcggattgttataacggggt

SEQ ID NO: 160862 - DNA, 75 bp, synthetic construct
  source 1..75: mol_type = other DNA
aatgaacttgtcatcaaatcgaatctagaaaaagctgccactataactgaagcccaggccttggttagaaatgta

SEQ ID NO: 160863 - DNA, 75 bp, synthetic construct
  source 1..75: mol_type = other DNA
tgaatcaggcccgcgcagagcttgaggcagcaggaaagccgtttacggaacaggatgtggcacagcgggcctaca

SEQ ID NO: 160864 - DNA, 75 bp, synthetic construct
  source 1..75: mol_type = other DNA
tatacccgattgatgcaactcctgacaacattagaaagctatccacggacagggatgcactgaacgaactacaca

SEQ ID NO: 160865 - DNA, 75 bp, synthetic construct
  source 1..75: mol_type = other DNA
aaaatccacctgtaccactgcgaccatcgcggcctgccgctggcgctcatcagcacggaaggggcaacagcgtgg

SEQ ID NO: 160866 - DNA, 75 bp, synthetic construct
  source 1..75: mol_type = other DNA
tctcccgcctgatcaacggcccgctgtccctgcgccagatttactttgccagcagtaacggtccggcgcccgatc

SEQ ID NO: 160867 - DNA, 75 bp, synthetic construct
  source 1..75: mol_type = other DNA
gatcttaatgatgctcagttgaaatatgccagcgatgtcgaaggccgtattcagcggcgtattgaagcaatcctg

SEQ ID NO: 160868 - DNA, 75 bp, synthetic construct
  source 1..75: mol_type = other DNA
actgcgtctgcgcctggcacaacaaggtttgcccaaaggcggcgcggtcggtttcgaactactcgatcaggaaaa

SEQ ID NO: 160869 - DNA, 75 bp, synthetic construct
  source 1..75: mol_type = other DNA
agcgcggtgagatcagaaagcgctatcgtgaaggtcaggaagatcagctgggggcactgggcctggtcactaacg

SEQ ID NO: 160870 - DNA, 75 bp, synthetic construct
  source 1..75: mol_type = other DNA
acttgagtaagccattaggatatctggttggcgacattgtcaataaagcaattccatttcttcttttaccagtaa

SEQ ID NO: 160871 - DNA, 75 bp, synthetic construct
  source 1..75: mol_type = other DNA
tggaaacaccggagcagattgtgtcgcatattctgtctgatagacacctccccgggaaacagagtgtcattgtgg

SEQ ID NO: 160872 - DNA, 75 bp, synthetic construct
  source 1..75: mol_type = other DNA
tcaaagagtttctgaacacatcagggatggagtccctccctgtcaccttgctcgatgggcagctcgtgatggcag

SEQ ID NO: 160873 - DNA, 75 bp, synthetic construct
  source 1..75: mol_type = other DNA
aacagacgcacatacacacaatgccccacctgccataaaaggtaatgcggggtacaaagagagcattggtggcgc

SEQ ID NO: 160874 - DNA, 75 bp, synthetic construct
  source 1..75: mol_type = other DNA
gatacaaagagagcattggtggcgcaaagaatttcaataacaaaatcctcaaacatataaaaagttatctaatta

SEQ ID NO: 160875 - DNA, 75 bp, synthetic construct
  source 1..75: mol_type = other DNA
gttggggcgaacctgggggcatggcgtttccgtgcagactggcaaagtgattatcagcacacccgcagcaacgat

SEQ ID NO: 160876 - DNA, 75 bp, synthetic construct
  source 1..75: mol_type = other DNA
cgttttcgttaccggaagatattctgaagggcgagttaagaccattaaatttgaatacaaacaatgaattaacct

SEQ ID NO: 160877 - DNA, 75 bp, synthetic construct
  source 1..75: mol_type = other DNA
attcgttcactgttgagaagtagccgaccatctggtctggctcaggcgattatggaagtgggccgggtcaacaag

SEQ ID NO: 160878 - DNA, 75 bp, synthetic construct
  source 1..75: mol_type = other DNA
tttgcaacagtgccattagcagtctggataaactggatgagccaccggcactgatacaattgaatcgtcgggtaa

SEQ ID NO: 160879 - DNA, 75 bp, synthetic construct
  source 1..75: mol_type = other DNA
cacctgtcactgccgaagcagtaaaactttcttttgagcggctactaaaaatcggccagggccagcagaagcatt

SEQ ID NO: 160880 - DNA, 75 bp, synthetic construct
  source 1..75: mol_type = other DNA
aagaacttcaaatcaagccagtagtgaatggcattgaagatgtattaaaacatatcgatactgtatttttaccca

SEQ ID NO: 160881 - DNA, 75 bp, synthetic construct
  source 1..75: mol_type = other DNA
aaaagctccgatagaattgttcaagttgatgatttttatgttcctcctggagatgaaatcgatactcaagatgaa

SEQ ID NO: 160882 - DNA, 75 bp, synthetic construct
  source 1..75: mol_type = other DNA
attgttttcaagctaaaagattgcctatcttcagaggacgctccacattacttgagatttcgcgttaaactcaac

SEQ ID NO: 160883 - DNA, 75 bp, synthetic construct
  source 1..75: mol_type = other DNA
tgtggattgcctgtgccgtgctggcggggctggcgctgacgattggcctggtgctatatgcgctgcgctcgaata

SEQ ID NO: 160884 - DNA, 75 bp, synthetic construct
  source 1..75: mol_type = other DNA
atgccggaagtcggtcagcgtctgcgcgttggcgggatggtgatgccgggtagtgtgcagcgcgatcccaattcg

SEQ ID NO: 160885 - DNA, 75 bp, synthetic construct
  source 1..75: mol_type = other DNA
cggtcggtgccgcatggggaaattgaagctgccagagcctatggtttctcaacctttaaaatgtatcgctgcatt

SEQ ID NO: 160886 - DNA, 75 bp, synthetic construct
  source 1..75: mol_type = other DNA
gcaaagggcgaggccggtgttgccgggccgcgtggtgaaaccggcgggcaggggccacggggggaacggggtgag

SEQ ID NO: 160887 - DNA, 75 bp, synthetic construct
  source 1..75: mol_type = other DNA
attataaactgcttattagttatattttttttgaaaattagtgcagagataaatattctaatattatcacaagct

SEQ ID NO: 160888 - DNA, 75 bp, synthetic construct
  source 1..75: mol_type = other DNA
tgcctgaagaagatgataatggagaagagattgatgaatttacttatgttaaagaggctataaaatctcacccgg

SEQ ID NO: 160889 - DNA, 75 bp, synthetic construct
  source 1..75: mol_type = other DNA
aaatgaatagagatgatttaaaagaaagagcaccacaggtgttgaatgacttgatcgaaaaaattaaggggatac

SEQ ID NO: 160890 - DNA, 75 bp, synthetic construct
  source 1..75: mol_type = other DNA
aagagaacaccggtgccgatgctgaattgatgcttgcggatatcatcgaagcgcgcgacggtagtgaggctgcac

SEQ ID NO: 160891 - DNA, 75 bp, synthetic construct
  source 1..75: mol_type = other DNA
cagggaaataattcctggggcatgcatggtcagataggctcaaatctcaactatgggaaaaatctggaattttct

SEQ ID NO: 160892 - DNA, 75 bp, synthetic construct
  source 1..75: mol_type = other DNA
tttattccaggaacggaaggtattgagttgtttaataactcaggaacattagtaactacgttaaataaagcgcca

SEQ ID NO: 160893 - DNA, 69 bp, synthetic construct
  source 1..69: mol_type = other DNA
atgaggcgctttgccggagcttgtcgtttcgttttcaaccgtgctctggcgcttcagaatgagaatcat

SEQ ID NO: 160894 - DNA, 75 bp, synthetic construct
  source 1..75: mol_type = other DNA
tttatgagcttggcggtggtgctgtctctgagtttaccaatggaattatcaaggatttcaataatcctcaagctc

SEQ ID NO: 160895 - DNA, 75 bp, synthetic construct
  source 1..75: mol_type = other DNA
tgatgactgttactgacagcaaagccagtggcgaaagttaccaggggaaaacccgctctgtaggcggcggtttat

SEQ ID NO: 160896 - DNA, 75 bp, synthetic construct
  source 1..75: mol_type = other DNA
atcaacgcacctggggccaatgttagtattgaccagacattgtggaagcttaactcgtcttctcaaatgcaaaat

SEQ ID NO: 160897 - DNA, 75 bp, synthetic construct
  source 1..75: mol_type = other DNA
ccattcttcatggttccgagcctgtaagccaggcttacaagttgcctcccatgtcatccaacgcagtaaacgacg

SEQ ID NO: 160898 - DNA, 75 bp, synthetic construct
  source 1..75: mol_type = other DNA
cgttccaccaatacaggctgatgtcgcacaagcaattgaaaatctcaagcagaagttagtggaatgcaatcgcta

SEQ ID NO: 160899 - DNA, 75 bp, synthetic construct
  source 1..75: mol_type = other DNA
gcccgctttacccctggcgatgggccagtacgaggtactattgagattagggctggacggaacattttctggtgt

SEQ ID NO: 160900 - DNA, 75 bp, synthetic construct
  source 1..75: mol_type = other DNA
tgattgggggaattatcatgaaatttaccttcagcaaggagatggtttttttttaatgaacccctattttctctc

SEQ ID NO: 160901 - DNA, 75 bp, synthetic construct
  source 1..75: mol_type = other DNA
gagctgccgcaggaggatgtggatgatatcgtagctttcctgcacagtctgaacggggtgtacacgccgtatatg

SEQ ID NO: 160902 - DNA, 75 bp, synthetic construct
  source 1..75: mol_type = other DNA
agacttcgatcatttcgacggcgacagacgaggtatcggtgattgtctggatgaggccgagcaagagcttatcgt

SEQ ID NO: 160903 - DNA, 75 bp, synthetic construct
  source 1..75: mol_type = other DNA
aagcgatgatgcagtggtggtcggattatctgaatgcttgcagggaaacatatataccaccatatatctgggata

SEQ ID NO: 160904 - DNA, 75 bp, synthetic construct
  source 1..75: mol_type = other DNA
aacgctggtttcagataaaagtgaacagattagcggtattgttggtgaagatgggcagttatatatcagtaggat

SEQ ID NO: 160905 - DNA, 75 bp, synthetic construct
  source 1..75: mol_type = other DNA
ggcatcgcatgttaatgcccgctacgccagttatatggtgctgtttattgctttttcagccacatttcttccgat

SEQ ID NO: 160906 - DNA, 75 bp, synthetic construct
  source 1..75: mol_type = other DNA
ggttttaccataatgtgtggtccatttttctccgtgatgccgttcccttcagttggattacattcatttagtcat

SEQ ID NO: 160907 - DNA, 75 bp, synthetic construct
  source 1..75: mol_type = other DNA
tgtgattatgctccagcgaaaatacagaacatggttaatccaaaaatgattaatgcatgttttacggttaaagag

SEQ ID NO: 160908 - DNA, 75 bp, synthetic construct
  source 1..75: mol_type = other DNA
gggttagaggtaatcacaacaatatctggacaaccagatattagctatgttgatcatcttttcaattgtacttat

SEQ ID NO: 160909 - DNA, 75 bp, synthetic construct
  source 1..75: mol_type = other DNA
agttcgctcagaaccagaagcttaagagctttttcactacacctgcaaaaccctttaagcgcgcaatcgcgcagg

SEQ ID NO: 160910 - DNA, 75 bp, synthetic construct
  source 1..75: mol_type = other DNA
atggtaaatctccctcaggaattggggtcacctgatgtatgggctggtggaggtattggacttattgcaggtctg

SEQ ID NO: 160911 - DNA, 75 bp, synthetic construct
  source 1..75: mol_type = other DNA
atgccgcattgttaatcgcgttgatgatgatcacttacatcccgcaaatatccttgttcattccacagctactag

SEQ ID NO: 160912 - DNA, 75 bp, synthetic construct
  source 1..75: mol_type = other DNA
atgggtgcgctgattttttctggcggtgggcaggcatccagttgcaggtttactggctgccattgcaggcgtagg

SEQ ID NO: 160913 - DNA, 75 bp, synthetic construct
  source 1..75: mol_type = other DNA
ttatcgtgttcagattgtttggtcgtgaatggtcatttgacctcaaggacaggacccgaacagacaaccacacag

SEQ ID NO: 160914 - DNA, 75 bp, synthetic construct
  source 1..75: mol_type = other DNA
tttggggcgtaggtaaaaaactggtccttacaaccatgacggctaaccaacatctccataaaaatatgctcctgc

SEQ ID NO: 160915 - DNA, 75 bp, synthetic construct
  source 1..75: mol_type = other DNA
tagatgctcagccgctcctgctggtagactgtgaagcaaggagtcgcgaagcgctggaaaaaaacctgacgcgga

SEQ ID NO: 160916 - DNA, 75 bp, synthetic construct
  source 1..75: mol_type = other DNA
cattctgcaaggctacgctgatggaatgaatgcctggattgataaggtaaataccaatccagagatgaaccgccc

SEQ ID NO: 160917 - DNA, 75 bp, synthetic construct
  source 1..75: mol_type = other DNA
caggcccgtcaggatacagaaacgctcgccggggaaatacagcaggatgcagaagaaattgcgagtaatgtgcag

SEQ ID NO: 160918 - DNA, 75 bp, synthetic construct
  source 1..75: mol_type = other DNA
taatccagaatcatcgacagaatctgttggtatcggtgcaggtgttgacgcttcagttatgactctggcttgtag

SEQ ID NO: 160919 - DNA, 75 bp, synthetic construct
  source 1..75: mol_type = other DNA
tcagccatgctttcgtgggtatgtaattatcactacgttcaatatgtcgatctccaagaaaataaattagatgac

SEQ ID NO: 160920 - DNA, 75 bp, synthetic construct
  source 1..75: mol_type = other DNA
ttacagggtctggcccggctgctagtcagtggaaacagggtggcatattccgagatgtagtcatatcatccgacg

SEQ ID NO: 160921 - DNA, 75 bp, synthetic construct
  source 1..75: mol_type = other DNA
cagttcgtcaggaagacgaacgtcggtgtcgttaagtttgaacaaagtaatgaaaagtcatcggtacgtgcggac

SEQ ID NO: 160922 - DNA, 75 bp, synthetic construct
  source 1..75: mol_type = other DNA
cgccgttcttgcctgtggagagatggtgcagtcaggccgcccgttgaagcaggaacccaccgaaatgattcaggc

SEQ ID NO: 160923 - DNA, 75 bp, synthetic construct
  source 1..75: mol_type = other DNA
cccggcagatgacgtggagccgctacgggcagttgctggcgttcactgactgctcgggctaccagacccgctatg

SEQ ID NO: 160924 - DNA, 75 bp, synthetic construct
  source 1..75: mol_type = other DNA
tattccggtcgccgccggtattttgtggccgttcactggaacactgcttaacccggtagttgccggagcggcaat

SEQ ID NO: 160925 - DNA, 75 bp, synthetic construct
  source 1..75: mol_type = other DNA
tcttattttgtaataccatatatgtttggggctaattatattgcatcttatgatatattaattattttgcttttt

SEQ ID NO: 160926 - DNA, 75 bp, synthetic construct
  source 1..75: mol_type = other DNA
ctactggccttaactaacttgggttttgataacgttcttattaatgagtttaatcaaaatgagaaacataataaa

SEQ ID NO: 160927 - DNA, 75 bp, synthetic construct
  source 1..75: mol_type = other DNA
tctcaaaaatttttagtggcaatccttttttaattgaagaaggacaactgggatacattgatcctacccacgtaa

SEQ ID NO: 160928 - DNA, 75 bp, synthetic construct
  source 1..75: mol_type = other DNA
tcactattactggcaagggactcctggttcggcctttatagcggcaatgaaaaagacaggtgttacacaagattt

SEQ ID NO: 160929 - DNA, 75 bp, synthetic construct
  source 1..75: mol_type = other DNA
aagcaactctttcgcattaacttctgttaatgaagagacaatgaaggcaattgttatttgttatggctcagcaag

SEQ ID NO: 160930 - DNA, 75 bp, synthetic construct
  source 1..75: mol_type = other DNA
ccccggctatgacgtactgaaagcgtcaattctcgcccgcgggctggataacccgccggtactgacccgtcgtcc

SEQ ID NO: 160931 - DNA, 75 bp, synthetic construct
  source 1..75: mol_type = other DNA
gacttccagaagcatggtcgcggttattctggtcacgcgacagactgagacaactgttatgtgcaggagacacca

SEQ ID NO: 160932 - DNA, 75 bp, synthetic construct
  source 1..75: mol_type = other DNA
ggtgtggctttgttcggagggcgcaaattacaccaccgggcagtcgttgatagtggatggcggctttatgttggc

SEQ ID NO: 160933 - DNA, 75 bp, synthetic construct
  source 1..75: mol_type = other DNA
catggatgacagcgacgtgaagcccgacgcggagccttcgattcctctgcggcgttttggcgcaacgcatgagat

SEQ ID NO: 160934 - DNA, 75 bp, synthetic construct
  source 1..75: mol_type = other DNA
gcaagttattacgcatttaattttggctttggtaaagggtttatcgataaagggcatctcgagccagttcagggg

SEQ ID NO: 160935 - DNA, 75 bp, synthetic construct
  source 1..75: mol_type = other DNA
tagttgtctggtccggtggtattaatatcactaaccagttatccgatacatttgcaattctggatgcgcctggat

SEQ ID NO: 160936 - DNA, 75 bp, synthetic construct
  source 1..75: mol_type = other DNA
cgcggcctgccgctggcccttatcagcaaggaagggacaacagaatggtgcgcagaatacgatgaatggggcaac

SEQ ID NO: 160937 - DNA, 75 bp, synthetic construct
  source 1..75: mol_type = other DNA
ccgccctgatggcatttaccccgcttgcagcaaatgcaggtgaaatcaccctactgccatcgatcaaattacaaa

SEQ ID NO: 160938 - DNA, 75 bp, synthetic construct
  source 1..75: mol_type = other DNA
ttgtatacaatggtgatttatcatatgtcgctacagtattggaacgaataagaaaaagagcatcttatggtaata

SEQ ID NO: 160939 - DNA, 75 bp, synthetic construct
  source 1..75: mol_type = other DNA
gaattattttgatggtaattattttgatggggtacttctcttttttaccggcctcacaatggtggtttatcaaaa

SEQ ID NO: 160940 - DNA, 75 bp, synthetic construct
  source 1..75: mol_type = other DNA
ctactccgctacgtcctcgtcagagtgcttgttgtctttagactgttcggtcgtacatggacgcttgaccttaag

SEQ ID NO: 160941 - DNA, 75 bp, synthetic construct
  source 1..75: mol_type = other DNA
ccgttccgctacgacattcagtttaccagtaccgataaagccatcgcgccggagtcggtgctgatgcaggacggc

SEQ ID NO: 160942 - DNA, 75 bp, synthetic construct
  source 1..75: mol_type = other DNA
gacactattaacgacacactgaattttgccgagcaactggttgataagataaattgcgtatccttggctacccag

SEQ ID NO: 160943 - DNA, 75 bp, synthetic construct
  source 1..75: mol_type = other DNA
attatctgcggcaagcaacagatgtatacgaagcgcaacgctttcttgaccgagtcttggcattaattgatggcg

SEQ ID NO: 160944 - DNA, 75 bp, synthetic construct
  source 1..75: mol_type = other DNA
tactggatgttaagcggaaaagagatatggagttgtatggtatatctaataaaatgctaaaaaaactgaatcaac

SEQ ID NO: 160945 - DNA, 75 bp, synthetic construct
  source 1..75: mol_type = other DNA
taggtataagtatgttaaataaagccttgaaattgataagacaataccatcagcaaactgttttggaactttctc

SEQ ID NO: 160946 - DNA, 75 bp, synthetic construct
  source 1..75: mol_type = other DNA
tgctcggcgagatgagcggtcgcagcggcatgagctggaatacgttgctggcggaactgaccgatggacagagca

SEQ ID NO: 160947 - DNA, 75 bp, synthetic construct
  source 1..75: mol_type = other DNA
tcctcaatgaactgtggcaggaaacgcaggatgaacgttaccaccgcgtctgctggccgttcagaccgtggccgg

SEQ ID NO: 160948 - DNA, 75 bp, synthetic construct
  source 1..75: mol_type = other DNA
ggcacaataatcagcaatggtgtaaaaattggttttgccaccgaaattaaaaatgcggttattgaagcggaagca

SEQ ID NO: 160949 - DNA, 75 bp, synthetic construct
  source 1..75: mol_type = other DNA
aaagcgaaattagtcaaacacatctttattgatgaaaccgaaggagaagtcgttataggtgaaggaacgcgcata

SEQ ID NO: 160950 - DNA, 75 bp, synthetic construct
  source 1..75: mol_type = other DNA
ctattacactgttgcaaagaaaagttcaaaactccttgtgctattgcgatcaaagaaaatgtagctcgagcttta

SEQ ID NO: 160951 - DNA, 75 bp, synthetic construct
  source 1..75: mol_type = other DNA
taatgtctgaatgtatatatcaagaaggcaacgcctttgtcattatgggagctggggaacaattaaaacgtatta

SEQ ID NO: 160952 - DNA, 75 bp, synthetic construct
  source 1..75: mol_type = other DNA
aagtaagttcattctgtggttgtataggcggcggtggctgttggttactctattatcgaaattatagaaaaaata

SEQ ID NO: 160953 - DNA, 75 bp, synthetic construct
  source 1..75: mol_type = other DNA
gttgtttgctcttttctattcttataaatttattagtcaaagtgactttattcttttcggaacttgttatcttct

SEQ ID NO: 160954 - DNA, 75 bp, synthetic construct
  source 1..75: mol_type = other DNA
gcgcagcctcaggataaaatcgaaagctataattcagcactgcaagctttttccatcttttgttcatctacgttg

SEQ ID NO: 160955 - DNA, 75 bp, synthetic construct
  source 1..75: mol_type = other DNA
gtgttattttagaaacgccgccaaatgtctgtatggaatcacgtaattcatatgacaaccaaaaatataaggtta

SEQ ID NO: 160956 - DNA, 75 bp, synthetic construct
  source 1..75: mol_type = other DNA
ccccatagatattcaaaaaataacagatgcgtttgtgaaggagttcaaggggatattatttgataaaaatggaag

SEQ ID NO: 160957 - DNA, 66 bp, synthetic construct
  source 1..66: mol_type = other DNA
atgtgtcgcggtctgtttatcgaattaaatgcagatataaaaaaaccaacctttacggttggtttt

SEQ ID NO: 160958 - DNA, 75 bp, synthetic construct
  source 1..75: mol_type = other DNA
ttaaatatttcacctatcagtccactgatattcctggtttaactctttggatacaggagggtattgaggttaaat

SEQ ID NO: 160959 - DNA, 75 bp, synthetic construct
  source 1..75: mol_type = other DNA
attttatctgaaagtaatattaaaaaaatttttgagcaagatgaaacatttggaagtttagttggcagcgaatat

SEQ ID NO: 160960 - DNA, 75 bp, synthetic construct
  source 1..75: mol_type = other DNA
tgtatgattgtggaattcgggttcggttattctggtgttcgtcttgtaacaagaaacccagaaaataaatcaaag

SEQ ID NO: 160961 - DNA, 75 bp, synthetic construct
  source 1..75: mol_type = other DNA
atcttattcctccggtgtttatttcagtgtccgtcaccttctttgtgatgttaacgctgattagcgttgtccagt

SEQ ID NO: 160962 - DNA, 75 bp, synthetic construct
  source 1..75: mol_type = other DNA
agtatcgatattatcagtccgatgaatgaaaaatatcgcctgtatggaacgttatatagtgcaggtaatagtaag

SEQ ID NO: 160963 - DNA, 75 bp, synthetic construct
  source 1..75: mol_type = other DNA
actgcattgcttgaacccgatttacagcttgcgatagcactgctgaaaccgtacggacttagtcgctcacaagtc

SEQ ID NO: 160964 - DNA, 75 bp, synthetic construct
  source 1..75: mol_type = other DNA
gaggaacatacgtttcccggatattactggagtctgacctcctatccgtggctgaaaacgagtgattatattctg

SEQ ID NO: 160965 - DNA, 75 bp, synthetic construct
  source 1..75: mol_type = other DNA
tttacgaccggacagaaggccgactggcgataccgggggcactgggttttggtgaaatttttcatattaatgaca

SEQ ID NO: 160966 - DNA, 75 bp, synthetic construct
  source 1..75: mol_type = other DNA
gtgccagacgacgagattgtgcagcaccgcagagtcgccctgttggagttgatccaaaagcatattcgccagcgc

SEQ ID NO: 160967 - DNA, 75 bp, synthetic construct
  source 1..75: mol_type = other DNA
atgccagataatgatattgctatgattgtatttcctgagtctggtgataattttgacgaccagggcgcaggagct

SEQ ID NO: 160968 - DNA, 75 bp, synthetic construct
  source 1..75: mol_type = other DNA
accattgagcttataagtatcgaaagcatcaagcgttgtgtcgcggcaaatatcggggtcagttacctgccgcgc

SEQ ID NO: 160969 - DNA, 75 bp, synthetic construct
  source 1..75: mol_type = other DNA
tgactgtatggaatcacataatttatatgacaaccaaatagataagatttcacctgtagctaaaaactcgcagca

SEQ ID NO: 160970 - DNA, 75 bp, synthetic construct
  source 1..75: mol_type = other DNA
atctactttgaataataatgatgtagggtttaatttcaaattattcccagaagtcaagctgtctggggaaaatct

SEQ ID NO: 160971 - DNA, 75 bp, synthetic construct
  source 1..75: mol_type = other DNA
ctgatcgtaataataaaataaaactcatcacgggcgtggcaccattcgatgatattttatttatggatgatgact

SEQ ID NO: 160972 - DNA, 75 bp, synthetic construct
  source 1..75: mol_type = other DNA
ttattttttttacggtgttaatggagaggtttattacgcccgtggcacttctggtgtcccggcatgggaactctg

SEQ ID NO: 160973 - DNA, 75 bp, synthetic construct
  source 1..75: mol_type = other DNA
gggggaagatgctcagcaggaatcccgagacaatctggggttgaaaagtgctgcaacgatggatgtacaaacaga

SEQ ID NO: 160974 - DNA, 75 bp, synthetic construct
  source 1..75: mol_type = other DNA
tcagacgtcatctggaccggctgaatgcaaaaggtatgacgccacagcagaccgccatgctggcaccggcggcgg

SEQ ID NO: 160975 - DNA, 75 bp, synthetic construct
  source 1..75: mol_type = other DNA
gtataatccctttgaatgtgtaaaaacgaatatcaatggtgctatgaacgtgattgatgcttgtattgacaaagg

SEQ ID NO: 160976 - DNA, 75 bp, synthetic construct
  source 1..75: mol_type = other DNA
gatgtttttgcttgcaaaatcatccctatttctatttcggctgatcatattgaaaatgtaaattgtggctatctt

SEQ ID NO: 160977 - DNA, 75 bp, synthetic construct
  source 1..75: mol_type = other DNA
ggctgtaaagcgtgtcaggtggcctgtaaagacaaaaacaaccttgaggttgggcgacgttttcgccgcgtgtat

SEQ ID NO: 160978 - DNA, 75 bp, synthetic construct
  source 1..75: mol_type = other DNA
cctgtatcagtacccactcaatcctattgaacatatagatccgttggggttatcacttgatttgaattattattc

SEQ ID NO: 160979 - DNA, 75 bp, synthetic construct
  source 1..75: mol_type = other DNA
aggacaacggggcgtttgaattggtgccagacgagaaacaaccaggggactttcataagtttacacctacaggaa

SEQ ID NO: 160980 - DNA, 75 bp, synthetic construct
  source 1..75: mol_type = other DNA
aaatgatcagcgctgaagattcttattacacctatgaatatccagagcattttaaaattcttccagctattcaca

SEQ ID NO: 160981 - DNA, 75 bp, synthetic construct
  source 1..75: mol_type = other DNA
gtgttttctgaaaataacaaattatcgagagaaaataatattgatcagtatgttcaatccgctaaaagaaatgaa

SEQ ID NO: 160982 - DNA, 75 bp, synthetic construct
  source 1..75: mol_type = other DNA
catctttgtcagagtcaaaggaacacaccatagatattcaaaaaataacggatgcctttgtgaaagaattccggg

SEQ ID NO: 160983 - DNA, 75 bp, synthetic construct
  source 1..75: mol_type = other DNA
atgaatggtggcgtgaacaagcactttcctgtgatatgcgcaaaaaaacctgagcgcccgacactacgcacagat

SEQ ID NO: 160984 - DNA, 75 bp, synthetic construct
  source 1..75: mol_type = other DNA
ctggcggcacagatagagccggtttatttgcctgagcgaaaaatacatctttatcactgtgaccaccggggcctg

SEQ ID NO: 160985 - DNA, 75 bp, synthetic construct
  source 1..75: mol_type = other DNA
tacagaccgacaccacgcgtatccagacggtataccagccggggagcttcgcgccgctcatccgcatcgaaacag

SEQ ID NO: 160986 - DNA, 75 bp, synthetic construct
  source 1..75: mol_type = other DNA
gattgctcagatagatgtagtgattatattaatccagagcataaaaaaacgataaaggctttacaagatgctggc

SEQ ID NO: 160987 - DNA, 75 bp, synthetic construct
  source 1..75: mol_type = other DNA
tgctcaagcgcacaacgtgctgtcaccagcgaaccactacgcaaagccgcttccaccaccagtacacctttactt

SEQ ID NO: 160988 - DNA, 75 bp, synthetic construct
  source 1..75: mol_type = other DNA
cgccaatgtaacaaacttccaccatgtagcaactgtgagaagaaagcacacaagaacaatacgtggaagctactc

SEQ ID NO: 160989 - DNA, 75 bp, synthetic construct
  source 1..75: mol_type = other DNA
taaccgcgccatttttgctgcgtcggctgaaatcggacaaaaccatcatcagcgatctgcccgaaaaaattgaaa

SEQ ID NO: 160990 - DNA, 75 bp, synthetic construct
  source 1..75: mol_type = other DNA
atgagcagaagccggttcagcctgaaggcggtcaggaggctggaaaaacagatgtgtcatccacaggctcaagtg

SEQ ID NO: 160991 - DNA, 75 bp, synthetic construct
  source 1..75: mol_type = other DNA
ataaaacttggagcaggtaatgacactatccagatctatggggatgttgagggaggttcctctccttctgtcatc

SEQ ID NO: 160992 - DNA, 75 bp, synthetic construct
  source 1..75: mol_type = other DNA
tggcaaggcaaaaacttcacgcccctgctcaagcgcacaacgtgctgtcaccagcgaaccaccgcttccaccacc

SEQ ID NO: 160993 - DNA, 75 bp, synthetic construct
  source 1..75: mol_type = other DNA
gaggatgcgcactatgtctaccgccacgatgaatacggcaggctggcggagaagacggaccgtatcccggaaggg

SEQ ID NO: 160994 - DNA, 75 bp, synthetic construct
  source 1..75: mol_type = other DNA
actgcgaccaccggggactgccgctggcgctcatcagcccggaaggggaaacggcgtggcagggggagtatgacg

SEQ ID NO: 160995 - DNA, 75 bp, synthetic construct
  source 1..75: mol_type = other DNA
cgctgtcgcgtaaaccggaggagacgtggtacgggtgggacggcgacaggctgacgacggtacagaccgacacca

SEQ ID NO: 160996 - DNA, 75 bp, synthetic construct
  source 1..75: mol_type = other DNA
taacgacggcgatataccacggcggcaagcgcgcgttgtccgatgagatgccggatatcctgctcaccacttacg

SEQ ID NO: 160997 - DNA, 75 bp, synthetic construct
  source 1..75: mol_type = other DNA
atggcaggttatcaggaaagccgttacagttttaatgctacaggaggaacttatatttacagtgagaatggtggt

SEQ ID NO: 160998 - DNA, 75 bp, synthetic construct
  source 1..75: mol_type = other DNA
acgatcgtagtgataatactgcagaacataataataacggggctggaattgaaaactataacttcattacaacgg

SEQ ID NO: 160999 - DNA, 75 bp, synthetic construct
  source 1..75: mol_type = other DNA
tgtaaaaagacctgcatggtctgatgtatatgaaggatatccaaaagttaatggaggtactgaaattgagagtga

SEQ ID NO: 161000 - DNA, 75 bp, synthetic construct
  source 1..75: mol_type = other DNA
ccctcggcggcagccagagcggtaccaccagcggcgtggcggcaatggactacgactgggacggcgcggtggatg

SEQ ID NO: 161001 - DNA, 75 bp, synthetic construct
  source 1..75: mol_type = other DNA
tgtcaccagcgacacgacgcttgcggtgagcggcacgctgggggcggcgctttctgccggtgagttcgcgcaaat

SEQ ID NO: 161002 - DNA, 75 bp, synthetic construct
  source 1..75: mol_type = other DNA
actggcctgcgggaacgctgaatattaccgttagcggcgcgaacagtgccggaacgcaaaccagcattacccatc

SEQ ID NO: 161003 - DNA, 75 bp, synthetic construct
  source 1..75: mol_type = other DNA
accgccagcaatattgaccagacggtaaacaccacctggggcggtttacaggccaccgatgctacccacgcttac

SEQ ID NO: 161004 - DNA, 75 bp, synthetic construct
  source 1..75: mol_type = other DNA
tcaatatcatcgaacacgggcaggcgctggttgtcaccggcagcagctcggggctggcagaaggcacgccgctta

SEQ ID NO: 161005 - DNA, 75 bp, synthetic construct
  source 1..75: mol_type = other DNA
tataccgatgatgtcgggcagcgacaggggacgttaagcagttcgcaggctaccgacgacaccacgccgctgctg

SEQ ID NO: 161006 - DNA, 75 bp, synthetic construct
  source 1..75: mol_type = other DNA
ggcacctggagcgtgactgttcccgccgcgaacgttgacgcactggctgacggcaacgccacggtgaccgccagc

SEQ ID NO: 161007 - DNA, 75 bp, synthetic construct
  source 1..75: mol_type = other DNA
gatggctcctggagtctgacagtacccgctgccgatatgggtaatctgcctgacggtgcggtggcaattactgca

SEQ ID NO: 161008 - DNA, 75 bp, synthetic construct
  source 1..75: mol_type = other DNA
cgttgcgcagatcatctccggaaacgtcagcggtgcttctcctggcgatacggtgactgtgaaattgggcgctca

SEQ ID NO: 161009 - DNA, 75 bp, synthetic construct
  source 1..75: mol_type = other DNA
ataatctggcggtagacaccaccgcgccggttctcaccattaacaccgtggcaggcgatgacatcatcaacgatg

SEQ ID NO: 161010 - DNA, 75 bp, synthetic construct
  source 1..75: mol_type = other DNA
cacggtacaggcagacgggagctggagcgtcggcattccggcgacaaacgtcagcgcatggcctgcgggggcgtt

SEQ ID NO: 161011 - DNA, 75 bp, synthetic construct
  source 1..75: mol_type = other DNA
tatcagcggctcggcaacgggcgcgacgacgggtaatacggtttccgttaccattggcacgaccacctataccac

SEQ ID NO: 161012 - DNA, 75 bp, synthetic construct
  source 1..75: mol_type = other DNA
caatggcacctgggcgctgaacgtgcctgcggcggatctggccgcgctcgggcagggcgcgcagaccattaccgc

SEQ ID NO: 161013 - DNA, 75 bp, synthetic construct
  source 1..75: mol_type = other DNA
ccgcacgctggatcgcggggccaacgatattgtcgttacggtgaccgatgccgctggtaacaccggttcggcgag

SEQ ID NO: 161014 - DNA, 75 bp, synthetic construct
  source 1..75: mol_type = other DNA
ccgccgaagcgggatcggcgctgaccatcagcggtaccagcacggcggaagccgggcagacggtgaccgtgacgc

SEQ ID NO: 161015 - DNA, 75 bp, synthetic construct
  source 1..75: mol_type = other DNA
agctcgccgggcagaccatcagcggcaccaccaccgccgaagtgggccagacggtgacggtcacctttaacggac

SEQ ID NO: 161016 - DNA, 75 bp, synthetic construct
  source 1..75: mol_type = other DNA
cggcaactacaactatcaggtacgggtgatcgacaccgccggaaatatcggcgcgaccgccagccagatagtcac

SEQ ID NO: 161017 - DNA, 75 bp, synthetic construct
  source 1..75: mol_type = other DNA
ggtcgatctggcgggcaacgtcggcgcaaccagcagccagtcggtgctgatcgataccgttaacccgacgcaggt

SEQ ID NO: 161018 - DNA, 75 bp, synthetic construct
  source 1..75: mol_type = other DNA
cgcgctgcctggcgtcaccattaatccggtggcgagcgacgatattattaacgccgccgaatcgggcgtagcgca

SEQ ID NO: 161019 - DNA, 75 bp, synthetic construct
  source 1..75: mol_type = other DNA
ggcagcgccagcaaaggcgtgaccgtcgataccaccgcgccggtgattagctttaacaccgtggcgggcgatgat

SEQ ID NO: 161020 - DNA, 75 bp, synthetic construct
  source 1..75: mol_type = other DNA
caccagcagcggcggggaagcgggggatgtggtgagcgtcgtgctcaacggcaaaacctacaccaccacgctgga

SEQ ID NO: 161021 - DNA, 75 bp, synthetic construct
  source 1..75: mol_type = other DNA
aggcgctggtgatctccggcaccagcaccggcggggaagcgggcgatgtggtgagcgttgtgctcaacggtaaaa

SEQ ID NO: 161022 - DNA, 75 bp, synthetic construct
  source 1..75: mol_type = other DNA
tgaacgccggagaaacctacaacgcggtgctgatcaaatccaccggcaccaccgccagcaatatcgaccagacgg

SEQ ID NO: 161023 - DNA, 75 bp, synthetic construct
  source 1..75: mol_type = other DNA
cgggagctggagcgtgaacgtgccggcggcagacgttgcggcgcttgccgatggcaccagctacacggtcagcgc

SEQ ID NO: 161024 - DNA, 75 bp, synthetic construct
  source 1..75: mol_type = other DNA
agcgtcggcgttccggcagcggacgtggctgactggcctgcggggacggttaatattgccgtctctggcaccaat

SEQ ID NO: 161025 - DNA, 75 bp, synthetic construct
  source 1..75: mol_type = other DNA
aagctggagcgttagcgtaccagcggcggatattcaggcgctgggcaacggttctcttacggtcaacgcatcggt

SEQ ID NO: 161026 - DNA, 75 bp, synthetic construct
  source 1..75: mol_type = other DNA
cggcgacgcctcggtgcaggccagcgtcagtaacgttaacggcaacacggcttcggcaacccacgcctacagcgt

SEQ ID NO: 161027 - DNA, 75 bp, synthetic construct
  source 1..75: mol_type = other DNA
caccggcagcagcacggcggaagccgggcagacggtgaccgtcacgctcaatggcgcaaactatactggcacggt

SEQ ID NO: 161028 - DNA, 75 bp, synthetic construct
  source 1..75: mol_type = other DNA
cctccgctcaggacagtgccggaaacagcgccacggcctcgcgcagcgtggcggtggatctcaccgcgccggtta

SEQ ID NO: 161029 - DNA, 75 bp, synthetic construct
  source 1..75: mol_type = other DNA
ccgccgaagcgggatcggcgctgactatcagcggcaccagcaccgcagaagccgggcagacagtgaccgtgacgc

SEQ ID NO: 161030 - DNA, 75 bp, synthetic construct
  source 1..75: mol_type = other DNA
tcaaccaggggaatgggacgtttgtctgggggcagaacaccaccaataccttcctgagcggggcgggcagtggcg

SEQ ID NO: 161031 - DNA, 75 bp, synthetic construct
  source 1..75: mol_type = other DNA
cgccagcgtcagcgatcgggcgggcaacagcgacgacgccagccgcaccgtgaccgtcagcctcagcgcgccagt

SEQ ID NO: 161032 - DNA, 75 bp, synthetic construct
  source 1..75: mol_type = other DNA
gttccagcggcggatgttgcggcactcggtagcggtgcgcagaccatcaccgccagcgtcagcgatcgggcaggt

SEQ ID NO: 161033 - DNA, 75 bp, synthetic construct
  source 1..75: mol_type = other DNA
gcggcgtgctgggcgcggtgctcggcgctaacgagttcgcgcaaatcagcaccgacaacggcgcaacctgggtga

SEQ ID NO: 161034 - DNA, 75 bp, synthetic construct
  source 1..75: mol_type = other DNA
ggtgcggcgctctctgccgatgagctcgcgcaaatcagtatcgatggcggcaccacctggcagaatctttcggta

SEQ ID NO: 161035 - DNA, 75 bp, synthetic construct
  source 1..75: mol_type = other DNA
ttgcttaacggcaaaggctacagcgccaccattcagagcaacgggagctggagtgtgaacgtgcctgcggcggac

SEQ ID NO: 161036 - DNA, 75 bp, synthetic construct
  source 1..75: mol_type = other DNA
aacaccgtctccggcgatgacattattaacgccgccgaacacgggcaggcgctggtgatctccggttccagcact

SEQ ID NO: 161037 - DNA, 75 bp, synthetic construct
  source 1..75: mol_type = other DNA
ccgatctggcgtcattacccgagggcagcgcctccgcactggccagcgtcagcaatatcaacggcaatagcgcct

SEQ ID NO: 161038 - DNA, 75 bp, synthetic construct
  source 1..75: mol_type = other DNA
cacatccggcgtcgaagcggggcaaaccgttacccttacctttggcggcaaaacttacaccaccacggtggcggc

SEQ ID NO: 161039 - DNA, 75 bp, synthetic construct
  source 1..75: mol_type = other DNA
acagcattgagcacaatcaggcgctggtgatcgccggtagcagcaccgggctgacggcgggaacggcgttaacgg

SEQ ID NO: 161040 - DNA, 75 bp, synthetic construct
  source 1..75: mol_type = other DNA
ggtattccggcggcaaacgtcagcgcctggccagcgggggcattaaccgttgaggtagacgggcaaagcagcgcc

SEQ ID NO: 161041 - DNA, 75 bp, synthetic construct
  source 1..75: mol_type = other DNA
gcacaaatacctttaccacggtgctggatgccagcggcaactggagcatcggcgttccggcaagcgtcgtctcgg

SEQ ID NO: 161042 - DNA, 75 bp, synthetic construct
  source 1..75: mol_type = other DNA
gtcagggcaatggcaccttcgtctggggacaaaacaccgtcaatactttcctcagtagtcctggctcggggggaa

SEQ ID NO: 161043 - DNA, 75 bp, synthetic construct
  source 1..75: mol_type = other DNA
ataatgacggcagaattgatctggttcagcacactttcaacctgaacaacaacttcaccctctcatcgttgataa

SEQ ID NO: 161044 - DNA, 75 bp, synthetic construct
  source 1..75: mol_type = other DNA
actatgccaccagctccatcgccgattacaaccgtaacggtacgggcgatctgtttattacccgtgatgactacg

SEQ ID NO: 161045 - DNA, 75 bp, synthetic construct
  source 1..75: mol_type = other DNA
gatgtgattaacgccactgaaaaaggtgcggcgctaacgctctccggtagcacatccggcgtcgaagcggggcaa

SEQ ID NO: 161046 - DNA, 75 bp, synthetic construct
  source 1..75: mol_type = other DNA
gttccagcagcggatgttgcggcactcagtagcggcgcacagaccatcaccgccagcgtcagcgatcgggcgggc

SEQ ID NO: 161047 - DNA, 75 bp, synthetic construct
  source 1..75: mol_type = other DNA
caccgatgctactcacgcttacgatctcagtgctgaagcgggtacggcgagcaacaacggcaagtttgtcggcac

SEQ ID NO: 161048 - DNA, 75 bp, synthetic construct
  source 1..75: mol_type = other DNA
gcacgcgagcaaacgtatttcgtcgacaaaacggcggatcatagagaaaaccggctgtggatgatggccaacatg

SEQ ID NO: 161049 - DNA, 75 bp, synthetic construct
  source 1..75: mol_type = other DNA
gcacgcgagcaaacgtatttcgtcgacaaaacggccgatcatagagaaaaccgcctgtggatgatggccaacatg

SEQ ID NO: 161050 - DNA, 75 bp, synthetic construct
  source 1..75: mol_type = other DNA
gcacgcgagcaaacgtatttcgtcgacaaaacggcagatcatagagaaaaccgactgtggatgatggccaacatg

SEQ ID NO: 161051 - DNA, 75 bp, synthetic construct
  source 1..75: mol_type = other DNA
gcacgcgagcaaacgtatttcgtcgacaagacggcggatcatagagaaaaccgactgtggatgatggccaacatg

SEQ ID NO: 161052 - DNA, 75 bp, synthetic construct
  source 1..75: mol_type = other DNA
gcacgcgagcaaacgtatttcgtcgacaacacggccgatcatagagaaaaccgactgtggatgatggccaacatg

SEQ ID NO: 161053 - DNA, 75 bp, synthetic construct
  source 1..75: mol_type = other DNA
gcacgcgagcaaacgtatttcgtcgacaatacggcggatcatagagaaaaccgtctgtggatgatggccaacatg

SEQ ID NO: 161054 - DNA, 75 bp, synthetic construct
  source 1..75: mol_type = other DNA
gcaatatgttcgaacgcggcagcgcgcagattatgccgttctttaaaacgctgctggtggagctcgcgccagtgt

SEQ ID NO: 161055 - DNA, 75 bp, synthetic construct
  source 1..75: mol_type = other DNA
aaaagtaccaacttcctattcattccttcctataataataggttacataaccacttttgcatttaatgagtttgc

SEQ ID NO: 161056 - DNA, 75 bp, synthetic construct
  source 1..75: mol_type = other DNA
ccgtgggcgatccgtcctgtgaattcaccatgacgcagtccgcgccgctgatggtgctgccggatccggatgagt

SEQ ID NO: 161057 - DNA, 75 bp, synthetic construct
  source 1..75: mol_type = other DNA
atgctttgacagtcagacatcgccgcggctttccgcgagtccattttgcgcagttccaaggggttccagtacctc

SEQ ID NO: 161058 - DNA, 75 bp, synthetic construct
  source 1..75: mol_type = other DNA
ggtatatccgcagagcgcgtgagacaacttgaaaataacgcgatgaaaaaacttcgcagtgtgccggtatggttc

SEQ ID NO: 161059 - DNA, 75 bp, synthetic construct
  source 1..75: mol_type = other DNA
tatgtattcattgtcagcaggagaaagatttacaaaaaccagcttatacaggatataatctcagaggttcgaaag

SEQ ID NO: 161060 - DNA, 75 bp, synthetic construct
  source 1..75: mol_type = other DNA
tcaccgatgcgttcggtaatgcgcttgccgggcagacggtcagcgtgatggcggacaacggtgcaacggttgctt

SEQ ID NO: 161061 - DNA, 75 bp, synthetic construct
  source 1..75: mol_type = other DNA
caggcattgccagcatcaacaacagcagcctgagccggaacgtgacgtttattgcggatgtcaggacggcgaaga

SEQ ID NO: 161062 - DNA, 75 bp, synthetic construct
  source 1..75: mol_type = other DNA
cctatagggcctacaaagaaggagaaaacttaaactcatatctacatattaatggttggtatgtaaacgggcaac

SEQ ID NO: 161063 - DNA, 75 bp, synthetic construct
  source 1..75: mol_type = other DNA
gtttgatcgcacccgttcttcccagtgtggtgtgaatgtacctaagccagatgagtctggctatgggccactgat

SEQ ID NO: 161064 - DNA, 75 bp, synthetic construct
  source 1..75: mol_type = other DNA
acctgcaacgcatcaaatccattttcacccgtaaagcccgcgcgctggagaagcgccgcgcccgtcaacaggagg

SEQ ID NO: 161065 - DNA, 75 bp, synthetic construct
  source 1..75: mol_type = other DNA
ggtcgctcgttacggtcagggatacgtcaactggctcaatggtccccacgaaatgaccaactaccgccgtgaaga

SEQ ID NO: 161066 - DNA, 75 bp, synthetic construct
  source 1..75: mol_type = other DNA
cctgtgcggaggtcagatgcgttttacggggtctgaagcggggctaccgtctgacagagctggtcctgatgcatg

SEQ ID NO: 161067 - DNA, 75 bp, synthetic construct
  source 1..75: mol_type = other DNA
atccggtgaaggtaatccgtcattcaacacggttgccagaataactaaggcacttggcctgaaacttcaattcaa

SEQ ID NO: 161068 - DNA, 75 bp, synthetic construct
  source 1..75: mol_type = other DNA
ctgactgaactgaaaaaccgcggtctgaacgatatccttatcgcctgtgtagatggccagaaaggcttcccagac

SEQ ID NO: 161069 - DNA, 75 bp, synthetic construct
  source 1..75: mol_type = other DNA
gcgctcacagcttcgtatacgcgaagttttattggttgctggagcggatttacctgtcagtgttttattagttga

SEQ ID NO: 161070 - DNA, 75 bp, synthetic construct
  source 1..75: mol_type = other DNA
atcagcaatgaaaaaatctttttcaacgtttagttgggggagtagctcttttaatgagaatgttctcaataaggt

SEQ ID NO: 161071 - DNA, 75 bp, synthetic construct
  source 1..75: mol_type = other DNA
gccaaagtcttatattttcttaccacgaccaaacccaattcaagaggaaatattggaacagtggagaataggcat

SEQ ID NO: 161072 - DNA, 75 bp, synthetic construct
  source 1..75: mol_type = other DNA
ccatcagcgggcaggtgacgggtgccgcggcgggcgacacagttaccgttacgctgggtggcaacacctacaccg

SEQ ID NO: 161073 - DNA, 75 bp, synthetic construct
  source 1..75: mol_type = other DNA
catttcggcctcggtaacgaacagcgtgggcaatacaggtaacggcacgcgcgaaatcaccatcgacgcgaatct

SEQ ID NO: 161074 - DNA, 75 bp, synthetic construct
  source 1..75: mol_type = other DNA
aatggcgtgggcaacaccggcagcggctcgcgcgatatcactatcgatgccaatctgcctggtttacgggtcgat

SEQ ID NO: 161075 - DNA, 75 bp, synthetic construct
  source 1..75: mol_type = other DNA
caccgatagcgcaggcaacagcagcacgcagacgcacaacgtgcaggtgaacacggcggcagtgtcgctctcggt

SEQ ID NO: 161076 - DNA, 75 bp, synthetic construct
  source 1..75: mol_type = other DNA
gtcataactacagcgccaccaccgacgcggcgggcaactggacgttaaccgtgccggtgagcgatctggcggctt

SEQ ID NO: 161077 - DNA, 75 bp, synthetic construct
  source 1..75: mol_type = other DNA
accgtgttgcttaacggcaaaggctacagcgctaccattcagaacaacgggagctggagtgtgaacgtgcctgcg

SEQ ID NO: 161078 - DNA, 75 bp, synthetic construct
  source 1..75: mol_type = other DNA
acggcacggtgaccatcagcgccaccattaccgatagcgcaggcaacagcagcacgcagacgcacaacgtgcagg

SEQ ID NO: 161079 - DNA, 75 bp, synthetic construct
  source 1..75: mol_type = other DNA
acagggcaacttaagctggagcgtcaccgttccggcagccgatctccaggcattgggcaatggtgatttgaccat

SEQ ID NO: 161080 - DNA, 75 bp, synthetic construct
  source 1..75: mol_type = other DNA
caacgcacgacatcgtgatagacgccaacctgcctggtctgcgcgtcgataccgtagcaggcgatgatgtggtca

SEQ ID NO: 161081 - DNA, 75 bp, synthetic construct
  source 1..75: mol_type = other DNA
gttatagcgccaccattcaaagcaacgggagctggagcgtgaatgtgcctgcggcagacgtcgccgcactagccg

SEQ ID NO: 161082 - DNA, 75 bp, synthetic construct
  source 1..75: mol_type = other DNA
cgccaccacagatgcttccggcaactggaatgccacggtgccagcctcggcggtcagtgcattgggtgaggccaa

SEQ ID NO: 161083 - DNA, 75 bp, synthetic construct
  source 1..75: mol_type = other DNA
taacgccagtgtcaccgatgccgccggaaacagcggcagcgccacccatcaggtgacggtcaataccggtctgcc

SEQ ID NO: 161084 - DNA, 75 bp, synthetic construct
  source 1..75: mol_type = other DNA
agactgaacagcagatttaccgtcagctgactgacgaggtactggccctgcgattgcctgaaaacggctcacaac

SEQ ID NO: 161085 - DNA, 75 bp, synthetic construct
  source 1..75: mol_type = other DNA
ctggtatatctctgcaaccgtcgtactcgcagactggacaggttcgtcaacgcgattttttccacgcgtcgcaca

SEQ ID NO: 161086 - DNA, 75 bp, synthetic construct
  source 1..75: mol_type = other DNA
ggaaactcatcatttctttttcgtgagggcaactatatatctcattttaattccacgctcaccgaacatgacgca

SEQ ID NO: 161087 - DNA, 75 bp, synthetic construct
  source 1..75: mol_type = other DNA
acgtaatgatgggatactgatcgttgttgcctggtcggatcgaactgtccgcattcaggtaggttatgggctgga

SEQ ID NO: 161088 - DNA, 75 bp, synthetic construct
  source 1..75: mol_type = other DNA
agctgaacacattgccagacagtatcatgaatctgcacatttatgcagatgttaatatttataacaatccattgt

SEQ ID NO: 161089 - DNA, 75 bp, synthetic construct
  source 1..75: mol_type = other DNA
atcttccttgcagtcactctcagcccttctcaatagcctggagacgctacctgatcttcccccggctctacaaaa

SEQ ID NO: 161090 - DNA, 75 bp, synthetic construct
  source 1..75: mol_type = other DNA
cgcggcgtttatcgcctttccgatgcattatggctggaccaggggttaaagaatcgacagggcagtgcgggatca

SEQ ID NO: 161091 - DNA, 75 bp, synthetic construct
  source 1..75: mol_type = other DNA
tcgccaaaaaagagttcaaaactggcgaagcggtcagcggcaaactgcaactgctctacccggatggcgagccgg

SEQ ID NO: 161092 - DNA, 75 bp, synthetic construct
  source 1..75: mol_type = other DNA
ttcttcgtaattttaatactccaccctttaaaaaagtgccggcttactggcttcatcccggactgacttatctga

SEQ ID NO: 161093 - DNA, 75 bp, synthetic construct
  source 1..75: mol_type = other DNA
gctttagcccctctccggaggggctttttaatgaggggaaggcaccgggcagtgaaatgttaaatcactcacaat

SEQ ID NO: 161094 - DNA, 75 bp, synthetic construct
  source 1..75: mol_type = other DNA
tacgccgtgccgatgtttcgcttagccctattacacaaaaatttgtcgatttcctctgtcagcaattacgtcagc

SEQ ID NO: 161095 - DNA, 75 bp, synthetic construct
  source 1..75: mol_type = other DNA
ggcgactgaatttgtaaaacgaggaatgggatgcagtattaccgatattttctctgcccgtcataacctcccggc

SEQ ID NO: 161096 - DNA, 75 bp, synthetic construct
  source 1..75: mol_type = other DNA
agtaagtatacagcatttggtttgctgctttacatgttgtgtccaatgcctattgacattgttcaaatcaggaat

SEQ ID NO: 161097 - DNA, 75 bp, synthetic construct
  source 1..75: mol_type = other DNA
cgacgctaacacatgccctggaaaccgcaaaagacatgcgctggaactactgcctgctgagcgatcggggatggt

SEQ ID NO: 161098 - DNA, 75 bp, synthetic construct
  source 1..75: mol_type = other DNA
gaaaatggttcgatttgtttcgctgcttcaggagtaacactttaggggcaaaaatgcaggcgctgagaattttcc

SEQ ID NO: 161099 - DNA, 75 bp, synthetic construct
  source 1..75: mol_type = other DNA
atgccgtccgccccgtggaggctgccgcgctccatgcgactaagcagcacggggcaaacgtcattcaacataatg

SEQ ID NO: 161100 - DNA, 75 bp, synthetic construct
  source 1..75: mol_type = other DNA
atgagcaattacgccagttgctgacggcgctcggtctgaccgtggctgacggtgacgaatttacgccggagctgg

SEQ ID NO: 161101 - DNA, 75 bp, synthetic construct
  source 1..75: mol_type = other DNA
tgtcgaacttcggatgctggctattaccggtgaccccggtctgaccggcatgaatcctgtcgccgcgctgtcggc

SEQ ID NO: 161102 - DNA, 75 bp, synthetic construct
  source 1..75: mol_type = other DNA
cgctgcgtccgctgggttacaaagaaggcattgtaacgctgatggaatttacctggacgcacggctgcgtgattg

SEQ ID NO: 161103 - DNA, 75 bp, synthetic construct
  source 1..75: mol_type = other DNA
tcagatgattgcggttaccaacaatcagatacagacggtgggcgttaaccagatagagacggtgggcagtaacca

SEQ ID NO: 161104 - DNA, 75 bp, synthetic construct
  source 1..75: mol_type = other DNA
aggaaatagtggtgacggaggccttgacataattgcctggcatccaatgggagatcaacgagatgccatccctat

SEQ ID NO: 161105 - DNA, 75 bp, synthetic construct
  source 1..75: mol_type = other DNA
taagccctcgcggcgtaatcaaggatcagaatgatatcgtgggatatggttgcacagaactgcgtgtagaaacca

SEQ ID NO: 161106 - DNA, 75 bp, synthetic construct
  source 1..75: mol_type = other DNA
atgccggtaaaaaatcggcaaaaggtgacgcggcgaaaaaagcggctaaccgttttgcggtgccaccaccacccc

SEQ ID NO: 161107 - DNA, 75 bp, synthetic construct
  source 1..75: mol_type = other DNA
aggcattgtaacgctgatggaatttacctggacgcacggctgcgtgattgagagcggagagttccgccatggccc

SEQ ID NO: 161108 - DNA, 75 bp, synthetic construct
  source 1..75: mol_type = other DNA
caacaactcttggaggctacaagaaagctttatactgtagatgaaagaccaactactgacgaattagttaataaa

SEQ ID NO: 161109 - DNA, 75 bp, synthetic construct
  source 1..75: mol_type = other DNA
aacgtacgggcattgcaaaaatgcttatgactacaccagttttaacactaatttttgatcgtgtaagatatgatg

SEQ ID NO: 161110 - DNA, 75 bp, synthetic construct
  source 1..75: mol_type = other DNA
gctttcataaaagagattggctctaatacatcacctataagtaagcaactttatgaagtgataatttactatttc

SEQ ID NO: 161111 - DNA, 75 bp, synthetic construct
  source 1..75: mol_type = other DNA
gatctggcctgggcaacgatgcacgcactgtttaacgaaccgctgcagggcgaatccgccaataccagcaatatt

SEQ ID NO: 161112 - DNA, 75 bp, synthetic construct
  source 1..75: mol_type = other DNA
atggtggacagttgggaagtctggaccgactttcatgcactggccctgcgcccgtttggctggcgcgaagtgtgg

SEQ ID NO: 161113 - DNA, 75 bp, synthetic construct
  source 1..75: mol_type = other DNA
aatattcaggcttgctgagattctgaatattgatccagatgccgcattagggaaggttgaggtgtactggcaata

SEQ ID NO: 161114 - DNA, 75 bp, synthetic construct
  source 1..75: mol_type = other DNA
ctggccgccagacttcgtgaaaagggctaccttgaatggggcgttccattgttgctgcgcgaggccgagtctgtg

SEQ ID NO: 161115 - DNA, 75 bp, synthetic construct
  source 1..75: mol_type = other DNA
ttaaatttgattttgtcatataaattagattgtaaaatcgcaattcttggtaaagtgccagaaaagttcaaagaa

SEQ ID NO: 161116 - DNA, 75 bp, synthetic construct
  source 1..75: mol_type = other DNA
tgcggactctctgccgcccgcccccgcagcccccgcgccgtggccccgccatgccgccggtggcggcctggcggc

SEQ ID NO: 161117 - DNA, 75 bp, synthetic construct
  source 1..75: mol_type = other DNA
ttaagtgatcaagaaattcgttcggccctgaatcaaggttcaagtgttaagtttttacggtatctggcatccaaa

SEQ ID NO: 161118 - DNA, 75 bp, synthetic construct
  source 1..75: mol_type = other DNA
ttagttatcagtgacttctcagaacgtgggccggcagaaatatatagaaaaatcagtgagataaatagaaatagc

SEQ ID NO: 161119 - DNA, 75 bp, synthetic construct
  source 1..75: mol_type = other DNA
ttactgccgccagcgagcgcgaagcccgcgccgcactggtcgggcgtttcattctctccttcgctggccgcctgc

SEQ ID NO: 161120 - DNA, 75 bp, synthetic construct
  source 1..75: mol_type = other DNA
aattaaccttattcttatcttctctgctacagtgagacgactccacgatactgggcgttcaggatggtggtttat

SEQ ID NO: 161121 - DNA, 75 bp, synthetic construct
  source 1..75: mol_type = other DNA
agcgtggtacgcagaatacgatgaatggggtaacctgctgaatgaagagaacccgcatcagctgcagcagcttat

SEQ ID NO: 161122 - DNA, 75 bp, synthetic construct
  source 1..75: mol_type = other DNA
accgcctgtattaaggcttgaaagtgaaattcaaacgaggttaagaattgttccggtttcaaatgttctaaaaaa

SEQ ID NO: 161123 - DNA, 75 bp, synthetic construct
  source 1..75: mol_type = other DNA
tccctgctttatttttgacttcttttttaagtcacgcgcaaacagcaaatacttcagttgcgaaatcaaatgcca

SEQ ID NO: 161124 - DNA, 75 bp, synthetic construct
  source 1..75: mol_type = other DNA
atgcggttctgataaagaatggcattgtaccaacttccattaatgagttgcctgtaacgtcgctggtaaagccat

SEQ ID NO: 161125 - DNA, 75 bp, synthetic construct
  source 1..75: mol_type = other DNA
tatccgcttgcaaccgttgcatttttcttacgaaaaaggccgcagagtttcacccctgcggcctggtccgggcgc

SEQ ID NO: 161126 - DNA, 75 bp, synthetic construct
  source 1..75: mol_type = other DNA
ggaatatgtacggggatgtgacggagaccttttactgggtggtggatttgcccctatatttccagacatctgtta

SEQ ID NO: 161127 - DNA, 75 bp, synthetic construct
  source 1..75: mol_type = other DNA
gtttccgcacttgcaaaccgaattgacggaggtaaattcaatgctcagtcgggcctcgagccatccacaaagcta

SEQ ID NO: 161128 - DNA, 75 bp, synthetic construct
  source 1..75: mol_type = other DNA
actttataacgattctgcctataccgctatcgacgctgaaggcaaggctgaaatgaagtttattgcacgctatgt

SEQ ID NO: 161129 - DNA, 75 bp, synthetic construct
  source 1..75: mol_type = other DNA
aaagtagtgctggtcgaaataactcatattttaccagtaagagattacatccaatttggaactaattgggtaatt

SEQ ID NO: 161130 - DNA, 75 bp, synthetic construct
  source 1..75: mol_type = other DNA
gccatccatccagtcatcggttcgtctgagaatgacgtgcaactgcgcacgcgacacccggagacaacggctgac

SEQ ID NO: 161131 - DNA, 75 bp, synthetic construct
  source 1..75: mol_type = other DNA
agaagagagataacgcgcagttttgaactaattagtttacctatttttgaaagcctaatgcctagcggtagcata

SEQ ID NO: 161132 - DNA, 75 bp, synthetic construct
  source 1..75: mol_type = other DNA
tgatctggaaggcagcctggaagagaagcaagcaatttccgggcataagacccacgacagacagcagcatatgac

SEQ ID NO: 161133 - DNA, 75 bp, synthetic construct
  source 1..75: mol_type = other DNA
gcagtatgatgaggagtccggcctgtattacaaccgccaccgctattatgacccgctgcaggggcgatatatcac

SEQ ID NO: 161134 - DNA, 75 bp, synthetic construct
  source 1..75: mol_type = other DNA
cgggacgggcgacgtgcttatcgacgtgcctaaaccgtggaatgatcccatggcgaataaccctctgacgacgct

SEQ ID NO: 161135 - DNA, 75 bp, synthetic construct
  source 1..75: mol_type = other DNA
agcaggtattgctgaatgtgaagctatcatatagtttcattagcaataatatactttatatcgttattatatgtc

SEQ ID NO: 161136 - DNA, 75 bp, synthetic construct
  source 1..75: mol_type = other DNA
cgtgcttatcgacgtgcctaaaccgtggaatgatcccatggcgaataaccctctgacgacgctcaatttgctgga

SEQ ID NO: 161137 - DNA, 75 bp, synthetic construct
  source 1..75: mol_type = other DNA
tatgtcggcaaaaatcggtggtgaaggggatctggcaatcaatacggtgcgacaggtttcgctttccaacggtca

SEQ ID NO: 161138 - DNA, 75 bp, synthetic construct
  source 1..75: mol_type = other DNA
caccgactgctcaggctatgaaacccgttatgaatatgaccgcttcgggcaaatgacggcggtacaccgtgagga

SEQ ID NO: 161139 - DNA, 75 bp, synthetic construct
  source 1..75: mol_type = other DNA
accctctgcaactgaagatgcgacgggtagccgcaagcagatgacgtggagccgctacgggcagttacagacctt

SEQ ID NO: 161140 - DNA, 75 bp, synthetic construct
  source 1..75: mol_type = other DNA
aactcacgcagagcgaggatgaggggcttatcaccataagcgctaacttaagggttgaaccatctgaagaatgcg

SEQ ID NO: 161141 - DNA, 75 bp, synthetic construct
  source 1..75: mol_type = other DNA
tcagcaactggcctgcgggtacggtggatattacggtaagcggcaccaacagcgccggaacaacctccaccatta

SEQ ID NO: 161142 - DNA, 75 bp, synthetic construct
  source 1..75: mol_type = other DNA
cggcgcgcttggcgctttactggcaagcggtggcgatgatgactcaaaaactgaagtggttaacaacccaccgcc

SEQ ID NO: 161143 - DNA, 75 bp, synthetic construct
  source 1..75: mol_type = other DNA
tcgtgggatggcgggtctcatcgcccatggaaacgacattcgtactggatgcactggagcaggcagtatggtccc

SEQ ID NO: 161144 - DNA, 75 bp, synthetic construct
  source 1..75: mol_type = other DNA
atgccgaactaaatttaacaataaaaggcctaaacaaaaataccattatcaaagcaataatatagaattatttta

SEQ ID NO: 161145 - DNA, 75 bp, synthetic construct
  source 1..75: mol_type = other DNA
gatgacgccttccctgtgcgcaggcttcacttaaatctgttaagccagcccgacttagaaactgggtcgatgtat

SEQ ID NO: 161146 - DNA, 75 bp, synthetic construct
  source 1..75: mol_type = other DNA
gtgagcctcctgtaggaagcattaatacagcttatgtcggtgattcgatgattaagcagggtgagtcacagaagt

SEQ ID NO: 161147 - DNA, 75 bp, synthetic construct
  source 1..75: mol_type = other DNA
cctgccggacccggagctgcacccggacagtaccctcacggcgtggccggataaccgcatcgcaggaggatgcgc

SEQ ID NO: 161148 - DNA, 75 bp, synthetic construct
  source 1..75: mol_type = other DNA
gggttttttaccactaactgattcagcatttaagcagattgtcttacagggaggtgttgatgaaagttttattat

SEQ ID NO: 161149 - DNA, 75 bp, synthetic construct
  source 1..75: mol_type = other DNA
caagtgacctggtacggctggggcggggcccgtcgtaccaccatacagcacgacagaacccgtcatccatcagac

SEQ ID NO: 161150 - DNA, 75 bp, synthetic construct
  source 1..75: mol_type = other DNA
gatggcgacacggtaactattacgttgggcggtaatacttatacggcgacggtgggcagcaatctcacctggagc

SEQ ID NO: 161151 - DNA, 75 bp, synthetic construct
  source 1..75: mol_type = other DNA
caggcgggcgatatcgtcaccgtgacgctgaataatgtggattacaccacggtggtggatgcttccggcaactgg

SEQ ID NO: 161152 - DNA, 75 bp, synthetic construct
  source 1..75: mol_type = other DNA
tgaccgtcaacgggaaaagccattcagcaaccgtcggtagcgacggaacctggcaagtgacgctgcctgccacgg

SEQ ID NO: 161153 - DNA, 75 bp, synthetic construct
  source 1..75: mol_type = other DNA
gtggaagcggggcaaaccatcaccgttatcttcggtggtaaaagctacaccaccacggttgccacagataatagc

SEQ ID NO: 161154 - DNA, 75 bp, synthetic construct
  source 1..75: mol_type = other DNA
ttaacgggcaaacctatgttgcggcggtactggcggatggctcatggagcgtcggcgttccggcggcagatgtca

SEQ ID NO: 161155 - DNA, 75 bp, synthetic construct
  source 1..75: mol_type = other DNA
gcgggcgatgacgtggtcaatattatcgagcacggacaggcgctggtgattaccggcagcagctccgatctggca

SEQ ID NO: 161156 - DNA, 75 bp, synthetic construct
  source 1..75: mol_type = other DNA
caggacagcgccggaaacagcgccacggcctcgcgcagtgtggcggtggatctcaccgcgccggttatcagcata

SEQ ID NO: 161157 - DNA, 75 bp, synthetic construct
  source 1..75: mol_type = other DNA
tggcaactacaactatcaggtgcgggttatcgacaccgccggaaatatcggcgcgaccgccagccagatagtcac

SEQ ID NO: 161158 - DNA, 75 bp, synthetic construct
  source 1..75: mol_type = other DNA
gttccggcagccgacctccaggcgctgggcaatggtgatttgaccattaccgcctcggtcaccaacgcgaatggc

SEQ ID NO: 161159 - DNA, 75 bp, synthetic construct
  source 1..75: mol_type = other DNA
ttaacgccgccgaacacggacaggcgctggtgatctccggttccagcgctggcggcgaagcgggcgatgtcatca

SEQ ID NO: 161160 - DNA, 75 bp, synthetic construct
  source 1..75: mol_type = other DNA
accacgctgaccgtgcgcggcacgctcggcgcgacgcttgccgccgatgaacgggcgcaaatcagcctcgacggc

SEQ ID NO: 161161 - DNA, 75 bp, synthetic construct
  source 1..75: mol_type = other DNA
cgtgattaacgcctcggtgagcaacgccattggcaacaccggcagcagcaatcacaccattactgtcgatctcag

SEQ ID NO: 161162 - DNA, 75 bp, synthetic construct
  source 1..75: mol_type = other DNA
gaacatgtttgtaagcaatggagagggttacatacggattaatcttgcctgtccacgcgccgtgatacaagaagg

SEQ ID NO: 161163 - DNA, 75 bp, synthetic construct
  source 1..75: mol_type = other DNA
tttaatcttgccggaaatctgatgtcccatatttttattaaaaatgaaaaggtcagaaaagaatggttacgtctt

SEQ ID NO: 161164 - DNA, 75 bp, synthetic construct
  source 1..75: mol_type = other DNA
gtgtggctgcgaccaaggcggcctggtcccgatgcgacgagtggctggaacaattgaaacactatcttgatgata

SEQ ID NO: 161165 - DNA, 75 bp, synthetic construct
  source 1..75: mol_type = other DNA
atttcatggggggaatttctgatcaccaaagataattttgcgctggaatccgtgaaagaacttaagggtgaaaag

SEQ ID NO: 161166 - DNA, 75 bp, synthetic construct
  source 1..75: mol_type = other DNA
cagagtttttttatgctcagagcctggggcaaagtcagaagaacatatttaaccacgagagaatttcccaaggaa

SEQ ID NO: 161167 - DNA, 75 bp, synthetic construct
  source 1..75: mol_type = other DNA
ggttacatacggattaatcttgcctgtccacgcgccgtgatacaagaaggattagagagaataagaaaagcactg

SEQ ID NO: 161168 - DNA, 75 bp, synthetic construct
  source 1..75: mol_type = other DNA
ctcagaacggcgacagtgccggatgcgtggtggtggcaccgccagccgtaccgggcggtaaattccgcattcttg

SEQ ID NO: 161169 - DNA, 75 bp, synthetic construct
  source 1..75: mol_type = other DNA
cttccgcgcccaggctgacgccatcaaaaaactgaccgaacagtataacgtgacctatatcggtatcgactcgac

SEQ ID NO: 161170 - DNA, 75 bp, synthetic construct
  source 1..75: mol_type = other DNA
cgcaaaacggcgacagcgccggatgcgtggtggtggcaccgccagccgtgcctggtggtaagttccgcattcttg

SEQ ID NO: 161171 - DNA, 75 bp, synthetic construct
  source 1..75: mol_type = other DNA
atttcgagaagggaattgtgaatgtcagaagaaacctgacgatacttgatatgttcggtcccccaaaaacaaatg

SEQ ID NO: 161172 - DNA, 75 bp, synthetic construct
  source 1..75: mol_type = other DNA
ctctggcgtgggaggatgtggatctcgaaaagggaatagtgaatgtcagaagaaacctgacgatacttgatatgt

SEQ ID NO: 161173 - DNA, 75 bp, synthetic construct
  source 1..75: mol_type = other DNA
ggatttatatcaaccaaaccatttgaaggagtaaaaaaattacagcgaaacagaataaagcctgatccgttatct

SEQ ID NO: 161174 - DNA, 75 bp, synthetic construct
  source 1..75: mol_type = other DNA
gtaggccaggtgactgctgatatgttgttatttgccggacgggtgggccaacgtgttaacgagggtgcaacactt

SEQ ID NO: 161175 - DNA, 75 bp, synthetic construct
  source 1..75: mol_type = other DNA
tttatgttgatgaatttacagccggaagggaacgaaaaagattcgagtttacaggagtggaacatttatcgcagg

SEQ ID NO: 161176 - DNA, 75 bp, synthetic construct
  source 1..75: mol_type = other DNA
tatttccctggagcaaagattgaatgtctgaaatttgggaaagtgagaaagaaagttaaaggtaacaacacccgt

SEQ ID NO: 161177 - DNA, 75 bp, synthetic construct
  source 1..75: mol_type = other DNA
gttgattgaaaagttaaaaaatatcaatgcaattgaggaagctgctgatgctaatttgccagaagatcttcctaa

SEQ ID NO: 161178 - DNA, 75 bp, synthetic construct
  source 1..75: mol_type = other DNA
tatcgaaggtgccagcctggctgacaaaatgaaagcggtgcaggcaatcaaagaggcgacccggggttacgccga

SEQ ID NO: 161179 - DNA, 75 bp, synthetic construct
  source 1..75: mol_type = other DNA
gtaattgcaggtggttccctgattggctcaatgggggttgctcgtgttggtcagacactacagggcagtgttgaa

SEQ ID NO: 161180 - DNA, 75 bp, synthetic construct
  source 1..75: mol_type = other DNA
tgcgcgcgactattccgtagtgggctgtgtggaattatctattcccggcagaacctacggcttgcatgacatcgc

SEQ ID NO: 161181 - DNA, 75 bp, synthetic construct
  source 1..75: mol_type = other DNA
cattaaaccaagctcaatagaaaaagtttatggtaaaatggcaaaagaaaaatggaatatgctgaagcaggccgg

SEQ ID NO: 161182 - DNA, 75 bp, synthetic construct
  source 1..75: mol_type = other DNA
gaaaaacaggcctcaaacggctttcagcagtgtctgggggagatcagtacctccgtcaccgtaccggtttttcct

SEQ ID NO: 161183 - DNA, 75 bp, synthetic construct
  source 1..75: mol_type = other DNA
agatggaatttgcagccattgttacaaagtgctcagctgacagggatgactgtaacaatcatatctaatacctgc

SEQ ID NO: 161184 - DNA, 75 bp, synthetic construct
  source 1..75: mol_type = other DNA
tttcactttcatttctttcagcaagtgttctggcagcgccagattgtgtaaccggaaaggtggagtatacaaaat

SEQ ID NO: 161185 - DNA, 75 bp, synthetic construct
  source 1..75: mol_type = other DNA
ctccggcgaccctggaaggtgaagcgggattacgcaaactggccgacttcttacgggcgtttacccagcttaagt

SEQ ID NO: 161186 - DNA, 75 bp, synthetic construct
  source 1..75: mol_type = other DNA
ctctgggtggtggtctgctttgcgattgctgcgttttatttttgtattattgtttccgatcgatatgtgagtcga

SEQ ID NO: 161187 - DNA, 75 bp, synthetic construct
  source 1..75: mol_type = other DNA
actgttagctctcgttcagtgcgtattctacaggaagtggaagtagatggtgttaatgatttgatagtgtctcac

SEQ ID NO: 161188 - DNA, 75 bp, synthetic construct
  source 1..75: mol_type = other DNA
cataatccccttactgggaggaactttaatcgctatatgtaatcataaatatcgatatactaagcctttcaatga

SEQ ID NO: 161189 - DNA, 75 bp, synthetic construct
  source 1..75: mol_type = other DNA
cactggcgggtgctgtgatagaagtattcagcaataataccaacaattacaccattcgaataacaacggccacta

SEQ ID NO: 161190 - DNA, 75 bp, synthetic construct
  source 1..75: mol_type = other DNA
agaatgcaaattccttacggggtgatgatgtgtgagggttataacgcactacgccagcgtatgaatgctcatatg

SEQ ID NO: 161191 - DNA, 75 bp, synthetic construct
  source 1..75: mol_type = other DNA
ccagcattgctggtttgctggcgttacctggcatggcgatgtacaacgctacaaaatgggcggtggaaggtatgg

SEQ ID NO: 161192 - DNA, 75 bp, synthetic construct
  source 1..75: mol_type = other DNA
ctggtcggtacaggatcgtcagcagagcattccggcccaggcttttaccgttatcctgcacgatggcacattttg

SEQ ID NO: 161193 - DNA, 75 bp, synthetic construct
  source 1..75: mol_type = other DNA
gtcacgcgcacttcaagcacgaaatagaaaatcaccctgaatactttatcaaagttgacaatgtaacggtggcgt

SEQ ID NO: 161194 - DNA, 75 bp, synthetic construct
  source 1..75: mol_type = other DNA
cgaaactggtcggtgaaatggtcagggcagaggtggaacggcgcgcccgtgccggacgtggcagtttttacgata

SEQ ID NO: 161195 - DNA, 75 bp, synthetic construct
  source 1..75: mol_type = other DNA
aaagaacttgagggcgcacgcggtgaggctgaacgcacggcaaaggttatggccaataaccttgatggcgacctg

SEQ ID NO: 161196 - DNA, 75 bp, synthetic construct
  source 1..75: mol_type = other DNA
agacggtcagtccggaaatatcagcgtcagtggtgaaggaggatcatcgttctgggggggcggtggtcgcgcagg

SEQ ID NO: 161197 - DNA, 75 bp, synthetic construct
  source 1..75: mol_type = other DNA
atggtgttaactataatgtgtatacacatgacgcagcaccaggcattaaaatattaatcgatgaacacattacga

SEQ ID NO: 161198 - DNA, 75 bp, synthetic construct
  source 1..75: mol_type = other DNA
atgccgggacggcaatgcgtgccagcctgtcccgcctggtaacacagccaaaggcgaccgctgatgccctgaaag

SEQ ID NO: 161199 - DNA, 75 bp, synthetic construct
  source 1..75: mol_type = other DNA
actcttcgggttagatggtataaaagcagataatccaataaaagcaaagcaagggagttcagatgcttcaaatta

SEQ ID NO: 161200 - DNA, 75 bp, synthetic construct
  source 1..75: mol_type = other DNA
ctaccggaattttgtataagattgatggcgaatacgttttttattttcacaaccaggcgcgagagtggcgattgt

SEQ ID NO: 161201 - DNA, 75 bp, synthetic construct
  source 1..75: mol_type = other DNA
tgctaacaaaagcaaggcaacatagccttgccttggccggttcggctgcggaagatttcttcaacccagtcccgg

SEQ ID NO: 161202 - DNA, 75 bp, synthetic construct
  source 1..75: mol_type = other DNA
tataataacaattttcgctcggcatcaaaaaatcttctttatttcaaagggaaaacccaaaatggaataccgaag

SEQ ID NO: 161203 - DNA, 75 bp, synthetic construct
  source 1..75: mol_type = other DNA
atggagcaggtgataattgtaagtttgatatttcttatataacaaacaccagtaacaacccaatacaaatgaaaa

SEQ ID NO: 161204 - DNA, 75 bp, synthetic construct
  source 1..75: mol_type = other DNA
atgatcctgatcagctacggcaagaattacaggggagcgcaggagtcattatcgttggtggtgctattctcgaat

SEQ ID NO: 161205 - DNA, 75 bp, synthetic construct
  source 1..75: mol_type = other DNA
tgctgacaatcaagcagtggcgcgaaatatacggacctggtagcaacgttgtactgccagcagaagaagcggaag

SEQ ID NO: 161206 - DNA, 75 bp, synthetic construct
  source 1..75: mol_type = other DNA
cgtcatgctggcaataggtgtgccaattacttttgcgattggtctttcttcgctgttatctattattactgcctt

SEQ ID NO: 161207 - DNA, 75 bp, synthetic construct
  source 1..75: mol_type = other DNA
tataagtgtctgatcgaaagttttacaaaagctcagtctgttgtacacaatggtccagaaacaaatctggaatat

SEQ ID NO: 161208 - DNA, 75 bp, synthetic construct
  source 1..75: mol_type = other DNA
acgcaggccgaacgactccagcaaacgggaaagctgaagcaatacgttaccgtcggacaggcattacttaacgcc

SEQ ID NO: 161209 - DNA, 75 bp, synthetic construct
  source 1..75: mol_type = other DNA
tactatattctttattcgtgtttccattatatgcaaaagctacacctcaaaatataacggatttatgtaacgaat

SEQ ID NO: 161210 - DNA, 75 bp, synthetic construct
  source 1..75: mol_type = other DNA
gaggcaaaccattcaggaacttggcggaaccatgcctgaggagttgccgaccccgcaggtcagcatcaagcagtt

SEQ ID NO: 161211 - DNA, 75 bp, synthetic construct
  source 1..75: mol_type = other DNA
cagaatgagaatctttcattcaataatgtagcgtcggttgttaattttgttgagacaggcatgagtggttataaa

SEQ ID NO: 161212 - DNA, 75 bp, synthetic construct
  source 1..75: mol_type = other DNA
ttaacgttaggtatgatgatgatgagtccggtaaccatatctacaccgataaaattaattttgtttgtcgcgatg

SEQ ID NO: 161213 - DNA, 75 bp, synthetic construct
  source 1..75: mol_type = other DNA
tggataaacaagaagttaaaagagaatgcaaggagcaagaaggaaatccagaaattaagtctaaacgcagagagc

SEQ ID NO: 161214 - DNA, 75 bp, synthetic construct
  source 1..75: mol_type = other DNA
cggcgatgcgcaaactgtggaattcctggcacctatgctggcgaatatggaggaatatcgccagttaaaagcctc

SEQ ID NO: 161215 - DNA, 75 bp, synthetic construct
  source 1..75: mol_type = other DNA
ttcaggcgcgtaatgagacgttgacgcaggcaatagcccgttacggctcactcaacgccagaacattgttaactc

SEQ ID NO: 161216 - DNA, 75 bp, synthetic construct
  source 1..75: mol_type = other DNA
atgtcaaatagcatttcgctgatagctatactatcattatttacactattgccgtttataatagcatccgggaca

SEQ ID NO: 161217 - DNA, 75 bp, synthetic construct
  source 1..75: mol_type = other DNA
aaaatgatcaaaaagcgtgttctgcatgattttgtcatccgtcgtaacggtgatgagtttgatgaggcgaaggtg

SEQ ID NO: 161218 - DNA, 75 bp, synthetic construct
  source 1..75: mol_type = other DNA
ataccaatatcaacgtaatggatgcccgtgggcgaattatcggcagcggcgatcgtgagcgtattggtgaattgc

SEQ ID NO: 161219 - DNA, 75 bp, synthetic construct
  source 1..75: mol_type = other DNA
ccacctccattgtcgttttcagaagacggctgcactgaacgtcagaagccgactgcactatagcagcggaggggt

SEQ ID NO: 161220 - DNA, 75 bp, synthetic construct
  source 1..75: mol_type = other DNA
atggggaaaatccccgcctttttcctgccggtccccggacagagcacaaaggaagtcgccgccggctccgcttta

SEQ ID NO: 161221 - DNA, 75 bp, synthetic construct
  source 1..75: mol_type = other DNA
cgatgaagaaattatcatccagtgggagagcggagagtgtgaaccaactatcagtatgcttatcccactggcaaa

SEQ ID NO: 161222 - DNA, 75 bp, synthetic construct
  source 1..75: mol_type = other DNA
gaccagaaggaaataactggaattttcctgacgaactctgtatgcatgtgataggggctgtattaatgaaaaaaa

SEQ ID NO: 161223 - DNA, 75 bp, synthetic construct
  source 1..75: mol_type = other DNA
catgggaagggttgcgcatccgcattgcagatctgattgacggtccgctgcgttctgtcacgcagtggctcacgc

SEQ ID NO: 161224 - DNA, 75 bp, synthetic construct
  source 1..75: mol_type = other DNA
ctatggggaatggtgacgggttccgtttctttgctgggaggcgctatcggggcgctgttcagtccggttggtctt

SEQ ID NO: 161225 - DNA, 75 bp, synthetic construct
  source 1..75: mol_type = other DNA
agttgcttatattttcaaacatccggctggaaaattattctgggctttaacggatgaaagcaataaagagcaatc

SEQ ID NO: 161226 - DNA, 75 bp, synthetic construct
  source 1..75: mol_type = other DNA
gtttcgacattcttacccggtcaatgaatgtcgtcagggtgttgcctgcgctgtggggaatggtgacgggttccg

SEQ ID NO: 161227 - DNA, 75 bp, synthetic construct
  source 1..75: mol_type = other DNA
gatgtgctgcttgatctctataaggcgacacaaaaatacggacaggtggaccaggtctccttcttcaaggacatc

SEQ ID NO: 161228 - DNA, 75 bp, synthetic construct
  source 1..75: mol_type = other DNA
atgctggtacggccatgcgcgcaagtctgtcccgccttgcatcaccgccaaaagctgcggctgatgcactgaaag

SEQ ID NO: 161229 - DNA, 75 bp, synthetic construct
  source 1..75: mol_type = other DNA
cccgcgaccgttgttccaggcgttgccggtgcgattttaacgccgccggtgggcaaacaactcgcgccatccggc

SEQ ID NO: 161230 - DNA, 75 bp, synthetic construct
  source 1..75: mol_type = other DNA
cagcaatatactgggtagtctggccgacggcataatgaatgctttccccgctctgaaaggcattattgatcaggt

SEQ ID NO: 161231 - DNA, 75 bp, synthetic construct
  source 1..75: mol_type = other DNA
taattctcgactggtcgccgctggagttgttctatagcgccttttccagtgtgatgaattggtttggtgttgaaa

SEQ ID NO: 161232 - DNA, 75 bp, synthetic construct
  source 1..75: mol_type = other DNA
ggccgcatcgtcagcgaatccattatggatcgtttgcttactgagcctgagcatctcatcgcccaagctcttgtt

SEQ ID NO: 161233 - DNA, 75 bp, synthetic construct
  source 1..75: mol_type = other DNA
ggctcaggatgccagcacaaccctaaacctgagacaaagtgccgccactaatatcgtacgtcgtctgtttgattt

SEQ ID NO: 161234 - DNA, 75 bp, synthetic construct
  source 1..75: mol_type = other DNA
ccgggaataccgcgatgataaactgtacagcgtaaggcacctggtgtttaacggctttgagctgataagccagca

SEQ ID NO: 161235 - DNA, 75 bp, synthetic construct
  source 1..75: mol_type = other DNA
accagcaatgagccagacaaactggtggccttgcaagtcgtgattatgggtgcggcatcggctgttgtcggcatt

SEQ ID NO: 161236 - DNA, 75 bp, synthetic construct
  source 1..75: mol_type = other DNA
gttcatgaaaacatcgtcaaaatagacacgtttaactacattatgacgtattttaaagtatgcaatgattttctc

SEQ ID NO: 161237 - DNA, 75 bp, synthetic construct
  source 1..75: mol_type = other DNA
aaagagaaagcgccccgttgccggagcgcctttgtgaacgaattacctgtagcaccatattgcttactgtctacg

SEQ ID NO: 161238 - DNA, 75 bp, synthetic construct
  source 1..75: mol_type = other DNA
atgaagataaaacaatgggcggtgttagtaccttattgtttagactaaatattgaagcaatagaaaaacgacaat

SEQ ID NO: 161239 - DNA, 75 bp, synthetic construct
  source 1..75: mol_type = other DNA
agtggcagccgctcccgcttcacggcctatcagggctatctggcaaacggcaccgcgctggggaccaccgaagaa

SEQ ID NO: 161240 - DNA, 75 bp, synthetic construct
  source 1..75: mol_type = other DNA
atgagcagtaaaaacacattacgggcctggacttttttccgccaggggatccgtattcagggagcgcatgagttc

SEQ ID NO: 161241 - DNA, 75 bp, synthetic construct
  source 1..75: mol_type = other DNA
gccgcctgaccggcgaacggcagacggtggagaacccggagacgggggaactgctgtggcagcatgagacgaaac

SEQ ID NO: 161242 - DNA, 75 bp, synthetic construct
  source 1..75: mol_type = other DNA
ggggatctaaattccaaattaaatacattagaatatctaaactgtataacaaatattattaatgcttgtggagtt

SEQ ID NO: 161243 - DNA, 75 bp, synthetic construct
  source 1..75: mol_type = other DNA
gtgataacagatgtctggaaatataggggcaaatccagccagcaagaaacatttaaaatattaatcaatccagaa

SEQ ID NO: 161244 - DNA, 75 bp, synthetic construct
  source 1..75: mol_type = other DNA
ccgagctggagcgtcgttttgaatgccagtatccccacggctcatggcacagcgaaaattttacgctgttccggc

SEQ ID NO: 161245 - DNA, 75 bp, synthetic construct
  source 1..75: mol_type = other DNA
ccttggtccggtgtatccgtccggggtggaaattgtgttaccggactggacatatgagccggaagagaaggagac

SEQ ID NO: 161246 - DNA, 75 bp, synthetic construct
  source 1..75: mol_type = other DNA
ccttggtccggtctatccggcaggtgtggaaatcgtgttgccggactgggtgtatgaaccggaggaaaaggaggc

SEQ ID NO: 161247 - DNA, 75 bp, synthetic construct
  source 1..75: mol_type = other DNA
aaacagacaacggcgagcgggagaaagcgcagcgccgcagcctggcggagaagctgcagcaggaagggagcgagg

SEQ ID NO: 161248 - DNA, 75 bp, synthetic construct
  source 1..75: mol_type = other DNA
aaagaattagtagctgtttacgtaattagtactgtgacaatatcttttatccaagcacgtcgtctctataaactc

SEQ ID NO: 161249 - DNA, 75 bp, synthetic construct
  source 1..75: mol_type = other DNA
ctagtttttttaagtatgaattggaaatttataaagaactttctttgaattatgaagtggaatattgggatgaaa

SEQ ID NO: 161250 - DNA, 75 bp, synthetic construct
  source 1..75: mol_type = other DNA
cacttcatcaggtacgtataccccaaccccaggaacaaaacggatcagggtcacaataacgggcggcggtggcgg

SEQ ID NO: 161251 - DNA, 75 bp, synthetic construct
  source 1..75: mol_type = other DNA
acataagcctgattggtggtgctggatataatgttaactcccctatgcaggctggtatatctgaacttgttcttc

SEQ ID NO: 161252 - DNA, 75 bp, synthetic construct
  source 1..75: mol_type = other DNA
acattctgattgctttgattattttttttaatgttatcgctattaatgcaagtatctctatcgattgggatgtgt

SEQ ID NO: 161253 - DNA, 75 bp, synthetic construct
  source 1..75: mol_type = other DNA
atgaaaaattctaagcgcattaccttcaacatgtttattaaatccaacggcaaactgaacatcactgtcatggaa

SEQ ID NO: 161254 - DNA, 75 bp, synthetic construct
  source 1..75: mol_type = other DNA
cgattaaagacgttccctgcgtgctgtcgagcggtgctaatgattttgtcgacaacgtctataacctgatggcct

SEQ ID NO: 161255 - DNA, 75 bp, synthetic construct
  source 1..75: mol_type = other DNA
actcaaagtccaagccagacgcaaatgcagccaacaataaacagaagaaaggagattcgaaagatgatgcaagga

SEQ ID NO: 161256 - DNA, 75 bp, synthetic construct
  source 1..75: mol_type = other DNA
gcccccttcacggtcatccatccaaaaggcatccgcggcgtgttcagcccggctgaaatccaagagatcttacag

SEQ ID NO: 161257 - DNA, 75 bp, synthetic construct
  source 1..75: mol_type = other DNA
tttagaagtgaccgaaaacggacatgttgctcgtggtcagtttaatttgatcatacctaatgatccgccagctca

SEQ ID NO: 161258 - DNA, 75 bp, synthetic construct
  source 1..75: mol_type = other DNA
gcatgacgctatctatgacaccaactacagcgcctacgcctacgcctacgcctacgcctacgcctacgcagctta

SEQ ID NO: 161259 - DNA, 75 bp, synthetic construct
  source 1..75: mol_type = other DNA
atgacgctgctggtacaactgcaccacaagtagcaacttacttaaatccaactgctaatgataaaactaaagctt

SEQ ID NO: 161260 - DNA, 75 bp, synthetic construct
  source 1..75: mol_type = other DNA
ttgagatatataaaatgcacatgttttatattgattagtttattgccaaatatagcatatccccattcattgtca

SEQ ID NO: 161261 - DNA, 75 bp, synthetic construct
  source 1..75: mol_type = other DNA
tagtaatccacatgtgcaagggaagtttgtttgtcaagatgtatttgtatctcagggaagctatataacttctgg

SEQ ID NO: 161262 - DNA, 75 bp, synthetic construct
  source 1..75: mol_type = other DNA
atctggtacgcgatgcccgcgaaccggaaaaagtggccctgttacagaaagtctggcgtcagcgtttaagctatc

SEQ ID NO: 161263 - DNA, 75 bp, synthetic construct
  source 1..75: mol_type = other DNA
tatgggtggcgaaaccgaaaaaggcatcgccctgccgatcctgccgtggtggaatgcggttgccatcaacgacgt

SEQ ID NO: 161264 - DNA, 75 bp, synthetic construct
  source 1..75: mol_type = other DNA
tgattctgctattaccaacttgggtaatactgttaacaacctgtcttctgcacgtagccgtatcgaagattccga

SEQ ID NO: 161265 - DNA, 75 bp, synthetic construct
  source 1..75: mol_type = other DNA
atggatgtggaacttcatgactggttgatttacgcatttgcacgagaaaataacttaaaatggcatattgattcg

SEQ ID NO: 161266 - DNA, 75 bp, synthetic construct
  source 1..75: mol_type = other DNA
tttcgcttccgctggcattattgaaggtgaatatgttcctgttaatgcagcaaacaatagaaatgtgattcaggc

SEQ ID NO: 161267 - DNA, 75 bp, synthetic construct
  source 1..75: mol_type = other DNA
taagtgtgactagagtgggagatacgttatctgcagtattaagcgcaggtagcttgcgctttgctaaggagcaca

SEQ ID NO: 161268 - DNA, 75 bp, synthetic construct
  source 1..75: mol_type = other DNA
acaccaggatatttaagatcgcaagcgtagataatgtttctaaaaaggatatattagaactgaaattacatagag

SEQ ID NO: 161269 - DNA, 75 bp, synthetic construct
  source 1..75: mol_type = other DNA
aattcgaccctgttacaacaaacctaaagaagaagtctatcagatatcgttcgttagtgaatggttcaacaggat

SEQ ID NO: 161270 - DNA, 75 bp, synthetic construct
  source 1..75: mol_type = other DNA
actgcgataacactgctttggcgcttaaacttttgtcagattataagaatgagctgctggcagatacgataactg

SEQ ID NO: 161271 - DNA, 75 bp, synthetic construct
  source 1..75: mol_type = other DNA
ggcgatgtgattaatcacaaaactgaaaacagctatgtgtacgccgaatctggcctggtcaccaccgtcggggtg

SEQ ID NO: 161272 - DNA, 75 bp, synthetic construct
  source 1..75: mol_type = other DNA
tcaattgatagatgttctttctggaacaatgagtttggttggcccaagaccggaagtgagggagtttattgatga

SEQ ID NO: 161273 - DNA, 75 bp, synthetic construct
  source 1..75: mol_type = other DNA
aggttcctgaatgcaggggtgatggacgcaggtctggtaaggccggtgacagaaggaacgccgcagggcggccca

SEQ ID NO: 161274 - DNA, 75 bp, synthetic construct
  source 1..75: mol_type = other DNA
aaattatatcaacttttcacgcagaaaaagttattaatgatctgttaaaaaacgattataaaatttccctttttc

SEQ ID NO: 161275 - DNA, 75 bp, synthetic construct
  source 1..75: mol_type = other DNA
acacccaaaagtgaccaggttattatgttgcaaaatcaatacgttcgtgaaatgcgaaaatatggcgtacgaggt

SEQ ID NO: 161276 - DNA, 75 bp, synthetic construct
  source 1..75: mol_type = other DNA
cagatacaacttaccgagagttgaataaagcagcacagcgtagcattacagcgccagacaggataggagaaggaa

SEQ ID NO: 161277 - DNA, 75 bp, synthetic construct
  source 1..75: mol_type = other DNA
cgtttgtaccggagacaaactgatggtatgtgccagactgcttgggcaacgcagggggatttacctgcttgaagc

SEQ ID NO: 161278 - DNA, 75 bp, synthetic construct
  source 1..75: mol_type = other DNA
ggcagaacagttgccgggcattccgattgcaggcggcgatgactttggctccgtcaccgccgggctggcacgctg

SEQ ID NO: 161279 - DNA, 75 bp, synthetic construct
  source 1..75: mol_type = other DNA
taacgcccaggaaaaaccggacgttatctacctgaccggcggtagcgcccgttctccgctgattaaaaaagcgct

SEQ ID NO: 161280 - DNA, 75 bp, synthetic construct
  source 1..75: mol_type = other DNA
gggccgggtatcactgggtggtcgacctcgatctggagaagttcttcgaccgggtaaatcacgatgtgctgatga

SEQ ID NO: 161281 - DNA, 75 bp, synthetic construct
  source 1..75: mol_type = other DNA
cgccggcacggactatggccgcagcgcaccctccggctcgatcaatatgatcagcaaactgccgcgccttgactc

SEQ ID NO: 161282 - DNA, 75 bp, synthetic construct
  source 1..75: mol_type = other DNA
aacctgactgacgccctcaaaaacgtccccggtgtcggggcgttttatgctggggagaatggcagctcaacgacc

SEQ ID NO: 161283 - DNA, 75 bp, synthetic construct
  source 1..75: mol_type = other DNA
ttttcataaacgttggtttgggagaagcggcaaaacgaaatgtgggtaacgagcaaaaccaaattccggatatgg

SEQ ID NO: 161284 - DNA, 75 bp, synthetic construct
  source 1..75: mol_type = other DNA
cgaaatatctgctggctccggaagtgagtgccctgctccattacgtcccggatctgcgccgcaagatgctgttgg

SEQ ID NO: 161285 - DNA, 75 bp, synthetic construct
  source 1..75: mol_type = other DNA
acgaagattgaagtgggctttgcggtagataaagacggtatcaccattacggtggacgacgatggtcctggcgtt

SEQ ID NO: 161286 - DNA, 75 bp, synthetic construct
  source 1..75: mol_type = other DNA
cgacgggcagtacaaaacagatggcatggagccgttacggtcaactgctggcctttacggactgctcggggtaca

SEQ ID NO: 161287 - DNA, 75 bp, synthetic construct
  source 1..75: mol_type = other DNA
cgccggacatacagtgcaaactggtactgcgaagataccgagcaccatttcaactcagatatccgggacattaca

SEQ ID NO: 161288 - DNA, 75 bp, synthetic construct
  source 1..75: mol_type = other DNA
gcggtattgaagaatgaaaaattcatgtttatggttaagctcggcgggcagctttctcctaagcctcaatgcata

SEQ ID NO: 161289 - DNA, 75 bp, synthetic construct
  source 1..75: mol_type = other DNA
tggagaatatttcatctcattaccagtgaaaaataatgaaattgactggttttttatggataattatatagaaga

SEQ ID NO: 161290 - DNA, 75 bp, synthetic construct
  source 1..75: mol_type = other DNA
ttaccgatctgactgaagattcaacgctggtagatggttttctggcacagattcattgtctgccatgtgtaccga

SEQ ID NO: 161291 - DNA, 75 bp, synthetic construct
  source 1..75: mol_type = other DNA
tcatcttgcgcaacaaggcgtcatccagcttaaagatgagaacgtctaccccctgcaactgaagaaagctgaagc

SEQ ID NO: 161292 - DNA, 75 bp, synthetic construct
  source 1..75: mol_type = other DNA
aatatgccgacgaactggaacacattacggcaaaagccttttgcgaaggcaccggtctgaataccgatctgctgt

SEQ ID NO: 161293 - DNA, 75 bp, synthetic construct
  source 1..75: mol_type = other DNA
atcgtcatatccggcaggcactttccagtgcgccgcgtaaccagtacaccgtcgagctgcacctgcaaatgatta

SEQ ID NO: 161294 - DNA, 75 bp, synthetic construct
  source 1..75: mol_type = other DNA
gtgcggtttctggcgatgtaaaaaccagtgcaggccgtcgtgatgcgatcagcagcattaactctgttacacgac

SEQ ID NO: 161295 - DNA, 75 bp, synthetic construct
  source 1..75: mol_type = other DNA
caacattgcgcctcaccggataacgccggcttggtgtggatactacgtcgcaattcatcttcacttcatccctga

SEQ ID NO: 161296 - DNA, 75 bp, synthetic construct
  source 1..75: mol_type = other DNA
gaatatattttaaaagagaataaaaattgcaatatgtggtggacccatacaccttgttgtaatgacaacattttg

SEQ ID NO: 161297 - DNA, 75 bp, synthetic construct
  source 1..75: mol_type = other DNA
cgacagtgaaacagtacaggatgtcatactgggagcagtggaacgccgctttggcagcgagcttccggcgtctcc

SEQ ID NO: 161298 - DNA, 75 bp, synthetic construct
  source 1..75: mol_type = other DNA
agttttgattctgaagtttctaatgcagaaaagagtcagccttctagcgggcgtttatccccacatgttgactca

SEQ ID NO: 161299 - DNA, 75 bp, synthetic construct
  source 1..75: mol_type = other DNA
gagattatacatctaactcggaagatgttaattgacaccgctttttttttgagtgaattctctcatttcttgccg

SEQ ID NO: 161300 - DNA, 75 bp, synthetic construct
  source 1..75: mol_type = other DNA
ttgtcaggttttacctctcaacgtgcgggggttttctctttccagcaaccaatgccaccagggataaagccccgc

SEQ ID NO: 161301 - DNA, 75 bp, synthetic construct
  source 1..75: mol_type = other DNA
gatgaaattcccactggaataaaagttgctctcaatgatgaacagaacttattctgtactattacttttcaacac

SEQ ID NO: 161302 - DNA, 75 bp, synthetic construct
  source 1..75: mol_type = other DNA
ccaacaccattccgttccaggcgcgttattttgcaaccggtgccgcaaccccgggtgctgctaatgcggatgcga

SEQ ID NO: 161303 - DNA, 75 bp, synthetic construct
  source 1..75: mol_type = other DNA
gaatcagtgaactgtacgccatcgaggatgaaatacggggattaccagagtcagagcgtcttgcagtcaggcagc

SEQ ID NO: 161304 - DNA, 75 bp, synthetic construct
  source 1..75: mol_type = other DNA
acgtcattctcagacgaaccgatgactggaaggacgaccgccgcagccgtcctacggatgatacggatgtgcttc

SEQ ID NO: 161305 - DNA, 75 bp, synthetic construct
  source 1..75: mol_type = other DNA
acagagaatggcgaacaggcgaaggcgcggcaccgtagcctggcggaggtgttgcaggaggacacgggtgtgacg

SEQ ID NO: 161306 - DNA, 75 bp, synthetic construct
  source 1..75: mol_type = other DNA
cgcgtaaaccggaggtgacctggtacgggtgggacggcgacaggctgacgacggtacagaccgacaccacgcgta

SEQ ID NO: 161307 - DNA, 75 bp, synthetic construct
  source 1..75: mol_type = other DNA
atctacactcaaatggtaaaggaacgggtgtatagcctgaaacagtccgttattgatactgcttttgcgggtaat

SEQ ID NO: 161308 - DNA, 75 bp, synthetic construct
  source 1..75: mol_type = other DNA
cgcaccgattatggacggctcgcggcttattggcgttttgagcgtaggcaaaccgaacgcggcgatggctccggt

SEQ ID NO: 161309 - DNA, 75 bp, synthetic construct
  source 1..75: mol_type = other DNA
atgagatcgttagctgatttcgaatttaataaagcgccattgtgcgaaggcatgatcctggcttgcgaagcaatc

SEQ ID NO: 161310 - DNA, 75 bp, synthetic construct
  source 1..75: mol_type = other DNA
ataatttcgtactgtatatatttagtgttattgaaaaatctcgacagaaagagttttctgtatttaatcgttgct

SEQ ID NO: 161311 - DNA, 75 bp, synthetic construct
  source 1..75: mol_type = other DNA
ggtcttgttaccctggacggtgttcctgccaacaacgctgccaaaacgtgggcaacctcaacaccggacgaaatc

SEQ ID NO: 161312 - DNA, 75 bp, synthetic construct
  source 1..75: mol_type = other DNA
cggagagctggagcgactcgaccagactctgaacctgccactggtggggtacacatggacccgcgatattcagtt

SEQ ID NO: 161313 - DNA, 75 bp, synthetic construct
  source 1..75: mol_type = other DNA
atgagacgactctgacggcaacagtgaaagatccttttgataacgcagtaaaagacctaccggtcaccttcagta

SEQ ID NO: 161314 - DNA, 75 bp, synthetic construct
  source 1..75: mol_type = other DNA
tggaaaaattaatcgcgctgttttacggcgaatgggggtttaaagcctcacgcggcgtttatcgtctttccgatg

SEQ ID NO: 161315 - DNA, 75 bp, synthetic construct
  source 1..75: mol_type = other DNA
caggcctttgatcctgcctatggccagcgcgtcgttgcattgatgcttcaggaatctgaccgctttatcaataaa

SEQ ID NO: 161316 - DNA, 75 bp, synthetic construct
  source 1..75: mol_type = other DNA
catgtgaagtactttttcttaaatccagcaccacagatatcgcaacttcttggtttaaacatactggctatgaag

SEQ ID NO: 161317 - DNA, 75 bp, synthetic construct
  source 1..75: mol_type = other DNA
ctgcatatggaaaaacagcctttatcagctttgctgtacctgcaggtacttcctatcagataacatcctatccaa

SEQ ID NO: 161318 - DNA, 75 bp, synthetic construct
  source 1..75: mol_type = other DNA
agccaatgaggcggtgacattcacgctaccggcagacgtgagcgcaagcttcactctcggacaaggcggttccgc

SEQ ID NO: 161319 - DNA, 75 bp, synthetic construct
  source 1..75: mol_type = other DNA
ggcaaaagaaaccctgaacgcacaagaaacccgtttcgaactccgcaagattacccaggaactacagaagcaagc

SEQ ID NO: 161320 - DNA, 75 bp, synthetic construct
  source 1..75: mol_type = other DNA
atgaattgaccaaagcaatggaaagcctagccccagttatggagggcctgggccgcgcgtccgcagacgtcctaa

SEQ ID NO: 161321 - DNA, 75 bp, synthetic construct
  source 1..75: mol_type = other DNA
cggcaaggttaaggatctggtgaatgcaactgtggatgaccgggagcgcgatcacctcaatatgatgacagccgg

SEQ ID NO: 161322 - DNA, 75 bp, synthetic construct
  source 1..75: mol_type = other DNA
tgttttatcgatgtcgatgcggcgctgatagacgacatttttctggaaatgatggaatacgccgagaaaaattcc

SEQ ID NO: 161323 - DNA, 75 bp, synthetic construct
  source 1..75: mol_type = other DNA
tttctggatatggtgtcagggcagacagagcttatcgctcatgtctatcccgagattgataaagcgatcctgaat

SEQ ID NO: 161324 - DNA, 75 bp, synthetic construct
  source 1..75: mol_type = other DNA
tgcatgccgaatatgagcaattagtagccattccgacctggggaaaaggaagtatcacaaagttattggcattca

SEQ ID NO: 161325 - DNA, 75 bp, synthetic construct
  source 1..75: mol_type = other DNA
ttcaggaaagcgaagtgatgaacatccttggcatatcctcaagacagacaatctggaattacacgaaacagcaca

SEQ ID NO: 161326 - DNA, 75 bp, synthetic construct
  source 1..75: mol_type = other DNA
ctggcgctgagccaggacctgctgctggtgacgagccgcttctggaaccacctgcaaacactatcgcttttgccg

SEQ ID NO: 161327 - DNA, 75 bp, synthetic construct
  source 1..75: mol_type = other DNA
gcgggaactggaaacccgaccggagtattttcagggaaagaccatgaatatgcctcccaaaggaggggagtcatg

SEQ ID NO: 161328 - DNA, 75 bp, synthetic construct
  source 1..75: mol_type = other DNA
gtagcctccacactccgggaatcatttgaacgccagaagcaatacagcggcctgaaagagcagggagtgagcgcc

SEQ ID NO: 161329 - DNA, 75 bp, synthetic construct
  source 1..75: mol_type = other DNA
ggcggtgacggtacagcggcaggcattaaggagagttacacggggtcacgtgatatgactcccaagtcagaacag

SEQ ID NO: 161330 - DNA, 75 bp, synthetic construct
  source 1..75: mol_type = other DNA
gtacaaaaaaaagaaattaatcatatctttaattactgtatcgaagatgaattggttgctgacgtcatgatttta

SEQ ID NO: 161331 - DNA, 75 bp, synthetic construct
  source 1..75: mol_type = other DNA
catccagcctgtgttttaagcactgattcgataaataaaaccgtaagtttaggtgtctggtctgccagacaattt

SEQ ID NO: 161332 - DNA, 75 bp, synthetic construct
  source 1..75: mol_type = other DNA
gcgatttttgtcagaaaagagctgggttgattttttttggtatgcttttcatgactacagatgtgtttactcaat

SEQ ID NO: 161333 - DNA, 75 bp, synthetic construct
  source 1..75: mol_type = other DNA
agtcttaccggcaggaaaggcaactctacactttagcgccattgatgatgatggcgcactacagtatttcactta

SEQ ID NO: 161334 - DNA, 75 bp, synthetic construct
  source 1..75: mol_type = other DNA
aagcggagtttgtgactcatgtgggttatcgcgttctcttcagagtgttaaatgcaaatggtaaaccggtacctt

SEQ ID NO: 161335 - DNA, 75 bp, synthetic construct
  source 1..75: mol_type = other DNA
ttatgtgcctgatgctgaaaactcagaggctgaaaagtttgttaaatcaaaaatgagcgatgtacagcgagcaag

SEQ ID NO: 161336 - DNA, 75 bp, synthetic construct
  source 1..75: mol_type = other DNA
tatattcgggattattgttagctatagctggaagcagctcggcgattgctgctgatgtaactactgatacagtaa

SEQ ID NO: 161337 - DNA, 75 bp, synthetic construct
  source 1..75: mol_type = other DNA
ttaaaaatgaattaaataaagaagatatattgaaactgatggcagcaagagaaaaagtggcgggagcatcagaca

SEQ ID NO: 161338 - DNA, 75 bp, synthetic construct
  source 1..75: mol_type = other DNA
gctattagaaccaatgattataatgttgttaatatattgctagccaatataaaagccaaaatgtttaaaaatgaa

SEQ ID NO: 161339 - DNA, 75 bp, synthetic construct
  source 1..75: mol_type = other DNA
atactccttgcgaaagattacctcggtgtgagctggattcctaaggctttaagaaataatcaaaataaaattgtc

SEQ ID NO: 161340 - DNA, 75 bp, synthetic construct
  source 1..75: mol_type = other DNA
tacctgatggtgaatttataattaatgttgtatatatccatgactgtcatgcaattgccatacataaagacaaat

SEQ ID NO: 161341 - DNA, 75 bp, synthetic construct
  source 1..75: mol_type = other DNA
ataagtttggggatgcattatctgtcttttttcacagaatggaaaaagagaagttaacgcatatggcggcaatcg

SEQ ID NO: 161342 - DNA, 75 bp, synthetic construct
  source 1..75: mol_type = other DNA
caaatttaaaagagttgaccagaaaatataattttagccaggaagacctggaaactctactccttgcgaaagata

SEQ ID NO: 161343 - DNA, 75 bp, synthetic construct
  source 1..75: mol_type = other DNA
agcagaccgcctcacgcaccgcaccgtgaatggcgaaaccgcagagcggtggcagtatgacgaacgcggctggct

SEQ ID NO: 161344 - DNA, 75 bp, synthetic construct
  source 1..75: mol_type = other DNA
actcatcacgcgcatcaccacgccggatggcagggcatcggcgttttactataaccaccacagccagttaacgtc

SEQ ID NO: 161345 - DNA, 75 bp, synthetic construct
  source 1..75: mol_type = other DNA
aagcacctagacagcaaacagagacaatgagtgcagtttttgctccggttagcgggtttacggcggttgatctag

SEQ ID NO: 161346 - DNA, 75 bp, synthetic construct
  source 1..75: mol_type = other DNA
cagcaactggtgctcggttcattggcgttcatggtggtgttcctccattggttgacgaagccgacgaaggccgcc

SEQ ID NO: 161347 - DNA, 75 bp, synthetic construct
  source 1..75: mol_type = other DNA
tacgttcagcaccgcgcttgattctctcaacgagatagagcaaagccccggcctttcaaaagcagtaggaattcg

SEQ ID NO: 161348 - DNA, 75 bp, synthetic construct
  source 1..75: mol_type = other DNA
agacagatagccagagaaagcaatcagttaaagcttgaagagctaaaacagaaacaggcagatgttcggcaaaag

SEQ ID NO: 161349 - DNA, 75 bp, synthetic construct
  source 1..75: mol_type = other DNA
tcgctggcccgtcgattgtcgggcatgctctccgctgggctgcattttgatcacagtattatcaaagaccctaat

SEQ ID NO: 161350 - DNA, 75 bp, synthetic construct
  source 1..75: mol_type = other DNA
cgggctggtggggtaatagttacgccacctattctgtttcgcaaaacgataattccggtagctcacatcaactcg

SEQ ID NO: 161351 - DNA, 75 bp, synthetic construct
  source 1..75: mol_type = other DNA
ggaagcgtctctcgtggaacgtctcctggagttattccaatactgccagacaggggacggggaacaaccatgcca

SEQ ID NO: 161352 - DNA, 75 bp, synthetic construct
  source 1..75: mol_type = other DNA
atgggccaccaggttgtggtaaaaccttgacatcaaaatatattgcatcctgtctaaatttaccgcttcttactg

SEQ ID NO: 161353 - DNA, 75 bp, synthetic construct
  source 1..75: mol_type = other DNA
gacttgctcaactatgtgaaggccaatggcgaattgagcaacgtgccaagcgggatgcacgccgtagtgtctgct

SEQ ID NO: 161354 - DNA, 75 bp, synthetic construct
  source 1..75: mol_type = other DNA
caattcatctttacctcgccgacgttcaccgccaatgaagtaaccgacaagattcgtaaggaacgcaaagaattc

SEQ ID NO: 161355 - DNA, 75 bp, synthetic construct
  source 1..75: mol_type = other DNA
accgctgaaagaggttcggccggggatctatactgcaaaactggagaacggtacatcaattactttacgtgatgt

SEQ ID NO: 161356 - DNA, 75 bp, synthetic construct
  source 1..75: mol_type = other DNA
ttgagcgtttgccgccgtcattgttgcaggcgtcggctgatctcggcgcacgtccacgacaaacctttcgctatg

SEQ ID NO: 161357 - DNA, 75 bp, synthetic construct
  source 1..75: mol_type = other DNA
ggagaccaaacagtggcggtatgaatttcgactggctggatggttcatcaagtggcacggtggtggggaatggaa

SEQ ID NO: 161358 - DNA, 75 bp, synthetic construct
  source 1..75: mol_type = other DNA
tttgatcgcgcccgcgaggctgcaaacaaggccggaaacggcattgtcagggcgcaacgccagttaagcgcactt

SEQ ID NO: 161359 - DNA, 75 bp, synthetic construct
  source 1..75: mol_type = other DNA
gcccgttacgaccgactgagcaccacagcgggcaaattacgcaccggcggcgcaatggcagttggcgcaagcgcg

SEQ ID NO: 161360 - DNA, 75 bp, synthetic construct
  source 1..75: mol_type = other DNA
attatttttcggatacagagagaatttctccggaagctggtgtgttttgcgtcagacatatgatatccgtaacat

SEQ ID NO: 161361 - DNA, 75 bp, synthetic construct
  source 1..75: mol_type = other DNA
agattgtcagtatcctccgcgaagctgaagccggggtttctgcccgtgaactctgccgcagtatggacacaccac

SEQ ID NO: 161362 - DNA, 75 bp, synthetic construct
  source 1..75: mol_type = other DNA
taagattgctggaggattcattagcattattgacggaatttgagaataatctattttctggggggggggggattt

SEQ ID NO: 161363 - DNA, 75 bp, synthetic construct
  source 1..75: mol_type = other DNA
tctttatttagtgatagcggatatgatcttcagacaggtgtatggttctgtcttatttctgcacatctatatggt

SEQ ID NO: 161364 - DNA, 75 bp, synthetic construct
  source 1..75: mol_type = other DNA
ctgtcgcgcagaagtaaaaatctgcagctcattgagaatgcgatagaactcgttgatgaaaagattatcgatcag

SEQ ID NO: 161365 - DNA, 75 bp, synthetic construct
  source 1..75: mol_type = other DNA
atttaaaaggtttagaaaaaaaacacgtgttgtataattgtggttattattactcccgttccagcatagtgaata

SEQ ID NO: 161366 - DNA, 75 bp, synthetic construct
  source 1..75: mol_type = other DNA
cttgtgaatatgaactgattggccttaatcatcttttaagtgaggagggttatagtgttgaaagttatactggtg

SEQ ID NO: 161367 - DNA, 75 bp, synthetic construct
  source 1..75: mol_type = other DNA
ttatgaaaatgataaagatgtggtgagagaactactgtcgctgagcagaaataatgccgtctgctctttgcatat

SEQ ID NO: 161368 - DNA, 75 bp, synthetic construct
  source 1..75: mol_type = other DNA
caccacctcactgaccggtaaggccggtacgctgaatgtcagtgtggaagccgaaagtgccggtcgtgcggggaa

SEQ ID NO: 161369 - DNA, 75 bp, synthetic construct
  source 1..75: mol_type = other DNA
tccgacatggaaaggcggtggcacagtcggggtgacgtttgttatggataaccggagcaatatttttccgcaacc

SEQ ID NO: 161370 - DNA, 75 bp, synthetic construct
  source 1..75: mol_type = other DNA
gagagttttactaaagagcagaaaaaagctaatagtaaatatgatattgtagattataactgtaaggtttatttt

SEQ ID NO: 161371 - DNA, 75 bp, synthetic construct
  source 1..75: mol_type = other DNA
tgccagtgataagtttggggaggcattatctgtcttttttcacagaatggaaaaagagaagttaacgcatatgac

SEQ ID NO: 161372 - DNA, 75 bp, synthetic construct
  source 1..75: mol_type = other DNA
cggcgattcgcctggcgttgcaacacgggttcactttcgatgaaattgtggagcagtttacccgtgactttgatg

SEQ ID NO: 161373 - DNA, 75 bp, synthetic construct
  source 1..75: mol_type = other DNA
tggctttgttcgtgatgaaacccattattgaagctggttatgaaaattatctaaatggccctcaaaaatttgata

SEQ ID NO: 161374 - DNA, 75 bp, synthetic construct
  source 1..75: mol_type = other DNA
tgccacaaaaaaagtcatcgcactgtcagcaaagttcgtcagcgagtgtgaccatgatgtccggctgaattatta

SEQ ID NO: 161375 - DNA, 75 bp, synthetic construct
  source 1..75: mol_type = other DNA
gtgcgccgtctttatcagtcgatccggcacgacctctgcaatctctggcattgccttcccgactggctccggcat

SEQ ID NO: 161376 - DNA, 75 bp, synthetic construct
  source 1..75: mol_type = other DNA
cgtacgctggtactgcaaatttgcagcacacgcagcaactggtgctcggttcattggcgttcatggtggtgttcc

SEQ ID NO: 161377 - DNA, 75 bp, synthetic construct
  source 1..75: mol_type = other DNA
cgataaaattaattttgtttgtcgcgatggacggttggacaatgttatcaaaagggctcattttacaatattttg

SEQ ID NO: 161378 - DNA, 75 bp, synthetic construct
  source 1..75: mol_type = other DNA
atgagtccggtaaccatatctacaccgataaaattaattttgtttgtcgcgatggacggttggacaatgttatca

SEQ ID NO: 161379 - DNA, 75 bp, synthetic construct
  source 1..75: mol_type = other DNA
aatattattttgttttatgtgcttacaacaataacaatgtttttcttctattttatacgaaaagggaaggttgtt

SEQ ID NO: 161380 - DNA, 75 bp, synthetic construct
  source 1..75: mol_type = other DNA
gaagcgatggggttgtgtaccgcatcaccggctctgcgaccggaaaagccggaacactgaatgttaatgtggagg

SEQ ID NO: 161381 - DNA, 75 bp, synthetic construct
  source 1..75: mol_type = other DNA
actcgttttattgaatcactgaaagctaagttgctggtcgattgccaacgtaagaacctacgatggaaacgtaac

SEQ ID NO: 161382 - DNA, 75 bp, synthetic construct
  source 1..75: mol_type = other DNA
tcttttttcagcgaactgaagaacgattcggccaccgcattatcccagcagttgccgcaaaatggcatgatagcg

SEQ ID NO: 161383 - DNA, 75 bp, synthetic construct
  source 1..75: mol_type = other DNA
aaaagctgctgaaggtaattctacccttatatcaaaaactaagagactccttagtcgagttgatggttttagagc

SEQ ID NO: 161384 - DNA, 75 bp, synthetic construct
  source 1..75: mol_type = other DNA
ccgtaaacacttgcgccttgtcactctctccggcaaaccttaactttcaacaggtcagctttagtcagtttgaaa

SEQ ID NO: 161385 - DNA, 75 bp, synthetic construct
  source 1..75: mol_type = other DNA
tttgatgaatctgggctacgaaccgttatttcccgcagaaatggcggaagtgaatccggcaatcctcgccgcgct

SEQ ID NO: 161386 - DNA, 75 bp, synthetic construct
  source 1..75: mol_type = other DNA
aagtgggtgagttaatatcatattgtatagcaatccattttttaaaagcagcgcaattagtctcaaaaatggctc

SEQ ID NO: 161387 - DNA, 75 bp, synthetic construct
  source 1..75: mol_type = other DNA
tcgcaatatccatgtcattaagtataaaatacagggtattaatcacatcatgttttctagttgctgtaagtacaa

SEQ ID NO: 161388 - DNA, 75 bp, synthetic construct
  source 1..75: mol_type = other DNA
cttacgcagcagcgtccgcgacagcatctgccgcattattcaaagcgatattcagcattactggaatctgcgaat

SEQ ID NO: 161389 - DNA, 75 bp, synthetic construct
  source 1..75: mol_type = other DNA
gatgaaaatcaaaagaagcatcttttttctgcgataaatgcatcctctcctcaaaatcctttttcaaagacagtt

SEQ ID NO: 161390 - DNA, 75 bp, synthetic construct
  source 1..75: mol_type = other DNA
tatgaccgttacggcaggctgacggagaaaaccgacctcatcccggaagggggtatccgtacggatgatgagcgc

SEQ ID NO: 161391 - DNA, 75 bp, synthetic construct
  source 1..75: mol_type = other DNA
gataagcctgaaggtgggtggctcgtttatcgttattcagccgggcggcgtggatatagtggggccgaagataaa

SEQ ID NO: 161392 - DNA, 75 bp, synthetic construct
  source 1..75: mol_type = other DNA
tataaaatcaaagcaaacaagagatttatttctagatgaaactggctacgaaatagttgatccaaacgatgagca

SEQ ID NO: 161393 - DNA, 75 bp, synthetic construct
  source 1..75: mol_type = other DNA
atgccatagaaggcgccacaccgctatttagcgatgtggatgagttatacagtttgctggaagaggcggcgcaag

SEQ ID NO: 161394 - DNA, 75 bp, synthetic construct
  source 1..75: mol_type = other DNA
gatattttatttggcacgaccgggccgcgcggcgggaagaaagacggtgtggtacaaacgatggcaaaaagcgcc

SEQ ID NO: 161395 - DNA, 75 bp, synthetic construct
  source 1..75: mol_type = other DNA
aacaagcagagggcattactatcgatgacaaatttaatttgtatattgtcagtgagcccaatttattttaccgtt

SEQ ID NO: 161396 - DNA, 75 bp, synthetic construct
  source 1..75: mol_type = other DNA
tatccaaggtgcgttacctttgtcgctaaccgacttgctcttttctttaataaagaaaagtaacaatgatgctat

SEQ ID NO: 161397 - DNA, 75 bp, synthetic construct
  source 1..75: mol_type = other DNA
tcaaatatggattcgagataacgatatagtctttgctgcagttggaaatacaattggtaaagtagcgttgaagac

SEQ ID NO: 161398 - DNA, 75 bp, synthetic construct
  source 1..75: mol_type = other DNA
atggctcgccgtatgaacggtgtttacgcggcatttatgctggtcgcttttatgatgggggtggccggggcgcta

SEQ ID NO: 161399 - DNA, 75 bp, synthetic construct
  source 1..75: mol_type = other DNA
aaggctgtgcggcagaacaggaatgataatcaggatgagagcaaagaagtcagaaaagcacacaaaaagtggcga

SEQ ID NO: 161400 - DNA, 75 bp, synthetic construct
  source 1..75: mol_type = other DNA
ctttaggcaatatagctaaagaaggtaaagaaactgcttgtggtttgattaaaccacaaacaaaaaaagcccccc

SEQ ID NO: 161401 - DNA, 75 bp, synthetic construct
  source 1..75: mol_type = other DNA
gtgtggtgcaaacaatggccaaaagcgccgctcgccaggtgacgaatcagattgtacgcggagtgctggggagtt

SEQ ID NO: 161402 - DNA, 75 bp, synthetic construct
  source 1..75: mol_type = other DNA
tgaatgcaggctgtataagagcagcgcgtatccacttaccctgtgcggttgagaaaatcgccttcgaccgcttcc

SEQ ID NO: 161403 - DNA, 75 bp, synthetic construct
  source 1..75: mol_type = other DNA
cctggttactgattcaggttttctccccgcaaaatattcccggtttcattattatcggtgcaatttatctgaccg

SEQ ID NO: 161404 - DNA, 75 bp, synthetic construct
  source 1..75: mol_type = other DNA
cgatattaataaatttgtatctagcgttaaaacgcttcttggtgaagttcgtggaaacagcagttttactgtctt

SEQ ID NO: 161405 - DNA, 75 bp, synthetic construct
  source 1..75: mol_type = other DNA
aatctggaagatgatattgatgatttatttcgtcttacagaagagttacgcgatattaaacaggatcttaaaaag

SEQ ID NO: 161406 - DNA, 75 bp, synthetic construct
  source 1..75: mol_type = other DNA
ggaagtgcgtgattttcacggcacggaatataaaacgctgcgcggcagcagttacaacagctacctcatccgcga

SEQ ID NO: 161407 - DNA, 75 bp, synthetic construct
  source 1..75: mol_type = other DNA
cagagaagaaatccgtcttcatattgtttgcgatgtccctgatgaacttattgattttacatttgaatggaaagg

SEQ ID NO: 161408 - DNA, 75 bp, synthetic construct
  source 1..75: mol_type = other DNA
aggaaaataaagcatctggatacgatgaggctatagcatggcgtaggtttggtataattatgcagaatgaagcac

SEQ ID NO: 161409 - DNA, 75 bp, synthetic construct
  source 1..75: mol_type = other DNA
gtgataaggttcccggtcgggatgtagaggcattatttgctgttaatgcccgtcttctggcagaggatatacaaa

SEQ ID NO: 161410 - DNA, 75 bp, synthetic construct
  source 1..75: mol_type = other DNA
cacgattaagtaaatttgtatttggcttattcggtgctgctggaatgatttggcttaataaagccttccagggcg

SEQ ID NO: 161411 - DNA, 75 bp, synthetic construct
  source 1..75: mol_type = other DNA
ctgatcccggtggatgtgaaagtgatcgccaccaccaccgtcgatctggccaatctggtggagcagaaccgcttt

SEQ ID NO: 161412 - DNA, 75 bp, synthetic construct
  source 1..75: mol_type = other DNA
atgaatcccaatgaaagtgatttgaatgacgtgttgatgccagcatcattaagtgatgataaaattatcaaacat

SEQ ID NO: 161413 - DNA, 75 bp, synthetic construct
  source 1..75: mol_type = other DNA
gcgtcaatagatcgagtagccttgcaacaggccaacgcggggtatccgcttgatgacgtgatcattcacgggcat

SEQ ID NO: 161414 - DNA, 75 bp, synthetic construct
  source 1..75: mol_type = other DNA
aggataaaagcccagggacaagcacgcttgccagtgggcctgcaggtactcattttgaggcccaagttgcggcgt

SEQ ID NO: 161415 - DNA, 75 bp, synthetic construct
  source 1..75: mol_type = other DNA
ctgtggctgcatctgctgcagtatccggttctgccatggcgtggactgcaaacggtactggtggtactgttaact

SEQ ID NO: 161416 - DNA, 75 bp, synthetic construct
  source 1..75: mol_type = other DNA
agcggaagcggaaatgcgggtgacgtggacgccttcgtgcgggcacagatgaaaaaacaggggattaaattcaat

SEQ ID NO: 161417 - DNA, 75 bp, synthetic construct
  source 1..75: mol_type = other DNA
aaaattgctgattatcttgggaaagctaaaaatgacaaaaaaccaaaagatccgctcactaacgccgaaactgaa

SEQ ID NO: 161418 - DNA, 75 bp, synthetic construct
  source 1..75: mol_type = other DNA
cttacgcagcagcgtcgccgcattattcaaagcgatattcagcattactggaatctgcgaattgtcgccagttcg

SEQ ID NO: 161419 - DNA, 75 bp, synthetic construct
  source 1..75: mol_type = other DNA
aatattccagcaacggtaacatatttgcccgctgatgcaggaagacgtgatggtacaaaacttccgactggtgct

SEQ ID NO: 161420 - DNA, 75 bp, synthetic construct
  source 1..75: mol_type = other DNA
cagcccggcccttttccaccttcacactggaaaattcagaaaccgtggcagatgcgctgacacgggccgcgagac

SEQ ID NO: 161421 - DNA, 75 bp, synthetic construct
  source 1..75: mol_type = other DNA
ctgggtggtgcacatacccataccgtgggtgcacatagccattctctgagtggtgcacatacgcacacttttaat

SEQ ID NO: 161422 - DNA, 75 bp, synthetic construct
  source 1..75: mol_type = other DNA
aactggccagacaggtggagccggaatacacaccggcgcgaaaagctcatctttatcactgcgaccaccggggac

SEQ ID NO: 161423 - DNA, 75 bp, synthetic construct
  source 1..75: mol_type = other DNA
tgtttgcgatgtccctgatgaacttattgattttacatttgaatggaaaggactgaaaaattatacgtggcagtc

SEQ ID NO: 161424 - DNA, 75 bp, synthetic construct
  source 1..75: mol_type = other DNA
agactgaactgctggtctgtcaggtggagtttttactggatgaacagaacggggaagtcacccggctggtactgg

SEQ ID NO: 161425 - DNA, 75 bp, synthetic construct
  source 1..75: mol_type = other DNA
cacggcagcgtgccctgcgggagatgcgccgggcggttgcccgttcagaacggttttctgccaccgtgcgcggct

SEQ ID NO: 161426 - DNA, 75 bp, synthetic construct
  source 1..75: mol_type = other DNA
caatggttaagagataatagaaacgtagaacccaaaacattccctacctatgaccatgaatatcccgatggtcgc

SEQ ID NO: 161427 - DNA, 75 bp, synthetic construct
  source 1..75: mol_type = other DNA
ctatcaaaatgtgacgattggtgtgagtaacaataaaactgaggattatcctattatcggagacaatgttattat

SEQ ID NO: 161428 - DNA, 75 bp, synthetic construct
  source 1..75: mol_type = other DNA
ttcaatgtatcatgatgatgaaccaaaattatcttataaagaagccaagcctctaatcacatcaataataacagc

SEQ ID NO: 161429 - DNA, 75 bp, synthetic construct
  source 1..75: mol_type = other DNA
gatgaacactataaaagtgttattcgacgttatactataggtgattatactgggtgtatttcagaaataaattca

SEQ ID NO: 161430 - DNA, 75 bp, synthetic construct
  source 1..75: mol_type = other DNA
ggttggccgtgctggacgtgacggacagcctgcccgcgcgtttctgctgtggtcatcgttgacgctcgatgccgc

SEQ ID NO: 161431 - DNA, 75 bp, synthetic construct
  source 1..75: mol_type = other DNA
caggcagctcgcgcgtttctgctgtggtcatcgctggcgctggatgctgcgcctgatgagcttgcttacttctac

SEQ ID NO: 161432 - DNA, 75 bp, synthetic construct
  source 1..75: mol_type = other DNA
aaaagacgttcctgaggataagattgctgttggctcaccgatgaaaataatagataagaaggctaatgttctcta

SEQ ID NO: 161433 - DNA, 75 bp, synthetic construct
  source 1..75: mol_type = other DNA
ttttatgcactatttttgcaaatatttttatatgggaggcggttttgttgcggattaattcataaagaaatgcat

SEQ ID NO: 161434 - DNA, 75 bp, synthetic construct
  source 1..75: mol_type = other DNA
agattacattgaaggcgagataagcaagacacagatttacatggagttcttgtatgataaaaatcaggatttatt

SEQ ID NO: 161435 - DNA, 75 bp, synthetic construct
  source 1..75: mol_type = other DNA
agcaaaacaaatggtggctttcaattagagactgagtcaataaatcaaggttcgtcaactaagcagaactttgaa

SEQ ID NO: 161436 - DNA, 75 bp, synthetic construct
  source 1..75: mol_type = other DNA
caccatcgacgagcgcgatggcaatcagcagaattacactattccgtattcaacagtgccaattttacaacgcga

SEQ ID NO: 161437 - DNA, 75 bp, synthetic construct
  source 1..75: mol_type = other DNA
gactggtctaatgattctttagaaacatgtaagatgaagtgctccggaaataaaattggacgttttattagattt

SEQ ID NO: 161438 - DNA, 75 bp, synthetic construct
  source 1..75: mol_type = other DNA
atagatccattaggattagaaacactaaaatgcattaagccactgcattcaatgggcggaactggtgaaagaagc

SEQ ID NO: 161439 - DNA, 75 bp, synthetic construct
  source 1..75: mol_type = other DNA
tgtttagccatcgtttacacgaccgtctaggtgagccgcagtatacagattcactgcattctcaggggtcggcaa

SEQ ID NO: 161440 - DNA, 75 bp, synthetic construct
  source 1..75: mol_type = other DNA
gcggcaagtcatccagcccggtgacgcaattcattgccgacgcgctgagatagaaatgtggctcaacaagaagcc

SEQ ID NO: 161441 - DNA, 75 bp, synthetic construct
  source 1..75: mol_type = other DNA
tggcctttggcgataagctaccgaagcaccgcaacgcgcaacaactggcggggctggctgccggggcgttccgtg

SEQ ID NO: 161442 - DNA, 75 bp, synthetic construct
  source 1..75: mol_type = other DNA
gaacttcccgatgataaaagggatgcattgatgaaaactgcgtcagaaattttgcgtcagatagaggggcaacaa

SEQ ID NO: 161443 - DNA, 75 bp, synthetic construct
  source 1..75: mol_type = other DNA
ggttgctgtttcgcaaccaactgttgataaaattatttttggtgctgaggcgacacttattaataaaattgggac

SEQ ID NO: 161444 - DNA, 75 bp, synthetic construct
  source 1..75: mol_type = other DNA
tcatttcatttttagttttccttctctctatatatgtagactttggagcctatgaacgagcggcatttcgtagtg

SEQ ID NO: 161445 - DNA, 75 bp, synthetic construct
  source 1..75: mol_type = other DNA
aaaaacagcgctctgacgctgggttgcggcaagtcatccagcccggcgacgcgattcattgccgacgcgctgaga

SEQ ID NO: 161446 - DNA, 75 bp, synthetic construct
  source 1..75: mol_type = other DNA
ctgacgttgagcgactgagccgcgaccagcgtcacgctaacgctgcgtggtttgccagcacgcccggcgctgttc

SEQ ID NO: 161447 - DNA, 75 bp, synthetic construct
  source 1..75: mol_type = other DNA
tgcctaccgggtacggcaagacggctgcgttcacctatgccctgcgattcgagtctgatgcaggtgacggcctga

SEQ ID NO: 161448 - DNA, 75 bp, synthetic construct
  source 1..75: mol_type = other DNA
ttgagcagtggctggacaagaagcctgctcgttatgttgacccgctgccgccagacttccccggcgttcgtgtcg

SEQ ID NO: 161449 - DNA, 75 bp, synthetic construct
  source 1..75: mol_type = other DNA
gtaacgcagatttcaaacgctacggagactttggggagtttcgtcaattttggtgtggagagtcgaagcctaccg

SEQ ID NO: 161450 - DNA, 75 bp, synthetic construct
  source 1..75: mol_type = other DNA
tggcgcatgccgacagggctgatgtgctcaatgtggggtgcgcggatgctcaacaattaattgcagataaggttg

SEQ ID NO: 161451 - DNA, 75 bp, synthetic construct
  source 1..75: mol_type = other DNA
cagacattaataaacccgatgggccagcaacagcagggatagatgatttgggtgaaattttagctaagatgaaac

SEQ ID NO: 161452 - DNA, 75 bp, synthetic construct
  source 1..75: mol_type = other DNA
aaagaatatcttgaagccttgtttaatatgagtggtattatttatagtatagatagtgttgaacctgataataaa

SEQ ID NO: 161453 - DNA, 75 bp, synthetic construct
  source 1..75: mol_type = other DNA
tatcaactatttccaaaggtttataacagtgttgggggggcatgggctgacggcctccatctaagtcctcttggc

SEQ ID NO: 161454 - DNA, 75 bp, synthetic construct
  source 1..75: mol_type = other DNA
atcaactcctctacgctaccgtccgccagcgactgctggatgatatcgcgcagggggtttaccaggccgggcaac

SEQ ID NO: 161455 - DNA, 75 bp, synthetic construct
  source 1..75: mol_type = other DNA
ccgcactggcgctgccgttacctgaaggtagcccgctggtggtaaagcgcattacgccggtggtggaacgccagt

SEQ ID NO: 161456 - DNA, 75 bp, synthetic construct
  source 1..75: mol_type = other DNA
tgaagtcgatggtgatgaccccgcagtattcagaccaatacaaaaatacatcaatggcacatggtataacgtcgc

SEQ ID NO: 161457 - DNA, 75 bp, synthetic construct
  source 1..75: mol_type = other DNA
aagttggcagcatcacccaaaatggcggatctggtaaaagcgaagaaagccaaaattattggcaatggcgcgaaa

SEQ ID NO: 161458 - DNA, 75 bp, synthetic construct
  source 1..75: mol_type = other DNA
cttcctgggcgcttacggaaccggacgacattttttatttttatcagccgacctggctcaacgcctgggaagcac

SEQ ID NO: 161459 - DNA, 75 bp, synthetic construct
  source 1..75: mol_type = other DNA
tggcctgtgctatctggattgaaagtgcgctaaaagaacaggcgcagattcaggggtacacagtggttgaggcca

SEQ ID NO: 161460 - DNA, 75 bp, synthetic construct
  source 1..75: mol_type = other DNA
caatttttaaaaaatggtatattaaggattgtactgtaagaaataaggattttttccatttttctgttcgtaata

SEQ ID NO: 161461 - DNA, 75 bp, synthetic construct
  source 1..75: mol_type = other DNA
cggatgtgctttccgtgggagaggggccagggatagccaccaatattggcgtagcgttgtttgatgatgaaggaa

SEQ ID NO: 161462 - DNA, 75 bp, synthetic construct
  source 1..75: mol_type = other DNA
atggtggcagtggtgtgctagttaatgcaatgacactggattacacatatgtactgactgcataccatgttattc

SEQ ID NO: 161463 - DNA, 75 bp, synthetic construct
  source 1..75: mol_type = other DNA
tattgatgcgttacagagtcattccttgataattttttatcgagtaccggcatttgacagtgttcatcgtatttt

SEQ ID NO: 161464 - DNA, 75 bp, synthetic construct
  source 1..75: mol_type = other DNA
cttgactgttcgcgaggcccttatccgtgatgtatgggttattaccagtgatgctggcggtgcggcagaggatat

SEQ ID NO: 161465 - DNA, 75 bp, synthetic construct
  source 1..75: mol_type = other DNA
caactgcaaaacatcctgcgtgcgggtatgcgtgcgccggaccataagtccatgcaaccgtggcattttttgtga

SEQ ID NO: 161466 - DNA, 75 bp, synthetic construct
  source 1..75: mol_type = other DNA
atgacgtatgcgcaaggcatggcggcacaaatgacggcggcagtgtctatcggtcttgccagttatattgggatg

SEQ ID NO: 161467 - DNA, 75 bp, synthetic construct
  source 1..75: mol_type = other DNA
tcgaaaatttacaagtcctttccagaagaggagctattcaaccctattttgatcgatgttattcaagagttaaga

SEQ ID NO: 161468 - DNA, 75 bp, synthetic construct
  source 1..75: mol_type = other DNA
tttaatgtctctcatccaaacagctttggtaaaacagtagctgtacacaaagaatctggtctcagagaaatcgcc

SEQ ID NO: 161469 - DNA, 75 bp, synthetic construct
  source 1..75: mol_type = other DNA
cgactatggtaatgaatatttcttctgtatatagttcgcaacactcagcgggtaatggacactggcagggagaga

SEQ ID NO: 161470 - DNA, 75 bp, synthetic construct
  source 1..75: mol_type = other DNA
agtgcacaggtagaagatcgagtgttgaaggatattccttgtgtacgaataatccagctatccactcccgtattt

SEQ ID NO: 161471 - DNA, 75 bp, synthetic construct
  source 1..75: mol_type = other DNA
gcgcctgctggatgaaagcaactcacaggcagaatatgcagtggtttatgaacgaacaagtgaagtcatggttaa

SEQ ID NO: 161472 - DNA, 75 bp, synthetic construct
  source 1..75: mol_type = other DNA
cggcaaacccttcactgtcgatgatcaccgtgacctggttgagtcattgattaccgctcataacaacgaaggatg

SEQ ID NO: 161473 - DNA, 75 bp, synthetic construct
  source 1..75: mol_type = other DNA
cctgattgcggtgctgtgatgggtgatgcgacctattcagaaatggttgcctctggtgcttttgatgatcaggag

SEQ ID NO: 161474 - DNA, 75 bp, synthetic construct
  source 1..75: mol_type = other DNA
atactgcttcgtggcgaaggtgagcgggcattttgcgcgggtagcgatttaaaggcgctggatagctacccatcc

SEQ ID NO: 161475 - DNA, 75 bp, synthetic construct
  source 1..75: mol_type = other DNA
cgtgctactcaacgcaccgctatcgttctcattctggcaaggcgcactcatggtctgtggcggctctctgctctg

SEQ ID NO: 161476 - DNA, 75 bp, synthetic construct
  source 1..75: mol_type = other DNA
tgttaataacgaaggcgagagcaccatcaccaacggcggcaccggcacgcagattaacggtgacgacgccacagc

SEQ ID NO: 161477 - DNA, 75 bp, synthetic construct
  source 1..75: mol_type = other DNA
gtcgttcgcctggcgcagaaatataaaccagaatatgtctttattcgtaataagcctctggcaatgaccgtcggg

SEQ ID NO: 161478 - DNA, 75 bp, synthetic construct
  source 1..75: mol_type = other DNA
tgtagatagtcggcaaatcttgtctatggtggatgatgctgccgctcgcgctgaaaggctgcatcagggcgaagc

SEQ ID NO: 161479 - DNA, 75 bp, synthetic construct
  source 1..75: mol_type = other DNA
gctcagatagatgtagtgattatattaatccagagcataaaaaaacgataaaggctttacaagatgctggctatc

SEQ ID NO: 161480 - DNA, 75 bp, synthetic construct
  source 1..75: mol_type = other DNA
agttaggttgggtgccaaagggctggcattataaaaatgcagaagaaatagcaacgatctccataggaaaaacgc

SEQ ID NO: 161481 - DNA, 75 bp, synthetic construct
  source 1..75: mol_type = other DNA
tcgctgacgcagaacattcagcaatctggcttgttaagtgcagaactgcaacaaaatgggcaagtgcaggacagc

SEQ ID NO: 161482 - DNA, 75 bp, synthetic construct
  source 1..75: mol_type = other DNA
ttgttatttgtggtcaattctgggcttttttatggtgcgcaaatcacccagaattgtgcgtcaatcagcccagaa

SEQ ID NO: 161483 - DNA, 75 bp, synthetic construct
  source 1..75: mol_type = other DNA
gatagcttctcgtggaaatgttgcagacacagggataactgatcgtgtcaatgacataataaatgacagattctg

SEQ ID NO: 161484 - DNA, 75 bp, synthetic construct
  source 1..75: mol_type = other DNA
agtaaggcagagggtattccagtagttatgcaaaccggacgaaacagtatactgctcccaccggaagacagcgag

SEQ ID NO: 161485 - DNA, 75 bp, synthetic construct
  source 1..75: mol_type = other DNA
tgaaccacatgtgtgatgttgtggtggtaccaaccacggagatgcagtctcgacttattcacgaaaaatgtatac

SEQ ID NO: 161486 - DNA, 75 bp, synthetic construct
  source 1..75: mol_type = other DNA
gggcgtgccggacattctctcttttggtgacgaattatcgccgcaaaatgtgcaggtccgctggcgtgaaccggc

SEQ ID NO: 161487 - DNA, 75 bp, synthetic construct
  source 1..75: mol_type = other DNA
cccgcagattcagggcgttgcgtggtgacagtcaaagacaccgaacacatgctggctgacccggcgatatgggcg

SEQ ID NO: 161488 - DNA, 75 bp, synthetic construct
  source 1..75: mol_type = other DNA
tccaccgtcgatacgctggttacgttgaacgatactggcaaatataccgcaagccagatgaagcaggtcgcaacg

SEQ ID NO: 161489 - DNA, 75 bp, synthetic construct
  source 1..75: mol_type = other DNA
caagatgatccttgatgtgacgaaccgcctcatggtggcctatgcggtgcaggcggcaatggggtggataagtgg

SEQ ID NO: 161490 - DNA, 75 bp, synthetic construct
  source 1..75: mol_type = other DNA
catgaaatacaccctgactggtttacacgttaaaaaagacaaaatgcgcaaaaatctcgatattctcggtggttt

SEQ ID NO: 161491 - DNA, 75 bp, synthetic construct
  source 1..75: mol_type = other DNA
ggtagaaggatgtatctatgcctttgtgtgtgcggtaattcctgctatagagccgcaaatcagcttaaaaacagt

SEQ ID NO: 161492 - DNA, 75 bp, synthetic construct
  source 1..75: mol_type = other DNA
ggtagaaggatgtatctatgcctttgtgtgtgcggtaattcctgccatagagccgcaaatcagcttaaaaacaac

SEQ ID NO: 161493 - DNA, 75 bp, synthetic construct
  source 1..75: mol_type = other DNA
tggggaaccggtgatattgaggtggttgtccataatcaggcagatttagcaaaagctaagttgctgattgagcaa

SEQ ID NO: 161494 - DNA, 75 bp, synthetic construct
  source 1..75: mol_type = other DNA
atggtaaaaacggtgtctctgaactgccggggaaatcagcaggcattgaaaaagatctgcaaaagctgattgagt

SEQ ID NO: 161495 - DNA, 75 bp, synthetic construct
  source 1..75: mol_type = other DNA
taactacggttattacccggatgatttcatcagcgacaaacccgagatgtcagagattcgctcgacgttctcatc

SEQ ID NO: 161496 - DNA, 75 bp, synthetic construct
  source 1..75: mol_type = other DNA
ttatctacgaactttaagaacacccaagataaaattgtcaactatatcatatataacacattactaattcgaggc

SEQ ID NO: 161497 - DNA, 75 bp, synthetic construct
  source 1..75: mol_type = other DNA
ctcactgcccgatttatacggtggcaagctatgtgctgcgttagatcgccagcaccccagagatttttacgacgt

SEQ ID NO: 161498 - DNA, 75 bp, synthetic construct
  source 1..75: mol_type = other DNA
acggtaaaaacggtgtctctgaactgccgggcaaatcagcagccattgaaaaagatctgcaaaagctgatcgaat

SEQ ID NO: 161499 - DNA, 75 bp, synthetic construct
  source 1..75: mol_type = other DNA
ggaaaccgcctgccggacccggagctacacccggacagcaccctcacggcgtggccggataaccgcatcgcagag

SEQ ID NO: 161500 - DNA, 75 bp, synthetic construct
  source 1..75: mol_type = other DNA
catatagatccgttggggttagcacttgatttgaattattattctccgtcagatcctatatataaaggttctctt

SEQ ID NO: 161501 - DNA, 75 bp, synthetic construct
  source 1..75: mol_type = other DNA
tggagcgggaactgcgtgcgggagcggtgagtgcggagagtgaggcatggcttgcgcagtgcgggctgacggtgg

SEQ ID NO: 161502 - DNA, 75 bp, synthetic construct
  source 1..75: mol_type = other DNA
aacggcagacggtggagaacccggagacgggggaactgctgtggcagcatgagacgaaacacgcctacaacgaac

SEQ ID NO: 161503 - DNA, 75 bp, synthetic construct
  source 1..75: mol_type = other DNA
tctgatacagaagcaaaaataaaggatctggatcttcttcattcgccggaaactattggctcgcgtcctgatctt

SEQ ID NO: 161504 - DNA, 75 bp, synthetic construct
  source 1..75: mol_type = other DNA
gaatcgaaacagagaatggtgaacaggcgaaggcgcggcaccgtagcctggcggaggtgttgcaggaggacacgg

SEQ ID NO: 161505 - DNA, 75 bp, synthetic construct
  source 1..75: mol_type = other DNA
tctacagtctgatacttctaaggaatttactctaacgttagcaattgatacagcaggtgaaacactattctgtac

SEQ ID NO: 161506 - DNA, 75 bp, synthetic construct
  source 1..75: mol_type = other DNA
acagttgcttaaattgattgcagatattgaccaagtgattgcagataaagttgcaggtggtggtgtttactcaac

SEQ ID NO: 161507 - DNA, 75 bp, synthetic construct
  source 1..75: mol_type = other DNA
atgaccccgatcagtttgagaagagattggcatcttctggaggggacaaattagtagggagttcatggggtgggc

SEQ ID NO: 161508 - DNA, 75 bp, synthetic construct
  source 1..75: mol_type = other DNA
gccggacggtctgccgccggtggagtggctgacgtatggcagcggttatcttgcggggatgaagctgggcggaac

SEQ ID NO: 161509 - DNA, 75 bp, synthetic construct
  source 1..75: mol_type = other DNA
accaccggggactgccgcaggcgcttatcagcccggaaggggaaacggcgtggcgcggggagtatgacgagtggg

SEQ ID NO: 161510 - DNA, 75 bp, synthetic construct
  source 1..75: mol_type = other DNA
gctgacggtggagcggctggcggcacagatagagccggtttatttgcctgagcgaaaaatacatctttatcactg

SEQ ID NO: 161511 - DNA, 75 bp, synthetic construct
  source 1..75: mol_type = other DNA
aatggaagaacatctggcaagaaaaaattttgtttcctttttttttgatgaaccattaggagagcaatggggata

SEQ ID NO: 161512 - DNA, 75 bp, synthetic construct
  source 1..75: mol_type = other DNA
gtatcgctggctcaacaggaattgatgccgaaggcccggatagtggtaaacatgatgtcgacttaaccaccatcg

SEQ ID NO: 161513 - DNA, 75 bp, synthetic construct
  source 1..75: mol_type = other DNA
tggaggttgaacaagcctggacagcattaacgttacaagaatggcagcaggcagctgtcttaacgcacgatgttg

SEQ ID NO: 161514 - DNA, 75 bp, synthetic construct
  source 1..75: mol_type = other DNA
aagcaacatattatcaatgaggtttggcgggagcagaaaggttcggtaagcgacagcagttattatgggcagatt

SEQ ID NO: 161515 - DNA, 75 bp, synthetic construct
  source 1..75: mol_type = other DNA
cttgtgtcgatgatatcacaataaaaagatcgcatacacaatatgcagcagcaatgggttatcttgcaaatggtg

SEQ ID NO: 161516 - DNA, 75 bp, synthetic construct
  source 1..75: mol_type = other DNA
ccgctctggtaagtgaaaataatgtaatacgtaaaacatcttgggcgtgtatgaataaaacaataaatcagctta

SEQ ID NO: 161517 - DNA, 75 bp, synthetic construct
  source 1..75: mol_type = other DNA
tcaccccggacccgattgggttggagggggggatggagtctgtatgcgtacccgctgaatccggtgaatggtatt

SEQ ID NO: 161518 - DNA, 75 bp, synthetic construct
  source 1..75: mol_type = other DNA
attatgcggggaggccggagagctgctaccggtatgatgataccggtcgggtgacggagcaggtcaacccggagg

SEQ ID NO: 161519 - DNA, 75 bp, synthetic construct
  source 1..75: mol_type = other DNA
tgacgggcgtggtggacggcttcgggcggacgctggcctttcaccgggcggcggagggtgatgtggcgggcgcgg

SEQ ID NO: 161520 - DNA, 75 bp, synthetic construct
  source 1..75: mol_type = other DNA
gcagctatagtcgatactcagggagtttcaggtgttaatttacgtcagggtggaaaaacttcatttttaggcact

SEQ ID NO: 161521 - DNA, 75 bp, synthetic construct
  source 1..75: mol_type = other DNA
atccgacgctgtcgctctctcgatatgacgcatgaggaaatccgcgcattactactggcaatcaataataacggt

SEQ ID NO: 161522 - DNA, 75 bp, synthetic construct
  source 1..75: mol_type = other DNA
cgactggcagaagagatctcgcgcaacggtaacattacgcgctggttttatgattcttcccgcagtggcctgccc

SEQ ID NO: 161523 - DNA, 75 bp, synthetic construct
  source 1..75: mol_type = other DNA
cctagaccttttatgaggatttatgactttatgagtagtttgatagtcaggttgaaggagcgattacgtcaattt

SEQ ID NO: 161524 - DNA, 75 bp, synthetic construct
  source 1..75: mol_type = other DNA
aatcagatgttacggccgagtcggtattctttatgaagcgtcgacaggtgttaaaagcactgggcatcagcgcag

SEQ ID NO: 161525 - DNA, 75 bp, synthetic construct
  source 1..75: mol_type = other DNA
cagtcttgcgccgtcacatgtcacaaccgggggcgcagaggaacgcagggagtggattgaaaactttcttattgc

SEQ ID NO: 161526 - DNA, 75 bp, synthetic construct
  source 1..75: mol_type = other DNA
atggatattatcaacagcattattagtctgggggcatcagtaatgatgccagtaatattctttatcatagcactt

SEQ ID NO: 161527 - DNA, 75 bp, synthetic construct
  source 1..75: mol_type = other DNA
tagatgcggataagttatatgacaacgcaattgcttcaatacaacttgggattgaagatttccagttatcccaac

SEQ ID NO: 161528 - DNA, 75 bp, synthetic construct
  source 1..75: mol_type = other DNA
tatgtggctggccgaaaacgaaggcgctgtactgacggagctgaaaaaaacggggcctgcaggacatcctgatag

SEQ ID NO: 161529 - DNA, 75 bp, synthetic construct
  source 1..75: mol_type = other DNA
gatcattgaaaccttcgaagaacgtggcaggagtccggcacaaatcccggcggtgctggtgcattctcacggccc

SEQ ID NO: 161530 - DNA, 75 bp, synthetic construct
  source 1..75: mol_type = other DNA
cgtctggcggcgctggatctggtgaagaaaaccaacgatacgctggcagtaaccggtgaagcattctcccgtcag

SEQ ID NO: 161531 - DNA, 75 bp, synthetic construct
  source 1..75: mol_type = other DNA
taataatgagctggcccaggtgatctatcaggcgatggagagctaccataatccgtggcaatacagcccaatgtc

SEQ ID NO: 161532 - DNA, 75 bp, synthetic construct
  source 1..75: mol_type = other DNA
ttggtctgattgcgatcgtcctgtggagcacgatggtcggcttaatccgtggcgttagtgaagggctcggtccgg

SEQ ID NO: 161533 - DNA, 75 bp, synthetic construct
  source 1..75: mol_type = other DNA
gagctgaaaaccatcgccgccaccacctggagcgagtacaaaaaatacatcgagaaagacgccgccctgtcgcgc

SEQ ID NO: 161534 - DNA, 75 bp, synthetic construct
  source 1..75: mol_type = other DNA
cgtggatgcagagctttaaatgttggttcagtgattgctggaactcaaagtaatgccggtaaagtgatcttaccc

SEQ ID NO: 161535 - DNA, 75 bp, synthetic construct
  source 1..75: mol_type = other DNA
tggacccagcaggcgatgctggaagagtacaagtccattgtcaacagcggcgatgccgatgccgtacgctctaat

SEQ ID NO: 161536 - DNA, 75 bp, synthetic construct
  source 1..75: mol_type = other DNA
gagcagcctggttcatctgtggccggtacaggatttgcgccattgctcgaggaggcgacaaaggttaatacagaa

SEQ ID NO: 161537 - DNA, 75 bp, synthetic construct
  source 1..75: mol_type = other DNA
tgcggtctccagccttcctgcaatggtgatacagcgtgcgaatcccggcctctacgacatgatcacgaatggtgt

SEQ ID NO: 161538 - DNA, 75 bp, synthetic construct
  source 1..75: mol_type = other DNA
tgcaacgcgttcgatccgtattgatgataccactcgtgatgctaacgacgtgatgcatgacgtcttccagcaata

SEQ ID NO: 161539 - DNA, 75 bp, synthetic construct
  source 1..75: mol_type = other DNA
ggcgaaactgaaaaccggcagcctgacggtctcccggggggtgattgaagcgctgcgccgggatccggataaaac

SEQ ID NO: 161540 - DNA, 75 bp, synthetic construct
  source 1..75: mol_type = other DNA
tttttccgccggcgctgacactgatggtgttatgcagtgtaccggcattttctgtccgggccgggctggattttt

SEQ ID NO: 161541 - DNA, 75 bp, synthetic construct
  source 1..75: mol_type = other DNA
agcagtttgcctggaaaagggctgaacactgtcaccgacgctgccggggaagggtgtaacgaaaaaagcagcctt

SEQ ID NO: 161542 - DNA, 75 bp, synthetic construct
  source 1..75: mol_type = other DNA
ttacccacccgttcattacattgccaccgataactatgcgctggttgaaagcgcatttttgcatttaaaagagaa

SEQ ID NO: 161543 - DNA, 75 bp, synthetic construct
  source 1..75: mol_type = other DNA
agtaatattctttatcatagcactttgctttggggtaaaaattggcacggcatttaaagccgggatgctggtcgg

SEQ ID NO: 161544 - DNA, 75 bp, synthetic construct
  source 1..75: mol_type = other DNA
ttctcgttctggcaaggcgcgctaatggtctgcggcggttccctgctctgctggctggcgacacgtcgtggttaa

SEQ ID NO: 161545 - DNA, 75 bp, synthetic construct
  source 1..75: mol_type = other DNA
gcccgcagcaggttctggcaatctcctctgcaaagcagggtgaggggcgctctttactggccagtctgctggcaa

SEQ ID NO: 161546 - DNA, 75 bp, synthetic construct
  source 1..75: mol_type = other DNA
actgggtgagatccgccgcattgcgggggccggggaccgtgcacaggttcgcgatttgatcacgcgaaacccctt

SEQ ID NO: 161547 - DNA, 75 bp, synthetic construct
  source 1..75: mol_type = other DNA
acggcgttaaccgtaaaaatcaatccaatcccacctgggagacgcacccggttcaaatccgtggtggcaccaacc

SEQ ID NO: 161548 - DNA, 75 bp, synthetic construct
  source 1..75: mol_type = other DNA
gcgtgcagcttaacggcggcaccagcagtagtctggcggcaacggacaacgggtatttgacctgtcagacaacgg

SEQ ID NO: 161549 - DNA, 75 bp, synthetic construct
  source 1..75: mol_type = other DNA
caggaagaagtcgaaggtaacgggctggaacaggaaggattacccttcccgattcgccagagcgatgccctgtgg

SEQ ID NO: 161550 - DNA, 75 bp, synthetic construct
  source 1..75: mol_type = other DNA
ggcatgaacatgtcaacaggcgctcagaattgcgcgattgatgtaagtaaaacggctgggtttgctacctgtttc

SEQ ID NO: 161551 - DNA, 75 bp, synthetic construct
  source 1..75: mol_type = other DNA
ctcgctggacgcaattttcacggttctcaccagcccggacgttagcgtagccaacatgtgggggcatatggcgga

SEQ ID NO: 161552 - DNA, 75 bp, synthetic construct
  source 1..75: mol_type = other DNA
caggccacgctgacgttaagtcagccagacggagttggtgtgaaaacacacatcacggcggcgatgcgtagtaac

SEQ ID NO: 161553 - DNA, 75 bp, synthetic construct
  source 1..75: mol_type = other DNA
caagttaaagccttacagaaggtagtaatcaatcatatgttggctaatttgaaagttcatgaaaatgctttcgct

SEQ ID NO: 161554 - DNA, 75 bp, synthetic construct
  source 1..75: mol_type = other DNA
gcggcgttgcagtcaaacgatatggcccgcgtggatgaagttcggcggcgggcgagcgattatttagccattgag

SEQ ID NO: 161555 - DNA, 75 bp, synthetic construct
  source 1..75: mol_type = other DNA
atgccgttatcttcttttgttcaggagctgctggctccctggtattcttttcgatctgtctgtcggcgcattctt

SEQ ID NO: 161556 - DNA, 75 bp, synthetic construct
  source 1..75: mol_type = other DNA
ggaagcctgcgatgatgcattagcccttaaacgcctggtgcgcttgatggcggaaaagcataagatgcacgccac

SEQ ID NO: 161557 - DNA, 75 bp, synthetic construct
  source 1..75: mol_type = other DNA
atgctacttcccggcttcggtgtttgcgatggatattctgggcaatgtggtagaagaagcagggctaggtcaaga

SEQ ID NO: 161558 - DNA, 75 bp, synthetic construct
  source 1..75: mol_type = other DNA
ttagtgaggatagtccatatttacacaatgggattgttttccttaatgggataccgtttaaaattattggcgtaa

SEQ ID NO: 161559 - DNA, 75 bp, synthetic construct
  source 1..75: mol_type = other DNA
tgagttactataaaaaatcgctcatatcccaggaaggaagcataaaaaaggtgcgccaggagacgcaccagttgt

SEQ ID NO: 161560 - DNA, 75 bp, synthetic construct
  source 1..75: mol_type = other DNA
tgttcccgccggtgctggtgcagatgctcgaccggctggaaagggaaatcctggctgaccgggtgagtgaggaaa

SEQ ID NO: 161561 - DNA, 75 bp, synthetic construct
  source 1..75: mol_type = other DNA
ctgcacaggtcactattaaacaaaatgggtatgacatttataatagtacggtgccgccggggccttttaccatca

SEQ ID NO: 161562 - DNA, 75 bp, synthetic construct
  source 1..75: mol_type = other DNA
tgaaagcaaaggtcacattgatcgagaaaggacctatgggcggagattgtcttaataccgggtgtgtaccttcca

SEQ ID NO: 161563 - DNA, 75 bp, synthetic construct
  source 1..75: mol_type = other DNA
cctacctgtttgcactgcggctggtaccgatatttccattctttctaatcaatttggcaatggggctcactcgat

SEQ ID NO: 161564 - DNA, 75 bp, synthetic construct
  source 1..75: mol_type = other DNA
tataatcatgccctgtatctcgatggtcgccgtgaaatgatgcaatggtacgctgactacattgattcactttcc

SEQ ID NO: 161565 - DNA, 75 bp, synthetic construct
  source 1..75: mol_type = other DNA
gagccctctggatactgaaggggacgttttcgccacgccaccgctgctgcgttgggaaaatcaaaatccaccttc

SEQ ID NO: 161566 - DNA, 75 bp, synthetic construct
  source 1..75: mol_type = other DNA
tagcgtgccgatggatatgatctctacggtattgaccagcccggattcgccgaaagcgaccgactggggccatat

SEQ ID NO: 161567 - DNA, 75 bp, synthetic construct
  source 1..75: mol_type = other DNA
gcacagacggcgatgtatgacggcaacgccggggtaaaagtcagaaccgactggaccaacacgggcgatgaaatc

SEQ ID NO: 161568 - DNA, 75 bp, synthetic construct
  source 1..75: mol_type = other DNA
tcgctgcagccgcctggcgcattcgccgctacgcgctgcgaatgggcgaagtacagggacaaggctacatcggtc

SEQ ID NO: 161569 - DNA, 75 bp, synthetic construct
  source 1..75: mol_type = other DNA
atatcaataacgaaacgtggggtcttgctcatgtcgttgattcgtcaaaatgggatatcaagaaacagtgcggta

SEQ ID NO: 161570 - DNA, 75 bp, synthetic construct
  source 1..75: mol_type = other DNA
ggtacttctcagcccacaactgtctattccggtacaaccgacgctcgaggtatagcaacggtggacattgagcag

SEQ ID NO: 161571 - DNA, 75 bp, synthetic construct
  source 1..75: mol_type = other DNA
gactggctgataacgcactttacgaggcgaaagagaccgggcgtaataaggtggttgtgagggatgtggtgaatt

SEQ ID NO: 161572 - DNA, 75 bp, synthetic construct
  source 1..75: mol_type = other DNA
tggccagcgacttcaatgtcgttatctacccggtttcagttattggtggagaggaatccaccgaccgtgtggcac

SEQ ID NO: 161573 - DNA, 75 bp, synthetic construct
  source 1..75: mol_type = other DNA
gaagcggaacgccgatcggggcatgtttaccgtcaacctgtcatccggtcatgaacgaaccctttacgcatttct

SEQ ID NO: 161574 - DNA, 75 bp, synthetic construct
  source 1..75: mol_type = other DNA
tcaatttaacgaagacgccattgttgccattgatgatctgactccgctggtgcgaaagtgtcataaccttttgat

SEQ ID NO: 161575 - DNA, 75 bp, synthetic construct
  source 1..75: mol_type = other DNA
acagcaaactgacaagtagtgatacacgtcgccgcatttgggcgattgtgggggcctcttcaggtaatctggtcg

SEQ ID NO: 161576 - DNA, 75 bp, synthetic construct
  source 1..75: mol_type = other DNA
caaagtttgaaaacagtaacaataaatggatattttcacattgtaaaggtttatggattaagcctataagtggta

SEQ ID NO: 161577 - DNA, 75 bp, synthetic construct
  source 1..75: mol_type = other DNA
aactccggagaatgaatggattttttctcattgtactggtttgtggattaagccacgttttggcctggaggagta

SEQ ID NO: 161578 - DNA, 75 bp, synthetic construct
  source 1..75: mol_type = other DNA
gtgataagcttttgtctcagaagcgtgaaaaagcgtttcgacagcagcaaactaatgcaaatccccctagttttg

SEQ ID NO: 161579 - DNA, 75 bp, synthetic construct
  source 1..75: mol_type = other DNA
aggagcgcgctttccagcagtggctgcgcagcccgaactatctcaaccggggcctgaactggttccggatgaata

SEQ ID NO: 161580 - DNA, 75 bp, synthetic construct
  source 1..75: mol_type = other DNA
ggtgttggttatgcattaattgcaggtattgccgcaggtgcactttcttttgttgcttcttcacaattagcaact

SEQ ID NO: 161581 - DNA, 75 bp, synthetic construct
  source 1..75: mol_type = other DNA
tgcgaaagtgtcataaccttttgataaacggcaaaacaacacaggcgaaatccttcctgccgccagaaaaaattt

SEQ ID NO: 161582 - DNA, 75 bp, synthetic construct
  source 1..75: mol_type = other DNA
ggaagcccatgtgtatccacatgcaggaatttgggaaacgttatttgcacaagcaaatgtgtatgttcagtggga

SEQ ID NO: 161583 - DNA, 75 bp, synthetic construct
  source 1..75: mol_type = other DNA
cactataaagaccagctacaggcgtatcaaaaacaactggaaacagttacaggcatccgtgacattcaggcgttc

SEQ ID NO: 161584 - DNA, 75 bp, synthetic construct
  source 1..75: mol_type = other DNA
aatgtgggtattgccgaacagagcatggttggtacagctgccgggctggcgctgggcggcaaggtggctgttacc

SEQ ID NO: 161585 - DNA, 75 bp, synthetic construct
  source 1..75: mol_type = other DNA
gtaaagccgatgctgttatatgtatatcatccgatatgttaaatgactatatcacgcaacataaaaataaaaatg

SEQ ID NO: 161586 - DNA, 75 bp, synthetic construct
  source 1..75: mol_type = other DNA
ttcataggcagtaaaattaaaagtcgtgtggaggagtttaatattatgaatatcaagaaaaaatacttatcattg

SEQ ID NO: 161587 - DNA, 75 bp, synthetic construct
  source 1..75: mol_type = other DNA
acgcaggcgcagcgggcggaagaggcccagcagcaggcggttgcagccggagcaaaacgaccagatatcccggtt

SEQ ID NO: 161588 - DNA, 75 bp, synthetic construct
  source 1..75: mol_type = other DNA
atcccggattcactgccggactatacggagtatggccgggataacggtatccgcctgtcaggggtgtggctgacg

SEQ ID NO: 161589 - DNA, 75 bp, synthetic construct
  source 1..75: mol_type = other DNA
aggaggaccaggctctgtttcgccagttgatggcggggactcgcaagattaagcaggacacgattgtccaccgac

SEQ ID NO: 161590 - DNA, 75 bp, synthetic construct
  source 1..75: mol_type = other DNA
acgtctggcgaacaaatctcaagctgggacagggtaaataccgctcattacgctcaatggatagtagtttgtaca

SEQ ID NO: 161591 - DNA, 75 bp, synthetic construct
  source 1..75: mol_type = other DNA
gcgtaataatcttaagctgggtacagggaagtaccgaccattacgcagtgttaatatcgaatcgtacaaaaaata

SEQ ID NO: 161592 - DNA, 75 bp, synthetic construct
  source 1..75: mol_type = other DNA
agtccggcatctctccggcattgtttttttttacttcagcaaatgtgctggcacagccactgattatcccaccag

SEQ ID NO: 161593 - DNA, 75 bp, synthetic construct
  source 1..75: mol_type = other DNA
gggaagaggtagaaacaacacgtttaccgttaactgtacggatgtttgcagaatcagcagaagcgggaaaatggc

SEQ ID NO: 161594 - DNA, 75 bp, synthetic construct
  source 1..75: mol_type = other DNA
ggccgcagtggctgcgggaagcacggttgcacctgtcagtccggcgtattacaccgtgggttttcgtgtttatga

SEQ ID NO: 161595 - DNA, 75 bp, synthetic construct
  source 1..75: mol_type = other DNA
tgtggaatccccgtggaacgcggtggctggtgtgaactggtcgttctgaccatcatcgaaaaagcccacatctgt

SEQ ID NO: 161596 - DNA, 75 bp, synthetic construct
  source 1..75: mol_type = other DNA
catgcggacatgcaggaattggtggtgggataaatgcggctatcacatattctgagaccaagtctttacctacat

SEQ ID NO: 161597 - DNA, 75 bp, synthetic construct
  source 1..75: mol_type = other DNA
tcggcaccaattttcagttaatgggttaccgctattcgacacaaggtttttatacccttgatgatgttgcgggta

SEQ ID NO: 161598 - DNA, 75 bp, synthetic construct
  source 1..75: mol_type = other DNA
gttgcgtccattttgagggaaatggagcgaaaaatcgccaccgataccctgaatcaatcaatgccagcaattaaa

SEQ ID NO: 161599 - DNA, 75 bp, synthetic construct
  source 1..75: mol_type = other DNA
cagctcagaggcatgacaatgtcaaatttaatgattcaatagcgcttgtgttctggtcgttagaagattgcttaa

SEQ ID NO: 161600 - DNA, 75 bp, synthetic construct
  source 1..75: mol_type = other DNA
cactcccgcaggccatttacagagccagcgcctgaacagccaggtgtatgaccgtgactacgactggaatgacaa

SEQ ID NO: 161601 - DNA, 75 bp, synthetic construct
  source 1..75: mol_type = other DNA
cattttgcgtatacttatgtagtggatgttgataatccagaatcatcgacagaatctgttggtatcggtgcaggt

SEQ ID NO: 161602 - DNA, 75 bp, synthetic construct
  source 1..75: mol_type = other DNA
cctgaacttcaatatgagcaatggcgataacctcaacctgacgctgaacgatagcgtgcttaactaccgtaaaac

SEQ ID NO: 161603 - DNA, 75 bp, synthetic construct
  source 1..75: mol_type = other DNA
tcttctggtttgtacgtatcgatgacgaagggcatccggaaatcgcccgctgtacggagcgggaatttgcgacca

SEQ ID NO: 161604 - DNA, 75 bp, synthetic construct
  source 1..75: mol_type = other DNA
ttactaggacataaagtccaggcaaccaccgatcgctataacgatactcgaggtcaggaatgggttaagttggtt

SEQ ID NO: 161605 - DNA, 75 bp, synthetic construct
  source 1..75: mol_type = other DNA
taccctgtgccgtaatatcaggttgctgccattacatattcataacgtaaataattgcagtacacctgatcaggg

SEQ ID NO: 161606 - DNA, 75 bp, synthetic construct
  source 1..75: mol_type = other DNA
agattgaagaccggtttcccgaaatcaccgtgccattaattaaacgtttgtgtcccagttatctgcgcacggttc

SEQ ID NO: 161607 - DNA, 75 bp, synthetic construct
  source 1..75: mol_type = other DNA
cgctgtatgtcaacccgcaacctttcgcctgtgaaggggagatgtatcacctgggaaccgtgttgtcgcattttt

SEQ ID NO: 161608 - DNA, 75 bp, synthetic construct
  source 1..75: mol_type = other DNA
gtactgccagagcaaacgacaatgccacgtatctggacggcaacgtcaccctgaatgcgtcaaatggcagcatca

SEQ ID NO: 161609 - DNA, 75 bp, synthetic construct
  source 1..75: mol_type = other DNA
gggattctgtttgctggcaacaacacgctgacggccagtaacattactcttaccgggaacagtgaggtgtactgg

SEQ ID NO: 161610 - DNA, 75 bp, synthetic construct
  source 1..75: mol_type = other DNA
cttattcattaacagttgcagctatgctgtcagccgccatcgtctgtcagacaacacatgctgatatcaacacac

SEQ ID NO: 161611 - DNA, 75 bp, synthetic construct
  source 1..75: mol_type = other DNA
gcgttataagttgtcaggtgatatttttagtagtgtgaaaatagattttagtacgaatgaaatagttgacgatat

SEQ ID NO: 161612 - DNA, 75 bp, synthetic construct
  source 1..75: mol_type = other DNA
cacgggtcagcatgcagatgtgacagaagttgttcagccaatccctgcgtttactgaaaaacagcaggattatgt

SEQ ID NO: 161613 - DNA, 75 bp, synthetic construct
  source 1..75: mol_type = other DNA
ctcgttttctctggtctgctttaccgggctttattcctgcactctgacaggtaatgaccggctaaaggtcagatt

SEQ ID NO: 161614 - DNA, 75 bp, synthetic construct
  source 1..75: mol_type = other DNA
gagcattaagcccttacgactacacactgtattgcaggaagtgggtaaaaccaaatctgacttgtacgccacagg

SEQ ID NO: 161615 - DNA, 75 bp, synthetic construct
  source 1..75: mol_type = other DNA
cactagtaaagtatatgacaagtaataaaagtggaaattttattgcagaaaatggcgctaaagttgtattggatg

SEQ ID NO: 161616 - DNA, 75 bp, synthetic construct
  source 1..75: mol_type = other DNA
tcaggaagtctagaaacagcacttttaggtcgcgtcgaaaatcaaatagaatttagaaaattaagaaatttttat

SEQ ID NO: 161617 - DNA, 75 bp, synthetic construct
  source 1..75: mol_type = other DNA
atggtggtgggggaaggattactcagcgctgcgcgcttcgcccttcgggtcgttgcctgcggcaacgctctctcg

SEQ ID NO: 161618 - DNA, 75 bp, synthetic construct
  source 1..75: mol_type = other DNA
cacacccgttacgcatcctgcgcatgacggagttgacagtgatgctggggatctcacgttcaagcatctacgaga

SEQ ID NO: 161619 - DNA, 75 bp, synthetic construct
  source 1..75: mol_type = other DNA
ataccccctcacgcatcctgcgtatggctgaacttacccgactccttggtatatcaagatcgaccatctacgaaa

SEQ ID NO: 161620 - DNA, 75 bp, synthetic construct
  source 1..75: mol_type = other DNA
atgactgaggggctggaactaaaggttccccagcgtaaagcctcagaggcccgcaatgctttctctacggagcag

SEQ ID NO: 161621 - DNA, 75 bp, synthetic construct
  source 1..75: mol_type = other DNA
aggctcttaatgtactcaaggcctgcatgaagcgcattgaagcgggagatagccagccacttatagattatatag

SEQ ID NO: 161622 - DNA, 75 bp, synthetic construct
  source 1..75: mol_type = other DNA
cgcttgagcaggcacgggaagcgttcgccacaaacacgcttaagaaccccgcgtttgactggtcagtgtatgacc

SEQ ID NO: 161623 - DNA, 75 bp, synthetic construct
  source 1..75: mol_type = other DNA
atgactgaggggctggaactcaaggttccccagcgtaaagcctcagaggcccgtaacgctttctctacggagcag

SEQ ID NO: 161624 - DNA, 75 bp, synthetic construct
  source 1..75: mol_type = other DNA
cggagcaggtaggacaactactggctgccgcccaagtttactcacagagacctgatcctacccacgtaatatgga

SEQ ID NO: 161625 - DNA, 75 bp, synthetic construct
  source 1..75: mol_type = other DNA
gcattccattcgttcaggcatacagttgcgacacagttaaaacaacatggcgtcgagttggcttacgctcaggcg

SEQ ID NO: 161626 - DNA, 75 bp, synthetic construct
  source 1..75: mol_type = other DNA
aacaattcgttactgaagaaataaaattgaatttcaatgagcagcaaggattgttagataaagataataaatgtt

SEQ ID NO: 161627 - DNA, 75 bp, synthetic construct
  source 1..75: mol_type = other DNA
tataatgcatttaaaaaattcgtcagtgagatttcggagatcagcgcaaacgatatcaatatgacgattaaaacc

SEQ ID NO: 161628 - DNA, 75 bp, synthetic construct
  source 1..75: mol_type = other DNA
cgtccgctgacgcagtctgctatgcgcaccattgtggagatgaagcttgcacaggtctgcgaacgcctgcactgc

SEQ ID NO: 161629 - DNA, 75 bp, synthetic construct
  source 1..75: mol_type = other DNA
tgattactgtaatgtaaatgaactcattaaaaattggaggggaaactctatacgtttcttaaaaacgaacctaaa

SEQ ID NO: 161630 - DNA, 75 bp, synthetic construct
  source 1..75: mol_type = other DNA
attatcttaaatatactttcaagatgcccttttcaaaatataaaaggtattcgggagcaatatgttaaagaaaag

SEQ ID NO: 161631 - DNA, 75 bp, synthetic construct
  source 1..75: mol_type = other DNA
aatagcgatcatgaacttgttatgcgcgtactggatacgtatctgtgctacttcagaaataaaaatctgagtaac

SEQ ID NO: 161632 - DNA, 75 bp, synthetic construct
  source 1..75: mol_type = other DNA
attcgtcaataaaatcctggcatctttggactacattaggttggttggaattaaggcagagatataaaagatcca

SEQ ID NO: 161633 - DNA, 75 bp, synthetic construct
  source 1..75: mol_type = other DNA
gtggactggcggcactatcacccgctgctccggaacatattctggttaatgatacggataaaatgtgtaagacaa

SEQ ID NO: 161634 - DNA, 75 bp, synthetic construct
  source 1..75: mol_type = other DNA
atagcaaaaaatcttgattgctttagtcgtaataaaagggtggctatttcttttacattccaatatttatgtaat

SEQ ID NO: 161635 - DNA, 75 bp, synthetic construct
  source 1..75: mol_type = other DNA
tgaatgcggcgttgtgttcggttatcgtgctgacgctttttttctaccgcagaaaagcgtcccgatacaaaccgc

SEQ ID NO: 161636 - DNA, 75 bp, synthetic construct
  source 1..75: mol_type = other DNA
gccagtgatatggccggtgcgttatcgacaaccaaagcgcgacattaccccgctttaccctcaagccgattccct

SEQ ID NO: 161637 - DNA, 75 bp, synthetic construct
  source 1..75: mol_type = other DNA
acctgttagccccgattaaaaaagttgatgccagtggaaagcatgacgtcgctcagcgcttgcaacagcgcgtta

SEQ ID NO: 161638 - DNA, 75 bp, synthetic construct
  source 1..75: mol_type = other DNA
agcgtatgctcaggcgattatgggttatagctcagggtctataacttacgaccgttacgctaaagaggtcgaggt

SEQ ID NO: 161639 - DNA, 75 bp, synthetic construct
  source 1..75: mol_type = other DNA
accgcaagcaacgctttaaggacataccgctgtctgacctgctgaaccgggagtctaagactgactgtctggatg

SEQ ID NO: 161640 - DNA, 75 bp, synthetic construct
  source 1..75: mol_type = other DNA
agaaacgctaacgctagctgtgctagtaacggcaatgatgctatggtattcgatggcctgcgtctcatgaagaac

SEQ ID NO: 161641 - DNA, 75 bp, synthetic construct
  source 1..75: mol_type = other DNA
tcgggaagctgtagcgactgagcgtctgactgtagaccagcatcactatatcaatgacgttatcggtgtacttaa

SEQ ID NO: 161642 - DNA, 75 bp, synthetic construct
  source 1..75: mol_type = other DNA
aaccgcaagcaacgctttaagtctatgccgctgtctgacctgctgaaccgggagtctaagactgactgtctggat

SEQ ID NO: 161643 - DNA, 75 bp, synthetic construct
  source 1..75: mol_type = other DNA
agatagattggttaatgtgatggctgatgtttataaggagactttagtaaatggcgataccatacactgcaccag

SEQ ID NO: 161644 - DNA, 75 bp, synthetic construct
  source 1..75: mol_type = other DNA
cgtaccttcctggaacctgctctgaagaaaattaatgagaagacgccattaaaggtaacatataccactgaagaa

SEQ ID NO: 161645 - DNA, 75 bp, synthetic construct
  source 1..75: mol_type = other DNA
ttgacgagatcaaacggccctggctggctgaggctgggctaaaaaaagggcgcggaaaatggcaaattgaattta

SEQ ID NO: 161646 - DNA, 75 bp, synthetic construct
  source 1..75: mol_type = other DNA
gcaacggaggcgagttcgtgctgggtgagggtgtcacaggcgtgggcggggccggggtttggtaacctggcgata

SEQ ID NO: 161647 - DNA, 75 bp, synthetic construct
  source 1..75: mol_type = other DNA
tggcatgtcaaaagtagataccaatgattgtagaagcatgtcaagaaaaataatgacaacagaggggaataaaac

SEQ ID NO: 161648 - DNA, 75 bp, synthetic construct
  source 1..75: mol_type = other DNA
ttaaaggtaatttttcaccaattattgataacagcaaatctcttggtgcaccatcatttagatgggcacaggttt

SEQ ID NO: 161649 - DNA, 75 bp, synthetic construct
  source 1..75: mol_type = other DNA
ctttttttatgggttttagttcattacctgcatgggcaatggactgctatgctgaacatgaagatggaaataccg

SEQ ID NO: 161650 - DNA, 75 bp, synthetic construct
  source 1..75: mol_type = other DNA
cattaaatccaataaatgaaatagatcctttaggattaaaagtgatcgttgtagctagtgatcctaatgaggcaa

SEQ ID NO: 161651 - DNA, 75 bp, synthetic construct
  source 1..75: mol_type = other DNA
cggtgaacggcgaaccggcagagcagtggcggtataacgaccacggctggctgaaagaaatcagccacctgagcg

SEQ ID NO: 161652 - DNA, 75 bp, synthetic construct
  source 1..75: mol_type = other DNA
gtcagtaagactgttatcctgtaatacaggaaaaggaaataactcttatgcacagcaattggcagatgaactagg

SEQ ID NO: 161653 - DNA, 75 bp, synthetic construct
  source 1..75: mol_type = other DNA
taatatgggccgctggataacgtttggaccttcaggccaacccatttcttccactcctggcaaagttatgagacc

SEQ ID NO: 161654 - DNA, 75 bp, synthetic construct
  source 1..75: mol_type = other DNA
tgctttcgcatttgagcgcaatttacatccataaccagttaccgcgtttgtctgcgctgtgtgccgcaacgaccg

SEQ ID NO: 161655 - DNA, 75 bp, synthetic construct
  source 1..75: mol_type = other DNA
actgaccggcctggtggaccgcttcgggcgcacactgaccttccggcgtgaggccgcaggcgaatttaccgggga

SEQ ID NO: 161656 - DNA, 75 bp, synthetic construct
  source 1..75: mol_type = other DNA
tcaaaagaattatgtataagtactagcttattaaagaaaaaactaaataaagagaacatatcttattcacagatt

SEQ ID NO: 161657 - DNA, 75 bp, synthetic construct
  source 1..75: mol_type = other DNA
gcccctttcctttcatggctggaccctgcgcgtgttcttgcagtggatttgttccctgaccagcttaccgtgacc

SEQ ID NO: 161658 - DNA, 75 bp, synthetic construct
  source 1..75: mol_type = other DNA
gtagcaatgatggctgcagctccggggtatccgcctcgctcaggcaacggaaccctggttttgatgcttgtctct

SEQ ID NO: 161659 - DNA, 75 bp, synthetic construct
  source 1..75: mol_type = other DNA
caataatattatcattattatatgtatatttaggtgtttaccctgaaaaagcaccagtggaaaactttacaataa

SEQ ID NO: 161660 - DNA, 75 bp, synthetic construct
  source 1..75: mol_type = other DNA
cacagtatatagaagatcgaaagaaaatgatgcagtggtatagtgattttattattaatttaaatggtgaaaatg

SEQ ID NO: 161661 - DNA, 75 bp, synthetic construct
  source 1..75: mol_type = other DNA
tacaggacatggatttaggcatacattatcaacaatactccatgaaaatggttttaatactgcttggattgaaat

SEQ ID NO: 161662 - DNA, 75 bp, synthetic construct
  source 1..75: mol_type = other DNA
tcaggcgcgggcttcctcggcgcggtggtgctggggctggcgattggctatttcgtcttctggttccgtaaagtc

SEQ ID NO: 161663 - DNA, 75 bp, synthetic construct
  source 1..75: mol_type = other DNA
cagtagtagacgggctgttttaccgcgtagaaggtgatgatattcgcatccgcgttggcggtggtgagtgggtag

SEQ ID NO: 161664 - DNA, 75 bp, synthetic construct
  source 1..75: mol_type = other DNA
attctcgaaaggtaacactctgtgctctaatatatttttcatctctcgcagtgaagtaagtcaagatatgaagga

SEQ ID NO: 161665 - DNA, 75 bp, synthetic construct
  source 1..75: mol_type = other DNA
tgttatcggtggcggtatcctggtggcgcttgccaacatgctggtgcagttcggcctgccgtataccgatatgtc

SEQ ID NO: 161666 - DNA, 75 bp, synthetic construct
  source 1..75: mol_type = other DNA
cgatatgggcggccccatcaataaaaccgcctggttcttctgcttctcactgctggaaaaacacatttatgactg

SEQ ID NO: 161667 - DNA, 75 bp, synthetic construct
  source 1..75: mol_type = other DNA
atggagtcatccttacgtattgtcgcgatcaccaactgccccgccgggatcgctcacacctacatggtggcggaa

SEQ ID NO: 161668 - DNA, 75 bp, synthetic construct
  source 1..75: mol_type = other DNA
tttttcgtcgtagctcaggcacacccattttccgggctgtggtgtttgtgtgtacaccgtagttctttcgagata

SEQ ID NO: 161669 - DNA, 75 bp, synthetic construct
  source 1..75: mol_type = other DNA
ccggcaactcagattagacattttcactaaatcacgacttcgcatcacaattattgctgaaccaccagattcccg

SEQ ID NO: 161670 - DNA, 75 bp, synthetic construct
  source 1..75: mol_type = other DNA
taagagcggtaattctattaatgtatatgatataaaagatgtcgatgcactaacaaaaatcttaagggattatat

SEQ ID NO: 161671 - DNA, 75 bp, synthetic construct
  source 1..75: mol_type = other DNA
atgttgtttttgataatttattatccgttttttgcctcccttttaaattaaataatcgagtttgcattttcaact

SEQ ID NO: 161672 - DNA, 75 bp, synthetic construct
  source 1..75: mol_type = other DNA
cgcagaaattttgcgtcaactcaaagaagatcaagcgtctatctttaagacaatttcaccaacaaactctggaag

SEQ ID NO: 161673 - DNA, 75 bp, synthetic construct
  source 1..75: mol_type = other DNA
attaatcactatgttgaacatcgcggcttccgcgttatagttatttgtcacgatgagcgcatagctgatcaacta

SEQ ID NO: 161674 - DNA, 75 bp, synthetic construct
  source 1..75: mol_type = other DNA
gagaaactggaggagccaccatcgttgcatcgtctcaacagtcgggtaaggctgctactcccgccagtagatttg

SEQ ID NO: 161675 - DNA, 75 bp, synthetic construct
  source 1..75: mol_type = other DNA
tgcaggaagtgttgagctggatgcgccgtaatggagaagaaattatagatgaagatatcgctcggctatctcccc

SEQ ID NO: 161676 - DNA, 75 bp, synthetic construct
  source 1..75: mol_type = other DNA
atgcaggaagccttgtcgcacctgcgtagcactggggaagggccagaagatgaacatatcgcgcggctttcgcct

SEQ ID NO: 161677 - DNA, 75 bp, synthetic construct
  source 1..75: mol_type = other DNA
tgcaaaaagtgaagttattaacagtttaactatcgaggagcttaatgtattaaaaaataaggagcaacctgatga

SEQ ID NO: 161678 - DNA, 75 bp, synthetic construct
  source 1..75: mol_type = other DNA
attgtggtacccggtacattacgggattcgatttttgtactggaaggacttcttgagcagcagacagggctgaat

SEQ ID NO: 161679 - DNA, 75 bp, synthetic construct
  source 1..75: mol_type = other DNA
ggctattcagctggatgagacctggaaagccgtggcatcacgatttgaaaagaatgcagaagttcatatctgtaa

SEQ ID NO: 161680 - DNA, 75 bp, synthetic construct
  source 1..75: mol_type = other DNA
ttcatctcggggacaaattgagatgtctttaacgatagaggatggaacaggaaatagtcagtcaaattacaatta

SEQ ID NO: 161681 - DNA, 75 bp, synthetic construct
  source 1..75: mol_type = other DNA
aagtataaaacaagtaatatcagtaatattgtaagggtttttctgattcaaccccgtgagataaaggagtcaagt

SEQ ID NO: 161682 - DNA, 75 bp, synthetic construct
  source 1..75: mol_type = other DNA
tttgtttttctcgccggactcttaagattggctgtttgttgttgcttatagcaggagcgaccatttttattgccg

SEQ ID NO: 161683 - DNA, 75 bp, synthetic construct
  source 1..75: mol_type = other DNA
gcggcgatgtcatcgtcatgatggtagcggagaatacccacgacgcatttatgcaggggctgaataaactgtcca

SEQ ID NO: 161684 - DNA, 75 bp, synthetic construct
  source 1..75: mol_type = other DNA
gcagccgccgcagaactcagcacggtaaaaatgcagttgccggttaaagccgatgtattgccagccagtgcgccg

SEQ ID NO: 161685 - DNA, 75 bp, synthetic construct
  source 1..75: mol_type = other DNA
ttgctgatgatatgggggcgctggcctgttcaattgtgccagcgcatccctgggtttacggtctgggacagaaca

SEQ ID NO: 161686 - DNA, 75 bp, synthetic construct
  source 1..75: mol_type = other DNA
gtacatgtaaaaataataaattcacaccaagcggggcgagactcttaattcgcgtcgggtcactacgccttaatg

SEQ ID NO: 161687 - DNA, 75 bp, synthetic construct
  source 1..75: mol_type = other DNA
gagtattattggcaaacagaactgggtacatgtaaaaataataaattcacaccaagcggggcgagactcttaatt

SEQ ID NO: 161688 - DNA, 75 bp, synthetic construct
  source 1..75: mol_type = other DNA
aagatcaggatggcgacggggaatcagggaaagagcggcagtgcgcgggtgatttacttccttgccaccgcagag

SEQ ID NO: 161689 - DNA, 75 bp, synthetic construct
  source 1..75: mol_type = other DNA
tcctgaaaacggaagacaatagctactcgtttgacgtttttattgatgcccgcgggcagcgtccgcttaaagtga

SEQ ID NO: 161690 - DNA, 75 bp, synthetic construct
  source 1..75: mol_type = other DNA
gctactcgtttgacgtttttattgatgcccgcggacagcgtccgcttaaagtgaaagatattcctttccctgggc

SEQ ID NO: 161691 - DNA, 75 bp, synthetic construct
  source 1..75: mol_type = other DNA
tagaaaaagaaaagtattatacttatggttacaagagtaaatgtgataagcctggcagaattttattaaatgagc

SEQ ID NO: 161692 - DNA, 75 bp, synthetic construct
  source 1..75: mol_type = other DNA
cgtactttctcttctcagtcacggcagaatgtgactcaggcattacccgaattacagctcggcaatgccattatt

SEQ ID NO: 161693 - DNA, 75 bp, synthetic construct
  source 1..75: mol_type = other DNA
cgatgcaggagcaactccgcccgatgctgcgcctgattctcgacaacgaaagcaaggtaaagcagttattacaga

SEQ ID NO: 161694 - DNA, 75 bp, synthetic construct
  source 1..75: mol_type = other DNA
gattatgccaattggttattttgggggctagtcctaataagcatggcatggaatttttggcatgatcgctatgaa

SEQ ID NO: 161695 - DNA, 75 bp, synthetic construct
  source 1..75: mol_type = other DNA
gcgatcggcgtaacgcaacaaccggaatactggcagcatatgctcgacagctacgcggagcaggcagataacatg

SEQ ID NO: 161696 - DNA, 75 bp, synthetic construct
  source 1..75: mol_type = other DNA
attacagctcggcaatgccattattaaaccttcccgttatgtacagaacaaccagttttcaccgctgaaaaaata

SEQ ID NO: 161697 - DNA, 75 bp, synthetic construct
  source 1..75: mol_type = other DNA
ggctgccgctattttaagtggtttaaccgctgagcaatccaccattgagcgcgcgctggcaatgaactggctggc

SEQ ID NO: 161698 - DNA, 75 bp, synthetic construct
  source 1..75: mol_type = other DNA
gagtaatactgtccctttgcttatgaaatcattaatttcgccactagagtttaatgaactagtagaaaaaaataa

SEQ ID NO: 161699 - DNA, 75 bp, synthetic construct
  source 1..75: mol_type = other DNA
ttcgttgccatgatgtcatggatcgagagcctacgttcggaatgtctaaggctttggctcagcagttagaactgg

SEQ ID NO: 161700 - DNA, 75 bp, synthetic construct
  source 1..75: mol_type = other DNA
gcgggtgctgctggttctggatgaaagtgtcattacccagacctggaacatcccgttccctgagcttgacggacg

SEQ ID NO: 161701 - DNA, 75 bp, synthetic construct
  source 1..75: mol_type = other DNA
taaaagaggcgcggaagtcacatatagtggctttgccggaaataacgcagcatcagtagtatctgttggtgatac

SEQ ID NO: 161702 - DNA, 75 bp, synthetic construct
  source 1..75: mol_type = other DNA
accggggcagggtggccgatgcgcagaaacatgaattgatacgcactctgcgcctagtcaacggaaaatcgctac

SEQ ID NO: 161703 - DNA, 75 bp, synthetic construct
  source 1..75: mol_type = other DNA
ttgcccgaaaagattacgaagaccgtcgacgccgtcagtcagagggtatcagtaaggcgaaagctgaaggaaaat

SEQ ID NO: 161704 - DNA, 75 bp, synthetic construct
  source 1..75: mol_type = other DNA
tttttgcctgtgcctgccgcaggctctatggtgaaagaatgaaaaatgtatgttttagattaaatgatgatgaat

SEQ ID NO: 161705 - DNA, 75 bp, synthetic construct
  source 1..75: mol_type = other DNA
tgcagagctggacgtgattaagataaaagctcttcaaaaaatctacgatcgcctgcgttacgttgaaaatgagca

SEQ ID NO: 161706 - DNA, 75 bp, synthetic construct
  source 1..75: mol_type = other DNA
gatgtttatcatcggccttgagttgaatccctccaagctttggcaactgcggcgttcgatttttggcgtaggcgc

SEQ ID NO: 161707 - DNA, 75 bp, synthetic construct
  source 1..75: mol_type = other DNA
atagaggtaattgccggcctcatatctcagtttagtccattggaaatcgatagttttcaaaattcaccacgacga

SEQ ID NO: 161708 - DNA, 75 bp, synthetic construct
  source 1..75: mol_type = other DNA
ttatcaaaaataattttagtaataatcagaagaaactatttaaaaggattgagccagccactaaccgtcaagtag

SEQ ID NO: 161709 - DNA, 75 bp, synthetic construct
  source 1..75: mol_type = other DNA
caatttgatttgaatagctcattgttattttatataaataattgggatttgctcccattgatttgtttactcgcc

SEQ ID NO: 161710 - DNA, 75 bp, synthetic construct
  source 1..75: mol_type = other DNA
gtttgaccgctgagcaatccactattgagcgcgcgctggccatgaactggctggcgaaatatatggcgacaatgc

SEQ ID NO: 161711 - DNA, 75 bp, synthetic construct
  source 1..75: mol_type = other DNA
ttctgcgctacggtcaggtggaagtaccgctcccgccgggagccgacgttgagcgcacaacatggggcatttcgg

SEQ ID NO: 161712 - DNA, 75 bp, synthetic construct
  source 1..75: mol_type = other DNA
tatcaatgacagcctgatcctcgatacaccggaatctccactggcagatgcggtggcaaacgtcttaaccatgac

SEQ ID NO: 161713 - DNA, 75 bp, synthetic construct
  source 1..75: mol_type = other DNA
tatcgatgccagagctacacaagactttaaagaggccagcgattactttaccagtcgcaaggtcagtgagtccgg

SEQ ID NO: 161714 - DNA, 75 bp, synthetic construct
  source 1..75: mol_type = other DNA
gcggcgtatcgtgttaccaccaccaaagagatcctcattgaacgcggtctggcgcattacactttgagcaccgcc

SEQ ID NO: 161715 - DNA, 75 bp, synthetic construct
  source 1..75: mol_type = other DNA
ctaagtagcgaaacgccgcaggagattttccgcaataaccttgacgcgttagttgatgaaccatgggggggagtg

SEQ ID NO: 161716 - DNA, 75 bp, synthetic construct
  source 1..75: mol_type = other DNA
tgcaatgcagatgaaattgttgatgtttcttcattggcccgcatcaccaaagcaaccacagaggaatttgaggtc

SEQ ID NO: 161717 - DNA, 75 bp, synthetic construct
  source 1..75: mol_type = other DNA
tagctgcagcagagcgcgtttcagtgtatgatgtacagataagtaacgcttacaaacaagcgtcacagtttaaga

SEQ ID NO: 161718 - DNA, 75 bp, synthetic construct
  source 1..75: mol_type = other DNA
cctcgacggatgtttactaccgtatccaaagcggcattgatggcgatcgggcagggcgtcaggagggcggcatga

SEQ ID NO: 161719 - DNA, 75 bp, synthetic construct
  source 1..75: mol_type = other DNA
agggtgggagcagcaggggatggagacgtggtgtggtccgggacattatcagttacgctttgcgctggagacgat

SEQ ID NO: 161720 - DNA, 75 bp, synthetic construct
  source 1..75: mol_type = other DNA
aatttcactgcatgacatccggttgcaggcattgcgccatcacctcctcggtgcgcggcaatttttgatgcacgc

SEQ ID NO: 161721 - DNA, 75 bp, synthetic construct
  source 1..75: mol_type = other DNA
taccgcacgtcggcgctgtgagctgctttcctgttattccagccaggcgatgcaggccttttttggtacgttgtc

SEQ ID NO: 161722 - DNA, 75 bp, synthetic construct
  source 1..75: mol_type = other DNA
aagaaaagcacggtcccaaatgaagataaaaaaggcataagagggggaaccgcagaattcggaaaaaatcgtacg

SEQ ID NO: 161723 - DNA, 75 bp, synthetic construct
  source 1..75: mol_type = other DNA
ataaaatcgtatttatcctgaataaacatgaacaggcatgcagacgcctgaagcctgtatatactgtattggaac

SEQ ID NO: 161724 - DNA, 75 bp, synthetic construct
  source 1..75: mol_type = other DNA
ggttatcctgctgacgcccggagacgatcctctcagggcatttttgatatgggtactgtcagaatccatcggcgc

SEQ ID NO: 161725 - DNA, 75 bp, synthetic construct
  source 1..75: mol_type = other DNA
cgattgggctgaaggggggatggaatttttatcagtatccgctgaatccggttcagtatatagattcaatgggac

SEQ ID NO: 161726 - DNA, 75 bp, synthetic construct
  source 1..75: mol_type = other DNA
tcatctacggatgcccagaaatatattccacagacacaacaagttgcagtgattattaattatagcggttctgtc

SEQ ID NO: 161727 - DNA, 75 bp, synthetic construct
  source 1..75: mol_type = other DNA
agaaagatattgcagagaagatacaaaaacagggaggtgattatttattcgctgtaaaaggaaatcaggtggcgg

SEQ ID NO: 161728 - DNA, 75 bp, synthetic construct
  source 1..75: mol_type = other DNA
aaacatcggagatgcgctccgctggatggggtttaataccgattttggccgcaatcccaataccgtgtatggcgc

SEQ ID NO: 161729 - DNA, 75 bp, synthetic construct
  source 1..75: mol_type = other DNA
gagcaatatgcccaccagcgccccggtgattcagcaggaaacgaatattaacatccacggcgttttcgatccgcg

SEQ ID NO: 161730 - DNA, 75 bp, synthetic construct
  source 1..75: mol_type = other DNA
tcctgccaacaatacgccgaccaccagtgaagaaatggcgtcgattggcggtataggcagcaatatcgtacctga

SEQ ID NO: 161731 - DNA, 75 bp, synthetic construct
  source 1..75: mol_type = other DNA
ctgatggctctttaccagctaacggctctttgtcacccacggcgcaagcgaccttgctgttgaccagctatttct

SEQ ID NO: 161732 - DNA, 75 bp, synthetic construct
  source 1..75: mol_type = other DNA
atctgctattcaggacagaattacagcgattggccgaacatccaattacagtagataggttgacagaagtcactg

SEQ ID NO: 161733 - DNA, 75 bp, synthetic construct
  source 1..75: mol_type = other DNA
tcgctccgtcaattatcaaagaaaatctctcattacacttaactcatacggtgaaatggactgaatctctcgata

SEQ ID NO: 161734 - DNA, 75 bp, synthetic construct
  source 1..75: mol_type = other DNA
tattctctagctcactcatccccacactactctattcaaaccagaattgaaaaattcttacttaaaaatatacct

SEQ ID NO: 161735 - DNA, 75 bp, synthetic construct
  source 1..75: mol_type = other DNA
ataaaaatttctatactgacatttttattaaaacatcatttcaaaatgaattcgaggcagggggagttataccac

SEQ ID NO: 161736 - DNA, 75 bp, synthetic construct
  source 1..75: mol_type = other DNA
ggaatgagtgggatcgctgcggtctgaccatgccaccacgcgtgcgaacaaaagacagcgtggcggtaattgccg

SEQ ID NO: 161737 - DNA, 75 bp, synthetic construct
  source 1..75: mol_type = other DNA
gctatgccgcatcgcaaactggcgccagcgctgagtcggccatgtcctccctcgaagggttggctggcttcatgc

SEQ ID NO: 161738 - DNA, 75 bp, synthetic construct
  source 1..75: mol_type = other DNA
atcagggctgtatcgcaacgactgggagtggctccccgagctgccctgaatatgagcgatccgcaaaccatgtca

SEQ ID NO: 161739 - DNA, 75 bp, synthetic construct
  source 1..75: mol_type = other DNA
aggctgccttatcgtcaaaccggtttatgacctcgctgaaatcgctcggtgaaatggccaggatggcgcgggaca

SEQ ID NO: 161740 - DNA, 75 bp, synthetic construct
  source 1..75: mol_type = other DNA
ttacagattttccctttgcatgatgaaataggtcttaattttaaagaccttcctggtccattaaaaaatgcatta

SEQ ID NO: 161741 - DNA, 75 bp, synthetic construct
  source 1..75: mol_type = other DNA
ccaataccatggtttggattaacagctcaagtggttcgtaatcatggtgtggaacttcctatagtcaaaactgaa

SEQ ID NO: 161742 - DNA, 75 bp, synthetic construct
  source 1..75: mol_type = other DNA
atcatatgtcactagtttattgcgtaagttacaggaagttaaccacaaagttattgatattcttccgtattatag

SEQ ID NO: 161743 - DNA, 75 bp, synthetic construct
  source 1..75: mol_type = other DNA
gttgaactcttcaatagtaagtataatttttgcgcaacaggggtattacataactgggctcggtttgaatgtata

SEQ ID NO: 161744 - DNA, 75 bp, synthetic construct
  source 1..75: mol_type = other DNA
tccacgtccagaggatgtagtcatcaatatcgaaagcaatgacttaccacatcataatccattaaatcatgttga

SEQ ID NO: 161745 - DNA, 75 bp, synthetic construct
  source 1..75: mol_type = other DNA
taaatatgccgttcttaccaatgctgccgcaaatgcgcttggcgccgcaggagggtttgcagtatccaaaatccc

SEQ ID NO: 161746 - DNA, 75 bp, synthetic construct
  source 1..75: mol_type = other DNA
tttgtttctgccgaagcccgtgcatcaagaagtgattcagcacatccgtgcgctaggcctgttaccagttggaga

SEQ ID NO: 161747 - DNA, 75 bp, synthetic construct
  source 1..75: mol_type = other DNA
gtcgtgctgcgcgtgcggatgcgctcatcaccgcacaactagctttcgccctgaatgggtacaactgggatgaac

SEQ ID NO: 161748 - DNA, 75 bp, synthetic construct
  source 1..75: mol_type = other DNA
cctcagttcctaaatatagagtcccatttttcaaccgcttaagaaaaaaatataatattgttatttattctaata

SEQ ID NO: 161749 - DNA, 75 bp, synthetic construct
  source 1..75: mol_type = other DNA
catctcgattttttgaagcaatatgatgattttgaaaattgtattcctgtgcacgataccattgccagagttgta

SEQ ID NO: 161750 - DNA, 75 bp, synthetic construct
  source 1..75: mol_type = other DNA
ctggccgccgagctatcgcgacggcttgagcggatggcggtcgaagccgagaagaatgaaggcggtgcagcatga

SEQ ID NO: 161751 - DNA, 75 bp, synthetic construct
  source 1..75: mol_type = other DNA
atggaaacgccgatcggtgatgatgaagattcgcatctgggggatttcatcgaggataccaccctcgagctgccg

SEQ ID NO: 161752 - DNA, 75 bp, synthetic construct
  source 1..75: mol_type = other DNA
atcaagccacgggctctgagcttattgaacggctgaagatactcagtaattctccagaatttgatggtctaatat

SEQ ID NO: 161753 - DNA, 75 bp, synthetic construct
  source 1..75: mol_type = other DNA
ggcatcgttgtgtgcgacgtttgcatgccagatatttcaggcattacgctgctggaaaaaataacgctgatcgac

SEQ ID NO: 161754 - DNA, 75 bp, synthetic construct
  source 1..75: mol_type = other DNA
tgttaattgatgacgataatgatgttctgcaagcctacagcgctctcttacagcaagagggttatgtagtatgta

SEQ ID NO: 161755 - DNA, 75 bp, synthetic construct
  source 1..75: mol_type = other DNA
caatccagaaaacacgggaaatatcgtagacagtggagataaatactacatcaagcctgatgcggtatacctcgg

SEQ ID NO: 161756 - DNA, 75 bp, synthetic construct
  source 1..75: mol_type = other DNA
ggttgaaaagctgataagcggtgaaataaacacctattcaatggaaaaacgttactacaaccgcaatggcgatgt

SEQ ID NO: 161757 - DNA, 75 bp, synthetic construct
  source 1..75: mol_type = other DNA
gccgaatatttttagctgggataagcggatgttcgagctgtatgaaattcctccgcatatcaaaccgaactggca

SEQ ID NO: 161758 - DNA, 75 bp, synthetic construct
  source 1..75: mol_type = other DNA
aattatttttatgatatgaacacgctagttgatgccggaacagaaggtttaagactcattaaaacctggcagtaa

SEQ ID NO: 161759 - DNA, 75 bp, synthetic construct
  source 1..75: mol_type = other DNA
ttgatgccggaacagaaggtttaagactcattaaaacctggcagcaagcaagacctcattctacacatgcctggc

SEQ ID NO: 161760 - DNA, 75 bp, synthetic construct
  source 1..75: mol_type = other DNA
ttcttcttaattatgttgttccatcttcagtaagaacaaaaaggaaagaggttagtgagcgatggatacgtcact

SEQ ID NO: 161761 - DNA, 75 bp, synthetic construct
  source 1..75: mol_type = other DNA
ctttcagatacccagaaaaaagctgtatttgcgcatgaaaaaatacggtattgataaaatggattttcgctatga

SEQ ID NO: 161762 - DNA, 75 bp, synthetic construct
  source 1..75: mol_type = other DNA
atctcttgcaatcactcttctttctatgttgcatcctaatgaacaaataaggaataaagcttatactcgtataga

SEQ ID NO: 161763 - DNA, 75 bp, synthetic construct
  source 1..75: mol_type = other DNA
tctgaacaaagagcttttaccttaacaggcccatatggtagcgggaaatcatctcttgcaatcactcttctttct

SEQ ID NO: 161764 - DNA, 75 bp, synthetic construct
  source 1..75: mol_type = other DNA
caaaaatttggtttattttcaacattgatgtttattctggcaattatcataaattttatagttaataatcccttg

SEQ ID NO: 161765 - DNA, 75 bp, synthetic construct
  source 1..75: mol_type = other DNA
tataccttcagtatatggtaaagaaaactatggttctgtcagagaagcttgcctgcttaaaagaaaggcatggtt

SEQ ID NO: 161766 - DNA, 75 bp, synthetic construct
  source 1..75: mol_type = other DNA
cagggaatgggaaatgctctggttgatattcccctttcccttcttcctgacggcagctatggctatttcacccgt

SEQ ID NO: 161767 - DNA, 75 bp, synthetic construct
  source 1..75: mol_type = other DNA
caggatggctaccacattcaaaaaggatttcgtattgatggtgataatctcacccaatattgtagtaaaaaagcc

SEQ ID NO: 161768 - DNA, 75 bp, synthetic construct
  source 1..75: mol_type = other DNA
caaacaagacgattattaaagataaaggaacaatgtcagttttaaccaatgctaaagctgatgcgacccgaatag

SEQ ID NO: 161769 - DNA, 75 bp, synthetic construct
  source 1..75: mol_type = other DNA
atgttattggtgtggtaaacgatgagactgtagatggcagccaaaaagtagatgaacgaggtacaacaaataaca

SEQ ID NO: 161770 - DNA, 75 bp, synthetic construct
  source 1..75: mol_type = other DNA
gatgtgcgggagaaaggcagcgcaacggggatacagcaaagtagccagggcgcgttggttgcaaccaccagggcg

SEQ ID NO: 161771 - DNA, 75 bp, synthetic construct
  source 1..75: mol_type = other DNA
gttcatgaaataacattaggccctggttgcaatgttcctggttatgccggaaccacgataggatatatttcaacc

SEQ ID NO: 161772 - DNA, 75 bp, synthetic construct
  source 1..75: mol_type = other DNA
gttgatgaccagatgctattaaatgccaccgccctgatacgtttggaagactgggactttttagagagtgcatta

SEQ ID NO: 161773 - DNA, 75 bp, synthetic construct
  source 1..75: mol_type = other DNA
gtgaatcttgtccccttcggtttatctgcatcggactggaaagtgcatcgtggcgatttagtggtagaaggtaat

SEQ ID NO: 161774 - DNA, 75 bp, synthetic construct
  source 1..75: mol_type = other DNA
ggcagtgcctttattgaagaatgcttttgccgtctggcagaccgctacctgaagcagaaggaacgcagaaatgac

SEQ ID NO: 161775 - DNA, 75 bp, synthetic construct
  source 1..75: mol_type = other DNA
caaattttataaaagaagatgccggtatgctgaaaaaattaattttaacaatactgtgttgttttctggcaatga

SEQ ID NO: 161776 - DNA, 75 bp, synthetic construct
  source 1..75: mol_type = other DNA
atgaaagcagatatttttagtcgggttgcctggcaattacgtacccgctcaggtgtaaacatctatgcgtggatg

SEQ ID NO: 161777 - DNA, 75 bp, synthetic construct
  source 1..75: mol_type = other DNA
atcaacgtgaaacgatagcaagtttttcaggcgaatttatttctggagatgaatatcacgggctaactgatatcc

SEQ ID NO: 161778 - DNA, 75 bp, synthetic construct
  source 1..75: mol_type = other DNA
aggcacaaacatggtatgaacaaaaaggctggctgtgcggttttaactatctgccgtcgacggcggtgaactgga

SEQ ID NO: 161779 - DNA, 75 bp, synthetic construct
  source 1..75: mol_type = other DNA
aagcaattgaattgttgaaacagtatggcagaccactgatttgtacggaatggcttgcccgccatgcaggttctg

SEQ ID NO: 161780 - DNA, 75 bp, synthetic construct
  source 1..75: mol_type = other DNA
ctggtatcgcgtgaatatctggcctcagtcgaaacgctcgctgatatcgggctgaaagccgaacgggcaaggccg

SEQ ID NO: 161781 - DNA, 75 bp, synthetic construct
  source 1..75: mol_type = other DNA
gaaacccggggcggttcacaggcaggtgaaagtgaaccagtgtcaccggtaccgaaagtgacagcgcaaatgctg

SEQ ID NO: 161782 - DNA, 75 bp, synthetic construct
  source 1..75: mol_type = other DNA
aaagtccgcaaatggttctggagccgaataacgcctcttccgtgtataaagattatgagtatgaagacgatgcaa

SEQ ID NO: 161783 - DNA, 75 bp, synthetic construct
  source 1..75: mol_type = other DNA
acaaatcgtcgagggtgtggcgaatgagacaacgattaacgacggcggaatacaaacagtttcagctaacggaga

SEQ ID NO: 161784 - DNA, 75 bp, synthetic construct
  source 1..75: mol_type = other DNA
atgtttagacgaaatcttattacctctgccattttattaatggcaccgttagccttttctgcacaatcattggct

SEQ ID NO: 161785 - DNA, 75 bp, synthetic construct
  source 1..75: mol_type = other DNA
tatgtttataaaggcggtaccagcaatggcacgatgattaaggccggaagttcactcgtagagggggggactgcg

SEQ ID NO: 161786 - DNA, 75 bp, synthetic construct
  source 1..75: mol_type = other DNA
gaggacgctgttgatgaaatgcaaaaggaagaagaggatgctgcgaccatgcagcgtttggatttatccagtctt

SEQ ID NO: 161787 - DNA, 75 bp, synthetic construct
  source 1..75: mol_type = other DNA
ccaaagccagacccaaatccaaaaccagaccctactcccgatccaacgccgacacccgttccggagaaacgcatt

SEQ ID NO: 161788 - DNA, 75 bp, synthetic construct
  source 1..75: mol_type = other DNA
ttcagcatcgagcaggatgcggcgaacaatatcctgctggcaaatggcggcgtgttaaccgtggagtcagacacc

SEQ ID NO: 161789 - DNA, 75 bp, synthetic construct
  source 1..75: mol_type = other DNA
acgctggtataacgagaaacgtatcaagctatcattaggtgcaatgagtcctgtgaagtaccggcagcatcttgg

SEQ ID NO: 161790 - DNA, 75 bp, synthetic construct
  source 1..75: mol_type = other DNA
attccttataataaactgaatgaagttaacggatctattcaaataaaattacatgaaaatctaattaacaacatt

SEQ ID NO: 161791 - DNA, 75 bp, synthetic construct
  source 1..75: mol_type = other DNA
agctggtatgcgccaatgaacagtattacttgctttgggaggggacacatacctcatgggagaaagccgatgcgg

SEQ ID NO: 161792 - DNA, 75 bp, synthetic construct
  source 1..75: mol_type = other DNA
cgatttagttgaaactttcaattatctcattggcttacatgtgaaatccatcgaatctgatatcgcacgtggcta

SEQ ID NO: 161793 - DNA, 75 bp, synthetic construct
  source 1..75: mol_type = other DNA
aaaaaaaccccccaaaaaaaaaaaaaaaaacccccaaaataaaaaactttattccccataataaaacagagcaaa

SEQ ID NO: 161794 - DNA, 75 bp, synthetic construct
  source 1..75: mol_type = other DNA
atgtctggatatcgcacctgctggaaaacctgccggaagaaaaactggcatcggcgctgaaagatgacaacccgg

SEQ ID NO: 161795 - DNA, 75 bp, synthetic construct
  source 1..75: mol_type = other DNA
ctgctattgcagtcagatccctgtgctacttaatgacgatggcagtatcttcaatgaagggttggcagataagct

SEQ ID NO: 161796 - DNA, 75 bp, synthetic construct
  source 1..75: mol_type = other DNA
aacgttcagtgactggaaggtcatcagcgacacagcccgtggcgacctgaccaacatcatcaccgatgcggtagc

SEQ ID NO: 161797 - DNA, 75 bp, synthetic construct
  source 1..75: mol_type = other DNA
ctgctcaacgacgacggcagtattttcaacgaagggctggctgataagcttgcaaaagagagaaaagactggggt

SEQ ID NO: 161798 - DNA, 75 bp, synthetic construct
  source 1..75: mol_type = other DNA
ttcgtattaatggtgatagtctcacacaatattgtagtgaaaacgccaggaatgcttcagcgtcatttgaaagca

SEQ ID NO: 161799 - DNA, 75 bp, synthetic construct
  source 1..75: mol_type = other DNA
tccgtgctatcattaatgacaacatagttgagaagactcatgatgatataaataatgctgactttactgatggta

SEQ ID NO: 161800 - DNA, 75 bp, synthetic construct
  source 1..75: mol_type = other DNA
aaaaggcttcaagatcgccagacgaaatatcaaaatgaaattaatcaactatatgcgccaggtgttaattttgat

SEQ ID NO: 161801 - DNA, 75 bp, synthetic construct
  source 1..75: mol_type = other DNA
atattgaaccatttttttctgcggctaccgctgaagataaacaacaagttgaacaagctatcaacagtagcgtga

SEQ ID NO: 161802 - DNA, 75 bp, synthetic construct
  source 1..75: mol_type = other DNA
gcacacttaaagataacaataatctagtcagttttgaaccgtttattggggttggaccacgtcgcttcttggatc

SEQ ID NO: 161803 - DNA, 75 bp, synthetic construct
  source 1..75: mol_type = other DNA
aagcatctgcccctattaggacacctttattatcaaagtcttatatagaaattgagaaagctgctgctgatatgt

SEQ ID NO: 161804 - DNA, 75 bp, synthetic construct
  source 1..75: mol_type = other DNA
gagagtgacaaagttgcagcctatttataccaaaaattcgagaatgacgatgatctaatacgtgtgttattttta

SEQ ID NO: 161805 - DNA, 75 bp, synthetic construct
  source 1..75: mol_type = other DNA
aagatgcgtggttattgcctgaatccattattgatggctatatccgcagtgatgattcctctattcgtcaggtcg

SEQ ID NO: 161806 - DNA, 75 bp, synthetic construct
  source 1..75: mol_type = other DNA
gtgaaaatctccctctggatatcgtaatgactctggcgaaaagagattgggatatgatcattcaggagctttata

SEQ ID NO: 161807 - DNA, 75 bp, synthetic construct
  source 1..75: mol_type = other DNA
tcggtggtcaccgccattccgtgggttgcggccttgtttgggacctggcttattccgcgctattccgataaaacc

SEQ ID NO: 161808 - DNA, 75 bp, synthetic construct
  source 1..75: mol_type = other DNA
atattgatatagtggctttctcagaaaatacaatttatggattcaagagtcagctcagcaagaaaataacacaaa

SEQ ID NO: 161809 - DNA, 75 bp, synthetic construct
  source 1..75: mol_type = other DNA
gtgggtattagcatattcatgctgcttcatccttttttatttggtcctgaatttctttatttttttgataataca

SEQ ID NO: 161810 - DNA, 75 bp, synthetic construct
  source 1..75: mol_type = other DNA
ttgccaccgatcttggctggtcaccgggcacagagcttaccgtggagaaaaaaggcgatagcgttaatttgcgcg

SEQ ID NO: 161811 - DNA, 75 bp, synthetic construct
  source 1..75: mol_type = other DNA
agcgtcttgtcattctgcggtcgctggcggattacaacggcgaactgggtgaatctgtgctccaggactgtctgg

SEQ ID NO: 161812 - DNA, 75 bp, synthetic construct
  source 1..75: mol_type = other DNA
ggcggggattggttttgtaaacctgtttggtgcagtgggtgggtttattgccccgatcctgcgcgtgaaagcaga

SEQ ID NO: 161813 - DNA, 75 bp, synthetic construct
  source 1..75: mol_type = other DNA
tttgcaggtagttttcaggatgatgccagcatagaaggtgttgaatttgagtatgatggtaagcgtgcagcaaga

SEQ ID NO: 161814 - DNA, 75 bp, synthetic construct
  source 1..75: mol_type = other DNA
cagaatgagacctgtaagcggttgctggatattcctggtgttgggccacttattgcgacggcagcggtggccacc

SEQ ID NO: 161815 - DNA, 75 bp, synthetic construct
  source 1..75: mol_type = other DNA
atgctgtttggaacccgttctgaaaaactgcgtcgtgaggttgaacaggctgaagccctgctgaaacaacgcgag

SEQ ID NO: 161816 - DNA, 75 bp, synthetic construct
  source 1..75: mol_type = other DNA
ataatattgaaactaaatggctttatgattttctgaccctggaaaaatgccgcaatttttcccaggcggcagtta

SEQ ID NO: 161817 - DNA, 75 bp, synthetic construct
  source 1..75: mol_type = other DNA
ctgcatgtatcccagctgcgtgaacagctcgatagcttaattaattctcatcaatcagcagaaaatgttgccatt

SEQ ID NO: 161818 - DNA, 75 bp, synthetic construct
  source 1..75: mol_type = other DNA
tgcccagaagactacgcagctgctgaggactggggaacggtgatcgccatcgttcacagtcaccctgacgccaca

SEQ ID NO: 161819 - DNA, 75 bp, synthetic construct
  source 1..75: mol_type = other DNA
actataaatctatttcagagaaacaaacactgagtttagttgcatcaaaacttaacgatttgcctaataatctgt

SEQ ID NO: 161820 - DNA, 75 bp, synthetic construct
  source 1..75: mol_type = other DNA
ttcgctattatttatcatgataaagatataaatcaattatcaagaattttgcacagaatagtccatttctcaata

SEQ ID NO: 161821 - DNA, 75 bp, synthetic construct
  source 1..75: mol_type = other DNA
gctttaacactgccggagataaaggtaatcccggcggggatacctggtactggcgattcctggagttcggcacag

SEQ ID NO: 161822 - DNA, 75 bp, synthetic construct
  source 1..75: mol_type = other DNA
agagttcgcttcgccgtcgccattgaaggtgaaaacaatattcgaaccggagtccgctatcgtcttaatgaacag

SEQ ID NO: 161823 - DNA, 75 bp, synthetic construct
  source 1..75: mol_type = other DNA
ctaatcaaagcattaactggtgtataccacgctgatcgcggcaccatctggctggaaggccaggctatctcaccg

SEQ ID NO: 161824 - DNA, 75 bp, synthetic construct
  source 1..75: mol_type = other DNA
atgcttaaatgataagaaagatgagattctcaattttttaaaagctgccgatgtaggtattgatgacattcatgt

SEQ ID NO: 161825 - DNA, 75 bp, synthetic construct
  source 1..75: mol_type = other DNA
gaaatggcgtcatttttatccaatgagaatcttggtgtcgagatcgtattggttagctggccctttaagtatggc

SEQ ID NO: 161826 - DNA, 75 bp, synthetic construct
  source 1..75: mol_type = other DNA
tctaaaagggcagagaacatctgatgggatgacctggctgtatttgcccaatgacgatcaatatcgtgattactg

SEQ ID NO: 161827 - DNA, 75 bp, synthetic construct
  source 1..75: mol_type = other DNA
actcgactcaaaagccctttattttcacgtcagtatatctctgatcgaactataccacttttaaaacccacaaag

SEQ ID NO: 161828 - DNA, 75 bp, synthetic construct
  source 1..75: mol_type = other DNA
aaatctatttgataaaatagcaataagagtttatttttccatccacaagatttacatggcatttaaatataaaga

SEQ ID NO: 161829 - DNA, 75 bp, synthetic construct
  source 1..75: mol_type = other DNA
ctaaaataagttatataagaggtaattattataaatgcattccatgtggtaggattaatccaaaaaaaataagcg

SEQ ID NO: 161830 - DNA, 75 bp, synthetic construct
  source 1..75: mol_type = other DNA
cgggtgtggcggcgtgaacgggacctgacgggctggatgtcgctgtcacggaaaccgcaagtgacctggtacggc

SEQ ID NO: 161831 - DNA, 75 bp, synthetic construct
  source 1..75: mol_type = other DNA
tccccggatgagtacagcgcatagaaactgtacatcgcaccaacaaaggcaacaaagtttgctactttcgctttt

SEQ ID NO: 161832 - DNA, 75 bp, synthetic construct
  source 1..75: mol_type = other DNA
agcgtacccgtgaaattatcgaaggctatgtcaatgagtgcggatgcagaaacctcaccgatgttcagcacgtac

SEQ ID NO: 161833 - DNA, 75 bp, synthetic construct
  source 1..75: mol_type = other DNA
tcgcagatccgccatctgttgcaacagttagaaagcaaccttgcagagagctgcgtggcggcagcgattacgcgc

SEQ ID NO: 161834 - DNA, 75 bp, synthetic construct
  source 1..75: mol_type = other DNA
tccatcgccccctggctgatgccgtgacagcatggttcccggaaaacaaacaatctgatgtatcacagatatggc

SEQ ID NO: 161835 - DNA, 75 bp, synthetic construct
  source 1..75: mol_type = other DNA
ggggaccatggcatgctgtactgaagcgtacggaagctgaccgctgggcgcaggcagaagagcagaaatatgaga

SEQ ID NO: 161836 - DNA, 75 bp, synthetic construct
  source 1..75: mol_type = other DNA
tttttcaaagcataaaccgatacccaataccggtttcagtaataaaatggcgaggccgggccgggccggatcctg

SEQ ID NO: 161837 - DNA, 75 bp, synthetic construct
  source 1..75: mol_type = other DNA
tctgggtggaagatgtgagcgcgggtaataactgcgtggctatcaccctgggctacgtacaacaggcagttcagc

SEQ ID NO: 161838 - DNA, 75 bp, synthetic construct
  source 1..75: mol_type = other DNA
cagctggcaaacgcattcacgggattgtggtgcgcgacatttacggcgaaggtgcaccgcacaccaagcaggtca

SEQ ID NO: 161839 - DNA, 75 bp, synthetic construct
  source 1..75: mol_type = other DNA
tggacagagaggggcaatattgccaaccacccctgcaggagataactcagcatcgtatgaacaggggtttcctcc

SEQ ID NO: 161840 - DNA, 75 bp, synthetic construct
  source 1..75: mol_type = other DNA
aggcttacggcggcatcttcgcaattacgatcattaaaagtctggccgtgctgtttatcatcggcgtgtactaca

SEQ ID NO: 161841 - DNA, 75 bp, synthetic construct
  source 1..75: mol_type = other DNA
tgaaattgtacttcccggtgtttctgctcggggccgtgttcggaaaactgattgaactttcaggattttctcgtt

SEQ ID NO: 161842 - DNA, 75 bp, synthetic construct
  source 1..75: mol_type = other DNA
tcgaagctgcgctcattgccggaattttgctggtagtgatttttggatatcgcaatattcatggaagactggcag

SEQ ID NO: 161843 - DNA, 75 bp, synthetic construct
  source 1..75: mol_type = other DNA
tactcgaaagccgaatacaaagcctcgcgaggccaaactaccgctgcagagcccaaaaaagagctggagcaggct

SEQ ID NO: 161844 - DNA, 75 bp, synthetic construct
  source 1..75: mol_type = other DNA
gaccgatccgaacagtttattcgcgcaaatcgtacacattattgaagagggcggttggacggtattccgtaatat

SEQ ID NO: 161845 - DNA, 75 bp, synthetic construct
  source 1..75: mol_type = other DNA
ataacagacaccatgaagtctccggtgtcattgtattcattcgtgatagcagattctggcgagagaaaaacagcg

SEQ ID NO: 161846 - DNA, 75 bp, synthetic construct
  source 1..75: mol_type = other DNA
cagcaactggccgctggagaaaatcacctgacggacttattgagcaatggggaagtgccggtatatcagacgcat

SEQ ID NO: 161847 - DNA, 75 bp, synthetic construct
  source 1..75: mol_type = other DNA
attggtggcgctgccggcggtgcctgggttgtctctgttcacgtttatatgactgccgttggtctgaccgcaata

SEQ ID NO: 161848 - DNA, 75 bp, synthetic construct
  source 1..75: mol_type = other DNA
gcttgctatttccagcaaccttaaccgccatgctggtgggaattaccgaaccgctggaatttaccttcctgttca

SEQ ID NO: 161849 - DNA, 75 bp, synthetic construct
  source 1..75: mol_type = other DNA
ggggcaagctggtctgtgatgattacgctggctacaaggccgggttcggcaacggcattaccgaaatcggctgta

SEQ ID NO: 161850 - DNA, 75 bp, synthetic construct
  source 1..75: mol_type = other DNA
tgcccaccgttgaacgtcacatccggggcaaatgggcctgcgacagctgcgagacgttgatccaggcaccggtgc

SEQ ID NO: 161851 - DNA, 75 bp, synthetic construct
  source 1..75: mol_type = other DNA
atccattaaccgacgccaacgcgctggaagctatccgcctgatttctctgtggctgccgaaagcggtagaagatg

SEQ ID NO: 161852 - DNA, 75 bp, synthetic construct
  source 1..75: mol_type = other DNA
tcaaaatcaggcgtttgttgaagataaattcagtgttgggattagtaactatagaggcgaattaccaatcttcat

SEQ ID NO: 161853 - DNA, 75 bp, synthetic construct
  source 1..75: mol_type = other DNA
atggttatgatagagccgttcttatatgacagcttatcaatgctaattaatcaaaatcaggcgtttgttgaagat

SEQ ID NO: 161854 - DNA, 75 bp, synthetic construct
  source 1..75: mol_type = other DNA
aaaaataattgtaaactttcccactaaagatagttggagaaaaaaatcaacatatgattttatctcgcaaggtct

SEQ ID NO: 161855 - DNA, 75 bp, synthetic construct
  source 1..75: mol_type = other DNA
atgggcgctttgtgtgcttagttaccctgaccgcgatgtgtatcaggatattctgcctgtgatatccactgacaa

SEQ ID NO: 161856 - DNA, 75 bp, synthetic construct
  source 1..75: mol_type = other DNA
cgggcaagagaaaaaagaagcgttggcaatgctaaggaagctacgtacccagcagatctccatccccgaagctgc

SEQ ID NO: 161857 - DNA, 75 bp, synthetic construct
  source 1..75: mol_type = other DNA
gcgtcagcatcagcaccgtgcaacaggcgtatcagacgctggaaacgatgaggctcatcactccgcagccgcgtt

SEQ ID NO: 161858 - DNA, 75 bp, synthetic construct
  source 1..75: mol_type = other DNA
ggctggttagataaagccctggccgacccatgcgcaccatgtaacccacgtaccgcaagtcgcgacgaagtgcgt

SEQ ID NO: 161859 - DNA, 75 bp, synthetic construct
  source 1..75: mol_type = other DNA
gagtaccacatgggaaacccggacgctggagtatgaaatgagtcagctacctgcacgtgaagtgaatggtgtcac

SEQ ID NO: 161860 - DNA, 75 bp, synthetic construct
  source 1..75: mol_type = other DNA
tgcgcctattggctatattgcggaaataaccggttttccagtggtttattgcggactagctttcatgtcgggaat

SEQ ID NO: 161861 - DNA, 75 bp, synthetic construct
  source 1..75: mol_type = other DNA
atgattaatcaaataaatgcaagcaatgctctgcagcaaagattaaatagtgaagaatttgttaatttaaatgag

SEQ ID NO: 161862 - DNA, 75 bp, synthetic construct
  source 1..75: mol_type = other DNA
acctgaatacatgttaaatactgattacaaagagtattataactattttaaatggattaattttgataatgttta

SEQ ID NO: 161863 - DNA, 75 bp, synthetic construct
  source 1..75: mol_type = other DNA
atggaagaatacgagcaacgttctagtacgttggcacagttagccgatgaagcgaaagaactgaatgatgattca

SEQ ID NO: 161864 - DNA, 75 bp, synthetic construct
  source 1..75: mol_type = other DNA
ggggacaaaaccttaccaaattatcaaagagtgtcttgaggtaagagacgctattgctcacggcgattcgtatac

SEQ ID NO: 161865 - DNA, 75 bp, synthetic construct
  source 1..75: mol_type = other DNA
gtgaataccggtgcgctgctgacaatgtcagtcagtgtcaacgggggaacgccgccttataaacacgcctggaag

SEQ ID NO: 161866 - DNA, 75 bp, synthetic construct
  source 1..75: mol_type = other DNA
taatgacagtgtgtatgcatttaaggtgcagtttccgtccggacgtgggtttaagtttatggcagaagtacgtca

SEQ ID NO: 161867 - DNA, 75 bp, synthetic construct
  source 1..75: mol_type = other DNA
gcattaagatatagaaggcagtttttgccttatgctttatgtaagtacttatgggtaaatgtatttgaacgcttt

SEQ ID NO: 161868 - DNA, 75 bp, synthetic construct
  source 1..75: mol_type = other DNA
aggttaatccttcagcaagaagaaaagcaaaaatcaaactcattttttggtctaacaaagaaaaaaacaatcaga

SEQ ID NO: 161869 - DNA, 75 bp, synthetic construct
  source 1..75: mol_type = other DNA
gatcaagaaccatctgcctggtgaagtgcgtagtcataataatgtctggcaatggctcgtggataactggaacag

SEQ ID NO: 161870 - DNA, 75 bp, synthetic construct
  source 1..75: mol_type = other DNA
acatagtctcctccattcgtcgtgaaactattttcatctacccagtaatgaactctttgaagagttgtaatcaat

SEQ ID NO: 161871 - DNA, 75 bp, synthetic construct
  source 1..75: mol_type = other DNA
gcatcagctatgaaaccgccaccttcccgtgggctgcttctggtcgtgctatcgcttccgactgcgcagacggta

SEQ ID NO: 161872 - DNA, 75 bp, synthetic construct
  source 1..75: mol_type = other DNA
ctcttgaagattttcgtcgccagtgtgagagttttgcgcgcaaacagcagccccgctgcggcctaatttatgaac

SEQ ID NO: 161873 - DNA, 75 bp, synthetic construct
  source 1..75: mol_type = other DNA
gctgggttctgggcgttcgtcaggtggtgatgccattcagtgtggcagaagaggaaagctggctgatgcgtctct

SEQ ID NO: 161874 - DNA, 75 bp, synthetic construct
  source 1..75: mol_type = other DNA
cggcacggaaattatcttttatgataagtacgtctccggccacgaacgctatgagaaagtcgatacccttgacga

SEQ ID NO: 161875 - DNA, 75 bp, synthetic construct
  source 1..75: mol_type = other DNA
cactgtacgactggatacagactcagatgaaaacactggcgcgtcactcggatacggcaaaagcgtttgcatacc

SEQ ID NO: 161876 - DNA, 75 bp, synthetic construct
  source 1..75: mol_type = other DNA
catatttccctcctgtttttagtggtggggcagaaaattcaatagaccatatgctccatggtttaatatgtaagc

SEQ ID NO: 161877 - DNA, 75 bp, synthetic construct
  source 1..75: mol_type = other DNA
cgttacaaatcattcctggacaaagtgactgccggtactgcaaacgccagcgcgaccttcaccatcgaatacaaa

SEQ ID NO: 161878 - DNA, 75 bp, synthetic construct
  source 1..75: mol_type = other DNA
tgatcctcatgcccgaacccgtagccgaacccgcgctaaacggattgcgcctgaatttgcgcattgtctctatag

SEQ ID NO: 161879 - DNA, 75 bp, synthetic construct
  source 1..75: mol_type = other DNA
cgtatgcttgaaaaaggggtaaaagtctcagctggtacagatgccacccgcgttgcatcctataacccttgggtg

SEQ ID NO: 161880 - DNA, 75 bp, synthetic construct
  source 1..75: mol_type = other DNA
tgggattaatagccgtaggtgaggctggaaaacgggcagcaacggcagtggctccccgttgcagtgcagatactc

SEQ ID NO: 161881 - DNA, 75 bp, synthetic construct
  source 1..75: mol_type = other DNA
gttacgaaatataacgcactgctggatgacaccacagcagtgcgcaccacgctggcatcagttctggcgcaactg

SEQ ID NO: 161882 - DNA, 75 bp, synthetic construct
  source 1..75: mol_type = other DNA
gacagaagttaaagcaatggcgttgacttatctggagctgacggtactcagttatccagcagctgccatcacttt

SEQ ID NO: 161883 - DNA, 75 bp, synthetic construct
  source 1..75: mol_type = other DNA
gcgtaaagtctggcgccagttgttacgcgaaggtatcagggtggccagatgtacagtggcgcgactcatggcggt

SEQ ID NO: 161884 - DNA, 75 bp, synthetic construct
  source 1..75: mol_type = other DNA
gcgtaaagtctggcgccagttgttacgcgaaggtatcagggtggccagatgtacagtggcacggctcatggcggt

SEQ ID NO: 161885 - DNA, 75 bp, synthetic construct
  source 1..75: mol_type = other DNA
ggacgatgcttttcgcgaacgcatccagctgtcctggtcgcaactgaataccgcaggtgcccgcaatgcctatcg

SEQ ID NO: 161886 - DNA, 75 bp, synthetic construct
  source 1..75: mol_type = other DNA
tgtggttgcagatattcatattccctacgggctggatggtgaactggtgatgaaaaatgcccgtcaggcgctgca

SEQ ID NO: 161887 - DNA, 75 bp, synthetic construct
  source 1..75: mol_type = other DNA
gtactgcttgccagtgccggtgggagcgatctggatcaggttggcgcgaattatcaggttcagcggctggtcatt

SEQ ID NO: 161888 - DNA, 75 bp, synthetic construct
  source 1..75: mol_type = other DNA
ggttatggcatcggcgatcgttttatgcgtgccggagtggaaatcagccggcacggaaaggcgatagcctaccat

SEQ ID NO: 161889 - DNA, 75 bp, synthetic construct
  source 1..75: mol_type = other DNA
atcgtcgggcacatgtttcgcctgagttaccggcccaactggcgctggctggggatgtcggaagctgattcgcat

SEQ ID NO: 161890 - DNA, 75 bp, synthetic construct
  source 1..75: mol_type = other DNA
cggtattgtcttcagcattacatttttattttcggccatcgcctcaccgttttggggtggactcgccgaccgtaa

SEQ ID NO: 161891 - DNA, 75 bp, synthetic construct
  source 1..75: mol_type = other DNA
atgatcttcagcgcaataaaagcaatatatgatggaaatcctggttttatcttcgataaaatatcgcacaaactc

SEQ ID NO: 161892 - DNA, 75 bp, synthetic construct
  source 1..75: mol_type = other DNA
ggattttgtgttcagtcttctggcagaagtgggttcttggggggggttcttggaagaaggggggttgagggcaga

SEQ ID NO: 161893 - DNA, 75 bp, synthetic construct
  source 1..75: mol_type = other DNA
cggcgtgacggatggtgcacgccggcgcgaaaaatccacctgtaccactgcgaccatcgcggcctgccgctggcc

SEQ ID NO: 161894 - DNA, 75 bp, synthetic construct
  source 1..75: mol_type = other DNA
gatacgcgttaagccaggcgaaatccatcgccgatgaactgatgaccgggtgtacaaattttgcgttcagcggaa

SEQ ID NO: 161895 - DNA, 75 bp, synthetic construct
  source 1..75: mol_type = other DNA
ggaaatgatcttcagcgcattaaaagaaatatatgatggagatcctggttttatcttcgataagatatcacaaaa

SEQ ID NO: 161896 - DNA, 75 bp, synthetic construct
  source 1..75: mol_type = other DNA
gcgagctataaagacaaagaactcgtccgtactatcattaatgacaacatagttgagaagactcatgatgatata

SEQ ID NO: 161897 - DNA, 75 bp, synthetic construct
  source 1..75: mol_type = other DNA
ttgatgcggttgtattgcagcaaacagggcttacattgcggcaggcacaacgctttctttcatttccacgaaagt

SEQ ID NO: 161898 - DNA, 75 bp, synthetic construct
  source 1..75: mol_type = other DNA
aggggtgaaaaagcagctgaattagcagtagctcacgaaaagacagagattgacaataattctggtggagatgca

SEQ ID NO: 161899 - DNA, 75 bp, synthetic construct
  source 1..75: mol_type = other DNA
gggttctatctgcgccagcatgggcagcaaagagggctggaaattgcctgcgcgttgctttcggatctgatggag

SEQ ID NO: 161900 - DNA, 75 bp, synthetic construct
  source 1..75: mol_type = other DNA
ttccgccgtcggggaaattatggggcgcatgttaatcgacatcatgacccccatttatacacagcatcccgaact

SEQ ID NO: 161901 - DNA, 75 bp, synthetic construct
  source 1..75: mol_type = other DNA
atgggaatgtttgttagtcaggtttctaattattctgaacatggctttgaaaatatttgtaagtcgatgttgttg

SEQ ID NO: 161902 - DNA, 75 bp, synthetic construct
  source 1..75: mol_type = other DNA
tagtgaaactgaattagttaaagtaatacataacctcaatcactcttttggttatactaacaaaaaaataatata

SEQ ID NO: 161903 - DNA, 75 bp, synthetic construct
  source 1..75: mol_type = other DNA
aaaaagcccggttggctgcctgttttatgattttttcggcgggaataccctcaaggctgatgtctctatttcggt

SEQ ID NO: 161904 - DNA, 75 bp, synthetic construct
  source 1..75: mol_type = other DNA
aaaaagcatttgaatatatcgccggggtgggggatgacagtaaaaacccgctgaaagccatcatgaaaggctatg

SEQ ID NO: 161905 - DNA, 75 bp, synthetic construct
  source 1..75: mol_type = other DNA
caaacgaaaatttgtggccagtcgactggcatcacagatgtttgcctgctggctggaggaagcacttattcgcgg

SEQ ID NO: 161906 - DNA, 75 bp, synthetic construct
  source 1..75: mol_type = other DNA
aacactcccgatcagaatggcaacgcatcagcataacgcgattaacgttattgaatggttagctactcgtgatga

SEQ ID NO: 161907 - DNA, 75 bp, synthetic construct
  source 1..75: mol_type = other DNA
gggattcagaagacgttaaaagttcatcgtcttgtagctcaattatttatcccaaatccgtattgcaagccagaa

SEQ ID NO: 161908 - DNA, 75 bp, synthetic construct
  source 1..75: mol_type = other DNA
atgagaaaacttctttttttcctgctgttgatgatagccgtcctgccggaggttcaggccacctgttcgttctac

SEQ ID NO: 161909 - DNA, 75 bp, synthetic construct
  source 1..75: mol_type = other DNA
gatgttctggtttccatgtcggctattatgaaaactctctgtcccagaaagtgtcagaagttatcagcctggatg

SEQ ID NO: 161910 - DNA, 75 bp, synthetic construct
  source 1..75: mol_type = other DNA
gatgttcttgtgtccatgtcggctattatgaaactctctgtccctgaaagtggtcagaaactatcagcctggatg

SEQ ID NO: 161911 - DNA, 75 bp, synthetic construct
  source 1..75: mol_type = other DNA
gcaaaagagtttgcgacaggcgtactgacctgtgagtccgttcacatcgttgcagaagtggatgacgagatgtgc

SEQ ID NO: 161912 - DNA, 75 bp, synthetic construct
  source 1..75: mol_type = other DNA
ttgttctcgatataaaactcgaaaactggtttttgtctgccggatacagacagaatgtgttggggcaggaatgtt

SEQ ID NO: 161913 - DNA, 75 bp, synthetic construct
  source 1..75: mol_type = other DNA
atgaagaaaaaaattatattagtggtttttttgttgcttattcttattgcttgccttattggcggtaattatctt

SEQ ID NO: 161914 - DNA, 75 bp, synthetic construct
  source 1..75: mol_type = other DNA
gcaaaggggcgtgagcaactggcacagatgctggcaggtcaaccggggatgacggtggagcaggcgaaagcgttt

SEQ ID NO: 161915 - DNA, 75 bp, synthetic construct
  source 1..75: mol_type = other DNA
gacggtggagcaggcgaaaacgttactggcagcggcaccggtttccggtgcggcaagtaccggcgagcagattat

SEQ ID NO: 161916 - DNA, 75 bp, synthetic construct
  source 1..75: mol_type = other DNA
atgccgttgaagtgatggtttctgcaataaataaagaaattaatagagaggtaaatatgtcgcaaacgaatgttt

SEQ ID NO: 161917 - DNA, 75 bp, synthetic construct
  source 1..75: mol_type = other DNA
gcggtttatttgcagttcaagcgcctggaatatcaccgaccatgtactgcgttatctcattcttgattgttctcc

SEQ ID NO: 161918 - DNA, 75 bp, synthetic construct
  source 1..75: mol_type = other DNA
taccctgcggccatattccggtatgaccggttatgacggtctgactgcccgtcttaagtcagcggtgaacgaccc

SEQ ID NO: 161919 - DNA, 75 bp, synthetic construct
  source 1..75: mol_type = other DNA
aattgtcaggaggcgaaagggcgcgagcaactggcgcaaatgctggcaggtcagcctggaatgacggtagagcag

SEQ ID NO: 161920 - DNA, 75 bp, synthetic construct
  source 1..75: mol_type = other DNA
ctcagacaaaggaatttacactacccaaaacagatgcaggaacaaacagggtaatacaactcatacagccagcaa

SEQ ID NO: 161921 - DNA, 75 bp, synthetic construct
  source 1..75: mol_type = other DNA
ccagcaaactaaaaatttctggtcgctggctgtatataccgggatgcggcatggcgaactgtgtgggctggcatg

SEQ ID NO: 161922 - DNA, 75 bp, synthetic construct
  source 1..75: mol_type = other DNA
attcgtttctacgccacgtatatcaaagccctggaaaacgaactggatggcttcaccttcggagacaataaagac

SEQ ID NO: 161923 - DNA, 75 bp, synthetic construct
  source 1..75: mol_type = other DNA
ggcggctgacaggctggggctgaataccggtctgctgtggttgtcagcgctcaaacctacgacgcgcacctggca

SEQ ID NO: 161924 - DNA, 75 bp, synthetic construct
  source 1..75: mol_type = other DNA
ctgccgcagatattcccgtggcgagcgataacccagcgcactatgcggatgccattcgttataatgctcgaacgc

SEQ ID NO: 161925 - DNA, 75 bp, synthetic construct
  source 1..75: mol_type = other DNA
gccgctgatagcggttatgtacgggtgaatccgttcaccgggatcgccatgcttaagcggtcacgatgcgagtct

SEQ ID NO: 161926 - DNA, 75 bp, synthetic construct
  source 1..75: mol_type = other DNA
gatccgctcacacgagacgaatttattcgttttattgatgcctgtcaccatcaacaaacgaaaaacctgtggtcc

SEQ ID NO: 161927 - DNA, 75 bp, synthetic construct
  source 1..75: mol_type = other DNA
tgtcagaaaataataatgcacaggtaacgctgttaaatacacagctaagcgagtttgccccaaccatgccccata

SEQ ID NO: 161928 - DNA, 75 bp, synthetic construct
  source 1..75: mol_type = other DNA
aaaatattctgagcataatcggtgaaaaaaatcttgcctcgtcgattaataaagaaaaattgctggcggtacgta

SEQ ID NO: 161929 - DNA, 75 bp, synthetic construct
  source 1..75: mol_type = other DNA
tgattgtcgtgattgggattatgcctaaaaaagtcatctacggtgacgcccggctcgcaactgatatggacctga

SEQ ID NO: 161930 - DNA, 75 bp, synthetic construct
  source 1..75: mol_type = other DNA
ggtaacgcgctcaatcggtatcaatctgtggtgagaaacatgctccctcgtataggggaaaatcgactggcttca

SEQ ID NO: 161931 - DNA, 75 bp, synthetic construct
  source 1..75: mol_type = other DNA
ccgtggtgagaaacatgcttcctcgcataggggaaaaacgtcttgcttcgtctgtaacaaaggaagatttactgt

SEQ ID NO: 161932 - DNA, 75 bp, synthetic construct
  source 1..75: mol_type = other DNA
cgtgaatttttattacgtttctcatttattggtattttttctgttttaattcatattgttaaagtttatattaaa

SEQ ID NO: 161933 - DNA, 75 bp, synthetic construct
  source 1..75: mol_type = other DNA
taattatggcatcaaataaaatagatgagtttctacctctggcaataaactcaattcttgaacaaacatatcaaa

SEQ ID NO: 161934 - DNA, 75 bp, synthetic construct
  source 1..75: mol_type = other DNA
catcgctttctgaggttagtgcgccaaattgaagaaggtcaggatgcggatgaattactcagcaaatggaataag

SEQ ID NO: 161935 - DNA, 75 bp, synthetic construct
  source 1..75: mol_type = other DNA
cccgcaatttacaaaccttaaccttgtaaattctacagatgcggcaactattggtggcggtatcttgcaaagtat

SEQ ID NO: 161936 - DNA, 75 bp, synthetic construct
  source 1..75: mol_type = other DNA
gccctactttgggcggcgtaccagaatttgctggcctttttataggtaagataactggcagtgcttacacttata

SEQ ID NO: 161937 - DNA, 75 bp, synthetic construct
  source 1..75: mol_type = other DNA
taatcaaaaaaaaatactcatttcagcgagaggctacaatgctggatttaattcagaggactatgatctctggtt

SEQ ID NO: 161938 - DNA, 75 bp, synthetic construct
  source 1..75: mol_type = other DNA
aacgcagacctaacccgccttaataacaatggggcagtactctttaaccataaccgtgatgatcttattggtgct

SEQ ID NO: 161939 - DNA, 75 bp, synthetic construct
  source 1..75: mol_type = other DNA
ttatcgctttactggcgtggcgatcactctgtggctgcttattttgtcggtagtgataggcggagttctggcgct

SEQ ID NO: 161940 - DNA, 75 bp, synthetic construct
  source 1..75: mol_type = other DNA
aaccaaatcatttgaactagtattgacaatattacaagaacataaaattgatattgttaatacaaataatttagc

SEQ ID NO: 161941 - DNA, 75 bp, synthetic construct
  source 1..75: mol_type = other DNA
attcaatatgattttcggtactgatatcggtgctgaactggtgaaacatcccgcaattcaggcggtgggttttac

SEQ ID NO: 161942 - DNA, 75 bp, synthetic construct
  source 1..75: mol_type = other DNA
gcagcggcactggctgcaggatgcccggtagttgtgaaagcgcatcctgggcatatggcaacggcagaaattatc

SEQ ID NO: 161943 - DNA, 75 bp, synthetic construct
  source 1..75: mol_type = other DNA
tttaaagattagtactacagcgagtgatatgtgggaaatgatccaggaaggaatcctccagcatatcagtattgg

SEQ ID NO: 161944 - DNA, 75 bp, synthetic construct
  source 1..75: mol_type = other DNA
aaaatacagcattcaaattggcaaagacacctcctactaagggagttgctcgttatgtcgtagagcttgctcgct

SEQ ID NO: 161945 - DNA, 75 bp, synthetic construct
  source 1..75: mol_type = other DNA
acgtttcggtactgaataatgaagaaattggcaagtgtatcaattcatttaaagcaaatgatatattgagaagaa

SEQ ID NO: 161946 - DNA, 75 bp, synthetic construct
  source 1..75: mol_type = other DNA
atggaatgtcggtccctgagcatccggctaaccggattttttatgtcagaaatgaacaaaaaacaaactttataa

SEQ ID NO: 161947 - DNA, 75 bp, synthetic construct
  source 1..75: mol_type = other DNA
gcactatgccgcaattaactgcaacggaagccgccgcgcaggagaaccagcgagtgatggggatcctgacatgcc

SEQ ID NO: 161948 - DNA, 75 bp, synthetic construct
  source 1..75: mol_type = other DNA
gaacaactggcggcaacgctggcggcgatgccggagatgacggtggaaaaagcccgcccgatcctggctgcttca

SEQ ID NO: 161949 - DNA, 75 bp, synthetic construct
  source 1..75: mol_type = other DNA
gacttttaaaatgtatcgctgcattattttgccttctgcgctgcgtattgcgttaccggcatacagcaacgaagt

SEQ ID NO: 161950 - DNA, 75 bp, synthetic construct
  source 1..75: mol_type = other DNA
agatatgggggcggctgcatttggtcattatttctgttacgcaaacaatgaaaacgcgatactttgcgttcgcgg

SEQ ID NO: 161951 - DNA, 75 bp, synthetic construct
  source 1..75: mol_type = other DNA
ctttgatggtggtaactggcgtattcagaaagacggatatgacgggacgaaaacaagcaattcaatgagctacaa

SEQ ID NO: 161952 - DNA, 75 bp, synthetic construct
  source 1..75: mol_type = other DNA
tgattttactgatagcccgcaatttacaaaccttaaccttgttaggtcgtcagatgtcgcaaccacggcaggcgg

SEQ ID NO: 161953 - DNA, 75 bp, synthetic construct
  source 1..75: mol_type = other DNA
atggcatggctgtacctgagcatcctgctaacagagttttttatgtcagaaatgaacaaaaaacaaactctataa

SEQ ID NO: 161954 - DNA, 75 bp, synthetic construct
  source 1..75: mol_type = other DNA
tcatcatcactctccctgctttctccgccacggcagccagttttgactgccgccagtcccgcagtgcggatgaaa

SEQ ID NO: 161955 - DNA, 75 bp, synthetic construct
  source 1..75: mol_type = other DNA
acgcttaaggaaaacggcctgccttacgctggcgttatcgctcaggaggtcatggaggcgcttccggaagctgtg

SEQ ID NO: 161956 - DNA, 75 bp, synthetic construct
  source 1..75: mol_type = other DNA
gtgcatctgaacgcgtcgcagttgaacgatgattttaccctcacaggaagcactgaagtccttgatagccaggta

SEQ ID NO: 161957 - DNA, 75 bp, synthetic construct
  source 1..75: mol_type = other DNA
gaaggggattgaaacccgcgattttgtgtaccagaaccagcaagaaacggaacagaacgaccagaaagcggaaca

SEQ ID NO: 161958 - DNA, 75 bp, synthetic construct
  source 1..75: mol_type = other DNA
aatattcacgctgcaatgcaaaacaatactgatgcagcaaggctactcaaccacccggatcgcaaatctgaaatc

SEQ ID NO: 161959 - DNA, 75 bp, synthetic construct
  source 1..75: mol_type = other DNA
aaaaatcaggctgaagttcaggaagatgatccggaggaaatggaaggcgctgaacatccgaacaatgagaatgct

SEQ ID NO: 161960 - DNA, 75 bp, synthetic construct
  source 1..75: mol_type = other DNA
acagtgtttcgcccgtattcggcacgcgcagccggactacgtgcccgtattgattatgaaaaaggatggtggtgg

SEQ ID NO: 161961 - DNA, 75 bp, synthetic construct
  source 1..75: mol_type = other DNA
cagggatcccctgcccgtggcgttactacaacgatcgcgatgtacgcacaatcgttgagctggggaaagccatag

SEQ ID NO: 161962 - DNA, 75 bp, synthetic construct
  source 1..75: mol_type = other DNA
tggctgactgcctgaataccgatgaatggccagctattaaaacgttatcactgccccgctgggctaaggagtatg

SEQ ID NO: 161963 - DNA, 75 bp, synthetic construct
  source 1..75: mol_type = other DNA
aggtggaatttttatcagtatccgttgaacccgatttctggaatcgatccccttgggattagccacctgtttata

SEQ ID NO: 161964 - DNA, 75 bp, synthetic construct
  source 1..75: mol_type = other DNA
taatggataatgggaatccattcgtcactccgcaatcaacgcctttctgtctctacgggaaatactcatttaatt

SEQ ID NO: 161965 - DNA, 75 bp, synthetic construct
  source 1..75: mol_type = other DNA
ggttgctcaaaatatcgctttaaacgctgattacccagtgatggtttttatcaaaaccaccaatacagcacagcc

SEQ ID NO: 161966 - DNA, 75 bp, synthetic construct
  source 1..75: mol_type = other DNA
ctggattattcccgcgccgctatttttgcacttatccggagcgctcaccctgagttttatcactacccgggacgc

SEQ ID NO: 161967 - DNA, 75 bp, synthetic construct
  source 1..75: mol_type = other DNA
actgattggcagcctggacattatgggcgtgctgaatcctgtagtcctgccaagcgtttctggcgctggtaatga

SEQ ID NO: 161968 - DNA, 75 bp, synthetic construct
  source 1..75: mol_type = other DNA
gtctttgcgcgcgaatggcaaaagctgaatattggtacggtgatcattactgccgcactggtcgcgttttacgcg

SEQ ID NO: 161969 - DNA, 75 bp, synthetic construct
  source 1..75: mol_type = other DNA
ctcgatatggacatccgcagcatctatgcttataagcaacgtattgaaaagagaatgggaggtaaaatcaacgaa

SEQ ID NO: 161970 - DNA, 75 bp, synthetic construct
  source 1..75: mol_type = other DNA
aaaaaacataaagacgcttcagttttgtttgcaaaagctcgggcaacagaggaaatagatctaataaataaaaag

SEQ ID NO: 161971 - DNA, 75 bp, synthetic construct
  source 1..75: mol_type = other DNA
tgtttgaccgttatggggatgcagacgatttcctggactcatcaggagatgaaacatgtttactgaagaacaaaa

SEQ ID NO: 161972 - DNA, 75 bp, synthetic construct
  source 1..75: mol_type = other DNA
aatcgccatgaacactgccctgaaccgccccgggtttcctggagagtattttatctgtgaactcaggctgccaga

SEQ ID NO: 161973 - DNA, 75 bp, synthetic construct
  source 1..75: mol_type = other DNA
cgggggaatttctgtctgctaatgaatggattcgccgcaaaaaccagcttaaaactagtgtacaccctgcgtcag

SEQ ID NO: 161974 - DNA, 75 bp, synthetic construct
  source 1..75: mol_type = other DNA
tgacatggggattgttttagtcagcgaccgcaatatgcaatcgttagctaattactggcgaaaacacggtgatgc

SEQ ID NO: 161975 - DNA, 75 bp, synthetic construct
  source 1..75: mol_type = other DNA
ccatcatcatccactccgtggcagttaccccggaagataacgaacgtttcgaatcacgcgacgtttatgaaatca

SEQ ID NO: 161976 - DNA, 75 bp, synthetic construct
  source 1..75: mol_type = other DNA
tgcagatgtgattgaggacagcattcaggaggccatgctgccttatgtcgatcgtccgcttgatcgggatgtggc

SEQ ID NO: 161977 - DNA, 75 bp, synthetic construct
  source 1..75: mol_type = other DNA
tgggggcgatccatggcggcagtgcatggctgaatgatgaactgaacacagcagaaacgctggcagctgggcagt

SEQ ID NO: 161978 - DNA, 75 bp, synthetic construct
  source 1..75: mol_type = other DNA
ctggataatgaactgacgatcacgtcaaaaattgccggcagggtgggaaacacggtcacagtgacggcggcacta

SEQ ID NO: 161979 - DNA, 75 bp, synthetic construct
  source 1..75: mol_type = other DNA
cgcccttactctgcgtttgctgccgggttacgcgcccgcatcgactttgaaaaaggctggtggtggagcaagtcg

SEQ ID NO: 161980 - DNA, 75 bp, synthetic construct
  source 1..75: mol_type = other DNA
ttaccaactctaacccgcaatcggtcgcgatggggattggcctgattttactactgggattcacctgctacgcct

SEQ ID NO: 161981 - DNA, 75 bp, synthetic construct
  source 1..75: mol_type = other DNA
gggtatgacgccgccgggcgcatcaccacgctgactaatgagaacggcagccagtccacgttcctgtatgacccg

SEQ ID NO: 161982 - DNA, 75 bp, synthetic construct
  source 1..75: mol_type = other DNA
tgacctgaccggaaaactcacgcagagtgaagatgaggggcttatcaccctctggcattacgatgcgtcggaccg

SEQ ID NO: 161983 - DNA, 75 bp, synthetic construct
  source 1..75: mol_type = other DNA
tggctataacagccagcggcaggtgacgtcggtgacgtacccggacgggcttcgcagcagccgggagtatgatga

SEQ ID NO: 161984 - DNA, 75 bp, synthetic construct
  source 1..75: mol_type = other DNA
gtgccgggggcggacgaggtgctgccgccggagccgcccgcataccgggtgctgacgggcgtggtggacggcttc

SEQ ID NO: 161985 - DNA, 75 bp, synthetic construct
  source 1..75: mol_type = other DNA
tcccgcgcctacagcagctaccggaccagaacccccgcgccggtgggggtgtttggtcccggctggaaagcgccc

SEQ ID NO: 161986 - DNA, 75 bp, synthetic construct
  source 1..75: mol_type = other DNA
tgctgccgggcgagacggaccttgcgctgcccggcccgttgccgtttattctttcccgcgcttacagcagctacc

SEQ ID NO: 161987 - DNA, 75 bp, synthetic construct
  source 1..75: mol_type = other DNA
gggtggaatgacaacggcgacctggtgcgcatcagcggcccgcgacagacgcgggaatacggctacagtgccacg

SEQ ID NO: 161988 - DNA, 75 bp, synthetic construct
  source 1..75: mol_type = other DNA
agtatgatgaggagtcggggctgtactataaccggaaccggtactacgatccgttgcaggggcggtatatcaccc

SEQ ID NO: 161989 - DNA, 75 bp, synthetic construct
  source 1..75: mol_type = other DNA
gatggaacctgtatcagtacccactcaatcctattgaacatatagatccgttggggttagcacttgatttgaatt

SEQ ID NO: 161990 - DNA, 75 bp, synthetic construct
  source 1..75: mol_type = other DNA
gataacgttgatccggctgtttttattgatgctgaggtggataccttcgaccggcttctggatgactacatcgtt

SEQ ID NO: 161991 - DNA, 75 bp, synthetic construct
  source 1..75: mol_type = other DNA
tgctgtcggtttatccccgctggcgcggggaacacaatactgactataaaaattatgtgctggctgacggtttat

SEQ ID NO: 161992 - DNA, 75 bp, synthetic construct
  source 1..75: mol_type = other DNA
actctgatcaatctggtttatataggcttgcgcggacggtttatccccgctggcgcggggaactcctgcaactga

SEQ ID NO: 161993 - DNA, 75 bp, synthetic construct
  source 1..75: mol_type = other DNA
ttcataccattgatgccacccagccgctggaggccgtgatggatgcaatccgcactaccgtgacccactgggtga

SEQ ID NO: 161994 - DNA, 75 bp, synthetic construct
  source 1..75: mol_type = other DNA
tggcgtattatctccagacaacaggcggccagttaaatctgatgcaccataaaacaggggggaatacgaaactgg

SEQ ID NO: 161995 - DNA, 75 bp, synthetic construct
  source 1..75: mol_type = other DNA
cacgatctctccactcaggcgtatcagggcggtggtcgtggtattgaccagcatatgctggcaacgttgcgtgat

SEQ ID NO: 161996 - DNA, 75 bp, synthetic construct
  source 1..75: mol_type = other DNA
ttaatccctataaccaaagtttcactttaacggcgtacgtttttgccatattcccgcagatattaccgaaatggg

SEQ ID NO: 161997 - DNA, 75 bp, synthetic construct
  source 1..75: mol_type = other DNA
caggcatcttttgccgtccgtcttgccgcgccagacatgccttgcgggaaaatgtctccttctacgcaaatgcct

SEQ ID NO: 161998 - DNA, 75 bp, synthetic construct
  source 1..75: mol_type = other DNA
gggaaagtccctcttacctttccacctgggcagggtgtacctcttaatgccaattctacccctgcgcaaaatgct

SEQ ID NO: 161999 - DNA, 75 bp, synthetic construct
  source 1..75: mol_type = other DNA
atgagcgcacccaccggtaccattacgacagtcagcaccggctggtgcactacacgcggacacaatatgaagagc

SEQ ID NO: 162000 - DNA, 75 bp, synthetic construct
  source 1..75: mol_type = other DNA
ctggttttatgatttttcccgcagtggcctgccctgtgcggtggaagacggaaccggggtgaggcggagaataac

SEQ ID NO: 162001 - DNA, 75 bp, synthetic construct
  source 1..75: mol_type = other DNA
cctcgcgcaacggtaacattacgcgctggttttatgatttttcccgcagtggcctgccctgtgcggtggaagacg

SEQ ID NO: 162002 - DNA, 75 bp, synthetic construct
  source 1..75: mol_type = other DNA
gaccgttttggtcaggtgacggcggtgcaccgcgaggaagggctgagtcagtaccgcgcatacgacagccgtgga

SEQ ID NO: 162003 - DNA, 75 bp, synthetic construct
  source 1..75: mol_type = other DNA
acgaacagtccgcaggggccgtggtgggtactcggctggtgtgagcaggtgccggaggcggatgaggtgctgccc

SEQ ID NO: 162004 - DNA, 75 bp, synthetic construct
  source 1..75: mol_type = other DNA
acatgtccacttgtaatagccttaaccacggttaccccggtattaaactgactttgaacataactgtaccaccac

SEQ ID NO: 162005 - DNA, 75 bp, synthetic construct
  source 1..75: mol_type = other DNA
ttgctattatggtgttcagacacttcgtggaaaagataatttccatatcactgaaatgccaatgagtcaggagcc

SEQ ID NO: 162006 - DNA, 75 bp, synthetic construct
  source 1..75: mol_type = other DNA
ccgtctcgtgcggagatctacgcgggggcactgagcgataaatatatcctcgcttacagcaactccctgatggat

SEQ ID NO: 162007 - DNA, 75 bp, synthetic construct
  source 1..75: mol_type = other DNA
attcaggcgcgccatacccgccagggcgagttccagtatcctatttaccgtatgccgccaaaacgtggtcgtctg

SEQ ID NO: 162008 - DNA, 75 bp, synthetic construct
  source 1..75: mol_type = other DNA
atgagctggatctcgacaatgtcacgctgctggatatgcgtggcgtttctgtgctcgcaacaaaaaaacgactcg

SEQ ID NO: 162009 - DNA, 75 bp, synthetic construct
  source 1..75: mol_type = other DNA
ccgcattgtgttttggtacgacccagagcaaagctttactgaagagcttgagcatttagctaacgccctatctat

SEQ ID NO: 162010 - DNA, 75 bp, synthetic construct
  source 1..75: mol_type = other DNA
cgattagagcagccgaaggtcttagtcagaatgagttttgcgaatttattgacttatctataaatacgcttagga

SEQ ID NO: 162011 - DNA, 75 bp, synthetic construct
  source 1..75: mol_type = other DNA
tcgccgggcaacaagaaaggcggtctggcaaacgtggtagagaaggcactcggctccattgctaaatcgggtaaa

SEQ ID NO: 162012 - DNA, 75 bp, synthetic construct
  source 1..75: mol_type = other DNA
cgagcgcctcggtcgccaaagctattctggatgagttgctggaggccaacaaagcgtactggccagagttacgtt

SEQ ID NO: 162013 - DNA, 75 bp, synthetic construct
  source 1..75: mol_type = other DNA
tcgtgttgttatcgctggcggtggcggggctgtttctggtgaagcatgaaaacgccagactgcgctactcgctgg

SEQ ID NO: 162014 - DNA, 75 bp, synthetic construct
  source 1..75: mol_type = other DNA
agacgcttactggtgtcgaggtgaccttccctcagtggtgtaaatacaccgttttcaagcgcatgcccagcggcg

SEQ ID NO: 162015 - DNA, 75 bp, synthetic construct
  source 1..75: mol_type = other DNA
gctgatttacctgatgctgtgcgccggttgcaccagcgcgccgcctgtaccaacgccgccgccggtgattgttta

SEQ ID NO: 162016 - DNA, 75 bp, synthetic construct
  source 1..75: mol_type = other DNA
tcattaaaatggcgacccgcaccgagctggcgaaccgctggtttgatttaatggatattaacgcgggcactatcg

SEQ ID NO: 162017 - DNA, 75 bp, synthetic construct
  source 1..75: mol_type = other DNA
aaccgtattatcatcggaataagaaaatatattttctttcaaccgtatttctggtggtatgttctttcaatgttt

SEQ ID NO: 162018 - DNA, 75 bp, synthetic construct
  source 1..75: mol_type = other DNA
cctggcgtgccgatcgtcgctataaagacgcttatgactactgcgctcagcaaatgcaggccgccctgcgcccgg

SEQ ID NO: 162019 - DNA, 75 bp, synthetic construct
  source 1..75: mol_type = other DNA
gctcgccgtatgatttgcacgaatgcgaaaccaccctcagcatcgaacaaaccattattcatgcgctggtaacgc

SEQ ID NO: 162020 - DNA, 75 bp, synthetic construct
  source 1..75: mol_type = other DNA
gatgatgggccgtccgcaggagtgggggcacaatattgtcggcggatttttctccggcggcgaagcctcctgggg

SEQ ID NO: 162021 - DNA, 75 bp, synthetic construct
  source 1..75: mol_type = other DNA
aaggagtcaatcatgtgtgatagatacaattttaaatatatatcccaacaagagaaggatatcgtcctaaaggtc

SEQ ID NO: 162022 - DNA, 75 bp, synthetic construct
  source 1..75: mol_type = other DNA
aataatgtgtgatagatacaactataaatatatatcgcaacaagagaaggatgtcgtcctaaaggtctataaatc

SEQ ID NO: 162023 - DNA, 75 bp, synthetic construct
  source 1..75: mol_type = other DNA
tgctgactagccagctatcaatagttaccgatgcgggtttccagagtgcatggtgctggcatataaggtcactcg

SEQ ID NO: 162024 - DNA, 75 bp, synthetic construct
  source 1..75: mol_type = other DNA
ttggatggaaaaatagtagttggagaatataacggcagttttgttttaaagaaatgcgtagatggcaaaggggtt

SEQ ID NO: 162025 - DNA, 75 bp, synthetic construct
  source 1..75: mol_type = other DNA
caccgacgggtttaatttccccgatacaggtgcgttctggaaggcctattgtgacgaaatttatcgcttcgatca

SEQ ID NO: 162026 - DNA, 75 bp, synthetic construct
  source 1..75: mol_type = other DNA
atgttttttttatccttgaatctctaaaagaaaatgattatgagataccatcgaacaaaaggatattgggtgttt

SEQ ID NO: 162027 - DNA, 75 bp, synthetic construct
  source 1..75: mol_type = other DNA
aacactatattaatgaaactgaattccgaataatatcaggttcagacagccatcgagatcatcttatcgcgatga

SEQ ID NO: 162028 - DNA, 75 bp, synthetic construct
  source 1..75: mol_type = other DNA
gaggttataggctatgaggaaagggcaaatgatcgaccatattatcaaaacaaactttttgcaatagctcaggtt

SEQ ID NO: 162029 - DNA, 75 bp, synthetic construct
  source 1..75: mol_type = other DNA
ttacgggcctacgtctggtcaatggtaatttaggtgcatacgaaactgatacaggtgattttaatattgcgtggg

SEQ ID NO: 162030 - DNA, 75 bp, synthetic construct
  source 1..75: mol_type = other DNA
atgccatgcgggcacattacgccgacgttcgcctgcatgtggtggaaagcctgtcaggtaatctggaacggatga

SEQ ID NO: 162031 - DNA, 75 bp, synthetic construct
  source 1..75: mol_type = other DNA
ctcacccctgccggtcttgcagtccgcgtaatactcacaaaagtcatgcgtgaactcgttgaaaccggtcattgg

SEQ ID NO: 162032 - DNA, 75 bp, synthetic construct
  source 1..75: mol_type = other DNA
cacggtgtccagtatgcaatcaatctattattgttaaacgtaacagtcatggaaacctttttacagtctgtttag

SEQ ID NO: 162033 - DNA, 75 bp, synthetic construct
  source 1..75: mol_type = other DNA
tgaatatttataatgtttttgtgattattcgagtcctttgccatggtcagcatcccagaatacgtcaattcaaaa

SEQ ID NO: 162034 - DNA, 75 bp, synthetic construct
  source 1..75: mol_type = other DNA
atattgacgttcttttagtaaaggatattgatgatgttatatcgataggatcagggcttatgattcaccgttctt

SEQ ID NO: 162035 - DNA, 75 bp, synthetic construct
  source 1..75: mol_type = other DNA
atgagtacctttggtattgcggccattattttctatgcccctagcggcgttattgccgataaattttcacatcgc

SEQ ID NO: 162036 - DNA, 75 bp, synthetic construct
  source 1..75: mol_type = other DNA
tcttctatatggtaattttttatgtaatcagtctgcaagaagtgctatcagccagcacgtctgtgattactaata

SEQ ID NO: 162037 - DNA, 75 bp, synthetic construct
  source 1..75: mol_type = other DNA
ttccgcgtgcgctcagccgcattcaccgcatcacaaaattcactttaaaaacggcggcagagcagtcacggagta

SEQ ID NO: 162038 - DNA, 75 bp, synthetic construct
  source 1..75: mol_type = other DNA
ttctcgaagcgctggcagaagtgggggtaaaggtatcgtcgttccggcagcgtggggcatgtttaccttccgctt

SEQ ID NO: 162039 - DNA, 75 bp, synthetic construct
  source 1..75: mol_type = other DNA
gaacagcccgtgtctgttcgaactccagatggaattatcgctaccggatgcgataaattaggttgttatatcggg

SEQ ID NO: 162040 - DNA, 75 bp, synthetic construct
  source 1..75: mol_type = other DNA
tcacgcatcactcgcacagattccggtgctaatgcaggcggcgggaaccttaccgatcgcggcgaaggtttcgtt

SEQ ID NO: 162041 - DNA, 75 bp, synthetic construct
  source 1..75: mol_type = other DNA
gtctttatccggtggcgatggcatcgaaatccgacacagcacgggacgtcatgacgtggggcgatgcggaaaatc

SEQ ID NO: 162042 - DNA, 75 bp, synthetic construct
  source 1..75: mol_type = other DNA
gctggaagcagcaaaagcagccaaacgccgggaaattgaagcatggcgtacagagcaggaggcgcagccattcat

SEQ ID NO: 162043 - DNA, 75 bp, synthetic construct
  source 1..75: mol_type = other DNA
atgccgcgtggcctggaattattgattgctcaaaccattttgcaaggcttcgatgctcagtatggtcgattcctc

SEQ ID NO: 162044 - DNA, 75 bp, synthetic construct
  source 1..75: mol_type = other DNA
tgaaccccgccgttgaactcgacaatgttatttttcaaaacatagttaagcaagcctttgatttagagataggaa

SEQ ID NO: 162045 - DNA, 75 bp, synthetic construct
  source 1..75: mol_type = other DNA
ggttttgaatttcagacctggggtgaaaatagacgtattccggtggatttggatgggttgcgtttggtttctttt

SEQ ID NO: 162046 - DNA, 75 bp, synthetic construct
  source 1..75: mol_type = other DNA
ccataacgaggctgatgaatgaaaacgaggatttgcgccgctggtatagcgctgatttgcctgatgctgtgcgcc

SEQ ID NO: 162047 - DNA, 75 bp, synthetic construct
  source 1..75: mol_type = other DNA
gcttccggtgtgtgaaattgacccggagggcggcgcgacgtttttcctctatgacgaattcgggcagacggtcag

SEQ ID NO: 162048 - DNA, 75 bp, synthetic construct
  source 1..75: mol_type = other DNA
cgtagagaacatcgaccgccttacacgtcttgatccttttcaggctgtagagattatatcggggatgatcaacag

SEQ ID NO: 162049 - DNA, 75 bp, synthetic construct
  source 1..75: mol_type = other DNA
aacgttacacagatggtcgccgagggtaaatcggcgttcaaaggcaagaactggaacccaaaaaccaaactagga

SEQ ID NO: 162050 - DNA, 75 bp, synthetic construct
  source 1..75: mol_type = other DNA
gcatggctacgaagaagagaagtggagaagaaataaatgaccaacaaatcttatgcgggatgggtattaaactac

SEQ ID NO: 162051 - DNA, 75 bp, synthetic construct
  source 1..75: mol_type = other DNA
gctagtacttcacagcaaatcgggtctctgctcgccgaggatatgaacagcgagcaagcggcaaatatggcgcgt

SEQ ID NO: 162052 - DNA, 75 bp, synthetic construct
  source 1..75: mol_type = other DNA
acatttatgacatcaacttgtcatatttactacttgcacagcgtttgattgttcaggacaaagcgtccgctatgt

SEQ ID NO: 162053 - DNA, 75 bp, synthetic construct
  source 1..75: mol_type = other DNA
gctcaataccaacaagaatactatcgtgaatacccgtgcgggtaacatctctacgatgggcgatatctacgttaa

SEQ ID NO: 162054 - DNA, 75 bp, synthetic construct
  source 1..75: mol_type = other DNA
ggataacctaaacgttgataaaaatggtgtcgttttcaataatagcgctaatgaatccagtacttcacttgccgg

SEQ ID NO: 162055 - DNA, 75 bp, synthetic construct
  source 1..75: mol_type = other DNA
ggcgacaaacagtccgcaggggccgtggtggctgctcggctggtgtgagcgggtgccggaagcggatgaggtgct

SEQ ID NO: 162056 - DNA, 75 bp, synthetic construct
  source 1..75: mol_type = other DNA
gctggggttgcaggggggtgagcagacttaccggtatgtgccgaatccactggggtatgttgatcctttggggct

SEQ ID NO: 162057 - DNA, 75 bp, synthetic construct
  source 1..75: mol_type = other DNA
atcgctgaaaatggtccgcttaatctgctgtccaggggaacgctggataatacccgcgcgcttcttagcagtggg

SEQ ID NO: 162058 - DNA, 75 bp, synthetic construct
  source 1..75: mol_type = other DNA
tgggggttcgcaacctcggcgttattgctgggggtgttaatggtgtcagcatcgattccaaaggtaacctgttaa

SEQ ID NO: 162059 - DNA, 75 bp, synthetic construct
  source 1..75: mol_type = other DNA
accgctattatgacccgctgcaggggcggtatatcactcaggatccgattgggctgaaggggggatggaacctgt

SEQ ID NO: 162060 - DNA, 75 bp, synthetic construct
  source 1..75: mol_type = other DNA
cgcggcctgccgctggctcttatcagtatggaagggtcaacagtttggtgcgcagaatatgatgattggggcaac

SEQ ID NO: 162061 - DNA, 75 bp, synthetic construct
  source 1..75: mol_type = other DNA
gccggtgacctgaccaccgtcattgccccggacggcagcagaaacgggacacagtacgatgcgtggggaaaggcc

SEQ ID NO: 162062 - DNA, 75 bp, synthetic construct
  source 1..75: mol_type = other DNA
ctgaccagtgaaaacggcagccacaccaccttccgttacgatgtactcgaccggctgatacaggaaaccggcttt

SEQ ID NO: 162063 - DNA, 75 bp, synthetic construct
  source 1..75: mol_type = other DNA
ccggatgtggtgacgggactcatcacgcgcatcaccacgccggatggcagggcatcggcgttttactataaccac

SEQ ID NO: 162064 - DNA, 75 bp, synthetic construct
  source 1..75: mol_type = other DNA
acccggagacgggggaactgctctggcagcatgagacgaaacacacttacaacgagcaggggctggcaaaccgct

SEQ ID NO: 162065 - DNA, 75 bp, synthetic construct
  source 1..75: mol_type = other DNA
caatttataatgtgtctcgagtctaatctattaagaagcaaaatcgctcccggggagtatccggcgtcagatgtt

SEQ ID NO: 162066 - DNA, 75 bp, synthetic construct
  source 1..75: mol_type = other DNA
aatggtataccgcaaaagcgctgatgtgtcttgttgtggagccttttcgtaaacgggatgcctactggccgaaaa

SEQ ID NO: 162067 - DNA, 75 bp, synthetic construct
  source 1..75: mol_type = other DNA
tttaccactgtgaccaccgtggactgccgcaggcgctcatcaccccggaaggcgaaacggcgtggtgcggggagt

SEQ ID NO: 162068 - DNA, 75 bp, synthetic construct
  source 1..75: mol_type = other DNA
cttgtgggttttcagttatgtggccgccgtgtcgtgtgcgggctgtgccgtgcctccatcgtagccgggcttctg

SEQ ID NO: 162069 - DNA, 75 bp, synthetic construct
  source 1..75: mol_type = other DNA
atcctgccagcaaatattctttgcgagtcgttacgcaataatcacagaggaaactattttgttcacgcgttagcg

SEQ ID NO: 162070 - DNA, 75 bp, synthetic construct
  source 1..75: mol_type = other DNA
atgataacactaagaaatattttctttctgaacgaattaattatgtattgtctttgatttctgaaagtaaagttt

SEQ ID NO: 162071 - DNA, 75 bp, synthetic construct
  source 1..75: mol_type = other DNA
ataaccggtgaaactacgataccagtagaaacttacacacctgatgattctttttttgggacatgtaatatgaaa

SEQ ID NO: 162072 - DNA, 75 bp, synthetic construct
  source 1..75: mol_type = other DNA
tgcgggcggtgtatgaccgcagcgggacgcaggttcgcgggtttacttatgatgcggagcacgccgggcggatgg

SEQ ID NO: 162073 - DNA, 75 bp, synthetic construct
  source 1..75: mol_type = other DNA
tcagggagtcagccgaatgttgggaaggatttgacggatgaagagaagaactgcctggccggcggcagtacggga

SEQ ID NO: 162074 - DNA, 75 bp, synthetic construct
  source 1..75: mol_type = other DNA
tgatcctaatagctcaataaccggtgaaactacgataccagtagaaacttacacacctgatgattcttttttttg

SEQ ID NO: 162075 - DNA, 75 bp, synthetic construct
  source 1..75: mol_type = other DNA
gaaggccaccgcgtggcggtccactacggctatgacgataaaggccgcctgacgggcgaacggcagacggtggag

SEQ ID NO: 162076 - DNA, 75 bp, synthetic construct
  source 1..75: mol_type = other DNA
gcgcggtgacgggggtgacggacggcgcgggccgctgttttcacctggtgctgaccacacaggcgcagcgggcgg

SEQ ID NO: 162077 - DNA, 75 bp, synthetic construct
  source 1..75: mol_type = other DNA
ggcctgaagcgggtggtgaagaaggagcatgcggacgggagcatcacccgcagcgagtatgatgaggcggggagg

SEQ ID NO: 162078 - DNA, 75 bp, synthetic construct
  source 1..75: mol_type = other DNA
acggcagccacagcgtcttcagttacgatgcgctggaccggctggtacagcagggcggctttgacgggcggacgc

SEQ ID NO: 162079 - DNA, 75 bp, synthetic construct
  source 1..75: mol_type = other DNA
aaatgatgccaaaattaaattttatagtgaaatggaaaaaggtcctcatcaaggcaaaagtgaatccattcacaa

SEQ ID NO: 162080 - DNA, 75 bp, synthetic construct
  source 1..75: mol_type = other DNA
gacgggagcatcacccgcagcgagtatgatgaggcggggaggctgaaggcgcagacggatgcggcgggacggcgg

SEQ ID NO: 162081 - DNA, 75 bp, synthetic construct
  source 1..75: mol_type = other DNA
ctataaccaccacagccagttaacgtcagccaccgggcctgacgggctggaaatacgccgggaatatgatgaatg

SEQ ID NO: 162082 - DNA, 75 bp, synthetic construct
  source 1..75: mol_type = other DNA
aaatcagccacctgagtgaaggccaccgtgtggcggtccactacggctatgacgataaaggccgtctgacgggcg

SEQ ID NO: 162083 - DNA, 75 bp, synthetic construct
  source 1..75: mol_type = other DNA
gccgtttgctgccaagtgtttgagaaaatcgcacgagaaggcagaaagtttggtcttggtatggtgatttcctca

SEQ ID NO: 162084 - DNA, 75 bp, synthetic construct
  source 1..75: mol_type = other DNA
gaaatgaagagtttgatttacaaacgaatttagatgtagaagttaaaaagtacttaggtactattttagtttctt

SEQ ID NO: 162085 - DNA, 75 bp, synthetic construct
  source 1..75: mol_type = other DNA
atgtttggacaagaaagtatgctgatgggaaattggtcgagagaactgtcgattggggagctgttgtaaaggaat

SEQ ID NO: 162086 - DNA, 75 bp, synthetic construct
  source 1..75: mol_type = other DNA
ttatgcaggcggtttttaaacaatcagaattgatggaaaaacaattgttaacagatgatgaaattttatcagatg

SEQ ID NO: 162087 - DNA, 75 bp, synthetic construct
  source 1..75: mol_type = other DNA
ctatccgcagcttttactgcgcaaccccccccatcagcgacgcggaaaaccaactcagtcagtttcaaaccgatc

SEQ ID NO: 162088 - DNA, 75 bp, synthetic construct
  source 1..75: mol_type = other DNA
ttagcacaagaaaatggtagcgagcaatatgttgaatatctagtagctagaatacgcacaatgcttgcggataca

SEQ ID NO: 162089 - DNA, 75 bp, synthetic construct
  source 1..75: mol_type = other DNA
gatgacttcgggcaacccggtaaatccgctgctgggggcgaaggtgctgcccggtgaaaccgacctcgccctgcc

SEQ ID NO: 162090 - DNA, 75 bp, synthetic construct
  source 1..75: mol_type = other DNA
gtcggaccgcatcacgcaccggacggtgaacggcgacccggcagagcagtggcagtatgatgagcacgggtggtt

SEQ ID NO: 162091 - DNA, 75 bp, synthetic construct
  source 1..75: mol_type = other DNA
ggtgaatggaatctgtataaatatccattaaaccctgttcggtttatagattctttgggtttaaaattccatgtt

SEQ ID NO: 162092 - DNA, 75 bp, synthetic construct
  source 1..75: mol_type = other DNA
cgggagacggtgcgcagcttcggcagcatggcaggcaatacagccgcatatgaactgaccagcacttacaccccc

SEQ ID NO: 162093 - DNA, 75 bp, synthetic construct
  source 1..75: mol_type = other DNA
acatgcaggaattggtggtgggataaatgcggctatcacatattctgagaccaagtctttacctacatcgggagt

SEQ ID NO: 162094 - DNA, 75 bp, synthetic construct
  source 1..75: mol_type = other DNA
gacggacgacgagcggacccaccactaccactacgacagccagcaccgcctggtgttctacacgcggatacagca

SEQ ID NO: 162095 - DNA, 75 bp, synthetic construct
  source 1..75: mol_type = other DNA
acgcggtatgaatacaacgccgcaggcgacctgactgccgttatcaccccggacggcaaccggagcgagacacag

SEQ ID NO: 162096 - DNA, 75 bp, synthetic construct
  source 1..75: mol_type = other DNA
atgatgataccgggcgggtgacggagcaggtcaacccggaggggctggactatcgctttgagtacgggcaggacc

SEQ ID NO: 162097 - DNA, 75 bp, synthetic construct
  source 1..75: mol_type = other DNA
cagtacagcggggtacgaacaggccacggcgtacaccctcacagggcagctacagagcaggcacctgaaccttcc

SEQ ID NO: 162098 - DNA, 75 bp, synthetic construct
  source 1..75: mol_type = other DNA
cctcacagggcagctacagagcaggcacctgaacctcccgcagcttgactgtgactatacgtggaacgataacgg

SEQ ID NO: 162099 - DNA, 75 bp, synthetic construct
  source 1..75: mol_type = other DNA
agccgctacgggcagttgctggcgttcaccgactgctcgggctaccagacccgatatgaatacgaccgcttcggc

SEQ ID NO: 162100 - DNA, 75 bp, synthetic construct
  source 1..75: mol_type = other DNA
cgggcaggctggtatcggagacatcgcgcagtggggacgtcatccggtatgcttatgataatccgcacagtgaat

SEQ ID NO: 162101 - DNA, 75 bp, synthetic construct
  source 1..75: mol_type = other DNA
gcggcggggtgctgacctttgatccgcagaataaacaggatcgtacccagaatgcgcatctgctgttattcggtc

SEQ ID NO: 162102 - DNA, 75 bp, synthetic construct
  source 1..75: mol_type = other DNA
atgacggagaaggaggagaaggcggagcgccgggcgttaatgaaagtgcatcagtgcagcgaactggaagccgca

SEQ ID NO: 162103 - DNA, 75 bp, synthetic construct
  source 1..75: mol_type = other DNA
tttggcccgactggcgcagggaaatcggccacgctgtgtgccgtactttcccagatgatggcagtgcaccgtccc

SEQ ID NO: 162104 - DNA, 75 bp, synthetic construct
  source 1..75: mol_type = other DNA
atgctgcaagatgtgaagaagttaaggctcttttacaagaagaactaggaattggcgagcctgatatttatacag

SEQ ID NO: 162105 - DNA, 75 bp, synthetic construct
  source 1..75: mol_type = other DNA
cgtcagtgcatccttgaggccgcacagcgctgcgtgtcggagaagcgtaccgtgttgacccgcgacgtgcgcgat

SEQ ID NO: 162106 - DNA, 75 bp, synthetic construct
  source 1..75: mol_type = other DNA
gttacacggaaggggtggtgctggcgcggaaagtggaggcgctgttccgggtggtacagccgagcttatatctgg

SEQ ID NO: 162107 - DNA, 75 bp, synthetic construct
  source 1..75: mol_type = other DNA
tgaatccgctgctctcgccctatatgacgaaggtggtgaaaatgtggcgcaagctgggagcctggctgtggcttg

SEQ ID NO: 162108 - DNA, 75 bp, synthetic construct
  source 1..75: mol_type = other DNA
ccggcaccgtcctggattagccgggaggatttgtaccggatggcctcaagagctgatccccgtgagaacgatgcg

SEQ ID NO: 162109 - DNA, 75 bp, synthetic construct
  source 1..75: mol_type = other DNA
accatatcaacaacctcggcgagcgcgaccagcatctggcgaggcccatcgtcaatatcactgatgaggcgcata

SEQ ID NO: 162110 - DNA, 75 bp, synthetic construct
  source 1..75: mol_type = other DNA
aggtcatcccggattcagtttctttaaccgggggggggatgtgctgacctttgatccgctgaataaactggaccg

SEQ ID NO: 162111 - DNA, 75 bp, synthetic construct
  source 1..75: mol_type = other DNA
gaactggacgcggcgaagctgattgcccgtaaactggaccggttgcgcggactgactgacgcgcacgacgaggag

SEQ ID NO: 162112 - DNA, 75 bp, synthetic construct
  source 1..75: mol_type = other DNA
tcgccgtatatgaccaaagtggtcaaaatgtggcgaaagctaggggcctggctgtggctggccacgcagaacctg

SEQ ID NO: 162113 - DNA, 75 bp, synthetic construct
  source 1..75: mol_type = other DNA
ttgccatcggctccaaaaagtttatcgctaacaattcagcgtgggcgcaacatgccatcagcggtgataaagtgt

SEQ ID NO: 162114 - DNA, 75 bp, synthetic construct
  source 1..75: mol_type = other DNA
tggaataccatgcggataaggagagtctgtacagctacgccgtgggtgaggcccgccacaccatcgggaagatac

SEQ ID NO: 162115 - DNA, 75 bp, synthetic construct
  source 1..75: mol_type = other DNA
cagtaagctgtttaagtatgtaatgctttttttctttttgctatcatttttattgctttttatattgttaatgct

SEQ ID NO: 162116 - DNA, 75 bp, synthetic construct
  source 1..75: mol_type = other DNA
acccggaaagcctgcccggtgcgccactggcgcggtacacgtatacggaagccggtgaactgctggcggtatatg

SEQ ID NO: 162117 - DNA, 75 bp, synthetic construct
  source 1..75: mol_type = other DNA
tgcacaaatagatccagatatgtcacacatttggggcggttctctttttgggtgtctaaatggttgtctacctgc

SEQ ID NO: 162118 - DNA, 75 bp, synthetic construct
  source 1..75: mol_type = other DNA
tgagcaatcatatccaggtcaggaatttcttcttttacaactttgtatgcgagttaccaaaaacttactgataat

SEQ ID NO: 162119 - DNA, 75 bp, synthetic construct
  source 1..75: mol_type = other DNA
aatgaagtttggcagtattcattgccaggcattattgaaaataacattatttctacaaaacaacatttctttagc

SEQ ID NO: 162120 - DNA, 75 bp, synthetic construct
  source 1..75: mol_type = other DNA
tggagaaaaccacgctctatcggcaggctgcttacgcagacccgcgcgagacgcctgaaggcaccgtgccggtca

SEQ ID NO: 162121 - DNA, 75 bp, synthetic construct
  source 1..75: mol_type = other DNA
atgaggacgacactgacgcgtacctggacaggctgcgcggatatgtcaaaccacatgcacagcgcacggcgttta

SEQ ID NO: 162122 - DNA, 75 bp, synthetic construct
  source 1..75: mol_type = other DNA
cagtaagctgtttaagtatgtaatgcttttttttttctttttgctatcatttttattgctttttatattgttaat

SEQ ID NO: 162123 - DNA, 75 bp, synthetic construct
  source 1..75: mol_type = other DNA
gcgccattgctgggctggcagggtgtttcactgtgtgcgcaaacagtgcataattcgcaaaattcacgctatata

SEQ ID NO: 162124 - DNA, 75 bp, synthetic construct
  source 1..75: mol_type = other DNA
ccgctcaggggaaaagcagccgcacccgtgctgttatcggcattgacggcgatgtgaaactcaatcgcgccctgt

SEQ ID NO: 162125 - DNA, 75 bp, synthetic construct
  source 1..75: mol_type = other DNA
agtagtgctctgccaaaagacagagaaagtgtgttctggtttaacgtactggaagttccaccaaaacccgatgca

SEQ ID NO: 162126 - DNA, 75 bp, synthetic construct
  source 1..75: mol_type = other DNA
atctcaatatcgtcctcactattacttgtacaaaaacactcaaaatttattacgtttttaattatcgttatttat

SEQ ID NO: 162127 - DNA, 75 bp, synthetic construct
  source 1..75: mol_type = other DNA
taagcctgagcttttccagaccaataacggacggcagtatatgattcccggtgagaatggtcgcgtcattcccgg

SEQ ID NO: 162128 - DNA, 75 bp, synthetic construct
  source 1..75: mol_type = other DNA
tactgaatgtggtgctgactgcgattcgccagaaaagatgacttcagaagacccgattatcagaatggcggaggc

SEQ ID NO: 162129 - DNA, 75 bp, synthetic construct
  source 1..75: mol_type = other DNA
agcttgccgggcatgaaagtggtgaactggccattttgcgtaatgccgtcacgcttcgtttatctacgcaggaaa

SEQ ID NO: 162130 - DNA, 75 bp, synthetic construct
  source 1..75: mol_type = other DNA
accagttacaaatcccttctggcgtaagaaccacggcagcctggcggctgcaaatcggggtgtggcagaatatga

SEQ ID NO: 162131 - DNA, 75 bp, synthetic construct
  source 1..75: mol_type = other DNA
caagcctgagctgtttcaatccggcgggcgacagtacatgattcctggtgagggcggcaggattattccaaaccg

SEQ ID NO: 162132 - DNA, 75 bp, synthetic construct
  source 1..75: mol_type = other DNA
gactgaaaggcgctattagtgacgcagccacagaagccagaaacgcaaactttaccactatgctcaacaccgtcg

SEQ ID NO: 162133 - DNA, 75 bp, synthetic construct
  source 1..75: mol_type = other DNA
aaagcaacctttccccggcaattcgcaacgcatcataccagatcgcagaccttgccactcaattgcagatgggcg

SEQ ID NO: 162134 - DNA, 75 bp, synthetic construct
  source 1..75: mol_type = other DNA
actacgaggtcgatgcgcgaacgggaaaacttcttgcggcacaacaacaagcagatgaagcattcgatcgcatag

SEQ ID NO: 162135 - DNA, 75 bp, synthetic construct
  source 1..75: mol_type = other DNA
ggcaacaggtcaggcgttgaaccctgccgcgcaagtagaaatgcaggagcagcagaagaaagcggcgctagataa

SEQ ID NO: 162136 - DNA, 75 bp, synthetic construct
  source 1..75: mol_type = other DNA
atatcacagcaagcaacggctggaccgagcaggacagcaaagcactgcaacagacgattgagaatacagccatgc

SEQ ID NO: 162137 - DNA, 75 bp, synthetic construct
  source 1..75: mol_type = other DNA
atggctggtacaggccttggctataacattggggcttcaattactaataagttagaagctcaatacggctttgtt

SEQ ID NO: 162138 - DNA, 75 bp, synthetic construct
  source 1..75: mol_type = other DNA
ttgttgggtgccggtagtgcttacatgagcagtcagattgaaggccaggacagtactgcatcagtattgggtagc

SEQ ID NO: 162139 - DNA, 75 bp, synthetic construct
  source 1..75: mol_type = other DNA
accattgcttctggtattgcggggggacttgccggcaacagtacggcgtctgccggtacggggccctggcaggta

SEQ ID NO: 162140 - DNA, 75 bp, synthetic construct
  source 1..75: mol_type = other DNA
aggcgagttatttaaccgcgaggggcagatgtggccagaggcggatatcactctggtagatctcgccaccttcgc

SEQ ID NO: 162141 - DNA, 75 bp, synthetic construct
  source 1..75: mol_type = other DNA
agagagcgacggcgatgaccagcgcgacgtgctgggcgagatggagatcaccgcccggctgatgatcaccggcgg

SEQ ID NO: 162142 - DNA, 75 bp, synthetic construct
  source 1..75: mol_type = other DNA
tccgcaggacaaactggaacagcacatcagccacctttccgaacgggcgattggcgacaacatcgattcggaata

SEQ ID NO: 162143 - DNA, 75 bp, synthetic construct
  source 1..75: mol_type = other DNA
tcggagacatcgcgcagcggggacgtcatccggtatgcttatgataatccgcacagtgaattaccggccacgaca

SEQ ID NO: 162144 - DNA, 75 bp, synthetic construct
  source 1..75: mol_type = other DNA
gggtatggcggcgggagcgtgacctgacggggtggatgtcgctgtcgcgtaaaccggaggtgacgtggtacggct

SEQ ID NO: 162145 - DNA, 75 bp, synthetic construct
  source 1..75: mol_type = other DNA
acaccggacgggcgggagacgaaattttactataacgacgggaaccagctgacggcggtggtgtacccggacggg

SEQ ID NO: 162146 - DNA, 75 bp, synthetic construct
  source 1..75: mol_type = other DNA
gttgttcttgaaagctattcagagaacaaaaacgtgtacattatccgtaatgatgtaaatcaaggtcttgctact

SEQ ID NO: 162147 - DNA, 75 bp, synthetic construct
  source 1..75: mol_type = other DNA
ataatgttaatatccgcaagagtattctttcatttaatgccgccaacattaatgtctttggcttacaaaaagttt

SEQ ID NO: 162148 - DNA, 75 bp, synthetic construct
  source 1..75: mol_type = other DNA
gggttatgaaaaagagattagagattacgggttaaatatgttcggtatgtacggcagaaaagtaaagttatccca

SEQ ID NO: 162149 - DNA, 75 bp, synthetic construct
  source 1..75: mol_type = other DNA
aatattccgctgccggcagacggtaaaagtatcaccccggatgatgtgcatccgatgcttgaacagatggtgaag

SEQ ID NO: 162150 - DNA, 75 bp, synthetic construct
  source 1..75: mol_type = other DNA
gagcaaaaatcctttccccggggcacgtatgccacacaccagggcggactctggcgggcgtatgaaaaaacgcac

SEQ ID NO: 162151 - DNA, 75 bp, synthetic construct
  source 1..75: mol_type = other DNA
aaacttccggtaccggcagatggaaaaagtatcacaccggatgatgtgcgtccgatgctcgagcagatggtgacg

SEQ ID NO: 162152 - DNA, 75 bp, synthetic construct
  source 1..75: mol_type = other DNA
tgtgttcagaatcggcgaaacttaccaccccggcgatacggtgacgtggggggctcgttgtggcactgcaacagt

SEQ ID NO: 162153 - DNA, 75 bp, synthetic construct
  source 1..75: mol_type = other DNA
aagcatgtgacggtggatgaggtgcgtccggttctgcaggcgatggtggatgacgctgtgggggccatcccggta

SEQ ID NO: 162154 - DNA, 75 bp, synthetic construct
  source 1..75: mol_type = other DNA
ttgacggggtggcggatattgacgtcagtatgacgggtgagcggttgttctctgtggtgatccggcagagcagtg

SEQ ID NO: 162155 - DNA, 75 bp, synthetic construct
  source 1..75: mol_type = other DNA
actcgttgtaaaataagaaacaatagttatggcaggtctatcaagcagaattgtaatgatataccgttaataaca

SEQ ID NO: 162156 - DNA, 75 bp, synthetic construct
  source 1..75: mol_type = other DNA
gtccgatgcttgagcagatggtgaaggaggctgtaagccatattcctgttccgcgtgatggtcgtgactacgatc

SEQ ID NO: 162157 - DNA, 75 bp, synthetic construct
  source 1..75: mol_type = other DNA
ttaatcagcagagcggagagcagggcgggattgttgccggtgatcgtctgacgcttgaagtgaatggtctggata

SEQ ID NO: 162158 - DNA, 75 bp, synthetic construct
  source 1..75: mol_type = other DNA
gcagatggtgaaggacgcagtgagtcatatccctgctccgcgcgatggtcgtgattatgatccggaggtgctgct

SEQ ID NO: 162159 - DNA, 75 bp, synthetic construct
  source 1..75: mol_type = other DNA
gctctaccgcggtgtgttcagagccggtgaaacctaccaccccggcgatacggtgacgtggggggctcgctgtgg

SEQ ID NO: 162160 - DNA, 75 bp, synthetic construct
  source 1..75: mol_type = other DNA
aaaaaacattttccctgccggtgatgctctaccgcggtgtgttcagagccggtgaaacctaccaccccggcgata

SEQ ID NO: 162161 - DNA, 75 bp, synthetic construct
  source 1..75: mol_type = other DNA
gtgactatgatcccgatgttctgcagaaggcggtgaatgatgcggtcgcaaatattccgcagccggcagacggta

SEQ ID NO: 162162 - DNA, 75 bp, synthetic construct
  source 1..75: mol_type = other DNA
tgttttttaattgaaacaggaaagtgtagaagcaaaaaaataattgcattatctttcaaaaaggatgcggccaaa

SEQ ID NO: 162163 - DNA, 75 bp, synthetic construct
  source 1..75: mol_type = other DNA
gcagagcagtggccagtgtacggaaaaaacattttccctgccggtgatgctctaccgcggtgtgttcagagccgg

SEQ ID NO: 162164 - DNA, 75 bp, synthetic construct
  source 1..75: mol_type = other DNA
gtgaatgcccttccggctccgcaggacgggcgtgatgccacggcactggaagtgctccccgctattgacgatcaa

SEQ ID NO: 162165 - DNA, 75 bp, synthetic construct
  source 1..75: mol_type = other DNA
ctctaccgcggtgtgttcagagccggtgaaacctaccaccccggcgatacggtgacgtggggggggctcgctgtg

SEQ ID NO: 162166 - DNA, 75 bp, synthetic construct
  source 1..75: mol_type = other DNA
ccggcggacggcaaaagtatcacccccgatgatgtgcgtccgatgcttgagcagatggtgaaagaggccgtaagc

SEQ ID NO: 162167 - DNA, 75 bp, synthetic construct
  source 1..75: mol_type = other DNA
aagcatgtgacggtggatgaggtgcgtccggttctgcaggcgatggtggatgacgctgtgggggccatttcggta

SEQ ID NO: 162168 - DNA, 75 bp, synthetic construct
  source 1..75: mol_type = other DNA
ggtcagtgtacggaaaaaacattttccctgccggtgatgctctaccgcggtgtgttcagagccggtgaaacctac

SEQ ID NO: 162169 - DNA, 75 bp, synthetic construct
  source 1..75: mol_type = other DNA
gatgtgcgtccgatgcttgagcagatggtgaaagaggccgtaagtcatatccctgctccgcgtgatggtcgtgac

SEQ ID NO: 162170 - DNA, 75 bp, synthetic construct
  source 1..75: mol_type = other DNA
atgaccggtgataaacccggagaagctcattcatcaggctggaccctggctgcaaaacgtggacgggatgcagga

SEQ ID NO: 162171 - DNA, 75 bp, synthetic construct
  source 1..75: mol_type = other DNA
gtgaaagaggccgtaagccatatccctgctccgcgtgatggtcgtgattacgatccggaagtactgaagcaggtg

SEQ ID NO: 162172 - DNA, 75 bp, synthetic construct
  source 1..75: mol_type = other DNA
ccgatgatgtgcgtccgatgcttgagcagatggtgaaagaggctgtaagccatattcctgttccgcgtgatggtc

SEQ ID NO: 162173 - DNA, 75 bp, synthetic construct
  source 1..75: mol_type = other DNA
tcgccatcacagctatttctgctctgcttatttctggtaccgcaatggctcagacaagtactggttctgtctctg

SEQ ID NO: 162174 - DNA, 75 bp, synthetic construct
  source 1..75: mol_type = other DNA
ggttgcattctatctatcgtccttggggtgttacttgtcgccgtacctgaaatgatgagtcgcagccagaaacag

SEQ ID NO: 162175 - DNA, 75 bp, synthetic construct
  source 1..75: mol_type = other DNA
actggtgcgggcgaggcgaagaactggacactgtgcttgcgcaatgttgtgaaagtaaatggtctgcaaggcggt

SEQ ID NO: 162176 - DNA, 75 bp, synthetic construct
  source 1..75: mol_type = other DNA
ggtggaccgcgagatcgccaacgcgcagcaggggctgcccagcggtatcactctaaagctaaataaccttgtcga

SEQ ID NO: 162177 - DNA, 75 bp, synthetic construct
  source 1..75: mol_type = other DNA
aggctctaattctcactcccgccacctgctgggaaaaattcagtcccgggtgctgaaagccgatcaggaattcga

SEQ ID NO: 162178 - DNA, 75 bp, synthetic construct
  source 1..75: mol_type = other DNA
ccgttatcataattttaaagactttattaatttccccaatgtcggcaaagccaatctggtgaacaaaccactgcc

SEQ ID NO: 162179 - DNA, 75 bp, synthetic construct
  source 1..75: mol_type = other DNA
atgcaggtgcgccagcgcgatgttgctgagctcgatgcaaaatactcgagggaattagccgatgcgagagctgaa

SEQ ID NO: 162180 - DNA, 75 bp, synthetic construct
  source 1..75: mol_type = other DNA
atgattgtggtgtgaatttatcgaccgcaaaaaatttatgccatgttcatcataagaacggtatcaaatatgata

SEQ ID NO: 162181 - DNA, 75 bp, synthetic construct
  source 1..75: mol_type = other DNA
gggtaaagaagttagtattgcagagcttgaccccggtagcagccttatctcttatcatggtcgccaggttctttt

SEQ ID NO: 162182 - DNA, 75 bp, synthetic construct
  source 1..75: mol_type = other DNA
tattgtcaatagcgatacctacaaagaacagacataaaacgctactaattactcttgataatatgcttcgccgaa

SEQ ID NO: 162183 - DNA, 75 bp, synthetic construct
  source 1..75: mol_type = other DNA
ctaccaagtgacctgatgaatccttcatgggcgaattcatcactgactgataaaaaacaaactttatggaaaagg

SEQ ID NO: 162184 - DNA, 75 bp, synthetic construct
  source 1..75: mol_type = other DNA
ggtcaaagtgaactcgatgaaccttggcttgactggagtgatggaaggatttcaacaaagcatcctgacgaagcc

SEQ ID NO: 162185 - DNA, 75 bp, synthetic construct
  source 1..75: mol_type = other DNA
tgcgggtgacagggatatcactgcgctgctatttaacaaagaggttgagaaaaacttagcggaatcgggctttgg

SEQ ID NO: 162186 - DNA, 75 bp, synthetic construct
  source 1..75: mol_type = other DNA
gaaaccttatgtgaagggtgaagctgctttgggaataggaccagggtatttttatgatgccagtgttgacccatc

SEQ ID NO: 162187 - DNA, 75 bp, synthetic construct
  source 1..75: mol_type = other DNA
cgaccgccggctgattaatgacggggtgattgccggacaacaggggctggagatccgtgcggataatctggtcaa

SEQ ID NO: 162188 - DNA, 75 bp, synthetic construct
  source 1..75: mol_type = other DNA
acgttgaactgacggcgccgggaacactgagtaatgaggggattatccggggcggacaggatgtcaggctgaccg

SEQ ID NO: 162189 - DNA, 75 bp, synthetic construct
  source 1..75: mol_type = other DNA
gcaggagatgttgcgggggctatagtggaatcatcatctgaaaataccattaaacaaataattaaggatggtgaa

SEQ ID NO: 162190 - DNA, 75 bp, synthetic construct
  source 1..75: mol_type = other DNA
agggcgtgatggggggagacctgaaggcggcgctggcgaatggtgcagcaccgtttatcgcaaatgaaataaaaa

SEQ ID NO: 162191 - DNA, 75 bp, synthetic construct
  source 1..75: mol_type = other DNA
cgctgattgcccgggcggtgaatgtgaatgcccggatgcaggtcagcggtgaactgcggatcaccaccggtcata

SEQ ID NO: 162192 - DNA, 75 bp, synthetic construct
  source 1..75: mol_type = other DNA
gcttacgcacagcttaccgctgatatggcgctgaatgaggcaaaagccatcctgattgctgattgtgaaaatggc

SEQ ID NO: 162193 - DNA, 75 bp, synthetic construct
  source 1..75: mol_type = other DNA
atcatccagtcaccacatttcaacgacgctgtggacattctgatcccggattatcagcgttatctcgctgaacgc

SEQ ID NO: 162194 - DNA, 75 bp, synthetic construct
  source 1..75: mol_type = other DNA
gggtaacccgggtactggataatctccggggactgctttcctcacagaaaacgctctctgttcagggacaggcgc

SEQ ID NO: 162195 - DNA, 75 bp, synthetic construct
  source 1..75: mol_type = other DNA
tgaaatcaataaccggcataccggagagagcggtaaggggctggaggccggtaaactcacgcttgccgccgatat

SEQ ID NO: 162196 - DNA, 75 bp, synthetic construct
  source 1..75: mol_type = other DNA
taaagtgcagctttccggtgcaggtgtgttatcccttcagacaaatgtacttcagggacagcagggcgcgttact

SEQ ID NO: 162197 - DNA, 75 bp, synthetic construct
  source 1..75: mol_type = other DNA
ggtgtcttcattcaaaacgtctttgattttctgattgtggcctttgccatctttatggcgattaagctaatcaac

SEQ ID NO: 162198 - DNA, 75 bp, synthetic construct
  source 1..75: mol_type = other DNA
atgaaacatactgtagaagtaatgatccccgaagcggagattaaagcgcgtatcgccgaactgggtcgtcagatt

SEQ ID NO: 162199 - DNA, 75 bp, synthetic construct
  source 1..75: mol_type = other DNA
attaattttcttgctaattatattattagtaggaatcaatatttatctaatgctataaattcaacatatgactat

SEQ ID NO: 162200 - DNA, 75 bp, synthetic construct
  source 1..75: mol_type = other DNA
cggtcgccgcgcctgcgccgaccaaagaagaagtgttactgacagagattcgtgatttgctgaaagagcagaata

SEQ ID NO: 162201 - DNA, 75 bp, synthetic construct
  source 1..75: mol_type = other DNA
gccacctctgggcttattaattggcgggatcgactttaaacagtttgctgtcacgctacgcgaggcccaagggga

SEQ ID NO: 162202 - DNA, 75 bp, synthetic construct
  source 1..75: mol_type = other DNA
cttcactggttgcagatatcatcatgccgccgctgggtttattaattggtgggatcgactttaaacagtttgctg

SEQ ID NO: 162203 - DNA, 75 bp, synthetic construct
  source 1..75: mol_type = other DNA
atgaaaaaaatactcatagcagtattactttgctttggtgttctttctgctaatcaggcaatagcggctgttacc

SEQ ID NO: 162204 - DNA, 75 bp, synthetic construct
  source 1..75: mol_type = other DNA
aaaatggccgcgtttgggcaatccattggtggaaattttccatctgatgaaattgtcaaaggttcgatcagtggc

SEQ ID NO: 162205 - DNA, 75 bp, synthetic construct
  source 1..75: mol_type = other DNA
tgaaaaataacggctatatacaggataccaacaccaaccgtagctacatgtttgagcggttggatctcggtgtcg

SEQ ID NO: 162206 - DNA, 75 bp, synthetic construct
  source 1..75: mol_type = other DNA
cagcgatggcagaacagcgtcaccaggagtggttacgttttgtcgacctgcttaagaatgcctaccaaaacgatc

SEQ ID NO: 162207 - DNA, 75 bp, synthetic construct
  source 1..75: mol_type = other DNA
gggcattgcgaccattactcgtggatctaacagtctgaaagccgcgcctgtcgagttgcgccagtggctggaaga

SEQ ID NO: 162208 - DNA, 75 bp, synthetic construct
  source 1..75: mol_type = other DNA
actggcctccggcgcgaacgaaatggcgacagcggagctggtgctcaatcgtctcgacgagctggcgcagtattt

SEQ ID NO: 162209 - DNA, 75 bp, synthetic construct
  source 1..75: mol_type = other DNA
ccacagtaaaagccgatgttccatcttctgaaactgaagcaccagtgccgtcaccttcagaaactgaagcagtaa

SEQ ID NO: 162210 - DNA, 75 bp, synthetic construct
  source 1..75: mol_type = other DNA
atgagcggctaaaactggagattaaggtggcacatatccgcactcgcgaaacatatggaacccggcgcctccaga

SEQ ID NO: 162211 - DNA, 75 bp, synthetic construct
  source 1..75: mol_type = other DNA
caacgttactctaaagagttcaaagccgaagctgtcagaacggttcttgaaaatcaactttcgatcagtgaaggc

SEQ ID NO: 162212 - DNA, 75 bp, synthetic construct
  source 1..75: mol_type = other DNA
acagcattacaacaacggttaacgggtgaggcgttaaaagatgcggttgcacgggccgatgtggtgctcgactgt

SEQ ID NO: 162213 - DNA, 75 bp, synthetic construct
  source 1..75: mol_type = other DNA
ctgctcgacagccaggtactgattatcggccttggcgggctgggtacgcccgctgcgttgtacctggcgggtgct

SEQ ID NO: 162214 - DNA, 75 bp, synthetic construct
  source 1..75: mol_type = other DNA
atacgcgttaatcgaacaatggcgacaacaatttcccattgaagcgatgtgtcaggtatttggtgtatccaggag

SEQ ID NO: 162215 - DNA, 75 bp, synthetic construct
  source 1..75: mol_type = other DNA
ctaaagagttcaaagccgaaactgtcagaacggttcttgaaaatcaactttcgatcagtgaaggcgcttcccgat

SEQ ID NO: 162216 - DNA, 75 bp, synthetic construct
  source 1..75: mol_type = other DNA
gaagctcgccttgagcgagatatattaaaaaaagcaactgtagattcaattggtcaacgcaacagttatgtgaaa

SEQ ID NO: 162217 - DNA, 75 bp, synthetic construct
  source 1..75: mol_type = other DNA
aatttgcgatgcgcgggaacgtggtggatttggcagtgggtgtcattatcggtgcggcattcgggaagattgtat

SEQ ID NO: 162218 - DNA, 75 bp, synthetic construct
  source 1..75: mol_type = other DNA
atgcggttaccgcagtgagcgaaggcaaaccggatagcatcccggcggcggaaaaatttgctgctgaaaataaaa

SEQ ID NO: 162219 - DNA, 75 bp, synthetic construct
  source 1..75: mol_type = other DNA
ctaaagagttcaaagccgaagctgtcagaacggttcttgaaaatcaactttcgatcagtgaagacgcttcccgat

SEQ ID NO: 162220 - DNA, 75 bp, synthetic construct
  source 1..75: mol_type = other DNA
gttcttgaaaatcaactttcgatcagtgaaggcgcttcccgattatcccttcctgaaggcactttaggacaatga

SEQ ID NO: 162221 - DNA, 75 bp, synthetic construct
  source 1..75: mol_type = other DNA
cggaagcccgttaccccgccggtaatacctggtatcccgtaacagccagttctgaaagcacagctcagcagattc

SEQ ID NO: 162222 - DNA, 75 bp, synthetic construct
  source 1..75: mol_type = other DNA
gagtgttgatgagtggtggtctggctatcatgctctccgaacagctatggttgttttacccgggctgtgcagtgc

SEQ ID NO: 162223 - DNA, 75 bp, synthetic construct
  source 1..75: mol_type = other DNA
cccttactcgccagttcgccacggataccaccgccattagccaacaggtggcctggctgttgggtctgtccgcag

SEQ ID NO: 162224 - DNA, 75 bp, synthetic construct
  source 1..75: mol_type = other DNA
gaagagtgaacaagtcaaaaagattacggtttccattcctcttaaggtgttgaaaatcctcaccgatgaacgcac

SEQ ID NO: 162225 - DNA, 75 bp, synthetic construct
  source 1..75: mol_type = other DNA
agcgacgaaatcccggaagcggcaaaagaaatcatgcgtgagatggggattaacccggagacgtgggaatactaa

SEQ ID NO: 162226 - DNA, 75 bp, synthetic construct
  source 1..75: mol_type = other DNA
gcacgcgtcgtcaggtgaacaacctgcgtcacgcgaccaacagcgagctgctgtgcgaagcgtttctgcatgcct

SEQ ID NO: 162227 - DNA, 75 bp, synthetic construct
  source 1..75: mol_type = other DNA
accgtccttatattcatattcacgaatgagcaaatcattaaaatgaaaacttatgggttcatccttcttatttta

SEQ ID NO: 162228 - DNA, 75 bp, synthetic construct
  source 1..75: mol_type = other DNA
atgacggaacgggaactgtccattattcgtgcactgggagaagaattttccacagtgctggcggatttacagcgc

SEQ ID NO: 162229 - DNA, 75 bp, synthetic construct
  source 1..75: mol_type = other DNA
tgatgcggtcgcaaatattccacagccggcggacggtaaaagtctcaccccggatgatgtgcgtccgatgcttga

SEQ ID NO: 162230 - DNA, 75 bp, synthetic construct
  source 1..75: mol_type = other DNA
cacaaactgtggtggtacggcttttttcctggaaaatcggtgtttagtagtcgttactttaccgatccatttatc

SEQ ID NO: 162231 - DNA, 75 bp, synthetic construct
  source 1..75: mol_type = other DNA
ggtttgcatataagaaagcagcagaggaagggattagaggaaaactaaaacacaaactgtggtggtacggctttt

SEQ ID NO: 162232 - DNA, 75 bp, synthetic construct
  source 1..75: mol_type = other DNA
ttctgggatgcaaagcaattgggtataacattcgtgactatcgcgagcggtaatatttttgatttctttataact

SEQ ID NO: 162233 - DNA, 75 bp, synthetic construct
  source 1..75: mol_type = other DNA
caacgccccgactacgcgtggcatgaaggcacggctttccagctttttaatctgcaagacgggcatgaagctgtc

SEQ ID NO: 162234 - DNA, 75 bp, synthetic construct
  source 1..75: mol_type = other DNA
aaacagcagcatgattttcttagtttgccggtttacgtgcgtgacaacaccttactggcgctggggaacaatgac

SEQ ID NO: 162235 - DNA, 75 bp, synthetic construct
  source 1..75: mol_type = other DNA
gctggattatctggaagcactggagctggtggatacttccagtgcgccagatattgaatggcctacgcctccggc

SEQ ID NO: 162236 - DNA, 75 bp, synthetic construct
  source 1..75: mol_type = other DNA
gtacgccgatgatgcgcgcaatggtgatggagtttccggacgatccggcctgtgattaccttgatcgccaataca

SEQ ID NO: 162237 - DNA, 75 bp, synthetic construct
  source 1..75: mol_type = other DNA
cctgacccggaagggatgatccgccgcctgaaagcgaaagggctgaaaatctgcgtctggattaacccctatatc

SEQ ID NO: 162238 - DNA, 75 bp, synthetic construct
  source 1..75: mol_type = other DNA
cgatggcccgacgccgaaagcggtgctcgatcgttatacccgttttaccgggcgtccggcactgccgccagcatg

SEQ ID NO: 162239 - DNA, 75 bp, synthetic construct
  source 1..75: mol_type = other DNA
gctggattatctggaagcactggatctggtggatacatccagtgcgccagatattgaatggcctacacctccggc

SEQ ID NO: 162240 - DNA, 75 bp, synthetic construct
  source 1..75: mol_type = other DNA
gctggattatctggaagcactggaactggtggatacttccagtgcgccagatattgaatggcctacacctccggc

SEQ ID NO: 162241 - DNA, 75 bp, synthetic construct
  source 1..75: mol_type = other DNA
gaattggaaaagcagcaattgattaatcaggtcaacgaatacataaacagtaagcaatggcctggtaaagcggcg

SEQ ID NO: 162242 - DNA, 75 bp, synthetic construct
  source 1..75: mol_type = other DNA
gctggattatctggaagcactggacctggtggatacttccagtgcgccagatattgaatggcctacccctccggc

SEQ ID NO: 162243 - DNA, 75 bp, synthetic construct
  source 1..75: mol_type = other DNA
gctggattatctggaagcactggatctggtggatacgtccagtgcgccagatattgaatggcctacgcctccggc

SEQ ID NO: 162244 - DNA, 75 bp, synthetic construct
  source 1..75: mol_type = other DNA
gctggattatctggaagcactggatctggtggatacctccagtgcgccagatattgaatggcctacccctccggc

SEQ ID NO: 162245 - DNA, 75 bp, synthetic construct
  source 1..75: mol_type = other DNA
cccgggccaaagggggaacaggggcccgcgggtcctcaggggccgaagggagataaaggagagcgtggcgacacc

SEQ ID NO: 162246 - DNA, 75 bp, synthetic construct
  source 1..75: mol_type = other DNA
tccggatgaagccggtcgttacagcatggacgttgagtacggtcagtacagcgtcattctgttggtggagggctt

SEQ ID NO: 162247 - DNA, 75 bp, synthetic construct
  source 1..75: mol_type = other DNA
acgagcctttagagcttgtgattttgcgtttgttgtacccgttgccatttctattcctctggtggattggtgggg

SEQ ID NO: 162248 - DNA, 75 bp, synthetic construct
  source 1..75: mol_type = other DNA
tctccttcagtccgaacaaaccccggcactatgaacgttatctgcagcgtatgaaagaaaggaggaaggaatggg

SEQ ID NO: 162249 - DNA, 75 bp, synthetic construct
  source 1..75: mol_type = other DNA
acagtgtatgaggactcaaagccgggcacactgaatgatttcctcggcgcaatgacggaggatgatgcccgtccg

SEQ ID NO: 162250 - DNA, 75 bp, synthetic construct
  source 1..75: mol_type = other DNA
ggggccggcaggtgatgctggtccggcaggcccgcaggggccgaaaggcgacaggggggaacggggagagaccgg

SEQ ID NO: 162251 - DNA, 75 bp, synthetic construct
  source 1..75: mol_type = other DNA
cgaaaggagaaacaggtgcggctggcccggtgggggcaaccggacctcaggggccgaagggcgacccgggggaga

SEQ ID NO: 162252 - DNA, 75 bp, synthetic construct
  source 1..75: mol_type = other DNA
gatgccacacaggttcaggggctgtttcggcatttgcaggtcaggtatggtgacgggccgtggcaggatgttaag

SEQ ID NO: 162253 - DNA, 75 bp, synthetic construct
  source 1..75: mol_type = other DNA
gatggtgattactctggttctttggccttgcggcgctggcgatattcaacttctcgttttaatgccgcagtaaca

SEQ ID NO: 162254 - DNA, 75 bp, synthetic construct
  source 1..75: mol_type = other DNA
cggggcccgcgggtcctcaggggccgaagggagataaaggagagcgtggcgacaccggcccggcaggggccaaaa

SEQ ID NO: 162255 - DNA, 75 bp, synthetic construct
  source 1..75: mol_type = other DNA
ggctggcccggtgggggcaaccggacctcagggaccgaagggcgacccgggggagacacaaatccgtttttcgtc

SEQ ID NO: 162256 - DNA, 75 bp, synthetic construct
  source 1..75: mol_type = other DNA
tgggattatgctaaccgctcacaggcattattccgcgaattgtatccagcgctaaagcaaattcaatcgaactat

SEQ ID NO: 162257 - DNA, 75 bp, synthetic construct
  source 1..75: mol_type = other DNA
aggcattattccgcgaattgtatccagcgctaaagcaaattcaatcgaactttaaaaaactgcgaaacagcagaa

SEQ ID NO: 162258 - DNA, 75 bp, synthetic construct
  source 1..75: mol_type = other DNA
ataaactatacttacaggataaacaatacagtgccgaagtcgcttcagcacgtattcagtatcaacaatctttag

SEQ ID NO: 162259 - DNA, 75 bp, synthetic construct
  source 1..75: mol_type = other DNA
ggatacccagcgcacgtttaccgattccgtgggcggtatctatcagaccgctgcggaattcgagcgctacgcgct

SEQ ID NO: 162260 - DNA, 75 bp, synthetic construct
  source 1..75: mol_type = other DNA
aagactgctatttcagccagtgcgagaaaaatactggcaaacaagagaagaagctcaacgggctttccgcaaaag

SEQ ID NO: 162261 - DNA, 75 bp, synthetic construct
  source 1..75: mol_type = other DNA
atttgcaaccatctttaagagggttacaaatttccccgaaagcccgctccctcattctctggacagaacgcggag

SEQ ID NO: 162262 - DNA, 75 bp, synthetic construct
  source 1..75: mol_type = other DNA
tgattgtcgaacacgccgatgacccggaaaccatgcaggaagccctctatccggtgctggcggacttctttaaac

SEQ ID NO: 162263 - DNA, 75 bp, synthetic construct
  source 1..75: mol_type = other DNA
tggcagacggtgaaggccgcctgattgactgtaaaaatatcgttttcttcctgacctccaaccttggctaccagg

SEQ ID NO: 162264 - DNA, 75 bp, synthetic construct
  source 1..75: mol_type = other DNA
atgacggacgcctctgacaccctgcttgcccgctatgccaaaaacatgaccgcagacgcccgtaacggcaggctt

SEQ ID NO: 162265 - DNA, 75 bp, synthetic construct
  source 1..75: mol_type = other DNA
aaaggttatagaagtgccatcactgcttactggaatgctgtagttgatgatttacgtcaaaagataattcatcgt

SEQ ID NO: 162266 - DNA, 75 bp, synthetic construct
  source 1..75: mol_type = other DNA
ggcttgacccggtactgtgccgcgactatgaaatcgacctgatgatcgacattctctgccgccgccgtaaaaaca

SEQ ID NO: 162267 - DNA, 75 bp, synthetic construct
  source 1..75: mol_type = other DNA
attgcccggattcgcctgtcggcggcagacggtgcgttcacggcagatgtggaagatgcgctgcctgatgatgcc

SEQ ID NO: 162268 - DNA, 75 bp, synthetic construct
  source 1..75: mol_type = other DNA
taggtcggggagaagcagggcggattgaactcggcgtagtgggaacggcaatgtggggacggatgcgcccggtta

SEQ ID NO: 162269 - DNA, 75 bp, synthetic construct
  source 1..75: mol_type = other DNA
tggtatcacattgatagcggacagctacgcacaaatgaactggccaggtgctgatgaatcccctaatgattttta

SEQ ID NO: 162270 - DNA, 75 bp, synthetic construct
  source 1..75: mol_type = other DNA
caggcccggcaggcccacagggaccgaaaggagaaacaggtgcggctggcccggtgggggcaaccggacctcagg

SEQ ID NO: 162271 - DNA, 75 bp, synthetic construct
  source 1..75: mol_type = other DNA
ccggccctgtcggggcaaccggcgaacggggaccggcaggtgatgctggtccggcaggcccgcaggggccgaaag

SEQ ID NO: 162272 - DNA, 75 bp, synthetic construct
  source 1..75: mol_type = other DNA
aggtcaggtttggtgacgggccgtggcaggatgttaaggggctggatgaagtgggcagtgatacaggcagaacag

SEQ ID NO: 162273 - DNA, 75 bp, synthetic construct
  source 1..75: mol_type = other DNA
acattattgagacaaacagccatggctggttcccggatacagatggcgcactcatcaccggactgacctttcttg

SEQ ID NO: 162274 - DNA, 75 bp, synthetic construct
  source 1..75: mol_type = other DNA
gggctaatttgccaatggcgattggttgcgcgatttccttgacggcgtttaccgcattcagtctggtactcgggc

SEQ ID NO: 162275 - DNA, 75 bp, synthetic construct
  source 1..75: mol_type = other DNA
aaagggggaaccgggtcccgcgggtcctcaggggccgaagggagataaaggagagcgtggtgacaccggccctgt

SEQ ID NO: 162276 - DNA, 75 bp, synthetic construct
  source 1..75: mol_type = other DNA
atgcagccagggatgcaacgaccgcaacagaaaaagcccgggagtcagcagaaagcgcacagtcagcggaacaaa

SEQ ID NO: 162277 - DNA, 75 bp, synthetic construct
  source 1..75: mol_type = other DNA
aacaaagcaggatagcggcggaagaggccgtaaaccgaatccccaccgtggtgggacctcccgggccaaaggggg

SEQ ID NO: 162278 - DNA, 75 bp, synthetic construct
  source 1..75: mol_type = other DNA
attgagacaaacagcaatggctggttcccggatacagatggcgcactcatcaccggactgacctttcttgccccc

SEQ ID NO: 162279 - DNA, 75 bp, synthetic construct
  source 1..75: mol_type = other DNA
cgtaaaccgaatccccaccgtggtggggcctcccgggccaaagggggaaccgggtcccgcgggtcctcaggggcc

SEQ ID NO: 162280 - DNA, 75 bp, synthetic construct
  source 1..75: mol_type = other DNA
ggtccggcaggcccgcaggggccgaaaggtgacaggggagagcggggagagaccggtctgacgggaaatgcaggt

SEQ ID NO: 162281 - DNA, 75 bp, synthetic construct
  source 1..75: mol_type = other DNA
tttcagcatttgcaggtcaggtttggtgacgggccgtggcaggatgttaagggactggatgaagtgggcagtgat

SEQ ID NO: 162282 - DNA, 75 bp, synthetic construct
  source 1..75: mol_type = other DNA
gcaaccggacctcaggggccgaagggcgacccggggagacgcaaatacggttccgtctggggccgggaaacatta

SEQ ID NO: 162283 - DNA, 75 bp, synthetic construct
  source 1..75: mol_type = other DNA
tcaggtttggtgacgggccatggcaggatgttaagggactggatgaagtgggcagtgatacaggcagaacaggag

SEQ ID NO: 162284 - DNA, 75 bp, synthetic construct
  source 1..75: mol_type = other DNA
tggtgaacacggtggcctctgaaaatccggatgaggcagggcgttacagcatggacgtcgagtacggtcagtaca

SEQ ID NO: 162285 - DNA, 75 bp, synthetic construct
  source 1..75: mol_type = other DNA
agggaccgaaaggagaaacaggtgcggctggcccggtggaggcaaccggacctcagggaccgaagggcgacccgg

SEQ ID NO: 162286 - DNA, 75 bp, synthetic construct
  source 1..75: mol_type = other DNA
gtaagttggcagcatcaccgcactaccgctaacgccgaagagtattatttcgaccccattatgctggaaaccaca

SEQ ID NO: 162287 - DNA, 75 bp, synthetic construct
  source 1..75: mol_type = other DNA
ggatcaaaatgttttatcgccccgcacacctgaagggacgggtaaacgatgcgtggacatcactggaatttaaac

SEQ ID NO: 162288 - DNA, 75 bp, synthetic construct
  source 1..75: mol_type = other DNA
agggaccatccggaagccctgacagcgggctgtttggtgtcggttcttttgttcttgcggcgtattaccagacgt

SEQ ID NO: 162289 - DNA, 75 bp, synthetic construct
  source 1..75: mol_type = other DNA
cctgctggctatcgataaacagcgcaacctggtgatcattgaaaacaagcttgatgactccgggcgcgatgtggt

SEQ ID NO: 162290 - DNA, 75 bp, synthetic construct
  source 1..75: mol_type = other DNA
ccttgagcgtcttaaaaccagctcctgcacgttgtacaacaatatcagcccttcgaccgaccattggatcagcgc

SEQ ID NO: 162291 - DNA, 75 bp, synthetic construct
  source 1..75: mol_type = other DNA
ggtggccgatgcgaatgtgaccatcagcaaggacagggcgctcaagtcacagatagcaaaactgctcaccagtat

SEQ ID NO: 162292 - DNA, 75 bp, synthetic construct
  source 1..75: mol_type = other DNA
tcggaggattatttcctcagactcaggtgtcacagcagaaggtctgtcaggacattgccggtgagagcaatattt

SEQ ID NO: 162293 - DNA, 75 bp, synthetic construct
  source 1..75: mol_type = other DNA
tgccggcgcgtaccactgaccgcgatatcctccgggcgattatgaggggggaacggcaaaagtttatcactgcaa

SEQ ID NO: 162294 - DNA, 75 bp, synthetic construct
  source 1..75: mol_type = other DNA
cctgaggcagcgaaagccatgaccgtggcgattcgcacttttttacagcaaaacgccaatcgggaaggcgattgc

SEQ ID NO: 162295 - DNA, 75 bp, synthetic construct
  source 1..75: mol_type = other DNA
ttttaaatatcttattgatccgcagatgctcggtgtgtccagcagcgtggtttaccagctgccggtggtgagtgg

SEQ ID NO: 162296 - DNA, 75 bp, synthetic construct
  source 1..75: mol_type = other DNA
agatagcaaaactgctcaccagtattcagaacaaggcgctcagtgattctccgctggctgagaacgaaaaaacct

SEQ ID NO: 162297 - DNA, 75 bp, synthetic construct
  source 1..75: mol_type = other DNA
ttttgaccttgccctgcagacaacggtgccggaaataaaaaccgcaaaagacttcctgcagaaaatggcaagtga

SEQ ID NO: 162298 - DNA, 75 bp, synthetic construct
  source 1..75: mol_type = other DNA
aattcgccctgcgtcttctaagtaaaggaatgcctcgggaagacgttgcagagatggcaaatttacctcttgctg

SEQ ID NO: 162299 - DNA, 75 bp, synthetic construct
  source 1..75: mol_type = other DNA
gtgccggaaatcaaaaccgcaaaagacttcctgcagaaaatggcaagcgacattaacagtatgaacctcagctcc

SEQ ID NO: 162300 - DNA, 75 bp, synthetic construct
  source 1..75: mol_type = other DNA
cagctgcagcgttttgttaagcagattatgagtaacgcgatggggtacttttttgaccttgccctgcagacaacg

SEQ ID NO: 162301 - DNA, 75 bp, synthetic construct
  source 1..75: mol_type = other DNA
ggtggcggatgcaaatgtgaccatcgcccgggataaagccctgaaatcacagattacaaaactgctcaccagtat

SEQ ID NO: 162302 - DNA, 75 bp, synthetic construct
  source 1..75: mol_type = other DNA
tgccggcgcgtaccactgaccgcgatatcctccgggcgattatggaggggggaacggcaaaaatttatcactgca

SEQ ID NO: 162303 - DNA, 75 bp, synthetic construct
  source 1..75: mol_type = other DNA
gtttgaatccacgacatttgatgctttctgtaaaagtattgtagatagatttaaaggtactcttccgaagtttta

SEQ ID NO: 162304 - DNA, 75 bp, synthetic construct
  source 1..75: mol_type = other DNA
atactcgagggaattagccgatgcgagagctgaaaatgaaactctgcgcgctgatgttgacgctggtcgtaagcg

SEQ ID NO: 162305 - DNA, 75 bp, synthetic construct
  source 1..75: mol_type = other DNA
atgattgccgaagcgttaaaagctgatgggatggaagaaatttatttttctggcgataaaaaagcggaatccatc

SEQ ID NO: 162306 - DNA, 75 bp, synthetic construct
  source 1..75: mol_type = other DNA
atacgagaaaaggccaattatgtttgtaatgattgtggcgtgaatttatcaaccgccaaaaacttgtgccatgtc

SEQ ID NO: 162307 - DNA, 75 bp, synthetic construct
  source 1..75: mol_type = other DNA
cgccataaaaatcgatttgaaaggtatcatgcaactaaccgcatagatggtttattcgaaattgatgatggttca

SEQ ID NO: 162308 - DNA, 75 bp, synthetic construct
  source 1..75: mol_type = other DNA
cctgcgcatcaacgccaactgtccaggctccttgcgtaaagccccatcacctccggcgtggataatgcaaccggt

SEQ ID NO: 162309 - DNA, 75 bp, synthetic construct
  source 1..75: mol_type = other DNA
gtttcccgtacccgttgcgcttcctgttcgccagcaagcctgaggcgatcggcccggtgctgggcatcgtgcatc

SEQ ID NO: 162310 - DNA, 75 bp, synthetic construct
  source 1..75: mol_type = other DNA
gccgaagaactcgataccgctaacctcaatgttaaagcgatgcaggccagtgttgatgccgcacaggcgacgctg

SEQ ID NO: 162311 - DNA, 75 bp, synthetic construct
  source 1..75: mol_type = other DNA
tctcagatgggggctgcatccttgttctttaaatcccatccaggtattcctgagtgggagctaaatggacgcatg

SEQ ID NO: 162312 - DNA, 75 bp, synthetic construct
  source 1..75: mol_type = other DNA
atgtcggcgacagcggaaccggcgttcatcaatccgctggcaattcccacatacttcggcgtaatatccatcggg

SEQ ID NO: 162313 - DNA, 75 bp, synthetic construct
  source 1..75: mol_type = other DNA
ttcgcaagccatttcatgatgaatgggggcaatataatcgcactgcaacagattctgggacatgcgagcattcag

SEQ ID NO: 162314 - DNA, 75 bp, synthetic construct
  source 1..75: mol_type = other DNA
cctgaacatccacttccacatgctgtggctcgacggcgtgtacgggaagccaccgagctgccgcggcgcgaactg

SEQ ID NO: 162315 - DNA, 75 bp, synthetic construct
  source 1..75: mol_type = other DNA
tgcagtacattcaggagctgatacagcaggcccgggcgatggtggccacgggaaattatgacgaagcagttatcg

SEQ ID NO: 162316 - DNA, 75 bp, synthetic construct
  source 1..75: mol_type = other DNA
actgaagtctcagattactaaacttctggccagcattcagaacaaggcggtcagtgacacgcctctggatgacaa

SEQ ID NO: 162317 - DNA, 75 bp, synthetic construct
  source 1..75: mol_type = other DNA
taacctgatgtgggatgctctcagcaacagtacgctcagcagcaatgcagagctgcgccagtttgccatgagcat

SEQ ID NO: 162318 - DNA, 75 bp, synthetic construct
  source 1..75: mol_type = other DNA
atgatgccacgcattaaacctcttctggttctttgtgctgccttactgacggtgacgcctgcagcgtcagcggat

SEQ ID NO: 162319 - DNA, 75 bp, synthetic construct
  source 1..75: mol_type = other DNA
aatatctggttgacccgcagatgctcggtatctccagcagtgtggtttaccagctgacggactatatcggctacg

SEQ ID NO: 162320 - DNA, 75 bp, synthetic construct
  source 1..75: mol_type = other DNA
aacagcgacatgaatcagttctttaacaagctgggcttcgcctccaataccacacagccgggcgtctggcagggg

SEQ ID NO: 162321 - DNA, 75 bp, synthetic construct
  source 1..75: mol_type = other DNA
tgatgcttatctgggctccttttcctttatcaacagcgaacagattgagcgttttgtgaagcagctgatggggaa

SEQ ID NO: 162322 - DNA, 75 bp, synthetic construct
  source 1..75: mol_type = other DNA
tcggcgggctcttcccccggacgcaggtgtcccagcagaaagtctgtcaggacattgccggtgagagcaatattt

SEQ ID NO: 162323 - DNA, 75 bp, synthetic construct
  source 1..75: mol_type = other DNA
ctctgatgttctggaaactgccgccgtggctggtcgtagtgagttgcggtgttgcgggttggttgttgagtttag

SEQ ID NO: 162324 - DNA, 75 bp, synthetic construct
  source 1..75: mol_type = other DNA
gcggcatcgatgcgtacctggggtcgttctcctttatcaacagcgagcagctgcagcgctttggcaaacaaatta

SEQ ID NO: 162325 - DNA, 75 bp, synthetic construct
  source 1..75: mol_type = other DNA
aggctgctcagggaattgtgggtggcctgtttcctcgtacccaggtcgctcaacaaaaggtctgccaggacattg

SEQ ID NO: 162326 - DNA, 75 bp, synthetic construct
  source 1..75: mol_type = other DNA
tgaaacaggttaaggattttatgcagaagctggccagtgacctcaacaacatgaatgtctcctcctgccaggctg

SEQ ID NO: 162327 - DNA, 75 bp, synthetic construct
  source 1..75: mol_type = other DNA
cggactatatcggctacgacatcatgctccagtacattcaggaactgcttcagcaggcccgggccatgattgcca

SEQ ID NO: 162328 - DNA, 75 bp, synthetic construct
  source 1..75: mol_type = other DNA
agcggaaattcgccagcttgagcgcgagcttcgcatcgggctgcgtaccgacacctcacggatgactgaggtgct

SEQ ID NO: 162329 - DNA, 75 bp, synthetic construct
  source 1..75: mol_type = other DNA
gctgaaaccggcgctggcacgtggcgagctgaaaaccatcgccgccaccacctggagcgagtacaaaaaatactt

SEQ ID NO: 162330 - DNA, 75 bp, synthetic construct
  source 1..75: mol_type = other DNA
cacacaaccgggcgtctggcaggggcaggccgccgggtatgcctatggtggctccctgtatgcccgcacccaggt

SEQ ID NO: 162331 - DNA, 75 bp, synthetic construct
  source 1..75: mol_type = other DNA
gccgtcttccagaatcaggtccaggttcagcagaacgcactgctggtcgttgaccgtcagatgagctacatgcgc

SEQ ID NO: 162332 - DNA, 75 bp, synthetic construct
  source 1..75: mol_type = other DNA
ggaacggcaaaagtttatcactgcaacgattcggacaagtgtctgaaggtggtggcggatgcaaatgtgaccatc

SEQ ID NO: 162333 - DNA, 75 bp, synthetic construct
  source 1..75: mol_type = other DNA
gaaggcggcgtactgaccgaagcgattcgccagaaaccgtactcggtggtgctgctcgatgaagtagaaaaagcg

SEQ ID NO: 162334 - DNA, 75 bp, synthetic construct
  source 1..75: mol_type = other DNA
acagtgacggtcagccagaacaacagtctgaatcagcgtgtgcagaacatgataaagaatatctctgacaaactg

SEQ ID NO: 162335 - DNA, 75 bp, synthetic construct
  source 1..75: mol_type = other DNA
agatgagctacatgcgtcagcagctttccgcccgtatgctcagccgttaccagaacaactatcacttcggaggga

SEQ ID NO: 162336 - DNA, 75 bp, synthetic construct
  source 1..75: mol_type = other DNA
ggacctggcgattgccagcctgcataaacacctgctgaccgcacgcgccgacctgcgccgtccgggacgcccgct

SEQ ID NO: 162337 - DNA, 75 bp, synthetic construct
  source 1..75: mol_type = other DNA
cacgaatgactgaggtgttggagcagtatgatgaaacgctgtcggcgctggacgaactggaagtcgcctggcagc

SEQ ID NO: 162338 - DNA, 75 bp, synthetic construct
  source 1..75: mol_type = other DNA
tcggagtgtatgagccagcaggccagtgagatcaccgttgcccatgtgctgttacagatgctggcaatcccgcgc

SEQ ID NO: 162339 - DNA, 75 bp, synthetic construct
  source 1..75: mol_type = other DNA
tcgagccagtggcgcagcctggcgttgcgccgtgccaatgattgcccggtatgtggaggatgcaatgcagatcct

SEQ ID NO: 162340 - DNA, 75 bp, synthetic construct
  source 1..75: mol_type = other DNA
gattaaacgtgaaatgttcgccaaactgcgcaccagtcgctttatgaaagccaaaggcagcgacagtgcggcggt

SEQ ID NO: 162341 - DNA, 75 bp, synthetic construct
  source 1..75: mol_type = other DNA
caagcgccagcaggcaccagacggcaccccgtatgcggcacgaaagcgccagccggtgaggagcaagaaaggtcg

SEQ ID NO: 162342 - DNA, 75 bp, synthetic construct
  source 1..75: mol_type = other DNA
tcggctgtccgtgcgtggtgtgagtatcaactggaaggtatgacgatacttcgtgatgcgtacagctcgctggca

SEQ ID NO: 162343 - DNA, 75 bp, synthetic construct
  source 1..75: mol_type = other DNA
atgatcgattcgaatgccaaactgcgatcgattcagatgccattttgcactaacgttaataatgcactttacgca

SEQ ID NO: 162344 - DNA, 75 bp, synthetic construct
  source 1..75: mol_type = other DNA
gcggaattggttggagaacttgctgcgccggttatcaagaaatctgactcaccaaaattgcaaaggatccttagc

SEQ ID NO: 162345 - DNA, 75 bp, synthetic construct
  source 1..75: mol_type = other DNA
agctccagcgagagctttctaagtggcttaggcgagggggcgtttcgttctttaggcggggcctttaagggggtg

SEQ ID NO: 162346 - DNA, 75 bp, synthetic construct
  source 1..75: mol_type = other DNA
ggtggtcgcaagaaattactccacgcagcgcgtgatcgagtagctgatgaagtgcagttgtatttgccaggcata

SEQ ID NO: 162347 - DNA, 75 bp, synthetic construct
  source 1..75: mol_type = other DNA
atgattaaaaatgacaaggcatggataggagacttgctgggcgggccgctcatgagcagggaaagccgcgtcatt

SEQ ID NO: 162348 - DNA, 75 bp, synthetic construct
  source 1..75: mol_type = other DNA
tcggccaactcaatgtgcaaaaacagcaacttgaacaagaaattaccgatcgtaaggtgatagaagccgatctgc

SEQ ID NO: 162349 - DNA, 75 bp, synthetic construct
  source 1..75: mol_type = other DNA
aacgatggctggacggaatgtctgaatcaacgtatagccgggctcctgaagcaggcctgtattgaattttccgac

SEQ ID NO: 162350 - DNA, 75 bp, synthetic construct
  source 1..75: mol_type = other DNA
atgaatagtctgttaatactcctttgcgttgttgtatgccgtgcctgcaccattcttcaggtaatcgcaccagtg

SEQ ID NO: 162351 - DNA, 75 bp, synthetic construct
  source 1..75: mol_type = other DNA
gggatatttcgtaaacgtccggctaacctggaagaagaaatgttgatagaggtatatcaaaatgaaaatcagggt

SEQ ID NO: 162352 - DNA, 75 bp, synthetic construct
  source 1..75: mol_type = other DNA
tcgtgaaatcgaaaaacgcggcccggcaattgcccaggcgttcgacgctgaaggcaaaccgagcaaagcggcaga

SEQ ID NO: 162353 - DNA, 75 bp, synthetic construct
  source 1..75: mol_type = other DNA
catccaggcgctggctggctggattgctgaacagattggcgctgacgttaaccacgctacccgtgcgggcctgct

SEQ ID NO: 162354 - DNA, 75 bp, synthetic construct
  source 1..75: mol_type = other DNA
agcactgaagcactgctgccgaatatggttgcgacttcgctggcgaaactgccgatcccgaaactgatgcgttgg

SEQ ID NO: 162355 - DNA, 75 bp, synthetic construct
  source 1..75: mol_type = other DNA
gtctgtatggcgataagctgactaatgccaacgtggttgatgatgttatcgactttatgctcggtcgcttccgcg

SEQ ID NO: 162356 - DNA, 75 bp, synthetic construct
  source 1..75: mol_type = other DNA
atttcgatgcccgtatgaaggccgtatcgcacttccgtactctggaagcagcggctgcactggcggcagcgaata

SEQ ID NO: 162357 - DNA, 75 bp, synthetic construct
  source 1..75: mol_type = other DNA
gctgggcgataaagtcattccggcaaccattctgggtattcagtccgatcgcgtgattcgcggccaccgctttat

SEQ ID NO: 162358 - DNA, 75 bp, synthetic construct
  source 1..75: mol_type = other DNA
atactctggcgggtatcttcggtatcggccagcatccgaaaggcgacaaagacccgtttgcgctgcgtcgtgccg

SEQ ID NO: 162359 - DNA, 75 bp, synthetic construct
  source 1..75: mol_type = other DNA
gcgctggtttacaccatgaaaggtgaccagaaatacttcccggtgtatgcgaacgacggcaaactgctgccgaac

SEQ ID NO: 162360 - DNA, 75 bp, synthetic construct
  source 1..75: mol_type = other DNA
ctgtcgcgttttgcattatttgcttcctgtttgtggttgtttcttgtggcgcatttgctgcgctggttagcttta

SEQ ID NO: 162361 - DNA, 75 bp, synthetic construct
  source 1..75: mol_type = other DNA
atcaaccgtctgaccatgctggaaaaactgcgcgaactgttcctgcgcgttgcggatatttcgctgttgcagtaa

SEQ ID NO: 162362 - DNA, 75 bp, synthetic construct
  source 1..75: mol_type = other DNA
gtcgcttcgctggtggaatggccggttgtgctgaccgcaaaattcgaagagaaattcctcgcggtgccgtctgaa

SEQ ID NO: 162363 - DNA, 75 bp, synthetic construct
  source 1..75: mol_type = other DNA
agggcgttatgggtatgcactacgcgcgtcacgatggtgaagcggaagatgtcgcagtggcgctgaacgagcagt

SEQ ID NO: 162364 - DNA, 75 bp, synthetic construct
  source 1..75: mol_type = other DNA
gtgggcggcgcggttctggtgtggaaatactgggatcagatcagcgcgtttttttccggcttttttgccggagtg

SEQ ID NO: 162365 - DNA, 75 bp, synthetic construct
  source 1..75: mol_type = other DNA
attggtggtgctgtccggcttgtgtctgcgatggcactgcgcctgacggggctgcctgcgctgtgggggctggtc

SEQ ID NO: 162366 - DNA, 75 bp, synthetic construct
  source 1..75: mol_type = other DNA
cgaaaggcagagcaggacggtaacactctctccaaaaagcagcgggagatgatgacggcgctgtctgcacgtctt

SEQ ID NO: 162367 - DNA, 75 bp, synthetic construct
  source 1..75: mol_type = other DNA
ctgtcccgtattctgggatggtttaaatccctgttaacgccggtctcctccacgcgtgatttgcttgagcagtgc

SEQ ID NO: 162368 - DNA, 75 bp, synthetic construct
  source 1..75: mol_type = other DNA
ggagcggtgctggcgttaaccacagcggtgggggcgttgtccgttgcggcctggatggttgtcgcaccgttactg

SEQ ID NO: 162369 - DNA, 75 bp, synthetic construct
  source 1..75: mol_type = other DNA
ggcgcgggtgtctgaccgtatggctgacgtgtctggtgtggcggaccggatggggcaaaccctgcgtgacaatct

SEQ ID NO: 162370 - DNA, 75 bp, synthetic construct
  source 1..75: mol_type = other DNA
tttttggtgtaagctttatcgcctctgcgttcgctgtagcggtcgtactggcagccttttactatggattccttg

SEQ ID NO: 162371 - DNA, 75 bp, synthetic construct
  source 1..75: mol_type = other DNA
caagtgttgagattcctgatggacttctcaaacaatcaaatcgcactgaaaaagatcaggagttgataactaagc

SEQ ID NO: 162372 - DNA, 75 bp, synthetic construct
  source 1..75: mol_type = other DNA
aattttttgctatctatgcaaaactcgatcccacaacaaaaaaaaccattgaatttcagttagtaaatcgtaaaa

SEQ ID NO: 162373 - DNA, 75 bp, synthetic construct
  source 1..75: mol_type = other DNA
gcttactcctcttcaggcgttgatggacggcctggcatgggtgctggaaaaactcggcgtgctcccttctgaagt

SEQ ID NO: 162374 - DNA, 75 bp, synthetic construct
  source 1..75: mol_type = other DNA
gcagaacgggccaatgcggcgatagcgctgttcggcacacccattgaagatctggctgttgaccagatcccggat

SEQ ID NO: 162375 - DNA, 75 bp, synthetic construct
  source 1..75: mol_type = other DNA
agtgaaagtatcagttacgccaaagtttttggtgtaagcttcatcgcctctgcgttcgctgtggcggtcgtactg

SEQ ID NO: 162376 - DNA, 75 bp, synthetic construct
  source 1..75: mol_type = other DNA
ctgccctgtatcgaacaggcgcgacaggatatccgtaccctgcgtcatctgcagcttcagcacccgaaccggtga

SEQ ID NO: 162377 - DNA, 75 bp, synthetic construct
  source 1..75: mol_type = other DNA
ataaaacggattcggcagcactgttgccctgtattgaacaggcctgggaggatatccgtaccctgcgccaactgc

SEQ ID NO: 162378 - DNA, 75 bp, synthetic construct
  source 1..75: mol_type = other DNA
atgaaatcattaaccacggaaacagcgctggatatcctcattgcgtggctgcaggacaatattgacttcgaatcg

SEQ ID NO: 162379 - DNA, 75 bp, synthetic construct
  source 1..75: mol_type = other DNA
atgaaattattaaccacggaaaccgcactggatattctgattgcgtggctacaggacaatatcgactgcgaatcg

SEQ ID NO: 162380 - DNA, 75 bp, synthetic construct
  source 1..75: mol_type = other DNA
gcaggacaatatcgactgcgaatcggggattatctttgacaacgatgaagataaaacggattcggcagcactgct

SEQ ID NO: 162381 - DNA, 75 bp, synthetic construct
  source 1..75: mol_type = other DNA
ctgccctgcattgaacaggccagggaagatatccgtaccctgcgccaggtgcagtttctgcaacagaaccggtga

SEQ ID NO: 162382 - DNA, 75 bp, synthetic construct
  source 1..75: mol_type = other DNA
atagaacggattcggcagcactgttgccctgtatcgaacaggccagagaagatgtccgtaccctgcgtcatctgc

SEQ ID NO: 162383 - DNA, 75 bp, synthetic construct
  source 1..75: mol_type = other DNA
aacatgaaatcattaaccacggaaacagcactggatattctgattgcgtggctgcaggacaatatcgactgcgaa

SEQ ID NO: 162384 - DNA, 75 bp, synthetic construct
  source 1..75: mol_type = other DNA
ttatgcctgcatgagtgagtatacatttaccaaagatgatgagttgaaactcggtgatgttcttgggtggtgctt

SEQ ID NO: 162385 - DNA, 75 bp, synthetic construct
  source 1..75: mol_type = other DNA
cactggatattctgattgcgtggctacaggacaatatcgactgcgaatcggggattatctttgacaacgatgagg

SEQ ID NO: 162386 - DNA, 75 bp, synthetic construct
  source 1..75: mol_type = other DNA
aaaattgggagctgacacgggatattcggggctaatttgcaagaatccgaaccacagtcactggaaaattgccgc

SEQ ID NO: 162387 - DNA, 75 bp, synthetic construct
  source 1..75: mol_type = other DNA
aaacggattcggcagcactgctgtcctgtattgaacaggccagggaggatatccgtaccctgcaccaactgcagc

SEQ ID NO: 162388 - DNA, 75 bp, synthetic construct
  source 1..75: mol_type = other DNA
aaaaattgttcatccatattattatccataaaaataaacatcagagacgctgtaaaaatatacgagaggctaata

SEQ ID NO: 162389 - DNA, 75 bp, synthetic construct
  source 1..75: mol_type = other DNA
tgcttatgattccctgcaaaaaaaatgggtactgattggcgtactttcctcaggaactaactatgaaaataactg

SEQ ID NO: 162390 - DNA, 75 bp, synthetic construct
  source 1..75: mol_type = other DNA
ggacctctggctaattatctgaatatgggggacagcggctcccccctgtttgcttatgattccctgcaaaaaaaa

SEQ ID NO: 162391 - DNA, 75 bp, synthetic construct
  source 1..75: mol_type = other DNA
ggcctgaccgtggcgcgggaaacgaaaagcagtatcagcattgccgatccggacggcggccgaaatatccggctg

SEQ ID NO: 162392 - DNA, 75 bp, synthetic construct
  source 1..75: mol_type = other DNA
gaactgtataaagagatgcagaaacgtggctgggatgtcaaagaaagcgcggtgatggcgattacctccaactaa

SEQ ID NO: 162393 - DNA, 75 bp, synthetic construct
  source 1..75: mol_type = other DNA
atttagttcaattaaagaacaattaacagagcaatcagataaattcacaaaagtaattaataaaaccatcgaaaa

SEQ ID NO: 162394 - DNA, 75 bp, synthetic construct
  source 1..75: mol_type = other DNA
gtcatgaatatggagaaaacgaacaatctgtttatggctatatttgctccttgaaaaatgatgaaccggagaatt

SEQ ID NO: 162395 - DNA, 75 bp, synthetic construct
  source 1..75: mol_type = other DNA
agccgcaaagcaacaggaagcggatgctgcattccaaaaagaatatgcggcagccatccagtccggtgatcgaca

SEQ ID NO: 162396 - DNA, 75 bp, synthetic construct
  source 1..75: mol_type = other DNA
cgattgactacttcaatgttcaggacaagatggctggtcgtgagattgaccgaggcaggctggcagagacaatcc

SEQ ID NO: 162397 - DNA, 75 bp, synthetic construct
  source 1..75: mol_type = other DNA
ctgcagaattccgttaatcaggggggcgggtatctgcagtttgccggcgattacagggggtccgccctgaacggc

SEQ ID NO: 162398 - DNA, 75 bp, synthetic construct
  source 1..75: mol_type = other DNA
ccatttttggcccagatcagggtaaaaaattcaccctgcccctaccgtcagattcacaacaatcgtcaatcgact

SEQ ID NO: 162399 - DNA, 75 bp, synthetic construct
  source 1..75: mol_type = other DNA
atggaacttaaaaaattgatggaacatatttctattatacccgattacagacaagcctggaaagtggtgcataaa

SEQ ID NO: 162400 - DNA, 75 bp, synthetic construct
  source 1..75: mol_type = other DNA
gctatcactattcagcgtaaagaacacgatgaaagaattaagcttgagcaagagctaaagatgtcaccaaagcaa

SEQ ID NO: 162401 - DNA, 75 bp, synthetic construct
  source 1..75: mol_type = other DNA
atcgataaagatgtcaccaaaggtaatttcctttgtgtctcctgagcctcaagagatgcccgatatctgcagaac

SEQ ID NO: 162402 - DNA, 75 bp, synthetic construct
  source 1..75: mol_type = other DNA
actggctttccccctggcgatatcgatgaatttctaggagtggaacaggtattcagatatctttcggccgtggcc

SEQ ID NO: 162403 - DNA, 75 bp, synthetic construct
  source 1..75: mol_type = other DNA
cgaattgtgaagatggttaaagcttcaagaggtgctggtcagtttatttacatgaccaataagagcgatgaagaa

SEQ ID NO: 162404 - DNA, 75 bp, synthetic construct
  source 1..75: mol_type = other DNA
aagatggttaaggcatcaagaggtgctggtcagtttatttacatgaccaataagagcgatgaagaactcgctgaa

SEQ ID NO: 162405 - DNA, 75 bp, synthetic construct
  source 1..75: mol_type = other DNA
aagaaatgccagatatctgcaaaagtgaagcactatttaatcttgagcgtgaatattacccacagttaaaagcac

SEQ ID NO: 162406 - DNA, 75 bp, synthetic construct
  source 1..75: mol_type = other DNA
cgctatcgttggtcctggataaacgcgggatctactatgacgccacgcgccccagcgacctggaagtgctgctta

SEQ ID NO: 162407 - DNA, 75 bp, synthetic construct
  source 1..75: mol_type = other DNA
aagccggaaatacagctctgataagccaggccagagaagcgatgcacaccatcgtgaccggggatttgtcgaaat

SEQ ID NO: 162408 - DNA, 75 bp, synthetic construct
  source 1..75: mol_type = other DNA
ctacacatcgacgaccgacaacaccgtggtgaaatacacggcgaaataaccccgtcagaacgccctgaatcgcgt

SEQ ID NO: 162409 - DNA, 75 bp, synthetic construct
  source 1..75: mol_type = other DNA
gcaaatggtgtgctgagcacatggcttcacttcatgttaagcgattttatgacagctggctggaaaccatccgga

SEQ ID NO: 162410 - DNA, 75 bp, synthetic construct
  source 1..75: mol_type = other DNA
tggttgcgatgtcgctctggcataaccatgaactgaaaggcacgttaccctccctgcgtcaggagactgacagga

SEQ ID NO: 162411 - DNA, 75 bp, synthetic construct
  source 1..75: mol_type = other DNA
atgtttctgaaaactgaaacgtttgaatataacgggcagaccgtcacgctcagcgaactgtccgccctgcagcgc

SEQ ID NO: 162412 - DNA, 75 bp, synthetic construct
  source 1..75: mol_type = other DNA
tgaaggctggcggcattcgacgcaccgcatcaacccggacaccggaaaaggggaatacgggaaatttgttaaagt

SEQ ID NO: 162413 - DNA, 75 bp, synthetic construct
  source 1..75: mol_type = other DNA
tggtgatcagagtaaatgtgttggtgctcagttgtgcaccaaacctggtgaacctgtggatatcggcaccggtga

SEQ ID NO: 162414 - DNA, 75 bp, synthetic construct
  source 1..75: mol_type = other DNA
tgtgaggaactgttcacttatgacaaaaacctgaatatcacccgccgccagacatgggtaaatgaggtgctggaa

SEQ ID NO: 162415 - DNA, 75 bp, synthetic construct
  source 1..75: mol_type = other DNA
gtcagcgttggtgcaacttatgcgaaatctgatcgtacagacatgcaggttcggacagggaaaacgcttccggag

SEQ ID NO: 162416 - DNA, 75 bp, synthetic construct
  source 1..75: mol_type = other DNA
ctttgcagtacagtaccagggtaaaaatgaacgtaatgatttagatcattacaccaaaggaaacgatgatggttt

SEQ ID NO: 162417 - DNA, 75 bp, synthetic construct
  source 1..75: mol_type = other DNA
gaccgatccacagggccggaaacagcagttcagctacagtgaacagggtgatttgcttgcacggattctgccggg

SEQ ID NO: 162418 - DNA, 75 bp, synthetic construct
  source 1..75: mol_type = other DNA
gagccgtacttcgctgaaggtcgttaccaggacgcgctggtcgaactggctgagctgcgtgaaccggttgatgcc

SEQ ID NO: 162419 - DNA, 75 bp, synthetic construct
  source 1..75: mol_type = other DNA
cggcaccgttcaatggtttgctgctccgtgtcgtctggcgctgaaagtcgctaacctggcggaggcgcaaccgga

SEQ ID NO: 162420 - DNA, 75 bp, synthetic construct
  source 1..75: mol_type = other DNA
gcacgtcgtccgacgcgtccggcagattttgatgcccgtatgaaggcagtatcgcacttccgtactctggatgcg

SEQ ID NO: 162421 - DNA, 75 bp, synthetic construct
  source 1..75: mol_type = other DNA
gaccgacccacagggccggaagcagcagttcagctacagtgaacagggcgatttactggcacgtgttctgccggg

SEQ ID NO: 162422 - DNA, 75 bp, synthetic construct
  source 1..75: mol_type = other DNA
tgagaagaacctcaacctcgatctgcaaacactgactgaagaagcggcgcgtctgtacggtgataagctgactaa

SEQ ID NO: 162423 - DNA, 75 bp, synthetic construct
  source 1..75: mol_type = other DNA
ttgtgctgaccgcaaaattcgaagagaaattcctcgcggtgccgtctgaagcactggtttacaccatgaaaggtg

SEQ ID NO: 162424 - DNA, 75 bp, synthetic construct
  source 1..75: mol_type = other DNA
cgacgccgggcagttaacccgcctgacgctaccgggcgagcaggtatggcagtgggactacgacgccaggggcag

SEQ ID NO: 162425 - DNA, 75 bp, synthetic construct
  source 1..75: mol_type = other DNA
acgtgcaaaatccgttgcggttcattgacccattcgggctggttcctgtgtgtgttcagccaggggataaaacgc

SEQ ID NO: 162426 - DNA, 75 bp, synthetic construct
  source 1..75: mol_type = other DNA
gtaggccgcgtacaggagctgctgaccgaagaaggtctgatagtctggaaaagcaagcagcagctatggggacgt

SEQ ID NO: 162427 - DNA, 75 bp, synthetic construct
  source 1..75: mol_type = other DNA
cctggctggatgtgtgcaccacgtctacaggcagagacggaaaccacggaataccgtgacaaccaggccgatgcc

SEQ ID NO: 162428 - DNA, 75 bp, synthetic construct
  source 1..75: mol_type = other DNA
tgctaataataatgcaaagtttgtagtttttgaattagatagaattgaaagggacgttatcgaagggcgtttatc

SEQ ID NO: 162429 - DNA, 75 bp, synthetic construct
  source 1..75: mol_type = other DNA
cgccacctggacgggtgattccagtcagtttccgctgtgtgaggaactgttcacttacgacaaaaacctgaacat

SEQ ID NO: 162430 - DNA, 75 bp, synthetic construct
  source 1..75: mol_type = other DNA
tcatgacgccctgcatcaggtgcgcgagactgttgcgccagacggcggcatcacgcagaccgaacaggatatgct

SEQ ID NO: 162431 - DNA, 75 bp, synthetic construct
  source 1..75: mol_type = other DNA
atgacaatggttttatggcagaatgcgataccttccagttctcgcatttatggcatgagtacacatcagaaggct

SEQ ID NO: 162432 - DNA, 75 bp, synthetic construct
  source 1..75: mol_type = other DNA
gcgtttgttgattataaaatcaacctgcttgacaaaaacaatttcacggatgttctgggtattaacacagatgat

SEQ ID NO: 162433 - DNA, 75 bp, synthetic construct
  source 1..75: mol_type = other DNA
ggtgcggcaaaaggtgtcagcagcggtacagtgggtgatgtctgcgagccgctggaccacagcgagacagtattt

SEQ ID NO: 162434 - DNA, 75 bp, synthetic construct
  source 1..75: mol_type = other DNA
gctgtgtgaggaactgttcacttatgacaaaaacctgaatattgcccgccgccagacatgggtaaatgaggtgct

SEQ ID NO: 162435 - DNA, 75 bp, synthetic construct
  source 1..75: mol_type = other DNA
ggcggagcgaggccgggttttaccagacgctggcatacacgcgcacagggatgccagcgaagcagaatgccgggg

SEQ ID NO: 162436 - DNA, 75 bp, synthetic construct
  source 1..75: mol_type = other DNA
gcaggttatcgcagacagtgtaatcagtgcgcgaacggcgcgaccgggcggcaaaaaaggtcaacagggccaggc

SEQ ID NO: 162437 - DNA, 75 bp, synthetic construct
  source 1..75: mol_type = other DNA
cgaacttgtgagcgtggcgggtaacatgcaggtaagccagtggacaggccagaacggcgcgcccgggcggcaaaa

SEQ ID NO: 162438 - DNA, 75 bp, synthetic construct
  source 1..75: mol_type = other DNA
cccttccgtgcagccaggcagatgacggaacggcgacgatgtggttatccgtcctggcatttggcagacaggccg

SEQ ID NO: 162439 - DNA, 75 bp, synthetic construct
  source 1..75: mol_type = other DNA
gtgctggcgtttggcagacaagccgatgcgctggcaaagcatcacaaaggcgaactcctgagcgtggcgggtaac

SEQ ID NO: 162440 - DNA, 75 bp, synthetic construct
  source 1..75: mol_type = other DNA
ttcttgcatctagaccattcaagaatagccgcgaaacgttgtcattacaacacaggcgactatatgacgctcgca

SEQ ID NO: 162441 - DNA, 75 bp, synthetic construct
  source 1..75: mol_type = other DNA
atgcagatgagccagtggactggacagaacggcgaaacgcggcagggctggcaggttatcgcagacagcgtaatc

SEQ ID NO: 162442 - DNA, 75 bp, synthetic construct
  source 1..75: mol_type = other DNA
acagcaaaacgccggagtacaaaacccgcaaccgtcatggggacaaccatcacagagtcacagcggtgatatgtt

SEQ ID NO: 162443 - DNA, 75 bp, synthetic construct
  source 1..75: mol_type = other DNA
gccacaaaacacaggggcacagacctcatcacggggacatccaccgcagaataatcacgatgacctgttccctga

SEQ ID NO: 162444 - DNA, 75 bp, synthetic construct
  source 1..75: mol_type = other DNA
aagcctgcgcggtggtttgtctattggcctttcaggttttggcttctggagccacgatatcggcggctttgaaaa

SEQ ID NO: 162445 - DNA, 75 bp, synthetic construct
  source 1..75: mol_type = other DNA
atgacagcacagatagcggcttacggacggctggtggctgacccgcagttaaagaccaccagcaagggtacacaa

SEQ ID NO: 162446 - DNA, 75 bp, synthetic construct
  source 1..75: mol_type = other DNA
gtcctggcatttggcagacaggccgaagcactggaaaggcaccgcaagggtgaactcctgagcgtggcgggcatt

SEQ ID NO: 162447 - DNA, 75 bp, synthetic construct
  source 1..75: mol_type = other DNA
aaaacagaccagcaagggcacacccatgacgctggcacggatggcggtatccgtaccgtgccataacgcagacga

SEQ ID NO: 162448 - DNA, 75 bp, synthetic construct
  source 1..75: mol_type = other DNA
gtccgctaaatccacagtataaaaccaagaaaaagacggtgtttcagaaggtctcagcattcattgataagttca

SEQ ID NO: 162449 - DNA, 75 bp, synthetic construct
  source 1..75: mol_type = other DNA
gtgagctggagacccgctttcctgacccggcagatatcacttctgaaaaagagaaaaaagccttcatcaaactgt

SEQ ID NO: 162450 - DNA, 75 bp, synthetic construct
  source 1..75: mol_type = other DNA
acggttttcaggattactaccgcgacctggctaaacgggttaagtctcaggaagtggacctgctgattgtagtgg

SEQ ID NO: 162451 - DNA, 75 bp, synthetic construct
  source 1..75: mol_type = other DNA
gagcgatggcattctggataagacccgtaaaatccatatcgactatatttgcgactttatttttgacgacgggcg

SEQ ID NO: 162452 - DNA, 75 bp, synthetic construct
  source 1..75: mol_type = other DNA
atcattcgtgcctcgatggcttatccaaagctcccctttgatatcgagcactccaccgaactgaaaggcccgaaa

SEQ ID NO: 162453 - DNA, 75 bp, synthetic construct
  source 1..75: mol_type = other DNA
cagagtatatggaaggctttactgatactgctactggtgaagctaaacgcggcttcatgacagtagtttcagaac

SEQ ID NO: 162454 - DNA, 75 bp, synthetic construct
  source 1..75: mol_type = other DNA
atgcaggtaagccagtggaccggacagaacggggagacgcgtcagggttatcaggtcattgccgacagcgtaatc

SEQ ID NO: 162455 - DNA, 75 bp, synthetic construct
  source 1..75: mol_type = other DNA
acttcctggctaaacatcaaaaaggcgacgttgccagcatatctggcgtgatgcagataagccagtggaccggac

SEQ ID NO: 162456 - DNA, 75 bp, synthetic construct
  source 1..75: mol_type = other DNA
ggtctgtttgtgacgatggtcgaaacattcaggcgtgaactttcggctttttctgcgcaatctccagccggagat

SEQ ID NO: 162457 - DNA, 75 bp, synthetic construct
  source 1..75: mol_type = other DNA
ttttacaccaacccggacaggcgtaatactcaataataaagagttccccgtcaccatttacaacgtgaccccatt

SEQ ID NO: 162458 - DNA, 75 bp, synthetic construct
  source 1..75: mol_type = other DNA
atgctcaataacaaagtgctacctgtaaccatttacaacatagtaccattcaataaaacattctggaatttaatc

SEQ ID NO: 162459 - DNA, 75 bp, synthetic construct
  source 1..75: mol_type = other DNA
cactgccatgcagtcaggcgcaggacgggcaggctacgttatggctgtcggtcctggcatttggcaaacaggccg

SEQ ID NO: 162460 - DNA, 75 bp, synthetic construct
  source 1..75: mol_type = other DNA
aatcaaaacagatttcaattcgtatcccacatgatgcttttgaaggcatggaatccgtaaaactggacggcgaaa

SEQ ID NO: 162461 - DNA, 75 bp, synthetic construct
  source 1..75: mol_type = other DNA
cccactagatgttatgcaagggatggaatccgttaagctggacggcgaaagcaatgccggatttatcgtaaccgc

SEQ ID NO: 162462 - DNA, 75 bp, synthetic construct
  source 1..75: mol_type = other DNA
gcaagcgaaggacagattcaagctcatgaattccgtcccgaccttcctgaattgtttccgcatccacattcagcc

SEQ ID NO: 162463 - DNA, 75 bp, synthetic construct
  source 1..75: mol_type = other DNA
atgtctcttgttttacgtaaattaaaacaggtaatactgatatcctcgctttgttttatttccgtcggggtttac

SEQ ID NO: 162464 - DNA, 75 bp, synthetic construct
  source 1..75: mol_type = other DNA
cgcaaatgacaacgatcagggttccccacgatgttatggagggcatggaatccgtaaaactggacggcgaaagca

SEQ ID NO: 162465 - DNA, 75 bp, synthetic construct
  source 1..75: mol_type = other DNA
aatttggtaaaagaagaaaacgaaacagacgcacaatttatcgttactgccatgcgcggtgagatcaaacgccgc

SEQ ID NO: 162466 - DNA, 75 bp, synthetic construct
  source 1..75: mol_type = other DNA
atgaatgaccgtgactttatgcgttacagccgtcaaatcctgctcgacgatatcgctcttgacgggcagcaaaaa

SEQ ID NO: 162467 - DNA, 75 bp, synthetic construct
  source 1..75: mol_type = other DNA
cgcaggtctgccaacagcgactgacgcaattgaatcccgatattcaactgatggcattacaacaacggctaacgg

SEQ ID NO: 162468 - DNA, 75 bp, synthetic construct
  source 1..75: mol_type = other DNA
ggtatcggaactctggtgctggcagatgacgacgatgtgcatttgagtaatctgcagcggcaaatcctctttacc

SEQ ID NO: 162469 - DNA, 75 bp, synthetic construct
  source 1..75: mol_type = other DNA
gctttttccacatccaagcttagcgcgcacgggggaggtgaagggcttgtatgtcccagaattacgttcagacag

SEQ ID NO: 162470 - DNA, 75 bp, synthetic construct
  source 1..75: mol_type = other DNA
gcaaataaagttgctttcgcggaaagaatttttaatgaaggcggcgcgggcgcaaaaaattacgcaattgtagat

SEQ ID NO: 162471 - DNA, 75 bp, synthetic construct
  source 1..75: mol_type = other DNA
caatgggttaccgccgccagaaaagggctcggtactcctggttcccgcacggtggctgaactggaatctgaaatt

SEQ ID NO: 162472 - DNA, 75 bp, synthetic construct
  source 1..75: mol_type = other DNA
acctggctgaacaggcggaacagtgtaccggtggcagtgctgctggcgttccgtggatttgtggcgataccacgt

SEQ ID NO: 162473 - DNA, 75 bp, synthetic construct
  source 1..75: mol_type = other DNA
gtcctggcatttggtaagcaggccgacgcgctggcgagacatgaaaaaggtgaccttatcagcgttgcaggtaat

SEQ ID NO: 162474 - DNA, 75 bp, synthetic construct
  source 1..75: mol_type = other DNA
atttcctggctaaacatcaaaaaggcgatgttgccagcgtatccggcacgatgcaggtaagccagtggaccggac

SEQ ID NO: 162475 - DNA, 75 bp, synthetic construct
  source 1..75: mol_type = other DNA
caaatcttatcgtgtgaggtgtactggcaatagcggatactaccatttgttcttttttaagcagccatctgatga

SEQ ID NO: 162476 - DNA, 75 bp, synthetic construct
  source 1..75: mol_type = other DNA
tttggtttgctttccagccatagccgtttacatggcagcaaatcttatcgtgtgccgtgggcctacgatgatgag

SEQ ID NO: 162477 - DNA, 75 bp, synthetic construct
  source 1..75: mol_type = other DNA
taaccacttcatttaccaccaactacgacgaagcgacggtaaacagctttatcgatggtatggcggaacgcaatc

SEQ ID NO: 162478 - DNA, 75 bp, synthetic construct
  source 1..75: mol_type = other DNA
cacatagatatatagaaaaattacttcaagaagccactgatggaaaaatggcaacttatggaagtatgatttcgt

SEQ ID NO: 162479 - DNA, 75 bp, synthetic construct
  source 1..75: mol_type = other DNA
ggtaagtcttacggctggactgagtgcaataccttcgaagggtattacgattggtcgagaaacaaatggtgggca

SEQ ID NO: 162480 - DNA, 75 bp, synthetic construct
  source 1..75: mol_type = other DNA
ggttcctgccccttcctgggcagcatttacgatgctgacccggtatttaagaaagaccttgatgatgcactgaag

SEQ ID NO: 162481 - DNA, 75 bp, synthetic construct
  source 1..75: mol_type = other DNA
gtgctggcgtttggcagacaagccgacgcgctggcaaagcatcacaaaggcgaactcctgagcgtggcgggtaat

SEQ ID NO: 162482 - DNA, 75 bp, synthetic construct
  source 1..75: mol_type = other DNA
agtgtgtgggctatactggatagtttatggtataaaacacaggttcttgctgatacaatttacaagcttggtgat

SEQ ID NO: 162483 - DNA, 75 bp, synthetic construct
  source 1..75: mol_type = other DNA
atggcggtttaggcgcgttatttacttttattggagtagctattgcattgcttataacaacgtttgtttttatgt

SEQ ID NO: 162484 - DNA, 75 bp, synthetic construct
  source 1..75: mol_type = other DNA
cttaattcgttcaagccttgggaaccgtgccaaagaaggtctggtggtcgattttattcagcaaacgaacctgga

SEQ ID NO: 162485 - DNA, 75 bp, synthetic construct
  source 1..75: mol_type = other DNA
atggcaactttaacaaaaaaagaacgggcatggttgaatgaattacagaacgttcttgatcgctgtccatcaccg

SEQ ID NO: 162486 - DNA, 75 bp, synthetic construct
  source 1..75: mol_type = other DNA
cgctaccggcggagctggcggtgatgctgggaaggctggagcgggaactgcgcgcgggagcggtgagtgcggaga

SEQ ID NO: 162487 - DNA, 75 bp, synthetic construct
  source 1..75: mol_type = other DNA
gcaggacaatatcgactgcgaatcgggaattatctttgacaacgatgaggataaaacggattcggcagcactgct

SEQ ID NO: 162488 - DNA, 75 bp, synthetic construct
  source 1..75: mol_type = other DNA
ataaaacggattcggcagcactactgccctgcattgaacaggccagggaagatatccataccctgcgccagttgc

SEQ ID NO: 162489 - DNA, 75 bp, synthetic construct
  source 1..75: mol_type = other DNA
gaggcattctttacgtttgctcaacgcgaacagcaacgtgaagcagaagcattgataaaagaagaaaatctcaat

SEQ ID NO: 162490 - DNA, 75 bp, synthetic construct
  source 1..75: mol_type = other DNA
taaaatgtacgcggtcgatgctgttgccgctattgcagaggtgagaggctggaatgcctgtcgtgccgctatgct

SEQ ID NO: 162491 - DNA, 75 bp, synthetic construct
  source 1..75: mol_type = other DNA
gccggactgtgacttaccagataaggcaatgaactacctagagcagcacagattggtgggcgtggaggatgccct

SEQ ID NO: 162492 - DNA, 75 bp, synthetic construct
  source 1..75: mol_type = other DNA
attattgaggtctacgccactccccccgttccagtagtaccggaagaaaaaccaatgcctaatcctcttagcatg

SEQ ID NO: 162493 - DNA, 75 bp, synthetic construct
  source 1..75: mol_type = other DNA
cccaacagacaagaatccagacggtataccagccgggaagcttcacgccgctcctgagaatcgaaacagagaatg

SEQ ID NO: 162494 - DNA, 75 bp, synthetic construct
  source 1..75: mol_type = other DNA
atgcgaggagccgtactcaggacagataaagggatgtatcgtgcacacggacaggaaatttttccagggcatggg

SEQ ID NO: 162495 - DNA, 75 bp, synthetic construct
  source 1..75: mol_type = other DNA
ttattccgctggttttacttctggcaatgatctttgcgtttttacttaactggccaatattgctgcatttttacg

SEQ ID NO: 162496 - DNA, 75 bp, synthetic construct
  source 1..75: mol_type = other DNA
acaatatcgactgtgaatccgggattatcttcgacaacgatgaggataagacggattcggcagcactgttgccct

SEQ ID NO: 162497 - DNA, 75 bp, synthetic construct
  source 1..75: mol_type = other DNA
tagaccgctggggggcttgggctgcagcagaaaatagtggtgtcgactggcagccgatagcggctggtttcaagg

SEQ ID NO: 162498 - DNA, 75 bp, synthetic construct
  source 1..75: mol_type = other DNA
atgcctgccgggtttacccactttcgactggtaaccagaaacaacatgaaatcattaaccacggaaacggctctg

SEQ ID NO: 162499 - DNA, 75 bp, synthetic construct
  source 1..75: mol_type = other DNA
taaggctgatgatgtattctgggttaaacatggcgttttgcgttcaactgatctaagagacagtatggatgagca

SEQ ID NO: 162500 - DNA, 75 bp, synthetic construct
  source 1..75: mol_type = other DNA
ggccacgggtaagagccagaccatgaacagccgccaccttacggggcatgccgtggatgttgtggcttatatcgg

SEQ ID NO: 162501 - DNA, 75 bp, synthetic construct
  source 1..75: mol_type = other DNA
gaaattttcattcctaataataccagtgctccttgggctggtttatttcttcaaggtgaaaggcttttataatta

SEQ ID NO: 162502 - DNA, 75 bp, synthetic construct
  source 1..75: mol_type = other DNA
atgcctgccgggtttacccactttcaactggtaaccagcaacaacatgaaatcattaaccacggaaaccgctctg

SEQ ID NO: 162503 - DNA, 75 bp, synthetic construct
  source 1..75: mol_type = other DNA
atgcctgccgggtttacccactttcaactggtaaccagaaacaacatgaaatcattaaccacggaaacagctctg

SEQ ID NO: 162504 - DNA, 75 bp, synthetic construct
  source 1..75: mol_type = other DNA
atgaaatcattaaccacagaaacggcgctggatattctgattgcgtggatgcaggacaatattgactgcgaatca

SEQ ID NO: 162505 - DNA, 75 bp, synthetic construct
  source 1..75: mol_type = other DNA
atgcctgccgggtttacccactttccactggtaaccagaaacaacatgaaatcattaaccacggaaaccgctctg

SEQ ID NO: 162506 - DNA, 75 bp, synthetic construct
  source 1..75: mol_type = other DNA
atgcctgccgggtttacccactttctactggtaaccagaaacaacatgaaatcattaaccacggaaactgctctg

SEQ ID NO: 162507 - DNA, 75 bp, synthetic construct
  source 1..75: mol_type = other DNA
atgcctgccgggtttacccactttcaactggtaaccaggaacaacatgaaatcattaaccacggaaacggctctg

SEQ ID NO: 162508 - DNA, 75 bp, synthetic construct
  source 1..75: mol_type = other DNA
tcgcagagcagtatctcgacagccccagtgacagcagcctggacaaaacccgtaaaatccatatcgactatatct

SEQ ID NO: 162509 - DNA, 75 bp, synthetic construct
  source 1..75: mol_type = other DNA
cggagttcgagaaaaagctgaaagagagagccgaatctacagagacaatgctgaacgacgagttcagcaagctcg

SEQ ID NO: 162510 - DNA, 75 bp, synthetic construct
  source 1..75: mol_type = other DNA
gctacgatgaatacggcaggctggcggagaagacggaccgtatcccggaaggggtgatacggatgcacgacgagc

SEQ ID NO: 162511 - DNA, 75 bp, synthetic construct
  source 1..75: mol_type = other DNA
cagattgccgccaccgagcgaatcctctggaaaattaacagctcatttaaaatgaagaactggtcaaaacccgaa

SEQ ID NO: 162512 - DNA, 75 bp, synthetic construct
  source 1..75: mol_type = other DNA
gacgtcaccattctggtcaacggcctgccactggtgcaaatcgaactcaaaaagcgcggcgtggcgattcgtgaa

SEQ ID NO: 162513 - DNA, 75 bp, synthetic construct
  source 1..75: mol_type = other DNA
gccagcgtatttggtcgtgaattgcattcgtatgtgattaccgatgcgattcgtgatgaaaaagtgctcaaattc

SEQ ID NO: 162514 - DNA, 75 bp, synthetic construct
  source 1..75: mol_type = other DNA
tgaagaagaatagcgatgctcaagtagtagcgtctttcagtgatgaaggtctatccggttacaaaggtaagcatc

SEQ ID NO: 162515 - DNA, 75 bp, synthetic construct
  source 1..75: mol_type = other DNA
ctcaaacgagacgaaaatcaaaggcgctatagcccggtttacggcctcgacggaggaatcgctggaaaaacaccg

SEQ ID NO: 162516 - DNA, 75 bp, synthetic construct
  source 1..75: mol_type = other DNA
agtctcaggaaataaacctggattatatccttggactgattttcgaacacaacaggcaaaataaaggcaagggcg

SEQ ID NO: 162517 - DNA, 75 bp, synthetic construct
  source 1..75: mol_type = other DNA
gttccagaggttttaatgccatgctggcagtaagcagcgtggatgctgcgaaagtctattacgcgacgtttaaac

SEQ ID NO: 162518 - DNA, 75 bp, synthetic construct
  source 1..75: mol_type = other DNA
cgattaccagacgatgaaggaatatcagcgtttttcgccagatagtgttaacggctcggaaaatacagcaggtct

SEQ ID NO: 162519 - DNA, 75 bp, synthetic construct
  source 1..75: mol_type = other DNA
ggcagtgagtagcgtggatgccgcgaaagcctattacgcgacgtttaaacggttacaagaggaagcagctaataa

SEQ ID NO: 162520 - DNA, 75 bp, synthetic construct
  source 1..75: mol_type = other DNA
aggcattttcccgcaccaaccgcatttatgacgctactaaaaccttcggtaatatcgtcacgttccgggatctgg

SEQ ID NO: 162521 - DNA, 75 bp, synthetic construct
  source 1..75: mol_type = other DNA
caattcgtctccctgctgatcgcaagattcaggattatcgttctgcctataacgatattcgcgactggtgcgtat

SEQ ID NO: 162522 - DNA, 75 bp, synthetic construct
  source 1..75: mol_type = other DNA
aacgctcaaccattgatgccataacgctgtttggtgataaaaataccaaaaatgtagtgttagaaaagagttatg

SEQ ID NO: 162523 - DNA, 75 bp, synthetic construct
  source 1..75: mol_type = other DNA
cagtgccagtagtacctgaagaaaaaccaatgcccaaccctcttaaaatgtacgcggtcgatgctgttgccgcta

SEQ ID NO: 162524 - DNA, 75 bp, synthetic construct
  source 1..75: mol_type = other DNA
acaagcgacagctaccagagcgaatcggacctggaacgtgaactgattcaggacctgcggaatcagggttatgaa

SEQ ID NO: 162525 - DNA, 75 bp, synthetic construct
  source 1..75: mol_type = other DNA
gcctttaaccagatacaccgttacagcaaggaaagctttaacagcgataactccctgtttaaatacctgcaactc

SEQ ID NO: 162526 - DNA, 75 bp, synthetic construct
  source 1..75: mol_type = other DNA
ttattcagcaaacgaacctggatgatttaccagacaaagccagtatcattgaggcattctttacgtttgctcaac

SEQ ID NO: 162527 - DNA, 75 bp, synthetic construct
  source 1..75: mol_type = other DNA
aggaatttctggatgcagccattgatgactataacgcctgctttaaaaccaatttcagcactgacagtaacggct

SEQ ID NO: 162528 - DNA, 75 bp, synthetic construct
  source 1..75: mol_type = other DNA
cgattaccagaccatgaaggagtaccagcgcttctctccggacagtgtgaatggttcggataatacagcaggcct

SEQ ID NO: 162529 - DNA, 75 bp, synthetic construct
  source 1..75: mol_type = other DNA
tgcagattatccagcagtttgaacaggcaggctctcacgccaatcgctacgatgtcaccattctggtcaatggcc

SEQ ID NO: 162530 - DNA, 75 bp, synthetic construct
  source 1..75: mol_type = other DNA
ggcagtgagcagcgtggatgctgcaaaagcctattacgcggcgtttaaacggttacaagaggaagcagctaataa

SEQ ID NO: 162531 - DNA, 75 bp, synthetic construct
  source 1..75: mol_type = other DNA
ggcgcggcaccgtagcctggcggaggtgttgcaggaggacacgggtgtgacgctaccggcggagctggcggtgat

SEQ ID NO: 162532 - DNA, 75 bp, synthetic construct
  source 1..75: mol_type = other DNA
gaccggcaggtgatgctggtccggcaggcccgcaggggccgaaaggtgacaggggagagcggggagagaccggtc

SEQ ID NO: 162533 - DNA, 75 bp, synthetic construct
  source 1..75: mol_type = other DNA
gttaaggtgcgccagctcgacccactgccgctttctgttctggcggtcctgccgcgattgactgtcgggggattc

SEQ ID NO: 162534 - DNA, 75 bp, synthetic construct
  source 1..75: mol_type = other DNA
catatgctgataccgaccttttccgcataaaattcacgcagagcgctgacgttctgacgctggtgcatcctgcat

SEQ ID NO: 162535 - DNA, 75 bp, synthetic construct
  source 1..75: mol_type = other DNA
aggccgacgaaaatgacattcgtttgccgggcgaagtggcgttctttatcgccaagcgtctacgatctaacgtac

SEQ ID NO: 162536 - DNA, 75 bp, synthetic construct
  source 1..75: mol_type = other DNA
gaaggcagcgaggatgctgtttacttcgtggttaaccgtactatcaatgggcagaccgtacgttacatcgaacgc

SEQ ID NO: 162537 - DNA, 75 bp, synthetic construct
  source 1..75: mol_type = other DNA
accaacgaaccggtggctaaagagctgcgcggcgatatcatctcggtaacaagcaataccgcagttaccgtccga

SEQ ID NO: 162538 - DNA, 75 bp, synthetic construct
  source 1..75: mol_type = other DNA
atggcttttagctggattcaaccgagctttgccggtggtgaaattggtccgtcactgtatggccgcattgatatg

SEQ ID NO: 162539 - DNA, 75 bp, synthetic construct
  source 1..75: mol_type = other DNA
ccttgcccaatatactcaacatgagctggataaagtcgcaactcagctaaacaacaggccaagaaagacactgaa

SEQ ID NO: 162540 - DNA, 75 bp, synthetic construct
  source 1..75: mol_type = other DNA
ttctctgcatggcctaccacgcgcaatatgtttacagcatgggtgggttcgtgttttaactatatattcctcaat

SEQ ID NO: 162541 - DNA, 75 bp, synthetic construct
  source 1..75: mol_type = other DNA
atcgatccgtctttaccagtcaggaatgaaagttggtacatgtggtgcaatttctttaatccatgatcacccgaa

SEQ ID NO: 162542 - DNA, 75 bp, synthetic construct
  source 1..75: mol_type = other DNA
tcgacgatattcagttttttgctaataaagaacgatctcaggaagagtttttccacacctttaacgccctgctgg

SEQ ID NO: 162543 - DNA, 75 bp, synthetic construct
  source 1..75: mol_type = other DNA
ttatcgacttttgttcgagtggagtccgccgtgtcactttcgctttggcagcagtgtcttgcccgattgcaggat

SEQ ID NO: 162544 - DNA, 75 bp, synthetic construct
  source 1..75: mol_type = other DNA
tcagagctcctggcagcggggaacaaacgaaaacactaatgggctaatccgacagtactttcccaaaaagacatg

SEQ ID NO: 162545 - DNA, 75 bp, synthetic construct
  source 1..75: mol_type = other DNA
gctgtgcgtcagggtaaacttccggacggttcagatctctcccgtatggtaaatggtgtgaataagcaccgcagc

SEQ ID NO: 162546 - DNA, 75 bp, synthetic construct
  source 1..75: mol_type = other DNA
gtcgccatatatgcagggaacggatacgcgttttgcctcctcacgaccgaatattttttccgcctttcccgataa

SEQ ID NO: 162547 - DNA, 75 bp, synthetic construct
  source 1..75: mol_type = other DNA
aagacaccttgcgtttactggaaaaaatcgccccttctgcacataaaattggcgcatcgagcgcaattgaagcac

SEQ ID NO: 162548 - DNA, 75 bp, synthetic construct
  source 1..75: mol_type = other DNA
gtgatgcgggctactacagtcatgaagacaactactacgccagcggttcactggagtcccgctggatgggggagg

SEQ ID NO: 162549 - DNA, 75 bp, synthetic construct
  source 1..75: mol_type = other DNA
gactgatgagagctcgatggtgggcaaccgtgatatggcggagctctaccagctggttgccgccggtggcgggcg

SEQ ID NO: 162550 - DNA, 75 bp, synthetic construct
  source 1..75: mol_type = other DNA
tttgacggcaggccagcgggaggccacgcggacagtgctggaaaacaccgaccgctttatggccattcagggcta

SEQ ID NO: 162551 - DNA, 75 bp, synthetic construct
  source 1..75: mol_type = other DNA
tcatcagcggtaccaccaatggtaccaccgcagtaaccgattacagcactctaccggaaggcatctggagcggcg

SEQ ID NO: 162552 - DNA, 75 bp, synthetic construct
  source 1..75: mol_type = other DNA
aacttgatgttattaacgattctctcgccgaatttaaatgtgggaatacattacatagtttcattcagatttccc

SEQ ID NO: 162553 - DNA, 75 bp, synthetic construct
  source 1..75: mol_type = other DNA
cctgcacagcggtttcggcattgcaaaaataacagcagtgtctggcgatggcctcacagcaactgccgatgtggt

SEQ ID NO: 162554 - DNA, 75 bp, synthetic construct
  source 1..75: mol_type = other DNA
aatagctctggtaacggtgtttaccggtataggtgtggcgcaggctgctgacgtaacagctcaggctgtagcgac

SEQ ID NO: 162555 - DNA, 75 bp, synthetic construct
  source 1..75: mol_type = other DNA
atgactcactgggacatcacgtcctcaattcaactcgggaagaaatacaatgaaaaaaaggttctggcaatagct

SEQ ID NO: 162556 - DNA, 75 bp, synthetic construct
  source 1..75: mol_type = other DNA
taccgccaacggcgtactgggcggcaaccttagcccgctggctaacggttacaatgccagcaatcgtaccaccgc

SEQ ID NO: 162557 - DNA, 75 bp, synthetic construct
  source 1..75: mol_type = other DNA
aagtgcaatttctgggagagtcacagcaaagtgaagaatctgcgaactctgccgattcgccctggtttgaaagct

SEQ ID NO: 162558 - DNA, 75 bp, synthetic construct
  source 1..75: mol_type = other DNA
agccaacagaatggcgaaaaggccaaaaccgtgcttactggatcaaaatttaccattgcgaaagcttgttctgga

SEQ ID NO: 162559 - DNA, 75 bp, synthetic construct
  source 1..75: mol_type = other DNA
ttgtcagccaaaatgagcattcgtgcgatagctactgcgctgaatcgcagtccttcgacgatctcacgtgaagtt

SEQ ID NO: 162560 - DNA, 75 bp, synthetic construct
  source 1..75: mol_type = other DNA
tcgcggccattttcagccggatgaaaaactgcgaatgagtttgctgacgtcgcgctattcactcggcgtcgggcc

SEQ ID NO: 162561 - DNA, 75 bp, synthetic construct
  source 1..75: mol_type = other DNA
actggagtatcgccagcattgcgcgtaatttaggtttctcgcaaaccagctatttctgcaaagtgtttcgccaga

SEQ ID NO: 162562 - DNA, 75 bp, synthetic construct
  source 1..75: mol_type = other DNA
cagaagaagatattgagtttgttatggatacctttcagaggagcatgggtaaatccaaacctgtcagggatactc

SEQ ID NO: 162563 - DNA, 75 bp, synthetic construct
  source 1..75: mol_type = other DNA
ctgattgcgcccgtggcggtgattctggtggcggaaaacttaggtcatctcaaggcggtcgccgggatgaccgga

SEQ ID NO: 162564 - DNA, 75 bp, synthetic construct
  source 1..75: mol_type = other DNA
tcgtgttcgggctgattgctgtcgcaggcgcacgaatctgggtacaaaaccgtgtagatttgagccagaacggta

SEQ ID NO: 162565 - DNA, 75 bp, synthetic construct
  source 1..75: mol_type = other DNA
tgcgtcacccgccgtcaggaggtggttaatcaggcccgcaccctgctgaaaaacaacacacacgaaaacgactga

SEQ ID NO: 162566 - DNA, 75 bp, synthetic construct
  source 1..75: mol_type = other DNA
gagagaaaaccgccaggtgaccgtccctgctgaactgctggcgtccctgattcagaccgccgaacaggcactgtg

SEQ ID NO: 162567 - DNA, 75 bp, synthetic construct
  source 1..75: mol_type = other DNA
tatttcttccggcgtggcgatggagattatcagcaacgtgagcgaaaaccgccaggtgaccgtcccggctgaact

SEQ ID NO: 162568 - DNA, 75 bp, synthetic construct
  source 1..75: mol_type = other DNA
aacggtcagggcattaacccgaatatcagcatcgcgctgggcgggattatcgcctgtgggctggtttataccgtc

SEQ ID NO: 162569 - DNA, 75 bp, synthetic construct
  source 1..75: mol_type = other DNA
ttttgcaaagttttccgtcagacttatcaggttacgccgcaggtgtatcgacagcaagtgagtgaaaatgcggcg

SEQ ID NO: 162570 - DNA, 75 bp, synthetic construct
  source 1..75: mol_type = other DNA
tggtaatcgccgggcatttagttggttttgtattgtgcgggcaagttcgtctgcgtaatgatgatgtcgatttgg

SEQ ID NO: 162571 - DNA, 75 bp, synthetic construct
  source 1..75: mol_type = other DNA
tgcctccgcagtctcagtaccggcagtcgttaagtgcacgtgagaaagcggtgcgtatggagcgtcgtatagagc

SEQ ID NO: 162572 - DNA, 75 bp, synthetic construct
  source 1..75: mol_type = other DNA
gtaatctccttgaggatctcaataatccggtagagtgggttaaagggattggcaagatggcggctaagtcggtag

SEQ ID NO: 162573 - DNA, 75 bp, synthetic construct
  source 1..75: mol_type = other DNA
gcgcgtatccatttacccaatgcggtcgagaaaatcgccttcgatcgcttccatgtggcgaagcaactgggcgaa

SEQ ID NO: 162574 - DNA, 75 bp, synthetic construct
  source 1..75: mol_type = other DNA
tcatcgtgggaaaataagtgactatgggccacttgcaggtacgggaattaatccaaatactaacgctgatgatat

SEQ ID NO: 162575 - DNA, 75 bp, synthetic construct
  source 1..75: mol_type = other DNA
gcgaagagtatgaacatgcgccgccggcgacgaatcgccaaatctcaccgtatctcccgagcggacgatttcgca

SEQ ID NO: 162576 - DNA, 75 bp, synthetic construct
  source 1..75: mol_type = other DNA
actgagtgcggatatattcctgtgccccttccagctgcttctgcatcatcatcaaccgctctctgagggtgaaat

SEQ ID NO: 162577 - DNA, 75 bp, synthetic construct
  source 1..75: mol_type = other DNA
agactcgtgcgcctaatccccacgacaatacagttatttttgcaaagttttccgtcagacttatcaggttacgcc

SEQ ID NO: 162578 - DNA, 75 bp, synthetic construct
  source 1..75: mol_type = other DNA
gcatattcacgatgcctttgagaaactgacatggaacaaatccatgcacagcataaatgatgtacatgcgctttt

SEQ ID NO: 162579 - DNA, 75 bp, synthetic construct
  source 1..75: mol_type = other DNA
ccatcgatgattattgatgcaacacagactcgcgatccttctactattgatacagccgtcgatcttattaaccga

SEQ ID NO: 162580 - DNA, 75 bp, synthetic construct
  source 1..75: mol_type = other DNA
cacgcagggtctgcacggctgccagcacgccttgcgcggccggcccgtgctgttccccaacttttcgctcggcga

SEQ ID NO: 162581 - DNA, 75 bp, synthetic construct
  source 1..75: mol_type = other DNA
cgctttatcagtgaatcaggctcttacagataaattcctgagcttaccacctgaaccgccccgggaatcctggag

SEQ ID NO: 162582 - DNA, 75 bp, synthetic construct
  source 1..75: mol_type = other DNA
cggggataaacaactcggccccaaaactggtgagctggagtcgttccagagtattgaagacatcattgaagctta

SEQ ID NO: 162583 - DNA, 75 bp, synthetic construct
  source 1..75: mol_type = other DNA
ccaacaaaatgtttcttgatatgatcattgacatgggagagagtaaaattattcatggagacttacatatgggaa

SEQ ID NO: 162584 - DNA, 75 bp, synthetic construct
  source 1..75: mol_type = other DNA
tgaccgtccggggcatgacctgcgctatgccattgatgcttcgaaaattgcccgtgaacttggctggctgccgca

SEQ ID NO: 162585 - DNA, 75 bp, synthetic construct
  source 1..75: mol_type = other DNA
cggtccggcggcatttatcgaaaccaacattgtgggtacttacacacttcttgaagcggcgcgggcttactggaa

SEQ ID NO: 162586 - DNA, 75 bp, synthetic construct
  source 1..75: mol_type = other DNA
aggcgcacaattacatccgttactgaaccaaaaagcgatcgcagcggtgttccataaaggcgaaaatcctttagt

SEQ ID NO: 162587 - DNA, 75 bp, synthetic construct
  source 1..75: mol_type = other DNA
taaaaataacacaaccattactgagaccaaaactgacgttaaattttgatataaacccctccctcccctgcatcg

SEQ ID NO: 162588 - DNA, 75 bp, synthetic construct
  source 1..75: mol_type = other DNA
gctttgttgattatcagcgtgctggtgtgaaccgcatctctattggtgtgcagagttttagcgaagaaaagctga

SEQ ID NO: 162589 - DNA, 75 bp, synthetic construct
  source 1..75: mol_type = other DNA
tacgccgagcctgctttccggcccggcgatgcaaacgctgctggacggcgtacgtgcgcgtttgccgctggcagc

SEQ ID NO: 162590 - DNA, 75 bp, synthetic construct
  source 1..75: mol_type = other DNA
gggggcttgcaggagaagtatttaaggatccagataatcctggatatgttatcaaacgttataataaagctaatt

SEQ ID NO: 162591 - DNA, 75 bp, synthetic construct
  source 1..75: mol_type = other DNA
atgtcttttatttaacatatattatggtgaaggcagtgccgaattatttactgaaaacggacgaacctgtttacg

SEQ ID NO: 162592 - DNA, 75 bp, synthetic construct
  source 1..75: mol_type = other DNA
gatcattgacatgggagagagtaaaattattcatggagacttacatatgggaaatatcttatttgatgaaaagaa

SEQ ID NO: 162593 - DNA, 75 bp, synthetic construct
  source 1..75: mol_type = other DNA
gattttggcaaaagcaatcctacgcaggatgacgatagaattatctacacctatgccgggcgtcaggttaatgag

SEQ ID NO: 162594 - DNA, 75 bp, synthetic construct
  source 1..75: mol_type = other DNA
tcggtgcgcaactacagttcccttataccggaactgatcctgatactggcgatgaagtgtcaaaagaattacgtt

SEQ ID NO: 162595 - DNA, 75 bp, synthetic construct
  source 1..75: mol_type = other DNA
atcgactgctgccgttgggtcagcgccgaagaaattttacaggcgtcaaatcttcgttcgccgctggtggcggaa

SEQ ID NO: 162596 - DNA, 75 bp, synthetic construct
  source 1..75: mol_type = other DNA
gcctatgcctgtctgttcaaggttctgattcagtatattaatcaatatattaatacaaacagtgtagctatttct

SEQ ID NO: 162597 - DNA, 75 bp, synthetic construct
  source 1..75: mol_type = other DNA
tccaggagaaaggcagtgttgtccgtgatctggcctactcattcgatgttgacggctatcaggggaacgacctga

SEQ ID NO: 162598 - DNA, 75 bp, synthetic construct
  source 1..75: mol_type = other DNA
acagcaaggaaaaaagtttatatcctggtggtcccgaaagattcccgtggcggcatccggttatgtactgggtcg

SEQ ID NO: 162599 - DNA, 75 bp, synthetic construct
  source 1..75: mol_type = other DNA
tgggatgtggatagcctggaaagtgccattcgccttggattaaacaaggcgtgcgaggaagggattcgtatcgat

SEQ ID NO: 162600 - DNA, 75 bp, synthetic construct
  source 1..75: mol_type = other DNA
cggcatgaaacagaccatcagccgtgaagagttgatagcgctcggcaagcgcttcggcgttacaccactagccag

SEQ ID NO: 162601 - DNA, 75 bp, synthetic construct
  source 1..75: mol_type = other DNA
tggctgcttcagcgagtgcttcaggagcggcaaatcaacgatctcccggcgcactttctctcccactgcgagcgc

SEQ ID NO: 162602 - DNA, 75 bp, synthetic construct
  source 1..75: mol_type = other DNA
tccaacccagccccatgacagcgatatcgactgctgtcgttgggtcagcgccgatgagattttacaggcctcaaa

SEQ ID NO: 162603 - DNA, 75 bp, synthetic construct
  source 1..75: mol_type = other DNA
gagctgtgggaagagacgggcatcagcgcgcaaccgcaacattttatccgcatgcatcagtggattgcgccggat

SEQ ID NO: 162604 - DNA, 75 bp, synthetic construct
  source 1..75: mol_type = other DNA
aaaaattcaatgatatcaaatggttttgtaaaaacacatggttgttgtatcgctttttatcgatgacttatggag

SEQ ID NO: 162605 - DNA, 75 bp, synthetic construct
  source 1..75: mol_type = other DNA
agatgcagagcaggcggtgaatctggccatcccgcgcgcgcagcagggacaggtccatctcagtgaacttaccct

SEQ ID NO: 162606 - DNA, 75 bp, synthetic construct
  source 1..75: mol_type = other DNA
ccctggaccgggagaagggcatattcacctctgatattcatctgctgaacgaactcagcgtccatcaactggccc

SEQ ID NO: 162607 - DNA, 75 bp, synthetic construct
  source 1..75: mol_type = other DNA
gggcgcatcattatcccggaggaggtgaccagtagtgtgcacagtgtggcggacgctgaagtagcagcaaaaacg

SEQ ID NO: 162608 - DNA, 75 bp, synthetic construct
  source 1..75: mol_type = other DNA
gtcacgcgcaaaagagcatgtgcaggtctacaccgacaacctggcgggctggcgtgccgatgcccggcactcaaa

SEQ ID NO: 162609 - DNA, 75 bp, synthetic construct
  source 1..75: mol_type = other DNA
gacctcgcttacgccctgacggtgtatggcgtgcagggggccagtgaacgctttgccattgccctgaccggtacg

SEQ ID NO: 162610 - DNA, 75 bp, synthetic construct
  source 1..75: mol_type = other DNA
ggcaggaagagaatggcgtccctggaatccacctatgtgacgttgtcacgcgcaaaagagcatgtccaggtctac

SEQ ID NO: 162611 - DNA, 75 bp, synthetic construct
  source 1..75: mol_type = other DNA
gccctgcgtgcagctgaaacctttgcggagtacaccggggcggtggcgatgatgaatgaacgctactggacggta

SEQ ID NO: 162612 - DNA, 75 bp, synthetic construct
  source 1..75: mol_type = other DNA
ggtcgtggtgcccgccaacaggcacgtgaacagatactgcgtactgaacgtgagtgggtggtgaatatgccggaa

SEQ ID NO: 162613 - DNA, 75 bp, synthetic construct
  source 1..75: mol_type = other DNA
gcccatgattatgtggagggaaccggggcgggtaccagtgcatcacgcacggtactggccgcggttgggccacga

SEQ ID NO: 162614 - DNA, 75 bp, synthetic construct
  source 1..75: mol_type = other DNA
ccggatttatacgccactggaggccgggcaggccgcgcgtaaagtggagaatgtgtcttctgtccggcttgccag

SEQ ID NO: 162615 - DNA, 75 bp, synthetic construct
  source 1..75: mol_type = other DNA
cggcaggggacggggaatgctttgtctgtgctcaaagaggcggatattccccagtaccggttttacggcacacag

SEQ ID NO: 162616 - DNA, 75 bp, synthetic construct
  source 1..75: mol_type = other DNA
tactgccggtgcaggggactgttatcgtcgaccgggcggagcgactgtcgctgaaagagaccgtcctgctgcagg

SEQ ID NO: 162617 - DNA, 75 bp, synthetic construct
  source 1..75: mol_type = other DNA
tgttatttgcgatgatttatatatctacttctgcatggtctgctgataatttaaggtttaaagggaatctaatta

SEQ ID NO: 162618 - DNA, 75 bp, synthetic construct
  source 1..75: mol_type = other DNA
tgcagcgaatagtattcaaacaaacaagtactctcaagaaaagcttgcaatctatttaaaacaatcaaatgcatc

SEQ ID NO: 162619 - DNA, 75 bp, synthetic construct
  source 1..75: mol_type = other DNA
cgggagctgtaagtaataataagagtaatgtatatcttactgctggtatcgcacgggaaggggatatgtcattgt

SEQ ID NO: 162620 - DNA, 75 bp, synthetic construct
  source 1..75: mol_type = other DNA
gcacggcaaagtgaccttcccggatgggcgcattctgcgtaccaccaaaacgcgtcatccgcgtggttttatgca

SEQ ID NO: 162621 - DNA, 75 bp, synthetic construct
  source 1..75: mol_type = other DNA
gtggcttacgctcagggccgtgaagtaaagacaatctttattggcggtggtacgccgagcctgctttccggcccg

SEQ ID NO: 162622 - DNA, 75 bp, synthetic construct
  source 1..75: mol_type = other DNA
ttactgcaccaaaaagcgatcgcagcggtgttccataaaggcgaaaatcctttagttgacagttacagtgccttt

SEQ ID NO: 162623 - DNA, 75 bp, synthetic construct
  source 1..75: mol_type = other DNA
gctgtgcgtcagggaaagcttccggacggttctgacctctcccgtatggtcaatggagtgaataaacaccgcagc

SEQ ID NO: 162624 - DNA, 75 bp, synthetic construct
  source 1..75: mol_type = other DNA
gtgatgcgggctattacagccatgaagacaactactatgccagcggttcactggattcccgctggatgggggaag

SEQ ID NO: 162625 - DNA, 75 bp, synthetic construct
  source 1..75: mol_type = other DNA
aaatacccgacaccgtatgtggccctgccggcctggacccgtcacgggaaagcggccggggcgctgctgactgaa

SEQ ID NO: 162626 - DNA, 75 bp, synthetic construct
  source 1..75: mol_type = other DNA
actgtcaggcctgacagcaggtcagcgggaagccacacgaacggtactggagaataccgaccgctttatggccat

SEQ ID NO: 162627 - DNA, 75 bp, synthetic construct
  source 1..75: mol_type = other DNA
caaaaccgcccacgacctgctgcacgagaaaagtgaccgcgagtccgacaccggtaaccgtctgctggccaccgc

SEQ ID NO: 162628 - DNA, 75 bp, synthetic construct
  source 1..75: mol_type = other DNA
gacagcaaaacccgtcatcagcgcgataactaccgggccgggatggtgatggagcggtgggatgctgagaagaaa

SEQ ID NO: 162629 - DNA, 75 bp, synthetic construct
  source 1..75: mol_type = other DNA
atgagcatcgataaaagttactgcggatttattgccatcgtcggacgtccgaacgttggcaaatccactctgcta

SEQ ID NO: 162630 - DNA, 75 bp, synthetic construct
  source 1..75: mol_type = other DNA
ggggccaagattaaaaccatcggaattgaagcgcgtaaagacatgcaggaaatgttcgaagcgcctgtccacctt

SEQ ID NO: 162631 - DNA, 75 bp, synthetic construct
  source 1..75: mol_type = other DNA
gagctatgggtgaaagtgaaatctggttgggccgacgatgaacgcgcactgcgtagtctcggttacgttgacgat

SEQ ID NO: 162632 - DNA, 75 bp, synthetic construct
  source 1..75: mol_type = other DNA
ccgtcgctaagttcaaggctaaatatgttaaataccagcgcaaaaaccccgttcctggcattgaactgagggaaa

SEQ ID NO: 162633 - DNA, 75 bp, synthetic construct
  source 1..75: mol_type = other DNA
aagaatttttaacgggaacgcctgctgaagctattttctccgggtctgaaaaagctgttggtagcgcgcgatttg

SEQ ID NO: 162634 - DNA, 75 bp, synthetic construct
  source 1..75: mol_type = other DNA
ttgctggctggtttattggtgttggcggtctgatcgcttttatcatttatgataaatcacgcgtgtttaaaggcg

SEQ ID NO: 162635 - DNA, 75 bp, synthetic construct
  source 1..75: mol_type = other DNA
aggctaacgtcaacatcctcaccagcctgctattcctgcggcgtaagagtgaagaggaaaaacgcgccgaagcct

SEQ ID NO: 162636 - DNA, 75 bp, synthetic construct
  source 1..75: mol_type = other DNA
aaggtggtttccgcaatacggggtcattgaaaggtagtgtggccccggagattctcttcattgagcgatgcatca

SEQ ID NO: 162637 - DNA, 75 bp, synthetic construct
  source 1..75: mol_type = other DNA
catgaagaacgcttaaaaagagaagctgaagagaaagccagagcagaagccgaagcaaaggcaaaagccgaaatt

SEQ ID NO: 162638 - DNA, 75 bp, synthetic construct
  source 1..75: mol_type = other DNA
atgagcatcgataaaagttactgcggatttattgctatcgtcggacgtccgaacgttggcaaatccacattgttg

SEQ ID NO: 162639 - DNA, 75 bp, synthetic construct
  source 1..75: mol_type = other DNA
tgggatggaagagaattacactgttaagttcgagaatgatcttgttgggtcagatctgagaatcatgcaaaaatt

SEQ ID NO: 162640 - DNA, 75 bp, synthetic construct
  source 1..75: mol_type = other DNA
gtccttagggcgcagcaatgtagcaatccttcagaaacagcacctagaacagccttctgatgctaacgggatttt

SEQ ID NO: 162641 - DNA, 75 bp, synthetic construct
  source 1..75: mol_type = other DNA
cggcgcgccggaagagatgacggacagtgacgggaaaatcgtgtgggagacggggtatcaggtctggggtaacac

SEQ ID NO: 162642 - DNA, 75 bp, synthetic construct
  source 1..75: mol_type = other DNA
tactgtattttcacacggatgtgaacggcgcgccggaagagatgacggacagtgacgggaaaatcgtgtgggaga

SEQ ID NO: 162643 - DNA, 75 bp, synthetic construct
  source 1..75: mol_type = other DNA
gcaggttcgcattcgtgccgcccagtcgctgggtgccagccgtgcgcaggtgctgtggtttgtcattttgcccgg

SEQ ID NO: 162644 - DNA, 75 bp, synthetic construct
  source 1..75: mol_type = other DNA
agattcattagatgaggccaatttacaagtaagcctcgagattacatacttcagaaaaacaaatgatagcggtca

SEQ ID NO: 162645 - DNA, 75 bp, synthetic construct
  source 1..75: mol_type = other DNA
gtttgtagattcaattttatattttggtgtactaaacaaccatgtcatgatcgttcaatccacatcgcttcgagc

SEQ ID NO: 162646 - DNA, 75 bp, synthetic construct
  source 1..75: mol_type = other DNA
taactgatgttatatggtgtgtttccaaaagtgatgaaaaaaaagcaattgagaaaattggtataaaagaaacaa

SEQ ID NO: 162647 - DNA, 75 bp, synthetic construct
  source 1..75: mol_type = other DNA
agaacgcagcgccatctgtactacggcagcggccatctccagcagataaacctggaccgggaggtcatcagcgag

SEQ ID NO: 162648 - DNA, 75 bp, synthetic construct
  source 1..75: mol_type = other DNA
ggtaaaaccgtggttgttgaaggttgtgatgagaaactcgcgcctctggacctgattcgtctcggcatgaactaa

SEQ ID NO: 162649 - DNA, 75 bp, synthetic construct
  source 1..75: mol_type = other DNA
gggcgggctaccagacgtactctcagctgattgagcgctatggcatcaacatagcggaaacactgctgggaagta

SEQ ID NO: 162650 - DNA, 75 bp, synthetic construct
  source 1..75: mol_type = other DNA
tgacgcgcattatgttcgcgttacttgcggcagtgttaatcggcattccggttgggatcgccatggggctaagtc

SEQ ID NO: 162651 - DNA, 75 bp, synthetic construct
  source 1..75: mol_type = other DNA
gcccggtgcgctgccggaaattctcaccggattacgcattggtctgggtgtgggctggtctaccctggtggcggc

SEQ ID NO: 162652 - DNA, 75 bp, synthetic construct
  source 1..75: mol_type = other DNA
tgctgaagacgcggcacagccggcggggggaaacggactacttctatgacaccacggggcgcatcacggcgtgtc

SEQ ID NO: 162653 - DNA, 75 bp, synthetic construct
  source 1..75: mol_type = other DNA
cgatgaccggtaactgtgcggcgctggcggcgctggctgatgaacctggctacgcacaaatcaataccgaagacg

SEQ ID NO: 162654 - DNA, 75 bp, synthetic construct
  source 1..75: mol_type = other DNA
cgcgatgagtttaatccgccgtatatctttctacgggattatttagggatcgacccaacccaaactgtgtataca

SEQ ID NO: 162655 - DNA, 75 bp, synthetic construct
  source 1..75: mol_type = other DNA
tagaaaaattcgtgctggcgcgggtcgtggcatcacgtgttcactgccgtacaggcagcttagaaatgacgtcgc

SEQ ID NO: 162656 - DNA, 75 bp, synthetic construct
  source 1..75: mol_type = other DNA
ctggattttcggtgcgccgccggcgggggaaatcacggtagatgaaggcgcaactgccgccattcttgaacgcgg

SEQ ID NO: 162657 - DNA, 75 bp, synthetic construct
  source 1..75: mol_type = other DNA
gtgggtacgctgttccatgcccaggcgactccgcttgaaaaccgtaaacgctggattttcggtgcgccgccggcg

SEQ ID NO: 162658 - DNA, 75 bp, synthetic construct
  source 1..75: mol_type = other DNA
gataacaatatcgttccggtaatcaatgagaacgatgctgtcgctactgcagagattaaggtcggcgataacgat

SEQ ID NO: 162659 - DNA, 75 bp, synthetic construct
  source 1..75: mol_type = other DNA
agtgacgctctaaaatgctccccggcatggttgctttttggtgacgaagataagtctccgacgccagttgatgaa

SEQ ID NO: 162660 - DNA, 75 bp, synthetic construct
  source 1..75: mol_type = other DNA
tatttggaacgatgacaatataaataaatctctcatactgagggagttattgataatggaattcagaagacaatc

SEQ ID NO: 162661 - DNA, 75 bp, synthetic construct
  source 1..75: mol_type = other DNA
gtggatggatttcgtagtgacatgaacattaaaaagttagttaagctgatgaaaaaaaatataaatagcttaagt

SEQ ID NO: 162662 - DNA, 75 bp, synthetic construct
  source 1..75: mol_type = other DNA
tgatggccggcgtgtcctggtctcatcacacggcgtatggttttctgcgaacgagcctggcggcggatgttctgg

SEQ ID NO: 162663 - DNA, 75 bp, synthetic construct
  source 1..75: mol_type = other DNA
gtattggtgtggagtggagcagccagaaacagaacgactattattatggcgtatcgcgtcgtgaatctgcgcgca

SEQ ID NO: 162664 - DNA, 75 bp, synthetic construct
  source 1..75: mol_type = other DNA
atgaaagaataccgctattccggcccggccagcggcgtcacgctgtcggacggaaccgaaatcctgctctggccg

SEQ ID NO: 162665 - DNA, 75 bp, synthetic construct
  source 1..75: mol_type = other DNA
ggaaattccaaagctaattgatgccaaccgcaagacagtgcgcgatcgccttgatgaactgaaagccaaggcgcg

SEQ ID NO: 162666 - DNA, 75 bp, synthetic construct
  source 1..75: mol_type = other DNA
tcagaagatgttgctaaaaatatcataacagccatcgtaaaaggcgaagtattcgcaacaaaaataacctactaa

SEQ ID NO: 162667 - DNA, 75 bp, synthetic construct
  source 1..75: mol_type = other DNA
tattatactgttttattccgtatctattaaaggttattctgtttcctatcgcagaattttattataaatcatact

SEQ ID NO: 162668 - DNA, 75 bp, synthetic construct
  source 1..75: mol_type = other DNA
acccgccgtcacaccggctgtgcagtcaccaaagcgcagaagcagcagtgacagcgaagtgaaaacggaggacgc

SEQ ID NO: 162669 - DNA, 75 bp, synthetic construct
  source 1..75: mol_type = other DNA
tctctgttggtacgcgtggcgcatccaacacctatgaccacctgatcattcgcggttttgcggcagaaggccaaa

SEQ ID NO: 162670 - DNA, 75 bp, synthetic construct
  source 1..75: mol_type = other DNA
atggtcaggagattgtcgaaacactggcggaatacgctagcgtgccggtatggaatggcctgaccaatgagttcc

SEQ ID NO: 162671 - DNA, 75 bp, synthetic construct
  source 1..75: mol_type = other DNA
aaatgatgcagttgacgggtaatcccgaagtcaaattcctgcactgtctgcccgcatttcatgacgatcaaacca

SEQ ID NO: 162672 - DNA, 75 bp, synthetic construct
  source 1..75: mol_type = other DNA
tgcgtctggtcgcgccacaggcgtgctggccagaagctgcgctggttacggaatgccgcgccctggcacaacaaa

SEQ ID NO: 162673 - DNA, 75 bp, synthetic construct
  source 1..75: mol_type = other DNA
taaaaagtgtagctattggattacgaaatgactttatagtcaacccgaggaaaaatgatagccgaataaaactta

SEQ ID NO: 162674 - DNA, 75 bp, synthetic construct
  source 1..75: mol_type = other DNA
attatttaataccgttaaggcgttttatgatgatttcctgacaaataagggatctattgtttatatctcatcggg

SEQ ID NO: 162675 - DNA, 75 bp, synthetic construct
  source 1..75: mol_type = other DNA
cattgtatttttattagcggcgattatgattgcttttatggcatcgattatgagttaaaaaataaaagcgatgaa

SEQ ID NO: 162676 - DNA, 75 bp, synthetic construct
  source 1..75: mol_type = other DNA
ttatctattggtgaatatcagtatttattgttattagcaaatatgcatccgtcttacaggctggtaaaaaaataa

SEQ ID NO: 162677 - DNA, 75 bp, synthetic construct
  source 1..75: mol_type = other DNA
ctggttgagtttgagtttcttttgttacttgcaggagaacatcctgaatacgtgctctgcaaaagggaggtaaaa

SEQ ID NO: 162678 - DNA, 75 bp, synthetic construct
  source 1..75: mol_type = other DNA
tgccgcaagtgcgagtgcaactgctgcgaaaaaatctgaaacgaatgccgcagcgtcacaacaatcagcagccac

SEQ ID NO: 162679 - DNA, 75 bp, synthetic construct
  source 1..75: mol_type = other DNA
caacatgggcaattcgatgctggaagctgctgcgctgactggcctggatttacgcctggtggcaccgcaggcgtg

SEQ ID NO: 162680 - DNA, 75 bp, synthetic construct
  source 1..75: mol_type = other DNA
atggcgggaatattacgctgacggaagatgtagccaaaggagttgaaggtgctgactttatctataccgatgtat

SEQ ID NO: 162681 - DNA, 75 bp, synthetic construct
  source 1..75: mol_type = other DNA
gctgactttatctataccgatgtgtgggtgtcgatgggggaagcaaaagagaaatgggcagaacggattgcatta

SEQ ID NO: 162682 - DNA, 75 bp, synthetic construct
  source 1..75: mol_type = other DNA
gtcctggcgcgcctggaggacatcccggaagaacagcggattgagtccggtatttcttccgctgcggtgatggag

SEQ ID NO: 162683 - DNA, 75 bp, synthetic construct
  source 1..75: mol_type = other DNA
atgtacggaacatgcgaaacgctatgccgggagctggcagcaaagtatccgggagacacgcctctgatgctggtt

SEQ ID NO: 162684 - DNA, 75 bp, synthetic construct
  source 1..75: mol_type = other DNA
atgtacggaacatgcgaaacgctatgccggcagctggcagcaaagtattcgggagacacgccactgatgctggtt

SEQ ID NO: 162685 - DNA, 75 bp, synthetic construct
  source 1..75: mol_type = other DNA
cgtgagtgggccgcccgtgataacggcctcgtcgtcccggaatgcgtcacccgccgtcaggcggtggttaatcag

SEQ ID NO: 162686 - DNA, 75 bp, synthetic construct
  source 1..75: mol_type = other DNA
ccctgctgaaaaacacacacacgaaaacgactgatgttatcgccgcctccgggcggcgatacagggagttcatga

SEQ ID NO: 162687 - DNA, 75 bp, synthetic construct
  source 1..75: mol_type = other DNA
gccaggtgaccgtccctgctgaactgctggcgtccctgattcagaccgctgagcaggcattgtggaaacgtgaat

SEQ ID NO: 162688 - DNA, 75 bp, synthetic construct
  source 1..75: mol_type = other DNA
gtcctggcgcgcatggaggacatcccggaagaccagaggactgaatccggtatttcttccgccgcggtgatggag

SEQ ID NO: 162689 - DNA, 75 bp, synthetic construct
  source 1..75: mol_type = other DNA
tatttcttccgccgcggcgatggagattatcagcaacgtgagcgaaaaccgccaggtgaccgtccctgctgaact

SEQ ID NO: 162690 - DNA, 75 bp, synthetic construct
  source 1..75: mol_type = other DNA
atgtacggaacatgcgaaacgctatgccgggcgctggcagcaaagtatccgggagacacgccgttgatgctggtt

SEQ ID NO: 162691 - DNA, 75 bp, synthetic construct
  source 1..75: mol_type = other DNA
atgtacggaacatgcgaaacgctatgccggtagctggcagcaaagtatccgggagacacgccgctgatgctggtt

SEQ ID NO: 162692 - DNA, 75 bp, synthetic construct
  source 1..75: mol_type = other DNA
atgtacggaacatgcgaaacgctatgccggaagctggcagcaaagtattcgggagacacgcccctgatgctggtt

SEQ ID NO: 162693 - DNA, 75 bp, synthetic construct
  source 1..75: mol_type = other DNA
gccaggtgaccgtccctgctgaactgctggcgtccctgattcagaccgctgaacaggcattgtggaagcgtgaat

SEQ ID NO: 162694 - DNA, 75 bp, synthetic construct
  source 1..75: mol_type = other DNA
gatgagtgcgctttccggtgaggagctggccactatgtcatcatggtcatcagccagcatagctatgacgtttgc

SEQ ID NO: 162695 - DNA, 75 bp, synthetic construct
  source 1..75: mol_type = other DNA
attgaagcgtctgcgcgtaacgactacgccagcaacatgatctgcatcatgcacagcgacggttataaggtatcg

SEQ ID NO: 162696 - DNA, 75 bp, synthetic construct
  source 1..75: mol_type = other DNA
atcgctttggcagcgatccgttctcgctaattgaagcagcacgggatgaactaaccgagctggcacagatggctg

SEQ ID NO: 162697 - DNA, 75 bp, synthetic construct
  source 1..75: mol_type = other DNA
tcactggcaccgcaccgcccgtgacctgtgcctgccatttggtgaagacgtttatccccgttacaaaaagtggtg

SEQ ID NO: 162698 - DNA, 75 bp, synthetic construct
  source 1..75: mol_type = other DNA
cggcgggcgtagtcgggtgttgcgtaatggtggtgttttcgaacaggcaggcgtcaacttttctcacgtccacgg

SEQ ID NO: 162699 - DNA, 75 bp, synthetic construct
  source 1..75: mol_type = other DNA
tacgatttgtcagcagctgaccgccgtcgatggcgcagaatttgtcgaagatagttggcagcgcgaagctggcgg

SEQ ID NO: 162700 - DNA, 75 bp, synthetic construct
  source 1..75: mol_type = other DNA
ggtatcaagcaagcggccggcaatcggcttgagcaggtccagaacgcaatgactggcgttaatattcagccatca

SEQ ID NO: 162701 - DNA, 75 bp, synthetic construct
  source 1..75: mol_type = other DNA
tgaagcacaacaggctatccgtttcgctgattcagcagatgttccattgcacacatctgacgttctgcaacctaa

SEQ ID NO: 162702 - DNA, 75 bp, synthetic construct
  source 1..75: mol_type = other DNA
tgggtgatccccggtatgattgacgatcaggttcatttccgcgaacccggtctgacgcataagggaaccattgcc

SEQ ID NO: 162703 - DNA, 75 bp, synthetic construct
  source 1..75: mol_type = other DNA
acctcggtagcatcggcggtccggcggcggtactggcgcagcagagcatcaagcatctggaatgcgtcgcttatc

SEQ ID NO: 162704 - DNA, 75 bp, synthetic construct
  source 1..75: mol_type = other DNA
tatcctggtcgatgacaaaggtaacgacttcttccagcaaatcgtcaacaaacagtgcgcgaactgcactaagta

SEQ ID NO: 162705 - DNA, 75 bp, synthetic construct
  source 1..75: mol_type = other DNA
aaggccgccttgtcaatctaacggcgcttacaatgcaaactggaattatcagttgcaaggtaaagaatcttttgc

SEQ ID NO: 162706 - DNA, 75 bp, synthetic construct
  source 1..75: mol_type = other DNA
gtggatcccctgaccagttccttcgacagcttaacatcctgcaaaaccagactggcatcacatttaaggggcagg

SEQ ID NO: 162707 - DNA, 75 bp, synthetic construct
  source 1..75: mol_type = other DNA
gtcgcggactggtgcaggctggcgtgaacgtggcaaacatacctgcatcagttgccgatgctgtaacaagcgcgg

SEQ ID NO: 162708 - DNA, 75 bp, synthetic construct
  source 1..75: mol_type = other DNA
aaactaccttcaatcaacgcagcaggctgcaaaagcggctgtaacaacacccacaggccagcaaaccatcccgtt

SEQ ID NO: 162709 - DNA, 75 bp, synthetic construct
  source 1..75: mol_type = other DNA
tgatgaatacctccctaggaagaatcaagctacacaacagcctgtacagcaaagtacacaggcagcgccacagca

SEQ ID NO: 162710 - DNA, 75 bp, synthetic construct
  source 1..75: mol_type = other DNA
cctaacaacccgtttgcacaactggaagcacagtcatccgaacaagtatcggcatcaggcgtgcagtcagaccca

SEQ ID NO: 162711 - DNA, 75 bp, synthetic construct
  source 1..75: mol_type = other DNA
atacgccaggacctgaaggccgcggttacgttgatgatcgctttgctcaatgggcgggtgacccggtaacagact

SEQ ID NO: 162712 - DNA, 75 bp, synthetic construct
  source 1..75: mol_type = other DNA
ctggtctgggatcgcggcacgctgtttggcctgcaaactggcgggcgcaccgagtcgatcctgatgtcaatgccg

SEQ ID NO: 162713 - DNA, 75 bp, synthetic construct
  source 1..75: mol_type = other DNA
aggcaaaggctacaccgacgcttatttaccaattgtagagcgacgtaaagcgatggcctacggcgagcgcgagcg

SEQ ID NO: 162714 - DNA, 75 bp, synthetic construct
  source 1..75: mol_type = other DNA
tctggtggtttggcggcggcttcgacttaacccctttctatggttttgaagaagacgccattcactggcaccgca

SEQ ID NO: 162715 - DNA, 75 bp, synthetic construct
  source 1..75: mol_type = other DNA
cagggcgcaaatgcgcaatggcatcattggaaaggcgatggagaaatctggcggatcccctgaccagttccttcg

SEQ ID NO: 162716 - DNA, 75 bp, synthetic construct
  source 1..75: mol_type = other DNA
ccattcactggtatttaaataataaagaatggtggcagcgtgtgatggatggttcgtacgctggtgaacgcttag

SEQ ID NO: 162717 - DNA, 75 bp, synthetic construct
  source 1..75: mol_type = other DNA
gagtacgattatcatccagaagatggcagcccggaagcggcgttaagtgagtttattaaggtcagggattgggtg

SEQ ID NO: 162718 - DNA, 75 bp, synthetic construct
  source 1..75: mol_type = other DNA
cagtacaggttcagttaatagaaactaacgcgcagggcgatatttcgaaagaaagtacttttgttgatacgctcg

SEQ ID NO: 162719 - DNA, 75 bp, synthetic construct
  source 1..75: mol_type = other DNA
ggtactgaaagcggtggtggatatttctggtaagaagatggggaatgctgttttcgcccaaacgttgaagattat

SEQ ID NO: 162720 - DNA, 75 bp, synthetic construct
  source 1..75: mol_type = other DNA
atgagttcatttgctgccttagctttaaaaatacttaatgaatctcctgcagcaacgcgatatatcaaagcaagg

SEQ ID NO: 162721 - DNA, 75 bp, synthetic construct
  source 1..75: mol_type = other DNA
attgggtagcgcactatttgccagggcttctgataaagaaatgactattggcgcaatataccttgatacccaggg

SEQ ID NO: 162722 - DNA, 75 bp, synthetic construct
  source 1..75: mol_type = other DNA
ttgctcaggagctggaaaacaaccaggtgctgaaagcggtggtggatatttccggtaagaaaatgggcaatgctg

SEQ ID NO: 162723 - DNA, 75 bp, synthetic construct
  source 1..75: mol_type = other DNA
gtccaggatgcagcaaaagattcttcagtacaggttcagttaattgaaactaacgcccagggcgatatttcgaaa

SEQ ID NO: 162724 - DNA, 75 bp, synthetic construct
  source 1..75: mol_type = other DNA
ctgcaaccgacccacgcagtgtcggaacgcaggtggatgatgaagtgctggagctgagggtcagcagtgcacttt

SEQ ID NO: 162725 - DNA, 75 bp, synthetic construct
  source 1..75: mol_type = other DNA
atcaaatatcacttgcatgtcttgctatcttatcttcagagaaaatagtgcaaagtttttatttggatgtcttaa

SEQ ID NO: 162726 - DNA, 75 bp, synthetic construct
  source 1..75: mol_type = other DNA
gcggaactggggctgcgtctgccgataacagcaggccagttttacggtgtctggcagcacttttatgacgataac

SEQ ID NO: 162727 - DNA, 75 bp, synthetic construct
  source 1..75: mol_type = other DNA
tacttaaaaagctagattctccttataaatattacttagaggagcatttttttggaataccatcagtcgttaatg

SEQ ID NO: 162728 - DNA, 75 bp, synthetic construct
  source 1..75: mol_type = other DNA
caggagtaatctaactgatgaggaactaattaattacttccatgaaatcgctggaatgctaaacattcagtttac

SEQ ID NO: 162729 - DNA, 75 bp, synthetic construct
  source 1..75: mol_type = other DNA
gtatttttgaacattttgagataaatttaaatcatagatgtcattcatcaataattaattatgcatctcgactac

SEQ ID NO: 162730 - DNA, 75 bp, synthetic construct
  source 1..75: mol_type = other DNA
tcggctttggggcaaattgatgatgctttgaaagatgttggtgatacccaacttgaacctacaggcctgttgaga

SEQ ID NO: 162731 - DNA, 75 bp, synthetic construct
  source 1..75: mol_type = other DNA
agcgcctgaatcggcagaaattcatctcaatggtgaacaattagtaacaaatttggttcagcaattattagatct

SEQ ID NO: 162732 - DNA, 75 bp, synthetic construct
  source 1..75: mol_type = other DNA
cggtcagcgcgtgggtctgcctgttgcttatcgagatagccgcaccagtggtctgatggcgctggcacaacagca

SEQ ID NO: 162733 - DNA, 75 bp, synthetic construct
  source 1..75: mol_type = other DNA
ggcgttgtacgctatctttgtcacctggcgcatgatggggaaaaactacgatgcggcggtgctggctgcgggtca

SEQ ID NO: 162734 - DNA, 75 bp, synthetic construct
  source 1..75: mol_type = other DNA
ctggattttgcaatcgctgaacatatcaatgcgggcaagttacagccgattcttgaggattgggccgtttcattt

SEQ ID NO: 162735 - DNA, 75 bp, synthetic construct
  source 1..75: mol_type = other DNA
ctgccgttcctgtttctccgcttattaaactggttactgtggcatcgccagattatttaaaagaacacggtattc

SEQ ID NO: 162736 - DNA, 75 bp, synthetic construct
  source 1..75: mol_type = other DNA
gaaagtgatgctgaactggcgcgctgtattttcgacagtctggcgctgctgtatgccgatgtgttgcatgagctg

SEQ ID NO: 162737 - DNA, 75 bp, synthetic construct
  source 1..75: mol_type = other DNA
tactggtatctgccaacctcccttcttaaaggtttctttcatgatgttccggactcctgtttccggcagtggatt

SEQ ID NO: 162738 - DNA, 75 bp, synthetic construct
  source 1..75: mol_type = other DNA
cggtgtcgaaccgttttctggtgctgatgggcgcgttgtttctgagtatctggggcacctggactatcattaaca

SEQ ID NO: 162739 - DNA, 75 bp, synthetic construct
  source 1..75: mol_type = other DNA
gcgctgctgtatgccgacgtactgcacgaactggcgcagctacgcggtgaagacttctctcaactgcatattgtc

SEQ ID NO: 162740 - DNA, 75 bp, synthetic construct
  source 1..75: mol_type = other DNA
ccaatgacgatcgctttattaatcctgacgcgatgtgcagcgaaattcaggctgcgtgtcgggaaacggcgcaac

SEQ ID NO: 162741 - DNA, 75 bp, synthetic construct
  source 1..75: mol_type = other DNA
ttacgctctcgcatcccgacgacagcattcgccagttctggattgatcactgcaaagccagccgtcgcgtttcgg

SEQ ID NO: 162742 - DNA, 75 bp, synthetic construct
  source 1..75: mol_type = other DNA
tctctccattacccggtaaatctgatccatttaacaaaacagcagaaataaatatacgaggattcggagaatcag

SEQ ID NO: 162743 - DNA, 75 bp, synthetic construct
  source 1..75: mol_type = other DNA
cgctgctcgccagtgataatgttcatgctaacagccgcgcctattttctcgctgagaagcgtaccggagtacccg

SEQ ID NO: 162744 - DNA, 75 bp, synthetic construct
  source 1..75: mol_type = other DNA
cccgctattcgccctactggggtcggatttgcccgcgctattatgcgcacaggggcaattgcaggactcattttc

SEQ ID NO: 162745 - DNA, 75 bp, synthetic construct
  source 1..75: mol_type = other DNA
tattcatcttgcctgtcataagaataggtctgtttttagcaaacatttctattggcattttcgcagtgctttgat

SEQ ID NO: 162746 - DNA, 75 bp, synthetic construct
  source 1..75: mol_type = other DNA
gggctacctggtcgcctgtgaattatgaatcgaaactgatttttccgcagatagggaataaaaattctgacagcc

SEQ ID NO: 162747 - DNA, 75 bp, synthetic construct
  source 1..75: mol_type = other DNA
atgcgctgacccgctcctggccacgcggcgaaaaactgattgcggatgcgctggaaacatcaccggaaattatct

SEQ ID NO: 162748 - DNA, 75 bp, synthetic construct
  source 1..75: mol_type = other DNA
gttatcagagagaaaaggattgcctaatgcaggttatcaattagcatctgttaatttttgtaatttgaagaaaat

SEQ ID NO: 162749 - DNA, 75 bp, synthetic construct
  source 1..75: mol_type = other DNA
gacgtccggtcgccgccgataatttgcatctgactctggcatttttaggcgaagtgagcgccgagaaagagaagg

SEQ ID NO: 162750 - DNA, 75 bp, synthetic construct
  source 1..75: mol_type = other DNA
gaatttgtcctgtatgcctccacatttacccgtggttctacccgctatacggcattgcaacgctggacgttagcg

SEQ ID NO: 162751 - DNA, 75 bp, synthetic construct
  source 1..75: mol_type = other DNA
atggtggggtttggtaataaatacattgccgctcaattcggcatttcgccgggtcttgctgcaaccgtcaatgca

SEQ ID NO: 162752 - DNA, 75 bp, synthetic construct
  source 1..75: mol_type = other DNA
atggataagaaatctgctcgtatccgtcgtgcgacccgcgcacgccgcaagctccaggagctgggcgcaactcgc

SEQ ID NO: 162753 - DNA, 75 bp, synthetic construct
  source 1..75: mol_type = other DNA
taaaatatccgaaactaaagaaaccgcacttcttgattatgaaacattcaacatatctctatactatattattga

SEQ ID NO: 162754 - DNA, 75 bp, synthetic construct
  source 1..75: mol_type = other DNA
ggcagggttttcaccgatgatcgttcgggaggccgtagaaccgcaaaccgtactggcgatgatcagtatggggct

SEQ ID NO: 162755 - DNA, 75 bp, synthetic construct
  source 1..75: mol_type = other DNA
cagtaagtgattttcggcgcgactttccacagtttgctgaccctgccaaatatcccgaagcacaaatccagtttc

SEQ ID NO: 162756 - DNA, 75 bp, synthetic construct
  source 1..75: mol_type = other DNA
ccggtttctggaacaactcccgttacggatcggagttctgggaatacctgatgatgtttggtgccggtgcggttc

SEQ ID NO: 162757 - DNA, 75 bp, synthetic construct
  source 1..75: mol_type = other DNA
atgatgtttttacgtcaggaagactttgccacggtagtgcgctccacaccgcttgtctctctcgactttattgtc

SEQ ID NO: 162758 - DNA, 75 bp, synthetic construct
  source 1..75: mol_type = other DNA
atgtctgaaccgcaacggctgttctttgccatcgacttacccgcagaaattcgcgagcagattatccactggcgc

SEQ ID NO: 162759 - DNA, 75 bp, synthetic construct
  source 1..75: mol_type = other DNA
cataccagccgatctgtatatcgtctatgaacagcaacaggcgacgccggcgctggaaaggttggttaatgcttt

SEQ ID NO: 162760 - DNA, 75 bp, synthetic construct
  source 1..75: mol_type = other DNA
gagcagcaaatcatgcaacttaagcaaaagacctataaagcgatggtaaaagatttggttaaccgctatcaataa

SEQ ID NO: 162761 - DNA, 75 bp, synthetic construct
  source 1..75: mol_type = other DNA
gcaattcgtaatatgctaaaaatccttgatatgccattagagcttcaacgtttgattagcctaaatctaatcaaa

SEQ ID NO: 162762 - DNA, 75 bp, synthetic construct
  source 1..75: mol_type = other DNA
catttcagtagttgttatgaactataagaataaaagtgaagaatacctggagaaccttgatgggaataggaataa

SEQ ID NO: 162763 - DNA, 75 bp, synthetic construct
  source 1..75: mol_type = other DNA
tcgttgcacactacatgacgctctgggcggcagacagccgggcgatgctggctggcgggccgggcggttcaacca

SEQ ID NO: 162764 - DNA, 75 bp, synthetic construct
  source 1..75: mol_type = other DNA
gatctgtttggtaatgaaaccactctggctgtttctgaggaggacatccaggctgcccttcagggagaggagttc

SEQ ID NO: 162765 - DNA, 75 bp, synthetic construct
  source 1..75: mol_type = other DNA
gcgatggtaaaagatttggttaaggaaggtgcgaataagcaggtcatttcttcccaagctgactcgctgattaaa

SEQ ID NO: 162766 - DNA, 75 bp, synthetic construct
  source 1..75: mol_type = other DNA
ggggccggcgagcattattgagacaaacagccatggctggttcccgggtacagatggtgcgctcatcaccggact

SEQ ID NO: 162767 - DNA, 75 bp, synthetic construct
  source 1..75: mol_type = other DNA
tcaggtttggtgacgggccgtggcaggatgttaaggggctggatgaagtgggcagtgatacaggcagaacaggag

SEQ ID NO: 162768 - DNA, 75 bp, synthetic construct
  source 1..75: mol_type = other DNA
gccggcgagcattattgagacaaacagccatggctggttcccgggtacagatggtgcgctcatcaccggactgac

SEQ ID NO: 162769 - DNA, 75 bp, synthetic construct
  source 1..75: mol_type = other DNA
ggccggcgagcattattgagacaaacagcaatggctggttcccgggtacagatggtgcgctcatcaccggactga

SEQ ID NO: 162770 - DNA, 75 bp, synthetic construct
  source 1..75: mol_type = other DNA
caccggccctgtcggggcaaccggcgaacggggaccggcaggtgatgctggtccggcaggcccgcaggggccgaa

SEQ ID NO: 162771 - DNA, 75 bp, synthetic construct
  source 1..75: mol_type = other DNA
aatgcagccagggatgcaacgaccgcaacagaaaaagcccgggagtcagcagaaagcgcacagtcagcggaacaa

SEQ ID NO: 162772 - DNA, 75 bp, synthetic construct
  source 1..75: mol_type = other DNA
cgtaaaccgaatccccaccgtggtggggccacccggaccaaagggagaaccggggcccgcgggtcctcaggggcc

SEQ ID NO: 162773 - DNA, 75 bp, synthetic construct
  source 1..75: mol_type = other DNA
gtctggggccgggaaacatattgagacaaacagccatggctggttcccggatacagatggtgcgctcatcaccgg

SEQ ID NO: 162774 - DNA, 75 bp, synthetic construct
  source 1..75: mol_type = other DNA
catttgcaggtcaggtttggtgacgggccgtggcaggatgtcaaggggctggatgaagtgggcagtgatacaggc

SEQ ID NO: 162775 - DNA, 75 bp, synthetic construct
  source 1..75: mol_type = other DNA
ccggggtcttacagactgaggcttccgtcacggtgcaaccagaagacatggataaaaccagtccggttgtttctg

SEQ ID NO: 162776 - DNA, 75 bp, synthetic construct
  source 1..75: mol_type = other DNA
gcgtcgttttgaactgatggtggaagaggtggcgcgtcacgctgaggaggcgaagaagaatgccggagaggcgga

SEQ ID NO: 162777 - DNA, 75 bp, synthetic construct
  source 1..75: mol_type = other DNA
cagggaccgaaaggagaaacaggtgcggctggcccggtgggggcaaccggacctcagggaccaaagggcgacccg

SEQ ID NO: 162778 - DNA, 75 bp, synthetic construct
  source 1..75: mol_type = other DNA
caataagaatattacattatctgatttaacgcatttcctggtttcgaatcttcatacacaaaatgtgtattccac

SEQ ID NO: 162779 - DNA, 75 bp, synthetic construct
  source 1..75: mol_type = other DNA
gctggcccggtgggggcaaccggacctcagggaccgaagggcgacccgggggagacacaaatccgttttcgtctg

SEQ ID NO: 162780 - DNA, 75 bp, synthetic construct
  source 1..75: mol_type = other DNA
tcaactgcgctttaccgctcagcgaaacttatcgcgaagcgctgaagcacattggcgaggccgtgtatcgggcaa

SEQ ID NO: 162781 - DNA, 75 bp, synthetic construct
  source 1..75: mol_type = other DNA
cgtatctgctggatggcgacaatgttcgccacggattatgcagcgatctcggttttagcgatgccgatcgtaaag

SEQ ID NO: 162782 - DNA, 75 bp, synthetic construct
  source 1..75: mol_type = other DNA
gtcagcagaaagcgcacagtcagcggaacaaagcaggatagcggcggaagaggccgtaaaccgaatccccaccgt

SEQ ID NO: 162783 - DNA, 75 bp, synthetic construct
  source 1..75: mol_type = other DNA
tattaaaggaattgattataaaacagtatcatatcacaaaataagagccctaaataaacttaacataaaaggtac

SEQ ID NO: 162784 - DNA, 75 bp, synthetic construct
  source 1..75: mol_type = other DNA
cctcagggaccaaagggcgacccgggggagacgcaaatacggttccgtctggggccgggaaacattattgagaca

SEQ ID NO: 162785 - DNA, 75 bp, synthetic construct
  source 1..75: mol_type = other DNA
aagggcgacccgggggagacacaaatccgttttcgtctggggccggcgagcattattgagacaaacagccatggc

SEQ ID NO: 162786 - DNA, 75 bp, synthetic construct
  source 1..75: mol_type = other DNA
actggtaatgagtctttttacataaagatcgcgaaactttccgatcccggaagcaacaattgccatgtaacgcta

SEQ ID NO: 162787 - DNA, 75 bp, synthetic construct
  source 1..75: mol_type = other DNA
tccggatgaagccgaacgttacagcatggatgttgagtacggtcagtacagcgtcattctgttggtggagggatt

SEQ ID NO: 162788 - DNA, 75 bp, synthetic construct
  source 1..75: mol_type = other DNA
acagtgtatgaagattcccgacccggtacgctgaatgattttctcggtgccatgacggaggatgatgcccgtccg

SEQ ID NO: 162789 - DNA, 75 bp, synthetic construct
  source 1..75: mol_type = other DNA
gcgactggcgaacgggctatgccgtttctggcgaacgtctgcggctgaatactgaacaagccaccgccgttggcg

SEQ ID NO: 162790 - DNA, 75 bp, synthetic construct
  source 1..75: mol_type = other DNA
agcgcctttcggcgtggctgaaagcgaaaaatggcgaggcggcgattgttatcggaacccgctccgcgctgttta

SEQ ID NO: 162791 - DNA, 75 bp, synthetic construct
  source 1..75: mol_type = other DNA
cccgtatgcgccagcatttacaggccaacaatcaggttatcctctttcttaaccgccggggttttgcgcctgcgc

SEQ ID NO: 162792 - DNA, 75 bp, synthetic construct
  source 1..75: mol_type = other DNA
tgctgtgccatgactgcggctggatcgccgaatgtccgcgctgcgatcattactacacgctgcatcaggcgcagc

SEQ ID NO: 162793 - DNA, 75 bp, synthetic construct
  source 1..75: mol_type = other DNA
ccggaacatcctctcttgcaaacattgctctataaaggctacgacgcctttgccgaacaggcgctggctgaacga

SEQ ID NO: 162794 - DNA, 75 bp, synthetic construct
  source 1..75: mol_type = other DNA
agatcataacaatcagcacgcgccattgttcctgcaacaactgcgtaatctgatcctctccagcccactggcaga

SEQ ID NO: 162795 - DNA, 75 bp, synthetic construct
  source 1..75: mol_type = other DNA
gatgacatcaaaatatctgtttggtattggtgcagcggttctggtttatttcgggattaaaaaactgaaaaaagg

SEQ ID NO: 162796 - DNA, 75 bp, synthetic construct
  source 1..75: mol_type = other DNA
cagcaagggctgcccagcggtatcaccctgaagctaaataaccttgtcgataaaggcctggttgatcgtctgtat

SEQ ID NO: 162797 - DNA, 75 bp, synthetic construct
  source 1..75: mol_type = other DNA
atggttggtgcgttctttatcgatattgtcaatgcgctggtgattaagctgtatttgatgttgccgatttttgcg

SEQ ID NO: 162798 - DNA, 75 bp, synthetic construct
  source 1..75: mol_type = other DNA
aatttaatgatgccgcgttgcaggcgctgcgcaaaaaaggtttgtgcgaactggcaagcgaaacaccggaattta

SEQ ID NO: 162799 - DNA, 75 bp, synthetic construct
  source 1..75: mol_type = other DNA
ctatctgctgccagaaggcatgacggttaaagccgggtgtcgcgtgcgcgtgccgtttggcaaacagcaggagcg

SEQ ID NO: 162800 - DNA, 75 bp, synthetic construct
  source 1..75: mol_type = other DNA
cacaacatcaaaatatctgttcggtattggtgcagcggttctggtttatttcgggattaaaaaactgaaaaaagg

SEQ ID NO: 162801 - DNA, 75 bp, synthetic construct
  source 1..75: mol_type = other DNA
tcaggggctgtttcggcatttgcaggtcaggtttggtgacgggccgtggcaggatgttaaggggctggatgaagt

SEQ ID NO: 162802 - DNA, 75 bp, synthetic construct
  source 1..75: mol_type = other DNA
acagcgtcattctgttggtggagggattcccgccgtcacatgccgggaccatcaccgtgtatgaagattctcaac

SEQ ID NO: 162803 - DNA, 75 bp, synthetic construct
  source 1..75: mol_type = other DNA
tcagaggaagcgtcctcgtcctcggcctctgcggccgctcaaaaagccagtgagtcatcacaaagtgcagcagaa

SEQ ID NO: 162804 - DNA, 75 bp, synthetic construct
  source 1..75: mol_type = other DNA
gacaaacagccatggctggttcccggatacagatggcgcactcatcaccggactgacctttcttgaccccaaaga

SEQ ID NO: 162805 - DNA, 75 bp, synthetic construct
  source 1..75: mol_type = other DNA
gaagctgaccgctgggcgcaggcagaagagcagaaatatgagatgctggagaatgagtaccctcagagggtggct

SEQ ID NO: 162806 - DNA, 75 bp, synthetic construct
  source 1..75: mol_type = other DNA
gggccaaagggggaacaggggcccgcgggtcctcaggggccgaagggcgataaaggagagcgtggcgacaccggc

SEQ ID NO: 162807 - DNA, 75 bp, synthetic construct
  source 1..75: mol_type = other DNA
ggctggttcccggatacagatggcgcactcatcaccggactgacctttcttgcccccaaagatgccacacgggtt

SEQ ID NO: 162808 - DNA, 75 bp, synthetic construct
  source 1..75: mol_type = other DNA
agtagcacagctacataacaacggtacgcaaagtggagggtggactgccgcttcagtagccgatggggcatgggt

SEQ ID NO: 162809 - DNA, 75 bp, synthetic construct
  source 1..75: mol_type = other DNA
tggtgaacacggtggcttcagaaaacccggatgaagccgggcgttacacaatggacgttgagtacggtcagtaca

SEQ ID NO: 162810 - DNA, 75 bp, synthetic construct
  source 1..75: mol_type = other DNA
agtttggcctggcaccgttcctgccggatcagatccacttcgtacacagccaggagttactgtctcgttatccgg

SEQ ID NO: 162811 - DNA, 75 bp, synthetic construct
  source 1..75: mol_type = other DNA
ggcgtggcttgcgcagtgcgggctgacggtggagcaactggccagacaggtggagccggaatacacaccggcgcg

SEQ ID NO: 162812 - DNA, 75 bp, synthetic construct
  source 1..75: mol_type = other DNA
tatgatgaatggggcaaccagcttaatgaggagaacccgcatcacctgccccagccgtaccggctgccggggcag

SEQ ID NO: 162813 - DNA, 75 bp, synthetic construct
  source 1..75: mol_type = other DNA
ggagccatacagccaggggacgctcgacggtttgccgcaaacattctggcctgaacactgcgtgcagagcagtga

SEQ ID NO: 162814 - DNA, 75 bp, synthetic construct
  source 1..75: mol_type = other DNA
cctcgaaaaatcttccaccagaaagctacccagtcggcgcaccaatcccgtggccatcagataccgttccgtctg

SEQ ID NO: 162815 - DNA, 75 bp, synthetic construct
  source 1..75: mol_type = other DNA
cagaagggcaacggatacgtatgccgatgcggatgggggcgttccatggaatgccgaatcaggcgcttacaatgt

SEQ ID NO: 162816 - DNA, 75 bp, synthetic construct
  source 1..75: mol_type = other DNA
ctgcgtcttaactacaacggcataattgcattgttagtcgaaggctttaaaacacttcgtcatgagattaaagaa

SEQ ID NO: 162817 - DNA, 75 bp, synthetic construct
  source 1..75: mol_type = other DNA
ggaccaccgggtcctgccggagagagagggccgacaggcgaagccggacctgcgggtcaaccggggcacaaagga

SEQ ID NO: 162818 - DNA, 75 bp, synthetic construct
  source 1..75: mol_type = other DNA
aagtgatcgccgtggaagcggaagattccgcctgcctgaaagcggcacttgatgcaggtcatcccgttgatctgc

SEQ ID NO: 162819 - DNA, 75 bp, synthetic construct
  source 1..75: mol_type = other DNA
aatgaatatcccggtttgttttcagcgatacagcataaacaacaaaatgttgtagagacggtttatcttgcttta

SEQ ID NO: 162820 - DNA, 75 bp, synthetic construct
  source 1..75: mol_type = other DNA
ggcatgagcgaacccatcgggaaatttccgatgaccgatggctggcatccgtcgccggattttcgacgacgggct

SEQ ID NO: 162821 - DNA, 75 bp, synthetic construct
  source 1..75: mol_type = other DNA
gtaccttagttatattgttcctttcgtacagggaagcggtcaggaagtggcctccaggcttattggccaggacgg

SEQ ID NO: 162822 - DNA, 75 bp, synthetic construct
  source 1..75: mol_type = other DNA
aaatcagatagaaaagaaaaagaattcccaagaattaaacttaatggtcaatgttattttccggggcgaccccaa

SEQ ID NO: 162823 - DNA, 75 bp, synthetic construct
  source 1..75: mol_type = other DNA
ccggagatagggattgactggccgtcactgagcgactgcgcgctgtcgctgtcggagaaagatctgcaggcacat

SEQ ID NO: 162824 - DNA, 75 bp, synthetic construct
  source 1..75: mol_type = other DNA
ttcttcgagagcttcagcagcaaggtgtttaatgaggcggtgggccgccaggtggaattcgtccaggacaaccac

SEQ ID NO: 162825 - DNA, 75 bp, synthetic construct
  source 1..75: mol_type = other DNA
ggacttctgttagcattgaataatggacaggctgatgcaatcttagcttatggtgatatcttgaatgaggcaaaa

SEQ ID NO: 162826 - DNA, 75 bp, synthetic construct
  source 1..75: mol_type = other DNA
tccgacaaaatccgaagaaaaagcctgcggacaaagatattgatgatgtttattacaatcaggtggcttttgcag

SEQ ID NO: 162827 - DNA, 75 bp, synthetic construct
  source 1..75: mol_type = other DNA
aatcattcaagatcgagtaagggagtgcttagaggcttacattatcaattgccaccgttcgcgcaagcgaaacta

SEQ ID NO: 162828 - DNA, 75 bp, synthetic construct
  source 1..75: mol_type = other DNA
gatgaagcagaatttgtctacaaaacaaataatttctattcaaaaatgcaagaacgtgggattttatggagcgac

SEQ ID NO: 162829 - DNA, 75 bp, synthetic construct
  source 1..75: mol_type = other DNA
tcgatgactggttacataaccatgaaatcaatgaattgatcgttatgggtctggctactgattactgcgtaaagt

SEQ ID NO: 162830 - DNA, 75 bp, synthetic construct
  source 1..75: mol_type = other DNA
agccgcaggacagtgcacacgcatttatggagatgtcagcggctggagcaacactgtacacgctggcggactggg

SEQ ID NO: 162831 - DNA, 75 bp, synthetic construct
  source 1..75: mol_type = other DNA
atattaagtggccgtcaagttttaatttgaaactttcacggaaagacgaaattgcacctcagttggctattattt

SEQ ID NO: 162832 - DNA, 75 bp, synthetic construct
  source 1..75: mol_type = other DNA
ttaaaacagaaatccctgatgtactcatttttgagccaaaagttttttgcgatgctcgtggttttttctttgaga

SEQ ID NO: 162833 - DNA, 75 bp, synthetic construct
  source 1..75: mol_type = other DNA
aagactctgaaaaatcaacagctgctgctcttaaaaaaggagaacaagtaactgttatttgcgaaaaaatgtcca

SEQ ID NO: 162834 - DNA, 75 bp, synthetic construct
  source 1..75: mol_type = other DNA
cagtggtcgagccgtattatctcaggaacaggacggcattaaatcgcacacccacagcgccagcgcatccagtac

SEQ ID NO: 162835 - DNA, 75 bp, synthetic construct
  source 1..75: mol_type = other DNA
cgcggcggaagcggaaactattcgtttaaaaagtgccgcagaagctgaagctattcgtttacgaggagcagctct

SEQ ID NO: 162836 - DNA, 75 bp, synthetic construct
  source 1..75: mol_type = other DNA
atgctatgcgtaaagccgttgttggtccggtggtgattgacggggtccagattgaaaatattgacttttctgacg

SEQ ID NO: 162837 - DNA, 75 bp, synthetic construct
  source 1..75: mol_type = other DNA
gaagttattgtccgtagtcagaacgcgttaaggatgattgcaggcgattacggtgtcatatggcgaaatgatgga

SEQ ID NO: 162838 - DNA, 75 bp, synthetic construct
  source 1..75: mol_type = other DNA
atttggggacgaaaaccacatcgtcgtttgattacggcactaaatccacgaataacaccggggcgcatacgcaca

SEQ ID NO: 162839 - DNA, 75 bp, synthetic construct
  source 1..75: mol_type = other DNA
tctaccgttcttcaagagacggttatggttttgaaagtggttgggcgcagctttacacctcggctcatcctcctg

SEQ ID NO: 162840 - DNA, 75 bp, synthetic construct
  source 1..75: mol_type = other DNA
cgttactgcacctgcttctgattatgttgttgctgaaacaacttataaatttggcgcaactgatccttattctga

SEQ ID NO: 162841 - DNA, 75 bp, synthetic construct
  source 1..75: mol_type = other DNA
gtgcgaggaagggattcgtatcgatagcattgggattgatacctggggcgtggattttgtgctgctcgaccaaca

SEQ ID NO: 162842 - DNA, 75 bp, synthetic construct
  source 1..75: mol_type = other DNA
ccagtcatgataccgccagcgcggttatcgcctcgccattaaacggttcacgcgccgcttatctctcctccggta

SEQ ID NO: 162843 - DNA, 75 bp, synthetic construct
  source 1..75: mol_type = other DNA
cttatgaaaaatcgattgaagatcgaatgaaagcagaagtcgccattgccacacgtaagcaaaatctggaaacag

SEQ ID NO: 162844 - DNA, 75 bp, synthetic construct
  source 1..75: mol_type = other DNA
ggcacaaatgacagtatcagtcagcttccacattaaaccttcagaagctggcgcggtttataccacctacaacac

SEQ ID NO: 162845 - DNA, 75 bp, synthetic construct
  source 1..75: mol_type = other DNA
cttatccgtcaggcgtgatccctgatatgcgtggctggacgattaagggcaagcccgccagtggtcgtgccgtat

SEQ ID NO: 162846 - DNA, 75 bp, synthetic construct
  source 1..75: mol_type = other DNA
cacgctggcgctggaactgctccagcaggacgcccatctcgaccgcgtatttgtgccagtcggcggcggcggtct

SEQ ID NO: 162847 - DNA, 75 bp, synthetic construct
  source 1..75: mol_type = other DNA
gcgtcttgataacgtcattctggtgaagcgcgaagatcgccagccagtgcacagctttaagctgcgcggcgcata

SEQ ID NO: 162848 - DNA, 75 bp, synthetic construct
  source 1..75: mol_type = other DNA
tccgcgaaaatatttatttccgccagcggtgtgcataatcactttggcgtcagctggtttaaccctgaagatctt

SEQ ID NO: 162849 - DNA, 75 bp, synthetic construct
  source 1..75: mol_type = other DNA
gatctgttcgaagatgtgcgcgcagtggcggaaccctctggcgcactggctctggcgggaatgaaaaaatatatc

SEQ ID NO: 162850 - DNA, 75 bp, synthetic construct
  source 1..75: mol_type = other DNA
cgtccatcgcatccgttgcaggaacgcctctacagcttcgaattcccggaatcaccgggcgcgctgctgcgcttc

SEQ ID NO: 162851 - DNA, 75 bp, synthetic construct
  source 1..75: mol_type = other DNA
ccaaaaacgcctgcatctttgtcggcgtgcgcctgagccgcggcctcgaagagcgcaaagaaattttgcagatgc

SEQ ID NO: 162852 - DNA, 75 bp, synthetic construct
  source 1..75: mol_type = other DNA
aaaacgccgtttttgcgtttcctttttgccattgagcttgagcaaatatgcccgacccagcctcatgacagcgat

SEQ ID NO: 162853 - DNA, 75 bp, synthetic construct
  source 1..75: mol_type = other DNA
ttaccggcagattatgttacgcactgccggaatggttctgtaaagatcattacacctgattcagaagacgaatga

SEQ ID NO: 162854 - DNA, 75 bp, synthetic construct
  source 1..75: mol_type = other DNA
attacagaaatggtggtctgttctaccgttcttcaagagacggttatggttttgaggaagactgggcagaagttt

SEQ ID NO: 162855 - DNA, 75 bp, synthetic construct
  source 1..75: mol_type = other DNA
gcctatgcctgtctgttcaaggttctgattcagtatattaataaatatattaatacaaacagcgatgatattact

SEQ ID NO: 162856 - DNA, 75 bp, synthetic construct
  source 1..75: mol_type = other DNA
acgccggcggtggtcagcggtgcggcagacattaccggtgaaattcagtctgcagtggcacaaaaaatggccgcc

SEQ ID NO: 162857 - DNA, 75 bp, synthetic construct
  source 1..75: mol_type = other DNA
tatgcatcagtggattgcgccagataaaacgccgtttttgcgtttcctgtttgctattgagcttgagcaaatatg

SEQ ID NO: 162858 - DNA, 75 bp, synthetic construct
  source 1..75: mol_type = other DNA
gtggcgcggctgtactggttgataaagacgcttttgaacgataccgtaaagcggctcttgatgctgagtttgctg

SEQ ID NO: 162859 - DNA, 75 bp, synthetic construct
  source 1..75: mol_type = other DNA
ttggtactgactcgcacaccaccatgatcaacggccttggcgtgctggggtggggcgtggggggatcgaagcaga

SEQ ID NO: 162860 - DNA, 75 bp, synthetic construct
  source 1..75: mol_type = other DNA
cgctggcaggatggtaactcggttaccgaagaggatatccacgcgctggcgggatggctgaaaaatgcccatgct

SEQ ID NO: 162861 - DNA, 75 bp, synthetic construct
  source 1..75: mol_type = other DNA
aaccggtaaagatcgttatggacgtaccttagcgaaggtctatgtaaaaaaatgccagccagcatgtctggctta

SEQ ID NO: 162862 - DNA, 75 bp, synthetic construct
  source 1..75: mol_type = other DNA
gcaccggagaaaagtcagccgttcggccaacgggctaaacaaaaactcattgaactggtgagtaacgctgcagat

SEQ ID NO: 162863 - DNA, 75 bp, synthetic construct
  source 1..75: mol_type = other DNA
atcgttatggtagaacgctggcgcaagtgtacgttaagaagtgtgatagtgaatgcttgtcgtacctggtcaatg

SEQ ID NO: 162864 - DNA, 75 bp, synthetic construct
  source 1..75: mol_type = other DNA
gccagtaaaaagtttgatagcaatttttatgttgttattagttattcacgtttttccagaatttattactgcaaa

SEQ ID NO: 162865 - DNA, 75 bp, synthetic construct
  source 1..75: mol_type = other DNA
gaagaagaaaaggctattaatgtgcctggcattatttattttgttgaaaacggttcgtggggagatattatttat

SEQ ID NO: 162866 - DNA, 75 bp, synthetic construct
  source 1..75: mol_type = other DNA
atgagctaccaaattctgactacgacagcagccagtattactgacctgaagaaaaatcctatgggaactgtagcc

SEQ ID NO: 162867 - DNA, 75 bp, synthetic construct
  source 1..75: mol_type = other DNA
caaggaaaatatgtttgcaaaatatgataaataaagacaacgtctctgttgagacaatccagtctctattgcact

SEQ ID NO: 162868 - DNA, 75 bp, synthetic construct
  source 1..75: mol_type = other DNA
accaggagctggtaaaactggttactgaacgcagcagtcagtctctgcatgatgtggacctggacagttatttat

SEQ ID NO: 162869 - DNA, 75 bp, synthetic construct
  source 1..75: mol_type = other DNA
acagatcgtactttgatgtatcgcatagggtatggatcaaacggtgaatatggcattcacccaactgcgttttaa

SEQ ID NO: 162870 - DNA, 75 bp, synthetic construct
  source 1..75: mol_type = other DNA
ggcaggggatgatgactcaagggagctgctgctggaattgtataccagttggtatgagtacccagataaagcgcg

SEQ ID NO: 162871 - DNA, 75 bp, synthetic construct
  source 1..75: mol_type = other DNA
aggaatatagcgatctttttgagatgtggggagatgcttatattgcattggatttgcccctatatttccagacac

SEQ ID NO: 162872 - DNA, 75 bp, synthetic construct
  source 1..75: mol_type = other DNA
cgtgtttctgatggtccgcaacgggcaaaatatcaaacagatctattccccggtggagagccatcttggggcgtc

SEQ ID NO: 162873 - DNA, 75 bp, synthetic construct
  source 1..75: mol_type = other DNA
tgcatggagtaaattgttcattgaacgttatggcttcaccaacgcgacagaagtggcgatggcctgtgcaacgtt

SEQ ID NO: 162874 - DNA, 75 bp, synthetic construct
  source 1..75: mol_type = other DNA
tgcatggagtaaattgttcattgaacgttacggcttcaccaatgcgacggaagtcgcaatggcctgtgcaacgtt

SEQ ID NO: 162875 - DNA, 75 bp, synthetic construct
  source 1..75: mol_type = other DNA
ggcggtccggtggcgcgctatctggtgaaacactccaccacgccgaacggtattccggatgaccaggaagtcccg

SEQ ID NO: 162876 - DNA, 75 bp, synthetic construct
  source 1..75: mol_type = other DNA
aataaaccttccatatgaaaaattcaggaaatcgtcaaaaaatccagatggattgactaagtggtgtgcaaggtg

SEQ ID NO: 162877 - DNA, 75 bp, synthetic construct
  source 1..75: mol_type = other DNA
cgattgatcctgcctgtggcgctggaattttgctatcagcattaacccaggccgtatgcgggggcgataaagcca

SEQ ID NO: 162878 - DNA, 75 bp, synthetic construct
  source 1..75: mol_type = other DNA
aacagtgaattacttccttctgcaaagcgtgcctatacctagactcaccaaggatgatttatcgtggaaaaagct

SEQ ID NO: 162879 - DNA, 75 bp, synthetic construct
  source 1..75: mol_type = other DNA
ttccgactgagcgatgtgtactcgtcatggtaaccacccgcagatttattgactatggtgatacctgggcgaatt

SEQ ID NO: 162880 - DNA, 75 bp, synthetic construct
  source 1..75: mol_type = other DNA
cgaagctcaggtttctctgatggcgaaagtcgcggaacgggaagggaagattgccggtgccgtagctaacattat

SEQ ID NO: 162881 - DNA, 75 bp, synthetic construct
  source 1..75: mol_type = other DNA
tctcagtcatctaaaaaagcacctcaggcagtatcagagccagcaagaataccttctgtatcgccgccaaaagaa

SEQ ID NO: 162882 - DNA, 75 bp, synthetic construct
  source 1..75: mol_type = other DNA
atgaacgtaattcagaccgcaattcccgacgtattcatctttgagccaaaagtgtttggcgacgatcgtggtttc

SEQ ID NO: 162883 - DNA, 75 bp, synthetic construct
  source 1..75: mol_type = other DNA
gtggcctgcactaccagctggcgccacatgcgcagggcaaactggtgcgttgcgtggcgggtgaagtcttcgacg

SEQ ID NO: 162884 - DNA, 75 bp, synthetic construct
  source 1..75: mol_type = other DNA
ttcttcgaaagctttaaccaccagcagttcgaagctgccattggccgcagcgtcaacttcgtgcaggacaaccac

SEQ ID NO: 162885 - DNA, 75 bp, synthetic construct
  source 1..75: mol_type = other DNA
cgcccgattaccgtttatgaattgctgtttattcgccatgaaggcaatgagctggagctggaaattcactgctca

SEQ ID NO: 162886 - DNA, 75 bp, synthetic construct
  source 1..75: mol_type = other DNA
agttgaatttgtccaggataaccattcgaagtcttgtaaaggtgttttacgcggactgcattatcagttagagcc

SEQ ID NO: 162887 - DNA, 75 bp, synthetic construct
  source 1..75: mol_type = other DNA
cgacaaattattacaatcccgaaagtgaacgaagtattcattggatggatccagagttaaatatttcttggccta

SEQ ID NO: 162888 - DNA, 75 bp, synthetic construct
  source 1..75: mol_type = other DNA
gttatgtgcgggttaacgctcctgcaggtgcaacatctggaaaatattaccctgttgttgttatgcgttctgctg

SEQ ID NO: 162889 - DNA, 75 bp, synthetic construct
  source 1..75: mol_type = other DNA
ctcaatcagagaagattctgtcacagaaagatattaatttaccctcatttagatttgttcaaatgtttagcaagt

SEQ ID NO: 162890 - DNA, 75 bp, synthetic construct
  source 1..75: mol_type = other DNA
aaaaacctttggaaagtgggttggtataaatctatctgctgaaaataaaagacaattatggattcctgaaggctt

SEQ ID NO: 162891 - DNA, 75 bp, synthetic construct
  source 1..75: mol_type = other DNA
ttgctcttcaaaatggacatgcagatgctatacgcgcatacggtgagctcattcttagcccccctctcctcaact

SEQ ID NO: 162892 - DNA, 75 bp, synthetic construct
  source 1..75: mol_type = other DNA
gtttgattacggcactaaatccacgaataacaccggggcgcatacgcacagtctgagcggctctacaagctcggc

SEQ ID NO: 162893 - DNA, 75 bp, synthetic construct
  source 1..75: mol_type = other DNA
accagtgccgctgcggcgaaaacgtcagaaacgaatgcggcagcgtcacaacaatcagcagccacttctgcatcc

SEQ ID NO: 162894 - DNA, 75 bp, synthetic construct
  source 1..75: mol_type = other DNA
gctgcttaccaatcaaggtgatgtttatggtggctggaatacattaagaccgtttgctattgataacgcaaccgg

SEQ ID NO: 162895 - DNA, 75 bp, synthetic construct
  source 1..75: mol_type = other DNA
gaacacggctagtgctaactccggtgctggtagtgcatcaacaagattgtctgttgtgcataatcaaaactatgc

SEQ ID NO: 162896 - DNA, 75 bp, synthetic construct
  source 1..75: mol_type = other DNA
gtggcacagaacacggcagccgcgaagaagtcagccagtgatgccagcacatctgcccgtgaggcggcaacccat

SEQ ID NO: 162897 - DNA, 75 bp, synthetic construct
  source 1..75: mol_type = other DNA
atccgtgtccgtgacggtcacgacacctttgattctgaataccagaacgacccggtcagcggtgaagatgcgctg

SEQ ID NO: 162898 - DNA, 75 bp, synthetic construct
  source 1..75: mol_type = other DNA
aaagaggagaggaaaaatgtaaaaagtgaaaatataaatctcctgaaacaacaaatagatgctattgaaaatggc

SEQ ID NO: 162899 - DNA, 75 bp, synthetic construct
  source 1..75: mol_type = other DNA
ctgtggcgcgcatgttatttacctgcgccgtctggcggtaagtaaatatccggttgaacggatggtgaccctgga

SEQ ID NO: 162900 - DNA, 75 bp, synthetic construct
  source 1..75: mol_type = other DNA
ctgaaggagttcattgctaccgtccgtactgaactggaatcttccccccgccgcaacggggaaaccgtaaaagcc

SEQ ID NO: 162901 - DNA, 75 bp, synthetic construct
  source 1..75: mol_type = other DNA
tccgccgggagtgggcatttcatttctgatatggaaaacagctacaagcctattatcgtcagcgtcaaaggaatt

SEQ ID NO: 162902 - DNA, 75 bp, synthetic construct
  source 1..75: mol_type = other DNA
taccgtgctggttgagcgttcggcggcgctgggcgtgccggttccggcgctgccggtcatcccgctggaggataa

SEQ ID NO: 162903 - DNA, 75 bp, synthetic construct
  source 1..75: mol_type = other DNA
ttgtgaaagaatatgaagacgctaagaaggttgctatgcaggctgatattgagcagcttacgaagatttctcaga

SEQ ID NO: 162904 - DNA, 75 bp, synthetic construct
  source 1..75: mol_type = other DNA
gctttcgggattggtttgatcttcccgaccttattccgctttacgctgttttccaataacttaccgaaagggacc

SEQ ID NO: 162905 - DNA, 75 bp, synthetic construct
  source 1..75: mol_type = other DNA
ttaagctatatccccatgatgagttgggtggctgtctcgccggtgatcctgatcgacgcgggcggcttaacaact

SEQ ID NO: 162906 - DNA, 75 bp, synthetic construct
  source 1..75: mol_type = other DNA
ctggaggcatggcattgcagtggctgctggggccgctttccgacagggttggccgcaggccggtgctgattaccg

SEQ ID NO: 162907 - DNA, 75 bp, synthetic construct
  source 1..75: mol_type = other DNA
gtattaattccggacgtgtatatggggcgcagttggcgatttttatatttggtattttgtcttccgtgattctga

SEQ ID NO: 162908 - DNA, 75 bp, synthetic construct
  source 1..75: mol_type = other DNA
catttgtgatgagaacgggaatcctgtttttactgttgctgacattactggtgaagcagaccctgagcgcggtgc

SEQ ID NO: 162909 - DNA, 75 bp, synthetic construct
  source 1..75: mol_type = other DNA
gttgcgatcgtgaagccatagactgggccgcaagcacgggaggttacgataaagcgacagtgcaggatgtcatgt

SEQ ID NO: 162910 - DNA, 75 bp, synthetic construct
  source 1..75: mol_type = other DNA
gtctatatggcggggatcgcgctgggagcaatcattactgcgctgatggtggtgttcttgcgtctgatgatgttc

SEQ ID NO: 162911 - DNA, 75 bp, synthetic construct
  source 1..75: mol_type = other DNA
attactgcgctgatggtggtgttcttgcgtctgatgatgttccgcaaaggtaaattgttaatcgatagcctgtaa

SEQ ID NO: 162912 - DNA, 75 bp, synthetic construct
  source 1..75: mol_type = other DNA
tccgtcgtatatggttggcgcgattgtcggctcaaccgccgcagtctggctgggtgcagttcaatggttcccgga

SEQ ID NO: 162913 - DNA, 75 bp, synthetic construct
  source 1..75: mol_type = other DNA
ccgtcgtctccagtggagtggctgacggataatggttcatgctaccgggctaatgaaacacgccagttcgcccgg

SEQ ID NO: 162914 - DNA, 75 bp, synthetic construct
  source 1..75: mol_type = other DNA
gcctggctgtcgcagtccttcggcggcgtgttgtttggttttgccattccgatgtttgctgcttttgtggcgaac

SEQ ID NO: 162915 - DNA, 75 bp, synthetic construct
  source 1..75: mol_type = other DNA
ttattccgccgattggtctggggctggcgaccattatcgaccgtcgtttaaccggcaaacgcctgttcaacgctc

SEQ ID NO: 162916 - DNA, 75 bp, synthetic construct
  source 1..75: mol_type = other DNA
tggcggaagccttacagtggcattttgaactgaccgtcaacaccgcgaacattgttgaaaattacgccaccttaa

SEQ ID NO: 162917 - DNA, 75 bp, synthetic construct
  source 1..75: mol_type = other DNA
cggaagtcgagaacgaagtacacgtcaccgttggcgtggtgcgttacgacgtggaaggccgcgcccgtgccggtg

SEQ ID NO: 162918 - DNA, 75 bp, synthetic construct
  source 1..75: mol_type = other DNA
ctggtcgcgcgaccaaaaagaaaaagtttacgtacaagacaaactgcgcgaacagggcgcggagctgtggcgctg

SEQ ID NO: 162919 - DNA, 75 bp, synthetic construct
  source 1..75: mol_type = other DNA
gcactggcctgaacgctttggctgtgtattaagccagtcaggatcgtactggtggccgcatcggggcgggcagca

SEQ ID NO: 162920 - DNA, 75 bp, synthetic construct
  source 1..75: mol_type = other DNA
cgattgttgacatggtgcgtttctccccggcacagcttgatgccgaagcgctaattaatctgctgcgcccgctga

SEQ ID NO: 162921 - DNA, 75 bp, synthetic construct
  source 1..75: mol_type = other DNA
tgcctctgaacgaagcgctacagtggcacttcgaactgaccgtcaacaccgccaacattgttgagaattatgcca

SEQ ID NO: 162922 - DNA, 75 bp, synthetic construct
  source 1..75: mol_type = other DNA
ggacagtttaccggtagtaaatctgtcagtgatcaattgcactttgcctttatggcaagattagatgatcaaaaa

SEQ ID NO: 162923 - DNA, 75 bp, synthetic construct
  source 1..75: mol_type = other DNA
tgccggtggtgcctccagcttcctcgcggatcgcgtggaagaagagggcgaagtccgcgtatttatcgaacataa

SEQ ID NO: 162924 - DNA, 75 bp, synthetic construct
  source 1..75: mol_type = other DNA
cgctgacgccgcgcctgtattccatcgcctcctcgcaggcggaagtcgagaacgaagtacacgtcaccgttggtg

SEQ ID NO: 162925 - DNA, 75 bp, synthetic construct
  source 1..75: mol_type = other DNA
acgccacgcttacccgcagtgaaacgctgctgccgctggtgggcgataaagcgaagttacagcattacgccgcga

SEQ ID NO: 162926 - DNA, 75 bp, synthetic construct
  source 1..75: mol_type = other DNA
tctggtctgaaccatatttcatgaaaatgaaatctacaattacatgggacgatcaggacaaagaagcattagagg

SEQ ID NO: 162927 - DNA, 75 bp, synthetic construct
  source 1..75: mol_type = other DNA
tccgcctcatttgcaggatacgctgttttacccgatggtcagtggccgcgaaggtggcaccgggcttggcttatc

SEQ ID NO: 162928 - DNA, 75 bp, synthetic construct
  source 1..75: mol_type = other DNA
cgcggaaagctttggctttggcaccggtccgatggtggcgctgggttgtaaatacctgcgtatttgccacctgaa

SEQ ID NO: 162929 - DNA, 75 bp, synthetic construct
  source 1..75: mol_type = other DNA
taccctgaaacaagcaattgctaccagtgaggcagcaagcgcaagtaagattgatcaagttcgggtagaaatgga

SEQ ID NO: 162930 - DNA, 75 bp, synthetic construct
  source 1..75: mol_type = other DNA
caggtggcactaacggttatttcaataccattaacgcgatgtatcaagaaccatcaatcgactattcagagcaaa

SEQ ID NO: 162931 - DNA, 75 bp, synthetic construct
  source 1..75: mol_type = other DNA
acatcatttgggcgctgattgggatgatcggtatcagggtaacggcattgcgaccatgtgtattgttttacgtcg

SEQ ID NO: 162932 - DNA, 75 bp, synthetic construct
  source 1..75: mol_type = other DNA
gacccggcgcgctatggcactaacaaagtgtcgcgcatcaagcaggtggcttccggtcgctttggggttactccg

SEQ ID NO: 162933 - DNA, 75 bp, synthetic construct
  source 1..75: mol_type = other DNA
aaccgggcgtcggcactatcgctaccggtgtggcgaaagcctacgcggacttaattaccatcgcaggctatgacg

SEQ ID NO: 162934 - DNA, 75 bp, synthetic construct
  source 1..75: mol_type = other DNA
gcaggatctgctgaatctgtcgaaacgagcctggctggcgcgtaagcctatcagccagggcggcctgctgaaata

SEQ ID NO: 162935 - DNA, 75 bp, synthetic construct
  source 1..75: mol_type = other DNA
ggtcgaggtcttaagcgttgacgatttggcgatccatgaagagcatctgcgcggtcttatcaccgagcatgttca

SEQ ID NO: 162936 - DNA, 75 bp, synthetic construct
  source 1..75: mol_type = other DNA
gcgcgggtgaacgtttcggcgtgcgtaactccggtgctatcaccgtggtagaaggcattggcgacaacggctgtg

SEQ ID NO: 162937 - DNA, 75 bp, synthetic construct
  source 1..75: mol_type = other DNA
actccgatttcaaacagctcacgacgatgaaagaggagcactaccgcgcagatacgctggatatcacctttgacg

SEQ ID NO: 162938 - DNA, 75 bp, synthetic construct
  source 1..75: mol_type = other DNA
tcgctggcgtcgatgaagccaaggcggagttggttgagatcgtcgatttcctcaagaatccgcaggagtatggac

SEQ ID NO: 162939 - DNA, 75 bp, synthetic construct
  source 1..75: mol_type = other DNA
atgtttaaaaaatctgttttatttgcaacactattatctggcgttatggcattttccaccaatgcagatgataaa

SEQ ID NO: 162940 - DNA, 75 bp, synthetic construct
  source 1..75: mol_type = other DNA
atgacaaaaatcacaacaccgtcccagctgaaagcagagctggagagccagaaaacctaccttctcgaagcctgc

SEQ ID NO: 162941 - DNA, 75 bp, synthetic construct
  source 1..75: mol_type = other DNA
tccgtcctatatggttggcgcgattgtcggctcaaccgccgcagtctggctgggcgcagtgcaatggttcccgga

SEQ ID NO: 162942 - DNA, 75 bp, synthetic construct
  source 1..75: mol_type = other DNA
cggtgccgtccaccttcattggtgcgctgattatttctatcgttgccggttaccttgtgaaatggatgaaccaga

SEQ ID NO: 162943 - DNA, 75 bp, synthetic construct
  source 1..75: mol_type = other DNA
tacctccattgtgttgctggcccccataatcggccctctttccggcgcggcgttaatgcactttgtccactggaa

SEQ ID NO: 162944 - DNA, 75 bp, synthetic construct
  source 1..75: mol_type = other DNA
atcgcggtagctccacaagacggatcagaagtttgtccgtttggcatcgaagataacaaagtttatctcgataat

SEQ ID NO: 162945 - DNA, 75 bp, synthetic construct
  source 1..75: mol_type = other DNA
aggttatcagctttatgactactgacgcattcactgccgaagtttgggatgttatcagcgtaacctatgatgaat

SEQ ID NO: 162946 - DNA, 75 bp, synthetic construct
  source 1..75: mol_type = other DNA
gatgatcacaagttcgatcgtcaaatcgttattccggcaattagttttggtggattgcgagcgcgtgaagggtcg

SEQ ID NO: 162947 - DNA, 75 bp, synthetic construct
  source 1..75: mol_type = other DNA
aatgcggcagaggtttctccagtaattcattgcgtccagaagtttgggaatattcgtgaaacacttcttgatctg

SEQ ID NO: 162948 - DNA, 75 bp, synthetic construct
  source 1..75: mol_type = other DNA
cgagcaaatgtattggttgccgtacttgtgaagtggcgtgcgtggtttctcatcaggaaaatcaggattgcgcat

SEQ ID NO: 162949 - DNA, 75 bp, synthetic construct
  source 1..75: mol_type = other DNA
gctaccagtgaggcagcaagcgcaagtaagattgatcaagttcgggtagaaatggatggcaagattgctggtgtg

SEQ ID NO: 162950 - DNA, 75 bp, synthetic construct
  source 1..75: mol_type = other DNA
caccggtatcgacgcgcggtgtatgcactgacccgcgcgggcgttcttgagcgttcgcgggatgtggacaccacc

SEQ ID NO: 162951 - DNA, 75 bp, synthetic construct
  source 1..75: mol_type = other DNA
tcccgcttcgtgcactgaaattttatgataacgatggtgcgcggcaggaagtgattgccgaagcctgtaaagtca

SEQ ID NO: 162952 - DNA, 75 bp, synthetic construct
  source 1..75: mol_type = other DNA
ctccctggctaaccagctgcagataacgatccccgggctgtccggtatttgccggtatgaaattaccggaaggcg

SEQ ID NO: 162953 - DNA, 75 bp, synthetic construct
  source 1..75: mol_type = other DNA
tgttggaagatggcgttttaagtgtaatcgcactcaatgatcaaagtatcattgcgcaggttgcgattaatccgt

SEQ ID NO: 162954 - DNA, 75 bp, synthetic construct
  source 1..75: mol_type = other DNA
tcccgataaccgcgccgtggcaacaggtattactggaaaaacaacgtctgtttttgacgcatggtcatctttttg

SEQ ID NO: 162955 - DNA, 75 bp, synthetic construct
  source 1..75: mol_type = other DNA
atgaaactgatgtttgcatcggacattcatgggtcgttaccggcgacggaacgtgttctggagttgtttgcccaa

SEQ ID NO: 162956 - DNA, 75 bp, synthetic construct
  source 1..75: mol_type = other DNA
atgcgcttcaaaagggcgagtctacgaattatttacccaccgtgactgcggtgcggcttttattcgtggatacgt

SEQ ID NO: 162957 - DNA, 75 bp, synthetic construct
  source 1..75: mol_type = other DNA
acggcgttgtgcacaatagcttcggtcaaaaactgatgcgcatttacaatcagaaaggcatcttttcaaacacaa

SEQ ID NO: 162958 - DNA, 75 bp, synthetic construct
  source 1..75: mol_type = other DNA
tcagtgtagcctgtagcaagggatggcgttggtggaaccgaaagaataaaaaaagcactggccttggattcattt

SEQ ID NO: 162959 - DNA, 75 bp, synthetic construct
  source 1..75: mol_type = other DNA
gactggctgcttggcgttacaccaagccagttctgatggctgaaattagtaacctggctacccagctgcagctca

SEQ ID NO: 162960 - DNA, 75 bp, synthetic construct
  source 1..75: mol_type = other DNA
atggagaaaaaacacgaatctgtggtttttactgagcgcggtgtacacggtggaacatatggcgggaagtttgtt

SEQ ID NO: 162961 - DNA, 75 bp, synthetic construct
  source 1..75: mol_type = other DNA
tcagcctggttctgtcattgtagtcaccactcaaagtggcatgaccattcagattcataaaccaaaagaggaaaa

SEQ ID NO: 162962 - DNA, 75 bp, synthetic construct
  source 1..75: mol_type = other DNA
tcttgaactattaaacaaattcaatgttcccctcccacctatatactatcaggatgagatattagctagattaac

SEQ ID NO: 162963 - DNA, 75 bp, synthetic construct
  source 1..75: mol_type = other DNA
cggcgtgacgcgtttctttaaagagaaattcttcaccccagtagcggaagcggcgaccagcggtctgaaattcac

SEQ ID NO: 162964 - DNA, 75 bp, synthetic construct
  source 1..75: mol_type = other DNA
acgtaacaaggacgacaaagaccgtcttgatgtgctgtgcggcccgaatctgattaaccagttccgcattttcgc

SEQ ID NO: 162965 - DNA, 75 bp, synthetic construct
  source 1..75: mol_type = other DNA
agtgctcagcagtaaaagcccttttttttagagagattaggactcgatttggaaaatataggttaggatacatat

SEQ ID NO: 162966 - DNA, 75 bp, synthetic construct
  source 1..75: mol_type = other DNA
atccgttgttacaggttatgtctctgaaggggttagtttatattacttatttataagcacgttaatattattgtt

SEQ ID NO: 162967 - DNA, 75 bp, synthetic construct
  source 1..75: mol_type = other DNA
ttttgcgtgctacgtttgctacaatgtatgggaatcctattacaaaccccaaaaaatggcctgtccatcttatgg

SEQ ID NO: 162968 - DNA, 75 bp, synthetic construct
  source 1..75: mol_type = other DNA
atgccctcatcccaattgcaggggaggttaagtggaagattgtaaccgattatggtggcgagagtaaattttaca

SEQ ID NO: 162969 - DNA, 75 bp, synthetic construct
  source 1..75: mol_type = other DNA
tttcctcttgtatagttgcggcgaaggatgtagccactacaaatttcccacatcaaaatgacgtgaatgctcagt

SEQ ID NO: 162970 - DNA, 75 bp, synthetic construct
  source 1..75: mol_type = other DNA
cgataccgatgatggtgatacccgtatttcagcgggtgcattctggccggatattgtgctgcgtgagctgcgtct

SEQ ID NO: 162971 - DNA, 75 bp, synthetic construct
  source 1..75: mol_type = other DNA
gcgaaacagtctgttgtatacgggtatttccacggtaactgtgggagccggtgatgtgatgcagattgagcgtca

SEQ ID NO: 162972 - DNA, 75 bp, synthetic construct
  source 1..75: mol_type = other DNA
ctgatgtggtgcagattgaacgtcaggtgacgatgtaccgtcagaatgcatacggcgaaagcgatcccagctatc

SEQ ID NO: 162973 - DNA, 75 bp, synthetic construct
  source 1..75: mol_type = other DNA
tcagggggaaggcaccggcacggccacgtccggcaccatcacgctttccggtacggcaacggaagacaatgtact

SEQ ID NO: 162974 - DNA, 75 bp, synthetic construct
  source 1..75: mol_type = other DNA
aacaaccatctggatattggcgttggaactgggttttaccttactcacgtacctgagagcagtctgatatcttta

SEQ ID NO: 162975 - DNA, 75 bp, synthetic construct
  source 1..75: mol_type = other DNA
cgggcgtacgagatgaacgccaaaatggtctcggctgcggacgatatgttgcagtacatcagccagacgctgtaa

SEQ ID NO: 162976 - DNA, 75 bp, synthetic construct
  source 1..75: mol_type = other DNA
atcttacccggcgacagcgatgtgaccgagttagggcaactgacgctggtgaacttcgccaacccggcggggctt

SEQ ID NO: 162977 - DNA, 75 bp, synthetic construct
  source 1..75: mol_type = other DNA
cggcaaccacctttgcgcaccttgacgcaaccgtggtactgagccgtcagatcgcgtctctgggtatctacccgg

SEQ ID NO: 162978 - DNA, 75 bp, synthetic construct
  source 1..75: mol_type = other DNA
atcgaagtcccggtaggtaaagcgactctgggccgtatcatgaacgtactgggtgaaccggtcgacatgaaaggc

SEQ ID NO: 162979 - DNA, 75 bp, synthetic construct
  source 1..75: mol_type = other DNA
taatcggcgccgtagttgacgtcgaattccctcaggatgccgtaccgcgcgtgtacgatgctcttgaggtgcaaa

SEQ ID NO: 162980 - DNA, 75 bp, synthetic construct
  source 1..75: mol_type = other DNA
cgtcgctacgcttttcacaatgcagcgacatcacacgcagtggtttctcaggtcatagaaagttatgacacaaaa

SEQ ID NO: 162981 - DNA, 75 bp, synthetic construct
  source 1..75: mol_type = other DNA
gtcttgcggttcagtcccgtcgattcactgtggaacaggccatcaatgacctgtggctaccggatttgcagttgt

SEQ ID NO: 162982 - DNA, 75 bp, synthetic construct
  source 1..75: mol_type = other DNA
atgccaacattgataacctgcggatgcatgacctgcgccgtacctttgccacccgggtactacaggcgaccgggg

SEQ ID NO: 162983 - DNA, 75 bp, synthetic construct
  source 1..75: mol_type = other DNA
attgtcgcagaagccacgcgtcgtctgcgcccgaatgcgaaaatcctcaacatctgtgacatgccaatcggtatt

SEQ ID NO: 162984 - DNA, 75 bp, synthetic construct
  source 1..75: mol_type = other DNA
tgttttattggctagttgaatatttttcatgcttttttggtgatgtcaatgttcttgttaataaacattatttaa

SEQ ID NO: 162985 - DNA, 75 bp, synthetic construct
  source 1..75: mol_type = other DNA
cggcaacagcgctgcaaacaccggcagctgattctatattgcttgctctttatacggggatgcgtattggtgagg

SEQ ID NO: 162986 - DNA, 75 bp, synthetic construct
  source 1..75: mol_type = other DNA
atgacacagtttcttatcgcgcgtgcaattcagggcaccagtatctgttttattgctaccgttggttatgtcacg

SEQ ID NO: 162987 - DNA, 75 bp, synthetic construct
  source 1..75: mol_type = other DNA
ctggaggcatggcattgcagtggctgctggggccgctttccgacaggattggccgcaggccagtgctgattaccg

SEQ ID NO: 162988 - DNA, 75 bp, synthetic construct
  source 1..75: mol_type = other DNA
gcgttatcgtcgttttcaccctggccggattgcttaatcgcgtgcgccaacatcaggctgccgagctggcagagg

SEQ ID NO: 162989 - DNA, 75 bp, synthetic construct
  source 1..75: mol_type = other DNA
gttcattatggataaagcagaatgtgatcttgagcacgaaataacgaacaaccttcttacaacagatcaaaaaat

SEQ ID NO: 162990 - DNA, 75 bp, synthetic construct
  source 1..75: mol_type = other DNA
tcgggagcagttggccgaagccacggaagaaattaataggctcagggctgagctgggcaggtatcagaataacgg

SEQ ID NO: 162991 - DNA, 75 bp, synthetic construct
  source 1..75: mol_type = other DNA
atgaataatgaagttatcgttactgctcgtaaacttacagattatgaagaacgcctgatgtttatgccgaaattc

SEQ ID NO: 162992 - DNA, 75 bp, synthetic construct
  source 1..75: mol_type = other DNA
aaagatccgaccgaaccgcgctttatctggcgtgctgtacccattcaactggtcggcctcgcgctgttgattatc

SEQ ID NO: 162993 - DNA, 75 bp, synthetic construct
  source 1..75: mol_type = other DNA
cgattcaccgcgcagcaccttcctacgaagagctgtcaaactctcaggaattgctggaaaccggtatcaaagtta

SEQ ID NO: 162994 - DNA, 75 bp, synthetic construct
  source 1..75: mol_type = other DNA
ctccgtacaggcagtatacgtaccagcggatgacttgactgacccgtctccggcaaccacctttgcgcaccttga

SEQ ID NO: 162995 - DNA, 75 bp, synthetic construct
  source 1..75: mol_type = other DNA
gtgcaggaggcgttcggccagacaaaagggatcaagttgatggcgattatcacctccatcgtactgattgcgccg

SEQ ID NO: 162996 - DNA, 75 bp, synthetic construct
  source 1..75: mol_type = other DNA
tccagaaaaccagattcaggtttatgtagagaacgaagacggctctcatgttcctgtttcgcagccaatcatcat

SEQ ID NO: 162997 - DNA, 75 bp, synthetic construct
  source 1..75: mol_type = other DNA
cgccgcgacaatgttcaccacgtcaatgacacaatttcttatcgcgcgtgcaattcagggcacaagtatctgttt

SEQ ID NO: 162998 - DNA, 75 bp, synthetic construct
  source 1..75: mol_type = other DNA
tgaccacactgcgcccttcgccactggcgaaagggaaccctcagcacaccaatctggtggaaatcgagaaaatat

SEQ ID NO: 162999 - DNA, 75 bp, synthetic construct
  source 1..75: mol_type = other DNA
tgatatgccgctgaatttttcggcgtttagtgacgtactctccccccttgccgaatgtgcgccgacgtttgcctg

SEQ ID NO: 163000 - DNA, 75 bp, synthetic construct
  source 1..75: mol_type = other DNA
atgcattactgtgagccaggctggtttgaattaatccgtcaccgcctcgccttttttaaagacaacgcagcacca

SEQ ID NO: 163001 - DNA, 75 bp, synthetic construct
  source 1..75: mol_type = other DNA
cgggaaagagtttgtagtaccagaagagatgaccattttgcagttcattgaaaataacaaagcggcaaaagtgga

SEQ ID NO: 163002 - DNA, 75 bp, synthetic construct
  source 1..75: mol_type = other DNA
ttcctggcatcatggcaaccatctgaacggagagatgccggagcggctgaacggaccggtctcgaaaaccggagt

SEQ ID NO: 163003 - DNA, 75 bp, synthetic construct
  source 1..75: mol_type = other DNA
ttggtgaaggcgatgataaaacagcgaaaacgccgcagtgggcttcgcaaattacaggtatcccggtagaccgta

SEQ ID NO: 163004 - DNA, 75 bp, synthetic construct
  source 1..75: mol_type = other DNA
gcgactggagcatttacggtactgcgcgctacacccgtctgtccgatgaagttaccgatagcccgatggttgata

SEQ ID NO: 163005 - DNA, 75 bp, synthetic construct
  source 1..75: mol_type = other DNA
ttggagtacttatcgcgacgtctgcaggcgcagtacatgcggaaagtaatttctctctgggcgcaggtgtcggtg

SEQ ID NO: 163006 - DNA, 75 bp, synthetic construct
  source 1..75: mol_type = other DNA
atgaatacggatgataaaagcagaaagccaagatcagaaaaaaccattaagcaaaaaatagcatcagcgcagatg

SEQ ID NO: 163007 - DNA, 75 bp, synthetic construct
  source 1..75: mol_type = other DNA
atgagcactaaattaaccggctatgtatgggatggttgcgctgcatcaggcatgaagttatccagcgtggcaatt

SEQ ID NO: 163008 - DNA, 75 bp, synthetic construct
  source 1..75: mol_type = other DNA
gcgctacacccgtctgtctgatgaagttactgacagcccaatggtggataaatcctggactggcctgatttctac

SEQ ID NO: 163009 - DNA, 75 bp, synthetic construct
  source 1..75: mol_type = other DNA
gcgactggagtgtttacggtaccgcgcgctacacccgtctgtctgatgaagttactgacagcccaatggtggata

SEQ ID NO: 163010 - DNA, 75 bp, synthetic construct
  source 1..75: mol_type = other DNA
gaactggcggataagttcggagttaccactcgtaaggttgcttccacgttggcggtggtaacagcaacggggcgc

SEQ ID NO: 163011 - DNA, 75 bp, synthetic construct
  source 1..75: mol_type = other DNA
aaaggacggctgtatgtgatttgtaaatctaatccacgttttaaggccgttcaggggcgtaagaaaaaacgttga

SEQ ID NO: 163012 - DNA, 75 bp, synthetic construct
  source 1..75: mol_type = other DNA
tgcacttgatgagtccgctgaaggtaaccctgtcagggatgctgtgcatatatataacgttgaagatatttcaga

SEQ ID NO: 163013 - DNA, 75 bp, synthetic construct
  source 1..75: mol_type = other DNA
ctggttggccgcctccagcatccggagctacaggtccagccttttgacgagaaggttgctcgtcataaagccaga

SEQ ID NO: 163014 - DNA, 75 bp, synthetic construct
  source 1..75: mol_type = other DNA
cagcaaaagaacgtcacccggactgtcagattgtgaagcgcaaaggacggctgtatgtcatttgcaaatctaatc

SEQ ID NO: 163015 - DNA, 75 bp, synthetic construct
  source 1..75: mol_type = other DNA
ggcggtggtaacagcaacggggcgcctggtacgtgtctccatcaagggaagattccattacaaaaagcctgacgt

SEQ ID NO: 163016 - DNA, 75 bp, synthetic construct
  source 1..75: mol_type = other DNA
aaataatgaactatgacccgaatctgacgtcatgcggacgcatggcaaaacaaaccgttcgattaactttcgggc

SEQ ID NO: 163017 - DNA, 75 bp, synthetic construct
  source 1..75: mol_type = other DNA
ctgggtacaaagccttttatgccaaaaggaaaagaaagtgtctctattttttcgtctgccccccctattccaaaa

SEQ ID NO: 163018 - DNA, 75 bp, synthetic construct
  source 1..75: mol_type = other DNA
gctatggtgaaacactaactaaccctgttaaacttaacagaggtggaggtgaaaagaataaaccttactcttatt

SEQ ID NO: 163019 - DNA, 75 bp, synthetic construct
  source 1..75: mol_type = other DNA
gtttctctcatcctgttgaccatcagctgcctgcgggtatcactgctgaatgtccgactcagactgaaatcgtgc

SEQ ID NO: 163020 - DNA, 75 bp, synthetic construct
  source 1..75: mol_type = other DNA
tgtaggttaccgtgcagcggttaaaggtaatgtgattaacctgtctctgggtttctctcatcctgttgaccatca

SEQ ID NO: 163021 - DNA, 75 bp, synthetic construct
  source 1..75: mol_type = other DNA
caccattaacggcgtgaaagcctcgaccagcgatggtctggcaatctgggatgagcaggcaatctccatccatgc

SEQ ID NO: 163022 - DNA, 75 bp, synthetic construct
  source 1..75: mol_type = other DNA
gaagaaggacgtgaatttgcgattctgcttcctgaaggtgcttacaccaaagacgctgccatcaccattggtgaa

SEQ ID NO: 163023 - DNA, 75 bp, synthetic construct
  source 1..75: mol_type = other DNA
aaggtaaattcgctaaagcagcccttgcagatgttggcaaggcccaacttttcattgttaacccggcattccatg

SEQ ID NO: 163024 - DNA, 75 bp, synthetic construct
  source 1..75: mol_type = other DNA
cagtttgcctgattggataccagccttgcagtttttatggaattaattatgccatgctcaagagccttgttagca

SEQ ID NO: 163025 - DNA, 75 bp, synthetic construct
  source 1..75: mol_type = other DNA
gaaaggggactaccttacaataccaatacccgccgcgtgccactcaaagaggggaccgagtgggtagcaaaaaat

SEQ ID NO: 163026 - DNA, 75 bp, synthetic construct
  source 1..75: mol_type = other DNA
caaatacaagacgtgtcccggcgaaagaaggatgtgattgggtcctaaagaacatcattaacccgttaaaaaaca

SEQ ID NO: 163027 - DNA, 75 bp, synthetic construct
  source 1..75: mol_type = other DNA
ccgagagttcgccatgcgccttaatactggtgcatataaaaaagaccaggccattaaacttggtgaggtcactgt

SEQ ID NO: 163028 - DNA, 75 bp, synthetic construct
  source 1..75: mol_type = other DNA
aagatgaattgttaaaaaatgtacaaccagtgttcttcttcgatacatgttcaatattggatatattaaattcta

SEQ ID NO: 163029 - DNA, 75 bp, synthetic construct
  source 1..75: mol_type = other DNA
ttcgttattgcaccgacagaagatgaggcccgctctcagcttcctgacgccccatgtattttctctgcccgtttt

SEQ ID NO: 163030 - DNA, 75 bp, synthetic construct
  source 1..75: mol_type = other DNA
gcccggaatttatctggcgcttctattcttgtcaaaaacgtcactatcacttcgtcattgcaccaacagaagatg

SEQ ID NO: 163031 - DNA, 75 bp, synthetic construct
  source 1..75: mol_type = other DNA
tggtgtccagagatgatgaacttaatgaacaaaccactcgtcagcagactcccaggtatctttcagagtttcctg

SEQ ID NO: 163032 - DNA, 75 bp, synthetic construct
  source 1..75: mol_type = other DNA
tcgcgtgcgcagttgcacgtcattctcagacgaaccgatgactggatggatggccgccgcagtcgtcacactgat

SEQ ID NO: 163033 - DNA, 75 bp, synthetic construct
  source 1..75: mol_type = other DNA
aaggaaaacttgagccaaaagattgtgaaattgttgaatgctttttagaattctgtcaagaactaaggaaggcag

SEQ ID NO: 163034 - DNA, 75 bp, synthetic construct
  source 1..75: mol_type = other DNA
aagagatgggatttgatcgcgtcttttccccaagtcatgacttagaagatgtttgtcagctgatggcccacgata

SEQ ID NO: 163035 - DNA, 75 bp, synthetic construct
  source 1..75: mol_type = other DNA
tatgtacaatataaattttatgcgttcgacacacaatggtactatctcatggaattctttattaaaaatcacccc

SEQ ID NO: 163036 - DNA, 75 bp, synthetic construct
  source 1..75: mol_type = other DNA
acaattccttttcagacgatgaatttagcttcaacgagtgtcgttttattagcaaagaatatacgtatgattacg

SEQ ID NO: 163037 - DNA, 75 bp, synthetic construct
  source 1..75: mol_type = other DNA
tgctatttgtattgctgctttaattttaaaaatgaagcatccaaatgaaaatccacttatgctcgttcttccagc

SEQ ID NO: 163038 - DNA, 75 bp, synthetic construct
  source 1..75: mol_type = other DNA
tattaagtggtggtaatggtactaggttatggccactatctagagaggaatatcctaagcagtttttaaaactaa

SEQ ID NO: 163039 - DNA, 75 bp, synthetic construct
  source 1..75: mol_type = other DNA
gcattctcgcaaccaattcacaccgaatcagcgttggggcaaaggtggatgttgatccatactggtgaatatgaa

SEQ ID NO: 163040 - DNA, 75 bp, synthetic construct
  source 1..75: mol_type = other DNA
cttctgattaacctcaaggggcgtcgtggtgagttcgcccagttatacagccgtgtggcgctggcgcttaacctg

SEQ ID NO: 163041 - DNA, 75 bp, synthetic construct
  source 1..75: mol_type = other DNA
acttgtgcgtggggtctaccggatttgtgatatcagcgatgccccggtcagcgtgcaggctattgatgatttcgc

SEQ ID NO: 163042 - DNA, 75 bp, synthetic construct
  source 1..75: mol_type = other DNA
ccttccggctgttcagaaatggcgtgatcgtggtcttccgtataatacgaatacccgccgttgtccacgggatag

SEQ ID NO: 163043 - DNA, 75 bp, synthetic construct
  source 1..75: mol_type = other DNA
atgttcccggtttcatcaataggtaatgacttaggtaataatttagtatgtataaaaatgaatgaccttcctgaa

SEQ ID NO: 163044 - DNA, 75 bp, synthetic construct
  source 1..75: mol_type = other DNA
ttaataattatttgagcaaagttaaattaccagagatgaaaaacttctcattagaaaaagcatatgattatatcg

SEQ ID NO: 163045 - DNA, 75 bp, synthetic construct
  source 1..75: mol_type = other DNA
gggagctgtgtcgccagctgggggtaaaggttcgcggcagtattcacgaactgattgatgtctgtgtgcgcgaac

SEQ ID NO: 163046 - DNA, 75 bp, synthetic construct
  source 1..75: mol_type = other DNA
ctgctttactaaaaataatattgataaacaattgcgattcttggaaagatcagtagactggccccctgaatctcc

SEQ ID NO: 163047 - DNA, 75 bp, synthetic construct
  source 1..75: mol_type = other DNA
aatattataatttgaatagagctatttattggatggaattcgctgtaaataacggtaatattgcaaacttcaaga

SEQ ID NO: 163048 - DNA, 75 bp, synthetic construct
  source 1..75: mol_type = other DNA
tataaatcacaacatggtgattcagaggcatcatttcgactatatcaatattactgctttactaaaaataatatt

SEQ ID NO: 163049 - DNA, 75 bp, synthetic construct
  source 1..75: mol_type = other DNA
atgttccctgtttcatcaattggtaatgaatttagtagtgatttagtccgtcgaaaaatgaatgatcttcctgaa

SEQ ID NO: 163050 - DNA, 75 bp, synthetic construct
  source 1..75: mol_type = other DNA
acaaaagaaatatataaaagctcatcgaaaatcatcaattgcttgaacagaattaaattaccagagatgaaagaa

SEQ ID NO: 163051 - DNA, 75 bp, synthetic construct
  source 1..75: mol_type = other DNA
aaatataacacatatgaagcatataactcagagaatctatattttaccagagaggaatatacgtatgattacgac

SEQ ID NO: 163052 - DNA, 75 bp, synthetic construct
  source 1..75: mol_type = other DNA
aagattcgggcttaactcaaaaagaaatgatagagcactggattttgaaagaaaaagctgcgatggataatgcga

SEQ ID NO: 163053 - DNA, 75 bp, synthetic construct
  source 1..75: mol_type = other DNA
acgcaataacccaacttcaggcgagcgaaagtccgcgtcgcgatgctgaaatcttgctggagcatgttaccggca

SEQ ID NO: 163054 - DNA, 75 bp, synthetic construct
  source 1..75: mol_type = other DNA
cagtttgcgatgattgttagcaatccaccgtatatcgacgagcaggatccacatcttcaacaaggcgatgtccgc

SEQ ID NO: 163055 - DNA, 75 bp, synthetic construct
  source 1..75: mol_type = other DNA
cagactgtggaatcacaggtgctgaaaaatgagcaggaaatggcatcctcgaagaaggtgttgggaacggagaga

SEQ ID NO: 163056 - DNA, 75 bp, synthetic construct
  source 1..75: mol_type = other DNA
acgccggattccgtggcatacagcaaaaccggtatgttgtttggtgccaccctgatggccaacaccacggatgtg

SEQ ID NO: 163057 - DNA, 75 bp, synthetic construct
  source 1..75: mol_type = other DNA
cgattgccgctaagcgagatgagtacgccctatatcttcccgacagaaaacggtctgcgctgcgactgcaaagcg

SEQ ID NO: 163058 - DNA, 75 bp, synthetic construct
  source 1..75: mol_type = other DNA
acggtcaggaagccgtcggttcgatgggcgacgacaccccattcgccgtgctctccagccagccgcgtattattt

SEQ ID NO: 163059 - DNA, 75 bp, synthetic construct
  source 1..75: mol_type = other DNA
gctgcaacaggcgaaaccgtttgtcgatgaacgccagagcaaaaccttctggttcgatattcgcaacaccgaccg

SEQ ID NO: 163060 - DNA, 75 bp, synthetic construct
  source 1..75: mol_type = other DNA
tgcgtgactcctggtacgatttagacgcccattacgatgccctggaaacccgcttctggcagttttatccgcgga

SEQ ID NO: 163061 - DNA, 75 bp, synthetic construct
  source 1..75: mol_type = other DNA
gcgacggctatttatccataccttgcctatgaaacgctgggccgcctggtagacacccacgcgattgccaaagat

SEQ ID NO: 163062 - DNA, 75 bp, synthetic construct
  source 1..75: mol_type = other DNA
gcacaacggcgaaatcaacactatcaccggtaaccgtcagtgggcgcgcgcccgtacttataaattccagacgcc

SEQ ID NO: 163063 - DNA, 75 bp, synthetic construct
  source 1..75: mol_type = other DNA
cgctcgccaccagcatcggtcgtgaaatgaacgtcttctgtgaagcagaaggccaggcgcaccgtttaagcttta

SEQ ID NO: 163064 - DNA, 75 bp, synthetic construct
  source 1..75: mol_type = other DNA
gttgctacgttacgactcgcggcagtttattccgcttgccatcgacgggctggcgaaggatgtacttggtagacg

SEQ ID NO: 163065 - DNA, 75 bp, synthetic construct
  source 1..75: mol_type = other DNA
gctggcggggtattactgcgaacagtgccgcctgcggttggggctttcccgcgtggtgttaagttccggggcgcg

SEQ ID NO: 163066 - DNA, 75 bp, synthetic construct
  source 1..75: mol_type = other DNA
gcattctcattagaaaaaatagattattacatcgatataatcattaaagattatgaaagcgtcaaagaaaatgct

SEQ ID NO: 163067 - DNA, 75 bp, synthetic construct
  source 1..75: mol_type = other DNA
ctggatgccctgcgtgactcctggtacgatttaaacgcccattatgccgccctcgaaacccgcttctggcagttt

SEQ ID NO: 163068 - DNA, 75 bp, synthetic construct
  source 1..75: mol_type = other DNA
tcaacgtcttaattagcggtgagacgggaacaggtaaggagctggtggcgaaagcgattcatgaagcctcgccgc

SEQ ID NO: 163069 - DNA, 75 bp, synthetic construct
  source 1..75: mol_type = other DNA
gttgctgcgctacgactcgcggcaatttattccgctcgccatcgacgggctggcaaaagatgtgctcggcagacg

SEQ ID NO: 163070 - DNA, 75 bp, synthetic construct
  source 1..75: mol_type = other DNA
tcggcgggatcatcggcgcggggctttcgagctatgccctgtttccggcgtttgataacgtccgccaggcgctgc

SEQ ID NO: 163071 - DNA, 75 bp, synthetic construct
  source 1..75: mol_type = other DNA
tgcggctggtcggtggtgcagcccggcgattccggctatgcacctttgattaatgaactcagcggccagagtgct

SEQ ID NO: 163072 - DNA, 75 bp, synthetic construct
  source 1..75: mol_type = other DNA
ggaaagtcatgtcacacctctttatcagttaatctgtaaaaataaaacctggttacagcagtcgctaaactggcc

SEQ ID NO: 163073 - DNA, 75 bp, synthetic construct
  source 1..75: mol_type = other DNA
gtgccgaacctgtaagccaggcttacaagttgaacgcgctggatggcaactctccggtaactcaggatggttggg

SEQ ID NO: 163074 - DNA, 75 bp, synthetic construct
  source 1..75: mol_type = other DNA
tcatggcaagctatctgggacgccgaaattgcgccccaaatggagacgctgataaagaaacctagttacagcatg

SEQ ID NO: 163075 - DNA, 75 bp, synthetic construct
  source 1..75: mol_type = other DNA
tttgggaaactaattctgttcgcatccctggcaacgcagttacttttttttcgcatgccatgtggcaacatttct

SEQ ID NO: 163076 - DNA, 75 bp, synthetic construct
  source 1..75: mol_type = other DNA
acgcgccgctggcggccagcctctctgttaaccagaaaattaccgggcgtaactctgaaaaagacgttcgtcaca

SEQ ID NO: 163077 - DNA, 75 bp, synthetic construct
  source 1..75: mol_type = other DNA
ccgcgcctttatgcagcaacgtgctgccgatgaagcgccaggcaaaaactggctgttctttggcaacccgcactt

SEQ ID NO: 163078 - DNA, 75 bp, synthetic construct
  source 1..75: mol_type = other DNA
aaaaaacatcaaacaactcagctcttgttttttggcgcgtcggcacaaagcgaaaaggcatcctcgatgttcata

SEQ ID NO: 163079 - DNA, 75 bp, synthetic construct
  source 1..75: mol_type = other DNA
aacactcccagccctcaagtcatcactgacctatctggagaatgaggggatcaactacatcatcgctggcaaaga

SEQ ID NO: 163080 - DNA, 75 bp, synthetic construct
  source 1..75: mol_type = other DNA
gcactatccgctttctcgttattgcttcattcgttgtagctatcagttaccgactttttgttgcctccaatgacg

SEQ ID NO: 163081 - DNA, 75 bp, synthetic construct
  source 1..75: mol_type = other DNA
gggctggctcgctaccagtcacacacttggctatggactgtgcgctttgctagtgccgctggtatcgaaaacagg

SEQ ID NO: 163082 - DNA, 75 bp, synthetic construct
  source 1..75: mol_type = other DNA
ggctgcgtaaaacccaggcgattccggctttacccacgccgaaatataaagtcggaaattttccatttagcccat

SEQ ID NO: 163083 - DNA, 75 bp, synthetic construct
  source 1..75: mol_type = other DNA
aaacgaagccgtttgcctgtggctgaaagagacttaccccgacgcagtagagtttttaccacttggcgatctctt

SEQ ID NO: 163084 - DNA, 75 bp, synthetic construct
  source 1..75: mol_type = other DNA
attggttcgcgactgaaaaacagctacccgcgtgaactggtgcgcgacgggaaactttttaccggtaacgcctga

SEQ ID NO: 163085 - DNA, 75 bp, synthetic construct
  source 1..75: mol_type = other DNA
gtgatgttacggcggttgaccgaatgcctgatgcagttgcccttgcaaagcgcaatgcacagcatctggcgatta

SEQ ID NO: 163086 - DNA, 75 bp, synthetic construct
  source 1..75: mol_type = other DNA
atcttcgcggggtatcatgacgtcgaaacctgccgtgactatggggataacgagcgcgtaacgctcggccgctat

SEQ ID NO: 163087 - DNA, 75 bp, synthetic construct
  source 1..75: mol_type = other DNA
gacgggtaccggggcgattgcgctggcgctggctagcgagcgcccggactgcgaaattaccgctgtagatcgtat

SEQ ID NO: 163088 - DNA, 75 bp, synthetic construct
  source 1..75: mol_type = other DNA
caccgccgggaacgcgtctggtattaacgacggtgctgccgctctggtgattatggaagaatctgcggcgctggc

SEQ ID NO: 163089 - DNA, 75 bp, synthetic construct
  source 1..75: mol_type = other DNA
gccgtagggaaaaccctgggctttgatcctgagaaagtgaatgtcaacggcggggcaatcgcgctcgggcatcct

SEQ ID NO: 163090 - DNA, 75 bp, synthetic construct
  source 1..75: mol_type = other DNA
tgaagcatttgccgcgcagttccttgccgtagggaaaaccctgggctttgatcctgagaaagtgaatgtcaacgg

SEQ ID NO: 163091 - DNA, 75 bp, synthetic construct
  source 1..75: mol_type = other DNA
tgttacatgccaatatcagccgctgtggcatcagtaatgttgcgctcacacattttgatggccgcgtgtttggtg

SEQ ID NO: 163092 - DNA, 75 bp, synthetic construct
  source 1..75: mol_type = other DNA
tggcccgtaaaagagcttcgttcaaggaagtaaaagtatttcttgaaccaaagtataaggccatgctcatgcaaa

SEQ ID NO: 163093 - DNA, 75 bp, synthetic construct
  source 1..75: mol_type = other DNA
tgaagcatttgctgcacagttccttgccgttgggaaaaccctgggctttgatcctgagaaagtgaatgtcaacgg

SEQ ID NO: 163094 - DNA, 75 bp, synthetic construct
  source 1..75: mol_type = other DNA
ggttttatcatgcatcgaactatgcctgatatatcttttccagtatttcttctcaatggtctaataccttatttt

SEQ ID NO: 163095 - DNA, 75 bp, synthetic construct
  source 1..75: mol_type = other DNA
agagatgtttgctgaccatctgttgtgcccagaccttgatgacactatccgtgactttgctgcccagcttcgcaa

SEQ ID NO: 163096 - DNA, 75 bp, synthetic construct
  source 1..75: mol_type = other DNA
atgttgcgaaccggacgccgaacggtcagcaccagcatacgcgacaacgcggaaatcaccattgttggtgaactg

SEQ ID NO: 163097 - DNA, 75 bp, synthetic construct
  source 1..75: mol_type = other DNA
tgaacgaacgcatagccgaactggaggctaatttagcggcgatgactgaagaccaccagagagcgattgagtcaa

SEQ ID NO: 163098 - DNA, 75 bp, synthetic construct
  source 1..75: mol_type = other DNA
gcggggatgaagtctggcgcaatggacgaaatcaaggttatcaaccgtggagggcaggcatattgcgtaaaagat

SEQ ID NO: 163099 - DNA, 75 bp, synthetic construct
  source 1..75: mol_type = other DNA
gttcgattattactacaaccagtggctggagtcagataacaaaaccccagccaccgatgctttcctggctgaagt

SEQ ID NO: 163100 - DNA, 75 bp, synthetic construct
  source 1..75: mol_type = other DNA
agggcaggcatattgcgtaaaagatggagtgcaagttaatcccatgtatgcaagagggtggaatgactatcgcgc

SEQ ID NO: 163101 - DNA, 75 bp, synthetic construct
  source 1..75: mol_type = other DNA
agggggtggagatgtttgcggagtgtgcatacacacttgaacatcatgatcacgcagtagcttttgccgccgagc

SEQ ID NO: 163102 - DNA, 75 bp, synthetic construct
  source 1..75: mol_type = other DNA
aatgtggatagagcattggtgagaatgtttaaatgtgttaagcttcacagtaatgaacttaacttatcaagcctt

SEQ ID NO: 163103 - DNA, 75 bp, synthetic construct
  source 1..75: mol_type = other DNA
atgcgcatgaatgttttcgaaatggaagggtttcttcgcgggaaatgtgtaccacgagatctgaaagtgaatgaa

SEQ ID NO: 163104 - DNA, 75 bp, synthetic construct
  source 1..75: mol_type = other DNA
atgcggggctgaaggccttcaaaaccgccgtttatcagcagatgggcgtcggatgtgatgctcctgaattctcca

SEQ ID NO: 163105 - DNA, 75 bp, synthetic construct
  source 1..75: mol_type = other DNA
tcctgaaattaacgatatcgaaaccccagctaccgacgctttcctggctgaagtacgggctaaggcgtttaatga

SEQ ID NO: 163106 - DNA, 75 bp, synthetic construct
  source 1..75: mol_type = other DNA
ggaagactgaagcacgcaaggaaggcgcttactttgtggcgaacagaatgctggctgcctgggaagctggtttta

SEQ ID NO: 163107 - DNA, 75 bp, synthetic construct
  source 1..75: mol_type = other DNA
cgaaaccacagccaccgacgctttcctggatgaaatacgtgcggaggcacgcaacgaggggattaactacaccgc

SEQ ID NO: 163108 - DNA, 75 bp, synthetic construct
  source 1..75: mol_type = other DNA
cgttgatctgcagatccgcataatgaatgacgagaacttccagcatggtggtactaacatccactatctggagaa

SEQ ID NO: 163109 - DNA, 75 bp, synthetic construct
  source 1..75: mol_type = other DNA
atttcagtaaggcatttattggtatcgatggctggcaacctgaaactggatttacaggtcgcgacatgatgcgta

SEQ ID NO: 163110 - DNA, 75 bp, synthetic construct
  source 1..75: mol_type = other DNA
attaactatgccgcaagccgtcttgctgctgctttcaaccacggatttatcaataagtctttacgtgaagttttc

SEQ ID NO: 163111 - DNA, 75 bp, synthetic construct
  source 1..75: mol_type = other DNA
aagggtttcttcgcgggaaatgtgtaccacgagatctgaaagtgaatgaaacaaacgctgaatatctggtgcgta

SEQ ID NO: 163112 - DNA, 75 bp, synthetic construct
  source 1..75: mol_type = other DNA
cgtgacaagctgtctccgtatgacaccgaagagatgcttgaggctatgcgtatttttctggaagaacagggaggc

SEQ ID NO: 163113 - DNA, 75 bp, synthetic construct
  source 1..75: mol_type = other DNA
ctacgcaagcagagcggctcagtgggctgatgaattgttagctgagcttaatgaattcgccactcagcttcgcga

SEQ ID NO: 163114 - DNA, 75 bp, synthetic construct
  source 1..75: mol_type = other DNA
acgcattcctggctgaagtacgggcgcagggggtggatgctgctatagaagctgcaaaaaatctggtggcccaag

SEQ ID NO: 163115 - DNA, 75 bp, synthetic construct
  source 1..75: mol_type = other DNA
tggttgcgcacgtcacttcattgaatgcgtgcaaaatcagacagttccgcaaaccgccggtgaacaggcggtgct

SEQ ID NO: 163116 - DNA, 75 bp, synthetic construct
  source 1..75: mol_type = other DNA
aagcgaaagtatggttggccctttgacacgccagtgcatccaacaggtgcatttcagcaaagcatttattggtat

SEQ ID NO: 163117 - DNA, 75 bp, synthetic construct
  source 1..75: mol_type = other DNA
atgaaccatcagcatcctgtcacatcgaaggcaatcgacataatgcgcgtccatgcctaccaaattcgcaaagga

SEQ ID NO: 163118 - DNA, 75 bp, synthetic construct
  source 1..75: mol_type = other DNA
atcaagcatcaggcgtatggcgtccatttggggcaggaagatttgcaagccaccgatctcaacgccatccgcgcg

SEQ ID NO: 163119 - DNA, 75 bp, synthetic construct
  source 1..75: mol_type = other DNA
aaaggctttgatgatgcattcaaaatgggccagttctacatgaacgtgaaggaaaacgaataccgggatttctac

SEQ ID NO: 163120 - DNA, 75 bp, synthetic construct
  source 1..75: mol_type = other DNA
ccgccgcctgcgtaccgctaacaaattcccggcaatcatctacggtggcaacgaagctccgctggctgttgctct

SEQ ID NO: 163121 - DNA, 75 bp, synthetic construct
  source 1..75: mol_type = other DNA
tgaacaaagcattcgaacaggtggaagttgcgattgtgaagggctttgatgatgcattcaaatacggtcaattca

SEQ ID NO: 163122 - DNA, 75 bp, synthetic construct
  source 1..75: mol_type = other DNA
tcatggccgtgggccgttatgtgctttctgccgatatttggccggaacttgaacgcactcagccaggtgcatggg

SEQ ID NO: 163123 - DNA, 75 bp, synthetic construct
  source 1..75: mol_type = other DNA
attgcgcgcttcaacgaaacgggccgcagccaggtgctggcaaaacgtatgccgggcgatctctctgaatactcc

SEQ ID NO: 163124 - DNA, 75 bp, synthetic construct
  source 1..75: mol_type = other DNA
atcgtgaaggtaaagtcagccgcattgttgaattcatcgaaaaaccggatcagccacaaacgctggactcagaca

SEQ ID NO: 163125 - DNA, 75 bp, synthetic construct
  source 1..75: mol_type = other DNA
acttgccagcctggaaaaagacctaatcgcagagcgtagagccgcaggaatcaaacgagctcagtcggaaggtaa

SEQ ID NO: 163126 - DNA, 75 bp, synthetic construct
  source 1..75: mol_type = other DNA
gcaagcgaagaggattttgtcgcaatggtggcggcggcccgccgtaatcaccccgatgcccgcctgctgctgcgt

SEQ ID NO: 163127 - DNA, 75 bp, synthetic construct
  source 1..75: mol_type = other DNA
gggagacgaccctgaggatctggtcgtttggcaaaagtttgagcactgggaatggaaagacattctggagcaaat

SEQ ID NO: 163128 - DNA, 75 bp, synthetic construct
  source 1..75: mol_type = other DNA
gagtttccaccagcgaccaaaacgttgaaaatcagaagcagcagatttccgatgctggttatagcgttactcgct

SEQ ID NO: 163129 - DNA, 75 bp, synthetic construct
  source 1..75: mol_type = other DNA
gagtttccaccagcgaccagaccgttgaaaaccagaagcagcaaatcaatgatgctgggtacagcgttaaccgtt

SEQ ID NO: 163130 - DNA, 75 bp, synthetic construct
  source 1..75: mol_type = other DNA
tgcaatcaaggcggaagaacgtccagggtttggtgaactactcagttatgtgcgagaaggcgatacgctgattgt

SEQ ID NO: 163131 - DNA, 75 bp, synthetic construct
  source 1..75: mol_type = other DNA
atgactaatttaaaagcagttataccggtagctggtcttggtatgcacatgttgcccgccacaaaagcgatccct

SEQ ID NO: 163132 - DNA, 75 bp, synthetic construct
  source 1..75: mol_type = other DNA
cagccgcagacgctggactcagacatcatggccgttggccgctatgtgctttctgccgatatttggccggagcta

SEQ ID NO: 163133 - DNA, 75 bp, synthetic construct
  source 1..75: mol_type = other DNA
cgtaactcttgagcatgtgtcggtcacggatgcagggcaggccggagttgctgcgatgattattaatgatgccct

SEQ ID NO: 163134 - DNA, 75 bp, synthetic construct
  source 1..75: mol_type = other DNA
cattctgcgatgttgttggcgacaacactgagattatctccgagttggttgggcaagatggcgttctggttattt

SEQ ID NO: 163135 - DNA, 75 bp, synthetic construct
  source 1..75: mol_type = other DNA
tcaaccagccattggcgacaacccatttgtagtagtgctgccagatgtcattattgataacgcctctgcggatcc

SEQ ID NO: 163136 - DNA, 75 bp, synthetic construct
  source 1..75: mol_type = other DNA
ttgtcctccgggcgtaacgattatgaacgtacgtcagggcgaaccattaggtttaggccactccattttgtgtgc

SEQ ID NO: 163137 - DNA, 75 bp, synthetic construct
  source 1..75: mol_type = other DNA
agctgaagatatgatgcgcgcaggtcgtgacgtcgagaaaaacgtcttaagtcgtgcactatacaaagtactggc

SEQ ID NO: 163138 - DNA, 75 bp, synthetic construct
  source 1..75: mol_type = other DNA
aactactggcggaagttcagtccatctgcccgccgggcgtgaccattatgaacgtacgtcagggcgaacctttag

SEQ ID NO: 163139 - DNA, 75 bp, synthetic construct
  source 1..75: mol_type = other DNA
tgccgaactggcgaaaaaacagtctgttgatgcaatgctgatgactggtgacagctacgactgcggtaaaaaaat

SEQ ID NO: 163140 - DNA, 75 bp, synthetic construct
  source 1..75: mol_type = other DNA
caaactgcaaccggcacgagaattttacgccccggttggcaccacgctactggaggcgctggaaagcaataaagt

SEQ ID NO: 163141 - DNA, 75 bp, synthetic construct
  source 1..75: mol_type = other DNA
acatcccggttggttctactgttcataacgtagaaatgaaaccaggtaaaggcggtcagctggcacgttccgctg

SEQ ID NO: 163142 - DNA, 75 bp, synthetic construct
  source 1..75: mol_type = other DNA
atgcattcactccaacgaaaagttttgcgtaccatttgcccggatcaaaagggcctgatcgcgcgtattactaat

SEQ ID NO: 163143 - DNA, 75 bp, synthetic construct
  source 1..75: mol_type = other DNA
gtgagctggcggggatggggaagggcagaaatcatgatactccgccagtgcgccgggactatgacagtcgagagt

SEQ ID NO: 163144 - DNA, 75 bp, synthetic construct
  source 1..75: mol_type = other DNA
cgccggaactatgacggtcgagagtattgggaagctgatcggtcgtaccggtgatgccgtcaggactaaagcgcg

SEQ ID NO: 163145 - DNA, 75 bp, synthetic construct
  source 1..75: mol_type = other DNA
aggagagaaatcgccagaaaattcggaatgccgttgcgcacagtgaataactacgtttatttcgacaggagggtg

SEQ ID NO: 163146 - DNA, 75 bp, synthetic construct
  source 1..75: mol_type = other DNA
tgctcggttcaatgctgatcccgttcgttactctgctggttttcggcgtgctcacttactacgttatcgggccgg

SEQ ID NO: 163147 - DNA, 75 bp, synthetic construct
  source 1..75: mol_type = other DNA
tggtgctggggctggcgattggctatttcgtcttctggttccgtaaagtccgtctcggcaaagcgttacaaccgc

SEQ ID NO: 163148 - DNA, 75 bp, synthetic construct
  source 1..75: mol_type = other DNA
ccacggtcgcgaccgaaccggctattccttacgctctggcggcaccactgccaatgattaccgccaatacgctgg

SEQ ID NO: 163149 - DNA, 75 bp, synthetic construct
  source 1..75: mol_type = other DNA
gggctgaaatcctgatactccggcagtgtgcgggaaccatgcgggtgaaagacatcgggaagctgacggggcgta

SEQ ID NO: 163150 - DNA, 75 bp, synthetic construct
  source 1..75: mol_type = other DNA
tcagaagtgggagcgagtctgtgccgcgctgcgggaactgaacaaacacagggatattctccgggatattaccgc

SEQ ID NO: 163151 - DNA, 75 bp, synthetic construct
  source 1..75: mol_type = other DNA
gtccgtgccacacaggaagcccatgggatgggcgttggaaatgagaattcccctgcgcctccagagacaatgccg

SEQ ID NO: 163152 - DNA, 75 bp, synthetic construct
  source 1..75: mol_type = other DNA
gtgtcagcctgatgttacggggtgattatcaccagtcaacaaaatatccgcagagtgatattgaactggcgcgac

SEQ ID NO: 163153 - DNA, 75 bp, synthetic construct
  source 1..75: mol_type = other DNA
aggcggctgtcaggacgaaagcccgggagatgggaataagtctgattctgcgtggtgattttcaccagtcagcaa

SEQ ID NO: 163154 - DNA, 75 bp, synthetic construct
  source 1..75: mol_type = other DNA
atgaaggtaaaaagcattggcgcacttatcggacgaactgaagcggcagtgagaacgaaggcacgggagctgggc

SEQ ID NO: 163155 - DNA, 75 bp, synthetic construct
  source 1..75: mol_type = other DNA
aaacccagaaaaagatatctatctgtacattaactctccaggcggggtgattactgccgggatgtctatctatga

SEQ ID NO: 163156 - DNA, 75 bp, synthetic construct
  source 1..75: mol_type = other DNA
atgtcatacagcggcgaacgagataactttgcaccccatatggcgctggtgccaatggtcattgaacagacctca

SEQ ID NO: 163157 - DNA, 75 bp, synthetic construct
  source 1..75: mol_type = other DNA
catttttctgactggccaggttgaagaccatatggctaacctgattgtggctcagatgctgttcctggaagcaga

SEQ ID NO: 163158 - DNA, 75 bp, synthetic construct
  source 1..75: mol_type = other DNA
gggggcagtattttgatatttactatcagagctggtggcctgaaggctactccgtcagcgattttgctaaagcag

SEQ ID NO: 163159 - DNA, 75 bp, synthetic construct
  source 1..75: mol_type = other DNA
acgtcgtcgaaaaaactatcatgaatggcggctggaacgtctaacggggctcgaatatcgcccacttacgcccaa

SEQ ID NO: 163160 - DNA, 75 bp, synthetic construct
  source 1..75: mol_type = other DNA
attctcgtctacttaaggaacgcgtcatttttctgactggccaggttgaagatcacatggctaacctgattgtgg

SEQ ID NO: 163161 - DNA, 75 bp, synthetic construct
  source 1..75: mol_type = other DNA
gcatgaatatatcagtcaggggctggaatccatcctcggcgcactggatattgacggctgttatgataaacagcg

SEQ ID NO: 163162 - DNA, 75 bp, synthetic construct
  source 1..75: mol_type = other DNA
tccatgcggccctggaacgatacccagaccaaaaagtcaatatatcagcccttttcagcttcctgagaaggatag

SEQ ID NO: 163163 - DNA, 75 bp, synthetic construct
  source 1..75: mol_type = other DNA
cttgaattgatcatatgcggattagaaaaacaacttaaatgtgaaagtgggtcggtaatgactccaacttattga

SEQ ID NO: 163164 - DNA, 75 bp, synthetic construct
  source 1..75: mol_type = other DNA
gtcagcaccatctgtatgggccaggcggcctcgatgggcgctttcttgttgaccgcaggggcaaaaggtaaacgt

SEQ ID NO: 163165 - DNA, 75 bp, synthetic construct
  source 1..75: mol_type = other DNA
tgatgttagcagaggattttttaatgaagttagcagcgagggagagcgacggagaaataatcgttttttacatgg

SEQ ID NO: 163166 - DNA, 75 bp, synthetic construct
  source 1..75: mol_type = other DNA
gctgcctgaaggagaaaatttcagcgttctacgtcagcggatacaaagtatgtttcctgagcgacaaatcaattt

SEQ ID NO: 163167 - DNA, 75 bp, synthetic construct
  source 1..75: mol_type = other DNA
tcgaacgtaaactcttcaccctgaatacaggtcatgctataaccgcgtacctcggaaaactggccggtcatcaga

SEQ ID NO: 163168 - DNA, 75 bp, synthetic construct
  source 1..75: mol_type = other DNA
gacaaaggtccgcaggcggcgctggcacagatttccggtcttgatgccaacagcgaggttgtatccgaggcggta

SEQ ID NO: 163169 - DNA, 75 bp, synthetic construct
  source 1..75: mol_type = other DNA
cgtaggccgtcagccgctgcgtaaactgagtgctggcgaccgtctgatcaagccattgctcggtacgctggaata

SEQ ID NO: 163170 - DNA, 75 bp, synthetic construct
  source 1..75: mol_type = other DNA
atgaaagcattacattttggtgcaggtaatatcggtcgtggctttatcggtaaactgctggcagacgcgggtatc

SEQ ID NO: 163171 - DNA, 75 bp, synthetic construct
  source 1..75: mol_type = other DNA
ggcaccacgcagctgaaaggccatgtgatgaacgccctgccggaagatgccaaagcgtgggtagaagaacacgtt

SEQ ID NO: 163172 - DNA, 75 bp, synthetic construct
  source 1..75: mol_type = other DNA
cgtaggccgtcagccgctgcgtaaactgagtgctggcgaccgtctgatcaagccactgctcggaaccctggaata

SEQ ID NO: 163173 - DNA, 75 bp, synthetic construct
  source 1..75: mol_type = other DNA
cgcttatccagcgaagagattgccgctgccgattacgtgattctcgccaccgggcgtggtctgagcggcgacgat

SEQ ID NO: 163174 - DNA, 75 bp, synthetic construct
  source 1..75: mol_type = other DNA
aaatgcatcccatgtgatttaaaggttaacgaaacaaacgctgaatatcttgtgcgtaaatttgctgaagcggag

SEQ ID NO: 163175 - DNA, 75 bp, synthetic construct
  source 1..75: mol_type = other DNA
atgactcgcgccgcctattgcggaagcgctgttgatgctgagagattcgccgcccagcttcgcaaaggaggcaac

SEQ ID NO: 163176 - DNA, 75 bp, synthetic construct
  source 1..75: mol_type = other DNA
ataacgcccgtagccagctgaaccgtctggaaaacctgctggggaatggcaaatatcacagcgactggatctcta

SEQ ID NO: 163177 - DNA, 75 bp, synthetic construct
  source 1..75: mol_type = other DNA
gccgataaacccgctttcgctccggcgtttctggtttgctatctggcgaacgacaaagcgttgctcggcacccag

SEQ ID NO: 163178 - DNA, 75 bp, synthetic construct
  source 1..75: mol_type = other DNA
ggcgctgaacatttcattcattatcgtcctgaaaggattgtggttacgccgcaaagcgaaagccgcacaacagga

SEQ ID NO: 163179 - DNA, 75 bp, synthetic construct
  source 1..75: mol_type = other DNA
gtgccgggatattctccgggatattaccgccaccagagagcagcagtgagtggctggaagaagtggtgccgggct

SEQ ID NO: 163180 - DNA, 75 bp, synthetic construct
  source 1..75: mol_type = other DNA
ttgaaagaactagcaaaggcgagagaagttacgatatatattctcgccttttaaaagatcgtattataatgctaa

SEQ ID NO: 163181 - DNA, 75 bp, synthetic construct
  source 1..75: mol_type = other DNA
ggattccttattgatgattcacaaatgaacaagctgagtaatgaggaaagccagaagacttataacgaaatggta

SEQ ID NO: 163182 - DNA, 75 bp, synthetic construct
  source 1..75: mol_type = other DNA
cacgcaaagtttatcttcaggagaatagctacgcttgtgtctgcaatccagtgcccgaggaccgtgaagaagaaa

SEQ ID NO: 163183 - DNA, 75 bp, synthetic construct
  source 1..75: mol_type = other DNA
cgtggtggtttatctctttgtatctatttttattaatagcattaacatttattacctttggtaaaagtaatctta

SEQ ID NO: 163184 - DNA, 75 bp, synthetic construct
  source 1..75: mol_type = other DNA
gtattttttccttactcgcatctggggtgacataacaaaaccaccacacataattaaaacaataattgtaattct

SEQ ID NO: 163185 - DNA, 75 bp, synthetic construct
  source 1..75: mol_type = other DNA
atgattaaaaccgaatttggcattattgatgaaattgacgctgataaagattatagtcactatgaacctgaaaaa

SEQ ID NO: 163186 - DNA, 75 bp, synthetic construct
  source 1..75: mol_type = other DNA
actgctggcagacgcgggtatccaactgacgtttgccgatgtcaatcaggtggtacttgatgccctgaatgcccg

SEQ ID NO: 163187 - DNA, 75 bp, synthetic construct
  source 1..75: mol_type = other DNA
ccgtcatagctatcaggttcacgttgtcggcgaaaccgagcaggtggataccgttaccggcgtaaatgccgtcag

SEQ ID NO: 163188 - DNA, 75 bp, synthetic construct
  source 1..75: mol_type = other DNA
gacatacagacacgggaactggtgatgctgatcaaacgactggcatcttctctgaaagcggtgaaacccgacagt

SEQ ID NO: 163189 - DNA, 75 bp, synthetic construct
  source 1..75: mol_type = other DNA
attaagtcgcaacgagcacgatcaaaaaatggcggatgccattgacgcttatcagcctgactacgtggtgctggc

SEQ ID NO: 163190 - DNA, 75 bp, synthetic construct
  source 1..75: mol_type = other DNA
ttaatcgaatttgaacgctttgatggttcagcgaaggggcagcaaaagctggaagaaaaattaaaaaacttactg

SEQ ID NO: 163191 - DNA, 75 bp, synthetic construct
  source 1..75: mol_type = other DNA
tggcgtatctgattttgccgctgtttgcattcgctaatgctggcgtttctctgcaaggcgtcacgctggatggct

SEQ ID NO: 163192 - DNA, 75 bp, synthetic construct
  source 1..75: mol_type = other DNA
tatctttattgccagccttgcctttggtagcgtagatccagaactgattaactgggcgaaactcggtatcctggt

SEQ ID NO: 163193 - DNA, 75 bp, synthetic construct
  source 1..75: mol_type = other DNA
tgagacgccggttcagctccgggttggttcactcgaaatcaacaaaaacatgctgttatggataaatgacgcgct

SEQ ID NO: 163194 - DNA, 75 bp, synthetic construct
  source 1..75: mol_type = other DNA
taattgaatcattaaataaaatgataatggattgttctagagtaatcgctcacttagataattattgtggggctt

SEQ ID NO: 163195 - DNA, 75 bp, synthetic construct
  source 1..75: mol_type = other DNA
catcaaacaatatgttcaatagtgcgcttagattgcggaccagaaatttaattgacatgatggatgaggaggatg

SEQ ID NO: 163196 - DNA, 75 bp, synthetic construct
  source 1..75: mol_type = other DNA
ggtactcgcggtattgaatctgtgtggtgtacgccgcacgggcgtctatattctggttggcgtagtgttgtggac

SEQ ID NO: 163197 - DNA, 75 bp, synthetic construct
  source 1..75: mol_type = other DNA
accaccgctccggctctgcaattttactccggcaacttcctcggcggcacgccgtcacggggaaccgaaccttac

SEQ ID NO: 163198 - DNA, 75 bp, synthetic construct
  source 1..75: mol_type = other DNA
aaaccatcctgaatggccgcaaccagactgcttcttacgcccaggcgaagagtattccagcctgacggaatatca

SEQ ID NO: 163199 - DNA, 75 bp, synthetic construct
  source 1..75: mol_type = other DNA
gcagattctggcggacgaatatctaccggtagatgaagacggtatcccgcacgacggcctgaaatctgtcgccgg

SEQ ID NO: 163200 - DNA, 75 bp, synthetic construct
  source 1..75: mol_type = other DNA
tcgttgcgatatgcttgttcataaccggtgtcgctattttgaacatccagctctggtattccgcaaaagcagagt

SEQ ID NO: 163201 - DNA, 75 bp, synthetic construct
  source 1..75: mol_type = other DNA
aattaccgtgacagttttacccgccgcgatttaaaccttgttctggaagtcaccgagcgtgagccattaaatgtt

SEQ ID NO: 163202 - DNA, 75 bp, synthetic construct
  source 1..75: mol_type = other DNA
gtcaacgcagacccagcatcaacccgaattctggattgtgtattggatctggcgcgtaaactttcgatcagtatc

SEQ ID NO: 163203 - DNA, 75 bp, synthetic construct
  source 1..75: mol_type = other DNA
atgcggcaagggcagtttcgccgtgacctgttttatcggctgagcattttacgcctgcaactgccaccactgcgt

SEQ ID NO: 163204 - DNA, 75 bp, synthetic construct
  source 1..75: mol_type = other DNA
cgccattctctcggagtcggcgtactcggcggcctatgcccttgccagcgccgccgaccggatcctggtcccccg

SEQ ID NO: 163205 - DNA, 75 bp, synthetic construct
  source 1..75: mol_type = other DNA
tggctgctgatggtgtggaacttggactggctgatgaggtgtgtcctcctgatgctgcgttcagaaacttacttg

SEQ ID NO: 163206 - DNA, 75 bp, synthetic construct
  source 1..75: mol_type = other DNA
gaggatggcgatttttgcgtggcccgaatgaatggcgatgaattcaccttcaaacgattcattcgtgagagcggt

SEQ ID NO: 163207 - DNA, 75 bp, synthetic construct
  source 1..75: mol_type = other DNA
ttgattacgatagctggacaaaaataatacgcggctctggcttttttgcagaaatacagaaattcacaaagaccc

SEQ ID NO: 163208 - DNA, 75 bp, synthetic construct
  source 1..75: mol_type = other DNA
atgacccgtgtcagtgtggcagtggtaaaaaatttaaaaagtgctgcctgcactgacaaagcggaagggggcttg

SEQ ID NO: 163209 - DNA, 75 bp, synthetic construct
  source 1..75: mol_type = other DNA
cgagtctggtttcccgctatgtgccgtcgggtgatgttcccgatgtggtacaagaagcttttattaaagcctatc

SEQ ID NO: 163210 - DNA, 75 bp, synthetic construct
  source 1..75: mol_type = other DNA
atgagcgagcagttaacggaccaggtcctggttgaacgggtccagaagggagatcagaaagcctttaacctactg

SEQ ID NO: 163211 - DNA, 75 bp, synthetic construct
  source 1..75: mol_type = other DNA
aagtactcaccacaaaatgatgcaacatattttagtgatatgcatgatcatattttagtatatgcaaagcaacgg

SEQ ID NO: 163212 - DNA, 75 bp, synthetic construct
  source 1..75: mol_type = other DNA
taccccagattaaaacttgctaaaaatttacttaggaatgatggggtaattataataagcattgatgactcagaa

SEQ ID NO: 163213 - DNA, 75 bp, synthetic construct
  source 1..75: mol_type = other DNA
ttatcttgaaattactggtcaaatagaaaatggcaagaaaataagttctaatattgagaaaggcggtagatttca

SEQ ID NO: 163214 - DNA, 75 bp, synthetic construct
  source 1..75: mol_type = other DNA
gacgacaaagaagagcgctatggcctgaactggcatggtaagcgtcaggctcgtcagcttgctcttaccccttcc

SEQ ID NO: 163215 - DNA, 75 bp, synthetic construct
  source 1..75: mol_type = other DNA
cttttatcagccatcgctctggacgcgcccggtattaaaagcaaacgcccaatcactgccagataacgccctcct

SEQ ID NO: 163216 - DNA, 75 bp, synthetic construct
  source 1..75: mol_type = other DNA
gagtcattcaacacaggaagcgcagttctccgcactcgatgacatcaccgccagcgagttgattaacgatattga

SEQ ID NO: 163217 - DNA, 75 bp, synthetic construct
  source 1..75: mol_type = other DNA
aagcaagctgtggctatgggaaggcaaagcggaaagctatggctgggggagtaattcaacacaggaagcgcagtt

SEQ ID NO: 163218 - DNA, 75 bp, synthetic construct
  source 1..75: mol_type = other DNA
ttccgccgactcactggcgggatttgcctgggatctgtttaccgcctggcagaccgctggcgcgccgtcgaaaga

SEQ ID NO: 163219 - DNA, 75 bp, synthetic construct
  source 1..75: mol_type = other DNA
gtgatattgctctgatgcaacttaacggtatcgcccagaagctgaaattcaaagcattgcaggagcgggcaaaag

SEQ ID NO: 163220 - DNA, 75 bp, synthetic construct
  source 1..75: mol_type = other DNA
gggggattaattcaacacaggaagcgctgttctccgcactcgatgacatcaccgctagcgagttaattaacgaca

SEQ ID NO: 163221 - DNA, 75 bp, synthetic construct
  source 1..75: mol_type = other DNA
gacacatataaatatatcggcgcttctgactcggcaattgacgcatgggaacgtgaggacttcgctacactcatc

SEQ ID NO: 163222 - DNA, 75 bp, synthetic construct
  source 1..75: mol_type = other DNA
aggactatttaattaccgaccggtgagacctatagatactataatatcaagagctttattggagactattatata

SEQ ID NO: 163223 - DNA, 75 bp, synthetic construct
  source 1..75: mol_type = other DNA
cctataatgattaaaccattatattttatttcatgcgtgatgtttcccttgcatgcaattccaaaagattattgg

SEQ ID NO: 163224 - DNA, 75 bp, synthetic construct
  source 1..75: mol_type = other DNA
aatagtagcgactgatgagcacattcttgcctcattagaaaaatattacgagccatatgccatttttgataatta

SEQ ID NO: 163225 - DNA, 75 bp, synthetic construct
  source 1..75: mol_type = other DNA
ttaagcaagctgtggctatgggaaggcaaagcagaaagctatggctgggggagtaattcaacacaggaagcgcag

SEQ ID NO: 163226 - DNA, 75 bp, synthetic construct
  source 1..75: mol_type = other DNA
actcgttttcacgctaccctcaagaaggttttgcggttgctaattattttgccgcaacggaactggcacctgccg

SEQ ID NO: 163227 - DNA, 75 bp, synthetic construct
  source 1..75: mol_type = other DNA
agaaagtcaccgtagaggcattatttctacgagaaatacgaacacgctttggtaagtttcgtctgggatatctgt

SEQ ID NO: 163228 - DNA, 75 bp, synthetic construct
  source 1..75: mol_type = other DNA
caatgttcactctggtcaccctgttcatcggtctggcgttataccgaacgcgtgaagaggcaatgctgacatcat

SEQ ID NO: 163229 - DNA, 75 bp, synthetic construct
  source 1..75: mol_type = other DNA
aatgtccgtcatctcaatatatccccgtaaccccttatgccacgaacctaaagctgctacgtgactcagaagccc

SEQ ID NO: 163230 - DNA, 75 bp, synthetic construct
  source 1..75: mol_type = other DNA
caggggcagatgaacacgctgtcgcgccactcggatacagcgaaagcgttcacctatctgctgaagcaatgggac

SEQ ID NO: 163231 - DNA, 75 bp, synthetic construct
  source 1..75: mol_type = other DNA
cgctccgtcgtatcggggaactgtacgctatcgaggctgagatccgcggcagtccggcagaagagcgactggcgg

SEQ ID NO: 163232 - DNA, 75 bp, synthetic construct
  source 1..75: mol_type = other DNA
agaagcttactatagaggcattatttcttcgagaaattagaacgcgctttggtaaatatcgactgggatatctct

SEQ ID NO: 163233 - DNA, 75 bp, synthetic construct
  source 1..75: mol_type = other DNA
tgagccgctcccgatgctgactgatacaccagaacaaacaatacccgcgccagatatgcaacatgcgggcaaacc

SEQ ID NO: 163234 - DNA, 75 bp, synthetic construct
  source 1..75: mol_type = other DNA
cccttatcgtgagtggttttactggagttaatgctgatagccaaagtgagaaccggattgtcatcattacgccac

SEQ ID NO: 163235 - DNA, 75 bp, synthetic construct
  source 1..75: mol_type = other DNA
gtttccggcagccgcctgaaagacctgcccaaaccgaacaaaagcgatgatgaatcgcggtcgaacgatgcggtt

SEQ ID NO: 163236 - DNA, 75 bp, synthetic construct
  source 1..75: mol_type = other DNA
accgccgtcagggtgtggagctgagccgtgccacactggggcgctggactggtgccgttgctgaactactggagc

SEQ ID NO: 163237 - DNA, 75 bp, synthetic construct
  source 1..75: mol_type = other DNA
gctggtcgctaaactgcagagaatgttgttcggccgcagtagcgagaaaaaccgcgagaagatagaaaagaagat

SEQ ID NO: 163238 - DNA, 75 bp, synthetic construct
  source 1..75: mol_type = other DNA
gtttctttggttgaagagcaggggcgcaaaccggtccaagacccagaaaaacagaacgtggctcgccttcctaag

SEQ ID NO: 163239 - DNA, 75 bp, synthetic construct
  source 1..75: mol_type = other DNA
taacgacagcatacttacagcaattggtattttttgcaggcgaggctacttgtcatcctgacgcaaactatttat

SEQ ID NO: 163240 - DNA, 75 bp, synthetic construct
  source 1..75: mol_type = other DNA
tggcgtatctgattttgcctctgtttgcatttgctaatgccggcgtctctttacagggggttacgctggatggtc

SEQ ID NO: 163241 - DNA, 75 bp, synthetic construct
  source 1..75: mol_type = other DNA
ttctttgtgccgttttactgacggtcacacccgcagcgtcagcggatgtgaacagcgacatgaatcagttcttta

SEQ ID NO: 163242 - DNA, 75 bp, synthetic construct
  source 1..75: mol_type = other DNA
aaaaagaactcactgttaattaaagcggttgaagcggcaaactttccgcaggatcgttttcagcccaccaccatt

SEQ ID NO: 163243 - DNA, 75 bp, synthetic construct
  source 1..75: mol_type = other DNA
gtttatcgcgaactggttaaccgtctccacgatacagcgatcaagtgtgctggcacccagcaattacgagaaaga

SEQ ID NO: 163244 - DNA, 75 bp, synthetic construct
  source 1..75: mol_type = other DNA
tgtcatcctgacgcaaactatttattggaatttgagaggttagcgtcacccggtatcgttctggaactggcccaa

SEQ ID NO: 163245 - DNA, 75 bp, synthetic construct
  source 1..75: mol_type = other DNA
ctggcatggggtatatttttctgccaaagtttacccaaactgggcagcaacgttatgcccacggtgaagctatcg

SEQ ID NO: 163246 - DNA, 75 bp, synthetic construct
  source 1..75: mol_type = other DNA
atgagtctggtaggcgatatgtttattatgatctgctggcttcttccttttttattttgttcccttgatcttttg

SEQ ID NO: 163247 - DNA, 75 bp, synthetic construct
  source 1..75: mol_type = other DNA
atttccacaagtacctgatggaattaccctgatctccgtaaataataacctgatatcgcatatagactcatttcc

SEQ ID NO: 163248 - DNA, 75 bp, synthetic construct
  source 1..75: mol_type = other DNA
cacccaggcgggcgtctggcaggggcaggccgccgggtatgcctatggtggctccctgtatgcccgcacccaggt

SEQ ID NO: 163249 - DNA, 75 bp, synthetic construct
  source 1..75: mol_type = other DNA
tttattatgatctgctggattattccttttttattttgttcccttgagcttttatttgcccgcgatgatgacaag

SEQ ID NO: 163250 - DNA, 75 bp, synthetic construct
  source 1..75: mol_type = other DNA
cgttatgcccacggtgaagctatcgttaactatcttgcgcgtaaagaggcagcaacacacagtgggcggcggagg

SEQ ID NO: 163251 - DNA, 75 bp, synthetic construct
  source 1..75: mol_type = other DNA
aatcctcaccggtatgccgggggataaagtcgagatcaacgataagtggaagatcaccgtcaatggtgatgtcgt

SEQ ID NO: 163252 - DNA, 75 bp, synthetic construct
  source 1..75: mol_type = other DNA
tcattgatctgaaagaccaatctctggagaggggggctgtttacgccttccacgctaagaacatgcagcctttct

SEQ ID NO: 163253 - DNA, 75 bp, synthetic construct
  source 1..75: mol_type = other DNA
ccagtgatgcttcggtacagcaagttatcaagggcaccggtgtcgttaaagacattgatatgaatactaagaaaa

SEQ ID NO: 163254 - DNA, 75 bp, synthetic construct
  source 1..75: mol_type = other DNA
agtatttgtcggagtgtgtagaactgggagacgaccctgaggatctggtcgtttggcaaaagtttgagcactggg

SEQ ID NO: 163255 - DNA, 75 bp, synthetic construct
  source 1..75: mol_type = other DNA
tgccgacgctggcagactgctgccttgtcccacagtgggcaaatgcgttacgcatgaactgcgacctgagtgcat

SEQ ID NO: 163256 - DNA, 75 bp, synthetic construct
  source 1..75: mol_type = other DNA
gaacaactactggtttatgggcaaaagcctattcagcttcgactcacgctactgggggactgtgaaaaatgatca

SEQ ID NO: 163257 - DNA, 75 bp, synthetic construct
  source 1..75: mol_type = other DNA
cactgattatcatgctcttattacctggtgcgcaggcacacaatttcgtcacaggaaaaccggttccccctgttt

SEQ ID NO: 163258 - DNA, 75 bp, synthetic construct
  source 1..75: mol_type = other DNA
caaaagtggaacagcacacaattggcgggaaaagtccgcattatccagtatatcgccgggcgtaagtcggcgaag

SEQ ID NO: 163259 - DNA, 75 bp, synthetic construct
  source 1..75: mol_type = other DNA
atgtcatctcgtttgattattgcgctggttatcatgctcttagccccgggtgtgcaggcgcacaatttcgtcact

SEQ ID NO: 163260 - DNA, 75 bp, synthetic construct
  source 1..75: mol_type = other DNA
ccactctggaaagaggctatcttgaggccgcattaaagattaagccgggccatacgctaggcgtcattgatgcca

SEQ ID NO: 163261 - DNA, 75 bp, synthetic construct
  source 1..75: mol_type = other DNA
cgccatgcgcgacttttgcttttggctcggaccacaaaaaagacactttctttgggcgcaatttttgttgtgaga

SEQ ID NO: 163262 - DNA, 75 bp, synthetic construct
  source 1..75: mol_type = other DNA
tgatcatcgcactcttagcgccaggcgcggcggcacacaatttcgtcactggcaaaacggttacccctgtttata

SEQ ID NO: 163263 - DNA, 75 bp, synthetic construct
  source 1..75: mol_type = other DNA
tgtcccaaaccctgttcaaatcctggtttgtggattttgatccagtgattgataacgctctggatgcaggaaatc

SEQ ID NO: 163264 - DNA, 75 bp, synthetic construct
  source 1..75: mol_type = other DNA
ttcgttggtcgtgttggcggcgttgctacctatcgtaactccaacttctttggtctggttgatggcctgaacttc

SEQ ID NO: 163265 - DNA, 75 bp, synthetic construct
  source 1..75: mol_type = other DNA
gcggcggcaaggcactttgccaatcgggttatggaacaggatcctgctatagccagagctattgctaaagggctc

SEQ ID NO: 163266 - DNA, 75 bp, synthetic construct
  source 1..75: mol_type = other DNA
tcgtccaattgttggggataaccctttcgtagtcgtattacctgatgtggttcttgatacagcgagcgcagatcc

SEQ ID NO: 163267 - DNA, 75 bp, synthetic construct
  source 1..75: mol_type = other DNA
cagccacagacgctggattccgacctcatggcggttggccgttatgtcctgaacgcggatatctgggccgagctg

SEQ ID NO: 163268 - DNA, 75 bp, synthetic construct
  source 1..75: mol_type = other DNA
catgggggcgtatccaactgaccgacgccattgccgaactggcgaagaagcagtccgtcgacgcgatgctgatga

SEQ ID NO: 163269 - DNA, 75 bp, synthetic construct
  source 1..75: mol_type = other DNA
aaagattaataaaaaatatcgtgatttatttgttctatttgattacggcttgcatctcgaaaaaatgggtttatt

SEQ ID NO: 163270 - DNA, 75 bp, synthetic construct
  source 1..75: mol_type = other DNA
atgaagtcggttcaggaaaccatacgtcacgtcttcatagaccatcttgctttcacttttccaataagtgagctt

SEQ ID NO: 163271 - DNA, 75 bp, synthetic construct
  source 1..75: mol_type = other DNA
tacaaatcaggctcgttccgttacacggcgatcaattggggtacggttaccgacgtagctaaacgcaaatcagcg

SEQ ID NO: 163272 - DNA, 75 bp, synthetic construct
  source 1..75: mol_type = other DNA
attttcatattattattcaattttcacagttgttacatttcttttcagtaaagtcttaattgcaggtaacggcgt

SEQ ID NO: 163273 - DNA, 75 bp, synthetic construct
  source 1..75: mol_type = other DNA
acacgttttaccgcaaattatcatcgctactgaaaccgattacaccaaccacgccagccaaatatttgtaatatt

SEQ ID NO: 163274 - DNA, 75 bp, synthetic construct
  source 1..75: mol_type = other DNA
atgccgcatccggcaaaaagctgcccgcacaataacatcattcttcctgaacacgttttaccgcaaattatcatc

SEQ ID NO: 163275 - DNA, 75 bp, synthetic construct
  source 1..75: mol_type = other DNA
ggggtatatgcaggcgtttgtgaagtatgggctgcgcaacctgaaagaaggggcgaagttccgtaaagggattga

SEQ ID NO: 163276 - DNA, 75 bp, synthetic construct
  source 1..75: mol_type = other DNA
acggaattatcagtaccaaagcctcaatgctgaaagcggcaagagcggaaggttttttctgtattcatcgcctgt

SEQ ID NO: 163277 - DNA, 75 bp, synthetic construct
  source 1..75: mol_type = other DNA
caacattgataagcaagttgcgcaatcgaatccggattgtattgagatcctgccaggctgtatgcctaaagtgct

SEQ ID NO: 163278 - DNA, 75 bp, synthetic construct
  source 1..75: mol_type = other DNA
gaatatcggagagaacgacacaaaaattgataatccgacgacgggtatcccggccaattcaatatggctggtcgt

SEQ ID NO: 163279 - DNA, 75 bp, synthetic construct
  source 1..75: mol_type = other DNA
gcggtggaacgggaacgaaaggcagcataaccggacgttttaccgagaccctgattcggcctgacggcacttcat

SEQ ID NO: 163280 - DNA, 75 bp, synthetic construct
  source 1..75: mol_type = other DNA
gggctatatgcaggcgttcgtgaagtatggattacgcaacctgaaagaaggggcgaaattccgtaaagggattga

SEQ ID NO: 163281 - DNA, 75 bp, synthetic construct
  source 1..75: mol_type = other DNA
aagaaggcgccaaattccgcgaaagcattaaggaaggtgcgaataagcggggaaattcttctcggctgactcagt

SEQ ID NO: 163282 - DNA, 75 bp, synthetic construct
  source 1..75: mol_type = other DNA
gaaatcgtcctggtcacccacgcctccaaaaatgccgtggaaaaccacttcgacacctcctatgaactggaagct

SEQ ID NO: 163283 - DNA, 75 bp, synthetic construct
  source 1..75: mol_type = other DNA
cgacacctcctacgaactggaagctctgctggagcaacgcgtgaagcgtcagctgctggcggaagttcagtccat

SEQ ID NO: 163284 - DNA, 75 bp, synthetic construct
  source 1..75: mol_type = other DNA
tgcaattgacgccggtgtcgtggcgctttctactactaatacccgcgtctggacgttagcgaaaaaattgcttta

SEQ ID NO: 163285 - DNA, 75 bp, synthetic construct
  source 1..75: mol_type = other DNA
tgcgattagcgcaggtgtcgtggcgctttccactacgaataccggggtctggacgttagcgaaaaaattgcttta

SEQ ID NO: 163286 - DNA, 75 bp, synthetic construct
  source 1..75: mol_type = other DNA
tgcgattaacgccggtgtagtggcgctttctaccacgaataccggggtctggacgttagcgaaaaaattgctttg

SEQ ID NO: 163287 - DNA, 75 bp, synthetic construct
  source 1..75: mol_type = other DNA
attctgaatttatctggcgtttctattcctgccaaaaacacctgtatatctgcgtaatggctgctaccgaagcag

SEQ ID NO: 163288 - DNA, 75 bp, synthetic construct
  source 1..75: mol_type = other DNA
gttcaccggcatcggcaaatctgaaggaaaggcgcttcttatcgccttcctgcgtaactgcaaaggctttcgcac

SEQ ID NO: 163289 - DNA, 75 bp, synthetic construct
  source 1..75: mol_type = other DNA
cgggagcggcaagagcactttcacgcacatagccagccttctggcagggaaacagaacaccgtaagcgctgagat

SEQ ID NO: 163290 - DNA, 75 bp, synthetic construct
  source 1..75: mol_type = other DNA
ggctgtggctggagtgaagaccgtacacgaatacgcggggattactgacaccagccccgtggatttatccgacca

SEQ ID NO: 163291 - DNA, 75 bp, synthetic construct
  source 1..75: mol_type = other DNA
gcccagctgcttgccgatcgctttgatggcgtttgcgtacatcctgaaagtgaaatcgttcacgtatggcgcggc

SEQ ID NO: 163292 - DNA, 75 bp, synthetic construct
  source 1..75: mol_type = other DNA
agcagtcacgcggcataaaacacaaagaaacagaagtcattatttttgcgggtagtgatgcctgggcacacgcga

SEQ ID NO: 163293 - DNA, 75 bp, synthetic construct
  source 1..75: mol_type = other DNA
tgaaatcgttcacgtatggcgcggcggggtatggtgtccggtcagcacaatggaacttagccgcgaaatggtggc

SEQ ID NO: 163294 - DNA, 75 bp, synthetic construct
  source 1..75: mol_type = other DNA
ttgaaattaacccgaaatatgaaaagcgtttcacaacaattatcaggtccgtcgtgctggcaacaaataacgtgc

SEQ ID NO: 163295 - DNA, 75 bp, synthetic construct
  source 1..75: mol_type = other DNA
agcagcaaacggatccggttgttgagctttgcgcggcgctggagtttctggaggaagctcgtgggctaatgatgg

SEQ ID NO: 163296 - DNA, 75 bp, synthetic construct
  source 1..75: mol_type = other DNA
cgaggaaaatagacgacatttttggtgataatgtcccactctggaattatagaagaaataaagaaggcgtaactg

SEQ ID NO: 163297 - DNA, 75 bp, synthetic construct
  source 1..75: mol_type = other DNA
gtgcgcttgacctgaaaacgggggaattttccccgcacacgccggagaactggatcaccacgcacaacggcattg

SEQ ID NO: 163298 - DNA, 75 bp, synthetic construct
  source 1..75: mol_type = other DNA
cagggaaacagaacacggtaagcgctgaaatgacatcgcttgatgatgctggtgggcgtgcgcaggttgtcggga

SEQ ID NO: 163299 - DNA, 75 bp, synthetic construct
  source 1..75: mol_type = other DNA
atattcagggccggatatcttgcgccagtaatgataaaggcgattggccagaagctggcggcggcaggcgtacag

SEQ ID NO: 163300 - DNA, 75 bp, synthetic construct
  source 1..75: mol_type = other DNA
gagcaagtcgttaatctgcctaacgaatttatcgagcagtttaagacgggtcaggccaaagagatcgataccgcg

SEQ ID NO: 163301 - DNA, 75 bp, synthetic construct
  source 1..75: mol_type = other DNA
ggcgaccgccggactccagaacaacgccgtcagccttaccgttttccaccgtgaaattgcccagacggttgctgc

SEQ ID NO: 163302 - DNA, 75 bp, synthetic construct
  source 1..75: mol_type = other DNA
taaagaagcgctacacagcaggagcgatgtgtttcatgctttttgtgtggctgggtgcagtggtgacgctctgtg

SEQ ID NO: 163303 - DNA, 75 bp, synthetic construct
  source 1..75: mol_type = other DNA
ttcatggcgttatagttcaggcagcgtggtttgtaaaagcatcactggagcagaatgcactatcgggcaactctc

SEQ ID NO: 163304 - DNA, 75 bp, synthetic construct
  source 1..75: mol_type = other DNA
tgcgaccagagaacgtgacacgcgaaaccgccaccttcaacctgccgtttatttcgctggggcaagtgggcgatg

SEQ ID NO: 163305 - DNA, 75 bp, synthetic construct
  source 1..75: mol_type = other DNA
gcgggtgaccgtctgctgatgtacgcacaactgaaggaatgggcagagaaaaactttgatatcaagaaatggtat

SEQ ID NO: 163306 - DNA, 75 bp, synthetic construct
  source 1..75: mol_type = other DNA
ccgtgatgaattaattgatacaactcaggcaagaccaattcagtattgcattaatggaacttggtataacgcggg

SEQ ID NO: 163307 - DNA, 75 bp, synthetic construct
  source 1..75: mol_type = other DNA
aagccagcggcaaaagtttacggatgtgaatatataacgcgcagggttaaaggacttacgcaaaccaatgtgaca

SEQ ID NO: 163308 - DNA, 75 bp, synthetic construct
  source 1..75: mol_type = other DNA
gcggcgaaagtttacgggcatgaatatattacgcggaaagtcaatggagttacgcagactaacgcaataacaaca

SEQ ID NO: 163309 - DNA, 75 bp, synthetic construct
  source 1..75: mol_type = other DNA
gaaactgttaccatcgcgtctaaagctggcgacgaaggtaaactgttcggttccatcggtactcgcgacatcgct

SEQ ID NO: 163310 - DNA, 75 bp, synthetic construct
  source 1..75: mol_type = other DNA
gcggcggtgactcttccaggtacacgaccagaaacagcctttaccgcgtctatctggcgtttatggcgtatgccg

SEQ ID NO: 163311 - DNA, 75 bp, synthetic construct
  source 1..75: mol_type = other DNA
ggcagatgtttattgaggccacaggagacggcgggagcggcaagagtacatttacgcatattgccagccttctgg

SEQ ID NO: 163312 - DNA, 75 bp, synthetic construct
  source 1..75: mol_type = other DNA
tgcgtgattttcttgatgccattcgtgatgacatcattgtcctggtaaggacaaagggttatacactggcagatg

SEQ ID NO: 163313 - DNA, 75 bp, synthetic construct
  source 1..75: mol_type = other DNA
caatgaaattaatgacatcaaagttaacctgtctcatattcttattgattccttagatgatgcaaaggttaacct

SEQ ID NO: 163314 - DNA, 75 bp, synthetic construct
  source 1..75: mol_type = other DNA
tttcatacttactgggcgaaaatggtatacttgaagaaatagataagctctacgaattaaatgatcacggaattg

SEQ ID NO: 163315 - DNA, 75 bp, synthetic construct
  source 1..75: mol_type = other DNA
atttgtcatcaggatttaaatcatgtctgagtattttattcggcataataaaagagattgaactaagaatgcctg

SEQ ID NO: 163316 - DNA, 75 bp, synthetic construct
  source 1..75: mol_type = other DNA
aataattaattttgattcaagtatgaatattatttgcggaccaaatgggatagggaaaaccactattttagattc

SEQ ID NO: 163317 - DNA, 75 bp, synthetic construct
  source 1..75: mol_type = other DNA
attctcaacacattacatcagccgacaattttaaaccaaaaaatgaagtcttaaatacctggtgtgtgggaatga

SEQ ID NO: 163318 - DNA, 75 bp, synthetic construct
  source 1..75: mol_type = other DNA
gtgcacaataaattaccggctggaagcctgggcgtttattaccgcgatggaatgccctgcaacatgtggggaaac

SEQ ID NO: 163319 - DNA, 75 bp, synthetic construct
  source 1..75: mol_type = other DNA
atgacgatattgaagcggcacgtcttgcactctctgaactccctgacctgaccgcaaaacgtaaaacactgcatg

SEQ ID NO: 163320 - DNA, 75 bp, synthetic construct
  source 1..75: mol_type = other DNA
tggcgaacgtcagggccaggaactgtataaagagatgcagaaacgtggctgggatgtcaaagaaagcgcggtgat

SEQ ID NO: 163321 - DNA, 75 bp, synthetic construct
  source 1..75: mol_type = other DNA
atctaaaatagctgagactttatttttcaatctcgataaagaaccctataaaaatagtcgtgaattacaggaatt

SEQ ID NO: 163322 - DNA, 75 bp, synthetic construct
  source 1..75: mol_type = other DNA
cgcaggtgagttgtaaaggttcagttgattctacgattacggatttattagaaaaatcattgaataatgcattat

SEQ ID NO: 163323 - DNA, 75 bp, synthetic construct
  source 1..75: mol_type = other DNA
taatatacaggagttaaataattcgcaggagttaaataattcgcaggagttaaataattcgcaggacttaaaaaa

SEQ ID NO: 163324 - DNA, 75 bp, synthetic construct
  source 1..75: mol_type = other DNA
aaccgttagcctttattcaacctggggaaattttgccctgttgttgccgggcaaaaggtgatattgaaatcgaga

SEQ ID NO: 163325 - DNA, 75 bp, synthetic construct
  source 1..75: mol_type = other DNA
gagcgcatacaacggcgagcacgttgccagcattgataacgataaggctaccacactgcaagcgtctatatgcct

SEQ ID NO: 163326 - DNA, 75 bp, synthetic construct
  source 1..75: mol_type = other DNA
gcactggctgcgttaattaagaatggccagctctggcaggagttgagggcatctttgctgaagaccattacccga

SEQ ID NO: 163327 - DNA, 75 bp, synthetic construct
  source 1..75: mol_type = other DNA
cgaggaaaatagacgacatttttggtgataatgtcccaaatatgtcccactctggaattatggaggatataaaga

SEQ ID NO: 163328 - DNA, 75 bp, synthetic construct
  source 1..75: mol_type = other DNA
ccgcgccattggtgtggcgctgaacgataccgcctgtaaagtgttgcgtgatcaaataggcaagcatcacaaatg

SEQ ID NO: 163329 - DNA, 75 bp, synthetic construct
  source 1..75: mol_type = other DNA
aaccgttagcctttattcagccaggggagattttgccctgttgttgccgggcaaaaggcgatattgaaatcgaga

SEQ ID NO: 163330 - DNA, 75 bp, synthetic construct
  source 1..75: mol_type = other DNA
aactgggtaataaaccacaccgagtattcgctgcgtaccccggctcgccgctgtgctaaagagtttgctgcactt

SEQ ID NO: 163331 - DNA, 75 bp, synthetic construct
  source 1..75: mol_type = other DNA
attcttcgcccgaacgaaaatcttgcagcagctctcggcaatgattcggaattcagcaatggcatgcagttcagg

SEQ ID NO: 163332 - DNA, 75 bp, synthetic construct
  source 1..75: mol_type = other DNA
tggcaagcgatcgcagcgatgcgagctgccccgttggctatgtttttatctatttttacggtctagaacgccgcg

SEQ ID NO: 163333 - DNA, 75 bp, synthetic construct
  source 1..75: mol_type = other DNA
gccgagtgtaaagaggcgctcaacaagctgatggaagattatccgggttgcgaaatgcagatcgtcgagaaggtg

SEQ ID NO: 163334 - DNA, 75 bp, synthetic construct
  source 1..75: mol_type = other DNA
aaagaaaacgtatttatcagctggatgatgcgattgctgattgtcgtcagtctcgcctggacggggtgggctctt

SEQ ID NO: 163335 - DNA, 75 bp, synthetic construct
  source 1..75: mol_type = other DNA
ctatttatttgatttatattctttttttcaaaaagaagaaaactaagtccgcgggctcttatacttccgctcctg

SEQ ID NO: 163336 - DNA, 75 bp, synthetic construct
  source 1..75: mol_type = other DNA
gtgacgccggaactgttatccattctggatgtgtcacccgaggcagttgcccgtgaaccggataccggaaatggc

SEQ ID NO: 163337 - DNA, 75 bp, synthetic construct
  source 1..75: mol_type = other DNA
atttggggcgtttatagcgccgacaatcagttacaaacctgtttccgtgttgcggaagataacagttacagcacc

SEQ ID NO: 163338 - DNA, 75 bp, synthetic construct
  source 1..75: mol_type = other DNA
tattcaacacaggaagcgcagttctccgtactcgatgacatcaccgccagcgagctgattagcgatattgaatct

SEQ ID NO: 163339 - DNA, 75 bp, synthetic construct
  source 1..75: mol_type = other DNA
cactggcgacgggggtttaatcagagcgatttgctttgccaaccgttatcgcactggctgcactgtcaatgggat

SEQ ID NO: 163340 - DNA, 75 bp, synthetic construct
  source 1..75: mol_type = other DNA
agactggtcacggtcgccgactatgcgccgccattaagtccgctcattcaccagcttaagttttcccggcgcagt

SEQ ID NO: 163341 - DNA, 75 bp, synthetic construct
  source 1..75: mol_type = other DNA
gcagaaggttaccggagtattgaaacgaaccttcagcacgacatagccatgttgcgtgcgcaactgacactgggg

SEQ ID NO: 163342 - DNA, 75 bp, synthetic construct
  source 1..75: mol_type = other DNA
ctggatcggctggatgatcaaacctctgggccgctggtcgttaatcatggaaatcgatgaaggttttgcggtggg

SEQ ID NO: 163343 - DNA, 75 bp, synthetic construct
  source 1..75: mol_type = other DNA
cttaaaaccgtttgtgcgtgatgtttccggcagccgcctgaaagacttacctaaacccaataaaagcgatgatga

SEQ ID NO: 163344 - DNA, 75 bp, synthetic construct
  source 1..75: mol_type = other DNA
cttaacggcatcgcccagaaactgaaattcaaagccttacaggagcgggcgaaagagaaaattgccgacattgcc

SEQ ID NO: 163345 - DNA, 75 bp, synthetic construct
  source 1..75: mol_type = other DNA
tggctgaaacttgttgtacaagaatcttccttgctcaaagcactggaatcttattgcgcgtacgacctttttaat

SEQ ID NO: 163346 - DNA, 75 bp, synthetic construct
  source 1..75: mol_type = other DNA
ccgagcgcaatgccagcgaattgatccgctgggcaggcagaaaatgcccgagcggtcgggtcatgggactggcga

SEQ ID NO: 163347 - DNA, 75 bp, synthetic construct
  source 1..75: mol_type = other DNA
attgcacttatcacagaacaagcatacacattacttttcagccattattaaaccacgcacattgtgttaccccct

SEQ ID NO: 163348 - DNA, 75 bp, synthetic construct
  source 1..75: mol_type = other DNA
ccagcttgcccccgccagcgtaaccaaaattacacgtcagcttatcgaacgcgggctgatcaaagaagttgatca

SEQ ID NO: 163349 - DNA, 75 bp, synthetic construct
  source 1..75: mol_type = other DNA
tttacaccgagcatatttatcctgatggtagtcgtgggcgcagggcaaaatctatcgcatttgcgaacatggacg

SEQ ID NO: 163350 - DNA, 75 bp, synthetic construct
  source 1..75: mol_type = other DNA
tttttcaaactcctgcaactcggattcgattattggactcctgtcggtggggcgatcacctctcgtgaacgaaaa

SEQ ID NO: 163351 - DNA, 75 bp, synthetic construct
  source 1..75: mol_type = other DNA
gctatctccatcgtcaccgaaacccgcaatttccacgcaatcggcgtacggcttggtcgtcatgacgccaccatc

SEQ ID NO: 163352 - DNA, 75 bp, synthetic construct
  source 1..75: mol_type = other DNA
tttttatcgggcgcaacggcaacgtcggtgaaattggtcatattcaggtcgaaccgttgggtgaacgctgccact

SEQ ID NO: 163353 - DNA, 75 bp, synthetic construct
  source 1..75: mol_type = other DNA
agcgttttaaagtgacctgttttgtcggccacgatatccgcagtctggcgctggcagagcactacttcggtgcaa

SEQ ID NO: 163354 - DNA, 75 bp, synthetic construct
  source 1..75: mol_type = other DNA
gccagacgacaagcgactgaactacactgtacaaaactccaggaaagtgcatctttggcaactgagattatgttt

SEQ ID NO: 163355 - DNA, 75 bp, synthetic construct
  source 1..75: mol_type = other DNA
gattatgaaaattcctacgtcttttctgacagtaaaacagatttgcctcttttttcgttagcaaagaataaaatt

SEQ ID NO: 163356 - DNA, 75 bp, synthetic construct
  source 1..75: mol_type = other DNA
ggctatgccgaatgccgctggcgttaggtcattgggggatttgttcggtctgctctcgcgccgcccgtacagata

SEQ ID NO: 163357 - DNA, 75 bp, synthetic construct
  source 1..75: mol_type = other DNA
ggcgatcacgcctcgcgaacgaaaactggtatcaggcttcgttgattacctgtgcgaatcagtaggtcgggaaca

SEQ ID NO: 163358 - DNA, 75 bp, synthetic construct
  source 1..75: mol_type = other DNA
tggattctgttccgtaaattttcctctccggaggaagtcgaaaatgtggccgcgcagctgctggagtttgcgtaa

SEQ ID NO: 163359 - DNA, 75 bp, synthetic construct
  source 1..75: mol_type = other DNA
tatcttctcgatgagtcggaaaagcgcgcggggaatatcagtgcggtgaagtcgttcgaggcgtttcgcgcctgg

SEQ ID NO: 163360 - DNA, 75 bp, synthetic construct
  source 1..75: mol_type = other DNA
gaaagtttcctgcgcgaaggaacgcaaaaaatcgtcggcggtcagccgctcacttacggtcaatccattaccgac

SEQ ID NO: 163361 - DNA, 75 bp, synthetic construct
  source 1..75: mol_type = other DNA
tgccgaccgggtatggcaaaagcgccgccttcacttatccattgatttatgagtcctgcgctggcgttggtctgt

SEQ ID NO: 163362 - DNA, 75 bp, synthetic construct
  source 1..75: mol_type = other DNA
acgctgcgtgtttacggctacgctgctacgcgaaaatgagcgcagtttaatggagtcgcttggctgccgtggcga

SEQ ID NO: 163363 - DNA, 75 bp, synthetic construct
  source 1..75: mol_type = other DNA
cgttctggaaatatcaccgacggatgctgtcgcctttggtcagctttttgccgactacgaactgctaccaccgtt

SEQ ID NO: 163364 - DNA, 75 bp, synthetic construct
  source 1..75: mol_type = other DNA
aaaaatcacataaattctgggcggtggagcagcagggaaacgagctgcatattaactggggtaaagtcggcacta

SEQ ID NO: 163365 - DNA, 75 bp, synthetic construct
  source 1..75: mol_type = other DNA
tagccctgcggatgttgcgcaatgtgaaaaagagatggaacaggcgggactgcgcccgtctctgatggtagattg

SEQ ID NO: 163366 - DNA, 75 bp, synthetic construct
  source 1..75: mol_type = other DNA
caccgcgactgaacgacagcgcgatctgcctgcggctggcgcagtttttacaggagacggaagcggccccgcaga

SEQ ID NO: 163367 - DNA, 75 bp, synthetic construct
  source 1..75: mol_type = other DNA
ccgtgtatccgtcttacctggtacctcagaaccttcgccctccgtatatcgcggtggatgttcgcaacagtattc

SEQ ID NO: 163368 - DNA, 75 bp, synthetic construct
  source 1..75: mol_type = other DNA
cattactccggacgacaggggatgctgttatatccgcctgcaacggtgtgacagttcccggggtgatatcagtac

SEQ ID NO: 163369 - DNA, 75 bp, synthetic construct
  source 1..75: mol_type = other DNA
acgatgccgcattgaaaccgcgcgagcacgccgtgccggaatcaacaaccggacagaatgcttttctcaaagcct

SEQ ID NO: 163370 - DNA, 75 bp, synthetic construct
  source 1..75: mol_type = other DNA
ggtcatcgttggcgctcgatgccgcacctgatgagctggcggcgttgtaccgccctgaaaactgcaattggggtt

SEQ ID NO: 163371 - DNA, 75 bp, synthetic construct
  source 1..75: mol_type = other DNA
gctggacatctttgacgataaacggttgctggcgatgcccggtggcgcaccagtactggtggaagggatggcgat

SEQ ID NO: 163372 - DNA, 75 bp, synthetic construct
  source 1..75: mol_type = other DNA
tgttgcgccagaaggatgaagacaaggaaaaagagaacggcggtattggaacagccgccacgcgggccgggcata

SEQ ID NO: 163373 - DNA, 75 bp, synthetic construct
  source 1..75: mol_type = other DNA
cggtagtgatatcgccctgatgcagcttaacggcatcgcccagaaactgaaattcaaagcattacaggagcgggc

SEQ ID NO: 163374 - DNA, 75 bp, synthetic construct
  source 1..75: mol_type = other DNA
gtccccgtccaggttatcgaatgccccgaaatagcccctttgccacaagacaaaccagtatttgttggagacaac

SEQ ID NO: 163375 - DNA, 75 bp, synthetic construct
  source 1..75: mol_type = other DNA
gaagcgcagttctccgtgctcgatgccatcaccgccagcgaactcattaacgatattgaagccctgtttgaataa

SEQ ID NO: 163376 - DNA, 75 bp, synthetic construct
  source 1..75: mol_type = other DNA
gtcacacacaataaaactgatgtacaacctcagcgcgttcctgttcagtgtataccgcgccataatcaggaaaaa

SEQ ID NO: 163377 - DNA, 75 bp, synthetic construct
  source 1..75: mol_type = other DNA
cagtctgctgatttcgttattctttataccagcaatgactgctttacctggtccaatcgcgaaaggcttcaggaa

SEQ ID NO: 163378 - DNA, 75 bp, synthetic construct
  source 1..75: mol_type = other DNA
agtggtcgggtaatggggctggcaaataaaggctggatgcgtggtgaaccgcaggacggtggctggatcggctgg

SEQ ID NO: 163379 - DNA, 75 bp, synthetic construct
  source 1..75: mol_type = other DNA
acaggatggaggctggatcggatggatgatcaaacctctcggtcgctggtcgttaatcatggaaatcgacgaagg

SEQ ID NO: 163380 - DNA, 75 bp, synthetic construct
  source 1..75: mol_type = other DNA
cttaacggcatcgcccagaaactgaaattcaaagccttacaggagcgggcaaaagaaaaaattgccgacattgcc

SEQ ID NO: 163381 - DNA, 75 bp, synthetic construct
  source 1..75: mol_type = other DNA
ttgttgccggaaaaacaagatgtgagccatgagattgccagacgtctttgcggacaaaaagggttatatgcgctg

SEQ ID NO: 163382 - DNA, 75 bp, synthetic construct
  source 1..75: mol_type = other DNA
attgcattgcaagccatccgctttgactggaattatgatgcccacctcattacgtttaccccggataacaagcag

SEQ ID NO: 163383 - DNA, 75 bp, synthetic construct
  source 1..75: mol_type = other DNA
ccgcctggcagaccgctggcgcaccgtcgaaagaaagctgggcattcactgcgttaggtgttctcggcaacgatg

SEQ ID NO: 163384 - DNA, 75 bp, synthetic construct
  source 1..75: mol_type = other DNA
acttcatgcggaacccttgccgcaactgtttgtgattttgcgtttactgcttttgtcgccatgttgtgtccccct

SEQ ID NO: 163385 - DNA, 75 bp, synthetic construct
  source 1..75: mol_type = other DNA
ggggcggtcgccaatgggaaagcactaaacataagcacggggatgatagccgctatcaggctggtgggcaatgca

SEQ ID NO: 163386 - DNA, 75 bp, synthetic construct
  source 1..75: mol_type = other DNA
agctgcagcaggaagggagcgaggacgggcacggcgtggtatttccggctgaactggtgcggctgctggacaggc

SEQ ID NO: 163387 - DNA, 75 bp, synthetic construct
  source 1..75: mol_type = other DNA
atggctacatacggcggtcagtttacgcttacccatcagctgaaggcctgggcggagaaacaggtgctggaaaac

SEQ ID NO: 163388 - DNA, 75 bp, synthetic construct
  source 1..75: mol_type = other DNA
cgtgtactttgtgtccttctccattcccgaagaggggctgaaacggacgctgggcgaaacccggcattacggtat

SEQ ID NO: 163389 - DNA, 75 bp, synthetic construct
  source 1..75: mol_type = other DNA
cggcgcgactgatggtgttcagatcgacccgacgctgttttcacagtacggcattcgcactgtaccggcactggt

SEQ ID NO: 163390 - DNA, 75 bp, synthetic construct
  source 1..75: mol_type = other DNA
ttcgtgagcaactcatgattgccactgcagatctcagtgggtcgacaaaaggccagctggaagcctggcaggaaa

SEQ ID NO: 163391 - DNA, 75 bp, synthetic construct
  source 1..75: mol_type = other DNA
gatgggtaaccgggcgtgagagctaccagcgacaggagcttgccaggctgtgtggaattaaacctgataactgga

SEQ ID NO: 163392 - DNA, 75 bp, synthetic construct
  source 1..75: mol_type = other DNA
atgaataaccagtatttacagtttgttcgtgagcaactcattatcgccaccgccgatttgagtggggcaacaaaa

SEQ ID NO: 163393 - DNA, 75 bp, synthetic construct
  source 1..75: mol_type = other DNA
gatttatcgctaacaagaaacgaccttgcgacgcttactgaacgcactacaaacctctcaaccaaagctgatgtt

SEQ ID NO: 163394 - DNA, 75 bp, synthetic construct
  source 1..75: mol_type = other DNA
tggaatgaatttaaaacccggtacggcaccagaaaaattgcagggaaaacgcaggagcgcgtgaagaagttgatc

SEQ ID NO: 163395 - DNA, 75 bp, synthetic construct
  source 1..75: mol_type = other DNA
tggctggcggcacaggatgtcagaggatgggttaccgggtgtgaggtctaccagagacaggagcttgccagactg

SEQ ID NO: 163396 - DNA, 75 bp, synthetic construct
  source 1..75: mol_type = other DNA
gtccgtgctcttattgaaaactacgagcaagtcgatatcgagactaaactcttggtgcctctgaagaaaacgttc

SEQ ID NO: 163397 - DNA, 75 bp, synthetic construct
  source 1..75: mol_type = other DNA
atgaaattattgcgtgttgcagaggggggtgacggctgcaaacaaaaccaatcctgcgagcctgctactattgat

SEQ ID NO: 163398 - DNA, 75 bp, synthetic construct
  source 1..75: mol_type = other DNA
ttgaggaagctgcggaatatttaatccagacgccgcgtaagccgatgtttattacccgaaaaaagcgggacgggt

SEQ ID NO: 163399 - DNA, 75 bp, synthetic construct
  source 1..75: mol_type = other DNA
atggcaagcaagttcattgttacggcctgcccttctatgccggttggggtttaaccgttgatgaacatcactgcc

SEQ ID NO: 163400 - DNA, 75 bp, synthetic construct
  source 1..75: mol_type = other DNA
tgctggcccgcatgagtttgctgccatgctggaagccgcgatggcggaaaatcctcaagccgaaatttgggtgaa

SEQ ID NO: 163401 - DNA, 75 bp, synthetic construct
  source 1..75: mol_type = other DNA
ctggcttgggcaaaacgctactcctacaaataaggtccgtatcgaaggtgaggttgataaggactggaattcagt

SEQ ID NO: 163402 - DNA, 75 bp, synthetic construct
  source 1..75: mol_type = other DNA
ttgcgcaggcacgcagaacgcgccacggccagcgccgtcagtccggcttataccgcagacgctgaccataccggt

SEQ ID NO: 163403 - DNA, 75 bp, synthetic construct
  source 1..75: mol_type = other DNA
aaagtggccgccacgggagactgccggcaggtggctcagggactgctggacggcaccggggataagccgcaatga

SEQ ID NO: 163404 - DNA, 75 bp, synthetic construct
  source 1..75: mol_type = other DNA
tcgctcaggattatggtcaccgcatccatgagtttcagaaggagatggggcaatgggtgaaagaggataaaatcc

SEQ ID NO: 163405 - DNA, 75 bp, synthetic construct
  source 1..75: mol_type = other DNA
agtcgaatcatcctgattatcagcctggcgactgggtgctgggctacagtggatggcaggactatgacatatcca

SEQ ID NO: 163406 - DNA, 75 bp, synthetic construct
  source 1..75: mol_type = other DNA
gtgaaacttggcgatcatccgcaaaatccatcgtggtcgctgggtgtgctggggatgccaggctttaccgcttat

SEQ ID NO: 163407 - DNA, 75 bp, synthetic construct
  source 1..75: mol_type = other DNA
atcatctttgtggctcctgaacctcaagagatgcctgatatttgcaagagtgaagccttgcttgagcttgaaaag

SEQ ID NO: 163408 - DNA, 75 bp, synthetic construct
  source 1..75: mol_type = other DNA
atgagtcgcagaagaagattgctatgcaagccgatattgagcagttagtgaagatttctcagaaatactcaaagg

SEQ ID NO: 163409 - DNA, 75 bp, synthetic construct
  source 1..75: mol_type = other DNA
aatatgaatcacagaagaagattgctatgcaggctgatattgagcagcttactaagatttctcagaaatatagca

SEQ ID NO: 163410 - DNA, 75 bp, synthetic construct
  source 1..75: mol_type = other DNA
ccgcatccgacaataagtgcggtgccgttgcctgatgcgacgctggctgaactgaaccccaaaacctggacagtt

SEQ ID NO: 163411 - DNA, 75 bp, synthetic construct
  source 1..75: mol_type = other DNA
gagaattacagtatacggcaccctcttattatggacgtgggcattaatcgccctgtacatcctgtattaccggtg

SEQ ID NO: 163412 - DNA, 75 bp, synthetic construct
  source 1..75: mol_type = other DNA
aatccgaatgtcaccgaagcaaattacctttgtgtctcctgaggctcaggagatgcctgatgtttgcaagggtga

SEQ ID NO: 163413 - DNA, 75 bp, synthetic construct
  source 1..75: mol_type = other DNA
taagagcgatgaagaactcgctgaacttgccagacagaacatcttggcatcacgtaacaagcaacttgataatgt

SEQ ID NO: 163414 - DNA, 75 bp, synthetic construct
  source 1..75: mol_type = other DNA
gtcaccacagactgaacatccagctatcgctattcagcgcaaagagcacgatgaaagaattaagtttgagcaaga

SEQ ID NO: 163415 - DNA, 75 bp, synthetic construct
  source 1..75: mol_type = other DNA
aatatgagtcgcagaagaagattgctatgcaggctgatattgagcagcttactaagatttctcagaaatatagca

SEQ ID NO: 163416 - DNA, 75 bp, synthetic construct
  source 1..75: mol_type = other DNA
cgcttattggtgaatacgaaggctttaagaagagtgctctacaggctgatattgagcagttaacgaagatttctc

SEQ ID NO: 163417 - DNA, 75 bp, synthetic construct
  source 1..75: mol_type = other DNA
gtattaaacttgatgacgcttacagcaaagttaccctgatgcaatcagctattgagccatcagaatttgagattc

SEQ ID NO: 163418 - DNA, 75 bp, synthetic construct
  source 1..75: mol_type = other DNA
gttgtatctctcaagagagcttcaggctatgaaagaccttgttagtgaatatgagtcgcagaagaaggttgctat

SEQ ID NO: 163419 - DNA, 75 bp, synthetic construct
  source 1..75: mol_type = other DNA
ccagaagttaagatcatctgtaattccgagcttgatctggctgacttccaggtagctactggccggaatacagca

SEQ ID NO: 163420 - DNA, 75 bp, synthetic construct
  source 1..75: mol_type = other DNA
aagagcattttaggctggatagctgaagcgccggaaggcgtgaagctcaagaatcttaaggggttaattgccagg

SEQ ID NO: 163421 - DNA, 75 bp, synthetic construct
  source 1..75: mol_type = other DNA
aatatcattgtctttcaggtagttatatgtcccgttcagctaaaccccgtaaacgaaaacctgcccctcaaagaa

SEQ ID NO: 163422 - DNA, 75 bp, synthetic construct
  source 1..75: mol_type = other DNA
cttgatagcgaagctttattgcttgtaacgagaacacgttcaaagcaaaaggcgacattttcacagcaaagtatt

SEQ ID NO: 163423 - DNA, 75 bp, synthetic construct
  source 1..75: mol_type = other DNA
ccgtgggactgggcattttatgccgaacaggtacggcgggagaaatttaatcttgatgaggcgcagctcaagcca

SEQ ID NO: 163424 - DNA, 75 bp, synthetic construct
  source 1..75: mol_type = other DNA
tggtgttacagcgggagtatttgttgggaatatcagatcgcgataacacagtgggcgtggaatgaatttaatact

SEQ ID NO: 163425 - DNA, 75 bp, synthetic construct
  source 1..75: mol_type = other DNA
gagcagcagttgaaagaggaaggtttcagcgtgacggtgaagcagcatcacgatggcactttggaactggaagct

SEQ ID NO: 163426 - DNA, 75 bp, synthetic construct
  source 1..75: mol_type = other DNA
cggttcgggtatcagcgcactttcttacaatatgatttttagtaagaaagaaacccgcgttgagttctggattgc

SEQ ID NO: 163427 - DNA, 75 bp, synthetic construct
  source 1..75: mol_type = other DNA
cctcgatgagagcaactggccagcgatgatcgactggctgctggtcaacctgacggcgtttgaaaaagcgctcga

SEQ ID NO: 163428 - DNA, 75 bp, synthetic construct
  source 1..75: mol_type = other DNA
aacggatctgctcaagtttcgcatcaggcttaaaaactgctcaaaagatgttgaaacatacggtttctgacgaag

SEQ ID NO: 163429 - DNA, 75 bp, synthetic construct
  source 1..75: mol_type = other DNA
cacttataacgtagcaattagacctctgctaacgtcctttgggcttgaactcccggctatgaccgtggatgaaca

SEQ ID NO: 163430 - DNA, 75 bp, synthetic construct
  source 1..75: mol_type = other DNA
ctaccatcctgacgttcgtgtgtgggaaatttttgatcataatggcgtggggctggcgttattttacggtgattt

SEQ ID NO: 163431 - DNA, 75 bp, synthetic construct
  source 1..75: mol_type = other DNA
ccgccaggcgctggagatggccgcctctgaatgtatgagtcagcaggcagcggaaattaccgtcagccatgtgct

SEQ ID NO: 163432 - DNA, 75 bp, synthetic construct
  source 1..75: mol_type = other DNA
tgcaacaggactttgtgcagtggacacaggagtcggcggaatcagtcgtgccggatgcagacggtaaaggcgcag

SEQ ID NO: 163433 - DNA, 75 bp, synthetic construct
  source 1..75: mol_type = other DNA
acacggcgattgcccgcatccgtctgtcggcggcagacggtgcattcacggcagacgtggaagatgctcaggacg

SEQ ID NO: 163434 - DNA, 75 bp, synthetic construct
  source 1..75: mol_type = other DNA
atgtctattaatcctaaacttaagcgtatcgcgctacgctatccagcgttattccaatatgagtccccctatatg

SEQ ID NO: 163435 - DNA, 75 bp, synthetic construct
  source 1..75: mol_type = other DNA
tgcggtccgtcttctccgccagcctgccgtattcatcgtggcggtagacatagtgcgcatcttccgcgatgcggt

SEQ ID NO: 163436 - DNA, 75 bp, synthetic construct
  source 1..75: mol_type = other DNA
ctggcgcgtatggaagtggtgccgtacctgccgctgtcgaaagagacgctcgccaccatcattgccgggaaactg

SEQ ID NO: 163437 - DNA, 75 bp, synthetic construct
  source 1..75: mol_type = other DNA
aacagtttccccggtacagcggctggcacagctcactgccgaactggacgccctgcataacgaccggttgctggt

SEQ ID NO: 163438 - DNA, 75 bp, synthetic construct
  source 1..75: mol_type = other DNA
gctcaaaccggcgctggcgcgtggcgaactgaaaaccatcgccgccaccacctggagcgagtacaaaaaatactt

SEQ ID NO: 163439 - DNA, 75 bp, synthetic construct
  source 1..75: mol_type = other DNA
ggtcgagtggctgaaagagggggggctgctggcctccgcagagatgcagcacagcgaactgcgtggcggtgtact

SEQ ID NO: 163440 - DNA, 75 bp, synthetic construct
  source 1..75: mol_type = other DNA
agggtgatattggcatggaagaactgcgccaggcgctgacggtggagaactacacaaccgcccgttctgcggaca

SEQ ID NO: 163441 - DNA, 75 bp, synthetic construct
  source 1..75: mol_type = other DNA
cgaactggacgccctgcataacgaccggttgctggtctccccgcacgtcgataaaaaacagattgcggcggtgat

SEQ ID NO: 163442 - DNA, 75 bp, synthetic construct
  source 1..75: mol_type = other DNA
tatgaacagtctcacggcgtgctgattgatgatgacgccttgcaggccgctgcgacattaagtgagcgttatctc

SEQ ID NO: 163443 - DNA, 75 bp, synthetic construct
  source 1..75: mol_type = other DNA
acgttgttaatgtcgacgtgatcattgggccgcgtgcggctactggtcgaaactttggttcgctgctcattctcg

SEQ ID NO: 163444 - DNA, 75 bp, synthetic construct
  source 1..75: mol_type = other DNA
atgcgcaactacgggcgcatgaaaaaccagttcaccgtaagcattaaccaaccgctacgctttgggaaggatgat

SEQ ID NO: 163445 - DNA, 75 bp, synthetic construct
  source 1..75: mol_type = other DNA
gactccgatacactggcggtagttcaagctccaggtgctcaaggagcgcgaataaattatggcaacagtactatc

SEQ ID NO: 163446 - DNA, 75 bp, synthetic construct
  source 1..75: mol_type = other DNA
cttaactggaatttaaatgcctgtagtcgtttcacaggccaaatgatactttggtctgtgaaaaaagaaacagat

SEQ ID NO: 163447 - DNA, 75 bp, synthetic construct
  source 1..75: mol_type = other DNA
ggggattgcaggcgatgaagatattccggatgcagactggctgaaagtggctgcggcgatcgaatcctcttctgt

SEQ ID NO: 163448 - DNA, 75 bp, synthetic construct
  source 1..75: mol_type = other DNA
cctgaagatatcggcactgatttcggcgtggatagcccggaatatgaagccgcgaccgtgtatttctcacagtca

SEQ ID NO: 163449 - DNA, 75 bp, synthetic construct
  source 1..75: mol_type = other DNA
gatgctgcaccgacgcaaaccaccgttttcaccggaggagttaaaagcgttgatggatgcaaataaatcaaatta

SEQ ID NO: 163450 - DNA, 75 bp, synthetic construct
  source 1..75: mol_type = other DNA
cagtaatggccctgtgtagcgcaccggttatggcagcagagcaggggggcttttctggcccatcggcaacacaaa

SEQ ID NO: 163451 - DNA, 75 bp, synthetic construct
  source 1..75: mol_type = other DNA
agaaaaccgtcagttatagcagcatctaatgttctttctacgtactgggattatttgcagtttgcattatttgaa

SEQ ID NO: 163452 - DNA, 75 bp, synthetic construct
  source 1..75: mol_type = other DNA
gcgccctttcgccataccatgaaaatcgtatcgcactggacattaacgatctggaaaacgatgttgaattgaaaa

SEQ ID NO: 163453 - DNA, 75 bp, synthetic construct
  source 1..75: mol_type = other DNA
tggtaaaaatattccatttgcagcggatatttatgatgaacaaaacaatatcatcggcaacgtaggtcagggtgg

SEQ ID NO: 163454 - DNA, 75 bp, synthetic construct
  source 1..75: mol_type = other DNA
atgagattgaatatcatggccgacgttacccctcgaaggcgattgctggcatcgcagcgacattgatgacgggga

SEQ ID NO: 163455 - DNA, 75 bp, synthetic construct
  source 1..75: mol_type = other DNA
gtgacttatctacgtattaatcctgttctggcgctgctgctgttgctgacggcaatcgcagcggcgctgccgttt

SEQ ID NO: 163456 - DNA, 75 bp, synthetic construct
  source 1..75: mol_type = other DNA
taccggtatttctgcgcagcctgcgggtggttatggtgcagactgtcggtatggcggtgattgcggcgttaatcg

SEQ ID NO: 163457 - DNA, 75 bp, synthetic construct
  source 1..75: mol_type = other DNA
acgtgctggagagcgccacagcgatgggcatgagtgggacgcagcgattcctgcatgtgcagttaccgctggcgt

SEQ ID NO: 163458 - DNA, 75 bp, synthetic construct
  source 1..75: mol_type = other DNA
tcccggtaattgttctggcggtgctgatcgatgcgctgttcgatttgcttatcgcactgctgaaggtgaaacgta

SEQ ID NO: 163459 - DNA, 75 bp, synthetic construct
  source 1..75: mol_type = other DNA
tcccggtgattgtactggcggtgctgatcgacgcgctgttcgatttggttatcgcactgctgaaggtgaaaagtc

SEQ ID NO: 163460 - DNA, 75 bp, synthetic construct
  source 1..75: mol_type = other DNA
tgagcggggcgcagcgtttcctgcatgttcagttaccgctggcgttaccggtatttctgcgcagcctgcgggtgg

SEQ ID NO: 163461 - DNA, 75 bp, synthetic construct
  source 1..75: mol_type = other DNA
cgttcattgaggcaggaacgccagaggcaataattacggcggtaactgatgccattgatgatttacgaggaacaa

SEQ ID NO: 163462 - DNA, 75 bp, synthetic construct
  source 1..75: mol_type = other DNA
gccagaactcatatcgcacgtgctatcaggctgcatagtggagtaaaaacaagcaaggatgagccatacagagcg

SEQ ID NO: 163463 - DNA, 75 bp, synthetic construct
  source 1..75: mol_type = other DNA
atcatagccagctaacgctggcgcagcagatgcgagctgaaaaattacgccagcgactggttgaaagcaaactga

SEQ ID NO: 163464 - DNA, 75 bp, synthetic construct
  source 1..75: mol_type = other DNA
atcagttacgcgcctaatcgtttagtttcgggtgaggggcgtcatctctggcagctgtggccgcaaacgatctgg

SEQ ID NO: 163465 - DNA, 75 bp, synthetic construct
  source 1..75: mol_type = other DNA
ttctggcgctgctgctgttgctgacggcaatcgcagcggcgctgccgtttatcagttacgcgcctaatcgtttag

SEQ ID NO: 163466 - DNA, 75 bp, synthetic construct
  source 1..75: mol_type = other DNA
atcaacgccagtaaactaaacgaagatatcgtaagaagcaggccatttgtgcctgttcacgtcgctcaccgtaag

SEQ ID NO: 163467 - DNA, 75 bp, synthetic construct
  source 1..75: mol_type = other DNA
cctcggctaccaggtaatagtcgagcatgccgatgacccggaaaccatgcaggaagtactgtatccggtgctggc

SEQ ID NO: 163468 - DNA, 75 bp, synthetic construct
  source 1..75: mol_type = other DNA
gcagcacagcgaactgcgcggcggcgtgttgctgctggccctgctgcattcgccgctgcgttatataccgcctgc

SEQ ID NO: 163469 - DNA, 75 bp, synthetic construct
  source 1..75: mol_type = other DNA
gctgagcgagcgttatctctccgggcgtcagttgccggacaaagccattgatgtgctggataccgcctgcgcccg

SEQ ID NO: 163470 - DNA, 75 bp, synthetic construct
  source 1..75: mol_type = other DNA
cggcggcagacggcgcgttcacggcagacgtggaagatgctcaggacgacgagtttgtcacaaaggatgaaacgg

SEQ ID NO: 163471 - DNA, 75 bp, synthetic construct
  source 1..75: mol_type = other DNA
tgaccgtctgcaacaggactttgtgcagtggactcgcgagtcagcagaatcggttgtgccggatgcggatggaaa

SEQ ID NO: 163472 - DNA, 75 bp, synthetic construct
  source 1..75: mol_type = other DNA
gtcgaacacgcggatgacccggaaaccatgcaggaagccctctatccggtgctggcggacttctttaaacctgcc

SEQ ID NO: 163473 - DNA, 75 bp, synthetic construct
  source 1..75: mol_type = other DNA
agaggattggcttccccttattagctcgtttttgagcgagaatcagaataatattgctctaataattccatattt

SEQ ID NO: 163474 - DNA, 75 bp, synthetic construct
  source 1..75: mol_type = other DNA
atgcttagggatttttaccatccacaatatcgtggcagcggtgccctgtggataccaaatagtgtaaaagcgcat

SEQ ID NO: 163475 - DNA, 75 bp, synthetic construct
  source 1..75: mol_type = other DNA
gactgccgaataatctttttccacggcaaaccgcgacctcgcgaagtgtcagaggattggcttccccttatcagc

SEQ ID NO: 163476 - DNA, 75 bp, synthetic construct
  source 1..75: mol_type = other DNA
gagtcagagtcagagtcagagtcagagtcagagtcagagtcagagtcagagtcagagtcagagtcagagtcagaa

SEQ ID NO: 163477 - DNA, 75 bp, synthetic construct
  source 1..75: mol_type = other DNA
gctggtgggcgaaaatcgagttgttccgaccggatataaccgatgatctgttctatctggatttggacacagtta

SEQ ID NO: 163478 - DNA, 75 bp, synthetic construct
  source 1..75: mol_type = other DNA
gcaaaccgcgacctcgcgaagtgtcagaggattggctccccctcattagcgcgttttttgagcaagagttagaat

SEQ ID NO: 163479 - DNA, 75 bp, synthetic construct
  source 1..75: mol_type = other DNA
cttacaggtgtcgccggagatcctgcgccagcgcctggaaaaccgtggccgtgaaaacgccagtgaaattaacgc

SEQ ID NO: 163480 - DNA, 75 bp, synthetic construct
  source 1..75: mol_type = other DNA
ccaccatttataatggatgtttttcttttagatgtattaactgagttcttaaatacgccactgtattttttatct

SEQ ID NO: 163481 - DNA, 75 bp, synthetic construct
  source 1..75: mol_type = other DNA
gaatgcatctttgaatactttacatagtgctatgcttttgactgagaagaatggcgattacaacaatgcgattat

SEQ ID NO: 163482 - DNA, 75 bp, synthetic construct
  source 1..75: mol_type = other DNA
gccgccagtctggttaatcccgtcgtcggctttaatgcaatccctctcccgattattgatgaacattactactct

SEQ ID NO: 163483 - DNA, 75 bp, synthetic construct
  source 1..75: mol_type = other DNA
aaaatttcaaccgattgaatctcaactcttcagtctctagatgttatattgttccaattatatctgagcattatc

SEQ ID NO: 163484 - DNA, 75 bp, synthetic construct
  source 1..75: mol_type = other DNA
gttgggaggataaacagaacgatctctggacaacctggcagcgggttcaggagaatatgataaaaggtggattat

SEQ ID NO: 163485 - DNA, 75 bp, synthetic construct
  source 1..75: mol_type = other DNA
atgaagctccatttttttggatgaatgatgataagaaatacaggccgatatctgcgcaacatagagggcaatttg

SEQ ID NO: 163486 - DNA, 75 bp, synthetic construct
  source 1..75: mol_type = other DNA
gatattcaggtggggaaagtcaatgtagatcaggcgccggtgctgacaaccaaatacgagatctggggggctgcc

SEQ ID NO: 163487 - DNA, 75 bp, synthetic construct
  source 1..75: mol_type = other DNA
tccggcatttattccgcaccaacgcaaaaaagctcagtcttccgactgagcctttcgctaaatttgatgcctggc

SEQ ID NO: 163488 - DNA, 75 bp, synthetic construct
  source 1..75: mol_type = other DNA
actaaatgccgtcggatggattcataagaaaggatatcttcatcgggatataaaaccactaaatgtactaaaatt

SEQ ID NO: 163489 - DNA, 75 bp, synthetic construct
  source 1..75: mol_type = other DNA
gccaatacctacatgctcaaaaccgaacaatacgggaaatggttcatcgacaaatccccgtattcggataagcag

SEQ ID NO: 163490 - DNA, 75 bp, synthetic construct
  source 1..75: mol_type = other DNA
agtcaatatatgaaacaccatttttttggatgaataatgacaaaaaatatagacctatatctgcacaacatagag

SEQ ID NO: 163491 - DNA, 75 bp, synthetic construct
  source 1..75: mol_type = other DNA
taccgtgttgtgaagatgcccgttaccaaaggtgggaagctggagctgaccatcactgaactggggaatgaatga

SEQ ID NO: 163492 - DNA, 75 bp, synthetic construct
  source 1..75: mol_type = other DNA
gttctggcaacagcaagcgtttatcgatcagttactggctgccggtcgctggttgctggtactgctggtggcgtg

SEQ ID NO: 163493 - DNA, 75 bp, synthetic construct
  source 1..75: mol_type = other DNA
ttcacgcccaggtaacggcacaactggacttcgccagtaaagagcaaacagaagaacagtatcgccctaacggca

SEQ ID NO: 163494 - DNA, 75 bp, synthetic construct
  source 1..75: mol_type = other DNA
atgaatacgaccgcagcccagacaaaatctcttgagtggctcaatcgcctgcgcgcgaatccgagaattcccctg

SEQ ID NO: 163495 - DNA, 75 bp, synthetic construct
  source 1..75: mol_type = other DNA
gcaccggggaaatgtggtggaaacagtaattgaaggggcttacgaggtggtgggcgtgtttgaccggattgagga

SEQ ID NO: 163496 - DNA, 75 bp, synthetic construct
  source 1..75: mol_type = other DNA
gcaccggggaaatgtggtggaaaaagtcattgaaggggcttacgaggtggtgggcgtgtttgaccggattgagga

SEQ ID NO: 163497 - DNA, 75 bp, synthetic construct
  source 1..75: mol_type = other DNA
atcctgcttaattcacatgatgattcatccagttatcagatgatccccggaatttttcgttttgtctgcacaaat

SEQ ID NO: 163498 - DNA, 75 bp, synthetic construct
  source 1..75: mol_type = other DNA
gtgaaatccgtgttccgcataaaggcgatattgtcggacaggtcattgaaggggcgtatgaagtgctcggcgttt

SEQ ID NO: 163499 - DNA, 75 bp, synthetic construct
  source 1..75: mol_type = other DNA
cgctgaaagagcaggttatggatttgggtatccctgcatctgagctgataaagacagcctgggcttcagcttcca

SEQ ID NO: 163500 - DNA, 75 bp, synthetic construct
  source 1..75: mol_type = other DNA
tggcagaagtatatgcctcggatgatgcgagaaataagtttattcatgattttgttaaatcgtggaataaagtta

SEQ ID NO: 163501 - DNA, 75 bp, synthetic construct
  source 1..75: mol_type = other DNA
aacccagtccaacaccagcgggcgcgatcttaatgacgcccagttgaaatatgccagcgatgtcgaaggacgcat

SEQ ID NO: 163502 - DNA, 75 bp, synthetic construct
  source 1..75: mol_type = other DNA
agcacgcctccggcaaatcaaaataaccgccagcagcaggcgagcaccaccagcaatagtgggccgcgtagcaca

SEQ ID NO: 163503 - DNA, 75 bp, synthetic construct
  source 1..75: mol_type = other DNA
ccccaaaggcttacgtaagctggtggaggacaaagccaacggcccggcggttattgattcactgaaaagcaccgt

SEQ ID NO: 163504 - DNA, 75 bp, synthetic construct
  source 1..75: mol_type = other DNA
tgtggtcgatgaagatgtatgcattggctgccgttactgtcatatggcttgcccgtatggcgcaccgcaatataa

SEQ ID NO: 163505 - DNA, 75 bp, synthetic construct
  source 1..75: mol_type = other DNA
gataaagtctttgaagataaagcgtcaggcaagaatacccagcgcccacagtttgaggcaatgatgaactatgtg

SEQ ID NO: 163506 - DNA, 75 bp, synthetic construct
  source 1..75: mol_type = other DNA
tacagccgaccttctggcaacggttgagcaattaacagagcgcggcgtgtctgtgcatttccataaagaagactt

SEQ ID NO: 163507 - DNA, 75 bp, synthetic construct
  source 1..75: mol_type = other DNA
tttgataaatgcacacaacggattgatgagtggggtatttttacggtttcgatggcggtgcgtcgtgataactga

SEQ ID NO: 163508 - DNA, 75 bp, synthetic construct
  source 1..75: mol_type = other DNA
ttgacccacgatcggcaacgggtggcgagtttcaataatgatccgctgatcacacgggcgattgccgttaatatc

SEQ ID NO: 163509 - DNA, 75 bp, synthetic construct
  source 1..75: mol_type = other DNA
gggccgcgtggttatagcccatctcttatgcgctctgtgcaggatgtcgatgaatttgtccgttttgctgccagc

SEQ ID NO: 163510 - DNA, 75 bp, synthetic construct
  source 1..75: mol_type = other DNA
ggctaccagttccagccagacagccagcataaattcaacattcaggggttctacacccaaaccctgcgcagcggc

SEQ ID NO: 163511 - DNA, 75 bp, synthetic construct
  source 1..75: mol_type = other DNA
agagaacagtggtgtggattggcaaccggtagccgctggcttcaaggggcttttacctcatggcagaaagtcccg

SEQ ID NO: 163512 - DNA, 75 bp, synthetic construct
  source 1..75: mol_type = other DNA
gaaattaatacgcattgagatacagatggctgaggggtttattgatggctgcctttcaatgctagatctaacatt

SEQ ID NO: 163513 - DNA, 75 bp, synthetic construct
  source 1..75: mol_type = other DNA
ttatcagttcgcttgccgcgattgtagtgggggtgatcatgacggtggtatggccgcatttccagaagctcattt

SEQ ID NO: 163514 - DNA, 75 bp, synthetic construct
  source 1..75: mol_type = other DNA
aagaggtggactgttgcgccacgcgcctgcgcgtgacggtgaaagagagcagcaaggtagatgaagcggcgctga

SEQ ID NO: 163515 - DNA, 75 bp, synthetic construct
  source 1..75: mol_type = other DNA
tctgcgggcgcggcggcgtcggtggaatcgctgaaaaacgtcagcggctacaaaggtacgctgcgcaaggtgatc

SEQ ID NO: 163516 - DNA, 75 bp, synthetic construct
  source 1..75: mol_type = other DNA
tcgtgacggtatatctgtgccgcagaacaatgcagcactgaatgcgctggggctgtctcttggcgattacacagg

SEQ ID NO: 163517 - DNA, 75 bp, synthetic construct
  source 1..75: mol_type = other DNA
tggccgttgatccccggttccgcgctggcaggcgcagcattactgattcagggcggcggacgcatcctggcccgc

SEQ ID NO: 163518 - DNA, 75 bp, synthetic construct
  source 1..75: mol_type = other DNA
agccttggttcgtaatggaactagcagaaacaaatcttgaagaagaaataaaaagtggaactcttacaaaggctg

SEQ ID NO: 163519 - DNA, 75 bp, synthetic construct
  source 1..75: mol_type = other DNA
cggggatggtgtatgcgtctcggtttcgtgacggtatatctgtaccgcagaacaacgcagcactgaatgcgctgg

SEQ ID NO: 163520 - DNA, 75 bp, synthetic construct
  source 1..75: mol_type = other DNA
tcgtgacggtatatctgtaccgcagaacaacgcagcactgaatgcgctggggttgtctcttggcgattacacagg

SEQ ID NO: 163521 - DNA, 75 bp, synthetic construct
  source 1..75: mol_type = other DNA
agtttgcaactcgccagtatctttagcacttatccggctgccgcgttaaatgtatggcaggcggcgttggttgaa

SEQ ID NO: 163522 - DNA, 75 bp, synthetic construct
  source 1..75: mol_type = other DNA
aaggaggccgccctgcagatactggtgaacacactcacccacgcggcagagcacgaggtgccgtaccggatggaa

SEQ ID NO: 163523 - DNA, 75 bp, synthetic construct
  source 1..75: mol_type = other DNA
aaggcggctgccctgcaggtactggtgaacacactcacccacacggcagagcacgatgtgccgtaccggatggaa

SEQ ID NO: 163524 - DNA, 75 bp, synthetic construct
  source 1..75: mol_type = other DNA
ctggcggggaggagccggatgcgcgtgactggatgccggagccgccagatgatgatggctggttcctgggatctg

SEQ ID NO: 163525 - DNA, 75 bp, synthetic construct
  source 1..75: mol_type = other DNA
atgcgagtatcttctccggatgataaattaataaattatttttttaactatgttaataaaaatacgcaacattca

SEQ ID NO: 163526 - DNA, 75 bp, synthetic construct
  source 1..75: mol_type = other DNA
atgtgttggtgcggcgatttatcgctatctcattgcaaagaatttacctgtcaatagtgtaacgcctaaagaaat

SEQ ID NO: 163527 - DNA, 75 bp, synthetic construct
  source 1..75: mol_type = other DNA
ccacaattaatggaaatggaatatacggttataccaaatcatgtgtacaaatcacttataaaaaaactagatggt

SEQ ID NO: 163528 - DNA, 75 bp, synthetic construct
  source 1..75: mol_type = other DNA
atatatgggttagagtggcaaataaagaagtaagcaataataatctcaaaaacaatagacttgttatttttgcgg

SEQ ID NO: 163529 - DNA, 75 bp, synthetic construct
  source 1..75: mol_type = other DNA
agattttagtaagttcaatgattccaattatgttcaacaacttgagcgtcattatctattaacttgcggagattc

SEQ ID NO: 163530 - DNA, 75 bp, synthetic construct
  source 1..75: mol_type = other DNA
taacgattttaacgaccttcgaggaatgaaggttacgcgccgccaggtggaagtaaaatacctggacgctatcaa

SEQ ID NO: 163531 - DNA, 75 bp, synthetic construct
  source 1..75: mol_type = other DNA
gatccatctattgaggctgtatctttttacgtcattgaagcaatggcagaagaaacagcagatcaggttcagtat

SEQ ID NO: 163532 - DNA, 75 bp, synthetic construct
  source 1..75: mol_type = other DNA
ttttacttattcaataaagtaaaatcacgttacattcattactcaattgctgattggttactaagacatcgtaac

SEQ ID NO: 163533 - DNA, 75 bp, synthetic construct
  source 1..75: mol_type = other DNA
gggaaaaatagcggaattttcggggatttttttgcgtgctaccgtgcggccagttctgcacgtcggcgggggtaa

SEQ ID NO: 163534 - DNA, 75 bp, synthetic construct
  source 1..75: mol_type = other DNA
acaggtattgatggtgatatccgaatcaacaaggcgttatgggtgattgccgaacagttcagaaagtggaagtca

SEQ ID NO: 163535 - DNA, 75 bp, synthetic construct
  source 1..75: mol_type = other DNA
tatgaccttcaaagacagcgaggggaccgactacgttgtcggccaggtatggggcaaaaagggcgcaaacgccta

SEQ ID NO: 163536 - DNA, 75 bp, synthetic construct
  source 1..75: mol_type = other DNA
gccaatataactcattacgtggtcagtctggtcgcgtttatgatgctttggtggtttcaagtgctgcaaatagtc

SEQ ID NO: 163537 - DNA, 75 bp, synthetic construct
  source 1..75: mol_type = other DNA
gggaattaatcccaatgctaagaaattacttaaggttgaaaccaatcctgatggctcggtaactaagtattacac

SEQ ID NO: 163538 - DNA, 75 bp, synthetic construct
  source 1..75: mol_type = other DNA
aacagcggaatggcgtgattgtaaacgtctcttccgaaagtggtctggaaggctccgaaggccaaagttgctacg

SEQ ID NO: 163539 - DNA, 75 bp, synthetic construct
  source 1..75: mol_type = other DNA
aatcaatcacatcaatggtcgcacattagcttatgtgaaatcagttacgcacaaacgtaatgaattaaaggcgga

SEQ ID NO: 163540 - DNA, 75 bp, synthetic construct
  source 1..75: mol_type = other DNA
ggggttattcgaatggctgggcgcggcatgagataaaaaaagaaacactttctatcactggctttcatgctgtaa

SEQ ID NO: 163541 - DNA, 75 bp, synthetic construct
  source 1..75: mol_type = other DNA
gaagggaatggagaaaggaatggagaaaggaattgagaaggggattcagcagggaagacaggaggaaaggcaaga

SEQ ID NO: 163542 - DNA, 75 bp, synthetic construct
  source 1..75: mol_type = other DNA
gccctgaattcatctggcgcttttactcctgccagaaacgtcactatcacttcgttatcgcaccaacagaagatg

SEQ ID NO: 163543 - DNA, 75 bp, synthetic construct
  source 1..75: mol_type = other DNA
atggctactatccctaccccaactcattctgaattcatctggcgtttctattcctgccaaaaacacctgtatatc

SEQ ID NO: 163544 - DNA, 75 bp, synthetic construct
  source 1..75: mol_type = other DNA
ggcgaagcgctggttccagagttgcacccaaaagagaaactgctcgaaaccaaaactattctcggggattacttc

SEQ ID NO: 163545 - DNA, 75 bp, synthetic construct
  source 1..75: mol_type = other DNA
atgaatgttaaggcggcatcccgtgatgatgtgctggctgcgcaccgcgttccgccgcaactgatgggggcgatg

SEQ ID NO: 163546 - DNA, 75 bp, synthetic construct
  source 1..75: mol_type = other DNA
aactgccgccgatttttcatcattcccactgacagatgaccttgcggaccttccagaattaattgcagagtccgc

SEQ ID NO: 163547 - DNA, 75 bp, synthetic construct
  source 1..75: mol_type = other DNA
tttacgtcgttgaggcgatgagcgaagaaacagccgaccaggtgcaatatgaactgtcaacgccaattgatgctg

SEQ ID NO: 163548 - DNA, 75 bp, synthetic construct
  source 1..75: mol_type = other DNA
cggaaggtaaacaaccgatatgcgttgaatcatgcccgctgcgcgcgctggagttcggccccattgaagaactgc

SEQ ID NO: 163549 - DNA, 75 bp, synthetic construct
  source 1..75: mol_type = other DNA
cgtcgccgaggggaaacaacccatatgtgtcgaatcctgcccgctgcgtgcacttgagttcggtccaattgaaga

SEQ ID NO: 163550 - DNA, 75 bp, synthetic construct
  source 1..75: mol_type = other DNA
ttgattccagccgctgcaccggctgcaaaacctgcgagctggcgtgtaaggactacaaagatttaggccccgacg

SEQ ID NO: 163551 - DNA, 75 bp, synthetic construct
  source 1..75: mol_type = other DNA
agtgacgaacaacatttatttggcagagctgcaatgatgggcaggtaggaagatgaaaataaaacgccagtgacg

SEQ ID NO: 163552 - DNA, 75 bp, synthetic construct
  source 1..75: mol_type = other DNA
gcgttatacatatattccaacaatcaatatcatcaataagttacgtgaagaaggtttccagccgttctttgcatg

SEQ ID NO: 163553 - DNA, 75 bp, synthetic construct
  source 1..75: mol_type = other DNA
gattttggtcctatcgacgagctgcgtaaaaaacatggtgatcttgcggcggttgcaccactgccgcgtgcacac

SEQ ID NO: 163554 - DNA, 75 bp, synthetic construct
  source 1..75: mol_type = other DNA
agtgacgaccaacatttatttggcagagctgcactgatgggcaggtaggaagatgaaaataaaacgccagtgacg

SEQ ID NO: 163555 - DNA, 75 bp, synthetic construct
  source 1..75: mol_type = other DNA
agtgacgatcaacatttatttggcagagctgcattgatgggcaggtaggaagatgaaaataaaacgccagtgacg

SEQ ID NO: 163556 - DNA, 75 bp, synthetic construct
  source 1..75: mol_type = other DNA
agtgacgatcaacatttatttggcagagctgcaatgatggtcaggtaggaagatgaaaataaaacgccagtgacg

SEQ ID NO: 163557 - DNA, 75 bp, synthetic construct
  source 1..75: mol_type = other DNA
gcaccggggaaatgtggtggagagagtcattgaaggggcttacgaggtggtgggcgtgtttgaccggattgagga

SEQ ID NO: 163558 - DNA, 75 bp, synthetic construct
  source 1..75: mol_type = other DNA
gcaccggggaaatgtggtggagacagtgattgaaggggcttacgaggtggtgggcgtgtttgaccggattgagga

SEQ ID NO: 163559 - DNA, 75 bp, synthetic construct
  source 1..75: mol_type = other DNA
gcaccggggaaatgtggtggacacagtcattgaaggggcttacgaggtggtgggcgtgtttgaccggattgagga

SEQ ID NO: 163560 - DNA, 75 bp, synthetic construct
  source 1..75: mol_type = other DNA
caaaacctgcgagctggcctgtaaagactataaagatctgacgccggaagtcagcttccgccgcatttatgaata

SEQ ID NO: 163561 - DNA, 75 bp, synthetic construct
  source 1..75: mol_type = other DNA
tgcgatggttgttattcgcgcgtcgccgagggggaaacaacccatatgtgtcgaatcctgcccgctgcgtgcact

SEQ ID NO: 163562 - DNA, 75 bp, synthetic construct
  source 1..75: mol_type = other DNA
cacagcattgacactgacattaagctcaaccgcgcattgtgggtgatggcggaaacgctgctggagagcctgcgc

SEQ ID NO: 163563 - DNA, 75 bp, synthetic construct
  source 1..75: mol_type = other DNA
gatgaacagttcattgtatctgatgcgtagcgaattacgggaaataccgccgcatgcctggggtaagaccttgaa

SEQ ID NO: 163564 - DNA, 75 bp, synthetic construct
  source 1..75: mol_type = other DNA
atgtctgatgctttaaaggttatcaacaatattcgtactctccgtgctcaggctcgtgaactgacactcgatact

SEQ ID NO: 163565 - DNA, 75 bp, synthetic construct
  source 1..75: mol_type = other DNA
gtgtctttgataaagtcactgaaaatatggaggcaatgaaagagatacatcttaacagtgacgaacaacatttat

SEQ ID NO: 163566 - DNA, 75 bp, synthetic construct
  source 1..75: mol_type = other DNA
gatatcagtcaacttgaagctttaattgaagagttgctgacttatgcccgactcgatcgcccacaaaacgagctt

SEQ ID NO: 163567 - DNA, 75 bp, synthetic construct
  source 1..75: mol_type = other DNA
acatatctttgaaccttttgttcgcctcgatcccagccgggatcgctcaaccggcggctgcgggctggggctggc

SEQ ID NO: 163568 - DNA, 75 bp, synthetic construct
  source 1..75: mol_type = other DNA
tcgccagcaaaaagcagcttattgatgggattgcccacgaattgcggactccgttagtgcgtttacgttatcgac

SEQ ID NO: 163569 - DNA, 75 bp, synthetic construct
  source 1..75: mol_type = other DNA
agtgacgagcaacatttatttggcagagctgcactgatggccaggtaggaagatgaaaataaaacgccagtgacg

SEQ ID NO: 163570 - DNA, 75 bp, synthetic construct
  source 1..75: mol_type = other DNA
agtgacgagcaacatttatttggcagagctgcattgatggtcaggtaggaagatgaaaataaaacgccagtgacg

SEQ ID NO: 163571 - DNA, 75 bp, synthetic construct
  source 1..75: mol_type = other DNA
agtgacgagcaacatttatttggcagagctgcaatgatggacaggtaggaagatgaaaataaaacgccagtgacg

SEQ ID NO: 163572 - DNA, 75 bp, synthetic construct
  source 1..75: mol_type = other DNA
accagaacaagagccattacaggcattgacggtgatatccgaatcaacaaagcattatggatgattgccgaaaag

SEQ ID NO: 163573 - DNA, 75 bp, synthetic construct
  source 1..75: mol_type = other DNA
catccagttatcagatgatcccaggaatttttcgttttgtctgcacaaatggcctggtgtgcggaaataattttg

SEQ ID NO: 163574 - DNA, 75 bp, synthetic construct
  source 1..75: mol_type = other DNA
agtgacgagcaacatttatttggcagagctgcagtgatgggcaggtaggaagatgaaaataaaacgccagtgacg

SEQ ID NO: 163575 - DNA, 75 bp, synthetic construct
  source 1..75: mol_type = other DNA
tcgctctgttctgactgctggttcgcaggctggtacggtacgtgtaactgcaaaagtaatggataaaacatttac

SEQ ID NO: 163576 - DNA, 75 bp, synthetic construct
  source 1..75: mol_type = other DNA
gatgcttatggaaaggcatcaacgcagttcactgcatcgaaatcgggccagtacacaattcaggccgagcatgtt

SEQ ID NO: 163577 - DNA, 75 bp, synthetic construct
  source 1..75: mol_type = other DNA
gttacgttgtccttacctgcgggggtaactcaagttggtggtgaacatgcagtgtcaactgacgaaaacggtaat

SEQ ID NO: 163578 - DNA, 75 bp, synthetic construct
  source 1..75: mol_type = other DNA
gttaataagctccactccggggtcttacgtgattacagctcatgctggttctcagatgtctactgagttaacagt

SEQ ID NO: 163579 - DNA, 75 bp, synthetic construct
  source 1..75: mol_type = other DNA
acattcagttggttgatgccaataacaatgcgtttacaggcgatgtggatttaacggttacaccatcgacgggag

SEQ ID NO: 163580 - DNA, 75 bp, synthetic construct
  source 1..75: mol_type = other DNA
tttatatccatggctggatactcaggattatgtgttattcagtcagacatcactacatcgtactgatgaccgaaa

SEQ ID NO: 163581 - DNA, 75 bp, synthetic construct
  source 1..75: mol_type = other DNA
gtttgtctcttcccatcacgtaccataaagtcccatttatcttacggtaccccctatatttatctcacgtctaat

SEQ ID NO: 163582 - DNA, 75 bp, synthetic construct
  source 1..75: mol_type = other DNA
gaggcaatcgccgcgttacgcgcgcaaccagacgtacttcagctcgacaaatttagtccgcaacaggcaactgaa

SEQ ID NO: 163583 - DNA, 75 bp, synthetic construct
  source 1..75: mol_type = other DNA
atgattttcctttctcaggcacaaatcgatgcgttacttctggaagatatccagggcggtgacctgaccacgcga

SEQ ID NO: 163584 - DNA, 75 bp, synthetic construct
  source 1..75: mol_type = other DNA
aaagaaatctcctttatggaggaccgaattcagttcgcgttctctcgtattgaagccagtaaaaataatgcattg

SEQ ID NO: 163585 - DNA, 75 bp, synthetic construct
  source 1..75: mol_type = other DNA
gactgtttattacctccgcgccttattacgcggcaccggctgatatcaaagtcagtctgaaacccaaagcctctt

SEQ ID NO: 163586 - DNA, 75 bp, synthetic construct
  source 1..75: mol_type = other DNA
ccggcacccgtttactggcggcgcaggcaattctggccgcagggggattgattcaccgtgccggatgtgcggaga

SEQ ID NO: 163587 - DNA, 75 bp, synthetic construct
  source 1..75: mol_type = other DNA
aggtctacacccagatagcagtgatccaaacagcattgcgaagacagcgacaacactggaatttaatgctaatgg

SEQ ID NO: 163588 - DNA, 75 bp, synthetic construct
  source 1..75: mol_type = other DNA
atgtccgattcgtcctggttgcgcagcgtgaataataaagggatttacactggcggccaggtaaaaggtggaact

SEQ ID NO: 163589 - DNA, 75 bp, synthetic construct
  source 1..75: mol_type = other DNA
ctcttcttgaggtattacttgtcatcggcataatggtgatggttatccctaaagtttatgaaaacattgaaaacc

SEQ ID NO: 163590 - DNA, 75 bp, synthetic construct
  source 1..75: mol_type = other DNA
aaataccggcgctaacaacattgtggcaaccacccagaatggctacaaaccgggcgatctggtgagttatcaaat

SEQ ID NO: 163591 - DNA, 75 bp, synthetic construct
  source 1..75: mol_type = other DNA
tgagcttcctcaactccatgcagcaaaataccggcgctaacaacattgtggcaccacccagaacggctacaaacc

SEQ ID NO: 163592 - DNA, 75 bp, synthetic construct
  source 1..75: mol_type = other DNA
accacgctggaatttaatgccaatggcgtattagttaagggagagatagcaaatatcaagactagcgccattaat

SEQ ID NO: 163593 - DNA, 75 bp, synthetic construct
  source 1..75: mol_type = other DNA
cgatgcgtttaacccggaggaactcagcgcgttaactccgcggcctacgctggcgattgtctctggcctgtatga

SEQ ID NO: 163594 - DNA, 75 bp, synthetic construct
  source 1..75: mol_type = other DNA
tccgaatatgctggttcgctgggccaggcgcggttttggcgtatggggtgcctggcgtctggttaaaaccaccct

SEQ ID NO: 163595 - DNA, 75 bp, synthetic construct
  source 1..75: mol_type = other DNA
gtacgtgtaactgcaaaagttcagggaaaaacatttactctcagtattaagcaaacagcaacaacagaacctgat

SEQ ID NO: 163596 - DNA, 75 bp, synthetic construct
  source 1..75: mol_type = other DNA
atgaagcgattagctatattcgagccagacgcccgcagattgtgcttaaggaagatcacaaagcgatgctgaaat

SEQ ID NO: 163597 - DNA, 75 bp, synthetic construct
  source 1..75: mol_type = other DNA
gtcaaacttggggcagcatactttttgcgcattatcccatgtaagagcaacgggtttccataattcaaacgatta

SEQ ID NO: 163598 - DNA, 75 bp, synthetic construct
  source 1..75: mol_type = other DNA
tgttaaccagtcataaagatggtaaaccgtgggtaatgcgcgtgcgttcgcaaggggagatggattcactcgtgc

SEQ ID NO: 163599 - DNA, 75 bp, synthetic construct
  source 1..75: mol_type = other DNA
gagcgacagcgcggttgttctgctggcgctcccgcttgcgcatggtaacggcggtaatctcggtcagggtgagca

SEQ ID NO: 163600 - DNA, 75 bp, synthetic construct
  source 1..75: mol_type = other DNA
agccgatttttacctgtccgttcgttcctcactgcctgcgcatcaggtactgcatcagctaccgctggtctgcaa

SEQ ID NO: 163601 - DNA, 75 bp, synthetic construct
  source 1..75: mol_type = other DNA
agacgaagtttccgcagttatgcaaagccgggagccccgatgatgtgtctgaggtggtgaatgtggcgctgagcg

SEQ ID NO: 163602 - DNA, 75 bp, synthetic construct
  source 1..75: mol_type = other DNA
cttttgtggtggcgctgatagcgattaaaaccttcctgcaattgattaagcgcatttcgtttatcccgttcgcca

SEQ ID NO: 163603 - DNA, 75 bp, synthetic construct
  source 1..75: mol_type = other DNA
atgagcgatatgcactcgctgctaatagcggcaatattgggtgtggtcgaaggattgacagaatttctgccggta

SEQ ID NO: 163604 - DNA, 75 bp, synthetic construct
  source 1..75: mol_type = other DNA
gggcggcagcgcgattgttttgctggcgctgccgcttgcgcatggtaacggcggtaatctcggtcagggcgagca

SEQ ID NO: 163605 - DNA, 75 bp, synthetic construct
  source 1..75: mol_type = other DNA
atggcccggataccgttactgaatgctaacggcggcaaccttgatgatggaagtgagagcgagcgtccgcgtcgc

SEQ ID NO: 163606 - DNA, 75 bp, synthetic construct
  source 1..75: mol_type = other DNA
gtcatttggggcaagtccggtcctgcgcgaacgtctggtgttgctcaatcgtcagttactctcacgacgtcagcg

SEQ ID NO: 163607 - DNA, 75 bp, synthetic construct
  source 1..75: mol_type = other DNA
gtcacccggaactgttgtacagggagcttgcccggctggcaggctccctgctcacattctcgcttgagcataatg

SEQ ID NO: 163608 - DNA, 75 bp, synthetic construct
  source 1..75: mol_type = other DNA
cggttctgattccgtcgaatctgccgctcgcgaaatcgcttattttcttcggcgaaggcgaagtgtgcccgcgca

SEQ ID NO: 163609 - DNA, 75 bp, synthetic construct
  source 1..75: mol_type = other DNA
acgttttcccttgaacataacgtcagcgccgttccgccctatgtccacgaatcgccgtccactgtctttccgcca

SEQ ID NO: 163610 - DNA, 75 bp, synthetic construct
  source 1..75: mol_type = other DNA
atttaagtacggatgcagcccgggcgatgctggacgcggggcgttgtactttctacaccccggcatcgctggggg

SEQ ID NO: 163611 - DNA, 75 bp, synthetic construct
  source 1..75: mol_type = other DNA
ccctgtaggtattctgggttttgcaattattatggcggctgtgagtgcgtttgttaatgataagtttattgagca

SEQ ID NO: 163612 - DNA, 75 bp, synthetic construct
  source 1..75: mol_type = other DNA
caggatttaaaagcgagattgataatcaggactggattattgcaaaagccgggcacaccattgataacagcggct

SEQ ID NO: 163613 - DNA, 75 bp, synthetic construct
  source 1..75: mol_type = other DNA
cgcgcggtggcctgatcctggcgaaaggtggtagtgaagagctgtacaaaaaactgaactctgctgttttccctg

SEQ ID NO: 163614 - DNA, 75 bp, synthetic construct
  source 1..75: mol_type = other DNA
aaatgcccagcatcagcgcgaagagctggagcgtgagaacaaccagctgaaagaacagcagaacggctggcagga

SEQ ID NO: 163615 - DNA, 75 bp, synthetic construct
  source 1..75: mol_type = other DNA
ggagaccaatttcccaaggagccaagaaagtaagagcagacgtatatacttcaagcgatagaaacgaagaacaca

SEQ ID NO: 163616 - DNA, 75 bp, synthetic construct
  source 1..75: mol_type = other DNA
tggaaggtgacaagaaaatttataatgctgaagttgctgaatgggataagttacggcaaagattgcttgatgcca

SEQ ID NO: 163617 - DNA, 75 bp, synthetic construct
  source 1..75: mol_type = other DNA
cctccgaaaactacaccagcccgcgcgtaatgcaagcacagggctctcagctaaccaacaaatatgctgaaggtt

SEQ ID NO: 163618 - DNA, 75 bp, synthetic construct
  source 1..75: mol_type = other DNA
aaaatggtaatgctatttttgcgttaataagctccactccggggtcttacgtgattacagctcatgctggttctc

SEQ ID NO: 163619 - DNA, 75 bp, synthetic construct
  source 1..75: mol_type = other DNA
aggtgttaagaaagaaatcacctttattgaggaccggcagcaggttacattctctcagtttgaagccagccaaaa

SEQ ID NO: 163620 - DNA, 75 bp, synthetic construct
  source 1..75: mol_type = other DNA
aatgatgaagccgttatcgagcgcatcaaaggtaaagttctcgacatctgcgcacgttacccggtttacgcataa

SEQ ID NO: 163621 - DNA, 75 bp, synthetic construct
  source 1..75: mol_type = other DNA
ccgctggtgtctaccctaacccggttcctcatgctcacgttgttactaccaccactcacaaaaccctggcgggtc

SEQ ID NO: 163622 - DNA, 75 bp, synthetic construct
  source 1..75: mol_type = other DNA
cctccgaaaactacaccagcccgcgcgtgatgcaggcgcagggttctcagctgaccaataaatatgctgaaggtt

SEQ ID NO: 163623 - DNA, 75 bp, synthetic construct
  source 1..75: mol_type = other DNA
atttactcatccgtcgatgagcgaatcactcaatgatctattttcattagtcaatgaaactcaaaatcagacgcc

SEQ ID NO: 163624 - DNA, 75 bp, synthetic construct
  source 1..75: mol_type = other DNA
ggggtattaaaagcgattgttgataataaaacccaacgtatattaggggcatcgctgctgtgtgctgagagatcc

SEQ ID NO: 163625 - DNA, 75 bp, synthetic construct
  source 1..75: mol_type = other DNA
agagcctgaggtacggacactgccagtctgacctgttaaaggccgcagggctggccagaagcacgctgtactacc

SEQ ID NO: 163626 - DNA, 75 bp, synthetic construct
  source 1..75: mol_type = other DNA
cttcctgacaaccggcgatatcccgatgtttgccgttgggtttatcaccgcttttgtggtggcgctgatagcgat

SEQ ID NO: 163627 - DNA, 75 bp, synthetic construct
  source 1..75: mol_type = other DNA
cgctcgatctctacaaaagctggggcttcctgacaaccggcgatatcccgatgtttgccgttgggtttatcaccg

SEQ ID NO: 163628 - DNA, 75 bp, synthetic construct
  source 1..75: mol_type = other DNA
gaacggcagcgagccgcagagctggaggttgccagactgcaacgccaggaacgggtggatcaggcgatgaagtcc

SEQ ID NO: 163629 - DNA, 75 bp, synthetic construct
  source 1..75: mol_type = other DNA
taaggttaaattgtatgtgccgctggcacgtcctgcgctggcgttatggcatcgtctgcgtggtctgttttttat

SEQ ID NO: 163630 - DNA, 75 bp, synthetic construct
  source 1..75: mol_type = other DNA
tccagtaatagatctcttcaacaacgaagttatttcttacagcctttcggaaagaccagtgatgaacatggtgtc

SEQ ID NO: 163631 - DNA, 75 bp, synthetic construct
  source 1..75: mol_type = other DNA
ataaaagataaccttgaggctttagataaaattagcgatttaaactcagaacattttagggaggtttttgcttct

SEQ ID NO: 163632 - DNA, 75 bp, synthetic construct
  source 1..75: mol_type = other DNA
acccgaaatctgatttattcaacaaagccgtatgcggacgttaaaaagcgtattagtgagatttatcacgagaat

SEQ ID NO: 163633 - DNA, 75 bp, synthetic construct
  source 1..75: mol_type = other DNA
atgccggattcgataaatgcacacaacggattgatgtgtggggcatttttacggtttcgatggcggtgcgtcgtg

SEQ ID NO: 163634 - DNA, 75 bp, synthetic construct
  source 1..75: mol_type = other DNA
gtgttaaccagtcataaagatggtaaaccgtgggtaatgcgcgtgcgttcgcaaggggagatggattcactcgtg

SEQ ID NO: 163635 - DNA, 75 bp, synthetic construct
  source 1..75: mol_type = other DNA
gacgccgtcagtgtcccgttgctgacccgcctttcttctgaacgcacactggcggttcaggcggccctgttgcag

SEQ ID NO: 163636 - DNA, 75 bp, synthetic construct
  source 1..75: mol_type = other DNA
tcatgagcttaatgatattctaaacgctcaaggtcatttgtttggtaaatatacaatatataagaatgtttatcg

SEQ ID NO: 163637 - DNA, 75 bp, synthetic construct
  source 1..75: mol_type = other DNA
tcataccatcaaccgtagtgaatccctatccgccacgcgagcagagtcgcaccgctgtgctgttgaagcattggt

SEQ ID NO: 163638 - DNA, 75 bp, synthetic construct
  source 1..75: mol_type = other DNA
ttgccaggacaagaaagaagagcgaaaaggcaatacggattgagatgcagattgcggaaggattcattgatggat

SEQ ID NO: 163639 - DNA, 75 bp, synthetic construct
  source 1..75: mol_type = other DNA
tcagtctggcaacaagtcagaacgataccgacgctgatgccggcgacgtcaccgaccataacaacccggcctgcg

SEQ ID NO: 163640 - DNA, 75 bp, synthetic construct
  source 1..75: mol_type = other DNA
ccgtcagtgtcccgttgctgacccgcctttcttctgaacgcacactggcggttcaggcggccctgttgcagcagc

SEQ ID NO: 163641 - DNA, 75 bp, synthetic construct
  source 1..75: mol_type = other DNA
tttacaaccatgctcagtatctcgataagcgcagagaaatgatgcagtggtgggcggattggattgatgaaaagg

SEQ ID NO: 163642 - DNA, 75 bp, synthetic construct
  source 1..75: mol_type = other DNA
tccacgacacgattaagtcgttgtttaacccgataaatgtgatgtatgcgctggtcgttggcggtctgttgctga

SEQ ID NO: 163643 - DNA, 75 bp, synthetic construct
  source 1..75: mol_type = other DNA
gatatgacctatcgtcaggcgtttatgattggctgcttccagtgtctggcgctgtggccgggtttctcccgctcc

SEQ ID NO: 163644 - DNA, 75 bp, synthetic construct
  source 1..75: mol_type = other DNA
caaatgaatatcttgccattggtgtcggtatccctgcatattcctgtttagatgcccctggcacacataaggcgg

SEQ ID NO: 163645 - DNA, 75 bp, synthetic construct
  source 1..75: mol_type = other DNA
ttttaactcatgggaatatgtgccagaccatcgcggtgaaatcatctatagcaccgaaacaggagaatcgaaaga

SEQ ID NO: 163646 - DNA, 75 bp, synthetic construct
  source 1..75: mol_type = other DNA
tcactaaaccagtatcagagtttgttttttccgggcgcaacgataagaagaagccaatctgcgagaacgcggtat

SEQ ID NO: 163647 - DNA, 75 bp, synthetic construct
  source 1..75: mol_type = other DNA
atttcgcgtctggaagctgccatgtgtcagcgtcgccgctggactgcagaacagttcagcctgtttctggtggag

SEQ ID NO: 163648 - DNA, 75 bp, synthetic construct
  source 1..75: mol_type = other DNA
gaaattcaaagcattacaggagcgggcaaagaaaaaattgccgacattgccgagagccgcgaactcacggtggcg

SEQ ID NO: 163649 - DNA, 75 bp, synthetic construct
  source 1..75: mol_type = other DNA
gctcttcctggttgagcatccgctggtccgccacttaacccgccgtctgatttggggcgtttatagcgccgaaaa

SEQ ID NO: 163650 - DNA, 75 bp, synthetic construct
  source 1..75: mol_type = other DNA
aagccgattagcgagaactccgtgctgctggttattcggcagattggatatgaagggttggcaagcggccacggc

SEQ ID NO: 163651 - DNA, 75 bp, synthetic construct
  source 1..75: mol_type = other DNA
tagcgaaaccgtttattctaattacaatactcagctccgtgtaattcgagaaaaaaaacaaaaagaacatttgat

SEQ ID NO: 163652 - DNA, 75 bp, synthetic construct
  source 1..75: mol_type = other DNA
gaaagatattaatagagagccatcgattattgttaaatccagaggtattatcgaattcgagtattacgataaacc

SEQ ID NO: 163653 - DNA, 75 bp, synthetic construct
  source 1..75: mol_type = other DNA
gctcataatataattgaaagaaaagaagagagttatatatatccttgttttggaggaaatggcatacggggttac

SEQ ID NO: 163654 - DNA, 75 bp, synthetic construct
  source 1..75: mol_type = other DNA
aaataactcaggctgcattaaaaaattcatcggcaaaatggattccgcgaaattgtgtaatcatagccatttcag

SEQ ID NO: 163655 - DNA, 75 bp, synthetic construct
  source 1..75: mol_type = other DNA
ggtcaccgccgccgcgctgtttggtacctcagtgccgctcgcccatgcgggggtagctggcaccctaaactgcga

SEQ ID NO: 163656 - DNA, 75 bp, synthetic construct
  source 1..75: mol_type = other DNA
tcctccacctcggtgaaatgctccgcttccctcaggaagaggcactgtatccgggattattgcaggtgaaagatg

SEQ ID NO: 163657 - DNA, 75 bp, synthetic construct
  source 1..75: mol_type = other DNA
ctgggggagtaattcaacacaggaagcgcagttctccgtactcgatgccatcaccgccagcgagctaattaacga

SEQ ID NO: 163658 - DNA, 75 bp, synthetic construct
  source 1..75: mol_type = other DNA
ttagaatggcaaaacaccgtcgcccaggcgatcagtcagatcgacggcctgaaaacaacacagctaccatcaccc

SEQ ID NO: 163659 - DNA, 75 bp, synthetic construct
  source 1..75: mol_type = other DNA
tactgccgtactggaaaaggcagacgcatacctggcacaggcggcagcactgagccgtaccgctggcgtaaaaag

SEQ ID NO: 163660 - DNA, 75 bp, synthetic construct
  source 1..75: mol_type = other DNA
atcgcggatcgtattgagtttaaacgggatgtgttactgccgcgctgggtgccgactgtggaagcgtatctggaa

SEQ ID NO: 163661 - DNA, 75 bp, synthetic construct
  source 1..75: mol_type = other DNA
gatcaactgctggccaccgcagaaaaatactatttaaaaatcggcgtcagaacggcacggcagacgattgccgcc

SEQ ID NO: 163662 - DNA, 75 bp, synthetic construct
  source 1..75: mol_type = other DNA
aatgtatatcctgatattttggcattagtaggtcaaggaaggaaatatgttgttgccacagagcagtggtttaga

SEQ ID NO: 163663 - DNA, 75 bp, synthetic construct
  source 1..75: mol_type = other DNA
cgtctattttgaaaagccgcgtaccacggtgggctggaaagggctgattaacgatccgcatatggataacagctt

SEQ ID NO: 163664 - DNA, 75 bp, synthetic construct
  source 1..75: mol_type = other DNA
tgcgaaacacgttgccgaagtgaaagaagggttgaacaaagcagggttgccggcgcaggtgatgatcgatttcag

SEQ ID NO: 163665 - DNA, 75 bp, synthetic construct
  source 1..75: mol_type = other DNA
attcgtaaacctgcaattacaattattgctcttgttattgggtatattgcaatattttctcgtcaacatacctca

SEQ ID NO: 163666 - DNA, 75 bp, synthetic construct
  source 1..75: mol_type = other DNA
atctcaccaacggctcgctacaaacccgagagtgtcgcattattactggcttgttactccaagagcttgatgaag

SEQ ID NO: 163667 - DNA, 75 bp, synthetic construct
  source 1..75: mol_type = other DNA
ctggaatcaacgcactgaggttcatgactggaaaagacgtgccgagcgtctggtcagggccactggtcaccccta

SEQ ID NO: 163668 - DNA, 75 bp, synthetic construct
  source 1..75: mol_type = other DNA
ggcgctggataagtgcgaagccctgacggcatcgccggtcagctttcacattcaaatgctggagctggaaaggga

SEQ ID NO: 163669 - DNA, 75 bp, synthetic construct
  source 1..75: mol_type = other DNA
taaccaacagcgtttaaatacactaaatcctccggaaaatttacgtatagcaatagaaaaatttggctggaagaa

SEQ ID NO: 163670 - DNA, 75 bp, synthetic construct
  source 1..75: mol_type = other DNA
cggttacttaagagttatgagggcgaaaaaaattattttgataatttaaaatgtgatttaaatgatgaggaatct

SEQ ID NO: 163671 - DNA, 75 bp, synthetic construct
  source 1..75: mol_type = other DNA
gcactgatttgtcgtcacgcccgcaacctgctgctggcgcagggctggccggaggagacggatgttgatcagcga

SEQ ID NO: 163672 - DNA, 75 bp, synthetic construct
  source 1..75: mol_type = other DNA
ctctgccattcagaaactgaccggaaccggggcggaactggtactgtccggcagtcagtggcagtcgctgccggt

SEQ ID NO: 163673 - DNA, 75 bp, synthetic construct
  source 1..75: mol_type = other DNA
gatgagcgccgaaaacctggtgccgtggtgggtttaccagcccgttcgccgcctgatggacgcctgccgcgccat

SEQ ID NO: 163674 - DNA, 75 bp, synthetic construct
  source 1..75: mol_type = other DNA
gctggatcagcatttacgtgcagctggatgcgccccggctggcgacgttactcgttaaccgccacgatggcgtgc

SEQ ID NO: 163675 - DNA, 75 bp, synthetic construct
  source 1..75: mol_type = other DNA
ggtttgaccgtggtgttctgcgggaggtggtccgggaagcccggaacgaaatccgcagcatggcggatgccctgg

SEQ ID NO: 163676 - DNA, 75 bp, synthetic construct
  source 1..75: mol_type = other DNA
cccctgctggcttgatgaagatgacgaaaatctgcccgtggtgctcgatgccatcctgaaccgtggcgcacgttt

SEQ ID NO: 163677 - DNA, 75 bp, synthetic construct
  source 1..75: mol_type = other DNA
cggcttttatggaggcacggcaccgcccggtgtcgcggaatatgtgaacaacggaggaaaacatcatgcagtatg

SEQ ID NO: 163678 - DNA, 75 bp, synthetic construct
  source 1..75: mol_type = other DNA
agtgagtgtgtggagcatatcctgtccagtggtctggtctgtgatgtgctgcgtataccggatgaaccgtcccgt

SEQ ID NO: 163679 - DNA, 75 bp, synthetic construct
  source 1..75: mol_type = other DNA
cgaaaacctgcccgtggtgctcgatgccatcgtgaaccggggagcacgtttttcgtcggtggaaatgtacctggt

SEQ ID NO: 163680 - DNA, 75 bp, synthetic construct
  source 1..75: mol_type = other DNA
ggtctggtctgtgatgtgctgcgtataccggaagaaccgtcccgtcgctggtttgaccgggatattctgcgggag

SEQ ID NO: 163681 - DNA, 75 bp, synthetic construct
  source 1..75: mol_type = other DNA
aatggctgaccgaagacgaaatcagggctgtacttgcggcggtgcgcgatgcggtacgcagtgtcagttgccggg

SEQ ID NO: 163682 - DNA, 75 bp, synthetic construct
  source 1..75: mol_type = other DNA
gtctggtagtgaaggaaagcgattacccctgctggcttgatgaagatgacgaaaatctgcccgtggtgctcgatg

SEQ ID NO: 163683 - DNA, 75 bp, synthetic construct
  source 1..75: mol_type = other DNA
gcagccagtggcaggcgctgccggtacttccggcagacggaacgcaggtgtctttcccgtatgccggtgaatggc

SEQ ID NO: 163684 - DNA, 75 bp, synthetic construct
  source 1..75: mol_type = other DNA
cgctggtttgaccgtggtgttctgcgggaggtggtcctggaagcccggagtgaaatccgcagcatggcggatgcc

SEQ ID NO: 163685 - DNA, 75 bp, synthetic construct
  source 1..75: mol_type = other DNA
cgctgaccaccaccggtcagacgttgctgacccgccagacgcgccgctttcgcctggtcgtgaaggaaagcgatc

SEQ ID NO: 163686 - DNA, 75 bp, synthetic construct
  source 1..75: mol_type = other DNA
agaaaaaatcctcatggagcaagcaccgattgcaccaatttatcaatataccaatggacgattaatcaagccgtg

SEQ ID NO: 163687 - DNA, 75 bp, synthetic construct
  source 1..75: mol_type = other DNA
atgttaaattgcaaaatcaggaatggaaaacctatatcgatagccgtaacaccggcaattttgatgttatccgcg

SEQ ID NO: 163688 - DNA, 75 bp, synthetic construct
  source 1..75: mol_type = other DNA
gtaccgaatacccattattgggataacgccaaaacggtactgcaaaaagtgaccttcctgccaattaatcaggaa

SEQ ID NO: 163689 - DNA, 75 bp, synthetic construct
  source 1..75: mol_type = other DNA
gcgatcacccctgctggctcgatgaggacgacgaaaacctgcccgtggtgctcgatgccatcctgaaccggggcg

SEQ ID NO: 163690 - DNA, 75 bp, synthetic construct
  source 1..75: mol_type = other DNA
caccgctggtttgaccgtggtgttctgcgggaggtggtccgggaagcccgggccgaaatccgcagcatggcggat

SEQ ID NO: 163691 - DNA, 75 bp, synthetic construct
  source 1..75: mol_type = other DNA
cccctgctggctcgatgaagatgacgaaaacctgcccgtggtgctcgatgccatcctgaaccggggcgctcgttt

SEQ ID NO: 163692 - DNA, 75 bp, synthetic construct
  source 1..75: mol_type = other DNA
ggcgacgttacttatcaaccgtcacggcggcgtactgccaccgctcctggcctccgccattcagagactgaccgg

SEQ ID NO: 163693 - DNA, 75 bp, synthetic construct
  source 1..75: mol_type = other DNA
cccctgctggcttgatgaagatgacgaaaatctgcccgtggtgctcgatgccattctgaaccggggcgcccgttt

SEQ ID NO: 163694 - DNA, 75 bp, synthetic construct
  source 1..75: mol_type = other DNA
ctcgaccacaaccggtcagacgttgctgacccgccagacccgccgctttcggcctggtggtgaaggaaagcgatc

SEQ ID NO: 163695 - DNA, 75 bp, synthetic construct
  source 1..75: mol_type = other DNA
gtataattaacgctttaaaaaaacgtaatatacgagttccacaagatgtgtccgtaatgagtattgatgggttta

SEQ ID NO: 163696 - DNA, 75 bp, synthetic construct
  source 1..75: mol_type = other DNA
catgcggtagccgaccttggtgccttaagcggcgatctcgaccgtctggcgcgcggacgaaaagcacgggtgcag

SEQ ID NO: 163697 - DNA, 75 bp, synthetic construct
  source 1..75: mol_type = other DNA
gtggtgaaggaaagcgatcacccctgctggctcgatgaagacgacgaaaacctgcctgtggtgctcgatgccatc

SEQ ID NO: 163698 - DNA, 75 bp, synthetic construct
  source 1..75: mol_type = other DNA
cccggatgctccggtgggctcgctgctgctgcacggacgattggcggtgcgggagtcagtgcggcgggttcgccc

SEQ ID NO: 163699 - DNA, 75 bp, synthetic construct
  source 1..75: mol_type = other DNA
cgattgcgccggaccatcggttaattggcgcgttcgccgcccgctatctgtttgaaatgggtcaccgggaggtga

SEQ ID NO: 163700 - DNA, 75 bp, synthetic construct
  source 1..75: mol_type = other DNA
tatcgtacacagagtgaggtaatccgcgagtcacttcgtctccttcgagagaaacaggcagagtcacgtctccag

SEQ ID NO: 163701 - DNA, 75 bp, synthetic construct
  source 1..75: mol_type = other DNA
atcatcgccattggtctggtgccggttatcgccctggtactgtatggcattttccgaatgacgcggagcacggtt

SEQ ID NO: 163702 - DNA, 75 bp, synthetic construct
  source 1..75: mol_type = other DNA
ggcctggatatcgccgttgccgtaggtaatccggcgattatctccaccgccctgctgctaacgccaatctcggtc

SEQ ID NO: 163703 - DNA, 75 bp, synthetic construct
  source 1..75: mol_type = other DNA
gagcagggtaatctggtggcagtagggcggctgtatatcaatgccgataacgaagcctccattcgctttatggcc

SEQ ID NO: 163704 - DNA, 75 bp, synthetic construct
  source 1..75: mol_type = other DNA
gagcagggtaatctggtggcggtaggccgattgtatattaatgccgacaatgaagcgtccattcgctttatggcc

SEQ ID NO: 163705 - DNA, 75 bp, synthetic construct
  source 1..75: mol_type = other DNA
gacttatatccgcgaaggttatgcgcatccctgcgtgtcgtctcatatgcgttttgagagtgaattcaccctggt

SEQ ID NO: 163706 - DNA, 75 bp, synthetic construct
  source 1..75: mol_type = other DNA
cttccggcagacggaacgcaggtgtctttcccgtatgccggagaatggctgaccgaagacgaaatcagggcagtt

SEQ ID NO: 163707 - DNA, 75 bp, synthetic construct
  source 1..75: mol_type = other DNA
atgaatgaaacgctgaatgcactgatttatcgccacgcccgtaacctgctgctggcgcagggctggccggaagag

SEQ ID NO: 163708 - DNA, 75 bp, synthetic construct
  source 1..75: mol_type = other DNA
atgaacgaaacgctgaatgcactgatttatcgccacgccagcaacctgctgctggcgcagggctggccggaagag

SEQ ID NO: 163709 - DNA, 75 bp, synthetic construct
  source 1..75: mol_type = other DNA
ttcagtctacctgcgccggtacgaccaaacaaacctgaatatataccacttccaccagaacctgatgagcatgcc

SEQ ID NO: 163710 - DNA, 75 bp, synthetic construct
  source 1..75: mol_type = other DNA
ctgtccggcagtcagtggcagtcgctgccggtacttccggcagacggaacgcaggtgtctttcccgtatgccgga

SEQ ID NO: 163711 - DNA, 75 bp, synthetic construct
  source 1..75: mol_type = other DNA
cctggtctgtgagtgtgtggagcatatcctggccagtggtctggtctgtgatgtgctgcgtataccggatgaacc

SEQ ID NO: 163712 - DNA, 75 bp, synthetic construct
  source 1..75: mol_type = other DNA
agcactatttgatcgccattcagaaaccattatgcggcgtctgcataatgtcacaaaattcacgatacatccggg

SEQ ID NO: 163713 - DNA, 75 bp, synthetic construct
  source 1..75: mol_type = other DNA
cggctggcgacgttactcatcaaccgtcacggcggcgtactgccgccgctcctggcctccgccattcagaaactg

SEQ ID NO: 163714 - DNA, 75 bp, synthetic construct
  source 1..75: mol_type = other DNA
ttcgtctggttgtgaaggaaagcgattacccctgctggcttgatgaagatgacgaaaatctgcccgtggtgctcg

SEQ ID NO: 163715 - DNA, 75 bp, synthetic construct
  source 1..75: mol_type = other DNA
gaatggctgaccgaagacgaaatcagggctgtacttgcggcggtgcgcgatgcggtacgcagtgtcagttgccgg

SEQ ID NO: 163716 - DNA, 75 bp, synthetic construct
  source 1..75: mol_type = other DNA
tccagtcggtccccggaaagagcaaaaggatgtcgccgcaggctcctctttacccggccatgtggggcatggcct

SEQ ID NO: 163717 - DNA, 75 bp, synthetic construct
  source 1..75: mol_type = other DNA
tcccgtcgctggtttgaccgggatattctgcgggaggttgttctggaggcacgggatgaaatccgcagcatggcg

SEQ ID NO: 163718 - DNA, 75 bp, synthetic construct
  source 1..75: mol_type = other DNA
ctcgccctgcaatatgcgaagaatgtctttaacgccaaagtgatcgccattgatgtcaatgatgagcaactgaaa

SEQ ID NO: 163719 - DNA, 75 bp, synthetic construct
  source 1..75: mol_type = other DNA
gtctgccgccggagtctatgagcctggatatcccacgtcttgtgctggatggtattgaagtggtcggttcgctgg

SEQ ID NO: 163720 - DNA, 75 bp, synthetic construct
  source 1..75: mol_type = other DNA
gtctgccgccggagtctatgagcctggacatcccacgccttgtgctggatggtattgaagtggtcggttcgctgg

SEQ ID NO: 163721 - DNA, 75 bp, synthetic construct
  source 1..75: mol_type = other DNA
tgccagcgtggcgtggttctacgaaggatgcggtcattgcgaatactgtaatagtggtaacgaaacgctctgccg

SEQ ID NO: 163722 - DNA, 75 bp, synthetic construct
  source 1..75: mol_type = other DNA
ctggcaaccgaaatgggcgctgatttagcgattaactcacgcaccgaagacgccgccaaaattgtgcaggaaaaa

SEQ ID NO: 163723 - DNA, 75 bp, synthetic construct
  source 1..75: mol_type = other DNA
cgaatactgtaacagcggcaacgaaacgctttgtcgttcggtcaaaaatgccggatacagcgttgatggcgggat

SEQ ID NO: 163724 - DNA, 75 bp, synthetic construct
  source 1..75: mol_type = other DNA
ccggttcaggaataaggaacgggctcacgttgatttcacctgggttaatggcgaggaacaggttggcgtaggaag

SEQ ID NO: 163725 - DNA, 75 bp, synthetic construct
  source 1..75: mol_type = other DNA
ccagccggataccgacaatgaaacaggcactgatcaggcgctacagattggcctcaacaaacttcttcagcgacc

SEQ ID NO: 163726 - DNA, 75 bp, synthetic construct
  source 1..75: mol_type = other DNA
atctggatgaacttttaagcgttatcggacgggttttacctgacgaagatgccgaagtggttctggatcaaatgc

SEQ ID NO: 163727 - DNA, 75 bp, synthetic construct
  source 1..75: mol_type = other DNA
ctctgggtaagcactttccgattctagacggtaacgtcaaacgcgtgttagcacgctgctatgctgtaagcggct

SEQ ID NO: 163728 - DNA, 75 bp, synthetic construct
  source 1..75: mol_type = other DNA
atgtatccatggagaacactttatcagccgggaaataatgcgggcaacggtgtttaattatatcgaatgtgatta

SEQ ID NO: 163729 - DNA, 75 bp, synthetic construct
  source 1..75: mol_type = other DNA
cgcatcatgttgctggtaattctcgcctgtttgcttttttatatgtggcgaattccggtgattgatgaaaagcaa

SEQ ID NO: 163730 - DNA, 75 bp, synthetic construct
  source 1..75: mol_type = other DNA
actgcggcgctgatcgtcgccacggcgattgtgcttatatatagctgggttcgctttcgtaaggttgagaagatg

SEQ ID NO: 163731 - DNA, 75 bp, synthetic construct
  source 1..75: mol_type = other DNA
cgataagcctgctgatggcgggatgtgtaagtaatgacaaaattgctgtgacgcctgagcaattgcagcatcatc

SEQ ID NO: 163732 - DNA, 75 bp, synthetic construct
  source 1..75: mol_type = other DNA
cggtcggctggttgccactatccaggccaaccgcaccgataatcagacgccatttaacgccgatattacattgag

SEQ ID NO: 163733 - DNA, 75 bp, synthetic construct
  source 1..75: mol_type = other DNA
ttactggttggttttttatgtttaggtgtggcgacaatgatctatttaccttttgttattgccgccaacaaagtc

SEQ ID NO: 163734 - DNA, 75 bp, synthetic construct
  source 1..75: mol_type = other DNA
ctgattgaccagccaggcaatgccgtaacgcgccttcgcattatgtccgcgatatacagcgcgcttttcctttgg

SEQ ID NO: 163735 - DNA, 75 bp, synthetic construct
  source 1..75: mol_type = other DNA
gccttgatcacctttgttctggtgctcgtcttcggtggtctgaccctgttcttccacaacgatgagtttattaaa

SEQ ID NO: 163736 - DNA, 75 bp, synthetic construct
  source 1..75: mol_type = other DNA
taaggaggatgaagagaaactaatatctcttaaagaagaaaaaaataagctaatggaatctattatagcaaagga

SEQ ID NO: 163737 - DNA, 75 bp, synthetic construct
  source 1..75: mol_type = other DNA
gatatcccggagttaatttcaggaagaatgagttctgctccatgtagatgggtagaacccaaaaaacttgaaaaa

SEQ ID NO: 163738 - DNA, 75 bp, synthetic construct
  source 1..75: mol_type = other DNA
gattacgcggtaaaagtgccagatggcctggactcggcggcggccagcagcattacctgtgcgggggtcaccacc

SEQ ID NO: 163739 - DNA, 75 bp, synthetic construct
  source 1..75: mol_type = other DNA
tggtcggctggttgccactattcaggccaaccgcaccgacaatcagacgccatttaacgccgatatcacattgag

SEQ ID NO: 163740 - DNA, 75 bp, synthetic construct
  source 1..75: mol_type = other DNA
tctacaagatgagtttgatatagatgatagtgcgaatgatgagtatgcttcgtcaaaaattgagataaaagatgg

SEQ ID NO: 163741 - DNA, 75 bp, synthetic construct
  source 1..75: mol_type = other DNA
aagaccatgaaaaatcttttaaagattcatgttggaagcaaaaagtaaaacatgacaatgtgttctcaaaggctt

SEQ ID NO: 163742 - DNA, 75 bp, synthetic construct
  source 1..75: mol_type = other DNA
actggcgcgtcattacgcttgcgtgcgccatagcccgttcaaaaccaaaattattgccttccataacgcctttca

SEQ ID NO: 163743 - DNA, 75 bp, synthetic construct
  source 1..75: mol_type = other DNA
gaccacggcggagattgcgtctgcgtttcatcctggctcgcacggttccacctacggtggtaatccactagcctg

SEQ ID NO: 163744 - DNA, 75 bp, synthetic construct
  source 1..75: mol_type = other DNA
tcagcatcaggcattattggtgtttgatgaagtgcagtccgggatggggcggaccggcgatctgtttgcctatat

SEQ ID NO: 163745 - DNA, 75 bp, synthetic construct
  source 1..75: mol_type = other DNA
tcgaactttacccaagttcacagttaggttctaaacaagatattactgaacaagcgttgatggggatgaatatta

SEQ ID NO: 163746 - DNA, 75 bp, synthetic construct
  source 1..75: mol_type = other DNA
cgatccggctgatatggcgtggctgcgccgttgtctggaagagaagccgcaggggcaattgcaggatatcgagcg

SEQ ID NO: 163747 - DNA, 75 bp, synthetic construct
  source 1..75: mol_type = other DNA
tgaaacgggaatttgatggcgcaccggaagatacagcgggcgcattgttgagcgttgctgacatgatgaaagctg

SEQ ID NO: 163748 - DNA, 75 bp, synthetic construct
  source 1..75: mol_type = other DNA
aaaacgctttctccatttgcctggtttgctgcactggcaggaatcaacaacgcccaggcgattattgatggtaaa

SEQ ID NO: 163749 - DNA, 75 bp, synthetic construct
  source 1..75: mol_type = other DNA
atgtggaaaaagaacctgggcgtagatgttaaattgcaaaatcaggaatggaaaacctatatcgatagccgtaac

SEQ ID NO: 163750 - DNA, 75 bp, synthetic construct
  source 1..75: mol_type = other DNA
tggctgaaaggttatcccattaataaccctgaggatgtggcgtacagtcggactatgtatattgtgaagcattga

SEQ ID NO: 163751 - DNA, 75 bp, synthetic construct
  source 1..75: mol_type = other DNA
atggatgatcacacctgtgcggtggtggttgagccgatccagggcgagggcggtgtgacggcagcgacgccagag

SEQ ID NO: 163752 - DNA, 75 bp, synthetic construct
  source 1..75: mol_type = other DNA
ctggtcagtgagtgtgtggagcatatcctggccagtggcctggtctgtgatgtgctgcgtataccggatgaaccg

SEQ ID NO: 163753 - DNA, 75 bp, synthetic construct
  source 1..75: mol_type = other DNA
ctgcaaaaagtgaccttcctgccaattaatcaggaatccgcagccactaagcgttatctcgcgggggatattgat

SEQ ID NO: 163754 - DNA, 75 bp, synthetic construct
  source 1..75: mol_type = other DNA
atcgaatgccaagtatgtaggccagtacaccccaggcattaaataccctgtattaagcaagattcaggctgggca

SEQ ID NO: 163755 - DNA, 75 bp, synthetic construct
  source 1..75: mol_type = other DNA
ttccctagagaaaattggctttattaagcgtatggctagtaaggaagatcgccgtagcaagaacatttatctgac

SEQ ID NO: 163756 - DNA, 75 bp, synthetic construct
  source 1..75: mol_type = other DNA
cagaacagctcgaagacgctaagcggcttaaggctttgtatgagtcaaaaaagaaagaattgggaataacccaat

SEQ ID NO: 163757 - DNA, 75 bp, synthetic construct
  source 1..75: mol_type = other DNA
gcacaattcagagcatcctctggagtccaccgcgctcgattatgctcgagtttctcccaactattctgcgcaact

SEQ ID NO: 163758 - DNA, 75 bp, synthetic construct
  source 1..75: mol_type = other DNA
agagcaatgagtactattccggttggtgttgcctattcactctggtgcggctttgggattgttggcgtgacaatt

SEQ ID NO: 163759 - DNA, 75 bp, synthetic construct
  source 1..75: mol_type = other DNA
cgcacagtttagtatcgagcaaatttcaccgtcagtggcaattctcgactctgacgacgggatggggcattccac

SEQ ID NO: 163760 - DNA, 75 bp, synthetic construct
  source 1..75: mol_type = other DNA
ggcgaaatatccgtttaccgcgatcaccggcgttaacacgttgttcaacgcgttgctgaacaataaagaattcca

SEQ ID NO: 163761 - DNA, 75 bp, synthetic construct
  source 1..75: mol_type = other DNA
gtgccggaagatttagccttcctgcaatatactggcggcaccacgggggtggcgaaaggagcgatgctgactcac

SEQ ID NO: 163762 - DNA, 75 bp, synthetic construct
  source 1..75: mol_type = other DNA
ggcttccgcggtggcagttgccgctacggctgcacctaagaacgtggtgaagctgacggtgcctgttgtgcgcgg

SEQ ID NO: 163763 - DNA, 75 bp, synthetic construct
  source 1..75: mol_type = other DNA
ataagttgaaatcactggtattaaaaaaattaacgtttgccgggctggatgataaaactgccggagaagtcacgg

SEQ ID NO: 163764 - DNA, 75 bp, synthetic construct
  source 1..75: mol_type = other DNA
gccgccatgatgttattacgcgtgggcttgaaagttgatttagatgagaaagtggcgaatttatctatcagccac

SEQ ID NO: 163765 - DNA, 75 bp, synthetic construct
  source 1..75: mol_type = other DNA
tcgtgatgagttaccgaaatctaacgtcggaaaaattttgcgacgagaattacgtgacgaagcgcgcggcaaagt

SEQ ID NO: 163766 - DNA, 75 bp, synthetic construct
  source 1..75: mol_type = other DNA
gcgttgggatgcgcaagctggaacgctttggcaaaccgtttatggcgctgattcgtgcgcatgttgatggcgatg

SEQ ID NO: 163767 - DNA, 75 bp, synthetic construct
  source 1..75: mol_type = other DNA
ttttccggttctgcttgtcctgggactggcaacgcgtttttccgcactagtgctggcaggaatgacgatagtgat

SEQ ID NO: 163768 - DNA, 75 bp, synthetic construct
  source 1..75: mol_type = other DNA
ggctagtgccgagcatatactgtcattcctgcttgtcatcgggctggcgactcgcctttccgccgccggtattct

SEQ ID NO: 163769 - DNA, 75 bp, synthetic construct
  source 1..75: mol_type = other DNA
aaaaatagccagcgcgaagcagcgcatttgcattgtcgccctgtatctcgaacaggatgacggtggcaaaggcat

SEQ ID NO: 163770 - DNA, 75 bp, synthetic construct
  source 1..75: mol_type = other DNA
gttaacggcatcatggtcggtgttgataccaaaattgacggtaacaacgctaagtggaatcgtcggtgcggctgc

SEQ ID NO: 163771 - DNA, 75 bp, synthetic construct
  source 1..75: mol_type = other DNA
ttgacagttaataatggttctcaggttaatgtttcggaatctaaattaacttcagatactatcgatttaactaac

SEQ ID NO: 163772 - DNA, 75 bp, synthetic construct
  source 1..75: mol_type = other DNA
gattagcagggcttttaagtatgcattggatggaatcacaaagaaaaaatccccggtggccgccggggactctaa

SEQ ID NO: 163773 - DNA, 75 bp, synthetic construct
  source 1..75: mol_type = other DNA
atggaacgaacaagttacagcaaactatcacagcgcgacgttgatcgcgcagaaacagatttactcatcaacctg

SEQ ID NO: 163774 - DNA, 75 bp, synthetic construct
  source 1..75: mol_type = other DNA
tatcacagcgtgacgttgatcgcgcagaaacagatttactcatcaacctgtcaacgcttacccagcgtggtctgg

SEQ ID NO: 163775 - DNA, 75 bp, synthetic construct
  source 1..75: mol_type = other DNA
cttgatgaaatcacaaagaaaaaatccccggctgccactgaaccgccccgggtttcctggagagtgttttatctg

SEQ ID NO: 163776 - DNA, 75 bp, synthetic construct
  source 1..75: mol_type = other DNA
gattagcagggcttttaagtatgcattggatgaaatcacaaagaaaaaatccccggctgccaccgaggattttaa

SEQ ID NO: 163777 - DNA, 75 bp, synthetic construct
  source 1..75: mol_type = other DNA
tcggaatggcatcagacatcagtccgattagcagggcttttaagtatgcgcttgatgaaatcacaagaaaaatcc

SEQ ID NO: 163778 - DNA, 75 bp, synthetic construct
  source 1..75: mol_type = other DNA
gaacgtccagcttctgcagaacagcatggatgcaccgaaaatcatcggctccttcccgtgtaaaaaggttgatgg

SEQ ID NO: 163779 - DNA, 75 bp, synthetic construct
  source 1..75: mol_type = other DNA
cctatgataaaggtatgtggcatgcattaatcggcgttccgcgtgcggttgatgactctgttttaggtgatttac

SEQ ID NO: 163780 - DNA, 75 bp, synthetic construct
  source 1..75: mol_type = other DNA
tagtgcagcaaggaaattgaaagaacaatccaatattaaatttctgcttactatcagtggtacagaaaatgcgta

SEQ ID NO: 163781 - DNA, 75 bp, synthetic construct
  source 1..75: mol_type = other DNA
aatgcagcgaccaacgatatttctggtcaaacttataatactttccatcactacaacgacgccacctatgctgat

SEQ ID NO: 163782 - DNA, 75 bp, synthetic construct
  source 1..75: mol_type = other DNA
aaattattgggggaggacggcatcaagataaacatggggatgatgcctgccaaagacggcaacaactacggcttt

SEQ ID NO: 163783 - DNA, 75 bp, synthetic construct
  source 1..75: mol_type = other DNA
tcacatcgcagaaaattacaaatcttggtgctgatggcattaagattgatatggggcttatgcctgctaaagatg

SEQ ID NO: 163784 - DNA, 75 bp, synthetic construct
  source 1..75: mol_type = other DNA
aagggatgtgggttgatgataagtggatgttgatcaccggtaataacctgaacccgcgcgcctggcgtctggatc

SEQ ID NO: 163785 - DNA, 75 bp, synthetic construct
  source 1..75: mol_type = other DNA
ccagctagtggttcggttatggaaagatgacgacaacacctatcacctaaaagggatgtgggttgatgataagtg

SEQ ID NO: 163786 - DNA, 75 bp, synthetic construct
  source 1..75: mol_type = other DNA
tatcatcgacgatagcgtactttatagcggtgccagcctgaacgatgtttacctgcatcagcacgataaatatcg

SEQ ID NO: 163787 - DNA, 75 bp, synthetic construct
  source 1..75: mol_type = other DNA
aaaagatatctctgatgcaaatttcatttatcgtaatgaaaatgtattagttgggtttgatgaactagttaattt

SEQ ID NO: 163788 - DNA, 75 bp, synthetic construct
  source 1..75: mol_type = other DNA
aatgaaattgccagcggcaatagtgcatatggtgctctgaacctggctttccatatcggattcaaacatgtagcc

SEQ ID NO: 163789 - DNA, 75 bp, synthetic construct
  source 1..75: mol_type = other DNA
aaccgaaaaatgtcagacattatgtttgaatgggttacacagaatattatgaatggtcgcggtattaaccgtctg

SEQ ID NO: 163790 - DNA, 75 bp, synthetic construct
  source 1..75: mol_type = other DNA
gtgacaccctgaaatccttcgccgagatcgggggcgccctggtcgatgcacaggatgatggccagccgctgggcg

SEQ ID NO: 163791 - DNA, 75 bp, synthetic construct
  source 1..75: mol_type = other DNA
gccgtgctcctaaccttaagaaccgtaccgataaggcaactgaactggctgttgttgattacgccgtcgctttcc

SEQ ID NO: 163792 - DNA, 75 bp, synthetic construct
  source 1..75: mol_type = other DNA
atgttaacgatatgtttattgcttggggttgcgatgacgacgaacacgcattttagaggtgaagaattgaagaag

SEQ ID NO: 163793 - DNA, 75 bp, synthetic construct
  source 1..75: mol_type = other DNA
ccgcatgtgccattctcggctaccggttcgctccgcgcatccgcgacctgccatccaaacggctctacgcgttca

SEQ ID NO: 163794 - DNA, 75 bp, synthetic construct
  source 1..75: mol_type = other DNA
cgatgcgttccgctccggagatgtctggcttactaggtcccggcgctatggcgatctgaaacacgcactcgttcc

SEQ ID NO: 163795 - DNA, 75 bp, synthetic construct
  source 1..75: mol_type = other DNA
gtctgcgcaggcagggtgaacggtattatgccgacggcatgcgcgatctcccggaggacaggcggcttgcgatct

SEQ ID NO: 163796 - DNA, 75 bp, synthetic construct
  source 1..75: mol_type = other DNA
actgggcggtgactaccggcggcttcaacagtgaaacagtacaggacgtcatgctgggagcggtggaacgccgct

SEQ ID NO: 163797 - DNA, 75 bp, synthetic construct
  source 1..75: mol_type = other DNA
cttccggcgtctccagtagagtggctgacggataatggttcatgctaccgggctaatgaaacacggcagtttgcc

SEQ ID NO: 163798 - DNA, 75 bp, synthetic construct
  source 1..75: mol_type = other DNA
cctttgcttgttgactgaagaagaaattcagtggtggatgtcgggcggagtattccctgatccatggccacagaa

SEQ ID NO: 163799 - DNA, 75 bp, synthetic construct
  source 1..75: mol_type = other DNA
tggcgatgctttgcatgatttgaagagttttgttggggatggcgaattcaagctcgataaaataaaagctggagg

SEQ ID NO: 163800 - DNA, 75 bp, synthetic construct
  source 1..75: mol_type = other DNA
ggtgctggaattcgaaagggttgtatttgatcagattagtttttctatccaaaccctcagcaataagatatgtct

SEQ ID NO: 163801 - DNA, 75 bp, synthetic construct
  source 1..75: mol_type = other DNA
agagtgcgcccgcgtgatgaccgttggcactcatggcaccacctatggcggtaatccgctggcctcggcggtggc

SEQ ID NO: 163802 - DNA, 75 bp, synthetic construct
  source 1..75: mol_type = other DNA
gtgtgttgtctggtggagtaatcaccgagggcaaagtccgtacactggcccagctttttgcacttgaataccaac

SEQ ID NO: 163803 - DNA, 75 bp, synthetic construct
  source 1..75: mol_type = other DNA
caactgcgaagcacggtcgacgatgacaacgatgcaaatctgcttttcgtgaagtcagaaatcataaagttacga

SEQ ID NO: 163804 - DNA, 75 bp, synthetic construct
  source 1..75: mol_type = other DNA
agtatgatggggatggttgtaacgctattgattcggctggcagctatccgttggcatcttaaactaccgacgttt

SEQ ID NO: 163805 - DNA, 75 bp, synthetic construct
  source 1..75: mol_type = other DNA
gccgggctttccagcatgccattaacgttcatgcaaataaaaaacgtccggttggggccggacgttctgagcaaa

SEQ ID NO: 163806 - DNA, 75 bp, synthetic construct
  source 1..75: mol_type = other DNA
gaagataagcagaacggactggagatttattgcttcggtcctgtgtgctttcggaatggcatcagacatcagtcc

SEQ ID NO: 163807 - DNA, 75 bp, synthetic construct
  source 1..75: mol_type = other DNA
catccacattctacagaaatacaaaatattagtacaagtaatttacttactctatttccagttgttttatttagt

SEQ ID NO: 163808 - DNA, 75 bp, synthetic construct
  source 1..75: mol_type = other DNA
tcagtttgcctgccgatagatgaattgattgagtatggtacgaaagaaacagtgaggcgacatcagattcgtagt

SEQ ID NO: 163809 - DNA, 75 bp, synthetic construct
  source 1..75: mol_type = other DNA
caccgactatttgcaacagtgccctcttgcatatgtcgggcagggataccatcgctttcgtcgttatgcgccccg

SEQ ID NO: 163810 - DNA, 75 bp, synthetic construct
  source 1..75: mol_type = other DNA
gatcggagagatgaaaggtgttgcatcgccagaaaggcgtttcctgcggcccagctccaaatggaaccgtcattt

SEQ ID NO: 163811 - DNA, 75 bp, synthetic construct
  source 1..75: mol_type = other DNA
agtatgatgggaatggttgtaacgctattgattcggctggcggctattcggtggcatctgaaattgccgacgttt

SEQ ID NO: 163812 - DNA, 75 bp, synthetic construct
  source 1..75: mol_type = other DNA
atcgttctggtacgccagccaagacgcttaccaaaatggatgctgcctgtgcttgacgcggttggcctggcggtg

SEQ ID NO: 163813 - DNA, 75 bp, synthetic construct
  source 1..75: mol_type = other DNA
atgctcgtctattggctggatatagtcggtacagcagtatttgccatctccggtgttttactggccggtaaattg

SEQ ID NO: 163814 - DNA, 75 bp, synthetic construct
  source 1..75: mol_type = other DNA
ttcgcggcgccaataaccagcgaatccgcgactatggtcatgacaaactgaaagtctacggcatgggtcgcgata

SEQ ID NO: 163815 - DNA, 75 bp, synthetic construct
  source 1..75: mol_type = other DNA
aggggcagttgcaggatatcgagcgccataaactcaatgcgatgggcgcgtttgccgaagcgcaaacttgccgtc

SEQ ID NO: 163816 - DNA, 75 bp, synthetic construct
  source 1..75: mol_type = other DNA
gcgttgggatgcgcaagctggaacgctttggcaaaccgtttatggcgctgattcgtgcgcatgtcgatggcgacg

SEQ ID NO: 163817 - DNA, 75 bp, synthetic construct
  source 1..75: mol_type = other DNA
ccagccaatgcaaaatgctttcaaaatgcgtaaacgtgttgagaaagttaagcatattgctgttaaaagccttga

SEQ ID NO: 163818 - DNA, 75 bp, synthetic construct
  source 1..75: mol_type = other DNA
ccaaagaacagcacgattggctgaatggctggcttgaactgtggggcgcatgggtttattcaggtcgtctggaaa

SEQ ID NO: 163819 - DNA, 75 bp, synthetic construct
  source 1..75: mol_type = other DNA
tgggttatgtggtggaagtgattcgtggtgctaataaccagcgtatccgcgactatggtcatgacaaactgaaag

SEQ ID NO: 163820 - DNA, 75 bp, synthetic construct
  source 1..75: mol_type = other DNA
cacgcgcaggtgaaatgcaacggcttgcagatcaatatgttgatggctgccgccgtgtgcgccgttatcgccagc

SEQ ID NO: 163821 - DNA, 75 bp, synthetic construct
  source 1..75: mol_type = other DNA
gttcctcaccagcaatagcaaagagggcaaactgtggtttgcgctggggcgtcttggcactctgctgctggcgat

SEQ ID NO: 163822 - DNA, 75 bp, synthetic construct
  source 1..75: mol_type = other DNA
tgtcgccgggaagttgacgaaatcctcaatgcttcgttgtttatgatttacccggttctggatagtgcgtttaaa

SEQ ID NO: 163823 - DNA, 75 bp, synthetic construct
  source 1..75: mol_type = other DNA
cgtggggctggcaattaccggtgcgctggcagtgatgtgtatggcgaaagtttatggcgttactttccttggcgc

SEQ ID NO: 163824 - DNA, 75 bp, synthetic construct
  source 1..75: mol_type = other DNA
ctggggctgggcgctggcgtaacgggtatcgcgctcgaacaaccggcgctgattgcccttggcctggtcggtggt

SEQ ID NO: 163825 - DNA, 75 bp, synthetic construct
  source 1..75: mol_type = other DNA
gggggattgcgctgctggtgctcggcatgatcaccgcgttcgtcggcggtctgtatgcactgatggagcacaata

SEQ ID NO: 163826 - DNA, 75 bp, synthetic construct
  source 1..75: mol_type = other DNA
gttgacgaggaagaggttaacttcctttctcgtactggtaatccaatcacgtctctcgatcacctaaagccagca

SEQ ID NO: 163827 - DNA, 75 bp, synthetic construct
  source 1..75: mol_type = other DNA
ctggccaatctggatgaatttgaacagagcatggtctcgctaatgctcaatccattcattcgattcggtgtgaag

SEQ ID NO: 163828 - DNA, 75 bp, synthetic construct
  source 1..75: mol_type = other DNA
ccagcgatggtaaaaaaggtgataaaatctggcaaagcagtgaatattttatgaatgttttctgtaataatgcac

SEQ ID NO: 163829 - DNA, 75 bp, synthetic construct
  source 1..75: mol_type = other DNA
tatatcggcctggatatcgccgttgccgtaggtaacccggcgattatctccaccgccctgctgctgacgccaatc

SEQ ID NO: 163830 - DNA, 75 bp, synthetic construct
  source 1..75: mol_type = other DNA
gacgtagatatgtggaactactggcattttgcccttgctggtacgttggtttattacagcaccggcagcctgttc

SEQ ID NO: 163831 - DNA, 75 bp, synthetic construct
  source 1..75: mol_type = other DNA
agcggccaggtctccagtttccttgatggcggtaacccgttccgcttctggctgctggaaatcttcaacggcaat

SEQ ID NO: 163832 - DNA, 75 bp, synthetic construct
  source 1..75: mol_type = other DNA
atatcgctctagagtttaaaggtatgagtggcgcaggagctatagaagtagacaaaaatttgaccttcaggattc

SEQ ID NO: 163833 - DNA, 75 bp, synthetic construct
  source 1..75: mol_type = other DNA
tatcacgcgactgcaaagccacgcaagatgtgtggacgtggtggcgagggatggagaaaaccttcactggcaacc

SEQ ID NO: 163834 - DNA, 75 bp, synthetic construct
  source 1..75: mol_type = other DNA
tttatgatttacccggttctggatagtgcgtttaaaaaccggaaacgtgtagagaaaattaaacatgtagcatag

SEQ ID NO: 163835 - DNA, 75 bp, synthetic construct
  source 1..75: mol_type = other DNA
cacaatttgcttctttttcatcgtctagtgcaccttcggtcaccgcaccattcagggcagaacttagtgcgaacc

SEQ ID NO: 163836 - DNA, 75 bp, synthetic construct
  source 1..75: mol_type = other DNA
atatagcacttgaatttaaaggtatgagcggagcaggtgctatagaagtagataaaaatctgaccttcaggattc

SEQ ID NO: 163837 - DNA, 75 bp, synthetic construct
  source 1..75: mol_type = other DNA
attgaagatatttcataaagatggaacagcaacggaatttaaccgcttctcacaatttgcttctttttcatcgtc

SEQ ID NO: 163838 - DNA, 75 bp, synthetic construct
  source 1..75: mol_type = other DNA
taataacgggaatgttagagcaggtgttaaagatatttatttttgtaagtcatctaatatcgatgataactgtgt

SEQ ID NO: 163839 - DNA, 75 bp, synthetic construct
  source 1..75: mol_type = other DNA
agataaattatcagaagaacagctcattgttagaccatttccacaaactgtcagtaaggggaaagatattcaaga

SEQ ID NO: 163840 - DNA, 75 bp, synthetic construct
  source 1..75: mol_type = other DNA
cggcaaccggtaactacaaagttcgtatcgacaacgcaactggtgcaggttctgttgctgactacaacggtaacg

SEQ ID NO: 163841 - DNA, 75 bp, synthetic construct
  source 1..75: mol_type = other DNA
gccgttaagctgtcaaaaattcgtccagggcagtggattgctatctacggtcttggcggtctgggtaacctcgcc

SEQ ID NO: 163842 - DNA, 75 bp, synthetic construct
  source 1..75: mol_type = other DNA
ctgtcaatataatatatgcggctttaatacgtgttttacctgaaaataaaaaaatgtctgctaatgcatcaatta

SEQ ID NO: 163843 - DNA, 75 bp, synthetic construct
  source 1..75: mol_type = other DNA
tatactaaaaaagttttaaatccggggacaaaggaagaatacgaggtagacaccccaaattgggagggagggttg

SEQ ID NO: 163844 - DNA, 75 bp, synthetic construct
  source 1..75: mol_type = other DNA
tttgatcacatcatcggtaacgaagtttaccagagcggtctgttcaatgtgaccctgaacaccggttcacagtgg

SEQ ID NO: 163845 - DNA, 75 bp, synthetic construct
  source 1..75: mol_type = other DNA
cagcgaagtgtttaacaacaccatcaatgttgcgaactctactgtcacttcaggttcatggtctgatgaaggaac

SEQ ID NO: 163846 - DNA, 75 bp, synthetic construct
  source 1..75: mol_type = other DNA
atcactctggatcaagaagttgatctgtctatcaccaataactctcatgtagcaggtattacgctgactcagagt

SEQ ID NO: 163847 - DNA, 75 bp, synthetic construct
  source 1..75: mol_type = other DNA
cggtaactacaaagttcgtatcgacaacgctactggtgctggttctatcgctgactacaacggcaacgagctgat

SEQ ID NO: 163848 - DNA, 75 bp, synthetic construct
  source 1..75: mol_type = other DNA
actctgatcgacatcgcagctaacagcctgtggccttcatcaactgttggtgtagaaaacagcgactctgaatac

SEQ ID NO: 163849 - DNA, 75 bp, synthetic construct
  source 1..75: mol_type = other DNA
tggaatcaatactgaagccactgcaactctgatcgacatcgcagctaacagcctgtggccttcatcaactgttgg

SEQ ID NO: 163850 - DNA, 75 bp, synthetic construct
  source 1..75: mol_type = other DNA
gcgcgtagctgcgggcattgcgatgcctgtgttagcggtaatcagatcaactgtgagcaaggtgcggtgccgacg

SEQ ID NO: 163851 - DNA, 75 bp, synthetic construct
  source 1..75: mol_type = other DNA
caaaagaggctggcggggaactggagctctatgagtacgatcccggtgaactgaagccacaagacggcgaagtac

SEQ ID NO: 163852 - DNA, 75 bp, synthetic construct
  source 1..75: mol_type = other DNA
gtatgttgttaatggcaagtacttgatttacaccaagaacattaaatccattgactctatggcagagcttatcca

SEQ ID NO: 163853 - DNA, 75 bp, synthetic construct
  source 1..75: mol_type = other DNA
cggaacccgcattacgggtgatgatgcgacggccaacaacagtggcaataccaccgttgatggtcagggttcgac

SEQ ID NO: 163854 - DNA, 75 bp, synthetic construct
  source 1..75: mol_type = other DNA
atgaagatggatgaacgatacagcagcgcatcttatggtagtgctggtcttactgcgttctttgccagcctgtca

SEQ ID NO: 163855 - DNA, 75 bp, synthetic construct
  source 1..75: mol_type = other DNA
tgctgcgttctttgccagcctgtcattgcaggattggggcttcattatcggtgtcgcgttcagcattatcctcgg

SEQ ID NO: 163856 - DNA, 75 bp, synthetic construct
  source 1..75: mol_type = other DNA
tgacagcggtagctaaagctgcgtttaactcggcggtggatgctgtccgtgcaggtggtcgtgtcgtggctgtcg

SEQ ID NO: 163857 - DNA, 75 bp, synthetic construct
  source 1..75: mol_type = other DNA
tgacagcggtagctaaagctgcgtttaactcggcggttgatgctgtacgagcaggcggtcgtgttgtggctgtcg

SEQ ID NO: 163858 - DNA, 75 bp, synthetic construct
  source 1..75: mol_type = other DNA
ctggcaaccgaaatgggcgctgatttagcgattaactcacgcactgaagacgctgccaaaattgtgcaggaaaaa

SEQ ID NO: 163859 - DNA, 75 bp, synthetic construct
  source 1..75: mol_type = other DNA
ggctggaaaaactgggagtggattgatataggtaagggggttagtaaacctttaccactaaacccagctccagag

SEQ ID NO: 163860 - DNA, 75 bp, synthetic construct
  source 1..75: mol_type = other DNA
ccggtgccgcctgccagaaagcaatgaatgagagggatgctgtagggctggctctggcaacaggtacagtggcac

SEQ ID NO: 163861 - DNA, 75 bp, synthetic construct
  source 1..75: mol_type = other DNA
ggcagcctgagttcacagataaaacactctccaggaaacccggggcggttcaacttgtagtatcacaattagcat

SEQ ID NO: 163862 - DNA, 75 bp, synthetic construct
  source 1..75: mol_type = other DNA
gacggttatcgtctggaaacagttcggctggctgggtctgtacgaaattattccgggctttatcttcggcagtat

SEQ ID NO: 163863 - DNA, 75 bp, synthetic construct
  source 1..75: mol_type = other DNA
aaagaagaggaagaggaaaaagaagaagaacagtaacaggcacgtaaccgtctcatttaaaccgtctttcgcctc

SEQ ID NO: 163864 - DNA, 75 bp, synthetic construct
  source 1..75: mol_type = other DNA
cccgccagggcggagacagcttcgctggctccgttcacgacagcccgccccgccagggggacgcccgggaaagcc

SEQ ID NO: 163865 - DNA, 75 bp, synthetic construct
  source 1..75: mol_type = other DNA
ctgaagatgtacaacatcgccgatcgcctggaaacagtgatgtgggagagcaaaaagatgttccccaatctcgac

SEQ ID NO: 163866 - DNA, 75 bp, synthetic construct
  source 1..75: mol_type = other DNA
atccgtcgtttctttgccgatcgtggagtgctggagggggagacgccttgtatgagccaggcgacggtaaccgat

SEQ ID NO: 163867 - DNA, 75 bp, synthetic construct
  source 1..75: mol_type = other DNA
gtgcatttcacccctggactggcggagacggttgtggctgtctttgcccccggcgacaggggcttaaacaggtgt

SEQ ID NO: 163868 - DNA, 75 bp, synthetic construct
  source 1..75: mol_type = other DNA
tcagcccccatcatctgttgagtttcgggagccgcggttttgacgttttgcggggacctgccgtttgttccctcc

SEQ ID NO: 163869 - DNA, 75 bp, synthetic construct
  source 1..75: mol_type = other DNA
aaaaatgtcacctgctatgtgagccgggcgaaaacgggcggtattaaaggcggattggggctggcggaagatact

SEQ ID NO: 163870 - DNA, 75 bp, synthetic construct
  source 1..75: mol_type = other DNA
gcggctggttatctggaaccattcgagttaggtggagagcataagctcaatagccaagcgctattgaaccccaag

SEQ ID NO: 163871 - DNA, 75 bp, synthetic construct
  source 1..75: mol_type = other DNA
atggcaacgcttaaggacctttccagtcagttaagacagctgcagaagcaaataccgtttgcgactgcccaggct

SEQ ID NO: 163872 - DNA, 75 bp, synthetic construct
  source 1..75: mol_type = other DNA
acagtacccatgtcattaaaccgaaaaaatctgtggcactttccggcgttccggcgggcaatacggcgctctgca

SEQ ID NO: 163873 - DNA, 75 bp, synthetic construct
  source 1..75: mol_type = other DNA
ccgtttaagtttgagttgtctcaactggtggagatgcgcatcagtgatgaatgggggggggttatggctgatctt

SEQ ID NO: 163874 - DNA, 75 bp, synthetic construct
  source 1..75: mol_type = other DNA
atgaaatacaagcatttgatcttgtccttaagcctgataatgctgggaccattggctcatgcggaagaaattggt

SEQ ID NO: 163875 - DNA, 75 bp, synthetic construct
  source 1..75: mol_type = other DNA
tgcgcacctatgccgacctgctcgataaagttgaggcggttctgttacccgcttatgcacagaaaaccgggaaaa

SEQ ID NO: 163876 - DNA, 75 bp, synthetic construct
  source 1..75: mol_type = other DNA
aataatcagagcagcagtaatcagagtcagagcagtaatcagagtcagaacaggaggaaaaagagaataatcaaa

SEQ ID NO: 163877 - DNA, 75 bp, synthetic construct
  source 1..75: mol_type = other DNA
tatcagggaaaaatggagcgcctgagtctggcagaagaggagcgttccaccgttgccgtgaccaatgaaaaaacc

SEQ ID NO: 163878 - DNA, 75 bp, synthetic construct
  source 1..75: mol_type = other DNA
cggatttgctgaccaggtgacacccgctgttgaggcaatggcatgtattcagtcaaaacgtacagaggaatttaa

SEQ ID NO: 163879 - DNA, 75 bp, synthetic construct
  source 1..75: mol_type = other DNA
cgatggcatctgtgattgcgatggccggtgatacggtcattatgccggaaaatgccttcatgatgatccataagc

SEQ ID NO: 163880 - DNA, 75 bp, synthetic construct
  source 1..75: mol_type = other DNA
aagcgcgtgtaaacggtattaatgatctgtttgccatgtttggcgggcgttatcagacgctgcaggctcagtgtc

SEQ ID NO: 163881 - DNA, 75 bp, synthetic construct
  source 1..75: mol_type = other DNA
ttggtgccagacccggcgcggtgattgaagaaggcggcaaacagcaggtctatttgcagggggaacggcttggct

SEQ ID NO: 163882 - DNA, 75 bp, synthetic construct
  source 1..75: mol_type = other DNA
atgctgcttattatttctgcaaaagtggcgcattcactctggcgctatttctccttttctgcggaatatacggct

SEQ ID NO: 163883 - DNA, 75 bp, synthetic construct
  source 1..75: mol_type = other DNA
aacgcttcgaggtctactacaaaggtattgagctggcgaatggtttccatgaattgacggatgcccgtgaacagc

SEQ ID NO: 163884 - DNA, 75 bp, synthetic construct
  source 1..75: mol_type = other DNA
aaaaacgttcgataaaaaagatgtgcaattaatcagccagcaaaactggtttggtaaatatcagcgcgtcgccac

SEQ ID NO: 163885 - DNA, 75 bp, synthetic construct
  source 1..75: mol_type = other DNA
atgctgcgctatcagggaaaaatagagcgtctgagtctggctgaagaggagcgttccacggttgctgtgacccgc

SEQ ID NO: 163886 - DNA, 75 bp, synthetic construct
  source 1..75: mol_type = other DNA
cacgaatttatctcattcagtggctgacaaaaattcgtcacactcttagccagagacaatctcttaatacagaca

SEQ ID NO: 163887 - DNA, 75 bp, synthetic construct
  source 1..75: mol_type = other DNA
tgaagggatcattgagcgcaatttctttgtattctatcctcgaatcaatgttataggttggcactataatcatat

SEQ ID NO: 163888 - DNA, 75 bp, synthetic construct
  source 1..75: mol_type = other DNA
gccagtctggaagaggcatttatcgcttatttgcaggaagcggcagggcagagcaacgaagccgaagcgccgcct

SEQ ID NO: 163889 - DNA, 75 bp, synthetic construct
  source 1..75: mol_type = other DNA
tttcatatcccggaagcggaaattcccgcgcgagtggctgaaatgagcgagcgttttaagctcaacgacgtcgaa

SEQ ID NO: 163890 - DNA, 75 bp, synthetic construct
  source 1..75: mol_type = other DNA
attaaataataataaaaaattaacattaaaaatgatttttcgcgggataattgatggggttaagggtattacagg

SEQ ID NO: 163891 - DNA, 75 bp, synthetic construct
  source 1..75: mol_type = other DNA
cgcagcaggggcgtgtggtggcctgtcagggcgacccggacgcaccggttaaccgtggcctgaactgcattaagg

SEQ ID NO: 163892 - DNA, 75 bp, synthetic construct
  source 1..75: mol_type = other DNA
atgttttgcggctttaccctgggttcggcggttggcgggattgtcagcgcgcagctggtgccggtgattggctgg

SEQ ID NO: 163893 - DNA, 75 bp, synthetic construct
  source 1..75: mol_type = other DNA
ccggtgcccgcgtcattgagcagggcaatgtgatggtgctgggcggcgatatgcgcgatccgaagcatcgccgtg

SEQ ID NO: 163894 - DNA, 75 bp, synthetic construct
  source 1..75: mol_type = other DNA
atggtgatctatacctacactacttccacctgaatatggagtattggggatacgtggacatcattgatgattgta

SEQ ID NO: 163895 - DNA, 75 bp, synthetic construct
  source 1..75: mol_type = other DNA
aagtcctatgacttcccatacattgaggggcgggagaaggatttcataaaggggctatcaagccagatctctaat

SEQ ID NO: 163896 - DNA, 75 bp, synthetic construct
  source 1..75: mol_type = other DNA
cggacgtaaaaagcctgccggcgattgttccggcggtgatcccgcttctgctgatgatgatcccgtcaatgctaa

SEQ ID NO: 163897 - DNA, 75 bp, synthetic construct
  source 1..75: mol_type = other DNA
ggttacggcatcagtatggatgtggaaaatctgcgctttgcggtgcttgatcgcgaccagaccgtcagtagccag

SEQ ID NO: 163898 - DNA, 75 bp, synthetic construct
  source 1..75: mol_type = other DNA
ggcaactttttatcccgttgctgatagccataccgctggtgatgggcttaagcatcctgctgctgaaaaaacagg

SEQ ID NO: 163899 - DNA, 75 bp, synthetic construct
  source 1..75: mol_type = other DNA
tggttttgataagccaactgagaatagtattgattctgtcagtgaccgcgaccatatggtcgaattcaccgcggc

SEQ ID NO: 163900 - DNA, 75 bp, synthetic construct
  source 1..75: mol_type = other DNA
atggaaatcgatgaaggctttgcagttggtatgtcgccagccgaacttagcgccgagcaactcttaagcaagctg

SEQ ID NO: 163901 - DNA, 75 bp, synthetic construct
  source 1..75: mol_type = other DNA
atccccctttcctggcactccctgtccggccatcagcgaatactggtagggcagggaggtaccagactcaggctc

SEQ ID NO: 163902 - DNA, 75 bp, synthetic construct
  source 1..75: mol_type = other DNA
cagagtgggacaaagccggtgcaatgttcgttcaggacgtggtgccttatgaagaaatgaagctgcgtatgttaa

SEQ ID NO: 163903 - DNA, 75 bp, synthetic construct
  source 1..75: mol_type = other DNA
gtgctgcgttggcaatacttatcgcaggctggctccattatattatcagggccatatctcttgggcaggatattg

SEQ ID NO: 163904 - DNA, 75 bp, synthetic construct
  source 1..75: mol_type = other DNA
taaagggaaaattaaaaataacgaagttgacgttgttttacttggcccgcaagttcgctttcagaaaccagagat

SEQ ID NO: 163905 - DNA, 75 bp, synthetic construct
  source 1..75: mol_type = other DNA
atggttttgacaccgcggctatcggctttatcgcccctgatatccgttctcactggcaactcaccgcaggcgctc

SEQ ID NO: 163906 - DNA, 75 bp, synthetic construct
  source 1..75: mol_type = other DNA
atgttttgcggctttacgctgggttcggcgtttggcgggattgtcagtgcgcagctggtgccggtgattggctgg

SEQ ID NO: 163907 - DNA, 75 bp, synthetic construct
  source 1..75: mol_type = other DNA
ctgtttataaggggccttttataaaaaaagttgatgttacctcacaacctattgaagcaacttttattattgcat

SEQ ID NO: 163908 - DNA, 75 bp, synthetic construct
  source 1..75: mol_type = other DNA
cagtggtaattttaaagcaatagataaccacgggaaggaaataacaaacagaaaaggattacctaatgtctgcag

SEQ ID NO: 163909 - DNA, 75 bp, synthetic construct
  source 1..75: mol_type = other DNA
aaattctgcgtaattacagggccgtgattaatgcgcggcgtcgtgagatggggcagaaaccgctcaccaccgcac

SEQ ID NO: 163910 - DNA, 75 bp, synthetic construct
  source 1..75: mol_type = other DNA
cagtattagccagttgtttgtagggcgccagctagccattacgttgatgctgtgggtggtgttctttatgagcct

SEQ ID NO: 163911 - DNA, 75 bp, synthetic construct
  source 1..75: mol_type = other DNA
agagttcgctgaatgggaaggtatctcccgtggctctgtttaccagaaaattcaccatggtcatcttgctaagta

SEQ ID NO: 163912 - DNA, 75 bp, synthetic construct
  source 1..75: mol_type = other DNA
tttgatggtgatttttatactgtagatggaatgaaattcagcaaaagttattatgagaaattatgggcgcaaggc

SEQ ID NO: 163913 - DNA, 75 bp, synthetic construct
  source 1..75: mol_type = other DNA
atgagcaacgacatttcaattcgtgtaccaaaagtgatggcgacacctgcagagttcgcggaatgggaaggccgc

SEQ ID NO: 163914 - DNA, 75 bp, synthetic construct
  source 1..75: mol_type = other DNA
gggttggcacactgtgccttccctggctcaaagagaaaaacggatggttgctgccgtggggtgatgtcgttacca

SEQ ID NO: 163915 - DNA, 75 bp, synthetic construct
  source 1..75: mol_type = other DNA
gatggctgcggctattctggcagtgattgctgcctgtgtgagtggtttacgtatcactcagccacgatccagggc

SEQ ID NO: 163916 - DNA, 75 bp, synthetic construct
  source 1..75: mol_type = other DNA
aaattctgcgtaattacaaagccgtgattaatgcgcggcgtcgtgaaatggggcagaaaccgctcaccaccgcgc

SEQ ID NO: 163917 - DNA, 75 bp, synthetic construct
  source 1..75: mol_type = other DNA
gtagtttcttcgttcgtcaccggaccaagctatgaaattctgccgttaaaaatttattcgatggtcaaagtcggc

SEQ ID NO: 163918 - DNA, 75 bp, synthetic construct
  source 1..75: mol_type = other DNA
gttttggcatcaactggcaggggtttaccaccaaatggtatagcctgctaatgaacaacgacagtttgttgcagg

SEQ ID NO: 163919 - DNA, 75 bp, synthetic construct
  source 1..75: mol_type = other DNA
tagccatctggaaattatcaatgattttacggcggtttcgatggcgatcccgatgctgaaaaaagagcacctgat

SEQ ID NO: 163920 - DNA, 75 bp, synthetic construct
  source 1..75: mol_type = other DNA
ggtttccgtgccgcttttgaagacaaaggccgctttaaagaatatgtccatgatattccggcttatctcatcgtc

SEQ ID NO: 163921 - DNA, 75 bp, synthetic construct
  source 1..75: mol_type = other DNA
gaacataaggtcgaggtgaaagacggctgtattgccatcgcttgcccaattaccggtgactgggtggcaatgacc

SEQ ID NO: 163922 - DNA, 75 bp, synthetic construct
  source 1..75: mol_type = other DNA
ttgatggaaaacgcggcgaagcaatttaacaacattggcgcgacgactcctgtcgttccatttcgtattttgctg

SEQ ID NO: 163923 - DNA, 75 bp, synthetic construct
  source 1..75: mol_type = other DNA
tcccggcagaaatgaccaccgcactgtaccggcgggcgattgcatcggcatggcggcagaaaatgctgaccgaaa

SEQ ID NO: 163924 - DNA, 75 bp, synthetic construct
  source 1..75: mol_type = other DNA
gcgctgctgactgacatgctggagccatcattgctgaccgcgccaccggtactgactgtgcgcggctgtgaagtg

SEQ ID NO: 163925 - DNA, 75 bp, synthetic construct
  source 1..75: mol_type = other DNA
ttcagatagccacaatgccaacctgcttgcacttgataatacggtgtcagcggccgcagggctgggaatacagct

SEQ ID NO: 163926 - DNA, 75 bp, synthetic construct
  source 1..75: mol_type = other DNA
caggcggcgtaaaggttgccgatgttaagaaagtcaggccccggacaaactggtttatgaaccaggtaatccgct

SEQ ID NO: 163927 - DNA, 75 bp, synthetic construct
  source 1..75: mol_type = other DNA
ccacgtaaagaactgcttaaagatcagttcatggaaacctggagtaaatgtcgtgaacttgataatcaggcccta

SEQ ID NO: 163928 - DNA, 75 bp, synthetic construct
  source 1..75: mol_type = other DNA
aaagtgatgtggcacgcggcgcaaatccgtgaagcgatccatatgtacggcccggattatggttttgataccact

SEQ ID NO: 163929 - DNA, 75 bp, synthetic construct
  source 1..75: mol_type = other DNA
atgaaaaaacgaatcataaacgcaccgaccccggatattgtggctatgttgaaacggcgtatgcccggggagttt

SEQ ID NO: 163930 - DNA, 75 bp, synthetic construct
  source 1..75: mol_type = other DNA
gatgaaaacggcctgcgcacgctgcgtgaactggcccccggcgtggcgatagcaccggcatccggttctgcgctg

SEQ ID NO: 163931 - DNA, 75 bp, synthetic construct
  source 1..75: mol_type = other DNA
ctgatttggctgtccgtcttcgcttatcacattacccggttctgatcacggaaaccgggctgagccagcaggtga

SEQ ID NO: 163932 - DNA, 75 bp, synthetic construct
  source 1..75: mol_type = other DNA
atgagcgacacaacgatcctgcaaaacagtacccatgtcattaaaccgaaaaaatcggtggcgctttctggcgtt

SEQ ID NO: 163933 - DNA, 75 bp, synthetic construct
  source 1..75: mol_type = other DNA
tccgtaagcgggtggaaaacaaagaagtggtcattggttttgggcatccggtttataccatcgccgacccgcgtc

SEQ ID NO: 163934 - DNA, 75 bp, synthetic construct
  source 1..75: mol_type = other DNA
ggcctgtacgaaattatcccaggctttatcttcggcagcgttgggattgtggtatttagtttgctggataaagct

SEQ ID NO: 163935 - DNA, 75 bp, synthetic construct
  source 1..75: mol_type = other DNA
gttttgatatgccaacaaataaactcgttgaacaatataatgcaactatcacgctggagcagcgcctatgcccct

SEQ ID NO: 163936 - DNA, 75 bp, synthetic construct
  source 1..75: mol_type = other DNA
ccgggggcggagttttatatatcttcagggaaatcatcacatgtttttggagaaggagggtgtcactactatttc

SEQ ID NO: 163937 - DNA, 75 bp, synthetic construct
  source 1..75: mol_type = other DNA
acataacagcaaaagaacatgagaaaataaaattacttataaatgaaattaataaagtatcagagcaaaacaaaa

SEQ ID NO: 163938 - DNA, 75 bp, synthetic construct
  source 1..75: mol_type = other DNA
gactactctttatatgtcgtagattactgtccggatagtcatacggcgagctggggaattaactacaccaagatt

SEQ ID NO: 163939 - DNA, 75 bp, synthetic construct
  source 1..75: mol_type = other DNA
ctgcgacctggggaatcaactatacaaaaatattggtttgtctgtgggcatttttactgttctttatggctttgt

SEQ ID NO: 163940 - DNA, 75 bp, synthetic construct
  source 1..75: mol_type = other DNA
cactattttcacccagatgagcgcgctggcgcagcaacaccaggcgattaacctgtcgcaaggctttcctgattt

SEQ ID NO: 163941 - DNA, 75 bp, synthetic construct
  source 1..75: mol_type = other DNA
ccgtcagcggcaatgcaaaaacgctttgctgacgccgatgcgcactatcattcagcgccgccgtcacggttgcag

SEQ ID NO: 163942 - DNA, 75 bp, synthetic construct
  source 1..75: mol_type = other DNA
gttctcggtgatgtggtcacgcatgacgcgcaacggtgcgctggcggggatgatcatcggtgcgctgacggttat

SEQ ID NO: 163943 - DNA, 75 bp, synthetic construct
  source 1..75: mol_type = other DNA
cccggaaaaccgcgtgctgggtctggtgagctacgcgtgggcaggctttggtgcggcgtttggtccggtggtgct

SEQ ID NO: 163944 - DNA, 75 bp, synthetic construct
  source 1..75: mol_type = other DNA
gtctgtttggcaaagctccggttgttgataagtggaccttctctactaacggcgtctccatcatgggtcgccacg

SEQ ID NO: 163945 - DNA, 75 bp, synthetic construct
  source 1..75: mol_type = other DNA
gtcgcggtacttccgaccaggaaggcggcatggcctctatggtttatgccggtaaaatcattaaagacctcggtc

SEQ ID NO: 163946 - DNA, 75 bp, synthetic construct
  source 1..75: mol_type = other DNA
gggcagaaaccgctcaccaccgcgcagattgttgatgaaatctgcgattttgtggtgaatcagcaggctgttttc

SEQ ID NO: 163947 - DNA, 75 bp, synthetic construct
  source 1..75: mol_type = other DNA
cttggcttctggtcattactattttcgcacattaccttctgtctaccctttgtggtagtgaccgtttattcacgt

SEQ ID NO: 163948 - DNA, 75 bp, synthetic construct
  source 1..75: mol_type = other DNA
agattgttgatgaaatctgtgattttgtggcgaatcagcaggcggttttcctcggcggtcactacatccttcagg

SEQ ID NO: 163949 - DNA, 75 bp, synthetic construct
  source 1..75: mol_type = other DNA
tgatgttcagggtgttagctgccacggttctgcaccagaacgcggagataacgccattttcaaaatgggcccaat

SEQ ID NO: 163950 - DNA, 75 bp, synthetic construct
  source 1..75: mol_type = other DNA
atgaatatcagcacggaaacccgcgaaattctgcgtaattacaaagccgtgattaatgcgcgacgtcgtgagatg

SEQ ID NO: 163951 - DNA, 75 bp, synthetic construct
  source 1..75: mol_type = other DNA
atgaatatcagcacggaaacccgcgaaattctgcgtaattacagggccgtgattaatgcgcggcgtcgtgaaatg

SEQ ID NO: 163952 - DNA, 75 bp, synthetic construct
  source 1..75: mol_type = other DNA
gggcagaaaccgctcaccaccgcgcagattattgatgaaatctgcgattttgtggcgaatcagcaggcggttttc

SEQ ID NO: 163953 - DNA, 75 bp, synthetic construct
  source 1..75: mol_type = other DNA
atgaatatcagcacggaaacccgcggaattctgcgtaattacagggccgtgattaatgcgcgacgtcgtgaaatg

SEQ ID NO: 163954 - DNA, 75 bp, synthetic construct
  source 1..75: mol_type = other DNA
atgaatatcagcacagaaacccgcgaaattctgcgcaattacaaagctgtgattaatgcacgacgtcgtgagatg

SEQ ID NO: 163955 - DNA, 75 bp, synthetic construct
  source 1..75: mol_type = other DNA
gattaatgcgcggcgtcgtgagatggggcagaaaccgctcaccactgcgcagattgttgatgaaatctgcgattt

SEQ ID NO: 163956 - DNA, 75 bp, synthetic construct
  source 1..75: mol_type = other DNA
tgctgcaccgtatttccgtattttcaacccgacaactcagggcgagaaatttgaccacgaaggtgagtttatccg

SEQ ID NO: 163957 - DNA, 75 bp, synthetic construct
  source 1..75: mol_type = other DNA
cgcgaagtggatgactttgccgccagtgtcgaaatagttaaacaggtgtgcgcggaaaacagcgttactcatctt

SEQ ID NO: 163958 - DNA, 75 bp, synthetic construct
  source 1..75: mol_type = other DNA
tgtgacgctggattatccgcaaccgatagtcgatcacaaagaggcaaggctgcgaacgctggcagcgtacgaaga

SEQ ID NO: 163959 - DNA, 75 bp, synthetic construct
  source 1..75: mol_type = other DNA
ctgatctggcgcgagttttaccgtcatctgataacgtattacccctcgctgtgtaaacatcgtccgtttattgtc

SEQ ID NO: 163960 - DNA, 75 bp, synthetic construct
  source 1..75: mol_type = other DNA
aacccgacaacccagggcgagaaatttgaccgcgagggcgagtttattcgccagtggctaccggagctgcgcaat

SEQ ID NO: 163961 - DNA, 75 bp, synthetic construct
  source 1..75: mol_type = other DNA
gatacccgattgtcgatgctgccatgcgtcagcttaacagcactggctggatgcataaccggctacggatgatta

SEQ ID NO: 163962 - DNA, 75 bp, synthetic construct
  source 1..75: mol_type = other DNA
tctttggtgggctcatcagcgcctgttatgcgttacgcgaaagtgagcagatagtcatcagcgttggggcatccg

SEQ ID NO: 163963 - DNA, 75 bp, synthetic construct
  source 1..75: mol_type = other DNA
gtgaaccctggcgtttattgagcagtgtctttctgcacagcagtgtttctcatctgctgatgaatatgtttgcat

SEQ ID NO: 163964 - DNA, 75 bp, synthetic construct
  source 1..75: mol_type = other DNA
tgatggtagtaaggctgattttgaagccaatttgaagctggcacaggccgtaatcaatagttatcgcggacagtg

SEQ ID NO: 163965 - DNA, 75 bp, synthetic construct
  source 1..75: mol_type = other DNA
gccaggatttacgtctgcacgataatctcgcgctggctgccgcctgccgcaattcgtctgcacgcgtgctggcgt

SEQ ID NO: 163966 - DNA, 75 bp, synthetic construct
  source 1..75: mol_type = other DNA
gtatatgaaaactggggaacgccgcagcaacgtgccattcgccgtgccacaccggatgagttagcgccatttgcc

SEQ ID NO: 163967 - DNA, 75 bp, synthetic construct
  source 1..75: mol_type = other DNA
ttatcggctggcgattgttcacggcaacgggccacaggtggggctgctggcgttacagaatctggcgtggaaaga

SEQ ID NO: 163968 - DNA, 75 bp, synthetic construct
  source 1..75: mol_type = other DNA
gggccaggtaacggcagatgtcagccagatgaccgaagaccagcatctgcttgccgcgcactgcgatgccaaagg

SEQ ID NO: 163969 - DNA, 75 bp, synthetic construct
  source 1..75: mol_type = other DNA
gtcagcctacggcttctgcccgtttgccactgacgctgatgacgcttgatgactgggcgcttgccaccattactg

SEQ ID NO: 163970 - DNA, 75 bp, synthetic construct
  source 1..75: mol_type = other DNA
gaaccggacagcatcttccgcgtgcgtgacgatgcgaatacattgcgtatcgagccactgccatattcgctggaa

SEQ ID NO: 163971 - DNA, 75 bp, synthetic construct
  source 1..75: mol_type = other DNA
ctacgacatgatggtgtcaaacattaaatgcctagaaattgatccaaacaatattgtactgtatagcaaagatgg

SEQ ID NO: 163972 - DNA, 75 bp, synthetic construct
  source 1..75: mol_type = other DNA
ttccagcaggcaaacagtgaatggcagatcaaggctatggacgcacgaagccaggctgtcgccgagcagggtcgc

SEQ ID NO: 163973 - DNA, 75 bp, synthetic construct
  source 1..75: mol_type = other DNA
attgatgccgccaacagcgggcagtttatcccacaggcgaccaacctccaggcgctgggcggtatcagctttaaa

SEQ ID NO: 163974 - DNA, 75 bp, synthetic construct
  source 1..75: mol_type = other DNA
cgggacattctgctgacaccgcagggtagccgcattgcccgccgggaatatggttccctgctgtcggcactgata

SEQ ID NO: 163975 - DNA, 75 bp, synthetic construct
  source 1..75: mol_type = other DNA
aatgggcggcctccaccggaaccgatgctgcgccgtattttcgtatttttaacccgacaacccagggcgagaaat

SEQ ID NO: 163976 - DNA, 75 bp, synthetic construct
  source 1..75: mol_type = other DNA
ggagtgcgtcgctgcgccaaaagtacgtagtagtggatcgatagatcccgcgccatccattacgctgaattaccc

SEQ ID NO: 163977 - DNA, 75 bp, synthetic construct
  source 1..75: mol_type = other DNA
gtgaactgccttcgaaagaaaaacaggtcgtcagagaaggtgcgactactctgctatggtttgaacatccggcag

SEQ ID NO: 163978 - DNA, 75 bp, synthetic construct
  source 1..75: mol_type = other DNA
agagaatcaacctgcgatggttcgtgacgttgcagaatacatggctgtgttgaaaggtgttgccgttgaagaact

SEQ ID NO: 163979 - DNA, 75 bp, synthetic construct
  source 1..75: mol_type = other DNA
cctgcagatgatggccggtccggcgtggcaacttgaagttgatgatgtgcagcgggttgtctgtcacagcctgcg

SEQ ID NO: 163980 - DNA, 75 bp, synthetic construct
  source 1..75: mol_type = other DNA
tttctggtgaaagatttgttgatcgactggcgcgaaggggagcggtatttcatgtcgcagctgattgatggtgat

SEQ ID NO: 163981 - DNA, 75 bp, synthetic construct
  source 1..75: mol_type = other DNA
gtcagcgcataatatgtcgccgcgtcaggctgagctaatcaatgcgcaactgaacgggctacaaatcgcgctggc

SEQ ID NO: 163982 - DNA, 75 bp, synthetic construct
  source 1..75: mol_type = other DNA
taatttgctcgacccgtccgtacgtcctctggtgatgggcgcgacctttggtatcgccttaacgctggtgattat

SEQ ID NO: 163983 - DNA, 75 bp, synthetic construct
  source 1..75: mol_type = other DNA
aatgtatacggcgctcaaagctattgctactgtccacacactggagcgaaaacccagaattacgcgggcgcggta

SEQ ID NO: 163984 - DNA, 75 bp, synthetic construct
  source 1..75: mol_type = other DNA
cgtggaagtgggcgcagaaagcaggtgtgacgctggattatccgcaaccgatagtcgagcacaaagaagcgagag

SEQ ID NO: 163985 - DNA, 75 bp, synthetic construct
  source 1..75: mol_type = other DNA
tgccgcgccgtattttcgtatattcaacccgacaccccagggcgagaaatttgaccgcgagggtgggtttatccg

SEQ ID NO: 163986 - DNA, 75 bp, synthetic construct
  source 1..75: mol_type = other DNA
cgccacgaccaatccgggtctaaataaaaattatccgaaaggcaccggatgttgtaatgacgccgaagttttcga

SEQ ID NO: 163987 - DNA, 75 bp, synthetic construct
  source 1..75: mol_type = other DNA
gtggaagcgactaactggaatcttgggaataaggatggttatcagcaacgcgcaaaaacacctgccttcccggcg

SEQ ID NO: 163988 - DNA, 75 bp, synthetic construct
  source 1..75: mol_type = other DNA
attaatctcgataacttaattgttggcgataaattgtatttcaacagcggtgtaaaaacccctgaagcagtaagg

SEQ ID NO: 163989 - DNA, 75 bp, synthetic construct
  source 1..75: mol_type = other DNA
attggctaaaaccaccgcccccgcaatggtgctgttcttcaaaggcgcattgtgtaactggttggtttgtctggc

SEQ ID NO: 163990 - DNA, 75 bp, synthetic construct
  source 1..75: mol_type = other DNA
cgaaaagaaaaatacgctgctggtgattaatctcgataacttaattgttggcgataaattgtatttcaatagtgg

SEQ ID NO: 163991 - DNA, 75 bp, synthetic construct
  source 1..75: mol_type = other DNA
aaagcgggcattgctgtactttcggtggaagcgactaactggaatcttgggaataaggatggttatcagcaacgc

SEQ ID NO: 163992 - DNA, 75 bp, synthetic construct
  source 1..75: mol_type = other DNA
ccgcctcatcggttatcatgaacacgaatttattgatttgctgattgagcgcgggatactgtaccaggtctgctt

SEQ ID NO: 163993 - DNA, 75 bp, synthetic construct
  source 1..75: mol_type = other DNA
aaagcgcgttcccggcaaaccggcggtagcggattagggttagcgatcgtgaaacatgctgtgaatcatcacgaa

SEQ ID NO: 163994 - DNA, 75 bp, synthetic construct
  source 1..75: mol_type = other DNA
atggaaggactggtgaagcaattgctgacgctgtcgaaaatagaagccgcaccgacgcatttgctcaatgaaaag

SEQ ID NO: 163995 - DNA, 75 bp, synthetic construct
  source 1..75: mol_type = other DNA
ggagattgcaggaaattttatctgtcaccgattattataataatataaaacctataaatagaatatcttaccaac

SEQ ID NO: 163996 - DNA, 75 bp, synthetic construct
  source 1..75: mol_type = other DNA
aatatggaaaacgcccgccaaatgattaaaacctgtagtgagttttcccgaggcgatatgaaggtttatgccgga

SEQ ID NO: 163997 - DNA, 75 bp, synthetic construct
  source 1..75: mol_type = other DNA
ctacaggaaaagttattcatcatcatgacggatgaaaaccaggtgaatcattcattcgtcactgataagggattg

SEQ ID NO: 163998 - DNA, 75 bp, synthetic construct
  source 1..75: mol_type = other DNA
gcaactcactgcgacggtgaaacagaatgcggataacgcgcatcatgccagcaaactggcgcaagaggcttctat

SEQ ID NO: 163999 - DNA, 75 bp, synthetic construct
  source 1..75: mol_type = other DNA
gggactgttcgacagggtgcggaagagatttatcgtggcaccagcgaaatttcagctggcaatgcggacctgtca

SEQ ID NO: 164000 - DNA, 75 bp, synthetic construct
  source 1..75: mol_type = other DNA
gagccacgcatctacctctatcatgcttatctggcctatctggaagcctacggttatcagagaacccccaccctg

SEQ ID NO: 164001 - DNA, 75 bp, synthetic construct
  source 1..75: mol_type = other DNA
atattctggcgctcaatgccgccgttgaagccgcgcgagctggtgagcaaggtcgcggatttgcggttgttgcca

SEQ ID NO: 164002 - DNA, 75 bp, synthetic construct
  source 1..75: mol_type = other DNA
tgaggcggtggacgtatttcgtctgaacaaacattccgtgtcggcagtacctcgcggagctggtgaaccagttag

SEQ ID NO: 164003 - DNA, 75 bp, synthetic construct
  source 1..75: mol_type = other DNA
aggggcataacgcaagtcagtcaggcgatttctgaaatggataaagtgacgcaacagaatgcctcactggtggaa

SEQ ID NO: 164004 - DNA, 75 bp, synthetic construct
  source 1..75: mol_type = other DNA
gcatcgaaactggtgaagtggtttatttcaaagcccgcgctaccgtgctggcgactggcggggcagggcgtattt

SEQ ID NO: 164005 - DNA, 75 bp, synthetic construct
  source 1..75: mol_type = other DNA
ttatcagtccaccaccaacgcccacattaacaccggcgacggtgtcggcatggctatccgtgccggcgtaccggt

SEQ ID NO: 164006 - DNA, 75 bp, synthetic construct
  source 1..75: mol_type = other DNA
gtattccgaccaaagtgaccgggcaggcgctgaccgtgaacgagaagggcgaagatgtggtgattcctggcctgt

SEQ ID NO: 164007 - DNA, 75 bp, synthetic construct
  source 1..75: mol_type = other DNA
ctcgtttcgcttacgacaaagaaataaatatcctccggcatagccggaggtttttcaaatgcgcctataaggctc

SEQ ID NO: 164008 - DNA, 75 bp, synthetic construct
  source 1..75: mol_type = other DNA
gcatatgtacgacaccgtgaaagggtcggactatatcggtgaccaggacgcgattgaatatatgtgtaaaaccgg

SEQ ID NO: 164009 - DNA, 75 bp, synthetic construct
  source 1..75: mol_type = other DNA
atcggtacacggcgctaaccgtcttggcggcaactcgctgctggacctggtggtctttggtcgcgcagcgggtct

SEQ ID NO: 164010 - DNA, 75 bp, synthetic construct
  source 1..75: mol_type = other DNA
ttaactccatcattcaccccggcacatatccgggtgtggggttctacggcaaccgggaacgggccgcactggccg

SEQ ID NO: 164011 - DNA, 75 bp, synthetic construct
  source 1..75: mol_type = other DNA
ggcggtcatccctttgctgctgctgatgctgccggcgatgctcaccgcgctcgccgtggtacgcgagaaggaact

SEQ ID NO: 164012 - DNA, 75 bp, synthetic construct
  source 1..75: mol_type = other DNA
gcgctggaactgcagcgcgacccggtacgcgccacattggccttggccggatccctgatcctgatgttcgtcatg

SEQ ID NO: 164013 - DNA, 75 bp, synthetic construct
  source 1..75: mol_type = other DNA
ggcggtaactctctgctggatctggtggtatttggacgagcggcgggtctgcatctgcaagaatctatcagtgaa

SEQ ID NO: 164014 - DNA, 75 bp, synthetic construct
  source 1..75: mol_type = other DNA
gcatctgcaagagtctatcgccgagcagggcgcactgcgcgatgccagcgagtctgatgtagaagcgtctctgga

SEQ ID NO: 164015 - DNA, 75 bp, synthetic construct
  source 1..75: mol_type = other DNA
aaccgggaacgggccgcactggctgcgtacacctgggaagtgctggcccgccagctgaaaaaggcgcgtcagcag

SEQ ID NO: 164016 - DNA, 75 bp, synthetic construct
  source 1..75: mol_type = other DNA
tgccgttacgaagaagacattgcacaactgcgccagctactgaaacagctgaagcgttatttgcaggataaccgt

SEQ ID NO: 164017 - DNA, 75 bp, synthetic construct
  source 1..75: mol_type = other DNA
taaccgtatcgtgacgatgtcgctgaagccgcagaatatcctctgtcaccgcatcagtgagtcagaggttatccc

SEQ ID NO: 164018 - DNA, 75 bp, synthetic construct
  source 1..75: mol_type = other DNA
atgaagcccaacgccggaaccctgcgcggcgttagcctggcggatgtcgcccgctctgaagtggatgccctgatt

SEQ ID NO: 164019 - DNA, 75 bp, synthetic construct
  source 1..75: mol_type = other DNA
caggggatgtgcaaaatcgcccgggaggcttacgacaagaccgtttcattcaaacgtaccaccgcaaaccacctc

SEQ ID NO: 164020 - DNA, 75 bp, synthetic construct
  source 1..75: mol_type = other DNA
gatttttaccgcacaataccgacagtaccaggaaatctgggatgaaattagcgccgttctgcaaccgctgatcct

SEQ ID NO: 164021 - DNA, 75 bp, synthetic construct
  source 1..75: mol_type = other DNA
tacgttgagtgaatttgctgagcaatgccgttacgaagatgatgtcacacaattgcgccagttactgaaacaact

SEQ ID NO: 164022 - DNA, 75 bp, synthetic construct
  source 1..75: mol_type = other DNA
aacactacatatacaaatgcagactactcaaaagttgtggttcaacttgtaagtcttattaataacattgaaacg

SEQ ID NO: 164023 - DNA, 75 bp, synthetic construct
  source 1..75: mol_type = other DNA
gtgtccaaaccatgttttcagatactaaggaaggtgcgaataagcaggtcatttcttcccaagctgactcgctga

SEQ ID NO: 164024 - DNA, 75 bp, synthetic construct
  source 1..75: mol_type = other DNA
agtggccttgcgataattgggaagaacaacaacccattaattccacattctctggagaaggatatatctctgatc

SEQ ID NO: 164025 - DNA, 75 bp, synthetic construct
  source 1..75: mol_type = other DNA
ccgggactggttaccggccggacgaaggaccggccaacgcgcagcggcggcagctggttttaaaaatgctggcgg

SEQ ID NO: 164026 - DNA, 75 bp, synthetic construct
  source 1..75: mol_type = other DNA
accacgggcaggtggaatatgtggctgacccggcgcctctgcagtatctgcagagtctggagtacgcggaaaatg

SEQ ID NO: 164027 - DNA, 75 bp, synthetic construct
  source 1..75: mol_type = other DNA
aatgttaaaacgccagacacaccgaagtggccttgtgataaccgggaagaacaacaccccattaattccccattc

SEQ ID NO: 164028 - DNA, 75 bp, synthetic construct
  source 1..75: mol_type = other DNA
atgagcgggcgcgggatgtggacgttgaaagagcgctgcgtaacgtgttgtgcgaagggtttgatgacagcgtga

SEQ ID NO: 164029 - DNA, 75 bp, synthetic construct
  source 1..75: mol_type = other DNA
cgtgaagtggatgactttgccgccagcgtcgaaatagttaaacaggtgtgcgcggaaaacagcgttactcatctt

SEQ ID NO: 164030 - DNA, 75 bp, synthetic construct
  source 1..75: mol_type = other DNA
ctcaacactgcgtcaggtaagtggaaagatccgattgtctgtgaaaccagtgaagaaactttgaaaaaagcggct

SEQ ID NO: 164031 - DNA, 75 bp, synthetic construct
  source 1..75: mol_type = other DNA
gcggacaatccaaatggtgaattaccgtcttatatcactggcgctgacattccgggcgtcttctccgccacaacg

SEQ ID NO: 164032 - DNA, 75 bp, synthetic construct
  source 1..75: mol_type = other DNA
aaccgggatggcctggttctggccgacgcatcgcgttgaacgctggacagagaccagcggcgttaatgaggtggt

SEQ ID NO: 164033 - DNA, 75 bp, synthetic construct
  source 1..75: mol_type = other DNA
aaaattgccctgtatgcggctctgatgccacatggacaaatcacgatacgtgctggaaaattcattgcagtggtt

SEQ ID NO: 164034 - DNA, 75 bp, synthetic construct
  source 1..75: mol_type = other DNA
atgaaaatccccctcataattgcctccgcgctattaattagtgcatgttctcacacccccaatcctgtgcagaaa

SEQ ID NO: 164035 - DNA, 75 bp, synthetic construct
  source 1..75: mol_type = other DNA
gtacgccggaagaaccggtaaaacgcgatagcccacgtcgtgccttcctgatgattatgtggggcattgtcgggg

SEQ ID NO: 164036 - DNA, 75 bp, synthetic construct
  source 1..75: mol_type = other DNA
tggtctatcaaacatccaaagaatcattaaaaagtactcatcaaaagatatttacaccgctattattgcggaatt

SEQ ID NO: 164037 - DNA, 75 bp, synthetic construct
  source 1..75: mol_type = other DNA
atgaactggatcggaaaacaacagaggctttgattcgtgtagcggacgaacattcccggtcgtttatgagcgatc

SEQ ID NO: 164038 - DNA, 75 bp, synthetic construct
  source 1..75: mol_type = other DNA
gctattacgccgcagcagcaacgcgcgctggcccagcgttttggcgagctgcatattcaccctgtttaccctcat

SEQ ID NO: 164039 - DNA, 75 bp, synthetic construct
  source 1..75: mol_type = other DNA
cgctattaattagtgcatgttctcacaccctcaatcctgtgcagaaaaaagggggatggtttgagttaaacacag

SEQ ID NO: 164040 - DNA, 75 bp, synthetic construct
  source 1..75: mol_type = other DNA
tgatgatttatgtcgagcaacggatgtatctctctgaccgtcagcagccaaaagtctgtctgattgatgaagcct

SEQ ID NO: 164041 - DNA, 75 bp, synthetic construct
  source 1..75: mol_type = other DNA
cgttacccgcgcccggcactatgtatttatgatctttgatagccaaaacacctcagcgtttgttgaggagattgc

SEQ ID NO: 164042 - DNA, 75 bp, synthetic construct
  source 1..75: mol_type = other DNA
gacggcaaaactgccgcgtaccgaagggctgaccggctccgatcgtcgcgaattcctggcgcaggccaaagagat

SEQ ID NO: 164043 - DNA, 75 bp, synthetic construct
  source 1..75: mol_type = other DNA
ctcgacgaacccacctcgggggtcgacccggtggcccgcgacaacttctggcgcctgctggcggaactgtctcgc

SEQ ID NO: 164044 - DNA, 75 bp, synthetic construct
  source 1..75: mol_type = other DNA
ggaaactgttgtcgaaggacaacaagcaggccgaagattttattgagaacggttaccgcacggcacgtaagtaca

SEQ ID NO: 164045 - DNA, 75 bp, synthetic construct
  source 1..75: mol_type = other DNA
tctgccggcagggcctgcccataccgtcttaccgtaatcagctctcctttctgaacctgttcgatcgcaatgccg

SEQ ID NO: 164046 - DNA, 75 bp, synthetic construct
  source 1..75: mol_type = other DNA
atggtgaattaccgtcttatatcactggcgctgacactgatggaaataccgggcgttgggccagtaatcaccacg

SEQ ID NO: 164047 - DNA, 75 bp, synthetic construct
  source 1..75: mol_type = other DNA
agagatccttgtgcgtgggatgtacgtgcgcggacgtaaaatggtagcgtttctggtctgctgcgtggcgctggc

SEQ ID NO: 164048 - DNA, 75 bp, synthetic construct
  source 1..75: mol_type = other DNA
ttgccaccgctaaacgttatccgttaacgccgctgctctatacgctcattttctttcacgccatcatcctgatgg

SEQ ID NO: 164049 - DNA, 75 bp, synthetic construct
  source 1..75: mol_type = other DNA
agcgaaatgcagcaaggagagtgggttaacaatctgctgaaaggtaccgtcgggggaagctttgttgccagcgcc

SEQ ID NO: 164050 - DNA, 75 bp, synthetic construct
  source 1..75: mol_type = other DNA
tgatttcgcgatgccacagggtacgccggtactttcggtgggtgacggtgaagtggttgtagccaaacgcagtgg

SEQ ID NO: 164051 - DNA, 75 bp, synthetic construct
  source 1..75: mol_type = other DNA
tgcagcaaacggttttaaaatgaccagcgaaatgcagcaaggggagtgggttaataatctactgaaaggcactgt

SEQ ID NO: 164052 - DNA, 75 bp, synthetic construct
  source 1..75: mol_type = other DNA
ctcgcgaatctaaagcagttcgccgaacacttgtagacaaacttgaaagtatgcaggaagcgcacattaaaagcg

SEQ ID NO: 164053 - DNA, 75 bp, synthetic construct
  source 1..75: mol_type = other DNA
ctggcggaaaagctggccaaagaccagaacggcgctgatattcctgacccggcgctctttgtcaaaaaccttggt

SEQ ID NO: 164054 - DNA, 75 bp, synthetic construct
  source 1..75: mol_type = other DNA
aaatcctattttgctagtgctatttcttattatcactataataaaaaggttgcaggtaaaagtaataaaattgat

SEQ ID NO: 164055 - DNA, 75 bp, synthetic construct
  source 1..75: mol_type = other DNA
aaggaagatgcttttttaaccaagaacgggatcaatgagcggcaaggatttttgtttgccaaaccgatgcccgcc

SEQ ID NO: 164056 - DNA, 75 bp, synthetic construct
  source 1..75: mol_type = other DNA
gcacttctcagattacaagggagaggtaagcccacatatcaatttaagagccaattatataagaatcgctgatac

SEQ ID NO: 164057 - DNA, 75 bp, synthetic construct
  source 1..75: mol_type = other DNA
aatcacagttcacaactatgtataaagaaatacaggggggtaaaattgacgtacatctacaatgcccgcctggga

SEQ ID NO: 164058 - DNA, 75 bp, synthetic construct
  source 1..75: mol_type = other DNA
ccccgggtgataggagagctggagggaacagctaaccagtatctattttatgggggtggaatagccttgatgcgt

SEQ ID NO: 164059 - DNA, 75 bp, synthetic construct
  source 1..75: mol_type = other DNA
catcacgaattttgacccgcttacggctcccctttcgcattggtttaattgaagtttataccagctgttcagtag

SEQ ID NO: 164060 - DNA, 75 bp, synthetic construct
  source 1..75: mol_type = other DNA
tgagaatgatgaactggcactgtctgttattcaacaatttagccaactaggtgcgcaagtgcatctggacgattt

SEQ ID NO: 164061 - DNA, 75 bp, synthetic construct
  source 1..75: mol_type = other DNA
tagcgatccatctggagatagtaatatagagttaggacccaccgagattctcgcacgtcgtgtcgctcaagaact

SEQ ID NO: 164062 - DNA, 75 bp, synthetic construct
  source 1..75: mol_type = other DNA
cgcaacaaatttgtccacagcggtagcggcaaaaatgagatctatttaatttgttccggcaccgatatcaccgaa

SEQ ID NO: 164063 - DNA, 75 bp, synthetic construct
  source 1..75: mol_type = other DNA
tttcctacgccgaagagtccgggctaattgtccctttaggccgttgggttattcttgatgtcgtacgccaggtgg

SEQ ID NO: 164064 - DNA, 75 bp, synthetic construct
  source 1..75: mol_type = other DNA
gttacgcgaagtttcactagctattttaagctgccttgagcaggatcaggtactggcacgcccaggcggcgatga

SEQ ID NO: 164065 - DNA, 75 bp, synthetic construct
  source 1..75: mol_type = other DNA
atatgccgagcgccacggagcttatcgctcacggtcgcgaagtagatgaaattcgccagatcatcggtgctgatg

SEQ ID NO: 164066 - DNA, 75 bp, synthetic construct
  source 1..75: mol_type = other DNA
gccccaggcgaggcgatttacatcactgaagaagggcagctgtttacccgccagtgcgctgacaacccggtcagc

SEQ ID NO: 164067 - DNA, 75 bp, synthetic construct
  source 1..75: mol_type = other DNA
gttgggaaaacgcgatattgacgataatcgcacagaatatatggtcgcctccgaaagcgttgcgctcgacaccct

SEQ ID NO: 164068 - DNA, 75 bp, synthetic construct
  source 1..75: mol_type = other DNA
tcgtggcaggaaggactgattcacgagattattcatcatgttactggaccagcgatccatctggagatagtaata

SEQ ID NO: 164069 - DNA, 75 bp, synthetic construct
  source 1..75: mol_type = other DNA
ccgtccatgacagccgtagcaggctcatcgatcagcatacggtcgatatgattggcaacactgtacttgatgcgt

SEQ ID NO: 164070 - DNA, 75 bp, synthetic construct
  source 1..75: mol_type = other DNA
tctcgcacgtcgtgtcgctcaagactgggatggagtgttcccgacttcaaaggatatgcagagccagaacgtgaa

SEQ ID NO: 164071 - DNA, 75 bp, synthetic construct
  source 1..75: mol_type = other DNA
gctcggtgttcaacggcgtctacgtcaccaaagatgttgatcagggctacctcgatttcctcgatactttacgta

SEQ ID NO: 164072 - DNA, 75 bp, synthetic construct
  source 1..75: mol_type = other DNA
ctggcgtcagctaccagcaacagaagaaatagcccaggcctgcggcgtcagctcgacaagcgatttcctgacgct

SEQ ID NO: 164073 - DNA, 75 bp, synthetic construct
  source 1..75: mol_type = other DNA
atttctgtcaatgtggtctcacagcaatattttctataagaaaggaaaggaaaggaaaggaaaggaaaggaaagg

SEQ ID NO: 164074 - DNA, 75 bp, synthetic construct
  source 1..75: mol_type = other DNA
gccatatgcagcgtttgcaaggcaatatgggcattggtcatgtgcgttacccgacggctggcagctccagcgctt

SEQ ID NO: 164075 - DNA, 75 bp, synthetic construct
  source 1..75: mol_type = other DNA
agatggcacgcgaagccggagcgaagaaagtgtacctcgcttctgcggcaccggaaattcgcttcccgaacgttt

SEQ ID NO: 164076 - DNA, 75 bp, synthetic construct
  source 1..75: mol_type = other DNA
ttacgtaatgacgacgccaaagcagtgcaacgtcagaacgaagtggaaaatctcgaaatgcataacgaaggatga

SEQ ID NO: 164077 - DNA, 75 bp, synthetic construct
  source 1..75: mol_type = other DNA
atgaaagttgccattccatattattatgagctgcattcgcaattaaaagagatgtatccggaggtagagtggata

SEQ ID NO: 164078 - DNA, 75 bp, synthetic construct
  source 1..75: mol_type = other DNA
atttaccaccgagggggcagtaaaaattacgacttccctggttcatattgatgacaaccacgctgttatcaaaat

SEQ ID NO: 164079 - DNA, 75 bp, synthetic construct
  source 1..75: mol_type = other DNA
tgcagtatatatttgtggttggcaagatattactgaaacgcgtgatctaattaatgcactcgaggtagaaaaaaa

SEQ ID NO: 164080 - DNA, 75 bp, synthetic construct
  source 1..75: mol_type = other DNA
ttatatttgtggttggcaagatattaccgagacgcgtgatttaattcatgcactcgaagtagagagaaataaagc

SEQ ID NO: 164081 - DNA, 75 bp, synthetic construct
  source 1..75: mol_type = other DNA
accccggtggatgggatatattgcccgccgctatttatagtgaagatcgagaaaataatgtttcatttgctgaag

SEQ ID NO: 164082 - DNA, 75 bp, synthetic construct
  source 1..75: mol_type = other DNA
taagcctgaaattcttcagttgctaaactctgtaaaagaacacattgcagagctagaccaggaaattgctgtttt

SEQ ID NO: 164083 - DNA, 75 bp, synthetic construct
  source 1..75: mol_type = other DNA
aagagtacagcaatgagggctgtcgacgcactttgtgaaaaaggtctattgattaaacaaccaagatacttaatc

SEQ ID NO: 164084 - DNA, 75 bp, synthetic construct
  source 1..75: mol_type = other DNA
tgccacctactgaactggatcgggatcttgaacgaaagatctatgcgttcactgactacctgaaagacaaaagca

SEQ ID NO: 164085 - DNA, 75 bp, synthetic construct
  source 1..75: mol_type = other DNA
gtcaggtagtggcacaaagcaaccgggggtagtggcagagagcaaccagggtagtggcacaaagcaaccgggggt

SEQ ID NO: 164086 - DNA, 75 bp, synthetic construct
  source 1..75: mol_type = other DNA
aagttgccattccatattattatgagcttcattcgcaattaaaagagatgtatccggaggtagagtggataaaag

SEQ ID NO: 164087 - DNA, 75 bp, synthetic construct
  source 1..75: mol_type = other DNA
tagcaaggagcaacgggtggaggcgatttcacttgcctacgccaccggacaatcactcctcggcttaattggtga

SEQ ID NO: 164088 - DNA, 75 bp, synthetic construct
  source 1..75: mol_type = other DNA
tatttgcttttgaaatgctctcggatatccgttcagcaaaagacgggaggaaaatctgcgcatctgtttttttca

SEQ ID NO: 164089 - DNA, 75 bp, synthetic construct
  source 1..75: mol_type = other DNA
atgctcaggccgcaaatatttacaagcatcccgttagctagcgccgacagcaccaatgtcgcgagaaacattggc

SEQ ID NO: 164090 - DNA, 75 bp, synthetic construct
  source 1..75: mol_type = other DNA
gttagtatcaccacccctgcacaaattgaacgtcctgctacacaggccaaacaaactcatcacgtgacttttact

SEQ ID NO: 164091 - DNA, 75 bp, synthetic construct
  source 1..75: mol_type = other DNA
acaagctgataatgtgacttttactattactcaaaatcagtcttgtgcagatataggctccagaattgcttattg

SEQ ID NO: 164092 - DNA, 75 bp, synthetic construct
  source 1..75: mol_type = other DNA
ggaaccggcgctaacgctactgcggaagccattagcctgacacagcgtttcaatgacagtggcattgttggctgc

SEQ ID NO: 164093 - DNA, 75 bp, synthetic construct
  source 1..75: mol_type = other DNA
gaatcaaagaggcaacagggaacttaacgcgtgtaaaccagatcaaagagctggtttcagatgattttgttctgc

SEQ ID NO: 164094 - DNA, 75 bp, synthetic construct
  source 1..75: mol_type = other DNA
tacttagaaaaaagattaaaagataataaattcaatcagggcgacatacttacatggaaaaatttattttttgga

SEQ ID NO: 164095 - DNA, 75 bp, synthetic construct
  source 1..75: mol_type = other DNA
acttgaaggtgttgaaaatgaagcgttgttccgtattgccagagacatgaatgtccagggctgtcagggatggct

SEQ ID NO: 164096 - DNA, 75 bp, synthetic construct
  source 1..75: mol_type = other DNA
gatgccctgttaacaagtaaggtactgaagcggatcgctgcactttgcaaaggcgatcgcagaaggctggcgcag

SEQ ID NO: 164097 - DNA, 75 bp, synthetic construct
  source 1..75: mol_type = other DNA
ataggaacgacatttacgatcacaatcccggtagaaattacccaacaagtggcggctgtcgaggcaaaagcagaa

SEQ ID NO: 164098 - DNA, 75 bp, synthetic construct
  source 1..75: mol_type = other DNA
acttcaacgctgtcgctggctttccgctgatgtcattatggtgctggttggcctgatttgcggcatcacgctatt

SEQ ID NO: 164099 - DNA, 75 bp, synthetic construct
  source 1..75: mol_type = other DNA
acttcaacgctgtcgctggctttcagctgatgtcattatggtgctggttggcctgatttgcggcatcacgctctt

SEQ ID NO: 164100 - DNA, 75 bp, synthetic construct
  source 1..75: mol_type = other DNA
agcagtattatacggactaatatatgtgagtttatacacggccggtgttcgtggaaataatacacaggcattact

SEQ ID NO: 164101 - DNA, 75 bp, synthetic construct
  source 1..75: mol_type = other DNA
ttatgcgaggcgattggcacactcgaattgctgaagcagtcactgattgaaggcgcgaaagagtcctcagcctga

SEQ ID NO: 164102 - DNA, 75 bp, synthetic construct
  source 1..75: mol_type = other DNA
gtgtatgtgaggcgattggcacactcgaattgctgaagcagtcattgattgaaagcatgaagagccaacgaccag

SEQ ID NO: 164103 - DNA, 75 bp, synthetic construct
  source 1..75: mol_type = other DNA
tgacctgaaagcggaagatgcagaaaaagcggcatgtgatttattcgatatgacaatgggtattatccaagagta

SEQ ID NO: 164104 - DNA, 75 bp, synthetic construct
  source 1..75: mol_type = other DNA
tgtacgataccgaacgcactgccgtgctgttttgtgaaatcgtcaatcgctggaaacgtctgggaggctggccgc

SEQ ID NO: 164105 - DNA, 75 bp, synthetic construct
  source 1..75: mol_type = other DNA
atttccacgtcgaaccatttgtcggcgcaaatttgcagccagaggccctcgccttcaacggcattgacccgaacg

SEQ ID NO: 164106 - DNA, 75 bp, synthetic construct
  source 1..75: mol_type = other DNA
caacgaagctccagggcgaagtcacaatttccggcgctaaaaatgctgctctgcctatcctttttgccgcactac

SEQ ID NO: 164107 - DNA, 75 bp, synthetic construct
  source 1..75: mol_type = other DNA
ggcaacgcgcgcgatgtcttttatcaacccgtacatccttattctatcggtttgctcaacgcggtgccgcgtctc

SEQ ID NO: 164108 - DNA, 75 bp, synthetic construct
  source 1..75: mol_type = other DNA
gtttgaagaatcggtgcggatgctcgatgcggtaaaaatgccggaagcgcgtaaacgcatgaaaatgtacccgca

SEQ ID NO: 164109 - DNA, 75 bp, synthetic construct
  source 1..75: mol_type = other DNA
tgccgctcgcacaacaacaggctgacgcactgctgaacgtgaaagatttgcgtgtcacctttagtaccccggatg

SEQ ID NO: 164110 - DNA, 75 bp, synthetic construct
  source 1..75: mol_type = other DNA
ttttagtgccaggaaaacatctgcattactgcgatgaaaatcatatcccgatcctgattgtctggaagcgaacag

SEQ ID NO: 164111 - DNA, 75 bp, synthetic construct
  source 1..75: mol_type = other DNA
gcagaaaccagtaggtcagcgcattgtatcttttaaaattaatggtgaagagatcgttgatacgaatatttacca

SEQ ID NO: 164112 - DNA, 75 bp, synthetic construct
  source 1..75: mol_type = other DNA
cagttgggcgtgccgaacgtcagcagtttcaacggctattggtctggctggtcgctaatgtctatccaacgttta

SEQ ID NO: 164113 - DNA, 75 bp, synthetic construct
  source 1..75: mol_type = other DNA
aaacgctttatcatcgaagagggaattgcttcggcatttaccgaacgttttgtggcagctgcggcagccttgaaa

SEQ ID NO: 164114 - DNA, 75 bp, synthetic construct
  source 1..75: mol_type = other DNA
cacggcgtagctttgcgcaatggtcaaaagcgtaaagacgctatgacctgggcggcagaatgcatgggattcccg

SEQ ID NO: 164115 - DNA, 75 bp, synthetic construct
  source 1..75: mol_type = other DNA
gacagtgcgccctggctgggtgaagggaaggacaaacgaactttaatagacctgatcacaatgtggtatgaacgc

SEQ ID NO: 164116 - DNA, 75 bp, synthetic construct
  source 1..75: mol_type = other DNA
cgatggcacgttttgacttgcgtgatgagttgcatcatcaggtggaaaaaactctggcgcagggcgcacgtttgt

SEQ ID NO: 164117 - DNA, 75 bp, synthetic construct
  source 1..75: mol_type = other DNA
tttaaagacgcgggtatccctcagggcgtatatggctggctaaatgctgacaacgatggtgtcagtcagatgatt

SEQ ID NO: 164118 - DNA, 75 bp, synthetic construct
  source 1..75: mol_type = other DNA
cgcttcagctggcggcagcaggctttcgcgactggcgcgagacaaatatagattatcgtgctgaaaaactgcgtg

SEQ ID NO: 164119 - DNA, 75 bp, synthetic construct
  source 1..75: mol_type = other DNA
accaaagaacctgcgtagaatgtccgttttgcaaggaacaaggaaagagtggtggtggtggggagaaggagtgtg

SEQ ID NO: 164120 - DNA, 75 bp, synthetic construct
  source 1..75: mol_type = other DNA
tcgaagttaccgctgaaggcattggccgtgacgcgtcagacctgctgcgtaaaatcaaagcagcacagtacgtag

SEQ ID NO: 164121 - DNA, 75 bp, synthetic construct
  source 1..75: mol_type = other DNA
ttatcccgttgtgatcgatgtagaaaccgccggatttaacgccaaaaccgatgcgctacttgagattgctgccat

SEQ ID NO: 164122 - DNA, 75 bp, synthetic construct
  source 1..75: mol_type = other DNA
ccaacccactggaaaacgtcaggcagtatcgtactgatgaaaccgaaatggctttcctcactgctgaagaaattg

SEQ ID NO: 164123 - DNA, 75 bp, synthetic construct
  source 1..75: mol_type = other DNA
ctggtgatttctgataaccagatttaccgtgaatggggaattaccagcgaaaatgaacaccgattcatggtcttt

SEQ ID NO: 164124 - DNA, 75 bp, synthetic construct
  source 1..75: mol_type = other DNA
tttggtgagcaactaacgctggtggactgttatctctgcaccatgcgcacatgggggccggggcatgaatggttt

SEQ ID NO: 164125 - DNA, 75 bp, synthetic construct
  source 1..75: mol_type = other DNA
tatgtgatggaccaattaaaagaggcgaaaatcgacgaactggatttgcatcgcgctattgtcgcattgagcgaa

SEQ ID NO: 164126 - DNA, 75 bp, synthetic construct
  source 1..75: mol_type = other DNA
ggaaatagaaaaagcggtcactgacgttgcggaactgaacggtgaattacgtaatcggcagtatcttgtcgagca

SEQ ID NO: 164127 - DNA, 75 bp, synthetic construct
  source 1..75: mol_type = other DNA
ggatctggatatcaaaattgatcgtacagaagcatttaacctgtttatcaagaagtttcagtctgttagcttact

SEQ ID NO: 164128 - DNA, 75 bp, synthetic construct
  source 1..75: mol_type = other DNA
tgcgttaggtatccagaatttaacaatgttggtaggcattgtgattagtgtttttgtgatgaaaaaaataactat

SEQ ID NO: 164129 - DNA, 75 bp, synthetic construct
  source 1..75: mol_type = other DNA
caaaaaaagtaagagatattcaccgcagtatattttagcatatagcttctacatgtgtttcttcatccctctttt

SEQ ID NO: 164130 - DNA, 75 bp, synthetic construct
  source 1..75: mol_type = other DNA
ccctatgtgtttatgttattttcatcaatatttttatgcaaatatcatgctaaaattatcttgatgaaatctaat

SEQ ID NO: 164131 - DNA, 75 bp, synthetic construct
  source 1..75: mol_type = other DNA
cgcattaaaacgaaaaatcaacttgatgcaaacattcagcgcctcaattattcactcgacattgccaacgcggcg

SEQ ID NO: 164132 - DNA, 75 bp, synthetic construct
  source 1..75: mol_type = other DNA
atggttgcttgtggcggcgtgcttttacgtcacgcgatggcatccagaaaacaggatgccatgatggaaatggaa

SEQ ID NO: 164133 - DNA, 75 bp, synthetic construct
  source 1..75: mol_type = other DNA
atgtcatcattgaatattaaacagggaagtgacgctcatttttctgagtatcctctggcgtcgcccagtaataat

SEQ ID NO: 164134 - DNA, 75 bp, synthetic construct
  source 1..75: mol_type = other DNA
ccagtgaaaaaagacggtccgggtaaggcgattattgtgatcctttccgcgttgatcggcgggatggtggcttgt

SEQ ID NO: 164135 - DNA, 75 bp, synthetic construct
  source 1..75: mol_type = other DNA
cgtcattgccagtgaaaaaagacggtccgggtaagggtaatgactccaacttattgatagtgttttatgttcaga

SEQ ID NO: 164136 - DNA, 75 bp, synthetic construct
  source 1..75: mol_type = other DNA
atggtggcttgtggtggcgtgctgttgcgccatgcgatggcatccagaaaacaggatgccgtgatggaagagcac

SEQ ID NO: 164137 - DNA, 75 bp, synthetic construct
  source 1..75: mol_type = other DNA
ggcgtcagggatttcaggatgctgttgatgaccgggctggaccgggaggttcataaaatggaagaccgacagtat

SEQ ID NO: 164138 - DNA, 75 bp, synthetic construct
  source 1..75: mol_type = other DNA
ggtgttgcgaaatatctgcccggtatacagcggatgcttacctctgccggacctggaaagaactgtgcgtatggc

SEQ ID NO: 164139 - DNA, 75 bp, synthetic construct
  source 1..75: mol_type = other DNA
tttcctgattatgcgccagctcggcgagatggtggtcgaagagccggtatccggttcgtttgcccactttgccta

SEQ ID NO: 164140 - DNA, 75 bp, synthetic construct
  source 1..75: mol_type = other DNA
catcagcagcagtgggagcacagagcgggaagaatgctgttgagaataactcactcagtgatggctggaacaata

SEQ ID NO: 164141 - DNA, 75 bp, synthetic construct
  source 1..75: mol_type = other DNA
aaagaacggcaagctaaaacagtcagcagtctcgatcttagcaaagccagacgagtgataggcattggtcggggc

SEQ ID NO: 164142 - DNA, 75 bp, synthetic construct
  source 1..75: mol_type = other DNA
catttatatgcgcggtgccgatacctctaacagtatttatatcgatggcattcgcgatatcggcagcgtctcgcg

SEQ ID NO: 164143 - DNA, 75 bp, synthetic construct
  source 1..75: mol_type = other DNA
tgcgcttgtcagcaattttgttgccggtgtggattgtgttcctgtttgtggcgtttaaaacgttgcgtcggaaag

SEQ ID NO: 164144 - DNA, 75 bp, synthetic construct
  source 1..75: mol_type = other DNA
atggcgggtccggctgtattgctgggctacggcgtcgccgggatcatcgctttcctgattatgcgccagcttggc

SEQ ID NO: 164145 - DNA, 75 bp, synthetic construct
  source 1..75: mol_type = other DNA
ctttggcctgctggccgggattattccgctgcacggctgggtgccgcaggcacatgctaacgcctctgcgccagc

SEQ ID NO: 164146 - DNA, 75 bp, synthetic construct
  source 1..75: mol_type = other DNA
ctgctgatgtgcacgatggatgatatgcgcttgtcggcaattttgctgccggtgtggattgtattcctgtttgtg

SEQ ID NO: 164147 - DNA, 75 bp, synthetic construct
  source 1..75: mol_type = other DNA
ttcctttctggctggaactactgggtaatgttcgtgctggtgggaatggcagagctgaccgctgcgggcatctat

SEQ ID NO: 164148 - DNA, 75 bp, synthetic construct
  source 1..75: mol_type = other DNA
atgggctgattttgtcgctggcggtaattatgttctccttcggcggtctggagctgattgggattactgcggctg

SEQ ID NO: 164149 - DNA, 75 bp, synthetic construct
  source 1..75: mol_type = other DNA
tttggatggtttcagacggttgttggagcagtattaatggttgcctcgatatgggtgcccgctcttgcgcctctc

SEQ ID NO: 164150 - DNA, 75 bp, synthetic construct
  source 1..75: mol_type = other DNA
gcacgggggagctgtatatcgtgcgggatgtgcaaccggacagccacggcggcacgcgacttgaactgaacaggg

SEQ ID NO: 164151 - DNA, 75 bp, synthetic construct
  source 1..75: mol_type = other DNA
gaagaatgccggtcgtttaactcggaagtgattaagcgattgctggacagcctgaagagagagggggtagtggta

SEQ ID NO: 164152 - DNA, 75 bp, synthetic construct
  source 1..75: mol_type = other DNA
aatagtgctgtggcttattggctatcacgctgaaaatcaaggagatatcaggccaacagcattaaaacgcagcgg

SEQ ID NO: 164153 - DNA, 75 bp, synthetic construct
  source 1..75: mol_type = other DNA
agttactaaaagagtgtttaataaccatctgataacggacattactgcgcaagagagtttttgtcaccatgaagt

SEQ ID NO: 164154 - DNA, 75 bp, synthetic construct
  source 1..75: mol_type = other DNA
tgcttatgaatatattgcagccgagtatgcgagtgcgggtgtgtacggtaatcaacaataatatcgctcgtgaat

SEQ ID NO: 164155 - DNA, 75 bp, synthetic construct
  source 1..75: mol_type = other DNA
cagcctggcgatattgtgctgccgaagccgcgctacagcggtttcttcaatacgccgctggacagcattttgcgc

SEQ ID NO: 164156 - DNA, 75 bp, synthetic construct
  source 1..75: mol_type = other DNA
aatctgttggagcaggatttttacgccagtggcccgaaccagaagtgggcaggagacatcacgtacttacgtaca

SEQ ID NO: 164157 - DNA, 75 bp, synthetic construct
  source 1..75: mol_type = other DNA
ggttgtgcaggcactagaagcaacgggagagattaagagattaacggcaaacttatctggagcaataccggttat

SEQ ID NO: 164158 - DNA, 75 bp, synthetic construct
  source 1..75: mol_type = other DNA
cccggcacaggcctctgttagcgatctgacgggtgaagaaaccgaggcacagccggtgcctgtaaacaccccaac

SEQ ID NO: 164159 - DNA, 75 bp, synthetic construct
  source 1..75: mol_type = other DNA
ccggcatcgccaccaacgtctgtgtcgaatcaacgctgcgcgacggtttctttctggaatatttcggcgtggtgc

SEQ ID NO: 164160 - DNA, 75 bp, synthetic construct
  source 1..75: mol_type = other DNA
gcgttgttcaatatcgaaaccttttttggctgggtcagcgacgtcgaaacattctgcgacgcgctttctcccacg

SEQ ID NO: 164161 - DNA, 75 bp, synthetic construct
  source 1..75: mol_type = other DNA
ccagggaggaagaaagcaagaagggtatggacgccagccagctaacaggagcaacatcaagttacgcgcgtaaat

SEQ ID NO: 164162 - DNA, 75 bp, synthetic construct
  source 1..75: mol_type = other DNA
atgtttgcaggtttaccttcactcacccatgaacagcagcaaaaagctgtcgagcggatccaggaactgatggca

SEQ ID NO: 164163 - DNA, 75 bp, synthetic construct
  source 1..75: mol_type = other DNA
atgctggggtaccttttccagattttgagacgctaccatcgttttctgagaccgtatcacgctatttcctcatga

SEQ ID NO: 164164 - DNA, 75 bp, synthetic construct
  source 1..75: mol_type = other DNA
gcgacatcaagttacgcgcgaaaatatgctttgaacggcttattctgcattgatgacgcaaaagatcctgatact

SEQ ID NO: 164165 - DNA, 75 bp, synthetic construct
  source 1..75: mol_type = other DNA
cccaccaaaacaacaaccacagcagcagaaagcgccgccaaatcctgatgaagtattagggaaggtgcgaataag

SEQ ID NO: 164166 - DNA, 75 bp, synthetic construct
  source 1..75: mol_type = other DNA
ggaaaaagaacaaaaaggcatgtcgtctggtcagttaactggcgcgacttcttcttatgctcgcaaatattgttt

SEQ ID NO: 164167 - DNA, 75 bp, synthetic construct
  source 1..75: mol_type = other DNA
gcgtgaaataataaacaacaagaacataataaagaagctgatgttctttttgtcagatgttaatcacaccggtga

SEQ ID NO: 164168 - DNA, 75 bp, synthetic construct
  source 1..75: mol_type = other DNA
ttcgggttcgctctgcgtgccagttacagtcgttccgtgggaagaatgctggtactgagcctactggcgacgctg

SEQ ID NO: 164169 - DNA, 75 bp, synthetic construct
  source 1..75: mol_type = other DNA
acgttcgcgttgtggtatagccagaccatcacagataaaagatgccaggtcggcggcaatagaaccatggttaat

SEQ ID NO: 164170 - DNA, 75 bp, synthetic construct
  source 1..75: mol_type = other DNA
aatcatgaagatatttttcgcccggcatggaagcgagctgaactgtttcttgactattatcataaagcatggaac

SEQ ID NO: 164171 - DNA, 75 bp, synthetic construct
  source 1..75: mol_type = other DNA
gctcattttttgactggtgacacaacgcgcattaatgccgcaaaattgctttttaacagtgcattcgctgaaaat

SEQ ID NO: 164172 - DNA, 75 bp, synthetic construct
  source 1..75: mol_type = other DNA
atgactctctataaaaaggaagtcaacaaatactggcaggataatctggtagatgtttacacaaaggtctacgga

SEQ ID NO: 164173 - DNA, 75 bp, synthetic construct
  source 1..75: mol_type = other DNA
gattccatcaagtgcagcagccaaagctgtaacactgaataatggtaattatcagctgtcaggctataaatggcc

SEQ ID NO: 164174 - DNA, 75 bp, synthetic construct
  source 1..75: mol_type = other DNA
cagctcgccactgataatattgatatttcgccggtcagcgtgatcaaaggcgaatcgacaggcgtggcgctgatt

SEQ ID NO: 164175 - DNA, 75 bp, synthetic construct
  source 1..75: mol_type = other DNA
ttgctgtgacacgtaaaggtgcacaaccttccgttccctggcgtgaagagatcgataccttcttagacaggcaga

SEQ ID NO: 164176 - DNA, 75 bp, synthetic construct
  source 1..75: mol_type = other DNA
ctggtacgccgtacctgctgccagcgttatcgcctaccggatgtgcagcaatgtggcgattgtacgctgaaatga

SEQ ID NO: 164177 - DNA, 75 bp, synthetic construct
  source 1..75: mol_type = other DNA
atgataggctgttttgccctgagaccggaacatatccgcctcaacacccccggcgaagtgcaagttaatggcacg

SEQ ID NO: 164178 - DNA, 75 bp, synthetic construct
  source 1..75: mol_type = other DNA
atgacgacagtaatactgaatcagcccgacgaaccgcaggacgtaccgggcgtggtgattcccacaccggagacg

SEQ ID NO: 164179 - DNA, 75 bp, synthetic construct
  source 1..75: mol_type = other DNA
tgggcgttgcaggcgtaacgcttgagaagatgccaaatgaagatgattactggcgattaaccgctaaggaccgtg

SEQ ID NO: 164180 - DNA, 75 bp, synthetic construct
  source 1..75: mol_type = other DNA
tgacgctatcattgttacggcggcaccgccggaaattccaactgcgctaatgacgcagctggacgaaggcgggat

SEQ ID NO: 164181 - DNA, 75 bp, synthetic construct
  source 1..75: mol_type = other DNA
caccgccaatattagcggatgatatccgtagctacgatcaactgatcgcctgtatgcgcagcgaaaaggtttatc

SEQ ID NO: 164182 - DNA, 75 bp, synthetic construct
  source 1..75: mol_type = other DNA
ggctccggctcccgaacttcctgacgaacagctggcgctggtgggccttattacccccaacaacacaggaagcag

SEQ ID NO: 164183 - DNA, 75 bp, synthetic construct
  source 1..75: mol_type = other DNA
atggtgaaggtcagcgcgttcctggattccgggtgcaggctgtcgataccattgctgccggaggtgatgctgcca

SEQ ID NO: 164184 - DNA, 75 bp, synthetic construct
  source 1..75: mol_type = other DNA
ttacgccaaatgaaacggaagcagaaaagctcaccggtattcgcgttgaaaatgatgaagatgcagcgaaggccg

SEQ ID NO: 164185 - DNA, 75 bp, synthetic construct
  source 1..75: mol_type = other DNA
aggcggcgcactgtttgctgcctggccgatggtctatgccgctgcgttctccggcttctatgtggcgatgatcct

SEQ ID NO: 164186 - DNA, 75 bp, synthetic construct
  source 1..75: mol_type = other DNA
tgacgcaactggatgaaggcgggattctcgtcttgccggtcggggaagagcaccagtatttgaaacgggtgcgtc

SEQ ID NO: 164187 - DNA, 75 bp, synthetic construct
  source 1..75: mol_type = other DNA
cactggtgacaccctgtgtgacccggatgcgccgatcattctggagcgtatggaattccctgagccggtaatctc

SEQ ID NO: 164188 - DNA, 75 bp, synthetic construct
  source 1..75: mol_type = other DNA
tacgcgacggtttattagttcgtcgaacctgctgccagcgttaccgcctgccagatgtgcaacagtgcggcgact

SEQ ID NO: 164189 - DNA, 75 bp, synthetic construct
  source 1..75: mol_type = other DNA
ttctctgctggcggtctattccgatcatatctatcgcaaccaaccaacgatgatccgcgagaacaaaccgctgat

SEQ ID NO: 164190 - DNA, 75 bp, synthetic construct
  source 1..75: mol_type = other DNA
ttatccgcgagaacaaaccgctgatctcgctatgggcacaatggtatatcggcctgatggtgccgccattaatgc

SEQ ID NO: 164191 - DNA, 75 bp, synthetic construct
  source 1..75: mol_type = other DNA
atgtgcgcttttttattgagcttagtgcagtctgcactggccaccagctttaccgaatatctgccaatgagtggc

SEQ ID NO: 164192 - DNA, 75 bp, synthetic construct
  source 1..75: mol_type = other DNA
agaaaagtgggcgttgcaggcgtaacgcttgagaagatgccaaatgaagaggattactggcgattaaccgctaag

SEQ ID NO: 164193 - DNA, 75 bp, synthetic construct
  source 1..75: mol_type = other DNA
tcacataagtggaaggaaaacgaacaaggacgcaaaaaaagcggatatagtcaatcgattgagcatataaacaaa

SEQ ID NO: 164194 - DNA, 75 bp, synthetic construct
  source 1..75: mol_type = other DNA
tggtgttcagccgcagtctgagaccgtatggcgtcaggcaaacaaatataaagttccgcgtattgcgttcgttaa

SEQ ID NO: 164195 - DNA, 75 bp, synthetic construct
  source 1..75: mol_type = other DNA
accgacccgtttgtcggtaacctgaccttcttccgtgtttactccggtgtggttaactctggtgatatcgtactg

SEQ ID NO: 164196 - DNA, 75 bp, synthetic construct
  source 1..75: mol_type = other DNA
gttgatgcaaattacagagaaagaattggggatcaaccaggtacaataaaaaacattgtacaatatttatttgca

SEQ ID NO: 164197 - DNA, 75 bp, synthetic construct
  source 1..75: mol_type = other DNA
tgggatatgttacgcgagaccaatccgtccagaatgcccaaattcgatgcggttgttgccaatccgccattcagc

SEQ ID NO: 164198 - DNA, 75 bp, synthetic construct
  source 1..75: mol_type = other DNA
cgtatgaatatgcttctgcatggagtgaaagattcggaatttgatattttccacggagatacccttctcaacgat

SEQ ID NO: 164199 - DNA, 75 bp, synthetic construct
  source 1..75: mol_type = other DNA
ctctcttcaccaggatgaagccgatcctgaactgatgtttcaggattatgagggattcccggggaatatggcctc

SEQ ID NO: 164200 - DNA, 75 bp, synthetic construct
  source 1..75: mol_type = other DNA
tgggacatgttgcgcgagaccaatccggctaagatgccgaggttcgacgctgtggtggctaacccgccgtttagc

SEQ ID NO: 164201 - DNA, 75 bp, synthetic construct
  source 1..75: mol_type = other DNA
gctctgcgaaatctgaggagaaagaggattcacttgttgacggcgacggcatgtccttacttgtaaaacctggcg

SEQ ID NO: 164202 - DNA, 75 bp, synthetic construct
  source 1..75: mol_type = other DNA
cagcagaacactttaataagggtaaacggcagaatcagatttcttctgatcatataaaaaaaattattgatgctt

SEQ ID NO: 164203 - DNA, 75 bp, synthetic construct
  source 1..75: mol_type = other DNA
ttacgtttataagtatgatgtttaaaagtgtattgtttggagtaaatggcgatagggaaatgcaggtcaaagaag

SEQ ID NO: 164204 - DNA, 75 bp, synthetic construct
  source 1..75: mol_type = other DNA
atgaaaaagatcatattacttacaatcatatcaagtatcgtctctctggctgggtgcaaagaagaagccaaaacg

SEQ ID NO: 164205 - DNA, 75 bp, synthetic construct
  source 1..75: mol_type = other DNA
atgtcagaaaacagggagtgcatcagaaaattgtaaaaacgctaatgaagcccactggcaaatacagcaactaaa

SEQ ID NO: 164206 - DNA, 75 bp, synthetic construct
  source 1..75: mol_type = other DNA
tgaatgccatatcaactgggcctgggttgaaggcttccgcctggcacgggatgaaggctgcgaagaggcttatcg

SEQ ID NO: 164207 - DNA, 75 bp, synthetic construct
  source 1..75: mol_type = other DNA
aggaggcttttgcggttgagttcgtcagtgataccggcctgctggctgacgtgccggagacggtggcgctctatt

SEQ ID NO: 164208 - DNA, 75 bp, synthetic construct
  source 1..75: mol_type = other DNA
ggcacggcaccgcccggtgtcgcagaacatgtgactatggaggattcgggaatgtctgttgttgcacctgctgta

SEQ ID NO: 164209 - DNA, 75 bp, synthetic construct
  source 1..75: mol_type = other DNA
tggatcgggatcttgaacgtaaaatatatgcgttcactgactacctgaaagacaaaagcattaacggatttatcg

SEQ ID NO: 164210 - DNA, 75 bp, synthetic construct
  source 1..75: mol_type = other DNA
atgaagtggtttaagcatgatagcgatgcgaaccgcgatgaaaaacttcaaaacgtcttgcttgattatggcctg

SEQ ID NO: 164211 - DNA, 75 bp, synthetic construct
  source 1..75: mol_type = other DNA
caaatgtcgtgatgctaagccattcgtagaactactgacagaaacaaaaacacgtaaagcgtatacggagaatga

SEQ ID NO: 164212 - DNA, 75 bp, synthetic construct
  source 1..75: mol_type = other DNA
catcatacactaaatcagtaagttggcagcatcacctaaatcttcatgcacataaaaaagtttcttcattactcg

SEQ ID NO: 164213 - DNA, 75 bp, synthetic construct
  source 1..75: mol_type = other DNA
aatagcgcagggaatactgaatggtgacccgatagcaagttttgttgggcagggaaatttttacagttctgaacg

SEQ ID NO: 164214 - DNA, 75 bp, synthetic construct
  source 1..75: mol_type = other DNA
atgcacataaaaaaaatttcttcattactcgttcatcactgtagcagagatattcctgtttttcaggaagttgcg

SEQ ID NO: 164215 - DNA, 75 bp, synthetic construct
  source 1..75: mol_type = other DNA
gagtcgttctcagaatggaacagaaaattatatgtaaatgcatcaattataatgtctgatttactgagaagagca

SEQ ID NO: 164216 - DNA, 75 bp, synthetic construct
  source 1..75: mol_type = other DNA
ggttttgggtagcttgctattacaaggaatgagccaacaggatcgcagttttgcctctcgcgtgagcatggaaag

SEQ ID NO: 164217 - DNA, 75 bp, synthetic construct
  source 1..75: mol_type = other DNA
ccagacgatgtgttgttcatcaacgccgccgagcattatgagaagggtaaacgccagagccagttgctcaggacg

SEQ ID NO: 164218 - DNA, 75 bp, synthetic construct
  source 1..75: mol_type = other DNA
gcctatcaacatttgccgggtaactaagtttgatgggtatctggctgatgctgaacaatggcgaagagttacagc

SEQ ID NO: 164219 - DNA, 75 bp, synthetic construct
  source 1..75: mol_type = other DNA
tatacacttcgtgtattgtcgaaaatgaacaaaaaatggtcaatcaggatggcgcaaacgaagcggcgttgcgtt

SEQ ID NO: 164220 - DNA, 75 bp, synthetic construct
  source 1..75: mol_type = other DNA
aatgtctggtttactgagaagagcatgttatcttccttcaaaaagaaagtttttgtctgatggtgagaaccagtt

SEQ ID NO: 164221 - DNA, 75 bp, synthetic construct
  source 1..75: mol_type = other DNA
tgggcgggacctccgctgagcgggaagtttctctgaattctggcgcagcggtgttagccgggctgcgtgaaggcg

SEQ ID NO: 164222 - DNA, 75 bp, synthetic construct
  source 1..75: mol_type = other DNA
aggaaagggcgtcaccggtgaacgtatccgcattaagccgcatgtttatcgcgaactggttaaccgtctccacga

SEQ ID NO: 164223 - DNA, 75 bp, synthetic construct
  source 1..75: mol_type = other DNA
cccccggacaaaccgctaccggcagtggacttgggctatcgattgtccagcgaatcgccaaattgcatggcatga

SEQ ID NO: 164224 - DNA, 75 bp, synthetic construct
  source 1..75: mol_type = other DNA
atgactgataaaatcgcggttctgttgggcggaacctccgcagagcgggaagtttctctgaattctggcgctgct

SEQ ID NO: 164225 - DNA, 75 bp, synthetic construct
  source 1..75: mol_type = other DNA
agtttctctgaattctggcgcagcggtgttagccgggctgcgtgaaggcggtattgacgcgtatcctgtcgaccc

SEQ ID NO: 164226 - DNA, 75 bp, synthetic construct
  source 1..75: mol_type = other DNA
gctttcaatggataaactacgcagcaaattgctgtggcagggagcaggtttaccggtagcgccgtgggtggcatt

SEQ ID NO: 164227 - DNA, 75 bp, synthetic construct
  source 1..75: mol_type = other DNA
gatggcgataatggagaagatattccctacagctatcaacgggaaggttttgctaatgggcaactggtaggtgaa

SEQ ID NO: 164228 - DNA, 75 bp, synthetic construct
  source 1..75: mol_type = other DNA
cgacgcagctcacgaactacgtagcccgttaacggcgctgaaagtgcaaaccgaagttgcgcagctctctgacga

SEQ ID NO: 164229 - DNA, 75 bp, synthetic construct
  source 1..75: mol_type = other DNA
gatgacggcgggacaaataacaggagcaacgtcaagttacgcgcggaaatatgccttgaatggcttattctgcat

SEQ ID NO: 164230 - DNA, 75 bp, synthetic construct
  source 1..75: mol_type = other DNA
tgggctgtcgattgtccagcggatcgccaaattgcatggcatgaatgttgtgtttgggaatgcgaaacaaggtgg

SEQ ID NO: 164231 - DNA, 75 bp, synthetic construct
  source 1..75: mol_type = other DNA
tccgctggtcgagtcgctgaatcaactgttcgcccgtacgcatgcaatgatggttcgtgagcgacgctttacctc

SEQ ID NO: 164232 - DNA, 75 bp, synthetic construct
  source 1..75: mol_type = other DNA
ccgtaagagacaacggccccggcgtgacgccagaggcgctggcgcgaattggcgaacgtttctaccgcccacctg

SEQ ID NO: 164233 - DNA, 75 bp, synthetic construct
  source 1..75: mol_type = other DNA
cggcattgttggcgcgtccggcaccggcagccaggaactgagtgtccgcattcatgaatttggcggcggtgtttc

SEQ ID NO: 164234 - DNA, 75 bp, synthetic construct
  source 1..75: mol_type = other DNA
ggcaagccgcatccaatgattgaccccaccaaccgcatcagccggttgatcgaagaagcgcgcgatccagaagtg

SEQ ID NO: 164235 - DNA, 75 bp, synthetic construct
  source 1..75: mol_type = other DNA
agcaaagaggcggcgctgaaagcggtaatgctctccggcgtgaaacaagaacatctcgacctgcataccttgaac

SEQ ID NO: 164236 - DNA, 75 bp, synthetic construct
  source 1..75: mol_type = other DNA
aatggcggtgctggacggaaaatccgtcacttttaatggtcagcagatgaccatggaaaacttatctgagatccg

SEQ ID NO: 164237 - DNA, 75 bp, synthetic construct
  source 1..75: mol_type = other DNA
ccaccaaccgtatcagccgcttgatcgaagaggcgcgcgatccagaagtggcggtgatcgtgatggattttgtgc

SEQ ID NO: 164238 - DNA, 75 bp, synthetic construct
  source 1..75: mol_type = other DNA
cggtattgttggcgcatctggcaccggcagtcaggagttgagcgtccgcattcatgaatttggcggcggcgtttc

SEQ ID NO: 164239 - DNA, 75 bp, synthetic construct
  source 1..75: mol_type = other DNA
atgatgcggagtggttgcgctttcttgaggtagccggacaagctgatattcgtactcgttttatgctggcactgg

SEQ ID NO: 164240 - DNA, 75 bp, synthetic construct
  source 1..75: mol_type = other DNA
ccaggtatgctggacaacgtgctcttgtttctccttaagtggggaattgtggcttcaggtctggcgttttttatc

SEQ ID NO: 164241 - DNA, 75 bp, synthetic construct
  source 1..75: mol_type = other DNA
tgggcggaacctctgcagagcgggaagtgtctctgaattctggcgcggctgtgttagccgggctgcgtgagggcg

SEQ ID NO: 164242 - DNA, 75 bp, synthetic construct
  source 1..75: mol_type = other DNA
agcaaagaggcggcgctgaaagcggtaatgctctccggcgtgaaacaggaacatctcgatctgcataccctgaac

SEQ ID NO: 164243 - DNA, 75 bp, synthetic construct
  source 1..75: mol_type = other DNA
acgttcgccgacagagccgtttgtcatcaggctggaaaactgccatgcaacggcagttggtaaaattgttaccct

SEQ ID NO: 164244 - DNA, 75 bp, synthetic construct
  source 1..75: mol_type = other DNA
aaggtaaccggagtgaatgccggccggttaggcattgcactgctggacaccgatggtagcagtctgctgaaaccc

SEQ ID NO: 164245 - DNA, 75 bp, synthetic construct
  source 1..75: mol_type = other DNA
cttaacgaagagaacgatctcggcccaatggcacgttttgatttgcgtgatgaactgcatcatcaggtggaaaga

SEQ ID NO: 164246 - DNA, 75 bp, synthetic construct
  source 1..75: mol_type = other DNA
ccgcttccgcttcgatgacaaagagggtcgcgggacgtggttctgtaaccagtgcggcgcgggtgacggactgaa

SEQ ID NO: 164247 - DNA, 75 bp, synthetic construct
  source 1..75: mol_type = other DNA
ctggcagctctttcttgaggtgaccggacccggtggcagcggtaaaagtattctggccgaaattgcgaccctgct

SEQ ID NO: 164248 - DNA, 75 bp, synthetic construct
  source 1..75: mol_type = other DNA
aaagcccgttcgacaccatgagcgaagcggagttttccgccatgagtaccagcgaaaaggccatgcgtatctatg

SEQ ID NO: 164249 - DNA, 75 bp, synthetic construct
  source 1..75: mol_type = other DNA
ggatgcggtctcggttgacccgaaataccgcgatgcgtactccacccatattccggcggtgatactggccgtaaa

SEQ ID NO: 164250 - DNA, 75 bp, synthetic construct
  source 1..75: mol_type = other DNA
cagggcatacaaaccaatctcgcgctaagagaggaaagcaacgccgactggctgccgaaatgtgatgaacccata

SEQ ID NO: 164251 - DNA, 75 bp, synthetic construct
  source 1..75: mol_type = other DNA
ccagagcaaagccgttgtggccgcagatgcctgtgagggcgttgttgccctgccgccggtgttcggtgactggaa

SEQ ID NO: 164252 - DNA, 75 bp, synthetic construct
  source 1..75: mol_type = other DNA
gactgaattacgagaagcgccataccaaacaggggatacagaccaacctgacgctgaaagaggaaagctacggcg

SEQ ID NO: 164253 - DNA, 75 bp, synthetic construct
  source 1..75: mol_type = other DNA
gaagccacccggaaagccatttatgacgctatccggccaccggcgcaaagtccgttcgacaccatgagcgaggcg

SEQ ID NO: 164254 - DNA, 75 bp, synthetic construct
  source 1..75: mol_type = other DNA
ccggccaccggcaacgcctacctcacccgcaagggtttccccgctctggaatgtctgacgctcaccgtcatgcat

SEQ ID NO: 164255 - DNA, 75 bp, synthetic construct
  source 1..75: mol_type = other DNA
tatgcagaaattcagcgacccgatgaccgcccgcgcactgctccagtcgcagcagaattccgatgaggcgctcaa

SEQ ID NO: 164256 - DNA, 75 bp, synthetic construct
  source 1..75: mol_type = other DNA
ctgattattccgcagcaggatacaccggcgcgccgtctgattggctttcgcaatggggtactcgatacccaaagt

SEQ ID NO: 164257 - DNA, 75 bp, synthetic construct
  source 1..75: mol_type = other DNA
caaacaggggatacagaccaacctgacgctgaaagaggaaagctacggcgactggctgccaaaatgtgacgaccc

SEQ ID NO: 164258 - DNA, 75 bp, synthetic construct
  source 1..75: mol_type = other DNA
cgtaattaccgtaaatacctctatcacgcctatctggcctacatggaggcaaacggctaccggaatgtactcagt

SEQ ID NO: 164259 - DNA, 75 bp, synthetic construct
  source 1..75: mol_type = other DNA
ctcgcccggtcactgcttcagtcccagcagaactcagacgaggcactgaacatcaaacgggatgccgacccgacg

SEQ ID NO: 164260 - DNA, 75 bp, synthetic construct
  source 1..75: mol_type = other DNA
ctgaccgggacctgaacggtgacggccagcggaaggcgcagaaggccgctgaagcctgcaacgccacggtggcgc

SEQ ID NO: 164261 - DNA, 75 bp, synthetic construct
  source 1..75: mol_type = other DNA
caggaaaaatggagcggtgacggggcaggactcaaggccattaccggcggggatgcggtctccgttgacccgaaa

SEQ ID NO: 164262 - DNA, 75 bp, synthetic construct
  source 1..75: mol_type = other DNA
ccatgatgctgaaagagtacggcctgaattatgagaaacggcacaccaagcaggggatacaaaccaatctgtcgc

SEQ ID NO: 164263 - DNA, 75 bp, synthetic construct
  source 1..75: mol_type = other DNA
ccctgccgccactttttcacggaatgtggctgacttattccagcgtctgcgcgccccgttctcgtccgggaaaat

SEQ ID NO: 164264 - DNA, 75 bp, synthetic construct
  source 1..75: mol_type = other DNA
gacgcctgtgagggcgttgttgctctgccgccggtgttcggtgactggaatgatgcgtttatacagtacggcgag

SEQ ID NO: 164265 - DNA, 75 bp, synthetic construct
  source 1..75: mol_type = other DNA
ctacggcgaagcgctggctgtggatgcgaacggccagctcctgtcccgctatgaaaacggcatctggaaaaatat

SEQ ID NO: 164266 - DNA, 75 bp, synthetic construct
  source 1..75: mol_type = other DNA
ccggcctgtcagattgtgctcgccgccgaccgtgaccttaacggtgacggccagaacaaagccgcggcggccgca

SEQ ID NO: 164267 - DNA, 75 bp, synthetic construct
  source 1..75: mol_type = other DNA
caccggcctgacggtgcataacctgaccggcgatgaggtgtgggttgccctgtcgtcctctaatcttccttccct

SEQ ID NO: 164268 - DNA, 75 bp, synthetic construct
  source 1..75: mol_type = other DNA
ccagaacaaagccgcggcggccgcagaagcctgtgagggcgttgttgccctgccgccggtgttcggtgactggaa

SEQ ID NO: 164269 - DNA, 75 bp, synthetic construct
  source 1..75: mol_type = other DNA
tgctcccgcagaccaacgggatgtttatagggaatgccagcatcatcccgcgtaattatcgtaaatatctctatc

SEQ ID NO: 164270 - DNA, 75 bp, synthetic construct
  source 1..75: mol_type = other DNA
cagacaaacagtacaaggcgaaaaacggcccgctggactgcgtacagaaaaattaccacgttgccgaaagcacac

SEQ ID NO: 164271 - DNA, 75 bp, synthetic construct
  source 1..75: mol_type = other DNA
cagcgaaccggcgctgattgcgctgcatagcctgctgggtcgaatcatgaaaaaccagttcggtggctggaatct

SEQ ID NO: 164272 - DNA, 75 bp, synthetic construct
  source 1..75: mol_type = other DNA
agaagactacgccaaccgtctgcgtaagaacctcaaaaaattcgagaagtgggcgcgtcaggaaggcattgaatg

SEQ ID NO: 164273 - DNA, 75 bp, synthetic construct
  source 1..75: mol_type = other DNA
gaaaaacagctacagcagcttggttatgcccgggtactgatactggatgagataggctatctgccgatgacccgc

SEQ ID NO: 164274 - DNA, 75 bp, synthetic construct
  source 1..75: mol_type = other DNA
gagcatcgtgctgacgtcaaataaagggttcgccgactggggagagatgttcggcgataacgtgctggcaacggc

SEQ ID NO: 164275 - DNA, 75 bp, synthetic construct
  source 1..75: mol_type = other DNA
gaagatgcgtttgatgttcagcgcgatcatctggcgctgatgaaagatttgaaacgtctgctgcgtgcaggtggg

SEQ ID NO: 164276 - DNA, 75 bp, synthetic construct
  source 1..75: mol_type = other DNA
gattcaacgtgcgcgcactaacgcccgtcttgcggggattggtgaactgatcacctttgaggtgaaagatgtcgc

SEQ ID NO: 164277 - DNA, 75 bp, synthetic construct
  source 1..75: mol_type = other DNA
gatccggctggcagccaggaacaccgctgctcgatccaatgtgtggttccggtacgttgctgattgaagcggcga

SEQ ID NO: 164278 - DNA, 75 bp, synthetic construct
  source 1..75: mol_type = other DNA
caatgaaagtcaaagatgcgatcgttgatgccttcacgcggaaaaatctaccgcgtccaaatgttgatcgtgatg

SEQ ID NO: 164279 - DNA, 75 bp, synthetic construct
  source 1..75: mol_type = other DNA
ttcagcgcgatcatctggcgctgatgaaagatttgaaacgtctgctgcgtgcaggtgggacgatcatgttctcga

SEQ ID NO: 164280 - DNA, 75 bp, synthetic construct
  source 1..75: mol_type = other DNA
ggccccggaggaagcggcaaaagtatcctggctgaaatcgcaaccatgctggcaggtgaggataacgccacctcg

SEQ ID NO: 164281 - DNA, 75 bp, synthetic construct
  source 1..75: mol_type = other DNA
gtcgctgcgctgtttcagcgcctcgacgcacctttttcatccgcgaaaattgcgtctctcgtggaaaccctcaaa

SEQ ID NO: 164282 - DNA, 75 bp, synthetic construct
  source 1..75: mol_type = other DNA
acaggagaagccgtcatggtggcattttcgtcggtcaactttctttctctggccagcgttgcccataacaagtat

SEQ ID NO: 164283 - DNA, 75 bp, synthetic construct
  source 1..75: mol_type = other DNA
agttgatttcacgccaccggtaaatggggaaacgcttgaaactcatgccccggcattctggcgctggctggacag

SEQ ID NO: 164284 - DNA, 75 bp, synthetic construct
  source 1..75: mol_type = other DNA
catcaaacgtgatgccgattcagcgtttgatttttgcggctaccttgaagtcttacctgataccacgggcatgtt

SEQ ID NO: 164285 - DNA, 75 bp, synthetic construct
  source 1..75: mol_type = other DNA
gccttacgttgccccgcgtcatgaaattctctgtcgcgaacgccgtgcgaaagcggcaagcagtgtggatctgag

SEQ ID NO: 164286 - DNA, 75 bp, synthetic construct
  source 1..75: mol_type = other DNA
acgttatatcggtgtctccggcgtgttgctgaaatccgatctctacctgacgctggggatctccgggcagatcca

SEQ ID NO: 164287 - DNA, 75 bp, synthetic construct
  source 1..75: mol_type = other DNA
gcgacggccaacaacagtggcaataccaccgttgacggacagggttcgaccggagctgaaatcgcgggtaacaac

SEQ ID NO: 164288 - DNA, 75 bp, synthetic construct
  source 1..75: mol_type = other DNA
acctgttatcacttaacccattactggcctgctgccgtagatattcccgtggcgagcgataacccagtgcactat

SEQ ID NO: 164289 - DNA, 75 bp, synthetic construct
  source 1..75: mol_type = other DNA
aagccgtttggtattggcgaattgcaggcccgtctgcgcgtcgctttacgccgccactccgccactccgccaccg

SEQ ID NO: 164290 - DNA, 75 bp, synthetic construct
  source 1..75: mol_type = other DNA
gtatggatccgtcgcagaatgcgttaattcattgtgaaacgggggagatgcgacgcctcggcgaatatcattttg

SEQ ID NO: 164291 - DNA, 75 bp, synthetic construct
  source 1..75: mol_type = other DNA
gcaggcggcaatgttgatccggatattacgccagcgctggcagcggcgttctctgcaggtcataacattgttgtt

SEQ ID NO: 164292 - DNA, 75 bp, synthetic construct
  source 1..75: mol_type = other DNA
ttaccgtcgatttagccgcccgcgttatccaccgcggcgaggaagaggtgcatctcacaccgattgagttccgcc

SEQ ID NO: 164293 - DNA, 75 bp, synthetic construct
  source 1..75: mol_type = other DNA
caaaaactggagcaagatcccgcccgcccccgccattttattactgaaaccggtattgggtatcggtttatgcca

SEQ ID NO: 164294 - DNA, 75 bp, synthetic construct
  source 1..75: mol_type = other DNA
cggaaaagtactcacccagcgccagctccttaaccaggtgtgggggccaaacgcggtcgaacacagtcattattt

SEQ ID NO: 164295 - DNA, 75 bp, synthetic construct
  source 1..75: mol_type = other DNA
gatccgctggtgaaattttctgatgttaccgtcgatttagccgcccgcgtgattcaccgcagtgaggaagaggtg

SEQ ID NO: 164296 - DNA, 75 bp, synthetic construct
  source 1..75: mol_type = other DNA
aaagcttaaagcagcatacagcctgaaagaactgtccgacgctatccgggcatggaaacagcaaaaaaataccgg

SEQ ID NO: 164297 - DNA, 75 bp, synthetic construct
  source 1..75: mol_type = other DNA
ctcctcaaccaggtgtggggaccaaacgctgtcgaacacagtcactatttgcgtatttatatgggacacctgcga

SEQ ID NO: 164298 - DNA, 75 bp, synthetic construct
  source 1..75: mol_type = other DNA
tctcttccggcgtaacggcagcgggtatcacagcggcgaccaccacgcttgcaggcggcaatgttgatccggata

SEQ ID NO: 164299 - DNA, 75 bp, synthetic construct
  source 1..75: mol_type = other DNA
tgcgccaatgctggcctccggtttgtctgcaccgcttgtcattcagtctgttttctctgatgaagaagctgcgac

SEQ ID NO: 164300 - DNA, 75 bp, synthetic construct
  source 1..75: mol_type = other DNA
tcagtacctacacggtgaacgcgcagggcgtggctgatgtctcgctactggatatcacgtccatcagaacgctgg

SEQ ID NO: 164301 - DNA, 75 bp, synthetic construct
  source 1..75: mol_type = other DNA
ccagaaaaaagccgccgcagccgcagatgcgtgtgagggtgttgttgccctgccgccggtcttcggtgactggaa

SEQ ID NO: 164302 - DNA, 75 bp, synthetic construct
  source 1..75: mol_type = other DNA
tcatggccgaaatagccaccctgctggccgggaggataacgccacgtcggccaccatcgagacgctggaatcccc

SEQ ID NO: 164303 - DNA, 75 bp, synthetic construct
  source 1..75: mol_type = other DNA
cggagttctggcgctggctcgaccgcgccgccggtggcaaaccggaaaaacgcgacgtgattctggccgcgctgt

SEQ ID NO: 164304 - DNA, 75 bp, synthetic construct
  source 1..75: mol_type = other DNA
cgaacattgaaaatgacggttgaagctgttaccaatctgttcgatctgatgccaaatcttgcgccggaagcaaag

SEQ ID NO: 164305 - DNA, 75 bp, synthetic construct
  source 1..75: mol_type = other DNA
gaattatgagaagcggcacaccaagcaggggatacagaccaatctgtcgctgaaagaggaaagctacggcgactg

SEQ ID NO: 164306 - DNA, 75 bp, synthetic construct
  source 1..75: mol_type = other DNA
tgaacgccgtgaccggcaatctgtcgccggttgccccggaagtgattgcggccgcagaggctgaaaccgatgccg

SEQ ID NO: 164307 - DNA, 75 bp, synthetic construct
  source 1..75: mol_type = other DNA
tgccgatgtggttttatcgcgatcttatttatgtgccgaagtatggaagaaccgcattgtcggcggaaacagcct

SEQ ID NO: 164308 - DNA, 75 bp, synthetic construct
  source 1..75: mol_type = other DNA
gccgacggcgatccatgcattgcgcgttgctatcgacgatgatggcaaacaacagaacattattaaaacaattcc

SEQ ID NO: 164309 - DNA, 75 bp, synthetic construct
  source 1..75: mol_type = other DNA
cagaacattattaaaacaattccgaagaaagggtacctgtgcaataaagagtatgtgtcttttccggagtcatcg

SEQ ID NO: 164310 - DNA, 75 bp, synthetic construct
  source 1..75: mol_type = other DNA
cggcgtaaagccagtgatgacgaggcctgtggcgaaatcgaaacggctcatccgggatatctggagtcgcaggac

SEQ ID NO: 164311 - DNA, 75 bp, synthetic construct
  source 1..75: mol_type = other DNA
acactgactgggcaaaaaggacgttatgacgataacttcagattgaatgtggtcagagatgttattgataattct

SEQ ID NO: 164312 - DNA, 75 bp, synthetic construct
  source 1..75: mol_type = other DNA
aagatgctttcattcgaaaaaataaaaatagtattcctgtgccggataaaagcgccatttcagcaccaccactac

SEQ ID NO: 164313 - DNA, 75 bp, synthetic construct
  source 1..75: mol_type = other DNA
tcgacgccctgaagatcccggcatttatcattaccctggcggggatgttctttttgcgcggcgtcagctatctcg

SEQ ID NO: 164314 - DNA, 75 bp, synthetic construct
  source 1..75: mol_type = other DNA
ggtattttcctcgcacatcgtacccgttttggtaatcaggtatatgccattggtggcaacgcgacttcggcaaac

SEQ ID NO: 164315 - DNA, 75 bp, synthetic construct
  source 1..75: mol_type = other DNA
gtggattaacggtgctgtgggagaatcgccagagttcgccagtaatgagagtgagtccggaaattagactaaaag

SEQ ID NO: 164316 - DNA, 75 bp, synthetic construct
  source 1..75: mol_type = other DNA
ctcaaggtgagtttgttcttttcaccagtgctgatggtcaaacccgcgttgagtgtcgttttgagtctgacacct

SEQ ID NO: 164317 - DNA, 75 bp, synthetic construct
  source 1..75: mol_type = other DNA
ccactatacgcatttatatgctctccaccgggctggcaacactggcggggatagtcttctcgatttatacccagg

SEQ ID NO: 164318 - DNA, 75 bp, synthetic construct
  source 1..75: mol_type = other DNA
tgatcaccatcggcgtctttgtgctgggttatctctactgtctgacgcagtttcccggttttgcttccacaagag

SEQ ID NO: 164319 - DNA, 75 bp, synthetic construct
  source 1..75: mol_type = other DNA
ccgtgaaggctgcccgcggtcactgggcgcggattttgccagcgctgggtgtgaacatactgaaaaattgccatc

SEQ ID NO: 164320 - DNA, 75 bp, synthetic construct
  source 1..75: mol_type = other DNA
ggctgcccgtttgcttgagaaatcccgccagaccactggcaatgcctatctgacgggtaaagggttttctgctct

SEQ ID NO: 164321 - DNA, 75 bp, synthetic construct
  source 1..75: mol_type = other DNA
aacggcacgttccacccgcacagtccgtcacactggatgcgcaccctgtgcgatgtggatttcaccccgccggtg

SEQ ID NO: 164322 - DNA, 75 bp, synthetic construct
  source 1..75: mol_type = other DNA
ctattcgcatttatatgctctccaccggactggcaacactggcggggattgtcttctcgatttatacccaggccg

SEQ ID NO: 164323 - DNA, 75 bp, synthetic construct
  source 1..75: mol_type = other DNA
ggccatcaccggcggcgatgcggtgtccgttgacccgaaataccgggatgcgtactccacgcacatcccggcggt

SEQ ID NO: 164324 - DNA, 75 bp, synthetic construct
  source 1..75: mol_type = other DNA
gggggcgggagttctttaagaaggatgtggattgcggaaggttacgccacggcgcttaccattcatcatctgaca

SEQ ID NO: 164325 - DNA, 75 bp, synthetic construct
  source 1..75: mol_type = other DNA
caaacagcaccgcgctatcgcggagcgtcgtcacatccagactgaaatcaaccgcagactttcccgcgcattccg

SEQ ID NO: 164326 - DNA, 75 bp, synthetic construct
  source 1..75: mol_type = other DNA
ggtactgcgaacctcgtacgtctcgccacccacagtttcgcagctctggatggtgagttttcacaacttactaca

SEQ ID NO: 164327 - DNA, 75 bp, synthetic construct
  source 1..75: mol_type = other DNA
tggtggggcgtatggggccgacttcggtcgggccgggttctgtagttgccggttgtggaaaccctgtacgtctca

SEQ ID NO: 164328 - DNA, 75 bp, synthetic construct
  source 1..75: mol_type = other DNA
gtgacaaacgttctgattgttgaagatgaacaggctattcgtcggtttctgcgcacggcgctggagggcgatggt

SEQ ID NO: 164329 - DNA, 75 bp, synthetic construct
  source 1..75: mol_type = other DNA
taaccctccgcgaactttaaaaccgttttcacaggccttagtcagaaatcttggcttaggcgttagcctagaaga

SEQ ID NO: 164330 - DNA, 75 bp, synthetic construct
  source 1..75: mol_type = other DNA
tgtggaaaccctgtacgtctcaccaccccgagttttccacctctggatggtgagtttttacaacttactaccgca

SEQ ID NO: 164331 - DNA, 75 bp, synthetic construct
  source 1..75: mol_type = other DNA
tgatgcgttcgttcagaaaggcgaagaggcgacgcggaaagcgatttatgacgccatccggccaccggctgacag

SEQ ID NO: 164332 - DNA, 75 bp, synthetic construct
  source 1..75: mol_type = other DNA
agtgtggtgccggtgacggcctgaaactggttgaaaaggtgtttggtgtctccccgtccgacgcggccacaaagg

SEQ ID NO: 164333 - DNA, 75 bp, synthetic construct
  source 1..75: mol_type = other DNA
ccggtgatatggttgtcccgctgtatgatgataccggcgcactggttaaccttcagattattaatgctgacggcc

SEQ ID NO: 164334 - DNA, 75 bp, synthetic construct
  source 1..75: mol_type = other DNA
gcaaaattgatcaggcggcaatggttcaagaggttatccaacgtatgtcgcaatctacatcacagaagtcgaggg

SEQ ID NO: 164335 - DNA, 75 bp, synthetic construct
  source 1..75: mol_type = other DNA
gccaacggccagcttctgtcccgctatgaaaatggtgtctggaagtgctgccgccacaggactttgcccgggatg

SEQ ID NO: 164336 - DNA, 75 bp, synthetic construct
  source 1..75: mol_type = other DNA
cggcacggcgtctgattggctttcgcaacggcgtactcgataccgccaccggcacattcagcccgcaccataaat

SEQ ID NO: 164337 - DNA, 75 bp, synthetic construct
  source 1..75: mol_type = other DNA
ctgatattgaaaatgagctacgagagtcgatcagacaaacgtcatcaggttcgtatctgaatatctcaccggagc

SEQ ID NO: 164338 - DNA, 75 bp, synthetic construct
  source 1..75: mol_type = other DNA
tttgccacacaccaaaggagagtgggcatttaagcggatgcccattacgcttgaaccctggcagttgttctgtat

SEQ ID NO: 164339 - DNA, 75 bp, synthetic construct
  source 1..75: mol_type = other DNA
tgctacgacaagcggcgggaagttatcgagatgctcaacggttcggtacccaacgatgaactgttcgggatcatc

SEQ ID NO: 164340 - DNA, 75 bp, synthetic construct
  source 1..75: mol_type = other DNA
gcagaaaaagacgcagacggaggagtgccatcacgaagccctcaggcggaaaacaacaccccggaaacaatccgc

SEQ ID NO: 164341 - DNA, 75 bp, synthetic construct
  source 1..75: mol_type = other DNA
tccggattccggcgtttttctgaaatatatattgaggtgcccaggaaaaatgggaaatccgcaattgcagctgcc

SEQ ID NO: 164342 - DNA, 75 bp, synthetic construct
  source 1..75: mol_type = other DNA
cagttaactgtgcttgcctgtcaaagacaccttgatgatttggaacgtgcgaaggatcctgcctggccttaccgg

SEQ ID NO: 164343 - DNA, 75 bp, synthetic construct
  source 1..75: mol_type = other DNA
ccagcgttaatgcggcaaaaggcagggagaaaggtaacggtactgagtggactgaaaccacaacagacagcggta

SEQ ID NO: 164344 - DNA, 75 bp, synthetic construct
  source 1..75: mol_type = other DNA
ctcgctggcgtggtgaaagcggttaaagacaagcaggacgaatttgtctttacagaatttaacccagcacaaaca

SEQ ID NO: 164345 - DNA, 75 bp, synthetic construct
  source 1..75: mol_type = other DNA
ttactccaccattcacatgtattgcaattgagtggtgaaagctatcgattgaaagataaacgacgctcaggtgcc

SEQ ID NO: 164346 - DNA, 75 bp, synthetic construct
  source 1..75: mol_type = other DNA
tgggagtcagcctgtcgctcaccacccagaaatcgaaatcacaacaacattctgaaagtgacacagtatccggca

SEQ ID NO: 164347 - DNA, 75 bp, synthetic construct
  source 1..75: mol_type = other DNA
caggaacagcagcagtggcggtggcgtgggtgtcagtatcggtgcaggtaaaggtgccggtatcagcgcctttgc

SEQ ID NO: 164348 - DNA, 75 bp, synthetic construct
  source 1..75: mol_type = other DNA
ggtggcatgatatccgccggaggtcacagcggacatgcggaaggaacgactcaggccgcagtggcagatggcaca

SEQ ID NO: 164349 - DNA, 75 bp, synthetic construct
  source 1..75: mol_type = other DNA
gcatccctgcacccggaaatacgtcgtaaaaggactgccgggaaaggcgtggtttaccatatcagcgcagccaca

SEQ ID NO: 164350 - DNA, 75 bp, synthetic construct
  source 1..75: mol_type = other DNA
aaaacagcgtcagccattgccgccggttattcggcgaagaccgccagggttaaaggctcgcagctggcaaaagat

SEQ ID NO: 164351 - DNA, 75 bp, synthetic construct
  source 1..75: mol_type = other DNA
gacggcaatcccatcatgacctggtgtatcggcaacgtggtcggcaaaaccattccgggtaacgatgatgtggtg

SEQ ID NO: 164352 - DNA, 75 bp, synthetic construct
  source 1..75: mol_type = other DNA
tgctggcgttgccgggtattatctttgtagtcctccttcccatcattctgtcgctatggatcgcctttctttggg

SEQ ID NO: 164353 - DNA, 75 bp, synthetic construct
  source 1..75: mol_type = other DNA
aaattgcaacgcgccctcgaaaaacatcaactttgtctttattaccagccaataatcggtaatgctgccaactta

SEQ ID NO: 164354 - DNA, 75 bp, synthetic construct
  source 1..75: mol_type = other DNA
gataaccattttttatgctcatcgctgatagcgtctgtaaatggctatacgattgcaccggccgattataagcgt

SEQ ID NO: 164355 - DNA, 75 bp, synthetic construct
  source 1..75: mol_type = other DNA
cgtcagccattgccgccggttattcggcgaagaccgccagggttaaaggctcgcagctggcaaaagatccggagg

SEQ ID NO: 164356 - DNA, 75 bp, synthetic construct
  source 1..75: mol_type = other DNA
tataccgttgacgaaggcgacgactggaccgacccgcaggtacttgaaaaagctaacccgaatatcggtgtgtcg

SEQ ID NO: 164357 - DNA, 75 bp, synthetic construct
  source 1..75: mol_type = other DNA
tccggagatgccaccgtccgcggtgatgtctcctggtattgaatatatggaggatggtcttcccgatccggtgaa

SEQ ID NO: 164358 - DNA, 75 bp, synthetic construct
  source 1..75: mol_type = other DNA
aacgtccttgtcgcggcaaatgccgacgcggtcgaagttcagttggcatgggatttgagcgcatcgacggctgaa

SEQ ID NO: 164359 - DNA, 75 bp, synthetic construct
  source 1..75: mol_type = other DNA
cactggatgcggcctggcgtctggcgcagttcacgcaccataaaaaaggggataccgggaaaaaatcggcaaaag

SEQ ID NO: 164360 - DNA, 75 bp, synthetic construct
  source 1..75: mol_type = other DNA
gaaattattaccaggtcaatggcaagacattaatttgaccctgaaatttgaccctgaagggtgtatcgcccaata

SEQ ID NO: 164361 - DNA, 75 bp, synthetic construct
  source 1..75: mol_type = other DNA
agtaacctggcgaatgccaatgcgcccgccagcagcgaggcgcaggcgtataaagcgcgcagcccggtgtttgcc

SEQ ID NO: 164362 - DNA, 75 bp, synthetic construct
  source 1..75: mol_type = other DNA
agatggcggacatgatgtcggcttcgcgcgattttgaaaccaatgtcgatgtgctcaacaacgtgaaaagtatgc

SEQ ID NO: 164363 - DNA, 75 bp, synthetic construct
  source 1..75: mol_type = other DNA
atgaatattgaattttatgactacggagtcaccgcaaaaatcattgttacctgctggttctgggagttccgtcgc

SEQ ID NO: 164364 - DNA, 75 bp, synthetic construct
  source 1..75: mol_type = other DNA
cgcatcgcttaaagtcggggacaaaaaattgcctgttgtggtcgttgcgtcggtgatgctaccgttgatgtactc

SEQ ID NO: 164365 - DNA, 75 bp, synthetic construct
  source 1..75: mol_type = other DNA
gggtcaccgcaactatcactatttcttgctggttctgggagttccaccgttacttcagagttgtagatgctgcgc

SEQ ID NO: 164366 - DNA, 75 bp, synthetic construct
  source 1..75: mol_type = other DNA
gcgcgatttcgaaaccaatgtcgatgtgctcaacaacgtgaaaagtatgcagcaaagtttgctgaaactgggaga

SEQ ID NO: 164367 - DNA, 75 bp, synthetic construct
  source 1..75: mol_type = other DNA
aagcctcaaccaaagttgctcagaacgcattgatccctatgcgcaagtcaatgcgtgaagacgggatggatgccg

SEQ ID NO: 164368 - DNA, 75 bp, synthetic construct
  source 1..75: mol_type = other DNA
cggcctttcagcgaccattttcaccaccgacgaaacacaggccagacagatggcggcacgtctggaatgcggtgg

SEQ ID NO: 164369 - DNA, 75 bp, synthetic construct
  source 1..75: mol_type = other DNA
gatgcgcgagtcgcctttggtggcgtgaagaagagcggttttgggcgtgaactctcccatttcggcttacatgag

SEQ ID NO: 164370 - DNA, 75 bp, synthetic construct
  source 1..75: mol_type = other DNA
taagagtgatggaggccttttaatgagaaccgtcatctacggtaagagggtcccgatgttacgggcgtttaaagt

SEQ ID NO: 164371 - DNA, 75 bp, synthetic construct
  source 1..75: mol_type = other DNA
tggtttatttatctgcaatatagatgataaagatataggtcggaatattcaggatatacgtaaccttgataagct

SEQ ID NO: 164372 - DNA, 75 bp, synthetic construct
  source 1..75: mol_type = other DNA
aaaaccgttgtaattgaccctgggttcttttctgtagactgggtagctcttgaagagggagaggtccgctatcac

SEQ ID NO: 164373 - DNA, 75 bp, synthetic construct
  source 1..75: mol_type = other DNA
tcaaacagcaagagttgcaaaaaagtaaagtagagcaacttgaaaggcaacaagcacaatataaacaaaaaatag

SEQ ID NO: 164374 - DNA, 75 bp, synthetic construct
  source 1..75: mol_type = other DNA
ctaaaagggatatcacccaacaacctgaagtatctgaaattgtctatcaatatggacaatattcagttcgacact

SEQ ID NO: 164375 - DNA, 75 bp, synthetic construct
  source 1..75: mol_type = other DNA
cagcaagaacaatataaaaataaaattgaaattattgaaaaacaacaaaatagcatcataagcagtaccaaaact

SEQ ID NO: 164376 - DNA, 75 bp, synthetic construct
  source 1..75: mol_type = other DNA
acctgtgcgcttcattaaaactgagcgcagtttcaacgctttggccatcattggctgagcagtctattgctcaga

SEQ ID NO: 164377 - DNA, 75 bp, synthetic construct
  source 1..75: mol_type = other DNA
tctgtcagaccgcattttaaatacatgggtgccagtttcgacctgagtctggtcggacgactggataaggaataa

SEQ ID NO: 164378 - DNA, 75 bp, synthetic construct
  source 1..75: mol_type = other DNA
cgtttcgcctaataacctgaagtatctgaagttgtccatcaatatggccaatatccagttcgacactgttcaacc

SEQ ID NO: 164379 - DNA, 75 bp, synthetic construct
  source 1..75: mol_type = other DNA
ggtattgggaaaaagacgttaatgtgcctggaggcgagtcacttgcgaaacttgcaaagtatttcaacacatcaa

SEQ ID NO: 164380 - DNA, 75 bp, synthetic construct
  source 1..75: mol_type = other DNA
ttttgctgatttaaacacgcaggttgagcaactcagcaagcgttgttcagaggcgttctccagaggagcgtctga

SEQ ID NO: 164381 - DNA, 75 bp, synthetic construct
  source 1..75: mol_type = other DNA
aagagattctctggctggaaacgatgttaaaccgcgcattgcatatttcgacagaaccttcggcggagtggcgtc

SEQ ID NO: 164382 - DNA, 75 bp, synthetic construct
  source 1..75: mol_type = other DNA
actacaaactgggcactcagcttccttatctgttcattatcaacaggctggcgcattacattaaagtgcttcagc

SEQ ID NO: 164383 - DNA, 75 bp, synthetic construct
  source 1..75: mol_type = other DNA
ctgagttcacagataaaacactctccaggaaacccggggcggttcaaagaggggatgatctccattgatggagag

SEQ ID NO: 164384 - DNA, 75 bp, synthetic construct
  source 1..75: mol_type = other DNA
tacccattgctcaacactcattcgagtgttgcatggcccctgctcgatgaactcaacagttacaccatccaaaaa

SEQ ID NO: 164385 - DNA, 75 bp, synthetic construct
  source 1..75: mol_type = other DNA
gccctgcgtgactcggaagattcgcgctacttaggacttactgcgccacgcttcctgcttcgccaaccttattca

SEQ ID NO: 164386 - DNA, 75 bp, synthetic construct
  source 1..75: mol_type = other DNA
gggatcgcctgttcagtggctgtcgcctcagcattgtggtggtggcaggtctatccggtacagcagcaactgtta

SEQ ID NO: 164387 - DNA, 75 bp, synthetic construct
  source 1..75: mol_type = other DNA
ccatctacggatgatgaagtcttgtctcttcaacgccctaagatacccgaatgtctatttaatgaagtagaataa

SEQ ID NO: 164388 - DNA, 75 bp, synthetic construct
  source 1..75: mol_type = other DNA
gtcagcgccgaaggtgacatggaactggataccaaaaactttttacgtatccatgatgcggcggcatcggctggc

SEQ ID NO: 164389 - DNA, 75 bp, synthetic construct
  source 1..75: mol_type = other DNA
gcaatagttattgagtttggttttaattattcatcagcaaaacaaataaagtatgatagtaataaggtaaaggtt

SEQ ID NO: 164390 - DNA, 75 bp, synthetic construct
  source 1..75: mol_type = other DNA
ctatcttttattgttatcgagattttttatgggaaggaatttattgcggcacatcttaatttggatattttagca

SEQ ID NO: 164391 - DNA, 75 bp, synthetic construct
  source 1..75: mol_type = other DNA
gaatttttcgctacgtgccggagaaacgctgggcatcgtaggtgagtctggttcgggtaaatcgcaaactgcatt

SEQ ID NO: 164392 - DNA, 75 bp, synthetic construct
  source 1..75: mol_type = other DNA
gaatccctatatgcgcgtcggtgagcagttgatggaagtgctgatgctgcataagaacatgagcaaagctgaggc

SEQ ID NO: 164393 - DNA, 75 bp, synthetic construct
  source 1..75: mol_type = other DNA
gcagctgtgtccacggtgacagcgggcgataacttcctccttgttgccggtcgtgatattgccagtcaggctgcc

SEQ ID NO: 164394 - DNA, 75 bp, synthetic construct
  source 1..75: mol_type = other DNA
aaatatcatggagtttggaaactgcttccatatctcacaggcaaagctatgccgagagttagatattaaaaagtc

SEQ ID NO: 164395 - DNA, 75 bp, synthetic construct
  source 1..75: mol_type = other DNA
acacggaaactggattacgcgttgctaggttgggctgtctcagcaaaccttggaagagaatgggtagcacgtatc

SEQ ID NO: 164396 - DNA, 75 bp, synthetic construct
  source 1..75: mol_type = other DNA
acgctgggtatcgttggtgaatctggttcgggtaaatcgcaaaccgcgtttgccttaatggggcttctggctgcc

SEQ ID NO: 164397 - DNA, 75 bp, synthetic construct
  source 1..75: mol_type = other DNA
tgcagcgctgacatctgcgatgttagacagaattttacatcactcacatgttgttcagataaaaggagagagcta

SEQ ID NO: 164398 - DNA, 75 bp, synthetic construct
  source 1..75: mol_type = other DNA
ctgccgttcagccaagaggaagctaagttgttcttccaggtcatcgccaaacggtatgaaaaaagcgcgatgatc

SEQ ID NO: 164399 - DNA, 75 bp, synthetic construct
  source 1..75: mol_type = other DNA
gttcatgctggtgggcgcggtaaagctggcggcgtaaaagtgcttaaacaactgccggaagcgcaggcttttgca

SEQ ID NO: 164400 - DNA, 75 bp, synthetic construct
  source 1..75: mol_type = other DNA
tttgtgaccagcccgaagttcgtaaacatcaacggcgtgccgtatctggaagcggaagccacagaaaacctgatc

SEQ ID NO: 164401 - DNA, 75 bp, synthetic construct
  source 1..75: mol_type = other DNA
caaaaccacgaagaaaattaaattcatggtgacaagcccggactttgtcgcgattgacggcgtgccgtacctgtc

SEQ ID NO: 164402 - DNA, 75 bp, synthetic construct
  source 1..75: mol_type = other DNA
gccgggcaaattctctcgttcaatatggggatgagcatggcggtgatgaacgacccgagcagtggcgcatcgacc

SEQ ID NO: 164403 - DNA, 75 bp, synthetic construct
  source 1..75: mol_type = other DNA
ttcccgcctgtggggaaatgtgaatgtgctggcacgctgcggtaacgacaaacgatatttgcaagtcaatgtaca

SEQ ID NO: 164404 - DNA, 75 bp, synthetic construct
  source 1..75: mol_type = other DNA
aactgcgaagtaattgatattggctgtactttcatggagcaaaccagcaaggctacttctgtctctgctggaagt

SEQ ID NO: 164405 - DNA, 75 bp, synthetic construct
  source 1..75: mol_type = other DNA
tgtatatgatgcgtatggttcgcaacagttctattttccgaatttgctgaagtatgaccctgaacagcttctgca

SEQ ID NO: 164406 - DNA, 75 bp, synthetic construct
  source 1..75: mol_type = other DNA
atgagcaataattcccgcctgtggggcaatgtgaatgtgttggcacgctgcggtaacgacaaacgatatttacag

SEQ ID NO: 164407 - DNA, 75 bp, synthetic construct
  source 1..75: mol_type = other DNA
gtgctggcgcgctgcggcaacgacaaacgatatttgcaggttaatgtgcaggccacgggaaattatgtggttgct

SEQ ID NO: 164408 - DNA, 75 bp, synthetic construct
  source 1..75: mol_type = other DNA
acaaaatgcgcgggtgcgcatggtatcgggactggtggtcagcggcgttgttgatgcagataggaatattcttat

SEQ ID NO: 164409 - DNA, 75 bp, synthetic construct
  source 1..75: mol_type = other DNA
ttatgttattgataatgtcttccgcgatctgggcgcgtacctggcaacacatgccgatcgctatgtttctattaa

SEQ ID NO: 164410 - DNA, 75 bp, synthetic construct
  source 1..75: mol_type = other DNA
aggggcaagtttgcactccagcccatcaaaagcgaatgttgaatattattcgtggctatctttatattaatgaat

SEQ ID NO: 164411 - DNA, 75 bp, synthetic construct
  source 1..75: mol_type = other DNA
caattaatttgtctgcctccgattttcatacttcaagggtcattgccttaaccaatcaaaaaatagaacaattca

SEQ ID NO: 164412 - DNA, 75 bp, synthetic construct
  source 1..75: mol_type = other DNA
cacttttgggattacgaaagcgataaaaaaaatcatgttctcagcttgcaacctgaagctattgtatccctggtg

SEQ ID NO: 164413 - DNA, 75 bp, synthetic construct
  source 1..75: mol_type = other DNA
gtcagcaggaaatagcagaacatttcaaggtcaacagaaccactattcgcgcatggaccaaacagggcatgccgt

SEQ ID NO: 164414 - DNA, 75 bp, synthetic construct
  source 1..75: mol_type = other DNA
gtcagcaggaaatagctgaacatttcaaggttaacagaaccactattcgcgcatggaccaaacaggggatgccgt

SEQ ID NO: 164415 - DNA, 75 bp, synthetic construct
  source 1..75: mol_type = other DNA
cgcttggcgtccatacgcgtattgatgaaaccattgcccaggtcactggctcggcccaggtcggtaatctgtacg

SEQ ID NO: 164416 - DNA, 75 bp, synthetic construct
  source 1..75: mol_type = other DNA
aaacccagaaaaaatcaatgaactatttaaaggacttacgaggattgaaggcgccgcaatcaatataagaggcgt

SEQ ID NO: 164417 - DNA, 75 bp, synthetic construct
  source 1..75: mol_type = other DNA
gactggattagacacaatggccttggcagctttaataaggtccaagtccgtaactctcagaatatgccttcattt

SEQ ID NO: 164418 - DNA, 75 bp, synthetic construct
  source 1..75: mol_type = other DNA
accaatattgagcgccatattcagactatgcgtagcaaaggccgcccggtgttccaggcagtgcgggaaaacagt

SEQ ID NO: 164419 - DNA, 75 bp, synthetic construct
  source 1..75: mol_type = other DNA
caattgtttcggtgcagggttttgcccgtggcgaaagcaatatccttctggaacggctgtatatcgagcgttcgc

SEQ ID NO: 164420 - DNA, 75 bp, synthetic construct
  source 1..75: mol_type = other DNA
gaagggttgtccggtaccgggccgaaagcaggcggtccgctctatctctaccgtctgctggcgaatcgcccggaa

SEQ ID NO: 164421 - DNA, 75 bp, synthetic construct
  source 1..75: mol_type = other DNA
atgaacatagtgatcaccggagggacgggattaattggtcgccatttgattccgcgtttgctggagctgggccat

SEQ ID NO: 164422 - DNA, 75 bp, synthetic construct
  source 1..75: mol_type = other DNA
ggtaaaagtttagcaggtagtaacactgatatacaagaaatcagtgatatttgtaaaaatgcctcaggcattaca

SEQ ID NO: 164423 - DNA, 75 bp, synthetic construct
  source 1..75: mol_type = other DNA
cgacaggtgttacattaaatggtatccccggtgttttttctctttatggcacaggatgttcagacaaaattagtg

SEQ ID NO: 164424 - DNA, 75 bp, synthetic construct
  source 1..75: mol_type = other DNA
caggattaattggtcgccatttaatcccacgcttgttggaactgggtcatcaggtaacggtggtaacgcgtaacc

SEQ ID NO: 164425 - DNA, 75 bp, synthetic construct
  source 1..75: mol_type = other DNA
cgggattaattggtcgccatttgattccacgtttgctggagctgggccatcaaatcacggtagtgacgcgtaacc

SEQ ID NO: 164426 - DNA, 75 bp, synthetic construct
  source 1..75: mol_type = other DNA
tggacaacgcgcgctgcctaaacggctggaagaagcgggttttgcgtttcgttggtacgatttagaagaggcgct

SEQ ID NO: 164427 - DNA, 75 bp, synthetic construct
  source 1..75: mol_type = other DNA
aatgggtgaaacagaatatttgggccgagtactggaggaaggtcacggatatgactaacgttctgctgatcatgc

SEQ ID NO: 164428 - DNA, 75 bp, synthetic construct
  source 1..75: mol_type = other DNA
atgactaacgttttgctgatcatgccagcttcccgtcgagatgagtggcgcgagcagtttatagagggcaaacag

SEQ ID NO: 164429 - DNA, 75 bp, synthetic construct
  source 1..75: mol_type = other DNA
ctctaatttgtgtagggatgattttattaaagtgcttatgatgtcaaaaaggtttatatgtttgtcaaagtggga

SEQ ID NO: 164430 - DNA, 75 bp, synthetic construct
  source 1..75: mol_type = other DNA
atgaatacagccctttctatcatcgacgatgccagctcaaacacggctatcgactatcgtcaggaaatgaatgtc

SEQ ID NO: 164431 - DNA, 75 bp, synthetic construct
  source 1..75: mol_type = other DNA
tttatgccaaagggaagtcgtttactaacgtgtttgaagacaccgggattactgtcagtgtatacgttttcaaac

SEQ ID NO: 164432 - DNA, 75 bp, synthetic construct
  source 1..75: mol_type = other DNA
gagcctgaagccgggcgcggagatctgctggcctgcatcgacgccaacccggaagacgtcacctgcatagaagtc

SEQ ID NO: 164433 - DNA, 75 bp, synthetic construct
  source 1..75: mol_type = other DNA
tttatacgaaatgaaagaagaaaatgtattgttgtacatattaataaaatcacttatccgccagtaaattcacta

SEQ ID NO: 164434 - DNA, 75 bp, synthetic construct
  source 1..75: mol_type = other DNA
gtctggtcgtggacgtgcgccaaaaccgattgctgaagcactggctggcggtcgctcccttgatgagtttctcat

SEQ ID NO: 164435 - DNA, 75 bp, synthetic construct
  source 1..75: mol_type = other DNA
aatacagcatcatcagtcggacaatgacgaatattcgttcactacgcacgtatgtacgcgaacttgattttgagc

SEQ ID NO: 164436 - DNA, 75 bp, synthetic construct
  source 1..75: mol_type = other DNA
atggtgaacattaaaaatttcacgacatacaccccggaaaacccgcccgtggcgtggggcagatatctcatcagc

SEQ ID NO: 164437 - DNA, 75 bp, synthetic construct
  source 1..75: mol_type = other DNA
gaggttgccattatggctacagtccctgctttatctcaccctgaatttacctttgtctttctggctgtccgccgt

SEQ ID NO: 164438 - DNA, 75 bp, synthetic construct
  source 1..75: mol_type = other DNA
gtgtatctcactgtacctccgatggaaaatttgtttgcaatgatggaactattagtaaatccaaaaaaatctgta

SEQ ID NO: 164439 - DNA, 75 bp, synthetic construct
  source 1..75: mol_type = other DNA
gcagaacgagctgaattaccgctgctttctcataatctgcccgccgattttgccgcgttgcgcaagctgatgatg

SEQ ID NO: 164440 - DNA, 75 bp, synthetic construct
  source 1..75: mol_type = other DNA
aatcaggggctgttttttccgcacgacctgccggaattcagcctgactgaaattgatgagatgctgaagctggat

SEQ ID NO: 164441 - DNA, 75 bp, synthetic construct
  source 1..75: mol_type = other DNA
cgaaatctcttggcctgccggtgaaacgttttattgctgcgaccaacgtgaacgataccgtgccgcgtttcctgc

SEQ ID NO: 164442 - DNA, 75 bp, synthetic construct
  source 1..75: mol_type = other DNA
cagtcaactttcgcgttttaatcgcgatctaggcgatatacttggtaattatgccgatgataagattgcccgcat

SEQ ID NO: 164443 - DNA, 75 bp, synthetic construct
  source 1..75: mol_type = other DNA
tactttgaggctgtggcgcagttgccgcaggaggcgcggaaccagttggttgtctcggtgccaagcggtaacttc

SEQ ID NO: 164444 - DNA, 75 bp, synthetic construct
  source 1..75: mol_type = other DNA
ggtgatttaacggcaggcctgctggcgaagtcactcggtctgccggtgaagcgttttatcgctgccactaacatt

SEQ ID NO: 164445 - DNA, 75 bp, synthetic construct
  source 1..75: mol_type = other DNA
gatggttcgtgccgtgaaccgtgcaaaaggttttaatcatccgctgttcaaaggtgaatgtgcgatgtggcgcaa

SEQ ID NO: 164446 - DNA, 75 bp, synthetic construct
  source 1..75: mol_type = other DNA
ccagccgggcgtagcaacccgtttaatgagcaaaaggcgacacagacgcgcccagcgtctttttttgtgtcgtgc

SEQ ID NO: 164447 - DNA, 75 bp, synthetic construct
  source 1..75: mol_type = other DNA
gctatcagtttatgcaatatcactcaggtcaatgggagcctgtgactgcaacgcgtttagctgctcagccctttg

SEQ ID NO: 164448 - DNA, 75 bp, synthetic construct
  source 1..75: mol_type = other DNA
tccactcgggcctgcagatgtcgctgcttgtcccattcttccggaggtagctctactgactgcagacctggagcg

SEQ ID NO: 164449 - DNA, 75 bp, synthetic construct
  source 1..75: mol_type = other DNA
cgtcagtggaatgactggtacacctcgacttccgggaaggactggaaccagatgatggttcgtgccgtgaaccgt

SEQ ID NO: 164450 - DNA, 75 bp, synthetic construct
  source 1..75: mol_type = other DNA
accagcgcgggtgcgccggttgtccgtatcacagaccttaacaaacaggccggtgatgaagtggcgttcagcatc

SEQ ID NO: 164451 - DNA, 75 bp, synthetic construct
  source 1..75: mol_type = other DNA
gtgctggaaagcctgaccaaaaatagcggcgagaaccagccagcgacgctgaaatcacagattgtcgccgatgaa

SEQ ID NO: 164452 - DNA, 75 bp, synthetic construct
  source 1..75: mol_type = other DNA
caaagcggaagatctggtcgatgttctgaaacaggtcagcggcacgctcaccgccgctaaagaagaggcggaagg

SEQ ID NO: 164453 - DNA, 75 bp, synthetic construct
  source 1..75: mol_type = other DNA
ctatctggcgtaagaagacaactggcctcaaaacaaaaaagcgtttactgccgctgatgctggcagcggcattgt

SEQ ID NO: 164454 - DNA, 75 bp, synthetic construct
  source 1..75: mol_type = other DNA
caataaacagattgatgagatgaacgcgtcgattgccaaactggagcagcaaaaagccgcccaggagcgcagcct

SEQ ID NO: 164455 - DNA, 75 bp, synthetic construct
  source 1..75: mol_type = other DNA
ttccattcaacaaggtcagcaacagttaagcgagctgcgcgccaacgaatctcgtctgcgcaatagcattgctcg

SEQ ID NO: 164456 - DNA, 75 bp, synthetic construct
  source 1..75: mol_type = other DNA
gctatggcgagcagctacagggtgaattacgctggaaagggatggtgattggtgcctctgaaggtactgaagtta

SEQ ID NO: 164457 - DNA, 75 bp, synthetic construct
  source 1..75: mol_type = other DNA
gggtcaggacgttccggtattaaccggctctaccgttggctccaataacagcaatcctttcaatacagtagaaag

SEQ ID NO: 164458 - DNA, 75 bp, synthetic construct
  source 1..75: mol_type = other DNA
ccctggcagcctctctggccgaaaaagtcagtgatacatggcaaagaattatcgctcgccgcactgctaaggaga

SEQ ID NO: 164459 - DNA, 75 bp, synthetic construct
  source 1..75: mol_type = other DNA
tgtacctgcggatattctggcaattttgccgcaaacacagggatttcatgacactgtggcttttgagctacaggg

SEQ ID NO: 164460 - DNA, 75 bp, synthetic construct
  source 1..75: mol_type = other DNA
ccggtactgccagcgcaaaatcaggccttaccgccggaagtacgcgcattcctcaatgccgggagaacgcgttaa

SEQ ID NO: 164461 - DNA, 75 bp, synthetic construct
  source 1..75: mol_type = other DNA
gctaccaccataaatccggatactaacggcgatctctccacgctcgctcagcttctttctggctttagcggtacg

SEQ ID NO: 164462 - DNA, 75 bp, synthetic construct
  source 1..75: mol_type = other DNA
cgcatcggcttcggaaattgcccgtgtgctggaaagcctgaccaaaaacagcggcgagaaccagccagcaacgct

SEQ ID NO: 164463 - DNA, 75 bp, synthetic construct
  source 1..75: mol_type = other DNA
tacaagggcaatatgactatgacgaggaagaaaaagagttgtatatgccagatgttggaactcaagaggattttt

SEQ ID NO: 164464 - DNA, 75 bp, synthetic construct
  source 1..75: mol_type = other DNA
cattatgacgctaactcccggtgaaacagcgatgatcgccggcgatttagcactgaaagccgccgatgtgcatat

SEQ ID NO: 164465 - DNA, 75 bp, synthetic construct
  source 1..75: mol_type = other DNA
cggctcctcgcatctgcccccctgcataattcatgcttccccgttttgccgatatttttcagcagggaaaccgct

SEQ ID NO: 164466 - DNA, 75 bp, synthetic construct
  source 1..75: mol_type = other DNA
tatgtacgcgaacttgattttgagcaattactcgacatgcaggaaaagctcaacgctgttattgaagaacgccgt

SEQ ID NO: 164467 - DNA, 75 bp, synthetic construct
  source 1..75: mol_type = other DNA
attccttcctgacgactacattattctcataggtgggaatggagaggaaaaacagaagcttttagagctcattca

SEQ ID NO: 164468 - DNA, 75 bp, synthetic construct
  source 1..75: mol_type = other DNA
ggcgcgacctgccgccaaatctctacgaaagaaacgggtattactgctacagagacccgaggacgaaaaaagagt

SEQ ID NO: 164469 - DNA, 75 bp, synthetic construct
  source 1..75: mol_type = other DNA
aggcggttcgcgaccgccagaaagaagcgacgcgcaaaggcaccacctacaaaccgaccgaaagcgaaaaatcgc

SEQ ID NO: 164470 - DNA, 75 bp, synthetic construct
  source 1..75: mol_type = other DNA
ccagcgcggtcagcgtttacaggcttatttcggctatctcaaccaggcgcgacaagaaaccatcgccgaactgaa

SEQ ID NO: 164471 - DNA, 75 bp, synthetic construct
  source 1..75: mol_type = other DNA
tctgaagccactcgcaagctgcgcgaaacgcaaaacacgctcaatcaactgaataaacagattgatgagatgaac

SEQ ID NO: 164472 - DNA, 75 bp, synthetic construct
  source 1..75: mol_type = other DNA
ccatgctccccatgtcctggaaaaattttctgtccgtgtgcacgatacatccctttatctgtccgcagtgcggca

SEQ ID NO: 164473 - DNA, 75 bp, synthetic construct
  source 1..75: mol_type = other DNA
agagcgagcaacaaacgcttttatatgagcagcgcgcccaacaggcgaagctgacccaggcgttgagcgagcgta

SEQ ID NO: 164474 - DNA, 75 bp, synthetic construct
  source 1..75: mol_type = other DNA
agccaattgcactggtgggcagcagtggcggtcagggcagaccttcactctatttcgaaattcgccgccagggtc

SEQ ID NO: 164475 - DNA, 75 bp, synthetic construct
  source 1..75: mol_type = other DNA
acaatcccacgatatctgggagcactggctacgattcgaggactcaactcctcctcttttgccagaaccaaagtt

SEQ ID NO: 164476 - DNA, 75 bp, synthetic construct
  source 1..75: mol_type = other DNA
gaattggcggagaaacactgttaaaaatgagtctggcaattacggtgtgttatacgctggcattgctggttgctc

SEQ ID NO: 164477 - DNA, 75 bp, synthetic construct
  source 1..75: mol_type = other DNA
gccgtctttttaaatggattgcttatttttaaaacaatctatggtatgtcggtcaatctgctcgatattttccat

SEQ ID NO: 164478 - DNA, 75 bp, synthetic construct
  source 1..75: mol_type = other DNA
ggttatcccacctgtaaggagtcttacccggatattaaaggtagtccgaactataaccccgtaaaacgcgcttaa

SEQ ID NO: 164479 - DNA, 75 bp, synthetic construct
  source 1..75: mol_type = other DNA
aaattgaacagggcaaacgtgatgttgattcctttgtgaagatgcaggaaaaatttgtacgagatcagattaagg

SEQ ID NO: 164480 - DNA, 75 bp, synthetic construct
  source 1..75: mol_type = other DNA
agtataggtgccattgagcatgacggcaccctgctggaatttgatgtcaatgaagcgttagtcgcgagaacgatg

SEQ ID NO: 164481 - DNA, 75 bp, synthetic construct
  source 1..75: mol_type = other DNA
aagatcgcgcgcgtctgcgccgttacttcgaacagcgtgtcgccacacataaagaagctcactggcaggcttatt

SEQ ID NO: 164482 - DNA, 75 bp, synthetic construct
  source 1..75: mol_type = other DNA
gcccatagcggtattccgcataaagtgcctgacgcggtactggagttactggtccgcaccttccgcgatctgcgt

SEQ ID NO: 164483 - DNA, 75 bp, synthetic construct
  source 1..75: mol_type = other DNA
agtattttcgacgccgggattagtcgagctgtaatcagagaaatctctctttatcgagaaagtgaaaaagagcaa

SEQ ID NO: 164484 - DNA, 75 bp, synthetic construct
  source 1..75: mol_type = other DNA
gtagtgccgccgccgggacaatttttgcttttattagttttacgacgttactgttttactccacctacggcgcgc

SEQ ID NO: 164485 - DNA, 75 bp, synthetic construct
  source 1..75: mol_type = other DNA
aatcttccaaagtaatattttgtgattttgagggggtatcacccataagcgctaacttaagggttgtggtattac

SEQ ID NO: 164486 - DNA, 75 bp, synthetic construct
  source 1..75: mol_type = other DNA
atttaattctcgctacaaaaatcatatagatgttcaatatcttgatgattacagaaaatatgagactgttgtagc

SEQ ID NO: 164487 - DNA, 75 bp, synthetic construct
  source 1..75: mol_type = other DNA
gtcaggatgccaaaaccaaagcgccacgtcgctttaatgacggtacgctcaacaccgcaatggaaaatattcata

SEQ ID NO: 164488 - DNA, 75 bp, synthetic construct
  source 1..75: mol_type = other DNA
aaccactaaaaatgggtggaaagacgtttattcagatggagaggatgaagacgaagaaaatgagtctgaacagtc

SEQ ID NO: 164489 - DNA, 75 bp, synthetic construct
  source 1..75: mol_type = other DNA
cttgagaacaacgataaatatgtaaattttggacgtgcagctcttgcgcgtggtcgggctgactggttggttgga

SEQ ID NO: 164490 - DNA, 75 bp, synthetic construct
  source 1..75: mol_type = other DNA
gaaaagatgatttcagaaaatccggatatcagaatggcagaggctgttttgagagcaggaataaaaactgaataa

SEQ ID NO: 164491 - DNA, 75 bp, synthetic construct
  source 1..75: mol_type = other DNA
cctctgctatgggttaataaaatcaatatattatgtgttttatttggaataaatattctatatttaggattgaaa

SEQ ID NO: 164492 - DNA, 75 bp, synthetic construct
  source 1..75: mol_type = other DNA
aaccatccggcatttggtagagcgggctgacactattgttaatgctggcgacccggatcgtgaggggcagttact

SEQ ID NO: 164493 - DNA, 75 bp, synthetic construct
  source 1..75: mol_type = other DNA
agccagtgaggatcaggctggtcttgattccgaaggccgcctggttgataccaaagaagctgacaggctggttaa

SEQ ID NO: 164494 - DNA, 75 bp, synthetic construct
  source 1..75: mol_type = other DNA
caaacgcctacgctcgcgctggtcgttgcccgtgatctggaaattgaaaattttaaaccggtcccttatcacaat

SEQ ID NO: 164495 - DNA, 75 bp, synthetic construct
  source 1..75: mol_type = other DNA
gtgagcaagtgctggctatatgccagtctctttatgaaacgcataaacttaccagttatccacgttctgatagtt

SEQ ID NO: 164496 - DNA, 75 bp, synthetic construct
  source 1..75: mol_type = other DNA
atgaatctttcaagaggattcacgctgtcggcagcgcgtggtggctcgcgggttctgttgacggtcgggcgagtt

SEQ ID NO: 164497 - DNA, 75 bp, synthetic construct
  source 1..75: mol_type = other DNA
actgccattaacgaacgtatgctactggaaattgaacagggtaaacgcgatgtggattcgttcgtcaaaatgcag

SEQ ID NO: 164498 - DNA, 75 bp, synthetic construct
  source 1..75: mol_type = other DNA
gaaattacctgtcatgaaaaacggtgacagtgtgctttgtgcgcaggcaaaacgcctggatgccaaaacaaaagc

SEQ ID NO: 164499 - DNA, 75 bp, synthetic construct
  source 1..75: mol_type = other DNA
ggtggccaaatttactgtgccactacatatgaaggtaatttgcgcgacgtattatcgatcatcgctaacgacatt

SEQ ID NO: 164500 - DNA, 75 bp, synthetic construct
  source 1..75: mol_type = other DNA
atgcaaacgagcacccactggatgccttagaaatcatggcgccacatatcacacaggcgcatattaaagatgcat

SEQ ID NO: 164501 - DNA, 75 bp, synthetic construct
  source 1..75: mol_type = other DNA
cgtcgtcacggacagtggttgcccgtttcctcgacccgcttatcggcacaggttacggtgccaaaacaggtgcag

SEQ ID NO: 164502 - DNA, 75 bp, synthetic construct
  source 1..75: mol_type = other DNA
attgaaacagctcgatggaacacagaaagtgccgctttgttggcactatcagaaatacatggcgttagttattgg

SEQ ID NO: 164503 - DNA, 75 bp, synthetic construct
  source 1..75: mol_type = other DNA
cgtcgtcacgggcagtggttgcccgtttctgcgacccggttatcggcacaggttacggtgccgaaacaggtgcag

SEQ ID NO: 164504 - DNA, 75 bp, synthetic construct
  source 1..75: mol_type = other DNA
taaaaacgatggcaccgcatattacccaggtccatatcaaagatgccttgatcgttaaagaagagggtggcctgg

SEQ ID NO: 164505 - DNA, 75 bp, synthetic construct
  source 1..75: mol_type = other DNA
atcactttgcacagtttcccaaacatcctttttataaaaatggtataaacaggacatcctggagagcacatccag

SEQ ID NO: 164506 - DNA, 75 bp, synthetic construct
  source 1..75: mol_type = other DNA
aactcaaaatcagaagtacagaacgagattataaatacatttccagaattactgacaggtatgctggattgtctc

SEQ ID NO: 164507 - DNA, 75 bp, synthetic construct
  source 1..75: mol_type = other DNA
ccgctttcaaacgagctggaagctcatatcgcagattttttgggagaacataaactagatgaattcggtatcgac

SEQ ID NO: 164508 - DNA, 75 bp, synthetic construct
  source 1..75: mol_type = other DNA
aacgcatgttgggcggtaaagctggcgcacgatggcgcgttatccctcaatcaatgtgatgagaggatgccatga

SEQ ID NO: 164509 - DNA, 75 bp, synthetic construct
  source 1..75: mol_type = other DNA
aacgcgtgttgggcggtaaagctggcgcacgatggcgcgttatccctcaatcaatgtgatgaggggatgccatga

SEQ ID NO: 164510 - DNA, 75 bp, synthetic construct
  source 1..75: mol_type = other DNA
gatagcccatccaagggctatgcgcggacaccagaaatacagagatgaggtgattgcacgaattaagcaactttg

SEQ ID NO: 164511 - DNA, 75 bp, synthetic construct
  source 1..75: mol_type = other DNA
aactgttgcagattaaatattttggacattccacaggaggtgtcgagttttttaatgtgcttaataaagttatcg

SEQ ID NO: 164512 - DNA, 75 bp, synthetic construct
  source 1..75: mol_type = other DNA
acaaaaactacaccctgagcagcgacggcggctttagcgcccgtgggcaagcgggccagatgctgaaaaaagaag

SEQ ID NO: 164513 - DNA, 75 bp, synthetic construct
  source 1..75: mol_type = other DNA
tggcgatgggttgcttctacagtctgaacgagaagatgtacgtccgcattgttgaagaaatagaagcccgtaaac

SEQ ID NO: 164514 - DNA, 75 bp, synthetic construct
  source 1..75: mol_type = other DNA
atgaatatttatgctttgggggtactggtgaatatcgttgaatgttatatgccagtatttaaactcatatcatct

SEQ ID NO: 164515 - DNA, 75 bp, synthetic construct
  source 1..75: mol_type = other DNA
atcttttacaggttagatattttggacattccacaggtggtgttgagttttttaacatgctcaataaagtcattg

SEQ ID NO: 164516 - DNA, 75 bp, synthetic construct
  source 1..75: mol_type = other DNA
aggtactggtgaatatcgttgaatgctatatgccagtatttaaactcatatcatctgttaaagtctttccagaag

SEQ ID NO: 164517 - DNA, 75 bp, synthetic construct
  source 1..75: mol_type = other DNA
ttcggtctgctgtttatgtgggtctgttactcgggcgtgaaagaacgttatgtcgaaacgcagcctgcaaatccg

SEQ ID NO: 164518 - DNA, 75 bp, synthetic construct
  source 1..75: mol_type = other DNA
ggcggtgggtgatatactgaattatttctggggaagtaactctttcactttcgtcatgttctcttgtgtcgcctt

SEQ ID NO: 164519 - DNA, 75 bp, synthetic construct
  source 1..75: mol_type = other DNA
gttttataccgacgttctggggctgccaggcacctatggcggcattatctttttgatttcaaaattctttactgc

SEQ ID NO: 164520 - DNA, 75 bp, synthetic construct
  source 1..75: mol_type = other DNA
atatcggcacgctttatcttttgaagttttataccgacgttctggggctgcctggcacctatggcggcattatct

SEQ ID NO: 164521 - DNA, 75 bp, synthetic construct
  source 1..75: mol_type = other DNA
cggcgtgcgttcggaaggaacggtctacaccggttttaccttctttcgcaaagtgtctcaggcgctggctggttt

SEQ ID NO: 164522 - DNA, 75 bp, synthetic construct
  source 1..75: mol_type = other DNA
gtcagacgttttggcaagaagaaagtttatatcggcggcctgctgatttgggtgctgggcgatctgctcaactat

SEQ ID NO: 164523 - DNA, 75 bp, synthetic construct
  source 1..75: mol_type = other DNA
catatctctccggcgggcagtattaagcccgacagtccggcgggtcgatatctacaaggtcgaggtgttgagcgg

SEQ ID NO: 164524 - DNA, 75 bp, synthetic construct
  source 1..75: mol_type = other DNA
cgaggaaaacgtgcgtctggaaatggagcgaaaccacgaacgttatgtgttcctgaaatggggacagcaggcctt

SEQ ID NO: 164525 - DNA, 75 bp, synthetic construct
  source 1..75: mol_type = other DNA
gggctgactggtgaagagacgattgatattgtcgatctgcaaaatttgcaaccgggggcaacggttccggtgatg

SEQ ID NO: 164526 - DNA, 75 bp, synthetic construct
  source 1..75: mol_type = other DNA
tcatggagtatttttacgctgaaggacttaggaagcgtggcctaatagacataaatgataatatttatgatattt

SEQ ID NO: 164527 - DNA, 75 bp, synthetic construct
  source 1..75: mol_type = other DNA
cagataagttcaccggaccagacctgggcggtggatactgctgatgcgcgtgcagagaacgggcaactggttttt

SEQ ID NO: 164528 - DNA, 75 bp, synthetic construct
  source 1..75: mol_type = other DNA
cccttctttcagccattatttcggtggccctgttttattcggcagcgccacatgcagatattcttgatggtggcg

SEQ ID NO: 164529 - DNA, 75 bp, synthetic construct
  source 1..75: mol_type = other DNA
atcgcctttctttgatgaaatgcaggcaacaccagcacctgtggaagatattcacggtgcgcggatcctcgcaat

SEQ ID NO: 164530 - DNA, 75 bp, synthetic construct
  source 1..75: mol_type = other DNA
tggcaaaagcgaaactgacaccgtatctcgacgaactggggtttaaccttgtgggatacggttgtaccacctgta

SEQ ID NO: 164531 - DNA, 75 bp, synthetic construct
  source 1..75: mol_type = other DNA
ggcaaccgtgggtcaaagcgtcgctggcaccgggttcgaaagtcgtttctgattatctggcaaaagcgaaactga

SEQ ID NO: 164532 - DNA, 75 bp, synthetic construct
  source 1..75: mol_type = other DNA
ttcacggcgcgcgtattctggcgatgttgggagattcggttaccactgatcatatctctccagcaggaagtatta

SEQ ID NO: 164533 - DNA, 75 bp, synthetic construct
  source 1..75: mol_type = other DNA
gtaactttgaggggcgtattcatccgctggttaaaactaactggctggcttcgccgccgctggtggtagcttatg

SEQ ID NO: 164534 - DNA, 75 bp, synthetic construct
  source 1..75: mol_type = other DNA
cacggtgcgcggatcctcgcaatgctgggggattcagtcaccactgaccatatctctccggcgggcagtattaag

SEQ ID NO: 164535 - DNA, 75 bp, synthetic construct
  source 1..75: mol_type = other DNA
tgtggttcagcgctctcccttaagtcgaggcatggcaacatactggcttctgaaaggagagaggcaggcgggtca

SEQ ID NO: 164536 - DNA, 75 bp, synthetic construct
  source 1..75: mol_type = other DNA
tgtggttcagcgctctcccttaagacgaggcatggcaacatactggcttctgaaaggagagaggcaggcggggca

SEQ ID NO: 164537 - DNA, 75 bp, synthetic construct
  source 1..75: mol_type = other DNA
gtatggttcagcgctcaccattaagacggggcatggcaacatactggtttctgaaaggagagaagcaggcggggc

SEQ ID NO: 164538 - DNA, 75 bp, synthetic construct
  source 1..75: mol_type = other DNA
tgtggttcagcgctctccattaaggcgaggcattgaaccgccccgggaatcctggagactaaacttcctgagaaa

SEQ ID NO: 164539 - DNA, 75 bp, synthetic construct
  source 1..75: mol_type = other DNA
tgtggttcagcgctctcccttaaggcgaggcatggcaacatactggcttctgaaaggagagaggcaggcgggaca

SEQ ID NO: 164540 - DNA, 75 bp, synthetic construct
  source 1..75: mol_type = other DNA
tgtggttcagcgctctcccttaagccgaggcatggcaacatactggattctgaaaggagagaggcaggcgggcca

SEQ ID NO: 164541 - DNA, 75 bp, synthetic construct
  source 1..75: mol_type = other DNA
gacagccgtaatgatattcctgaaggaattgccacgctgggcgcttttatgggttattcccattcacatatcggt

SEQ ID NO: 164542 - DNA, 75 bp, synthetic construct
  source 1..75: mol_type = other DNA
ataattattgttacgactttttcaaaccagctcttgaggatttattagtagccattgaacaatatgatgagattg

SEQ ID NO: 164543 - DNA, 75 bp, synthetic construct
  source 1..75: mol_type = other DNA
ggaggggggggggcttcagcgcagcgttttcgtgcttctgtttcagtacgtgacccggagagtggaaatgtggcg

SEQ ID NO: 164544 - DNA, 75 bp, synthetic construct
  source 1..75: mol_type = other DNA
ttaagacggggcatggcaacatactggtttctgaaaggagaaaagcaggtgggacaaaactgttcttccacaact

SEQ ID NO: 164545 - DNA, 75 bp, synthetic construct
  source 1..75: mol_type = other DNA
gaaattgcggaggcgctggcggtaacggattatcaggcacgctattacctgttattactggaaaaagcaggtatg

SEQ ID NO: 164546 - DNA, 75 bp, synthetic construct
  source 1..75: mol_type = other DNA
ttactggaaaaagaaggtatggttcagcgctctccattaaggcgaggcatggcaacatactggtttctgaaagga

SEQ ID NO: 164547 - DNA, 75 bp, synthetic construct
  source 1..75: mol_type = other DNA
tggccttgagatcactatcaagcttttcaagcacccgagattttctaaataccgcgactggtttttgttcgatga

SEQ ID NO: 164548 - DNA, 75 bp, synthetic construct
  source 1..75: mol_type = other DNA
acgctcggcgcgattgttgaggcgatagcctcccgtaacaggctggaagccagtgtcgctccgtcactggccgga

SEQ ID NO: 164549 - DNA, 75 bp, synthetic construct
  source 1..75: mol_type = other DNA
attaaaatcccgcacatcgaccagtcgcaggagtctgatgcgaaattcctgacccggcttgctgaacgcaacggc

SEQ ID NO: 164550 - DNA, 75 bp, synthetic construct
  source 1..75: mol_type = other DNA
attttcgtgaaacgctgaatacccgccgtgaaaagtcgtggcacaagactacggtcggggaagtggtgaaggaaa

SEQ ID NO: 164551 - DNA, 75 bp, synthetic construct
  source 1..75: mol_type = other DNA
atcaccactgtcttggataatcgcctgatgagtctgacgctgacggacaatcggggctttgaagcagaccagctt

SEQ ID NO: 164552 - DNA, 75 bp, synthetic construct
  source 1..75: mol_type = other DNA
cgctcaattcccgccgtgaaggctcctggcatgacaccacgctcggtgcgattgttgaggcgatagcctcccgta

SEQ ID NO: 164553 - DNA, 75 bp, synthetic construct
  source 1..75: mol_type = other DNA
gatctggagctggacgacgctgacggaaaaatcgtgctgccgcgccgtggtgcggtcattacgctggcgctgggc

SEQ ID NO: 164554 - DNA, 75 bp, synthetic construct
  source 1..75: mol_type = other DNA
gcagtgggaacgcctgcaacgcggcgttgcatcattctcgctacaactggcggaagggcgggcagacctctacac

SEQ ID NO: 164555 - DNA, 75 bp, synthetic construct
  source 1..75: mol_type = other DNA
cggcttctaaaacatccaagattccgtaaataccgtgactggttcatgtttgatgaaactgatcccgcagctggt

SEQ ID NO: 164556 - DNA, 75 bp, synthetic construct
  source 1..75: mol_type = other DNA
tgatgagtctgacgctgacggacaatcggggctttgaagcggaccaacttgatctggagctggacgacgccgacg

SEQ ID NO: 164557 - DNA, 75 bp, synthetic construct
  source 1..75: mol_type = other DNA
gttgcgtcattctcgttacaactggcagaagggcgggcagatctctacacggaaatgccagtgaaagtcagtggc

SEQ ID NO: 164558 - DNA, 75 bp, synthetic construct
  source 1..75: mol_type = other DNA
gcaacgctgaacgggcagcgaaaatgcagtgggaacgcctgcaacgcggcgttgcgtcattatcgctacaactgg

SEQ ID NO: 164559 - DNA, 75 bp, synthetic construct
  source 1..75: mol_type = other DNA
ccgtgaaaaatcgtggcataacaccaccatcggggaagtggtgaaggaaatagccgcgcggcacaagctgaagat

SEQ ID NO: 164560 - DNA, 75 bp, synthetic construct
  source 1..75: mol_type = other DNA
cggaaggtcgggcggatctctacacggaaatgcctgtgaaggtcagcggctttaaacagccgatagatgatgcgg

SEQ ID NO: 164561 - DNA, 75 bp, synthetic construct
  source 1..75: mol_type = other DNA
cactacggtgaagcgtaagcgcaggactaagaagcagaagaaagagccggaagcgaagcagggcgattacctggt

SEQ ID NO: 164562 - DNA, 75 bp, synthetic construct
  source 1..75: mol_type = other DNA
actggctggcctcgccgccgctggtggttgcctatgcgctggcgggaaatatgaatatcaacctggcttctgagc

SEQ ID NO: 164563 - DNA, 75 bp, synthetic construct
  source 1..75: mol_type = other DNA
cgctggcgggcaatatgaacatcaacctcgcttccgatccacttggacatgatcgcaaaggcgatccggtatatc

SEQ ID NO: 164564 - DNA, 75 bp, synthetic construct
  source 1..75: mol_type = other DNA
tttaaacagccgattgatgatgcggaatggaccattaccaccctgacacataccgtcagcccggataacggtttt

SEQ ID NO: 164565 - DNA, 75 bp, synthetic construct
  source 1..75: mol_type = other DNA
atcaccactgtgctggacaaccgcctgatggggctgacgctgacggataaccggggctttgacgcagaccagctt

SEQ ID NO: 164566 - DNA, 75 bp, synthetic construct
  source 1..75: mol_type = other DNA
atgctggatgcgctgacatttgatgcaggcagtacactgacgccggattatatgctgatgctcaacagcagggat

SEQ ID NO: 164567 - DNA, 75 bp, synthetic construct
  source 1..75: mol_type = other DNA
aggacggcgacagccaccgctttaccctggcagatcgcggagcttacacgggggtaattgccagctggttgcata

SEQ ID NO: 164568 - DNA, 75 bp, synthetic construct
  source 1..75: mol_type = other DNA
gacattgagctcgacgacaccgacggaaaagtcgagctgcccctgcgcggagcggtgctgacgctgtggcttggc

SEQ ID NO: 164569 - DNA, 75 bp, synthetic construct
  source 1..75: mol_type = other DNA
aacacctgcgcgcactggagcacccgaaagcgaaaccagtcacgcagaagaaagcgccaaaagtaccggaagcgc

SEQ ID NO: 164570 - DNA, 75 bp, synthetic construct
  source 1..75: mol_type = other DNA
ctgccggtgatcactatcacgcgtaaggacggcgacagtcaccgctttaccttggcagatcgcggagcctacacg

SEQ ID NO: 164571 - DNA, 75 bp, synthetic construct
  source 1..75: mol_type = other DNA
accaaccggacataaagccagtattctcaaatctttttgcgcgatatttcggaatccgccattgctggttttatg

SEQ ID NO: 164572 - DNA, 75 bp, synthetic construct
  source 1..75: mol_type = other DNA
aaatgcaccgaagagcaccaggcgattgtgcgtaagtggctggaagagcgcaaactggatgaggtacgcaccagc

SEQ ID NO: 164573 - DNA, 75 bp, synthetic construct
  source 1..75: mol_type = other DNA
atacggatttaagaaatttaaattctcatcacgactcctatttatatatttactgtttgttatgcttttacaatg

SEQ ID NO: 164574 - DNA, 75 bp, synthetic construct
  source 1..75: mol_type = other DNA
ctgccggaatcactcatggtcctcagccgtcagagcctgcttcagcttatgcgtctgactgaagacgtaccagat

SEQ ID NO: 164575 - DNA, 75 bp, synthetic construct
  source 1..75: mol_type = other DNA
ggtattataccacgccgttaatttacttatgttacgacgcaacgtgtggcctattatccttattatttcgtctaa

SEQ ID NO: 164576 - DNA, 75 bp, synthetic construct
  source 1..75: mol_type = other DNA
gcggaatggggccggcggctaccgtcgatctgtttaataaatttgtgacgtttaccaccgcacaacgtgatcagg

SEQ ID NO: 164577 - DNA, 75 bp, synthetic construct
  source 1..75: mol_type = other DNA
gttgccggaattttccatcacgcgcagcagcggagatcgccattctttccggattgcagatcgcgacgcatatac

SEQ ID NO: 164578 - DNA, 75 bp, synthetic construct
  source 1..75: mol_type = other DNA
ctgaatacccgccgtgaaaaatcgtggcacaagaccaccgttggggaagtcgtgaaggaaatatctgcgcggcac

SEQ ID NO: 164579 - DNA, 75 bp, synthetic construct
  source 1..75: mol_type = other DNA
tgccagggtggaacacactatcgacagcaacggtttcaccacacaactggagcttgaggctaaaatacctgactg

SEQ ID NO: 164580 - DNA, 75 bp, synthetic construct
  source 1..75: mol_type = other DNA
cgagcacaccattgataacagcggttttaccacgcagcttgaacttgaaacaaaaatccctgaatggattgcgca

SEQ ID NO: 164581 - DNA, 75 bp, synthetic construct
  source 1..75: mol_type = other DNA
tcgctggcagaggtggaaatcgaccacgccgaccagacggaggaaagtgacatctcgtttctcacgcgcatggcg

SEQ ID NO: 164582 - DNA, 75 bp, synthetic construct
  source 1..75: mol_type = other DNA
acctgaacggtctgtcagagtgcgtgaagatccctgatttttccatcacggttaagggcacggaaaacgcggcgc

SEQ ID NO: 164583 - DNA, 75 bp, synthetic construct
  source 1..75: mol_type = other DNA
gatgccgggaaggaacttaaaattgatgctgccagttatggcgcggatagctgggaggctcttcagcgtaacctg

SEQ ID NO: 164584 - DNA, 75 bp, synthetic construct
  source 1..75: mol_type = other DNA
aaaaccaaaaacagcgtaaggagctggggctgattgttaccctcaccttcttcagcatgttgttctgggcattcg

SEQ ID NO: 164585 - DNA, 75 bp, synthetic construct
  source 1..75: mol_type = other DNA
ggttctgctggtggcaacgcctgcgctgattaccgtgttgttctggaaagagtggtcggtatacgccttgattgt

SEQ ID NO: 164586 - DNA, 75 bp, synthetic construct
  source 1..75: mol_type = other DNA
actgaactgcgaagagccatttttgagctggtcaggcggataccctatcagctcggtgcatggaatggcgaaagc

SEQ ID NO: 164587 - DNA, 75 bp, synthetic construct
  source 1..75: mol_type = other DNA
ttacccaatagccaattttatcgcattacaaataaatggttcaaaaacaggatttgccgcatctattacaggttt

SEQ ID NO: 164588 - DNA, 75 bp, synthetic construct
  source 1..75: mol_type = other DNA
ccaatccagattgtagcggtggagaaatcgccgctgcactgaataccacaaccacagccattaatgcggagttac

SEQ ID NO: 164589 - DNA, 75 bp, synthetic construct
  source 1..75: mol_type = other DNA
caatgcaggagtctgccacccgtcagcgtgaacaggataccatccggaagtttactgaagagaataaatccgaat

SEQ ID NO: 164590 - DNA, 75 bp, synthetic construct
  source 1..75: mol_type = other DNA
tctggcttatgagtctgactgaagactgtccggatatgcaccaggaactgcttaactgcctgctgtccggtaaaa

SEQ ID NO: 164591 - DNA, 75 bp, synthetic construct
  source 1..75: mol_type = other DNA
tgttgccacattctgtgtttctggcctgtatctgaaatccctgtgcctgtccgttgcctgctgttgtggggtatt

SEQ ID NO: 164592 - DNA, 75 bp, synthetic construct
  source 1..75: mol_type = other DNA
tgccttcgcagttatgctgtgcggtgtgttcctggcgtgggtggttaaagaaagcgtcgcaggtaatcgtaccgt

SEQ ID NO: 164593 - DNA, 75 bp, synthetic construct
  source 1..75: mol_type = other DNA
atgaccattctggactacatcgccgccaatccgggttgtagcggtggagaaatcgccgcagcactgaatacccca

SEQ ID NO: 164594 - DNA, 75 bp, synthetic construct
  source 1..75: mol_type = other DNA
atgaccattctggactacatcacagccaatccgggttgtagcggtggagaaatcgccgccgcgctgaatacccca

SEQ ID NO: 164595 - DNA, 75 bp, synthetic construct
  source 1..75: mol_type = other DNA
acgaagaacctgcaaagagcggggctgagtaaggacagggcgatgatctcagcgtacaacaaccacgggccatag

SEQ ID NO: 164596 - DNA, 75 bp, synthetic construct
  source 1..75: mol_type = other DNA
tggccagaacgataaaggacaggcgggtgctgagactgatacgccgctacctgaaatcggaaatggttaaagacg

SEQ ID NO: 164597 - DNA, 75 bp, synthetic construct
  source 1..75: mol_type = other DNA
gtggtggacatggatctggagaagttctttgaccgtgtggatcaccggctgttgctggcccgcctggcccggaag

SEQ ID NO: 164598 - DNA, 75 bp, synthetic construct
  source 1..75: mol_type = other DNA
ctttatgctcggcgtctttcttgtcctgaactccattggcttactgttccgggcaaagctcgcatgggcaatcag

SEQ ID NO: 164599 - DNA, 75 bp, synthetic construct
  source 1..75: mol_type = other DNA
atgaataaagtcccttttgaagtattaagccactctgaaaacgcattaactaaagcgcgcgaaatgaatgcgctg

SEQ ID NO: 164600 - DNA, 75 bp, synthetic construct
  source 1..75: mol_type = other DNA
catttttacctgagctgtaaaaaggcaatgtctcttgcggaaaagatagatcattttgtcttatcggaatctatc

SEQ ID NO: 164601 - DNA, 75 bp, synthetic construct
  source 1..75: mol_type = other DNA
ggcgcgtaacgtcaacggcaaagcgattctctacggcgataagataaccccgtcaatggcgaaagcgattggcga

SEQ ID NO: 164602 - DNA, 75 bp, synthetic construct
  source 1..75: mol_type = other DNA
agacggggcatggcaacatactggtttctgaaaggagagaagcaggcggggcagagctgttcttccacaacttaa

SEQ ID NO: 164603 - DNA, 75 bp, synthetic construct
  source 1..75: mol_type = other DNA
atgaagaatgaaatactggaatttctgaacaggcataatggagggaaaactgcagaaattgcagaggcgctggcg

SEQ ID NO: 164604 - DNA, 75 bp, synthetic construct
  source 1..75: mol_type = other DNA
acagcttctgccgctacgcagacgactgcaacatctacgtaagtagccggaaagcgggcgaccatctgctgaaga

SEQ ID NO: 164605 - DNA, 75 bp, synthetic construct
  source 1..75: mol_type = other DNA
gatgatgaaacacgcacaaaacctggagttcgaagaggcggcgcaaattcgtgaccagttgcatcagttgcgtga

SEQ ID NO: 164606 - DNA, 75 bp, synthetic construct
  source 1..75: mol_type = other DNA
agtggtcgatatcctggcgctggggcagaacattgccaaaaccaaagcgaagggcagaggaaaatcgcgcccgat

SEQ ID NO: 164607 - DNA, 75 bp, synthetic construct
  source 1..75: mol_type = other DNA
gcgttaatcccgtccttaaaagcgaagaagattgacgccatcatgtcatcgctttccattacggaaaaacgtcag

SEQ ID NO: 164608 - DNA, 75 bp, synthetic construct
  source 1..75: mol_type = other DNA
ccaaacccaaacccaaacccgaacccaaacccaaatccagacccgactcccgatccaacgccgacacccgttccg

SEQ ID NO: 164609 - DNA, 75 bp, synthetic construct
  source 1..75: mol_type = other DNA
acgcgcaaaccacgaagaagccggagaaaagcagtgcgcgggaaggtggttacatggaaggcgcagagggtaacg

SEQ ID NO: 164610 - DNA, 75 bp, synthetic construct
  source 1..75: mol_type = other DNA
atgaaaaaactggtgctatcgctctctctggttctggccttctccagcgcaactgcggcgtttgctgcgattccg

SEQ ID NO: 164611 - DNA, 75 bp, synthetic construct
  source 1..75: mol_type = other DNA
cggtaaagattacaaattcggtggcccgtctgttaaagatgaaaaactgtttggcgtagggaccggcatgggcct

SEQ ID NO: 164612 - DNA, 75 bp, synthetic construct
  source 1..75: mol_type = other DNA
ggttcgagtttattggtcatccgtttaccgcgattctggttgcttgtctggtggcgatttacggtctggcaatgc

SEQ ID NO: 164613 - DNA, 75 bp, synthetic construct
  source 1..75: mol_type = other DNA
caaccggcggggatcattctgttggtgattggtgcaggcggcgtcttcaaacaggtgctggttgactctggcgtc

SEQ ID NO: 164614 - DNA, 75 bp, synthetic construct
  source 1..75: mol_type = other DNA
taccgcgattctggttgcttgtctggtagcgatttatggcctggcaatgcgtcagggcatgccaaaagacaaagt

SEQ ID NO: 164615 - DNA, 75 bp, synthetic construct
  source 1..75: mol_type = other DNA
agtccatagaaatggttcgtaggtatgctcaccttgcgcctaatcatttgacagagcatgcgaggaaaatagacg

SEQ ID NO: 164616 - DNA, 75 bp, synthetic construct
  source 1..75: mol_type = other DNA
gtagcgggttaggtggtgtactgatgggcttcggtgccagcattgcaggtggttgctctatcggtaatggactgg

SEQ ID NO: 164617 - DNA, 75 bp, synthetic construct
  source 1..75: mol_type = other DNA
actcatgtgctacgtcacacgtttgccagtcattttatgatgcggggcggaaatattcttgtgttgcaaaaaata

SEQ ID NO: 164618 - DNA, 75 bp, synthetic construct
  source 1..75: mol_type = other DNA
atgcgccaaacatttattgcgcgtaaaatatcgtttatttcattaatacatttcagggatgaatatatatcaccg

SEQ ID NO: 164619 - DNA, 75 bp, synthetic construct
  source 1..75: mol_type = other DNA
gtctgcgccgttactttgaacagcgcgttgccacacacaaagaagctcactggcaggcttattaccaggctcgcc

SEQ ID NO: 164620 - DNA, 75 bp, synthetic construct
  source 1..75: mol_type = other DNA
cgtgaacgtggcccacgcggtgggcgtccgcgcctggtttttagcgaatcgcgcaggggaacctgccgacctggt

SEQ ID NO: 164621 - DNA, 75 bp, synthetic construct
  source 1..75: mol_type = other DNA
gatgccggtaactcgcttgcgggcattgctgtccttgaacaattgacgaaacaattagggcgttcagtttattaa

SEQ ID NO: 164622 - DNA, 75 bp, synthetic construct
  source 1..75: mol_type = other DNA
gtattccgcgtaatccgtttattaatgccggtgcgctggtggtctgcgatatgttgcaagggcgattaagcgcgc

SEQ ID NO: 164623 - DNA, 75 bp, synthetic construct
  source 1..75: mol_type = other DNA
tgccaacggcgaaaagaaaacgtcaatggatacactaacagcgattatgtccaccgctgaagccgtgaacgtggc

SEQ ID NO: 164624 - DNA, 75 bp, synthetic construct
  source 1..75: mol_type = other DNA
agggttatgacggtaccggaacttaccggtgaagcaagtcaactctacgcccgtgcaggctttaacattattgcc

SEQ ID NO: 164625 - DNA, 75 bp, synthetic construct
  source 1..75: mol_type = other DNA
tactggtgatcctgccgtcgtggacctcgtttctgattcgtgtctacgcctggatgggaatattaaaaaacaacg

SEQ ID NO: 164626 - DNA, 75 bp, synthetic construct
  source 1..75: mol_type = other DNA
gctgtggttgtcgcagttgcaaatgaagcatgggcgcaaactggtcattgcgttgccgtatatctggttgatctt

SEQ ID NO: 164627 - DNA, 75 bp, synthetic construct
  source 1..75: mol_type = other DNA
agggcggcgcatcaaccaccgaagaccaaatcaagtacggctggaactacgctctgcttatcaaccacggtccgt

SEQ ID NO: 164628 - DNA, 75 bp, synthetic construct
  source 1..75: mol_type = other DNA
cagcgattatgtccaccgctgaagccgtgaacgtggcccacgccgtgggcgtccgcgcctggtttttagcgaatc

SEQ ID NO: 164629 - DNA, 75 bp, synthetic construct
  source 1..75: mol_type = other DNA
gtctgcgccgttacttcgaacagcgtgtcgccacacataaagaagctcactggcaggcttattatcaagcccgcc

SEQ ID NO: 164630 - DNA, 75 bp, synthetic construct
  source 1..75: mol_type = other DNA
attggcagcattccaggggcgatgattggcgggctgatcctggggattgcggaggcgctctcttctgcctatctg

SEQ ID NO: 164631 - DNA, 75 bp, synthetic construct
  source 1..75: mol_type = other DNA
ccgcactgatgatgatgggcattgataccggctggctgctggtggcggcgggattcgtcggcgcaatcgtcattg

SEQ ID NO: 164632 - DNA, 75 bp, synthetic construct
  source 1..75: mol_type = other DNA
cctgcaaaactacgtcagcctgaccgaaggttcgcgcgacgtggcgctgcccagtctgtttaacggtcagtgggt

SEQ ID NO: 164633 - DNA, 75 bp, synthetic construct
  source 1..75: mol_type = other DNA
tcaggcattctgcgatgttgttggcgacaacaccgaggttatcgctgaggaggttgggcgagatggcgttctggt

SEQ ID NO: 164634 - DNA, 75 bp, synthetic construct
  source 1..75: mol_type = other DNA
ctttcctggctgaaattcgtgcggaggctcgcaacgaggggattaactataccgcaagccgtcttgctgctgctt

SEQ ID NO: 164635 - DNA, 75 bp, synthetic construct
  source 1..75: mol_type = other DNA
cattcgccttgctgattctggtgttgctggtgatgccgaccggtattctggggcgtccggaggtagagaaagtat

SEQ ID NO: 164636 - DNA, 75 bp, synthetic construct
  source 1..75: mol_type = other DNA
ctggcgaagcctcttacacctgaccagcttcaacaacaaaatggcaaagcgatagatactcgccccagcgcgttt

SEQ ID NO: 164637 - DNA, 75 bp, synthetic construct
  source 1..75: mol_type = other DNA
gtgacgccgatgcaggcgcggcaaattaatgcgctgatggcgaccagtggtatgtatcagaacgccggtgagttt

SEQ ID NO: 164638 - DNA, 75 bp, synthetic construct
  source 1..75: mol_type = other DNA
tatgtaccagaacgcgggggagtttgcctggcgggtgggactaccggcgaaattgcgggtatcgccgtccttgaa

SEQ ID NO: 164639 - DNA, 75 bp, synthetic construct
  source 1..75: mol_type = other DNA
agctacgtctcatttatgatcatcgccgcgctgatgatgatgggcattgataccggctggctgctggtggcggcg

SEQ ID NO: 164640 - DNA, 75 bp, synthetic construct
  source 1..75: mol_type = other DNA
gcaagatgaatgggtagcatatattttgccggggcataacggcatttatcctgcgcgcacatctgagggtaggca

SEQ ID NO: 164641 - DNA, 75 bp, synthetic construct
  source 1..75: mol_type = other DNA
gtgagtgaaactaactatcaggagttgcgcgaggcagcggagcaggcaacgcaagatgaatgggtagcatatatt

SEQ ID NO: 164642 - DNA, 75 bp, synthetic construct
  source 1..75: mol_type = other DNA
gtcgatcagatccagcgtcagtttatccagcagtcgaaaatttcctcgccggaaaaaatccgcaatatggtcagt

SEQ ID NO: 164643 - DNA, 75 bp, synthetic construct
  source 1..75: mol_type = other DNA
gccgctgcatctgcgtgacggtatctggcaggccgatatccatgacacagaactgctgcaatctgccacctttgt

SEQ ID NO: 164644 - DNA, 75 bp, synthetic construct
  source 1..75: mol_type = other DNA
gatgttgcagttacttaaccgtaaccagacccggtttacccatcgcgcccgccgatcccagctccacccggaaga

SEQ ID NO: 164645 - DNA, 75 bp, synthetic construct
  source 1..75: mol_type = other DNA
ctcaacaaagaactgttggcgcaaggtaaaatcatgattgacagtgcatcgggcacattgcccgacggtaccgtt

SEQ ID NO: 164646 - DNA, 75 bp, synthetic construct
  source 1..75: mol_type = other DNA
tgcataccgtgctgtcacccagagccgtcaatctgccacttcatctgcgtgacggcatctggcaggccgatgttc

SEQ ID NO: 164647 - DNA, 75 bp, synthetic construct
  source 1..75: mol_type = other DNA
gccgacggctccctgacgctggatgacgattttatcccctcctgccagaatattcaggtcagtaagaaactgcgt

SEQ ID NO: 164648 - DNA, 75 bp, synthetic construct
  source 1..75: mol_type = other DNA
gcgtacgctaattaacagtgagaaaacgacgccgctgctgactggaacgcgcggtcagcccttgctgatgtgtgt

SEQ ID NO: 164649 - DNA, 75 bp, synthetic construct
  source 1..75: mol_type = other DNA
ggttttgttgagccatttatggatggatatctggttgatcctacgcgagctattgagggcgttctggatagggtg

SEQ ID NO: 164650 - DNA, 75 bp, synthetic construct
  source 1..75: mol_type = other DNA
atgaaatgggaaaacgcaattctgcgcccgtcagccatgaacattaaatgctctgtggtttgccttcatccatgg

SEQ ID NO: 164651 - DNA, 75 bp, synthetic construct
  source 1..75: mol_type = other DNA
aaagcggccaggcctgggctgaaatagctgccgccggggccgttgcactgcatgtctccggcagttttccggacc

SEQ ID NO: 164652 - DNA, 75 bp, synthetic construct
  source 1..75: mol_type = other DNA
atggcaaccacccgcaacaaggtgatgtggcaggaagggatgctgatgcgcccacaccatttccagcaacagcag

SEQ ID NO: 164653 - DNA, 75 bp, synthetic construct
  source 1..75: mol_type = other DNA
tatattgagaagaaaaaaggcaggcagactacacatattgtcttttctttcagagatatagcaactatctctcaa

SEQ ID NO: 164654 - DNA, 75 bp, synthetic construct
  source 1..75: mol_type = other DNA
agagcggctttttttgtgtctgaaatcacccatatccgtgcagtatataggcctgccagaaaagcagttcagtat

SEQ ID NO: 164655 - DNA, 75 bp, synthetic construct
  source 1..75: mol_type = other DNA
cgtcacactactccgtggaagatctggcgaaagtgaaaaaaagaaaaaccggcaatctgtctaaacaatgcagaa

SEQ ID NO: 164656 - DNA, 75 bp, synthetic construct
  source 1..75: mol_type = other DNA
tgaaaaccacccgacgcaaaaaccggaagccttactgaaacgcattattctcgcctcttccaacccaggcgatat

SEQ ID NO: 164657 - DNA, 75 bp, synthetic construct
  source 1..75: mol_type = other DNA
tctgctgtggctgggggttatcgatcaaccgctgaccattcttcataccaatctggcagtttatattggcattgt

SEQ ID NO: 164658 - DNA, 75 bp, synthetic construct
  source 1..75: mol_type = other DNA
tataccgcgttgattcgtattgattattcgctggtggaagcggcactggatctcggtgcacgaccgctgaaaacg

SEQ ID NO: 164659 - DNA, 75 bp, synthetic construct
  source 1..75: mol_type = other DNA
cagccgctgaccattctgcataccaatctggccgtttatatcggcattgtttacgcctacgtgccgtttatggtg

SEQ ID NO: 164660 - DNA, 75 bp, synthetic construct
  source 1..75: mol_type = other DNA
ggcggcatatagtctttctagggatcaaaagcgtatgctgtatctgttcgttgaccagatcagaaaatccgacgg

SEQ ID NO: 164661 - DNA, 75 bp, synthetic construct
  source 1..75: mol_type = other DNA
gcccgcttgatgtgtatgatcatcatgacctgacgaaatcatttaaaacgctgttaccggaagtcaagcgagcac

SEQ ID NO: 164662 - DNA, 75 bp, synthetic construct
  source 1..75: mol_type = other DNA
ccgtaaccagacccggtttacccatcgcgcccgccgctcccagctccatccagaagatttctatcttgatcttgc

SEQ ID NO: 164663 - DNA, 75 bp, synthetic construct
  source 1..75: mol_type = other DNA
tgaaagacgccaaaaactacacgtttaatagcgacgctattctggtagaagctaaaactggagcgcgacgcgcat

SEQ ID NO: 164664 - DNA, 75 bp, synthetic construct
  source 1..75: mol_type = other DNA
gatttggcgatgaaacaaaaaccatcatccagggcgatgctctctgcgaactaaaaaaaatgcccgcagccagcg

SEQ ID NO: 164665 - DNA, 75 bp, synthetic construct
  source 1..75: mol_type = other DNA
ctttacagtgtacatatcaacccatatctcattcccttctttatcgggttacagaaccggtttacgcagtttcgg

SEQ ID NO: 164666 - DNA, 75 bp, synthetic construct
  source 1..75: mol_type = other DNA
aatctctcggcgttagcggcaattctggccggtgccgataaactgctgctgctgaccgatcaaaaaggtttgtat

SEQ ID NO: 164667 - DNA, 75 bp, synthetic construct
  source 1..75: mol_type = other DNA
gtggtgaagtcatccgcatttgcaacctcgaaggccgcgatatcgcccacggtgtcagtcgttacaacagcgatg

SEQ ID NO: 164668 - DNA, 75 bp, synthetic construct
  source 1..75: mol_type = other DNA
ggaggcggaatgacgtctgggacatatgtatatggttatgtggatgaccggggcgttattgtgtacgaaagagtg

SEQ ID NO: 164669 - DNA, 75 bp, synthetic construct
  source 1..75: mol_type = other DNA
aacctttctgcactggcggcgattctggcgggtgccgataaactgttgttactgaccgatcaaaaaggtttgtat

SEQ ID NO: 164670 - DNA, 75 bp, synthetic construct
  source 1..75: mol_type = other DNA
attgccggtgacagcgtttcaggcctcggaactggcggcatgagtaccaaattgcaggccgctgacgtggcttgc

SEQ ID NO: 164671 - DNA, 75 bp, synthetic construct
  source 1..75: mol_type = other DNA
ggtgaaattactgtagatgaaggggcgaccgccgctattcttgaacgcggcagttccctgttgccgaaaggcatt

SEQ ID NO: 164672 - DNA, 75 bp, synthetic construct
  source 1..75: mol_type = other DNA
gataatcgagctttatcgtccggtgccgccgctggcttatttgccgctgatggtgatctggtttggtattggtga

SEQ ID NO: 164673 - DNA, 75 bp, synthetic construct
  source 1..75: mol_type = other DNA
ggactttctgttgaggaagctggtgagatcgttacccaggccgccttctatgctggctggccaaacgcatttacc

SEQ ID NO: 164674 - DNA, 75 bp, synthetic construct
  source 1..75: mol_type = other DNA
tcctggatctatggcaaagacccgcgctgaaaccccgcgacagaagcctgattacggtcagcgccttaatcgcat

SEQ ID NO: 164675 - DNA, 75 bp, synthetic construct
  source 1..75: mol_type = other DNA
tttaaaagagttagagtcttcggcgggaagttattcccgcctttcttacggcgttgcgcattctcattgcaccca

SEQ ID NO: 164676 - DNA, 75 bp, synthetic construct
  source 1..75: mol_type = other DNA
tcttactcgttggaaatcaacacagggggctgggaatgccgcagaaatatagattactttctttaatagtgattt

SEQ ID NO: 164677 - DNA, 75 bp, synthetic construct
  source 1..75: mol_type = other DNA
ctgtggcagcatctggcagccagcctgacgcgcattgtgctggcgctactcgcggcggtgttgatcggtattccg

SEQ ID NO: 164678 - DNA, 75 bp, synthetic construct
  source 1..75: mol_type = other DNA
gatcgttgatttgcgtttttgggaattcgcttatcagtgtgagctttataacgatgttagcggtactcgtgaaga

SEQ ID NO: 164679 - DNA, 75 bp, synthetic construct
  source 1..75: mol_type = other DNA
ggcaatggaaatgctggagatgcgccgtgcagcattgccacctgaagacgacgcggaattcaaagaagcgatcgt

SEQ ID NO: 164680 - DNA, 75 bp, synthetic construct
  source 1..75: mol_type = other DNA
aaaccaggataaaaaggagtccacagagggtgcgtatacccgtctgtgggtgccctttcgggctaccgacttcat

SEQ ID NO: 164681 - DNA, 75 bp, synthetic construct
  source 1..75: mol_type = other DNA
gcgccgcctgcatgatctgcatatgaagttattcgaagatcaggaagcacgggaattattcaaaatttacgggga

SEQ ID NO: 164682 - DNA, 75 bp, synthetic construct
  source 1..75: mol_type = other DNA
ggttgacgagcttacaatcaaatttaattatgagggtgaaatttatctaatttgggtcgggaatagatggtattc

SEQ ID NO: 164683 - DNA, 75 bp, synthetic construct
  source 1..75: mol_type = other DNA
gagggtgcgtttacccgtctgtgggtgccctttcgggctaccgacttcattccacaggtggggattgaaaagcta

SEQ ID NO: 164684 - DNA, 75 bp, synthetic construct
  source 1..75: mol_type = other DNA
ccgtgcgcaggtgctgtggtttgtcattttgcccggcgcgctgccggaaatcctcaccggattacgtattggtct

SEQ ID NO: 164685 - DNA, 75 bp, synthetic construct
  source 1..75: mol_type = other DNA
ctttggaagtcgttgatgaatacggcgaagtggttactgacctctgccataccgtttatgtttcagagttaaccg

SEQ ID NO: 164686 - DNA, 75 bp, synthetic construct
  source 1..75: mol_type = other DNA
ccgcgggcagcaagccgggcgtcattggtgatgtgatggaaggcatttccgtcggtacgctgttccatgcccagg

SEQ ID NO: 164687 - DNA, 75 bp, synthetic construct
  source 1..75: mol_type = other DNA
ggtgaaatcacggtagatgaaggggcaaccgccgccattcttgaacgcggcagttccctgttgccgaaaggtatt

SEQ ID NO: 164688 - DNA, 75 bp, synthetic construct
  source 1..75: mol_type = other DNA
ggggcactttgctggtgggactggaagggacttacccgccgtttagctttcagggcgatgacggtaaattgaccg

SEQ ID NO: 164689 - DNA, 75 bp, synthetic construct
  source 1..75: mol_type = other DNA
cagggcgatgacggtaaattgaccggttttgaagtggagtttgctcaacaactggcaaaacatctgggcgttgaa

SEQ ID NO: 164690 - DNA, 75 bp, synthetic construct
  source 1..75: mol_type = other DNA
atgagtgaaaagagtcacggtacccggcacgacggttattacgagaccgtcatcaccgccgggtcatccaccgtt

SEQ ID NO: 164691 - DNA, 75 bp, synthetic construct
  source 1..75: mol_type = other DNA
acaaaggcacccagcacgacggttattacgagaccgtcatcaccgccgggtcatccaccgtttttatcgatggtc

SEQ ID NO: 164692 - DNA, 75 bp, synthetic construct
  source 1..75: mol_type = other DNA
gaggaaagacctctgcgaggtacgaatccgaaccagccagacggaggtcactgtcttcacagcctacgaatctga

SEQ ID NO: 164693 - DNA, 75 bp, synthetic construct
  source 1..75: mol_type = other DNA
ttgcagagttcgctgccggtgagattggtgagaaagagcacctgaaagccagcgagcagtattcctacggtgctg

SEQ ID NO: 164694 - DNA, 75 bp, synthetic construct
  source 1..75: mol_type = other DNA
acagccgcaacagccggtgtctcctgccatcaacgataagaagtcagattcaggtgtgaatgttccggcaggggg

SEQ ID NO: 164695 - DNA, 75 bp, synthetic construct
  source 1..75: mol_type = other DNA
caacagccgcaacagccgatgtctcctgccatcaacgataagaagtcagattcaggtgtgaatgttccggcaggg

SEQ ID NO: 164696 - DNA, 75 bp, synthetic construct
  source 1..75: mol_type = other DNA
cgataacgattggcaataacgtctggatcggaagtcatgtggttattaatccaggcgtcaccatcggggataatt

SEQ ID NO: 164697 - DNA, 75 bp, synthetic construct
  source 1..75: mol_type = other DNA
atgcctttagcagccaaacttaccgacaaaggcacccagcacgacggttattacgagaccgtcatcaccgccggg

SEQ ID NO: 164698 - DNA, 75 bp, synthetic construct
  source 1..75: mol_type = other DNA
tggctaatgaaccgcatccgattgatggcctgtccggtgaatatgcggagaaatcccttgaagaatgggcggaac

SEQ ID NO: 164699 - DNA, 75 bp, synthetic construct
  source 1..75: mol_type = other DNA
gaggaaagacctctgcgaggtacgaatccgaaccggccagatggaggttgctgttttcgtagactacgaatctag

SEQ ID NO: 164700 - DNA, 75 bp, synthetic construct
  source 1..75: mol_type = other DNA
atcggtgataacgtactgattgcacccaacgttactctttccgttaccgggcaccctgtacaccatgaattgaga

SEQ ID NO: 164701 - DNA, 75 bp, synthetic construct
  source 1..75: mol_type = other DNA
cgtcaccatcggggataattctgttattggcgcgggtagtatcgtcacaaaagacattccaccaaacgtcgtggc

SEQ ID NO: 164702 - DNA, 75 bp, synthetic construct
  source 1..75: mol_type = other DNA
agacgtggcggcaggcgttaagggcgcggactttatctataccgacgtgtgggtgtcgatgggcgaggccaaaga

SEQ ID NO: 164703 - DNA, 75 bp, synthetic construct
  source 1..75: mol_type = other DNA
tggcacccagcctgcgcgagcagctgtcgcgtgcacgggcatggtggctgaaggaccaggccgagggccgcagcg

SEQ ID NO: 164704 - DNA, 75 bp, synthetic construct
  source 1..75: mol_type = other DNA
cgcagcacacgcattcgaccgatccacggagcggtgtcgtgcgtcgccatcacatgtatgaccagacctttcagc

SEQ ID NO: 164705 - DNA, 75 bp, synthetic construct
  source 1..75: mol_type = other DNA
ggactttctgctgaggaagctggggagatcgttacccaagccgcgttttacgctggctggccaaacgcatttacc

SEQ ID NO: 164706 - DNA, 75 bp, synthetic construct
  source 1..75: mol_type = other DNA
atataatcagcaataaaaaatggtatgttcgcgtacataattacttagccccttcattatctcccattgaaatgg

SEQ ID NO: 164707 - DNA, 75 bp, synthetic construct
  source 1..75: mol_type = other DNA
tacgattcaaaaaagtcaggagatttctgtcaaagtttttcccttatgaagacaaaagacaaaatgatattcaat

SEQ ID NO: 164708 - DNA, 75 bp, synthetic construct
  source 1..75: mol_type = other DNA
cctgatctggcaaaagccagctgatgtactggcgtcagaaactggggggctggaggtgatgcgtctcatcacacg

SEQ ID NO: 164709 - DNA, 75 bp, synthetic construct
  source 1..75: mol_type = other DNA
gtctttttgttgcctctggcgcaacgatttctcaggcaggtccgggcggggcgctgctctcgtatattttgattg

SEQ ID NO: 164710 - DNA, 75 bp, synthetic construct
  source 1..75: mol_type = other DNA
atgatgattttcggtatcttcaaaggtgcacagcctgctggctggagtaactggacgataggcgaggcaccgttt

SEQ ID NO: 164711 - DNA, 75 bp, synthetic construct
  source 1..75: mol_type = other DNA
gcaggttcgctggggctacccgatctcggtatttctacccttgatgatgtgctgaccgatattcggcgtatcacc

SEQ ID NO: 164712 - DNA, 75 bp, synthetic construct
  source 1..75: mol_type = other DNA
gacgtttgttcgctgccgctgctggtggatgcggatatcggttttggttcttcggcctttaacgtggcgcgcacc

SEQ ID NO: 164713 - DNA, 75 bp, synthetic construct
  source 1..75: mol_type = other DNA
ttcggcctttaacgtggcgcgcaccgtgaaatcgatgattaaagccggtgcggcaggattgcatattgaagatca

SEQ ID NO: 164714 - DNA, 75 bp, synthetic construct
  source 1..75: mol_type = other DNA
tggaactttgctaccaaacgcgtggcgcttgcagatacgagcaatccaccgcctgactgggaatatgcgtatcag

SEQ ID NO: 164715 - DNA, 75 bp, synthetic construct
  source 1..75: mol_type = other DNA
acggaacaggaaagttgatctacacagacctgaaccgccccgggtttcctggagagtgttttatctgtgaactca

SEQ ID NO: 164716 - DNA, 75 bp, synthetic construct
  source 1..75: mol_type = other DNA
aggaaacgttggatcgcgtcctgacagttcaacgcgaattacaagtttcgatgcaatcactattactcaaagcag

SEQ ID NO: 164717 - DNA, 75 bp, synthetic construct
  source 1..75: mol_type = other DNA
ctgctggctgacggcgacagcgttaccatcattaaagatctgaaggtgaaaggtagctcttcgatgctgaagatc

SEQ ID NO: 164718 - DNA, 75 bp, synthetic construct
  source 1..75: mol_type = other DNA
taccggcaaatactttggttcatttactaatggcatgatcaccggcgtggtccccatcctcgctgtctggctgtt

SEQ ID NO: 164719 - DNA, 75 bp, synthetic construct
  source 1..75: mol_type = other DNA
ggcgcgttttattcgctggtgattaatttccagatccctcatttgcatcaacaagtgttgaaagcggcccccatt

SEQ ID NO: 164720 - DNA, 75 bp, synthetic construct
  source 1..75: mol_type = other DNA
tcagtggctcacggaacagcaggccggtgaaatctggcggcaatatgtgccgcatcagttcctgttcgccgaaat

SEQ ID NO: 164721 - DNA, 75 bp, synthetic construct
  source 1..75: mol_type = other DNA
aatgctgatgcaggggctgattagcgccgagcagctggcacaggcgctggcagagcaaaacggcgtggcgtggga

SEQ ID NO: 164722 - DNA, 75 bp, synthetic construct
  source 1..75: mol_type = other DNA
gtacaatgcggttcagcatcagtggctcacggaacagcagaccggtgaaatctggcggcaatatgtgccgcatca

SEQ ID NO: 164723 - DNA, 75 bp, synthetic construct
  source 1..75: mol_type = other DNA
gttcgccgaaatactgaccacgctcggtcatattaatcgttcagcaattaacgtgttgttattgcgccatgaacg

SEQ ID NO: 164724 - DNA, 75 bp, synthetic construct
  source 1..75: mol_type = other DNA
tagcgccgagcagctggcacaggcgctggcagagcaaaacggcgtggcgtgggaatccatcgatgcctggcagat

SEQ ID NO: 164725 - DNA, 75 bp, synthetic construct
  source 1..75: mol_type = other DNA
tgatcgattatcgcaaaaatcctccacagccttacaatcatcaaaaagtaccgggtaacgtctgggattttcctc

SEQ ID NO: 164726 - DNA, 75 bp, synthetic construct
  source 1..75: mol_type = other DNA
atgagtgcttactacttcgaaggaaatagtatcgacggttttatatacctgtgcctctttcttgtggttatctgt

SEQ ID NO: 164727 - DNA, 75 bp, synthetic construct
  source 1..75: mol_type = other DNA
tatctgcctgtcatcattcacactcaacaagaggcgatgatttcaggctgcaatggttttattttggcaacgagt

SEQ ID NO: 164728 - DNA, 75 bp, synthetic construct
  source 1..75: mol_type = other DNA
gtttggttatcaacaataaccgtgtcagatttgccgtaaacctggatgctttatcacgtagtggtgtgaaggtga

SEQ ID NO: 164729 - DNA, 75 bp, synthetic construct
  source 1..75: mol_type = other DNA
ggcgtgtgtaggagtggtgttgatgatttggctgtatcaggcgcttaagttcagaaaccgcgcgctggcgctgga

SEQ ID NO: 164730 - DNA, 75 bp, synthetic construct
  source 1..75: mol_type = other DNA
tggcggtgatgggctttgcggaactgtttatcgaccggttgccatgtcgcaaattacgcgcattgaaatccccgg

SEQ ID NO: 164731 - DNA, 75 bp, synthetic construct
  source 1..75: mol_type = other DNA
gcatcatcattaatgtgcctggtgggcagtattattcctatatccatcagtgggaattatataaagctaactcaa

SEQ ID NO: 164732 - DNA, 75 bp, synthetic construct
  source 1..75: mol_type = other DNA
atgaacacttttttcaaaggtaaaaaactgctcgtcgtcggcggtaccagcggcatgggcctggccgtggcacgc

SEQ ID NO: 164733 - DNA, 75 bp, synthetic construct
  source 1..75: mol_type = other DNA
tgtatcttgcgctgaaccgcgccacgttctttattacgcaggatgtcgtgaagaacatgcttgccgcgaagatcg

SEQ ID NO: 164734 - DNA, 75 bp, synthetic construct
  source 1..75: mol_type = other DNA
ggcaacaatcgcatcagcatttttagcgagataacaccggatccgacaatccaaaccgtggcgcgcggtattgca

SEQ ID NO: 164735 - DNA, 75 bp, synthetic construct
  source 1..75: mol_type = other DNA
gatgccttatctcgtagcggtgtaaaggtcaacccggatgtcttaatgctcgcacggaagaaaaatgatggataa

SEQ ID NO: 164736 - DNA, 75 bp, synthetic construct
  source 1..75: mol_type = other DNA
atgtccgtgatttgcactctgatgatggcgatgttcagcaaattgtcctcgggcaacttgcacccaaaattgtca

SEQ ID NO: 164737 - DNA, 75 bp, synthetic construct
  source 1..75: mol_type = other DNA
agaaggtatggaaactatccgtcaggaaattaatgctcaccatcgcgatatcagcctgatggtgaatgccgccgg

SEQ ID NO: 164738 - DNA, 75 bp, synthetic construct
  source 1..75: mol_type = other DNA
ataagttggagtcattacccggcgttcgagcagcgtgaggtttcgcaaaccgaggaaaaaaaagcgattgccgaa

SEQ ID NO: 164739 - DNA, 75 bp, synthetic construct
  source 1..75: mol_type = other DNA
ttgattatgccgatatttcccaacgcgaacagttggccgcggcattaaaacgctggccgttgctggcagagtttg

SEQ ID NO: 164740 - DNA, 75 bp, synthetic construct
  source 1..75: mol_type = other DNA
gcgtggatgaacggcagagaatataaacaaatcgcccccgacggaacgccaaagaaaaacagcgaatgtctctat

SEQ ID NO: 164741 - DNA, 75 bp, synthetic construct
  source 1..75: mol_type = other DNA
agaaggaatttggctttagtccaatgcaatttagcctggtgtttggccttaacggcatcggacttatcattgctt

SEQ ID NO: 164742 - DNA, 75 bp, synthetic construct
  source 1..75: mol_type = other DNA
atcggctcttcgtcgttcgtgttgcagaaggaatttggctttagtccaatgcaatttagcctggtgtttggcctt

SEQ ID NO: 164743 - DNA, 75 bp, synthetic construct
  source 1..75: mol_type = other DNA
taacaatatttactggctggtggtctggcgttttattcaggggatcgcgggggcaggtggttcggtgctctctcg

SEQ ID NO: 164744 - DNA, 75 bp, synthetic construct
  source 1..75: mol_type = other DNA
tttacgccaggttgttcacggcactcgctggcacgctaaacgcaagagctacaaagtgttgttctggcgcgagat

SEQ ID NO: 164745 - DNA, 75 bp, synthetic construct
  source 1..75: mol_type = other DNA
atgagtcacggaataaagatttgggggttgttgtccgtattgggcttgcgacgggtgctcggtggagtgaagcag

SEQ ID NO: 164746 - DNA, 75 bp, synthetic construct
  source 1..75: mol_type = other DNA
aaaaatatgtttgctacttatcgggaaagaaggctatcaggagaatggaatcccaaggggaagaaaaaacttagt

SEQ ID NO: 164747 - DNA, 75 bp, synthetic construct
  source 1..75: mol_type = other DNA
gctaaaccgtatggcagtggattttgaagaaatcaaatcaaaagtagagttcaacaccgagctgtacaaactgac

SEQ ID NO: 164748 - DNA, 75 bp, synthetic construct
  source 1..75: mol_type = other DNA
catggcgcaaacagccaatatgtttgccttaggcctgttagtcattgatgaaatacaacatttgagtcgagcaaa

SEQ ID NO: 164749 - DNA, 75 bp, synthetic construct
  source 1..75: mol_type = other DNA
ttgtacatcctatgctcagcgcattacgttcaggtatacctgaacggatagctcaattctcagatttggctgtac

SEQ ID NO: 164750 - DNA, 75 bp, synthetic construct
  source 1..75: mol_type = other DNA
tcatgctcgatggcacctggccggaagctcgcaagatgtttcgtaaaagtccgtatctggataatcttcccgtca

SEQ ID NO: 164751 - DNA, 75 bp, synthetic construct
  source 1..75: mol_type = other DNA
agcccaggctgaaggccaatattgtactgccgaggtagccatcgcactgttagatatggccggcgataccggggc

SEQ ID NO: 164752 - DNA, 75 bp, synthetic construct
  source 1..75: mol_type = other DNA
ttcaatggtcgcgtaccgaaccctcgcaggatttgctggatctggtacaaaacccggattatcagccaatggtgg

SEQ ID NO: 164753 - DNA, 75 bp, synthetic construct
  source 1..75: mol_type = other DNA
agatcccgtcctcgctgattgccgaaatgccagcctccgtagcgctgcattatgcagtactgccgctgcgtctgg

SEQ ID NO: 164754 - DNA, 75 bp, synthetic construct
  source 1..75: mol_type = other DNA
agtttttggtcaccgaaggcgttatcagccaggaaacgttggatcgcgtcctgacaattcaacgcgaattacaag

SEQ ID NO: 164755 - DNA, 75 bp, synthetic construct
  source 1..75: mol_type = other DNA
gcaaaaagccgcttttgtttgctgatgtttgacaccgagccaatgaaacccagcaatactggacgtttgattgcc

SEQ ID NO: 164756 - DNA, 75 bp, synthetic construct
  source 1..75: mol_type = other DNA
atatgcgcgtcggcatggatgcaatgaaagaagttgtcagaaacaaaattaatgtctgtggttcagaaaatagaa

SEQ ID NO: 164757 - DNA, 75 bp, synthetic construct
  source 1..75: mol_type = other DNA
aactgggtcgcctgggcggtgtggaagatgatatgagcgttgacgccgaaagcgcgttccttaccgacccacaag

SEQ ID NO: 164758 - DNA, 75 bp, synthetic construct
  source 1..75: mol_type = other DNA
attggtacggcgcacggcttatacagcaaaacgccgaagattgatttccagcggctggcggaaattcgtgaagtg

SEQ ID NO: 164759 - DNA, 75 bp, synthetic construct
  source 1..75: mol_type = other DNA
agctcgcaagatgtttcgtaaaagtccgtatctggataatcttcccgtcatttccgtcgatctttcccggctttc

SEQ ID NO: 164760 - DNA, 75 bp, synthetic construct
  source 1..75: mol_type = other DNA
tggcgtaaggtagatccagacagttttgagattttagggtctgttgaatatctccgctatgttggtcagggttag

SEQ ID NO: 164761 - DNA, 75 bp, synthetic construct
  source 1..75: mol_type = other DNA
gaagcccagatggaacggaaggagtccggatttaatcagaaggagttcaataaagtattgcttgagaatgttatg

SEQ ID NO: 164762 - DNA, 75 bp, synthetic construct
  source 1..75: mol_type = other DNA
ggctgaacagtgccatgtgggatgccattcaggaggaaatctgtggtgtcattgagaaggccgggatagaactga

SEQ ID NO: 164763 - DNA, 75 bp, synthetic construct
  source 1..75: mol_type = other DNA
cagtaaaagataagtttggcccgggcaagaacggatttactgacggaaatcttcgcacaggacgtcttgccacct

SEQ ID NO: 164764 - DNA, 75 bp, synthetic construct
  source 1..75: mol_type = other DNA
ccgccgctggtggtatgggcaatcgtgatgcacagctggcagatggcatttatcatctccggtgcgctgagcttt

SEQ ID NO: 164765 - DNA, 75 bp, synthetic construct
  source 1..75: mol_type = other DNA
aaaaatgtctttgctctacccacggatatgcctattgaggatggggcttttattgaaccgattaccgttggcctg

SEQ ID NO: 164766 - DNA, 75 bp, synthetic construct
  source 1..75: mol_type = other DNA
atggggcaattcatcccgacctgtagttgcagagcttggtgatgattccggctggcatttttacagccagagaaa

SEQ ID NO: 164767 - DNA, 75 bp, synthetic construct
  source 1..75: mol_type = other DNA
aacggacagatgaccccatcaaactatggaaatttcgatgcccgttatcagcagcgaaatggcggcgtgcaggat

SEQ ID NO: 164768 - DNA, 75 bp, synthetic construct
  source 1..75: mol_type = other DNA
gcctggcgagtggggcttccggcgaaatctggcgttggcggcggtattgttgcgatcgtcccgcatgaaatggct

SEQ ID NO: 164769 - DNA, 75 bp, synthetic construct
  source 1..75: mol_type = other DNA
tccgtctggatcgccgttcaattccctggtgcaactggaaatggagcagggcattccacgcaatccgtttattaa

SEQ ID NO: 164770 - DNA, 75 bp, synthetic construct
  source 1..75: mol_type = other DNA
agagtaatgcgaacggcatatatacgagtggtattagtcagaatgatggtagtggcaccgctgcggcttttaatg

SEQ ID NO: 164771 - DNA, 75 bp, synthetic construct
  source 1..75: mol_type = other DNA
atgaattaccaactggcaaaactttatcgtggtaaacatttcgtagggtatgggattgcagttaatggtgagtta

SEQ ID NO: 164772 - DNA, 75 bp, synthetic construct
  source 1..75: mol_type = other DNA
ggattattagtgttgcccgacgtagtgcagtaaaagcctgtacgcaggcgattaatcagcttcgtgcactgctgg

SEQ ID NO: 164773 - DNA, 75 bp, synthetic construct
  source 1..75: mol_type = other DNA
aaatgcggctatcgcctggctgatgaagtcgtttggcaatttccatcatgacgtgacaaccgttctgcaaaacta

SEQ ID NO: 164774 - DNA, 75 bp, synthetic construct
  source 1..75: mol_type = other DNA
acgggacgctacaaagcaacagggccatgaacatttctggtagggtaacaccgtcagactacggaaactttgatg

SEQ ID NO: 164775 - DNA, 75 bp, synthetic construct
  source 1..75: mol_type = other DNA
ttgccagctcgggcttatgtggttccggatttacccaggatatttaaaaatggtgcacattattatccaataacg

SEQ ID NO: 164776 - DNA, 75 bp, synthetic construct
  source 1..75: mol_type = other DNA
gagctgcgctttaatcagcttatcctcgagacggctggcgtcccgcaaaccgtcgaactggcggtagagattgcc

SEQ ID NO: 164777 - DNA, 75 bp, synthetic construct
  source 1..75: mol_type = other DNA
atgtcccgcatgatctccagccagctttcactgggcatcagcagaatgcaaatccccgccagaccggtaacatca

SEQ ID NO: 164778 - DNA, 75 bp, synthetic construct
  source 1..75: mol_type = other DNA
tgaaggtggcaaccggagatggcctgtttctgcgacaggacaggaatctttcggatgtggaagacagggatgagt

SEQ ID NO: 164779 - DNA, 75 bp, synthetic construct
  source 1..75: mol_type = other DNA
ttcggcagataacatcggcggcgtgtattaccgtccgcttcagaaactgattaacggcacctggtataacgtggc

SEQ ID NO: 164780 - DNA, 75 bp, synthetic construct
  source 1..75: mol_type = other DNA
gccgcaaatgcagggcgttttacgcgagctgcgctttaatcagcttatcctcgagacggctggcgtcccgcaaac

SEQ ID NO: 164781 - DNA, 75 bp, synthetic construct
  source 1..75: mol_type = other DNA
tattgaaccgattaccgttggcctgcatgctttccatttagcgcaaggttgtgagaataaaaacgttattattat

SEQ ID NO: 164782 - DNA, 75 bp, synthetic construct
  source 1..75: mol_type = other DNA
atattgcgtaaagagctgacggttatcggcagttggatgaactactccagcccttggccggggcaggagtgggaa

SEQ ID NO: 164783 - DNA, 75 bp, synthetic construct
  source 1..75: mol_type = other DNA
cattagctcagaaaaactggcactggcaaaatctttcggtgcgatgcaaacatttaacagtagcgaaatgagcgc

SEQ ID NO: 164784 - DNA, 75 bp, synthetic construct
  source 1..75: mol_type = other DNA
aacaatgtctttgcactacctgcggatatgcctattgaggatggcgcttttattgaaccgattaccgttggcctg

SEQ ID NO: 164785 - DNA, 75 bp, synthetic construct
  source 1..75: mol_type = other DNA
cagttccacgaagaacgtagggtttaatttatggggcaatcaatccagacctgtagttgcagaacttggtgatga

SEQ ID NO: 164786 - DNA, 75 bp, synthetic construct
  source 1..75: mol_type = other DNA
caacctaaggctcaccgatattgcccaagcggtgaataccaagaactggacgtttgccaaagatattctcgatac

SEQ ID NO: 164787 - DNA, 75 bp, synthetic construct
  source 1..75: mol_type = other DNA
ttgctggttttgtaactcttctaaataaatatatagcaggtgaaattcatatcgaacatgaaaaaattcctgcgt

SEQ ID NO: 164788 - DNA, 75 bp, synthetic construct
  source 1..75: mol_type = other DNA
ttaatgactattataagataattgcagaagaaattggttatactgggagtttttctcatgatttaacaaaaccaa

SEQ ID NO: 164789 - DNA, 75 bp, synthetic construct
  source 1..75: mol_type = other DNA
gtttttgccgttggtatgttttccatttttgaagcgcatttacaaaatggattgagttgccaaaatggatttaaa

SEQ ID NO: 164790 - DNA, 75 bp, synthetic construct
  source 1..75: mol_type = other DNA
gtggaaatcgtgttgcaccaatgagtattgttgatataacaactcgcgctgttaactatagcgcgatcttcgacc

SEQ ID NO: 164791 - DNA, 75 bp, synthetic construct
  source 1..75: mol_type = other DNA
cgctatatcacccaaaagcgcatggtcgagaagcagatgaagatggccgcgatggcaacagaagttgaagggaac

SEQ ID NO: 164792 - DNA, 75 bp, synthetic construct
  source 1..75: mol_type = other DNA
gtatggtcactcttctctgccactgatggtattaggcctggcggtgatgggctttgcggaactgtttatcgaccc

SEQ ID NO: 164793 - DNA, 75 bp, synthetic construct
  source 1..75: mol_type = other DNA
gttgggatgattgccgggctggttatcttcttatgtggcaatcgtcatttcgctcatacccgcggcgttaacaaa

SEQ ID NO: 164794 - DNA, 75 bp, synthetic construct
  source 1..75: mol_type = other DNA
tcgaatctggggaaaattcgctattgggctcggcctgatgagcgccggattctgcattctggccctgagcgcccg

SEQ ID NO: 164795 - DNA, 75 bp, synthetic construct
  source 1..75: mol_type = other DNA
gcgacgtgatcaatgaaatccaggggttgcacagcgccggtcagggtacggagcgttaccgcctcacccataccc

SEQ ID NO: 164796 - DNA, 75 bp, synthetic construct
  source 1..75: mol_type = other DNA
tgcaataccgactctcgctaatgcactgaaagaaaaaaaagcagaatggtcagcacgtcttccagatatggttca

SEQ ID NO: 164797 - DNA, 75 bp, synthetic construct
  source 1..75: mol_type = other DNA
gttttaacccatgcgcttgaagcttatgtatctcctcatgccagtgacttcacggacgcgctggtcgaaaaagca

SEQ ID NO: 164798 - DNA, 75 bp, synthetic construct
  source 1..75: mol_type = other DNA
tatacgggttaataggtgctgctattgcatggtccgtaagaacaacaatagattgttttttgttaatatggctaa

SEQ ID NO: 164799 - DNA, 75 bp, synthetic construct
  source 1..75: mol_type = other DNA
tggcggtagtgtattatttttgagtagcaatgtaattgttaaattattaaacattaacgcgaatcatgttgtaga

SEQ ID NO: 164800 - DNA, 75 bp, synthetic construct
  source 1..75: mol_type = other DNA
cctttaccgggccaatatgacatcgatatttatgtcaataaacaatggcgtgggaaatatgagattatcgttaaa

SEQ ID NO: 164801 - DNA, 75 bp, synthetic construct
  source 1..75: mol_type = other DNA
tgacgggcgaggtgcagacggtggtcgcgaattattaagctggcaggcagctacaaacttttctcagtttgccgg

SEQ ID NO: 164802 - DNA, 75 bp, synthetic construct
  source 1..75: mol_type = other DNA
aggcagtcagggatattgaattttgcgttctttgcggaagatacggagttcaggccgctcacagaaatgaaggga

SEQ ID NO: 164803 - DNA, 75 bp, synthetic construct
  source 1..75: mol_type = other DNA
ttgtcgcggttgtctggctaagtggcataacattcctcagggggaagcgttaagtgaggagcaacaacgttatat

SEQ ID NO: 164804 - DNA, 75 bp, synthetic construct
  source 1..75: mol_type = other DNA
tggtttataaaagcattaagatccgatggacagccattaacgtttggttatgaagtcaatgatatgcatggtcat

SEQ ID NO: 164805 - DNA, 75 bp, synthetic construct
  source 1..75: mol_type = other DNA
atgcagcggtgccaaatatgctgcaacccggcgtgtcgtagccatattgaaggggcgagcaaacaaagtgatttt

SEQ ID NO: 164806 - DNA, 75 bp, synthetic construct
  source 1..75: mol_type = other DNA
aacttgttcagggggggagttatgcctgggatatcggcgtttttcgtctcgatttcagtgttccgcaagcctggg

SEQ ID NO: 164807 - DNA, 75 bp, synthetic construct
  source 1..75: mol_type = other DNA
tgcggcgggccgtagccatattgaaggggcgagcaagcaaagtgattttatccagatgggttatcagtatggttt

SEQ ID NO: 164808 - DNA, 75 bp, synthetic construct
  source 1..75: mol_type = other DNA
cagcaatcgttgtgttattgctcggcattgaagttcatgcagcagaagaaacctttgatacccattttatgatgg

SEQ ID NO: 164809 - DNA, 75 bp, synthetic construct
  source 1..75: mol_type = other DNA
attatcaggaaccgttggaagccgggatcagtttaactatggggtcaacctgagttatcagcatcagggaaatga

SEQ ID NO: 164810 - DNA, 75 bp, synthetic construct
  source 1..75: mol_type = other DNA
tagctgcgcggcacaaactgaagatggcactgggtaaagatctgtctgataaacccgtagagcatatagaccaga

SEQ ID NO: 164811 - DNA, 75 bp, synthetic construct
  source 1..75: mol_type = other DNA
tggcgcgattgacgtctacactgcatgggaggaaatgggcaaagtacgcgacgctctggaagctgcaggtctgaa

SEQ ID NO: 164812 - DNA, 75 bp, synthetic construct
  source 1..75: mol_type = other DNA
taagatccgcaaagtgctgaagatcgccaaagagccaatctccatggaaacgccgatcggtgatgatgaagattc

SEQ ID NO: 164813 - DNA, 75 bp, synthetic construct
  source 1..75: mol_type = other DNA
tgaaagttccggtgactgccgaggggctggctgctattaaaatgttaaaagcagaaggtattccgacgctgggta

SEQ ID NO: 164814 - DNA, 75 bp, synthetic construct
  source 1..75: mol_type = other DNA
ggatgctaagcgcggtaaaatcttcactaaaatcattcgtgagctggtaaccgcggctaagctcggcggtggcga

SEQ ID NO: 164815 - DNA, 75 bp, synthetic construct
  source 1..75: mol_type = other DNA
gcagcaattgataaagcgttgtctaacaacatgacccgtgacaccctgaaccgcgctatcgcacgtggtgtaggt

SEQ ID NO: 164816 - DNA, 75 bp, synthetic construct
  source 1..75: mol_type = other DNA
agcagacagcgcggaagtttccatgatcccgtccaccaaagctgatatggatgcagaaaccgcaccgaaactgat

SEQ ID NO: 164817 - DNA, 75 bp, synthetic construct
  source 1..75: mol_type = other DNA
ggattcctcataaatttaatgaggagcaaatgggtaaattcaagagatccaaagcagaaactgaggactttgata

SEQ ID NO: 164818 - DNA, 75 bp, synthetic construct
  source 1..75: mol_type = other DNA
cagtgctaccagtactggcgttttatatcgtcgccgcagaagagcaaggtgttacacccgataaactgaccggca

SEQ ID NO: 164819 - DNA, 75 bp, synthetic construct
  source 1..75: mol_type = other DNA
atgtctaacgtgcaggagtggcaacagcttgccaacaaggaattgagccgtcgggagaaaactgtcgactcgctg

SEQ ID NO: 164820 - DNA, 75 bp, synthetic construct
  source 1..75: mol_type = other DNA
acgtatttttccgctggcgggtgtgaccactaacccaagcattatcgcagcgggtaaaaaaccgctggacgttgt

SEQ ID NO: 164821 - DNA, 75 bp, synthetic construct
  source 1..75: mol_type = other DNA
gctgctgtcggcgctggcaggtgcggagtacgttgcgccttacgtcaaccgaattgatgctcagggcggtagcgg

SEQ ID NO: 164822 - DNA, 75 bp, synthetic construct
  source 1..75: mol_type = other DNA
gatttagaagaacttagaattaaagccagtaataaaaggaaaacctcctttaaagatgatttttccatgatcttt

SEQ ID NO: 164823 - DNA, 75 bp, synthetic construct
  source 1..75: mol_type = other DNA
gcgcatgatgccattgtcacccacagacccacgccggaactcaaccgccagtcaccggaagagacaacaatggcc

SEQ ID NO: 164824 - DNA, 75 bp, synthetic construct
  source 1..75: mol_type = other DNA
gttcaaagcaactggcggtacacctatggcggaagctatgtggtatgcagcctttgaactcaccaagacccgtga

SEQ ID NO: 164825 - DNA, 75 bp, synthetic construct
  source 1..75: mol_type = other DNA
actgttccaaaagaacattgtcattgatgatgcggcagctctgcaacgcacactgtttaagttgatggagcggtc

SEQ ID NO: 164826 - DNA, 75 bp, synthetic construct
  source 1..75: mol_type = other DNA
aagcgatgcggttgattatcgagcacaacatcaatgtgcgcatgaaacacgctgatcagcgtctggagctcgata

SEQ ID NO: 164827 - DNA, 75 bp, synthetic construct
  source 1..75: mol_type = other DNA
tacaaagccgggcagatggtcacggtgacaatggcctcatccccttcagacagaacacaggctgaatggacaatg

SEQ ID NO: 164828 - DNA, 75 bp, synthetic construct
  source 1..75: mol_type = other DNA
ccttcatggatcagattctccatgtcacccgctgacattaagaataatgttggtttaaacgtcacaggtggcgat

SEQ ID NO: 164829 - DNA, 75 bp, synthetic construct
  source 1..75: mol_type = other DNA
gacgttggaggcgccgggcgaaccggaaacgccggaagcaatacagcaagagctgctgcaacgcattgacaaggt

SEQ ID NO: 164830 - DNA, 75 bp, synthetic construct
  source 1..75: mol_type = other DNA
accactgggttcgcctggtgaaccagaaacgccggaagcaatgcaacgagagctactgcaacgcatcgacaaggt

SEQ ID NO: 164831 - DNA, 75 bp, synthetic construct
  source 1..75: mol_type = other DNA
ctggcatttcgcgcaatgctctcgccgtctgctgtgctggcactgctggatcagctggagcacgccagaaccacg

SEQ ID NO: 164832 - DNA, 75 bp, synthetic construct
  source 1..75: mol_type = other DNA
agcgatgttgaggtgatcggcataggggtagagactaccgcagtgtcaggactgttccaaaagaacattgtcatt

SEQ ID NO: 164833 - DNA, 75 bp, synthetic construct
  source 1..75: mol_type = other DNA
acttaaagctgagctcaaccgggtggctcaagataagggtgacagtagttatatgactgttcgctctgctgtgaa

SEQ ID NO: 164834 - DNA, 75 bp, synthetic construct
  source 1..75: mol_type = other DNA
atcgaggaggaaaaggagaaggaagagcagaagcctaagaatggtgaggatggtaacaatcagcagaatgctggt

SEQ ID NO: 164835 - DNA, 75 bp, synthetic construct
  source 1..75: mol_type = other DNA
gcttctgtttcttcatgcctgtcatttgtctgttactgatgatgttgttgttcctgctactgctactgctactgc

SEQ ID NO: 164836 - DNA, 75 bp, synthetic construct
  source 1..75: mol_type = other DNA
ccattcgggaatttctttcacgctcattacgtgggcatacgttgaacgatgatgacgatattttttctctcgggc

SEQ ID NO: 164837 - DNA, 75 bp, synthetic construct
  source 1..75: mol_type = other DNA
tttccagcgtggaatctgaaatcgggcgcacgactgacccggtacgcatgtacatgcgtgaaatgggcaccgttg

SEQ ID NO: 164838 - DNA, 75 bp, synthetic construct
  source 1..75: mol_type = other DNA
caccaccgatgccgttggcattagtggcgatgacatggaagcattggctttcgcctggcttgcctggcggacgct

SEQ ID NO: 164839 - DNA, 75 bp, synthetic construct
  source 1..75: mol_type = other DNA
aatatgcttagtgatgcgtatttttcccaatccgcgccaaaaagcaccgggcgcgaatactttaactatggctgg

SEQ ID NO: 164840 - DNA, 75 bp, synthetic construct
  source 1..75: mol_type = other DNA
aatgcctgtctgcccgtgccgggaaaagaccgcgcgccggtggcgctgaaaggggccgcgctcacgcgccgcccc

SEQ ID NO: 164841 - DNA, 75 bp, synthetic construct
  source 1..75: mol_type = other DNA
atgcataaaaatatctttctatactacgaaactacgaaactacgaaactacgaaactacgaaactacgaaactac

SEQ ID NO: 164842 - DNA, 75 bp, synthetic construct
  source 1..75: mol_type = other DNA
ttacgcggctgagcacaacattattgttgttgcgccggacaccagtccgcgaggcagtcatgtcgcagatgccga

SEQ ID NO: 164843 - DNA, 75 bp, synthetic construct
  source 1..75: mol_type = other DNA
caaattgaagcataccgccagaactgttgggtggagggcttccacttcaaacgagtatctcctttagggaaggtg

SEQ ID NO: 164844 - DNA, 75 bp, synthetic construct
  source 1..75: mol_type = other DNA
gattgcgccgtctctgtctcagtggcgtgagggaaaggaagggctgaactggctggttatcaggttgataccgtc

SEQ ID NO: 164845 - DNA, 75 bp, synthetic construct
  source 1..75: mol_type = other DNA
ggttgcagtaaacgacgatatggcttacgcattccatcacgcattgtcagattcatcgctaggcgctgatgaagt

SEQ ID NO: 164846 - DNA, 75 bp, synthetic construct
  source 1..75: mol_type = other DNA
aatggcacctgaagaagcgcctgcaatgcttcggtttcgtcgcagcggtagcaaactcactcttattaatccaac

SEQ ID NO: 164847 - DNA, 75 bp, synthetic construct
  source 1..75: mol_type = other DNA
atgacacagggctggcgggaggataaatgcccgtctgaccgcgccgggaaaataccgcgcgtcggtggcgctgaa

SEQ ID NO: 164848 - DNA, 75 bp, synthetic construct
  source 1..75: mol_type = other DNA
atgacacagggctggcgggaggataaatgcccgtctgaccgcgctgggaaaacaccgcgcgtcggtggcgctgaa

SEQ ID NO: 164849 - DNA, 75 bp, synthetic construct
  source 1..75: mol_type = other DNA
accaatgggagtcacgatttttacgatggtctgctaatggcctcagtgtcgcctgatgaggcagacaactctttt

SEQ ID NO: 164850 - DNA, 75 bp, synthetic construct
  source 1..75: mol_type = other DNA
ccctttcattacgcggacgttctgatgggggcttctgtcttttcagacctgtcatttgtctgttactgatgatgt

SEQ ID NO: 164851 - DNA, 75 bp, synthetic construct
  source 1..75: mol_type = other DNA
atgacacagggctggcgggaggataaatgcccgtctgtccgcgcggggaaaacaccgcgcgtcggtggcgctgaa

SEQ ID NO: 164852 - DNA, 75 bp, synthetic construct
  source 1..75: mol_type = other DNA
atgacacagggctggcgggaggataaatgcccgtctgtccgcgccgggaaaagaccgcgcgtcggtggcgctgaa

SEQ ID NO: 164853 - DNA, 75 bp, synthetic construct
  source 1..75: mol_type = other DNA
ttacgcggacgttctgatgggggcttctgtcttttcagacctgtcatttgtctgttactgatgatgttgttgttc

SEQ ID NO: 164854 - DNA, 75 bp, synthetic construct
  source 1..75: mol_type = other DNA
ggtctgtggtggtggaagccgtaatccattggtgatgacgcgacttgctgccttgctgccaggaaccgaagtgac

SEQ ID NO: 164855 - DNA, 75 bp, synthetic construct
  source 1..75: mol_type = other DNA
tgcgatcggctgtcacggtcaaaccgtctggcatgaaccgacgggcgtggcaccacacactttacagattggcga

SEQ ID NO: 164856 - DNA, 75 bp, synthetic construct
  source 1..75: mol_type = other DNA
gtgggcttctgtcttttcagacctgtcatttgcctgttactgatgatgttgttgttcctgctactgctactgcta

SEQ ID NO: 164857 - DNA, 75 bp, synthetic construct
  source 1..75: mol_type = other DNA
atttgtctgttactgatgatgtggttgttcctgctactgctactgctactgctactgctactgttcttctttttt

SEQ ID NO: 164858 - DNA, 75 bp, synthetic construct
  source 1..75: mol_type = other DNA
tttcattacgcggacgttctgctgtgggcttctgtcttttcagacctgtcatttgcctgttactgatgatgttgt

SEQ ID NO: 164859 - DNA, 75 bp, synthetic construct
  source 1..75: mol_type = other DNA
ggcaaaaacctctaccacaccttgtcggtgtatgaaaacgtcgattttttcgctcgcctgttcggtcacgacaaa

SEQ ID NO: 164860 - DNA, 75 bp, synthetic construct
  source 1..75: mol_type = other DNA
taaattatgacgggaaaaaattcacgtatccggtcgctgatgagtggccgggattctcaacagtaatggagtgga

SEQ ID NO: 164861 - DNA, 75 bp, synthetic construct
  source 1..75: mol_type = other DNA
gtagcccgtcggatgacgttaacgagtacgaggaagaagtcgagagagtggtcggcatttacgcgccgcatctcg

SEQ ID NO: 164862 - DNA, 75 bp, synthetic construct
  source 1..75: mol_type = other DNA
ctacttctggcgtcgatccggtggcgagggatatgttctggcagttgatggtcgatctctcgcgtcaggacaaag

SEQ ID NO: 164863 - DNA, 75 bp, synthetic construct
  source 1..75: mol_type = other DNA
tttcgggcgcgatatcgcgcgtggtacgcctgtggaactcggcgtctggatcgacggagcgatgcccagtcgtgc

SEQ ID NO: 164864 - DNA, 75 bp, synthetic construct
  source 1..75: mol_type = other DNA
agctgcggcagcaaacgcaaagcgccacgctggaagaagcatttataaatctgttaccgcaagcgcaacgccagg

SEQ ID NO: 164865 - DNA, 75 bp, synthetic construct
  source 1..75: mol_type = other DNA
ctaaggacacaaaattatctgcgagacacagctcgctccctagattcatgtttactcatgattggtgattttata

SEQ ID NO: 164866 - DNA, 75 bp, synthetic construct
  source 1..75: mol_type = other DNA
caacagtaaattatgacgggaaaaaattcatgtatccggtcgctgacgaatggccgggactctcaacatattatc

SEQ ID NO: 164867 - DNA, 75 bp, synthetic construct
  source 1..75: mol_type = other DNA
ggaatgagccagaggtcgtgagggcgctcagaggtgcattaaaacacgaactgagaacaccaaatcgtcagcaga

SEQ ID NO: 164868 - DNA, 75 bp, synthetic construct
  source 1..75: mol_type = other DNA
gctcaggggggcattaaaacacgacctgagaacaccaaatcgtcagcaaagaaacggaagcccgttaaaaccaca

SEQ ID NO: 164869 - DNA, 75 bp, synthetic construct
  source 1..75: mol_type = other DNA
taacgatgaatggtggactaaccagctcaaggcgcagcgcatgcgctggcatgaagcgctgctgattgctgcagg

SEQ ID NO: 164870 - DNA, 75 bp, synthetic construct
  source 1..75: mol_type = other DNA
ctgaaaacaccaaatcgtcagcaaagaaacggaagtccgttaaaaccacatgaaatagcaccgtcggccagactg

SEQ ID NO: 164871 - DNA, 75 bp, synthetic construct
  source 1..75: mol_type = other DNA
gcctggaagccaatccgaaacagttcccggattttggcccacgtctggcggaaatcaaagcgcaaaccctgattg

SEQ ID NO: 164872 - DNA, 75 bp, synthetic construct
  source 1..75: mol_type = other DNA
ctgtccggcattgccggttctgaactgcatatcttccgcgactgtggtcactgggcgcagtgggaacatgccgac

SEQ ID NO: 164873 - DNA, 75 bp, synthetic construct
  source 1..75: mol_type = other DNA
gaacgtatccgtcagatcgaagcgaaggcgctgcgcaaactgcgtcacccgagccgttctgaagtgttgcagtag

SEQ ID NO: 164874 - DNA, 75 bp, synthetic construct
  source 1..75: mol_type = other DNA
acttggtgaaatatttgctgagaaaggcattaagccaacattaatcattgatgcagcttgtcatccatccatatt

SEQ ID NO: 164875 - DNA, 75 bp, synthetic construct
  source 1..75: mol_type = other DNA
tcagtggaaattttatcgtcaagaattaaattttaattttataaaatcaacaaaatactttattggttatgccat

SEQ ID NO: 164876 - DNA, 75 bp, synthetic construct
  source 1..75: mol_type = other DNA
tctattaatattatcaattcatttcatgataaccgaataaaattaatccaattagctcaaaatggtggggctggt

SEQ ID NO: 164877 - DNA, 75 bp, synthetic construct
  source 1..75: mol_type = other DNA
ttttgatgctcttcgcggtaatattcttcatctttctactaattacacgcagcatcaggctggagaaagtctgca

SEQ ID NO: 164878 - DNA, 75 bp, synthetic construct
  source 1..75: mol_type = other DNA
gtatgttatggcacagagacgatttgttatggtcacaatccacagggttcgcaacgcattcaatgccgtaactgc

SEQ ID NO: 164879 - DNA, 75 bp, synthetic construct
  source 1..75: mol_type = other DNA
cgggatgatcgatccggtggcatcgctggaagggccggggcgttggatcggcgaggtttaccccaccagtcattt

SEQ ID NO: 164880 - DNA, 75 bp, synthetic construct
  source 1..75: mol_type = other DNA
cctaccgccactcacgtcggttctgagctttcccaggaagatctggacgatgacgaagatgaagacgaagaagat

SEQ ID NO: 164881 - DNA, 75 bp, synthetic construct
  source 1..75: mol_type = other DNA
gacgaacagcaatttcgtgactggttgtcagttcacttatctacttttgcaactgagaaaggtcatttctgcccg

SEQ ID NO: 164882 - DNA, 75 bp, synthetic construct
  source 1..75: mol_type = other DNA
tgtaatttcacacgagtgttttttaagaggtgcgattattacggcctgggcagaactgtttcgccaacagcaagg

SEQ ID NO: 164883 - DNA, 75 bp, synthetic construct
  source 1..75: mol_type = other DNA
acgtttctctggttctttttttgccttcttatttttagctgtctttttgttctttggtataataattctgttgtg

SEQ ID NO: 164884 - DNA, 75 bp, synthetic construct
  source 1..75: mol_type = other DNA
acggacaagaacattagtgaggcaagaaaatggtttttacttgcagccgaaaatggcaaaacatctgcgcaatat

SEQ ID NO: 164885 - DNA, 75 bp, synthetic construct
  source 1..75: mol_type = other DNA
atcccgcagcctggcaacaattgcacgatgcttatgaacaggctttacgttatgacgacgaagatcagtggcaag

SEQ ID NO: 164886 - DNA, 75 bp, synthetic construct
  source 1..75: mol_type = other DNA
gtatgattatatccacaacgagctgccggatttagtgatgcaacattttccggcaacggccagaaagtctatctc

SEQ ID NO: 164887 - DNA, 75 bp, synthetic construct
  source 1..75: mol_type = other DNA
ttttttccataatcttttttatctgcctttctcttgtattaacttattatttacatgataaggttagatataaca

SEQ ID NO: 164888 - DNA, 75 bp, synthetic construct
  source 1..75: mol_type = other DNA
cacaatgcccggaatgcaagccgtatattcgccgtctggggttctgccggacgcggcaactgtacgccaaacgcc

SEQ ID NO: 164889 - DNA, 75 bp, synthetic construct
  source 1..75: mol_type = other DNA
cgccggtcacctggactttctccggcggagagcagacagatccccgcgcaagacttcacctgaaagcgcattcga

SEQ ID NO: 164890 - DNA, 75 bp, synthetic construct
  source 1..75: mol_type = other DNA
caccgggtaaaatcaccgcgattgatacgcactggatttggcaggaaggcaatcagcgcttgaccaaagaaccgt

SEQ ID NO: 164891 - DNA, 75 bp, synthetic construct
  source 1..75: mol_type = other DNA
caatccccggcgtccccagtagcccctgaagcatcaaccgtcagcaccgtccctgcatcatcaccggctgaacct

SEQ ID NO: 164892 - DNA, 75 bp, synthetic construct
  source 1..75: mol_type = other DNA
ggtggcagtaaacctcagagcaacgccaatagcgaacctccaatggactttgaagacgatattccattttgagag

SEQ ID NO: 164893 - DNA, 75 bp, synthetic construct
  source 1..75: mol_type = other DNA
cccgtaagtggacagatgacgccggtgtagaacgttacacgacggaaattatcgtcagccagggcggcaccatgc

SEQ ID NO: 164894 - DNA, 75 bp, synthetic construct
  source 1..75: mol_type = other DNA
ttggacaacgagtaaaagagttccgtatagctattggcttaagccaagaggcctttgcagatcggtgtggttttg

SEQ ID NO: 164895 - DNA, 75 bp, synthetic construct
  source 1..75: mol_type = other DNA
tcgtttctcgacaaagcgcgtggcttttttacgcgtaaaaaaacggattcacaggcgcatgagaacagtgatccc

SEQ ID NO: 164896 - DNA, 75 bp, synthetic construct
  source 1..75: mol_type = other DNA
tttgttgagcttaaaaaccgcagtggcagcaaactctactgggggaacaactggaaagtctggtcaaaaaccatc

SEQ ID NO: 164897 - DNA, 75 bp, synthetic construct
  source 1..75: mol_type = other DNA
cggagaacagacagatccccgcgcaagactccacctgaaagcgcattcaatgcaacgcagggaggacgcggagcg

SEQ ID NO: 164898 - DNA, 75 bp, synthetic construct
  source 1..75: mol_type = other DNA
atggtattccgtttactctcgacggtttccgtttgcccgattgaagaagtcgcgccagccatcaagcgcccaatg

SEQ ID NO: 164899 - DNA, 75 bp, synthetic construct
  source 1..75: mol_type = other DNA
tatgattgcactcggtgccgatactgtactactgggtcgtgctttcctgtatgcgctggcaacggcgggccaagc

SEQ ID NO: 164900 - DNA, 75 bp, synthetic construct
  source 1..75: mol_type = other DNA
tgcgcattcaggtatgagcggcccgaacgcggcaatgcgccgctacttgcaagcggtgacacatccgcaatgggc

SEQ ID NO: 164901 - DNA, 75 bp, synthetic construct
  source 1..75: mol_type = other DNA
ttgaaatgctttgctgtatccacgcttaccgtaccggacaagagcgatattggttttttatcatcttctgttttc

SEQ ID NO: 164902 - DNA, 75 bp, synthetic construct
  source 1..75: mol_type = other DNA
tggtgtcgcacacctgctgcgcctgtatgctgaagatatgaaggtaacgatgactctgacgggcgcagcatcacc

SEQ ID NO: 164903 - DNA, 75 bp, synthetic construct
  source 1..75: mol_type = other DNA
gggattgagtgacgatttttatgcagaacaactgcggactcaaaatcttgaaaagatctgtcaggagatgaatat

SEQ ID NO: 164904 - DNA, 75 bp, synthetic construct
  source 1..75: mol_type = other DNA
ttaatgacacatcaattaaattcaataaaacaaatgtaaagtttcagataatagacaagaagccaataattgtta

SEQ ID NO: 164905 - DNA, 75 bp, synthetic construct
  source 1..75: mol_type = other DNA
tgcaaaagcggcggatgcgcatggcattccgtttactctctcgacggtttccgtttgcccgattgaagaagtcgc

SEQ ID NO: 164906 - DNA, 75 bp, synthetic construct
  source 1..75: mol_type = other DNA
agccgcacaagaaaaatacgctgatgcggaaagcgagtttgaggtgcttgtttcttattaccccggcccgcaggc

SEQ ID NO: 164907 - DNA, 75 bp, synthetic construct
  source 1..75: mol_type = other DNA
gattttttattgatgttgcctctattcccggcgttggccctgcgcgtaaagcggcgttacggtcctttggtattg

SEQ ID NO: 164908 - DNA, 75 bp, synthetic construct
  source 1..75: mol_type = other DNA
agcgcgctgctgagacaacgacaacaccggagcgaggaactgaaacgtgagaacgaggatctacgccgctgggct

SEQ ID NO: 164909 - DNA, 75 bp, synthetic construct
  source 1..75: mol_type = other DNA
aactggaaaagcgcctcgatttgctggtggagaaggtactgaacctcgagctgcagatcaaatcactcacagata

SEQ ID NO: 164910 - DNA, 75 bp, synthetic construct
  source 1..75: mol_type = other DNA
atgcagaaaggaaggagagcagttaatggccttattttacataccgataaaaaaccaagatattttactaccaga

SEQ ID NO: 164911 - DNA, 75 bp, synthetic construct
  source 1..75: mol_type = other DNA
agcgcactgctgagacaacgacaacgccggatcgaggagctgaaacgtgagaacgaggatttacgccgctgggct

SEQ ID NO: 164912 - DNA, 75 bp, synthetic construct
  source 1..75: mol_type = other DNA
ggcgaccatctgacccaggcggttatcgactggaaagcgagctgtgaacgccgttttgtgttcaggccgaatgaa

SEQ ID NO: 164913 - DNA, 75 bp, synthetic construct
  source 1..75: mol_type = other DNA
cccgctcgatgccgccttcacgccggaaggggccgagtacgtggagcatttctgcgggctggagtgctatcagcg

SEQ ID NO: 164914 - DNA, 75 bp, synthetic construct
  source 1..75: mol_type = other DNA
aaaattatccgtccttccgccaattatgttggaccggaagaccgccagtttgtcgcgctggataagcgccagtaa

SEQ ID NO: 164915 - DNA, 75 bp, synthetic construct
  source 1..75: mol_type = other DNA
acgaataacaataaggaaacatacccaatgtcagctcaaatcaacaacatccgcccggaatttgatcgtgaaatc

SEQ ID NO: 164916 - DNA, 75 bp, synthetic construct
  source 1..75: mol_type = other DNA
tgacctccggcgatgcgcacctggcggtgaatttcccgctgctgctggaaaaaggcttgatggtctgcgcgagaa

SEQ ID NO: 164917 - DNA, 75 bp, synthetic construct
  source 1..75: mol_type = other DNA
ccggtcattgctggcattcttccggtcattgctggcattcttgccagtctgatcgtgaactggctgaacaagcgg

SEQ ID NO: 164918 - DNA, 75 bp, synthetic construct
  source 1..75: mol_type = other DNA
gtcgacattgaggctccggaaggggtgacagaggcggattatcagttcctgccgtcgaaaaatgaccatttcgcg

SEQ ID NO: 164919 - DNA, 75 bp, synthetic construct
  source 1..75: mol_type = other DNA
gtcagcgaggcagatgcagaaaagaaaagactacttaaacaggccagtgatgccattgccacattgcaggatgcc

SEQ ID NO: 164920 - DNA, 75 bp, synthetic construct
  source 1..75: mol_type = other DNA
ccccacagataccccgcagccaaaatcaacaaaatgccaaaaggttctgttcctgccctgcaacaagaaatgctg

SEQ ID NO: 164921 - DNA, 75 bp, synthetic construct
  source 1..75: mol_type = other DNA
gaggcctttttatgtcccatatatgccccatagataccccgcagccaaaatcaacaaaatgccaaaaggttctgt

SEQ ID NO: 164922 - DNA, 75 bp, synthetic construct
  source 1..75: mol_type = other DNA
atggttcttttgataagtggagtgacagggttcattcagcttatgaaaataagcctccagccagaatccagccca

SEQ ID NO: 164923 - DNA, 75 bp, synthetic construct
  source 1..75: mol_type = other DNA
ttctgtccagagaagaaagccttttacttcacactattcagtctgaacgattgagtacagattgctctttattca

SEQ ID NO: 164924 - DNA, 75 bp, synthetic construct
  source 1..75: mol_type = other DNA
cccaaaatggagtccttattaaataaacctggtgaaaacagtcatgatgtgtgggaagagttcgaatggggtgac

SEQ ID NO: 164925 - DNA, 75 bp, synthetic construct
  source 1..75: mol_type = other DNA
atggttcttttgataagtggagtgatagggtgcattcagcttatgaaaataatcctccagccagaattcagccca

SEQ ID NO: 164926 - DNA, 75 bp, synthetic construct
  source 1..75: mol_type = other DNA
atggtgtcacaggaaattcttttaaatggttctttagataagtggagtgacagagttcattcagcttatgaaaat

SEQ ID NO: 164927 - DNA, 75 bp, synthetic construct
  source 1..75: mol_type = other DNA
acttcacactattcagtctgaaagattaaacactgacttctctttattcaaaagacaaccatctatcgaaactgc

SEQ ID NO: 164928 - DNA, 75 bp, synthetic construct
  source 1..75: mol_type = other DNA
caaaacagattttgggtaccttactggcagattttacagatcgagggttaactgcacaggatttaaaaaatggtt

SEQ ID NO: 164929 - DNA, 75 bp, synthetic construct
  source 1..75: mol_type = other DNA
ccccttaatgccccatcgtccgcgatttcgtggacgaccctgacgccgggtaaaccaaatacgctgaatttttac

SEQ ID NO: 164930 - DNA, 75 bp, synthetic construct
  source 1..75: mol_type = other DNA
ccgtaaaagttgggtttaccggcgttgcagatagccacaatgccaacctgcttgcacttgaaaatacggtgtcag

SEQ ID NO: 164931 - DNA, 75 bp, synthetic construct
  source 1..75: mol_type = other DNA
gcgccagtcttcagcccgtaaccgcaagaactggctgttcgcgcgttccgacagttcttgcccgtagcagttatt

SEQ ID NO: 164932 - DNA, 75 bp, synthetic construct
  source 1..75: mol_type = other DNA
acgcttcttgagcctgtaataatggagctacaagaaatagaccaattgcacgacagatataaagaacagcacacc

SEQ ID NO: 164933 - DNA, 75 bp, synthetic construct
  source 1..75: mol_type = other DNA
aggtgaagccgaatatcatcaaggtaacggcatagtcactcatcttaaagctggagatattgcgatcgcaaaacc

SEQ ID NO: 164934 - DNA, 75 bp, synthetic construct
  source 1..75: mol_type = other DNA
caatattcgcgccgagctgtggcgaaaactggcggttaactgtgtgattaatccgctgactgccatctggaattg

SEQ ID NO: 164935 - DNA, 75 bp, synthetic construct
  source 1..75: mol_type = other DNA
tggctgtattcaggatgcggatgcattgagtgagggtattaatgcgtctccccgttatccgaaaaactggaagac

SEQ ID NO: 164936 - DNA, 75 bp, synthetic construct
  source 1..75: mol_type = other DNA
atgcgatacagacgtgaagacgccgacggtgattacactttcgggcagggtgacgatactttccttatcgacagt

SEQ ID NO: 164937 - DNA, 75 bp, synthetic construct
  source 1..75: mol_type = other DNA
cgcccgcgcgcatgggattgccgtaccggaaaacacccgcctgtttgaaatggtaaaaagaaaggagagtgaata

SEQ ID NO: 164938 - DNA, 75 bp, synthetic construct
  source 1..75: mol_type = other DNA
ggcaatgtcattattcatgtggcaaacggaatcacgcatatcggtccggcacggcaacaggatggcgattacagt

SEQ ID NO: 164939 - DNA, 75 bp, synthetic construct
  source 1..75: mol_type = other DNA
gtcacgatctcgccgtggggcaattatcgtggtcgttaaagatgatggcgaaagaattgcgtgtaccagtgttgg

SEQ ID NO: 164940 - DNA, 75 bp, synthetic construct
  source 1..75: mol_type = other DNA
gcgtgtattcagtcaatgaatcatcgcacaagccgttttaaccaacgaaacaatcaaaataacacatctttttaa

SEQ ID NO: 164941 - DNA, 75 bp, synthetic construct
  source 1..75: mol_type = other DNA
tacggcaggaacgtgaagcgtcagttatcggcgggctgctgttaggcggcctcactcctaacgcgcaagatgttc

SEQ ID NO: 164942 - DNA, 75 bp, synthetic construct
  source 1..75: mol_type = other DNA
tttcaattccgctctaccggaaagccttcgaggttatccgcaagcaggcgcgaaacagaaacctaatcgacgcgc

SEQ ID NO: 164943 - DNA, 75 bp, synthetic construct
  source 1..75: mol_type = other DNA
ttgcacagccagtttcgtgctcaggcagcgtcagggggtgttcaaatgatcagtaacgttaaattcaacgaactg

SEQ ID NO: 164944 - DNA, 75 bp, synthetic construct
  source 1..75: mol_type = other DNA
tacaggaatatacggaagtcttaagtaaacgtatggaatgtggtgtcaattctgacaacatcaaaacagggatcg

SEQ ID NO: 164945 - DNA, 75 bp, synthetic construct
  source 1..75: mol_type = other DNA
tcgcaatattcgtcatactgtctggtataccgccagcaatgcagggcgtttttacggcatctgggatagagccag

SEQ ID NO: 164946 - DNA, 75 bp, synthetic construct
  source 1..75: mol_type = other DNA
tataccgccagtaatgcagggcgtttttacggcatctgggatagagccagagggagacagcgtcacgctgtttta

SEQ ID NO: 164947 - DNA, 75 bp, synthetic construct
  source 1..75: mol_type = other DNA
taaaaagtgtgagtcgagtatttggtcaggtcactgatgaaaaacacagagataatgctgtgatcttacccagca

SEQ ID NO: 164948 - DNA, 75 bp, synthetic construct
  source 1..75: mol_type = other DNA
ctaactcctaacgcgcaagatgttctcgccactcttgatcctgaagtgttcactattccgctgtataagcgggct

SEQ ID NO: 164949 - DNA, 75 bp, synthetic construct
  source 1..75: mol_type = other DNA
aatagattgggataaggaggaccgaaagttgcatattactgatccattttttgctttttatctaaaatggcgata

SEQ ID NO: 164950 - DNA, 75 bp, synthetic construct
  source 1..75: mol_type = other DNA
aattttactgctggtctgtcgagtaagaaacaatctctttcacggcggaaaattcaatggtaattggtttgaacc

SEQ ID NO: 164951 - DNA, 75 bp, synthetic construct
  source 1..75: mol_type = other DNA
ttatatttttataatttcgctaatgattatatatgataaggatcgtcaaattatagatggactaattggtcgaag

SEQ ID NO: 164952 - DNA, 75 bp, synthetic construct
  source 1..75: mol_type = other DNA
cgttcacagataattatcctcatggcgcattttcgcttttgccaccatttatcacgcacggtcaattttctgttc

SEQ ID NO: 164953 - DNA, 75 bp, synthetic construct
  source 1..75: mol_type = other DNA
acttgctattggtattgggaatgcatcttacgatgaatcccgtaatggcctccttgtacttgatgaatgtggtac

SEQ ID NO: 164954 - DNA, 75 bp, synthetic construct
  source 1..75: mol_type = other DNA
ccgccattgaagagatgctgacttcgcttcctgccgagtggcgtaatatcgatattctggtaaacaatgctggac

SEQ ID NO: 164955 - DNA, 75 bp, synthetic construct
  source 1..75: mol_type = other DNA
ttcatagaagatttactttaaaacaacctgaacttaaagatttaattaatggtgttgttggtgattatattggta

SEQ ID NO: 164956 - DNA, 75 bp, synthetic construct
  source 1..75: mol_type = other DNA
aaggtgtttctcaagccatccttgaattaaatcttgatacaaatcagcaaagaataggtgtcaattatatctata

SEQ ID NO: 164957 - DNA, 75 bp, synthetic construct
  source 1..75: mol_type = other DNA
gggctgcagtccactcaaaaagacgtgcctgagtccggtgaaatccgggcgcgggcacgtcgccccacctttggc

SEQ ID NO: 164958 - DNA, 75 bp, synthetic construct
  source 1..75: mol_type = other DNA
tatccgcatcctgcgcggggtgtgacatgtactgcaccctggcggatttacaggaacaagtgcctgagtcaacgc

SEQ ID NO: 164959 - DNA, 75 bp, synthetic construct
  source 1..75: mol_type = other DNA
tgagcacgccgcagcagtgcttaatctggttgatgacggtgttattgaatggaatgaaccggaggtcgtgagggc

SEQ ID NO: 164960 - DNA, 75 bp, synthetic construct
  source 1..75: mol_type = other DNA
aattaggttcaggtaagacactggttagtgttgccagaatacaggaaagactagctaaaggctgtcctgtagcca

SEQ ID NO: 164961 - DNA, 75 bp, synthetic construct
  source 1..75: mol_type = other DNA
atcacgcacggtcaattttctgttcacagaggatttaattattatatgcgcctcacgaaaatttattttcgcaaa

SEQ ID NO: 164962 - DNA, 75 bp, synthetic construct
  source 1..75: mol_type = other DNA
gtccactcagaaagatgtgcctgagcctagcgagtttcgtgtacgcagtcgcccggctactttcggcggtcgtga

SEQ ID NO: 164963 - DNA, 75 bp, synthetic construct
  source 1..75: mol_type = other DNA
gctcgataacgataccggcaggccgctgaaagacactgccgcggctgttaccgcatgggcgtcaacgtggcgcat

SEQ ID NO: 164964 - DNA, 75 bp, synthetic construct
  source 1..75: mol_type = other DNA
atctgtatgttggtggaggagtccaggtagcaatttctgtactggaagagttatctgattcatcattttctttta

SEQ ID NO: 164965 - DNA, 75 bp, synthetic construct
  source 1..75: mol_type = other DNA
cgaccgtattcatacttcctatgaaaacgtactcggtaaaaataacgtcgatgtaatcaagggctttgctcgctt

SEQ ID NO: 164966 - DNA, 75 bp, synthetic construct
  source 1..75: mol_type = other DNA
attgcccgtctgtttaacgatgagtggtggactcatcagcttaaaggccagcgtatgcgctggcatgaagcgtta

SEQ ID NO: 164967 - DNA, 75 bp, synthetic construct
  source 1..75: mol_type = other DNA
atcgcgaaatacatctcaaaaaatatcgacggctatgcactggatggtcagctcgataacgataccggcagaccg

SEQ ID NO: 164968 - DNA, 75 bp, synthetic construct
  source 1..75: mol_type = other DNA
ggaccgagccaggcattatgaaggtacttagagacttattgagtaatgaactgaaatgcagtaatcgttcacagc

SEQ ID NO: 164969 - DNA, 75 bp, synthetic construct
  source 1..75: mol_type = other DNA
ggttacatcgccgttgaactggctggcgtgattaacggcctcggcgcgaagacgcatctgtttgtgcgtaaacac

SEQ ID NO: 164970 - DNA, 75 bp, synthetic construct
  source 1..75: mol_type = other DNA
gaaccgggtctggttggcggcaccgaattctcaaatgttcgctttaaaggcgatgacgataaagcagaaaagact

SEQ ID NO: 164971 - DNA, 75 bp, synthetic construct
  source 1..75: mol_type = other DNA
cacgtcaacatcaacacactggaaatgatgccggttacccaaagttatgccggactgaatgtccatcgccattaa

SEQ ID NO: 164972 - DNA, 75 bp, synthetic construct
  source 1..75: mol_type = other DNA
ggcgcaaccaagaaagactttgacaacacggttgccattcacccaacggcggcagaagagttcgtgaccatgcgt

SEQ ID NO: 164973 - DNA, 75 bp, synthetic construct
  source 1..75: mol_type = other DNA
aagattgtcggtattcacggcattggttttggtatggacgaaatgttgcagggcttcgcggtggcgctgaagatg

SEQ ID NO: 164974 - DNA, 75 bp, synthetic construct
  source 1..75: mol_type = other DNA
ccgagccacccggatattccgggcgtggaatacggtattgattctgatggcttcttcgcccttcctgctttgcca

SEQ ID NO: 164975 - DNA, 75 bp, synthetic construct
  source 1..75: mol_type = other DNA
gaccggctgtacacccatccggctgagcgcacggggggtggcacgctccccgtcaccgccacgggtttccgcccg

SEQ ID NO: 164976 - DNA, 75 bp, synthetic construct
  source 1..75: mol_type = other DNA
aagatccaaacaattgatgaaattcaatccaccgagactctgatcgttctgcagaacccaatcatgcgtactatc

SEQ ID NO: 164977 - DNA, 75 bp, synthetic construct
  source 1..75: mol_type = other DNA
ccaagccgggaagacctccattaagaggttcacttggtaaatttgattatttaaaacttgttattgatgatcttc

SEQ ID NO: 164978 - DNA, 75 bp, synthetic construct
  source 1..75: mol_type = other DNA
gtggggcaacggtgatttatggcgataaaaaattcaaatacgcggctgctgatgagtggccgggattctcaatgc

SEQ ID NO: 164979 - DNA, 75 bp, synthetic construct
  source 1..75: mol_type = other DNA
tagaggtttatgggatgcgtgttgtcgaaccgcaccacgacgggacgccacactggcacatgatgatgttttgca

SEQ ID NO: 164980 - DNA, 75 bp, synthetic construct
  source 1..75: mol_type = other DNA
tctatgctgcttgcggtgtttattgcttatgaccaaggtaacaatgcgcgaagagcaatagaaaacgaagagatt

SEQ ID NO: 164981 - DNA, 75 bp, synthetic construct
  source 1..75: mol_type = other DNA
atattctcaaaaataaagagagagttgcttacagagttcgatgtatctgagttgtatccaaataataatatctgg

SEQ ID NO: 164982 - DNA, 75 bp, synthetic construct
  source 1..75: mol_type = other DNA
cggacacaccgttggtttgccatcagatttgtatatatatgatagagataaggatcgtatggaagtctttatgca

SEQ ID NO: 164983 - DNA, 75 bp, synthetic construct
  source 1..75: mol_type = other DNA
cagagcgtgttcgatatatattgaataatacaaagagagatgctgttatcgccctgacctttacgaataaagcag

SEQ ID NO: 164984 - DNA, 75 bp, synthetic construct
  source 1..75: mol_type = other DNA
cagcataatagataaagacaaaaacctgttgtacgttattcgtccttcaggaacctgtttgttgcgttgtgataa

SEQ ID NO: 164985 - DNA, 75 bp, synthetic construct
  source 1..75: mol_type = other DNA
aaaccctgcttaatctggcaaacggggctattgcgacattacaggatgccgttgatcttgatatggcgacggacg

SEQ ID NO: 164986 - DNA, 75 bp, synthetic construct
  source 1..75: mol_type = other DNA
aaaattatgtcaagtactttgcatatcagagccggctggctggacacctgatgtattgcgagagatggcggttca

SEQ ID NO: 164987 - DNA, 75 bp, synthetic construct
  source 1..75: mol_type = other DNA
cggctgttaccgcatgggcgtcaacgtggcgcatcccgcaatttaaaacggttggcctgccgacaatgggggctt

SEQ ID NO: 164988 - DNA, 75 bp, synthetic construct
  source 1..75: mol_type = other DNA
gctcaggggtgcattaaaacacggcctgaaaacaccaaatcgtcagcaaagaaacggaagtccgttaaaaccaca

SEQ ID NO: 164989 - DNA, 75 bp, synthetic construct
  source 1..75: mol_type = other DNA
ctgccattgcccgcctgtttaacgatgagtggtggactcatcagcttaaaggccagcgtatgcgctggcatgagg

SEQ ID NO: 164990 - DNA, 75 bp, synthetic construct
  source 1..75: mol_type = other DNA
taaagaactgcatgaagagacggtgcgtaaactgctggccctgcatatgtatgactgcgcgcgtgccaacaaagc

SEQ ID NO: 164991 - DNA, 75 bp, synthetic construct
  source 1..75: mol_type = other DNA
agggcatgtttgcctttgccctgtacgacagcgaaaaagatgcctacctgattggtcgcgaccatctggggatca

SEQ ID NO: 164992 - DNA, 75 bp, synthetic construct
  source 1..75: mol_type = other DNA
aagcgtggcctggcggcagaaagagcagttctccgatggcgtcggttacagttggatcgacaccctgaaagaagt

SEQ ID NO: 164993 - DNA, 75 bp, synthetic construct
  source 1..75: mol_type = other DNA
cattcgtgatgtgcgtgcgcgccgccaggcaaatctggaatttcttaaatcgtgtgaccttgaaaacagggaaac

SEQ ID NO: 164994 - DNA, 75 bp, synthetic construct
  source 1..75: mol_type = other DNA
ttctcatattttgtgatgatgcttcctgtggtgatgggggcaattactctaatttcgtttattagaaactacatg

SEQ ID NO: 164995 - DNA, 75 bp, synthetic construct
  source 1..75: mol_type = other DNA
aggcaccggtaaggcgtttaccggtgcttatgcatggaacgcgccacgcgaggctgtcgggcgcgaaagacccct

SEQ ID NO: 164996 - DNA, 75 bp, synthetic construct
  source 1..75: mol_type = other DNA
ttttgcattcacggatagccatgactggagtggttttgctgaacacttgtgtaagttcacagagatattgcaatt

SEQ ID NO: 164997 - DNA, 75 bp, synthetic construct
  source 1..75: mol_type = other DNA
gtggggcaacggtgatttatggcgataaaaaaatcaaatacgcggctgctgatgagtggccgggattctcaattc

SEQ ID NO: 164998 - DNA, 75 bp, synthetic construct
  source 1..75: mol_type = other DNA
cattaaaatacgacatgagaacgccaaaccgtcagcaaagaaacggaagcccgttaaaaccgcatgaaattgcac

SEQ ID NO: 164999 - DNA, 75 bp, synthetic construct
  source 1..75: mol_type = other DNA
gatcgcattgatgaacgactggaaaaagcgaaagagagcggggctgactgggcgattaataacagccagacaccg

SEQ ID NO: 165000 - DNA, 75 bp, synthetic construct
  source 1..75: mol_type = other DNA
agaaaattatccgcgtgggttcctgtggcgctgttctgccgcacgtaaaactgcgcgacgtcgttatcggtatgg

SEQ ID NO: 165001 - DNA, 75 bp, synthetic construct
  source 1..75: mol_type = other DNA
ttgaagatgcccgtgaagtgaacaacgttcgcggtatgctgggcttcaccggtacttacaaaggccgcaaaattt

SEQ ID NO: 165002 - DNA, 75 bp, synthetic construct
  source 1..75: mol_type = other DNA
cttactgcgcccagacgccgacgctgtttggcgatacggtatacgataacctgatttttccctggcagatccgta

SEQ ID NO: 165003 - DNA, 75 bp, synthetic construct
  source 1..75: mol_type = other DNA
gggggcctcgaccgggaagcgagaaagctgatgctttcgctgaaacgttgtgccccgggcgaaggcgccggagtt

SEQ ID NO: 165004 - DNA, 75 bp, synthetic construct
  source 1..75: mol_type = other DNA
acatcagggcgtagaagcttacaaggttatgattgtgtagagtattacgctaccagatataacaatttcccgaga

SEQ ID NO: 165005 - DNA, 75 bp, synthetic construct
  source 1..75: mol_type = other DNA
tccgtgatagcgccatcaacgaaggttttaacacagccaaaccgtgggctgatgcggtgatttccaatcgtccat

SEQ ID NO: 165006 - DNA, 75 bp, synthetic construct
  source 1..75: mol_type = other DNA
ctgcaattgacccgactcaatacgtcaaccttgacgagatgcgggaaggctacgcccctgttaagccgcaggggt

SEQ ID NO: 165007 - DNA, 75 bp, synthetic construct
  source 1..75: mol_type = other DNA
tgcaacacaacgtacaattaaaatgcgggatattattttagcggtcgcttccggaacagactctgtcactaattt

SEQ ID NO: 165008 - DNA, 75 bp, synthetic construct
  source 1..75: mol_type = other DNA
ctgccttaaccatagatgaaaaactggcaaaagcattgagaaattcgaatactcatcatatctcgtccgggaaga

SEQ ID NO: 165009 - DNA, 75 bp, synthetic construct
  source 1..75: mol_type = other DNA
gggtgatacgaagattcttaataacatcaatttttcgctgcgtgctggcgaatttaagttaattaccggtccttc

SEQ ID NO: 165010 - DNA, 75 bp, synthetic construct
  source 1..75: mol_type = other DNA
aaaacaacgcatctcattgattcgtaacctgcaatttatgccgaaggttttattgctggatgaaatcaccagtgc

SEQ ID NO: 165011 - DNA, 75 bp, synthetic construct
  source 1..75: mol_type = other DNA
atgtctccgagctttccggtggtgaaaaacagcgcatctcgttgattcgcaatctgcaatttatgccgaaggtat

SEQ ID NO: 165012 - DNA, 75 bp, synthetic construct
  source 1..75: mol_type = other DNA
gaatggctggattctcaaggggcattcaatcacccatactggatgtgcaaatgttcatggtcatacggcaataat

SEQ ID NO: 165013 - DNA, 75 bp, synthetic construct
  source 1..75: mol_type = other DNA
tactggctgtggaactattcatcttgcaggttgcgttattgaggttatgggtaataaaggtgccatgaccatccg

SEQ ID NO: 165014 - DNA, 75 bp, synthetic construct
  source 1..75: mol_type = other DNA
ttcaccttaaaggtgccaccgctgctggcgaaggtgagttattcattggctggagtggcacgagcggtgcccatg

SEQ ID NO: 165015 - DNA, 75 bp, synthetic construct
  source 1..75: mol_type = other DNA
aaccgtagaactagccgctggatcattgcagaaaaaccagaatggcgcggatattcctggaaaagataccttcac

SEQ ID NO: 165016 - DNA, 75 bp, synthetic construct
  source 1..75: mol_type = other DNA
aaccgtagaattagccgctggatcattgcagaaaaaccagaacggcgcagatattccaaacaaagataaatttac

SEQ ID NO: 165017 - DNA, 75 bp, synthetic construct
  source 1..75: mol_type = other DNA
aatcaggacacctctggtaatgcggctacagcgaccaaattgcagacagcacgtactattaacggtgtctcgttt

SEQ ID NO: 165018 - DNA, 75 bp, synthetic construct
  source 1..75: mol_type = other DNA
tggtaatgcggcgacagcgaccaaattgcagacggcgtgtactatcaacggtgtctcgtttgacggttctaaaaa

SEQ ID NO: 165019 - DNA, 75 bp, synthetic construct
  source 1..75: mol_type = other DNA
gtctgaatgggcacagatctatacgtcaaaagattccgttcccggcgttaatgccaaagggaatcaggacacctc

SEQ ID NO: 165020 - DNA, 75 bp, synthetic construct
  source 1..75: mol_type = other DNA
aacgcagctattagtggtgcatcaacgttaattattcatttttatatgggagaaggaagttgtcctgcagctcag

SEQ ID NO: 165021 - DNA, 75 bp, synthetic construct
  source 1..75: mol_type = other DNA
cttttgatggttcctccgatatcacattaaaagcaggtcatgttggtgcgtttgccttagggaaaacaggaagca

SEQ ID NO: 165022 - DNA, 75 bp, synthetic construct
  source 1..75: mol_type = other DNA
gatttaaatcttgagcaaaccgtagaattagccgcaggagcattacagaaaaaccagaacggcgcagatattccg

SEQ ID NO: 165023 - DNA, 75 bp, synthetic construct
  source 1..75: mol_type = other DNA
cgtataccggagctgatgcgcgatcttgcaagtatgggacaacttgtgaaattaccgacaagaagggaaagggcc

SEQ ID NO: 165024 - DNA, 75 bp, synthetic construct
  source 1..75: mol_type = other DNA
ccggtgcgtcgcctgattgcccgtcgggcagcacgcgaactggtggctggcgcttcaaccaactttggctttggt

SEQ ID NO: 165025 - DNA, 75 bp, synthetic construct
  source 1..75: mol_type = other DNA
gcattggcgatcgcgactgcaaaggcacgaaccgcttcgctcatgctgaaatgctcaaacgcattattgctgggc

SEQ ID NO: 165026 - DNA, 75 bp, synthetic construct
  source 1..75: mol_type = other DNA
ctttaaccggttgcgatcgtctgactatcgcgccgaacttgctgaaagagttgcaggaaaaagtctcgccagtcg

SEQ ID NO: 165027 - DNA, 75 bp, synthetic construct
  source 1..75: mol_type = other DNA
ggcgctgggcttcaccttaatttccgtgttcacgcttagcggccccggcccgctttctctactgcgtcgtcaggt

SEQ ID NO: 165028 - DNA, 75 bp, synthetic construct
  source 1..75: mol_type = other DNA
gcgcttatctggtgctgggtctggtggcgctgggcttcaccttaatttccgtgttcacgcttagcggccccggcc

SEQ ID NO: 165029 - DNA, 75 bp, synthetic construct
  source 1..75: mol_type = other DNA
ccggtgcgtcgcctgattgctcgccgggcagcacgcgaactggtggctggcgcttcaaccaactttggtttcggt

SEQ ID NO: 165030 - DNA, 75 bp, synthetic construct
  source 1..75: mol_type = other DNA
gacctgacgctgatccattctttgggtattggcgatcgcgacagcaaaggtacgaaccgcttcgctcatgcagat

SEQ ID NO: 165031 - DNA, 75 bp, synthetic construct
  source 1..75: mol_type = other DNA
ccgcgaacaaccacaaacctatcttggcggttacgacctgaccatcagcggccaacatcgccgtctgagttctaa

SEQ ID NO: 165032 - DNA, 75 bp, synthetic construct
  source 1..75: mol_type = other DNA
taattcaggcactgctgcgggagatcggtgccggacgtccagggctttttacccacgttgggctgggatcgtttg

SEQ ID NO: 165033 - DNA, 75 bp, synthetic construct
  source 1..75: mol_type = other DNA
cgacgctattgaactggttagtcatccggtacgtcgcctgattgcccgtagggcagcacgcgaactggtggcagg

SEQ ID NO: 165034 - DNA, 75 bp, synthetic construct
  source 1..75: mol_type = other DNA
atgatgccctgtttggttgtgcccgtaacgccgatgccattattccatcactcgatcaattcgagttttacagcg

SEQ ID NO: 165035 - DNA, 75 bp, synthetic construct
  source 1..75: mol_type = other DNA
tatttctctttacgcaaaacttggatatagaggaaatatgcagaatctgagggccggaaatttttctgcaacagc

SEQ ID NO: 165036 - DNA, 75 bp, synthetic construct
  source 1..75: mol_type = other DNA
tcggtggctgggtagaaagcgaatgtcttgggttatatctgattgatgataaagaacaatgcagagtctacgaac

SEQ ID NO: 165037 - DNA, 75 bp, synthetic construct
  source 1..75: mol_type = other DNA
gctgccactgagcgcgaagcacgcgcacagctgccgcacgcacatcttatttttgtcgcccgtattcgtcagggg

SEQ ID NO: 165038 - DNA, 75 bp, synthetic construct
  source 1..75: mol_type = other DNA
tttttggaagaatataagcgtatgcgtgaaagtgaacaacgccaccgaattgccattgaagcacgcagagacttc

SEQ ID NO: 165039 - DNA, 75 bp, synthetic construct
  source 1..75: mol_type = other DNA
tatggtgaattgtataccatttacaacgaaaagattgataaagttctatcaaaaacaaactgtgcccctaatgaa

SEQ ID NO: 165040 - DNA, 75 bp, synthetic construct
  source 1..75: mol_type = other DNA
aatgtctcagcatgcacatgcagctgataatctgacctttaaaggaaaactgattattcctgcctgtactgtaac

SEQ ID NO: 165041 - DNA, 75 bp, synthetic construct
  source 1..75: mol_type = other DNA
cgaagcaggcgtttttctgatttcaccgtttgtcgggcgtatttatgactggtatcaggctcataagccgctgga

SEQ ID NO: 165042 - DNA, 75 bp, synthetic construct
  source 1..75: mol_type = other DNA
ttccgtcgcaccgaacaaatcctcgccttaaccggctgcgatcgactgactatcgcaccgaatttgctaaaggag

SEQ ID NO: 165043 - DNA, 75 bp, synthetic construct
  source 1..75: mol_type = other DNA
tcacgcattttgatcaaactggcttcgacctgggaaggaattcgcgcggccgaagagctggaaaaagaaggtatt

SEQ ID NO: 165044 - DNA, 75 bp, synthetic construct
  source 1..75: mol_type = other DNA
gcgtagtagcgagactccttaaatttaatcaaggagcctttcacatggctgtattcgcacgcccttactttatct

SEQ ID NO: 165045 - DNA, 75 bp, synthetic construct
  source 1..75: mol_type = other DNA
gcagccactgaacgcgaagcccgcgcccagctgccgcacgcacatctgatttttgtcgcccgtattcgtcagggg

SEQ ID NO: 165046 - DNA, 75 bp, synthetic construct
  source 1..75: mol_type = other DNA
gccctggaaataccccacagccccgaaaaagagccagtcagttgcttaactaatcggcattacagccttgagctg

SEQ ID NO: 165047 - DNA, 75 bp, synthetic construct
  source 1..75: mol_type = other DNA
gtcgtgctgatatttacacggaaacaccggtcagagtgtcaggctttaagcgcgtcatagacgagcaggactgga

SEQ ID NO: 165048 - DNA, 75 bp, synthetic construct
  source 1..75: mol_type = other DNA
catgaatacacgccgcctgccattaatatcacgacagtggatatcaaaaccggcgcaatggatgcaccggtggca

SEQ ID NO: 165049 - DNA, 75 bp, synthetic construct
  source 1..75: mol_type = other DNA
gattgctgaccgtggagcctacagcggcgtaacggcaaagtggttacacactaaagacccgaagccgcaaaagca

SEQ ID NO: 165050 - DNA, 75 bp, synthetic construct
  source 1..75: mol_type = other DNA
atgggcggcatggcggcgtttattccgagcaaagatgaagagcgcaataaccaggtgctcaacaaagtaaaagcg

SEQ ID NO: 165051 - DNA, 75 bp, synthetic construct
  source 1..75: mol_type = other DNA
gctttaactgctcaatgctccgtgcatggtgggttatgctaggactgcctgttctgttggcgttagttttttggt

SEQ ID NO: 165052 - DNA, 75 bp, synthetic construct
  source 1..75: mol_type = other DNA
aggacggcgacagtcaccgatttaccctggcagatcgcggagcctacacgggcgtaattgccagctggttgcata

SEQ ID NO: 165053 - DNA, 75 bp, synthetic construct
  source 1..75: mol_type = other DNA
ctttcccttgatggtggcatgagccctgccgactggcgtcacgacgtcaacccacgcggcaaatatatgccaggt

SEQ ID NO: 165054 - DNA, 75 bp, synthetic construct
  source 1..75: mol_type = other DNA
ctgccgactggcgtcacgacgtcaacccgcgcggcaaatatatgccaggtaaaccagcgtggtatatgtacgata

SEQ ID NO: 165055 - DNA, 75 bp, synthetic construct
  source 1..75: mol_type = other DNA
ctgttaattggtcgctttattgcgtttgtcagaacactgctgccgacgattgccgggttatcagggctgaataac

SEQ ID NO: 165056 - DNA, 75 bp, synthetic construct
  source 1..75: mol_type = other DNA
atgatgacgggtgaaaaaaaactgttgcgcgcatgggcgttatttcttcctggcgggatccgccttcagggtgcg

SEQ ID NO: 165057 - DNA, 75 bp, synthetic construct
  source 1..75: mol_type = other DNA
gggatggaagcactgacctgtcaggtgaaattttacggtctggacacggatatgctggccagctttggatttgtc

SEQ ID NO: 165058 - DNA, 75 bp, synthetic construct
  source 1..75: mol_type = other DNA
tctggctgaagactcagtaacgtatcaaaagcctgtaaaatcatgggcgtttcgcgtgatacgttttatcgttac

SEQ ID NO: 165059 - DNA, 75 bp, synthetic construct
  source 1..75: mol_type = other DNA
cgcgagcgcggcaatgtagaagcgggcgaatgggtggaagtagaaccgtttaacgcgttgttcggaggcctgtaa

SEQ ID NO: 165060 - DNA, 75 bp, synthetic construct
  source 1..75: mol_type = other DNA
ggtggtgtttcggttggtgaggcggattacaccaaaaccattctcgaagaactgggcgaaattgctttctggaaa

SEQ ID NO: 165061 - DNA, 75 bp, synthetic construct
  source 1..75: mol_type = other DNA
atggaatttaccaccggtttgatgtcgctcgacaccgcgcttaatgagatgctttctcgcgttacccctttgact

SEQ ID NO: 165062 - DNA, 75 bp, synthetic construct
  source 1..75: mol_type = other DNA
gtggatgacggtatggaggcgctgacctgctcgtttaaaatttacggatacgacgtggccatactgaccctgctg

SEQ ID NO: 165063 - DNA, 75 bp, synthetic construct
  source 1..75: mol_type = other DNA
tagccgcgcgtcacaagctgaagatggcgctgggtaaagacctgtcggataagcccgtggaacatatagaccaga

SEQ ID NO: 165064 - DNA, 75 bp, synthetic construct
  source 1..75: mol_type = other DNA
ggcaggtcgggctgccgattcgtggcgctgtcctgacggtgtatatcggctggaaaggttttgccctggtatgca

SEQ ID NO: 165065 - DNA, 75 bp, synthetic construct
  source 1..75: mol_type = other DNA
gtgcagtacatcgaagcatggatctccggcaacggctgtgtgccgatttatggcctgatggaagatgcggcgacg

SEQ ID NO: 165066 - DNA, 75 bp, synthetic construct
  source 1..75: mol_type = other DNA
acgcggtctgcacttgccggaaaaacatgtcacctggcgcggcgaagcgatcccaggcagcctgtttgattttgc

SEQ ID NO: 165067 - DNA, 75 bp, synthetic construct
  source 1..75: mol_type = other DNA
ggcaaaatttatcaactcaaacccaatccggctgttttgatttgtcgggtacgcggtctgcacttgccggaaaaa

SEQ ID NO: 165068 - DNA, 75 bp, synthetic construct
  source 1..75: mol_type = other DNA
ggggattgccgaagttccggtgattcgtaaagtgcgagtggcgcttttttctaccggtgatgaactccagttgcc

SEQ ID NO: 165069 - DNA, 75 bp, synthetic construct
  source 1..75: mol_type = other DNA
ccggggtttgataactccgcaatggacggctacgcggtgcgtttagccgatattgcctccgggcaaccgctgccc

SEQ ID NO: 165070 - DNA, 75 bp, synthetic construct
  source 1..75: mol_type = other DNA
ctaccggtgatgaactccagttgccaggccagccgctgggcgacggccaaatctacgataccaaccgtctcgccg

SEQ ID NO: 165071 - DNA, 75 bp, synthetic construct
  source 1..75: mol_type = other DNA
caacggtattacctatagcaagtggatgccattactgggtaataacgcgacttttggtgtccatcaattttccat

SEQ ID NO: 165072 - DNA, 75 bp, synthetic construct
  source 1..75: mol_type = other DNA
tggtattatgattgcgccagtatttcagcaattaatgatgatgactatgttagggcgggctggtgcgggtagtga

SEQ ID NO: 165073 - DNA, 75 bp, synthetic construct
  source 1..75: mol_type = other DNA
atgaatgatgtaaacatcgggaaagataattctcggcactcgtttgttttcacaggcaaaggtggtgagtatttt

SEQ ID NO: 165074 - DNA, 75 bp, synthetic construct
  source 1..75: mol_type = other DNA
caggcatggataatcagccgtgtggtgcacagccttaacgggagcggcttcacgacgggcttagagcttgaggtt

SEQ ID NO: 165075 - DNA, 75 bp, synthetic construct
  source 1..75: mol_type = other DNA
atcctcggcgtagaaatggaagcggcaggtatttatggtgtggctgcagagtttggcgcgaaagcgctggctatc

SEQ ID NO: 165076 - DNA, 75 bp, synthetic construct
  source 1..75: mol_type = other DNA
ttcaagtcaacactttgcgctggggggactcctgtttgcgctcttgatctgcggtattccatgtatggcagtaaa

SEQ ID NO: 165077 - DNA, 75 bp, synthetic construct
  source 1..75: mol_type = other DNA
caatatgaatacggggagctgccctgctgtacagttccgcgtgaattacaggaacggcggtattttttatcgttc

SEQ ID NO: 165078 - DNA, 75 bp, synthetic construct
  source 1..75: mol_type = other DNA
gaacggtgcagatattccgaataaagataaattcatacaaaacacaggggcctgtcgtgcatttagcggtcagac

SEQ ID NO: 165079 - DNA, 75 bp, synthetic construct
  source 1..75: mol_type = other DNA
tataaaccatggtgcagattacgccccaggctggcggcgcgactacagcacaaaaaaccagcaacctgcatttgc

SEQ ID NO: 165080 - DNA, 75 bp, synthetic construct
  source 1..75: mol_type = other DNA
tggtattatgattgcgccagtatttcagcagttaatgatgatgagcatgttgggtaggtctgatgcgggcagtga

SEQ ID NO: 165081 - DNA, 75 bp, synthetic construct
  source 1..75: mol_type = other DNA
tagcgctataccttattgcgcaagttatgacatcaataggaggattagtctttaatttagtggtgttaagtttac

SEQ ID NO: 165082 - DNA, 75 bp, synthetic construct
  source 1..75: mol_type = other DNA
tacaggcaaaggtggtgagtattttcttatttgtcttgtgaattttttactgacaattattactctgggaatata

SEQ ID NO: 165083 - DNA, 75 bp, synthetic construct
  source 1..75: mol_type = other DNA
gaaaaatagcgctgccgcgccgtggtgcggtcattacgctggcgctaggctggaaggggcagccgcttttcccga

SEQ ID NO: 165084 - DNA, 75 bp, synthetic construct
  source 1..75: mol_type = other DNA
gatctggagctggatgacgccgatggaaaaatagcgctgccgcgccgtggtgcggtcattacgctggcgctaggc

SEQ ID NO: 165085 - DNA, 75 bp, synthetic construct
  source 1..75: mol_type = other DNA
tgcggtcattacgctggcgctgggctggaaggggcagccgcttttccctaaaggggcattcacggtggacgagat

SEQ ID NO: 165086 - DNA, 75 bp, synthetic construct
  source 1..75: mol_type = other DNA
accgtcggggaagtggtaaaggaaatagccgcgcgtcacaagctgaagatggcgctgggtaaagacctgtcggat

SEQ ID NO: 165087 - DNA, 75 bp, synthetic construct
  source 1..75: mol_type = other DNA
gggcaaaagcgccactggtaaaccactgccagtgatcactatcacacgcaaggatggcgacagtcaccgatttac

SEQ ID NO: 165088 - DNA, 75 bp, synthetic construct
  source 1..75: mol_type = other DNA
tttaaacagccgatagatgatgcgggatggaccattacgactctgacacataccgtcagcccggataacggtttt

SEQ ID NO: 165089 - DNA, 75 bp, synthetic construct
  source 1..75: mol_type = other DNA
cagcattgcggaatcgctgaaaaaaatcccggtaccgcatatcgaccagtcgcaggaatccgacgcggtattttt

SEQ ID NO: 165090 - DNA, 75 bp, synthetic construct
  source 1..75: mol_type = other DNA
ttgcaaagcgcaataaactgacggccagtgtcgcggattcactgaaaaaaataccggtaccgcatatcgaccagt

SEQ ID NO: 165091 - DNA, 75 bp, synthetic construct
  source 1..75: mol_type = other DNA
gcgacggcgaccgccatcagttcgccattgcagaccgggaggcttacaccggcgtgacggcgaaatggctacaca

SEQ ID NO: 165092 - DNA, 75 bp, synthetic construct
  source 1..75: mol_type = other DNA
gatctggagctggacgatgccgacgggctgatcgccctgccgcgacgtggggcagtgattcagcttgcgctgggc

SEQ ID NO: 165093 - DNA, 75 bp, synthetic construct
  source 1..75: mol_type = other DNA
ctcacattctgaataatagtggcttcacgacggggttagagcttgaggttaagctatctgatatagagtacagct

SEQ ID NO: 165094 - DNA, 75 bp, synthetic construct
  source 1..75: mol_type = other DNA
ctcatagcctgaataatagtggcttcacgacaggcttagagcttgaggttaagctctctgacgtagagtataaag

SEQ ID NO: 165095 - DNA, 75 bp, synthetic construct
  source 1..75: mol_type = other DNA
catcggaagaatcggacgaaacggggatcgttgcatgttccgcttacggtggcggtaaaaatgctcagtattctg

SEQ ID NO: 165096 - DNA, 75 bp, synthetic construct
  source 1..75: mol_type = other DNA
tgccagtgaagatcgacaatagcgttgactacagggatttgtaccctgaaaacgagttcgcaatacccattcctc

SEQ ID NO: 165097 - DNA, 75 bp, synthetic construct
  source 1..75: mol_type = other DNA
agcgtatccactacgatgatttgtccggctacctgttacgcggtggcagtggtgagaagtggtatcaccttaacc

SEQ ID NO: 165098 - DNA, 75 bp, synthetic construct
  source 1..75: mol_type = other DNA
aaccatgatcgctactatcaacatgatggcgcggtccctcgcaataaatccccgcacacgattccttcacgtttc

SEQ ID NO: 165099 - DNA, 75 bp, synthetic construct
  source 1..75: mol_type = other DNA
aagcaagcgaacggaacgaagatgttaatctcaggccatcatttagctatccgcgacgcactgcaacgcgttatt

SEQ ID NO: 165100 - DNA, 75 bp, synthetic construct
  source 1..75: mol_type = other DNA
tgccagtgaagatcgacaacagcgttgactattgggatttgtaccctgaaaacgagttcgccatccctattgctc

SEQ ID NO: 165101 - DNA, 75 bp, synthetic construct
  source 1..75: mol_type = other DNA
gcgcccgcgtaaattcgacgaagagggtgcattgtggactgaagccatgataaccgcagcgcaccggatgcagat

SEQ ID NO: 165102 - DNA, 75 bp, synthetic construct
  source 1..75: mol_type = other DNA
atggcgcggtccctcgcaataaatccccgcacaagattccttcacgtttcctattccaacaacctggcgctactc

SEQ ID NO: 165103 - DNA, 75 bp, synthetic construct
  source 1..75: mol_type = other DNA
ttcagtcaaaatgtgaaaacgatggcctgtttttcaatcgctacttctataagcaagcaaacggaacgaagatgt

SEQ ID NO: 165104 - DNA, 75 bp, synthetic construct
  source 1..75: mol_type = other DNA
tatggtgtggggcatcactgaattaagccaaccgcaggcaatgggcctcatgttaccgaagcgcctgcgcggatt

SEQ ID NO: 165105 - DNA, 75 bp, synthetic construct
  source 1..75: mol_type = other DNA
aaaaatcccctgaccgtatggacgctatggtgtggggcatcactgaattaagccaaccgcaggcaatgggcctca

SEQ ID NO: 165106 - DNA, 75 bp, synthetic construct
  source 1..75: mol_type = other DNA
tcaatgaacgcttataacatccatgaagctgacgcgatggttatcgaaaccaaccagggtggtgatatggcagag

SEQ ID NO: 165107 - DNA, 75 bp, synthetic construct
  source 1..75: mol_type = other DNA
ggtcaaccgactgaaaatgataccgttctggtttatggtgccggtccaatcggcctgacgatcgttcaggtataa

SEQ ID NO: 165108 - DNA, 75 bp, synthetic construct
  source 1..75: mol_type = other DNA
aactgcgccaggctgcggagtcgatgaaacgttcttacgttgcgaatgatcctgaaaaggcaagcgatgaagcgc

SEQ ID NO: 165109 - DNA, 75 bp, synthetic construct
  source 1..75: mol_type = other DNA
gtggacggcaccacggatattaaagtggcactgcaccaggccgggacgccgatcggccagaacgatacggcgatt

SEQ ID NO: 165110 - DNA, 75 bp, synthetic construct
  source 1..75: mol_type = other DNA
gggaaaggctgcattatgggcagtgcgcaccagcgtctgaaagatctgcatccggagctggaagtgattggtact

SEQ ID NO: 165111 - DNA, 75 bp, synthetic construct
  source 1..75: mol_type = other DNA
ctgcgcgaaggtgagtatgcaaagagtcgtcagggacgtatgttccttgatgaccagttctggattggcaagctt

SEQ ID NO: 165112 - DNA, 75 bp, synthetic construct
  source 1..75: mol_type = other DNA
aacgttaccggacacggacagccgactgaagatgacaccgtgctggtttatggtgctggtccaattggtctgact

SEQ ID NO: 165113 - DNA, 75 bp, synthetic construct
  source 1..75: mol_type = other DNA
cacactggcagcctgtacacgctggaaaatcaaatgatggaatatgtgccagctaccgctaaaaaatcccctgac

SEQ ID NO: 165114 - DNA, 75 bp, synthetic construct
  source 1..75: mol_type = other DNA
atatggcagaggccacactacgcaatgcaggatttaagggccgcattgttaaggtgcacgcaagcaagggtaaat

SEQ ID NO: 165115 - DNA, 75 bp, synthetic construct
  source 1..75: mol_type = other DNA
acagagaggttctaagggggttgtgtgttaaaggttgtgctcccaaagacatatcagcacctttgttttttagtt

SEQ ID NO: 165116 - DNA, 75 bp, synthetic construct
  source 1..75: mol_type = other DNA
cggcaatctctacgtgttggagaaccagctgatggaatacatccccgccaccgctaagaaatcacctgaccgcct

SEQ ID NO: 165117 - DNA, 75 bp, synthetic construct
  source 1..75: mol_type = other DNA
gcggaggacacgctgcgcaatgccgggttcagcggccgcatcatccgcgtgcacgccagtaagggtaaatacgca

SEQ ID NO: 165118 - DNA, 75 bp, synthetic construct
  source 1..75: mol_type = other DNA
cgtatggatgcgatggtatgggggatcactgaattaagccaaccacaggcgatgggtcttatgttacctaaacgc

SEQ ID NO: 165119 - DNA, 75 bp, synthetic construct
  source 1..75: mol_type = other DNA
atgatgttaaatcccggacggggaaagcagtcaaaacatgctggatcgctcatgttaagtcattgcatggactaa

SEQ ID NO: 165120 - DNA, 75 bp, synthetic construct
  source 1..75: mol_type = other DNA
tgttgagggtaaagttctcattgcccgttttgcacttaagcaatttttccattctgattttggtgatttcatctt

SEQ ID NO: 165121 - DNA, 75 bp, synthetic construct
  source 1..75: mol_type = other DNA
atgtttaatgaaagtgatgataaaaactttgttagtgcaatgcttaaatgtcaacttggcctgaatataagccaa

SEQ ID NO: 165122 - DNA, 75 bp, synthetic construct
  source 1..75: mol_type = other DNA
gataaaaacgctcgtagtcatgcctccgatggtatccaccgatcctatgttggaaacgagaacgatctattcttc

SEQ ID NO: 165123 - DNA, 75 bp, synthetic construct
  source 1..75: mol_type = other DNA
gaagtacgagtaaaagtgaaacttgccggaatttgtggttcagatagccatatttatcgtgggcataatcctttt

SEQ ID NO: 165124 - DNA, 75 bp, synthetic construct
  source 1..75: mol_type = other DNA
atgaaaagcattttaattgaaaaaccgaatcaactggcaattatcgaacgtgaaatacccaccccgtcagcgggt

SEQ ID NO: 165125 - DNA, 75 bp, synthetic construct
  source 1..75: mol_type = other DNA
tattatttcacacgaatgttttctaagaggcgcaattattacagcctgggcagatcagttccgccaacaacaagg

SEQ ID NO: 165126 - DNA, 75 bp, synthetic construct
  source 1..75: mol_type = other DNA
ttcgatgaaattcagtatggcagtgctgtgctcaagcgcaacggcaagggagccatactacgcccggttatcacg

SEQ ID NO: 165127 - DNA, 75 bp, synthetic construct
  source 1..75: mol_type = other DNA
caccattagaagttaactataacgaactattaaaatctaacgttattggatgtttgactgcaatatatgatgctt

SEQ ID NO: 165128 - DNA, 75 bp, synthetic construct
  source 1..75: mol_type = other DNA
ggtccgggtccgggcaagaatcatccgcgagcgaacggcactgtgcaatgaaatccgggggctgttaagtgagtt

SEQ ID NO: 165129 - DNA, 75 bp, synthetic construct
  source 1..75: mol_type = other DNA
atgcgaaagcgaaacatatgtccgatgaaactgcacgtatcatcgaccaggaagtgaaagcactgattgagcgta

SEQ ID NO: 165130 - DNA, 75 bp, synthetic construct
  source 1..75: mol_type = other DNA
tgatgtttggttgccagaaaaacttgcaaaacaaataaagtttatgagagatggtaattatgcactgacatatag

SEQ ID NO: 165131 - DNA, 75 bp, synthetic construct
  source 1..75: mol_type = other DNA
ggaaatccaccgccgcataaagcaaaaattacagtcgtcagcctgttatttaaagacctaagttacagcgctgaa

SEQ ID NO: 165132 - DNA, 75 bp, synthetic construct
  source 1..75: mol_type = other DNA
ggaaatccaccgccgcataaagccaaaattacagccgtcagtctgttatttaaagacctgagttacagcgctgaa

SEQ ID NO: 165133 - DNA, 75 bp, synthetic construct
  source 1..75: mol_type = other DNA
cgctggccccgcaaactatctatgtttctgcgacgcccggcaattacgagctggagaaatccggtggcgatgtgg

SEQ ID NO: 165134 - DNA, 75 bp, synthetic construct
  source 1..75: mol_type = other DNA
aatggatattagttggagtcagggatatgtctggcattatctgatgggtgatttagagcacgaagaaggagaggc

SEQ ID NO: 165135 - DNA, 75 bp, synthetic construct
  source 1..75: mol_type = other DNA
gccggaagggagttgtttgaactctggcaatccaactttattcagtatcacgccatgaacgtctacaccattacc

SEQ ID NO: 165136 - DNA, 75 bp, synthetic construct
  source 1..75: mol_type = other DNA
tacggattatttcacgcaatgatgaatggtattttgattacattaccgacttcagttatatggggacggtatacc

SEQ ID NO: 165137 - DNA, 75 bp, synthetic construct
  source 1..75: mol_type = other DNA
tggaaacgagaacgatctattcttctcccgtgccgggaagtggaactcagaatcaaaatggtttagctctaagaa

SEQ ID NO: 165138 - DNA, 75 bp, synthetic construct
  source 1..75: mol_type = other DNA
aggaaacgagaacgatctattcttctcaagggcgggtcgctggaacgcggaatcaaaatggtttagctctaaaaa

SEQ ID NO: 165139 - DNA, 75 bp, synthetic construct
  source 1..75: mol_type = other DNA
gataaaaacgctcgtagtcatgcctcagacggtattcatcgttcctacccaggaaatgagaacgatctattcttc

SEQ ID NO: 165140 - DNA, 75 bp, synthetic construct
  source 1..75: mol_type = other DNA
ctgttgtaccggagtgaacatattccagaggcttggcaggggcggggacgaacgaaggatgtcaatgaggctggg

SEQ ID NO: 165141 - DNA, 75 bp, synthetic construct
  source 1..75: mol_type = other DNA
cgccgtcgtccgctgtgcgagcagattgacgtcgtctggggcgggcgagtgttgcccaatatccgcagtacttta

SEQ ID NO: 165142 - DNA, 75 bp, synthetic construct
  source 1..75: mol_type = other DNA
attgaaagcaaaatagctaaatttatcaaagataaataccgcgtagatgttaaaatagcgaaactggattcatct

SEQ ID NO: 165143 - DNA, 75 bp, synthetic construct
  source 1..75: mol_type = other DNA
tatgattgcactcggtgccgatactgtactgctgggtcgtgctttcctgtatgcgctggcaacggcgggccaggc

SEQ ID NO: 165144 - DNA, 75 bp, synthetic construct
  source 1..75: mol_type = other DNA
gaaattgtcgatgccggtggcactggctccggtgggtttgtgtggcatgtatgcgcgtcgtggcgaagttcaggc

SEQ ID NO: 165145 - DNA, 75 bp, synthetic construct
  source 1..75: mol_type = other DNA
taaagaaatcaccggagattcgctggtacaggagctgggcaaagaactgccagcggcactggcttcgatggcgaa

SEQ ID NO: 165146 - DNA, 75 bp, synthetic construct
  source 1..75: mol_type = other DNA
aaagctaccaaatggtattgaggcatattttgctaagaaacatcccaaagtatacgaagactttgatattccatt

SEQ ID NO: 165147 - DNA, 75 bp, synthetic construct
  source 1..75: mol_type = other DNA
ttatagacacgggctaaaacgaccaaatggtattgaggcatattttgctaagaaacatcccaaagtatatgaaga

SEQ ID NO: 165148 - DNA, 75 bp, synthetic construct
  source 1..75: mol_type = other DNA
tgttccgccagcgacatcagcccggtctgcgaggcctgtcggactttactgaactgaaaggtgtagttgtcacca

SEQ ID NO: 165149 - DNA, 75 bp, synthetic construct
  source 1..75: mol_type = other DNA
tctgtcgctttgccggccatctttcgcacttctacagggtcgcccaacatgcggtactttgcagccagcttgtgc

SEQ ID NO: 165150 - DNA, 75 bp, synthetic construct
  source 1..75: mol_type = other DNA
tctgtcgctttgctggccatctttcgcacttctacagggtcgcccaacatgcggtgctttgcagccagctagtgc

SEQ ID NO: 165151 - DNA, 75 bp, synthetic construct
  source 1..75: mol_type = other DNA
cgcaggaatttgcttttgaagcgttaatgcatgatgcaacagaagcgtattgccaggacatccccgctccactga

SEQ ID NO: 165152 - DNA, 75 bp, synthetic construct
  source 1..75: mol_type = other DNA
actgaaacgccttcttcctgactataaacggatggaagaaaaaatagacgccgtaatccgtgagaaatacgggtt

SEQ ID NO: 165153 - DNA, 75 bp, synthetic construct
  source 1..75: mol_type = other DNA
tctgtcgctttgcgggccatctttcgcacttctacagggtcgcccaacatgcggttctttgcagccagctcgtgc

SEQ ID NO: 165154 - DNA, 75 bp, synthetic construct
  source 1..75: mol_type = other DNA
tctgtcgctttgccggccatctttcgcacttctacagggtcgcccaacatgcggttctttgcagccagctggtgc

SEQ ID NO: 165155 - DNA, 75 bp, synthetic construct
  source 1..75: mol_type = other DNA
attaccgcagcaaagacctcatcccgaaaaaatctaggctgctggcggagacgatttctgcggtttatctcgatg

SEQ ID NO: 165156 - DNA, 75 bp, synthetic construct
  source 1..75: mol_type = other DNA
ggatatgggggtgaaagacaaagcagccggagtatcagcagaaacggcacagcaacgtataaaagaattccactc

SEQ ID NO: 165157 - DNA, 75 bp, synthetic construct
  source 1..75: mol_type = other DNA
gcaggctataccgaaagccaggacggcgtcggtgcccgcctgcttattgacagtcatgatagcccggtgacggtg

SEQ ID NO: 165158 - DNA, 75 bp, synthetic construct
  source 1..75: mol_type = other DNA
cgtggcacttatgccgatcctcgaggcaacgtcagccttgaagaagaagcgattgatatggatagctattccatg

SEQ ID NO: 165159 - DNA, 75 bp, synthetic construct
  source 1..75: mol_type = other DNA
ctggtagaactgattgaaatcgacggtgaaaccaaacttcgttatcgccctttcaaagtggattacgcgattttg

SEQ ID NO: 165160 - DNA, 75 bp, synthetic construct
  source 1..75: mol_type = other DNA
aagaaagttactttgaaagagagattgttacagaaagcaacttaacaggatattacgtcgttgaaatcggtgatt

SEQ ID NO: 165161 - DNA, 75 bp, synthetic construct
  source 1..75: mol_type = other DNA
atgaatattgcctatcgtaaacgggaagcggataaagtactggcaacccggctcgcgctgcgtacccaccgaatt

SEQ ID NO: 165162 - DNA, 75 bp, synthetic construct
  source 1..75: mol_type = other DNA
gaccatgacagaaccaatgcggtatttgcgttactgaaaccggaaacgttttatatcaatgctcaccaggttatc

SEQ ID NO: 165163 - DNA, 75 bp, synthetic construct
  source 1..75: mol_type = other DNA
cgaaagccttgatcgcttaatggcaccaaagcaggcgttaagaggttcattggtcgttattggtgcccggccaaa

SEQ ID NO: 165164 - DNA, 75 bp, synthetic construct
  source 1..75: mol_type = other DNA
caccctgatcgaatgggatgccagtatccccccgctcagcgtcctgctcggtgaggcagcaatggcagaaaacag

SEQ ID NO: 165165 - DNA, 75 bp, synthetic construct
  source 1..75: mol_type = other DNA
tggaagtggacatcagtgcgtttttcgaccatgtgagacatgatctggtgctcaaagctctggaacaccacggga

SEQ ID NO: 165166 - DNA, 75 bp, synthetic construct
  source 1..75: mol_type = other DNA
gtttatagcctggtctttactgtgttgctggcaatcccgttgggaatttatttccttggcggcgaagagcagtaa

SEQ ID NO: 165167 - DNA, 75 bp, synthetic construct
  source 1..75: mol_type = other DNA
tggtcgtaaaacccatcgatatgcgtcggggtatcgatacactgacacagtacgtccagaacgaacttaacgctg

SEQ ID NO: 165168 - DNA, 75 bp, synthetic construct
  source 1..75: mol_type = other DNA
ctataaagtcgcacaactggaaaaacttcgcggatttaaagcctggctaattctgctttacggcattttgctatg

SEQ ID NO: 165169 - DNA, 75 bp, synthetic construct
  source 1..75: mol_type = other DNA
tctggcatttgtcggaattatttataccgccctttttgctctctacgccatgctgttctggctggcatttttcta

SEQ ID NO: 165170 - DNA, 75 bp, synthetic construct
  source 1..75: mol_type = other DNA
ccgtactgaccgcattcttaggcatttatctcggtttccacgaggccattaaaggcattattctcaatctgttaa

SEQ ID NO: 165171 - DNA, 75 bp, synthetic construct
  source 1..75: mol_type = other DNA
gtgtggttgtgtacccgccgtctgcacaaaggcagcttccgctggccacgtgcaaatgacgctgcctggcacctc

SEQ ID NO: 165172 - DNA, 75 bp, synthetic construct
  source 1..75: mol_type = other DNA
gtgaccgcactggacggtctgttctggtctggtagtcagcgtattgcggaagatattctgtgtcgttacggggaa

SEQ ID NO: 165173 - DNA, 75 bp, synthetic construct
  source 1..75: mol_type = other DNA
atgaaccttctccagaaggtggacggcgagcggggtgtctgggagctctcaagcaaaaccaagaagggcctgcat

SEQ ID NO: 165174 - DNA, 75 bp, synthetic construct
  source 1..75: mol_type = other DNA
cacgttggctttgccatgagcgtaattaatgaagccgaagcgcgcgacaccctcgacgcattacgaaatatgttt

SEQ ID NO: 165175 - DNA, 75 bp, synthetic construct
  source 1..75: mol_type = other DNA
tccagagctggaagtgattggtactaatgccgacgacgcggtaccgcattatctgcgtaaactctatctcagtta

SEQ ID NO: 165176 - DNA, 75 bp, synthetic construct
  source 1..75: mol_type = other DNA
aacttagcagtatcgcgaaagggatggaaaccggcgatgccatgctgaaaagcgccaacgttgagttactggtca

SEQ ID NO: 165177 - DNA, 75 bp, synthetic construct
  source 1..75: mol_type = other DNA
atgtcgaaagcggtaggtattttagaacttagcagtatcgcgaaagggatggaaaccggcgatgccatgctgaaa

SEQ ID NO: 165178 - DNA, 75 bp, synthetic construct
  source 1..75: mol_type = other DNA
gcaaaacgctatgccccggaaaatttctgctgatgctcggtggcgatgtgggcgcggtgcaacaggccatcaaca

SEQ ID NO: 165179 - DNA, 75 bp, synthetic construct
  source 1..75: mol_type = other DNA
aacgccttcttcctgactataaacagatggaagaaaagatagacgccgtaatccgtgagaaatacgggttacctc

SEQ ID NO: 165180 - DNA, 75 bp, synthetic construct
  source 1..75: mol_type = other DNA
gatatcgcggtttccctttcaaatatctgtcgctttgccggccatctttcacacttctacagcgtcgcccaacat

SEQ ID NO: 165181 - DNA, 75 bp, synthetic construct
  source 1..75: mol_type = other DNA
aacgccgcaaaaacgctttcgccttatgcctcagccattctggtggatcaacagttctgctatcgccaggtggtt

SEQ ID NO: 165182 - DNA, 75 bp, synthetic construct
  source 1..75: mol_type = other DNA
gtgttctatggcctgaactaaataaccctttctttattgaggcgttaagtgcctgcgaaacaggtgaaagttata

SEQ ID NO: 165183 - DNA, 75 bp, synthetic construct
  source 1..75: mol_type = other DNA
ctggcaccgggccatgcctacgggatgtttatggaacgcttcaacgagttatcggaattacgcaaatgtgcataa

SEQ ID NO: 165184 - DNA, 75 bp, synthetic construct
  source 1..75: mol_type = other DNA
tgccaggacatccccacgccgctgaaacgtcttcttcctgactataaacggatggaagaaaaaatagacgccgta

SEQ ID NO: 165185 - DNA, 75 bp, synthetic construct
  source 1..75: mol_type = other DNA
gtatttgattatctcattaagcccattgcctatgaacggctggggcaaacgctaacccgtttccgccagcgtaaa

SEQ ID NO: 165186 - DNA, 75 bp, synthetic construct
  source 1..75: mol_type = other DNA
ggaagtatttttattatgacaagataaataaagacgacatcgtgattaacgatatcgcggtttccctttcaaata

SEQ ID NO: 165187 - DNA, 75 bp, synthetic construct
  source 1..75: mol_type = other DNA
tgccaggacattcccgcaccactgaaacgccttcttcctgactataaacggatggaagaaaaaatagacgccgta

SEQ ID NO: 165188 - DNA, 75 bp, synthetic construct
  source 1..75: mol_type = other DNA
aaagttattccactggctccgggccatgcctacgggatgtttatggaacgttttaacgagttatcggagttacgc

SEQ ID NO: 165189 - DNA, 75 bp, synthetic construct
  source 1..75: mol_type = other DNA
aagaaaaaatagacgccgtaatccgtgagaaatacgggttacccccagttatgagtacgcccgtgaaatatgccg

SEQ ID NO: 165190 - DNA, 75 bp, synthetic construct
  source 1..75: mol_type = other DNA
attgacccgttttcgccagcgtaaacatatgctggaaagtattgatagtgccagtcagaagcaaattgatgagat

SEQ ID NO: 165191 - DNA, 75 bp, synthetic construct
  source 1..75: mol_type = other DNA
ccgggtttgcaaacgagctggcgtggcccgcgcaggaatcgtcgccgctgcgccagcatctgctggtagcgcgtt

SEQ ID NO: 165192 - DNA, 75 bp, synthetic construct
  source 1..75: mol_type = other DNA
gaaacctgcatcgcccggcacgacgccctcttctccgggcagtgttctccgctggaattgctgttcaacgagcag

SEQ ID NO: 165193 - DNA, 75 bp, synthetic construct
  source 1..75: mol_type = other DNA
cattatcaatggcgctggacgcccctcaacgtcgccagcattgaccatccgcttacctttagcttcagcgccggt

SEQ ID NO: 165194 - DNA, 75 bp, synthetic construct
  source 1..75: mol_type = other DNA
ttgccagcggtcaaactcattcaaaaatcagccttggggatattttcaaagatagctatggctatcgagtaaaga

SEQ ID NO: 165195 - DNA, 75 bp, synthetic construct
  source 1..75: mol_type = other DNA
cgtcacgctggttgattttaacttctcagcgccggtgacgttgcaagagcagatgcaacagacccaacagcgcct

SEQ ID NO: 165196 - DNA, 75 bp, synthetic construct
  source 1..75: mol_type = other DNA
gacgagcgttatgcgcccttccctttgacgcccattcagcacgcctactggctggggcgaacccacctcattggc

SEQ ID NO: 165197 - DNA, 75 bp, synthetic construct
  source 1..75: mol_type = other DNA
tgaggattctcggtgctatgtggatggtggcgacgttcattgtggttgtcggaagttttgtccggttggtaggcg

SEQ ID NO: 165198 - DNA, 75 bp, synthetic construct
  source 1..75: mol_type = other DNA
caatccgcgctgtaaagcggtagtgcatttgcacagtacgtggtcgacggcgctttcctgccaggaagggctgga

SEQ ID NO: 165199 - DNA, 75 bp, synthetic construct
  source 1..75: mol_type = other DNA
atctgtcgctgcttttacctgacgggaatttactggcgacaccgacaggttcatgcctgggcaatctcgatccgc

SEQ ID NO: 165200 - DNA, 75 bp, synthetic construct
  source 1..75: mol_type = other DNA
tgattggtgattttacctccgtcacgctggttgattttaacttctcagcgccggtgacgttgcaagagcagatgc

SEQ ID NO: 165201 - DNA, 75 bp, synthetic construct
  source 1..75: mol_type = other DNA
aagccccccacgttcaggcttgtgcgcaacacattacgcgctggctttgcgcaacctcaacgcaaccggagaaca

SEQ ID NO: 165202 - DNA, 75 bp, synthetic construct
  source 1..75: mol_type = other DNA
caaaggcaagcaggttcggatggtgttaatcgatcccgtgtgccgacaggatttctgttgcgaaaaccgggcggc

SEQ ID NO: 165203 - DNA, 75 bp, synthetic construct
  source 1..75: mol_type = other DNA
cacagccatcaccggcggagcagcaactcagggcgttgctgacaccaccaccggatgtgctttcagcaggccaga

SEQ ID NO: 165204 - DNA, 75 bp, synthetic construct
  source 1..75: mol_type = other DNA
cttccttccagcgcctgctgggtgacgggtcgcagttcggggtaaacttcagctacgccgtccagccgtcgccgg

SEQ ID NO: 165205 - DNA, 75 bp, synthetic construct
  source 1..75: mol_type = other DNA
ctgggcggtgaccggcctctacttctacgacaacaacgtggtggagatggcgaaggacgtgaagccttctgaacg

SEQ ID NO: 165206 - DNA, 75 bp, synthetic construct
  source 1..75: mol_type = other DNA
gccgtaacgaatttattattggcgtggcgtatgattctgatatcgatcaggttaagcagatcctgaccaatatta

SEQ ID NO: 165207 - DNA, 75 bp, synthetic construct
  source 1..75: mol_type = other DNA
atgcgggactaccagttttaattgtcagcactcttggtattcaatacatatcgggaatctatttaacaattaatc

SEQ ID NO: 165208 - DNA, 75 bp, synthetic construct
  source 1..75: mol_type = other DNA
agcaaaatacatcatagttagccattttgggttaactgttatgttgtactgcttcatttttatatatattgtaaa

SEQ ID NO: 165209 - DNA, 75 bp, synthetic construct
  source 1..75: mol_type = other DNA
attgcaaaaagcgcaggtaaaggcatggtgtcaggtttggctgcggcgactgccagctacattccccaagacgag

SEQ ID NO: 165210 - DNA, 75 bp, synthetic construct
  source 1..75: mol_type = other DNA
atgcgcagttaattagcgacgttattattagtataggattttcagcagaatccctgcctggcctgtgggcgctct

SEQ ID NO: 165211 - DNA, 75 bp, synthetic construct
  source 1..75: mol_type = other DNA
gaacttcgcgactggcagcctgatcccggagcaaatctcctgggatcactggaaactggcgttaggttttagcgt

SEQ ID NO: 165212 - DNA, 75 bp, synthetic construct
  source 1..75: mol_type = other DNA
tacgacaacgacgtggtggagatggcgaaagccgtgaaaccgtctgcgcgcggcgagctggaaatcaccaccctg

SEQ ID NO: 165213 - DNA, 75 bp, synthetic construct
  source 1..75: mol_type = other DNA
acccacgacagcctggtggacgcgtcgcagttcattcacaccattgagaagcgccaggggatgaaagtggcctgc

SEQ ID NO: 165214 - DNA, 75 bp, synthetic construct
  source 1..75: mol_type = other DNA
cagatgtatctggagcgcggcgatttgcaggtggaactgctggggcgcggatttgcctggctggatacgggcacc

SEQ ID NO: 165215 - DNA, 75 bp, synthetic construct
  source 1..75: mol_type = other DNA
gggcagaaaaaagcgcgtgaaatctggttcctgtgccgtcagtatgacgcgaaacaggcgctggatatggggctg

SEQ ID NO: 165216 - DNA, 75 bp, synthetic construct
  source 1..75: mol_type = other DNA
ggtgcaggcgataaagcgttctgctccggtggtgaccagaaagtgcgtggcgattacggcggctataaagatgat

SEQ ID NO: 165217 - DNA, 75 bp, synthetic construct
  source 1..75: mol_type = other DNA
tttacgcaccggttgaatggcacgactgctccgaaggctttgaggacattcgttatgaaaaatccaccgacggta

SEQ ID NO: 165218 - DNA, 75 bp, synthetic construct
  source 1..75: mol_type = other DNA
tgcgccaaaacacgtcctgttctggaggggagtttcagacacgccgtttcttgcctgaaagtcgatccgctttaa

SEQ ID NO: 165219 - DNA, 75 bp, synthetic construct
  source 1..75: mol_type = other DNA
ccttgaaacctgccaggctgcggtgaatgccgccgataatggcagcgatttcatcaatatcccacatgatatttt

SEQ ID NO: 165220 - DNA, 75 bp, synthetic construct
  source 1..75: mol_type = other DNA
ccaatctggctcaccgtcgcgtgtttgatcatctttggcttgctgctgaataaaaccacctttggtcgtaatacc

SEQ ID NO: 165221 - DNA, 75 bp, synthetic construct
  source 1..75: mol_type = other DNA
catggcttttacgccagtgctatccacgagatttcgcactggtgtattgccgggaaagcgcgccgtgaactggtt

SEQ ID NO: 165222 - DNA, 75 bp, synthetic construct
  source 1..75: mol_type = other DNA
ctgacggtaaaagagatgatccaggcactggcggatgcgcgttatgacgacaacatcggcgtgatcattctgact

SEQ ID NO: 165223 - DNA, 75 bp, synthetic construct
  source 1..75: mol_type = other DNA
atctggaaaaagaaaccgtccgttggtgccgcgaaatgctgcaaaacagcccgatggcgctgcgctgcctgaaag

SEQ ID NO: 165224 - DNA, 75 bp, synthetic construct
  source 1..75: mol_type = other DNA
atcgtccgcaggtgcgcaatgccttccgtcctctgacggtaaaagagatgatccaggcactggcagatgcgcgtt

SEQ ID NO: 165225 - DNA, 75 bp, synthetic construct
  source 1..75: mol_type = other DNA
aatcttgataaaattgtaaaaggcaaaaaagaagtcaaagatccgttagcacagtggaacgaaataattaattct

SEQ ID NO: 165226 - DNA, 75 bp, synthetic construct
  source 1..75: mol_type = other DNA
aggttttttaagattatcttcatactcaatcatatgatcgaaaataatcttgagaagccagacttccgtacactt

SEQ ID NO: 165227 - DNA, 75 bp, synthetic construct
  source 1..75: mol_type = other DNA
gggcgtgaactgcctgctattcgtgaagtttacaccctgagtaaatctgaattactactgatgactgatcgtagc

SEQ ID NO: 165228 - DNA, 75 bp, synthetic construct
  source 1..75: mol_type = other DNA
acggcgtgaaagctgacgtgctgtttaactggggccctgcaacaatcagcttggttgatggggaggttgttgtgg

SEQ ID NO: 165229 - DNA, 75 bp, synthetic construct
  source 1..75: mol_type = other DNA
gtactggcctgctgccgtgggtgctggcgcagtggggaatgcaagtcaccttattgctcctggcggcagtgttgt

SEQ ID NO: 165230 - DNA, 75 bp, synthetic construct
  source 1..75: mol_type = other DNA
taataattaacccagattacgaaactttgcgtcaacccctttttgacgtgctaagcgagatgccttacttacatt

SEQ ID NO: 165231 - DNA, 75 bp, synthetic construct
  source 1..75: mol_type = other DNA
gcaccacaacctgcaccatcagctgaacagctgccgcctccatgccaggaacgactggtaccaccaccggcacag

SEQ ID NO: 165232 - DNA, 75 bp, synthetic construct
  source 1..75: mol_type = other DNA
ccaccgctctatgccttatcacaacagaccaccacaccggcagaaacactgagcgcggcggtaaaaaatattcct

SEQ ID NO: 165233 - DNA, 75 bp, synthetic construct
  source 1..75: mol_type = other DNA
catccttcaattatactaatcctaaatcatttgactatactgcccaactagttagacctagtagtggtgcaactg

SEQ ID NO: 165234 - DNA, 75 bp, synthetic construct
  source 1..75: mol_type = other DNA
tttgacgggagatacttcggcgcggtcacaaagtcacagattatttctacggtattacctgtaatgacctggtaa

SEQ ID NO: 165235 - DNA, 75 bp, synthetic construct
  source 1..75: mol_type = other DNA
gatacggcgaaatgatgaagcggattttagcggctaaaggggatgaagtggcgtttcgtgatgacggtgtttatg

SEQ ID NO: 165236 - DNA, 75 bp, synthetic construct
  source 1..75: mol_type = other DNA
gggctgctcaggaatggtatttgctgcaccacaaccggcaccgtcggctgaacagttgccgccgccatgtcagga

SEQ ID NO: 165237 - DNA, 75 bp, synthetic construct
  source 1..75: mol_type = other DNA
atgaacgacaacatcatgaccgcgcaggattacccattagccacccgctgcccggagaaaatccggacgcctggc

SEQ ID NO: 165238 - DNA, 75 bp, synthetic construct
  source 1..75: mol_type = other DNA
ttacagtactttaatgtactgaatgaacttagtaatcaggctatctcttctttgaatataggagccttttcagca

SEQ ID NO: 165239 - DNA, 75 bp, synthetic construct
  source 1..75: mol_type = other DNA
gcccgtttgatcttgacgaagatgtaaaaaaaatagccgcgataaataaatatatccatgcaaaatttgaggagc

SEQ ID NO: 165240 - DNA, 75 bp, synthetic construct
  source 1..75: mol_type = other DNA
tatggtgatcacttcgaagaatccttaatgaaggcattgtgtcggccctatctctggcaggagatgatgaatgct

SEQ ID NO: 165241 - DNA, 75 bp, synthetic construct
  source 1..75: mol_type = other DNA
tgaacggcgttatcaggccaaaatttgtgctgcatttgtccgtgaagctgcggaactttatgtcgagcgcaaaaa

SEQ ID NO: 165242 - DNA, 75 bp, synthetic construct
  source 1..75: mol_type = other DNA
ttgaaaactcattatcccgcagagtttttcgctgctgctctcactattcttggcgaagataaacaccaggggctg

SEQ ID NO: 165243 - DNA, 75 bp, synthetic construct
  source 1..75: mol_type = other DNA
ccgtcatggtgaggttgcacgttactatacttatgatatgcacacccgtattcctgacgttttactaatgagcac

SEQ ID NO: 165244 - DNA, 75 bp, synthetic construct
  source 1..75: mol_type = other DNA
tctattcagacacttaaactcctgggagcatctcccattgcaatgagtcaagctgaagtttatacctcccttcag

SEQ ID NO: 165245 - DNA, 75 bp, synthetic construct
  source 1..75: mol_type = other DNA
aagtagacagaattcagtgtaatgacacaggaaaacgcatctatgaaacacttgcttacctctataaaggaaagc

SEQ ID NO: 165246 - DNA, 75 bp, synthetic construct
  source 1..75: mol_type = other DNA
tggcacggcattattcttccggccaacatggatggtgtgccggggctcagttttacgggtatcgagccagatgat

SEQ ID NO: 165247 - DNA, 75 bp, synthetic construct
  source 1..75: mol_type = other DNA
atgaaaatattaatcatattcgcattatatatcttgtcgtcttcactatatgccaatgctgcgaatatacaggga

SEQ ID NO: 165248 - DNA, 75 bp, synthetic construct
  source 1..75: mol_type = other DNA
ggcaacgccaccagcgcttctttgcgcttttatttacggtgcgttgtggcgcagatacgggcgcaaatggatgta

SEQ ID NO: 165249 - DNA, 75 bp, synthetic construct
  source 1..75: mol_type = other DNA
attttcgcagcgggagaaaatatactcgtccgctttctgtatgtcagataacgccaactgtaagtttgcgaaatg

SEQ ID NO: 165250 - DNA, 75 bp, synthetic construct
  source 1..75: mol_type = other DNA
ttgaccaagacgttactggacggccccggtcgcgtgctggagtcggttcatccgcgctttttagtggatctggcg

SEQ ID NO: 165251 - DNA, 75 bp, synthetic construct
  source 1..75: mol_type = other DNA
ggagttgcgctggggtgcatttggcgatgcctgccgtctgggaagcccgcaagcggtggcgttgttgctgggtga

SEQ ID NO: 165252 - DNA, 75 bp, synthetic construct
  source 1..75: mol_type = other DNA
tcaccggatactttatcggcaagctgctaccttccgtcagcggcgaggcgacgtatctgttctatatgggctaca

SEQ ID NO: 165253 - DNA, 75 bp, synthetic construct
  source 1..75: mol_type = other DNA
tgatgaacttaaaaacagtatactgaagaaatgtggtctgccattgctaagattacgtactatagacagtgatat

SEQ ID NO: 165254 - DNA, 75 bp, synthetic construct
  source 1..75: mol_type = other DNA
aggaagtattaaaggaatctgattttaaaattttactggagcgcctgacatcatggtctgtgctttatttaaaac

SEQ ID NO: 165255 - DNA, 75 bp, synthetic construct
  source 1..75: mol_type = other DNA
ttgcccgcgccgttgttggtcagcaggaagccattaaatgggataaagcgccgtgccgtttctgcggtactggtt

SEQ ID NO: 165256 - DNA, 75 bp, synthetic construct
  source 1..75: mol_type = other DNA
ctgtttattcacccgctggatgcgaaagcgcgcgatctgcgccgtggcgacaaagtgaaagtggtttctcgccgt

SEQ ID NO: 165257 - DNA, 75 bp, synthetic construct
  source 1..75: mol_type = other DNA
catagaagccaatccgttatggtcgcaagaatggataggctgggggcatccattaggccataaagatggctggtc

SEQ ID NO: 165258 - DNA, 75 bp, synthetic construct
  source 1..75: mol_type = other DNA
atgaagagtacgacctgtggctctctaccggacgcgtcctggagcactggcacaccggcagtatgactcgccgtg

SEQ ID NO: 165259 - DNA, 75 bp, synthetic construct
  source 1..75: mol_type = other DNA
gtgagcaaattcccggtatccgaactggcggaagatcagctgaacgatgaatcacgcgagctgggcttctatctg

SEQ ID NO: 165260 - DNA, 75 bp, synthetic construct
  source 1..75: mol_type = other DNA
gtggggcgcaaacatggcggagatgcacccgatcctctggtcgcgcatcactaaccgtcgtctctctaaccagaa

SEQ ID NO: 165261 - DNA, 75 bp, synthetic construct
  source 1..75: mol_type = other DNA
ccgctgacgatgatcttttcaccctgccggaaggcgatatctctgttggcattcctcacgttctggaaatatcac

SEQ ID NO: 165262 - DNA, 75 bp, synthetic construct
  source 1..75: mol_type = other DNA
ataaaaatgacgacaacagtcctttggctaaatacccggcgaaaattccctctttaccgctattttatcaacctt

SEQ ID NO: 165263 - DNA, 75 bp, synthetic construct
  source 1..75: mol_type = other DNA
gctatcgtcacaagctgcgaaattagtacatcaatgccaacaattgctgaatagtcgcgatgaagatttcgcaaa

SEQ ID NO: 165264 - DNA, 75 bp, synthetic construct
  source 1..75: mol_type = other DNA
gtgctgatccgctggaacaaggcgctggcgaccaggggctgatgtttggctatgccaccaacgaaaccgatgtgc

SEQ ID NO: 165265 - DNA, 75 bp, synthetic construct
  source 1..75: mol_type = other DNA
tacgcaaccaatgaaaccgacgtgctgatgccagcacctatcacctatgcacaccgtctggtacagcgtcaggct

SEQ ID NO: 165266 - DNA, 75 bp, synthetic construct
  source 1..75: mol_type = other DNA
acgggcaaagtcaggtaaaaagctttgctgatgctgcggcggcggaaaaagcggaactgaagctgattgcggaga

SEQ ID NO: 165267 - DNA, 75 bp, synthetic construct
  source 1..75: mol_type = other DNA
ccgtcgaaagagagttgggcgttcactgcgttaggcgttctcggtaacgatgacaccgcccgcaaactgacgcca

SEQ ID NO: 165268 - DNA, 75 bp, synthetic construct
  source 1..75: mol_type = other DNA
tgaatcacaggcgaacgatgctgttaaccgctacaaactgctgaaaaagatgcgcgtaccgtcgccgcccagcag

SEQ ID NO: 165269 - DNA, 75 bp, synthetic construct
  source 1..75: mol_type = other DNA
tcagctcttcctggttgagcatccgctggttcgccacttaacccgccgtctgatttggggcgtttatagcgccga

SEQ ID NO: 165270 - DNA, 75 bp, synthetic construct
  source 1..75: mol_type = other DNA
ccatcgaaagaaagctgggcgttcattgcgttaggtgttctcggcaacgatgacaccgcccgcaaactgacgcca

SEQ ID NO: 165271 - DNA, 75 bp, synthetic construct
  source 1..75: mol_type = other DNA
agtaattcaacacaggaagcgcagttctccgtactcgatgccatcaccgccagcgagctaattaacgatattgaa

SEQ ID NO: 165272 - DNA, 75 bp, synthetic construct
  source 1..75: mol_type = other DNA
ggtcgttaatcatggaaatcgatgaaggttttgcggtaggcatgtcgccagccgaactgagtgccgagcaaatct

SEQ ID NO: 165273 - DNA, 75 bp, synthetic construct
  source 1..75: mol_type = other DNA
caaatttgatacatggcaattggaattggcgcagagataacaacatcagcggtgttctagaggttattgataatt

SEQ ID NO: 165274 - DNA, 75 bp, synthetic construct
  source 1..75: mol_type = other DNA
ttccttagatatctttattctaatgcaaatttgatacatggcaattggaattggcgcagagataacaacatcagc

SEQ ID NO: 165275 - DNA, 75 bp, synthetic construct
  source 1..75: mol_type = other DNA
acacgattaacacacttattactgacggcgtaaaaacacaaagcgctattgctaaagaagcgggggtgtcggagg

SEQ ID NO: 165276 - DNA, 75 bp, synthetic construct
  source 1..75: mol_type = other DNA
tctggctgttgatgtttgtactcaggggcatggttttggtaaatggctgctgagtgatgccattcatcgggttgt

SEQ ID NO: 165277 - DNA, 75 bp, synthetic construct
  source 1..75: mol_type = other DNA
cgtcactcatgccgagcttggtcgcagtttgcggcataacatgcccaatcctgtccctgttgttctgttagggcg

SEQ ID NO: 165278 - DNA, 75 bp, synthetic construct
  source 1..75: mol_type = other DNA
gttgaaagtgcaattaatgtagaagggaacaaaccagcgcgggctgcttgggatgttttcaatgatttcgctaaa

SEQ ID NO: 165279 - DNA, 75 bp, synthetic construct
  source 1..75: mol_type = other DNA
aaccgcaaaccctgcgcatctttaactacgcggcagatactcaggaatttatcggcgtcagcgacgcctatatcg

SEQ ID NO: 165280 - DNA, 75 bp, synthetic construct
  source 1..75: mol_type = other DNA
taccgagaaagtgccttcagaacaactgaccctgctggtgcgcgagttcttcgacctgcgtccatacggtctgat

SEQ ID NO: 165281 - DNA, 75 bp, synthetic construct
  source 1..75: mol_type = other DNA
gcagcatacggtcactttggtcgcgaacatttcccgtgggaaaaaaccgacaaagcgcagctgctgcgcgatgct

SEQ ID NO: 165282 - DNA, 75 bp, synthetic construct
  source 1..75: mol_type = other DNA
gcaaccaaacacctggatgatcaccctgtctcccgcgcattccagcgtcacggagtgtctgctggagctggccga

SEQ ID NO: 165283 - DNA, 75 bp, synthetic construct
  source 1..75: mol_type = other DNA
cgctgtaaatgaatttgaatttcttttgcctaaactcctatcatctatatcaacaattcgtataaaaaccggcat

SEQ ID NO: 165284 - DNA, 75 bp, synthetic construct
  source 1..75: mol_type = other DNA
tgccagagcggctttgccctgacattcaacggagaaacatggcttgcggtagaagatcatcgcggtaaaaccgcg

SEQ ID NO: 165285 - DNA, 75 bp, synthetic construct
  source 1..75: mol_type = other DNA
ctttgaaatgaccggtagcgagcgcgacaaaaaggcggaagccgagtttgaagaatttgtagattatctgttgag

SEQ ID NO: 165286 - DNA, 75 bp, synthetic construct
  source 1..75: mol_type = other DNA
ctttgaaatgactggcgctgaacgcgataagaaggcagaagccgagttcgaagagtttgtagattacatcttgag

SEQ ID NO: 165287 - DNA, 75 bp, synthetic construct
  source 1..75: mol_type = other DNA
catggataaacactatatccctgttttacaggatttaagcaaagcgatatacagcgacagaatgttatcaaggct

SEQ ID NO: 165288 - DNA, 75 bp, synthetic construct
  source 1..75: mol_type = other DNA
cgcgagcggcttatcgcccaccgtttggcttcggtcaatctgtcacgtttaccttacgagcccaaacttaaataa

SEQ ID NO: 165289 - DNA, 75 bp, synthetic construct
  source 1..75: mol_type = other DNA
ttcggaggggtgcctgaccatcatcgctgacagtgacgagatgcaggaactgcgggaagaactttatcaggttaa

SEQ ID NO: 165290 - DNA, 75 bp, synthetic construct
  source 1..75: mol_type = other DNA
tggctggcagaggcgggatttgataccgggcggggtgtcacagtgaagatttcggaggggtgcctgaccatcatc

SEQ ID NO: 165291 - DNA, 75 bp, synthetic construct
  source 1..75: mol_type = other DNA
gtgcttatgttttcctctatggtgccgaaggatttattattttgtttgtcgaaacagaattatcacatgctaaaa

SEQ ID NO: 165292 - DNA, 75 bp, synthetic construct
  source 1..75: mol_type = other DNA
atgtctgaaaaaaacaaaccacaaggtgaaaataaacctcagcaacccgtggcaccaaaaccaactccaacacaa

SEQ ID NO: 165293 - DNA, 75 bp, synthetic construct
  source 1..75: mol_type = other DNA
cgtgaaggaactgaaagtcaacgttggcgataaagtgaaaactggctcgctgattatgatcttcgaagttgaagg

SEQ ID NO: 165294 - DNA, 75 bp, synthetic construct
  source 1..75: mol_type = other DNA
agctacgatatgggcatggtccggccggtcgctgccggcgaacctgccgccctcgatacggacgtttttcgcggt

SEQ ID NO: 165295 - DNA, 75 bp, synthetic construct
  source 1..75: mol_type = other DNA
atcgtgtacggaaaatcaacatttgcaggaaatgccaaaactcgccgtcatgagcggcgcagaaagctggctatc

SEQ ID NO: 165296 - DNA, 75 bp, synthetic construct
  source 1..75: mol_type = other DNA
tcgccgtcatgagcggcgcagaaagctggctatcgagcgtgattccatctgcaacatcatcgattcgatcttcgg

SEQ ID NO: 165297 - DNA, 75 bp, synthetic construct
  source 1..75: mol_type = other DNA
tgatcgcctatctgaacaaaggtggctcggtgctgatcatggaaaacgtgatgagcaatcttaaggaagagagcg

SEQ ID NO: 165298 - DNA, 75 bp, synthetic construct
  source 1..75: mol_type = other DNA
gtgctgatcatggaaaacgtgatgagcaatcttaaggaagagagcgcgtctggctttgtacgtctgcttgatgcc

SEQ ID NO: 165299 - DNA, 75 bp, synthetic construct
  source 1..75: mol_type = other DNA
atactccgcctgtagattctggaactgggtctttaccggaagtgaaacccgatccaacgccaaacccggagccga

SEQ ID NO: 165300 - DNA, 75 bp, synthetic construct
  source 1..75: mol_type = other DNA
cagcgtcgatctggaacgtctgtaccagaacatgtcggtctggctgtggaatgaaattgaatacagctatgacag

SEQ ID NO: 165301 - DNA, 75 bp, synthetic construct
  source 1..75: mol_type = other DNA
ctgtcaatggcactgaacaagtcggtggtgaataacgatccgcagggttatccagaccgcgtgcgccagcgtcga

SEQ ID NO: 165302 - DNA, 75 bp, synthetic construct
  source 1..75: mol_type = other DNA
gcagcaaagcgggcatgatgaacccgagctatccgctcaactatatggaaaaaccgctgacgcgcctgatgctgg

SEQ ID NO: 165303 - DNA, 75 bp, synthetic construct
  source 1..75: mol_type = other DNA
tgtataagcacggtcagcaaggactggcctatgaaatcgtcattaactctaacccgtgtatcgcttacctgatgg

SEQ ID NO: 165304 - DNA, 75 bp, synthetic construct
  source 1..75: mol_type = other DNA
aaatcagcgccaaatggctgagagaagcgggatttgagatcggcacgggcgttaccgtgaagatctcggaaggtt

SEQ ID NO: 165305 - DNA, 75 bp, synthetic construct
  source 1..75: mol_type = other DNA
gcatgaccacgtattattcacgacaccccagcctgcaccttaaaggcgactggctcgctgaggcgggatttgata

SEQ ID NO: 165306 - DNA, 75 bp, synthetic construct
  source 1..75: mol_type = other DNA
aaattgtacatggtgtaaaagtaatcaaagagcttaggccaacacaaaaaagaaaagataatataaggatgtgtc

SEQ ID NO: 165307 - DNA, 75 bp, synthetic construct
  source 1..75: mol_type = other DNA
acaggccacttgctaatatagagtctctattaaaaatgctagaaacaaacgaagagaggctcgcttatgttttaa

SEQ ID NO: 165308 - DNA, 75 bp, synthetic construct
  source 1..75: mol_type = other DNA
aaaagaacgacgtataaagtggttggtgaattattaaagatacatgagcttattaaacagcgtattttttctaag

SEQ ID NO: 165309 - DNA, 75 bp, synthetic construct
  source 1..75: mol_type = other DNA
cgaagatttctttctggaagcgcggcacatgacgcaagaagacgcggaccaattagcttacgataacgtttatta

SEQ ID NO: 165310 - DNA, 75 bp, synthetic construct
  source 1..75: mol_type = other DNA
gctatccgtccgaaccacaagaaaacctgctctattttatggagaaaaatgcgccactgctggaatcatggcagc

SEQ ID NO: 165311 - DNA, 75 bp, synthetic construct
  source 1..75: mol_type = other DNA
ggcgaccgttcgctgacgctgcgttacattccacataaccgcgcaccgctggatcgggggcgtaaagaagtgctg

SEQ ID NO: 165312 - DNA, 75 bp, synthetic construct
  source 1..75: mol_type = other DNA
gcctcaaacaccaagatgtacgccactaacttcgccctgcaaaagctgatgagcgaaggcaaactgcatcctgac

SEQ ID NO: 165313 - DNA, 75 bp, synthetic construct
  source 1..75: mol_type = other DNA
cgattgtgatgttaagcaacaagccccattcgccagttgccgatccacaaaaaaatcccaatatgttcgaaagcg

SEQ ID NO: 165314 - DNA, 75 bp, synthetic construct
  source 1..75: mol_type = other DNA
ttctgatgcttttatggaaagcgcaccgctattaacacaagaacaagccgacgaagtggctaacgataacgttta

SEQ ID NO: 165315 - DNA, 75 bp, synthetic construct
  source 1..75: mol_type = other DNA
gaagaacctgacggctgcctctctggcagttgtaaaagctgcccggaaggaaaagcctgtctgcacgaatggtgg

SEQ ID NO: 165316 - DNA, 75 bp, synthetic construct
  source 1..75: mol_type = other DNA
ttcagggatttgccgtcggcggcgaatggggaggcgcggcgttgctttccgttgaaagtgcaccgaaaaataaaa

SEQ ID NO: 165317 - DNA, 75 bp, synthetic construct
  source 1..75: mol_type = other DNA
gagtgaaattctttaccaagcatgccgatatccagactatccagatatccaaaaggctattattacccaaggcaa

SEQ ID NO: 165318 - DNA, 75 bp, synthetic construct
  source 1..75: mol_type = other DNA
atggcgacgatcgattctatgaataaggacaccacgcgtttgagcgatggtcctgactggacgttcgacctgctg

SEQ ID NO: 165319 - DNA, 75 bp, synthetic construct
  source 1..75: mol_type = other DNA
ttgagggcgcatacaaaaacaacatggcgatggattccagccccgcgaatgagttaaagcgtagattgtccagac

SEQ ID NO: 165320 - DNA, 75 bp, synthetic construct
  source 1..75: mol_type = other DNA
atttgctggcgttacggggccgtatggaagcggcccagataagccagacattgaacacgccgcagccaatgatta

SEQ ID NO: 165321 - DNA, 75 bp, synthetic construct
  source 1..75: mol_type = other DNA
aacattttagcggcggggcacgccgtgcttgcctgtggagagatggtgcagtcaggccgcccgttgaagcaggaa

SEQ ID NO: 165322 - DNA, 75 bp, synthetic construct
  source 1..75: mol_type = other DNA
gatgtttatctggcagagatagaccgggtggcgaaactctaccggctggatacctacccgcaccagattgaagtg

SEQ ID NO: 165323 - DNA, 75 bp, synthetic construct
  source 1..75: mol_type = other DNA
aaaactcgataaagtcgcctatatccgctttgcttccgtttatcgtagtttcgaagatatcaaagagtttggcga

SEQ ID NO: 165324 - DNA, 75 bp, synthetic construct
  source 1..75: mol_type = other DNA
acctctccggcaagtgatgaatttgaccttgtgcgcggctggcaacaactgaatacacaacatggcgtggcgctg

SEQ ID NO: 165325 - DNA, 75 bp, synthetic construct
  source 1..75: mol_type = other DNA
aatatctgcgtagcggcagcattacgccgtggcgttgttgatgaaacggaggccggaagactggggctggcttcg

SEQ ID NO: 165326 - DNA, 75 bp, synthetic construct
  source 1..75: mol_type = other DNA
cactatgcagactttggtgaaagagaacttaaaattcattttctagacatctcacccgaggatggctcctacttc

SEQ ID NO: 165327 - DNA, 75 bp, synthetic construct
  source 1..75: mol_type = other DNA
ggaccgaatgatgtcaaaatcgaaatcgcttactgtggcgtctgccattccgatctccaccaggtccgttccgag

SEQ ID NO: 165328 - DNA, 75 bp, synthetic construct
  source 1..75: mol_type = other DNA
atgaaacggacaatgctctatctttctctgctggctgttagctgtagcgtcagcgccgcaaaataccctgttctg

SEQ ID NO: 165329 - DNA, 75 bp, synthetic construct
  source 1..75: mol_type = other DNA
catatctacagcgatgtcgattatatgctgcttggatttatcgtcgagtcggtcaccggtcagccgcttgaccgc

SEQ ID NO: 165330 - DNA, 75 bp, synthetic construct
  source 1..75: mol_type = other DNA
tagcggaatgctgcgggcgctggaaaaacgtccggtgagttccgatgacgtcgaaatggcaatcaatcatattaa

SEQ ID NO: 165331 - DNA, 75 bp, synthetic construct
  source 1..75: mol_type = other DNA
gttcgtaccgctagtctgaagcagactggagcaaccagctctgctgtcggttttaacattcagctgaatgattgc

SEQ ID NO: 165332 - DNA, 75 bp, synthetic construct
  source 1..75: mol_type = other DNA
tgcaaagtcaggtcaatatgctctggcgtaccctgccgaagcgcgaggaagagaaaacggttgctgaagcgcgcc

SEQ ID NO: 165333 - DNA, 75 bp, synthetic construct
  source 1..75: mol_type = other DNA
tttagcctctctggctgggaaccgattctggtcaataaaacctcgcgcacacacaaaaacagcgtctcgcgccat

SEQ ID NO: 165334 - DNA, 75 bp, synthetic construct
  source 1..75: mol_type = other DNA
tgtcagccagatgctgggctttattgcggataactatgatcaggcgctgaccatcaacgatgtggccgagcacgt

SEQ ID NO: 165335 - DNA, 75 bp, synthetic construct
  source 1..75: mol_type = other DNA
tatcaatcagggtcatatcacgctgttctgggcctgtacaccgcaccaactaacagataccggaacctgtcagag

SEQ ID NO: 165336 - DNA, 75 bp, synthetic construct
  source 1..75: mol_type = other DNA
atgaatacagatacgtttatgtgcagcagcgacgaaaagcagacccgtagcccactgtcgctgtattcagaatac

SEQ ID NO: 165337 - DNA, 75 bp, synthetic construct
  source 1..75: mol_type = other DNA
tgacgatgaaacagtacataaccgcgatgcgcatcaaccacgttcgcgcattactgagcgataccgataaaagta

SEQ ID NO: 165338 - DNA, 75 bp, synthetic construct
  source 1..75: mol_type = other DNA
gtcgtttttacagcacgttcggcaaatatgtcggcatgtcgccgcaacaataccgcaaacttagccaacagcgcc

SEQ ID NO: 165339 - DNA, 75 bp, synthetic construct
  source 1..75: mol_type = other DNA
cccgcgcagagtatgaaatgttggtggcatttgtgacgaatccgggcgaaattctcagccgtgaacgtctgctgc

SEQ ID NO: 165340 - DNA, 75 bp, synthetic construct
  source 1..75: mol_type = other DNA
gctatcgctttgccggttattgcctgaatgtgtcgcgccatacgctggagcgggatggtgagccgattaaactga

SEQ ID NO: 165341 - DNA, 75 bp, synthetic construct
  source 1..75: mol_type = other DNA
ccgggaatattacccggaagctgaaattatcgctaattaccagtcactggagggtacgcttgccccgctgggcca

SEQ ID NO: 165342 - DNA, 75 bp, synthetic construct
  source 1..75: mol_type = other DNA
gagcatgacacacgcatctctgttattgcttctgatgcggagcatgccactttcctcaagaaaggcagcttcgct

SEQ ID NO: 165343 - DNA, 75 bp, synthetic construct
  source 1..75: mol_type = other DNA
attattctggttacgggacgcagcgatcggattgaccgtattgttgggctggaaatgggcgcagacgattacgtc

SEQ ID NO: 165344 - DNA, 75 bp, synthetic construct
  source 1..75: mol_type = other DNA
caacggtggggattattctggttaccggacgcagcgatcggattgaccgtattgttgggctggaaatgggcgcag

SEQ ID NO: 165345 - DNA, 75 bp, synthetic construct
  source 1..75: mol_type = other DNA
ttctattattttttcaggggctcagcctgcagggaaagacaaggttttggctgttcaagggggggcaggaacagc

SEQ ID NO: 165346 - DNA, 75 bp, synthetic construct
  source 1..75: mol_type = other DNA
gtttactacagggcaatgtctgggagaacccgacctgctggcgtcggcccgtcgcttacaattttttcacatcag

SEQ ID NO: 165347 - DNA, 75 bp, synthetic construct
  source 1..75: mol_type = other DNA
gggatgaatatggtcgtctcatcgttcgcgccgatcgtggttcattattgttagtcggtcagcgttcatcacagg

SEQ ID NO: 165348 - DNA, 75 bp, synthetic construct
  source 1..75: mol_type = other DNA
gccaacaattgctatatcaatacggatgaaaaacttatcgcggcgattggtgttgatgatctggtgattattaat

SEQ ID NO: 165349 - DNA, 75 bp, synthetic construct
  source 1..75: mol_type = other DNA
ggttaaccctttccggtcagcagataacgcgactgacagaattacccccggcatataacctgcagcgcagtgcgc

SEQ ID NO: 165350 - DNA, 75 bp, synthetic construct
  source 1..75: mol_type = other DNA
gaacgaaggcatgacccgcttacagcagctggctgagcgcctgaatcgtctggatgaacagcggggaaaatacat

SEQ ID NO: 165351 - DNA, 75 bp, synthetic construct
  source 1..75: mol_type = other DNA
tgttgcaggtgatggacaacggtacgctgaccgataacaacggacgcaaagcggacttccgtaacgtggtgctgg

SEQ ID NO: 165352 - DNA, 75 bp, synthetic construct
  source 1..75: mol_type = other DNA
ataaagacctgattaaccacgtcactcacggcatggtgatcaaatcactggcgacacagcaacttagcccgtttg

SEQ ID NO: 165353 - DNA, 75 bp, synthetic construct
  source 1..75: mol_type = other DNA
gaaggcgtgaagggcgtcattttgaccagcgatcaggtgcaggtggtttttgggccaggcaaagcgcatcgtgca

SEQ ID NO: 165354 - DNA, 75 bp, synthetic construct
  source 1..75: mol_type = other DNA
agctaccgagtgtgcgaatgtaagtgaagagtggcgattgaaatacgttcatgatgattctttaggttataatgt

SEQ ID NO: 165355 - DNA, 75 bp, synthetic construct
  source 1..75: mol_type = other DNA
accgatgcgatggaagagatcaagaagatctttacaccggaattccgtaaccgtctcgacaacattatctggttc

SEQ ID NO: 165356 - DNA, 75 bp, synthetic construct
  source 1..75: mol_type = other DNA
aaaagtttcctggattacaggagtgtaaggactcgacatatcactatgaggtcaactgcctggaatatcgtcctg

SEQ ID NO: 165357 - DNA, 75 bp, synthetic construct
  source 1..75: mol_type = other DNA
cgcgacgctggatgaaggcgatcaaaccgttgtgctgccaaacgaatttatcgagcagtttaagacgggacaggc

SEQ ID NO: 165358 - DNA, 75 bp, synthetic construct
  source 1..75: mol_type = other DNA
ctgcctaacgaatttatcgagcagtttaagacgggtcaggccaaagagatcgataccgcgatttgtgcgaaaacc

SEQ ID NO: 165359 - DNA, 75 bp, synthetic construct
  source 1..75: mol_type = other DNA
ttcctcgccattggtctgtttggcctgatgccgatgtggattttaggcgtggtttgtctggcgctgttcggctgg

SEQ ID NO: 165360 - DNA, 75 bp, synthetic construct
  source 1..75: mol_type = other DNA
gttgttaagccttccggcgttgccaccgccaccgcagccgcgtgagcatccgttgaaatcattactggcaggatt

SEQ ID NO: 165361 - DNA, 75 bp, synthetic construct
  source 1..75: mol_type = other DNA
cggtgcgacgctgggggaaggtgagcaagttgttaatctgccaaacgaattcatcgagcagtttgaaacgggtca

SEQ ID NO: 165362 - DNA, 75 bp, synthetic construct
  source 1..75: mol_type = other DNA
aaggacaaaatctttaaagcgttcccgggactgaaagagtgtaccgactcgacttaccactacgagatcaactgt

SEQ ID NO: 165363 - DNA, 75 bp, synthetic construct
  source 1..75: mol_type = other DNA
tgacgaaaacctatgagctgaaagccaatggtgaggtgaagtttacggttccttacggtggtctgatttatatca

SEQ ID NO: 165364 - DNA, 75 bp, synthetic construct
  source 1..75: mol_type = other DNA
agcaaaccgaagctgacccagcaggatgtgaccgatctgatcgcctatctgaacaaaggtggctcggtgctgatc

SEQ ID NO: 165365 - DNA, 75 bp, synthetic construct
  source 1..75: mol_type = other DNA
tcgtgatggcgagcaaggtaagcaccggatgtttacctataaagcattgacgggtcacaaacatcgtttcactaa

SEQ ID NO: 165366 - DNA, 75 bp, synthetic construct
  source 1..75: mol_type = other DNA
acctacaccagacccgacacccgatccagagccgacaccagaaccggagccagaacctgttcctacgaaaacggg

SEQ ID NO: 165367 - DNA, 75 bp, synthetic construct
  source 1..75: mol_type = other DNA
cagcttcacctttaccggtgtagtaaaagcgccgttctataaagacggcgaatggaaaaacgatctggactcacc

SEQ ID NO: 165368 - DNA, 75 bp, synthetic construct
  source 1..75: mol_type = other DNA
cagagcagggcgttggcctgatggttaacactgaccaggcgaagccgttaatggcggtggcaatgaaagaaaaca

SEQ ID NO: 165369 - DNA, 75 bp, synthetic construct
  source 1..75: mol_type = other DNA
atgtcagatttaattcaagtaaacgcaaaaatttcatgtaataaaatacgcagggagatatacaacggtagggaa

SEQ ID NO: 165370 - DNA, 75 bp, synthetic construct
  source 1..75: mol_type = other DNA
aggccttgggcgagccgttaatatggtttgttcgcactgtagggcttcctatctgttcaaccgaaatgctttaga

SEQ ID NO: 165371 - DNA, 75 bp, synthetic construct
  source 1..75: mol_type = other DNA
gtttaaatccctgggtaaagcagcaccaatggcagcaaactccgccgctggtggaaataaacctgctacccctga

SEQ ID NO: 165372 - DNA, 75 bp, synthetic construct
  source 1..75: mol_type = other DNA
aaggcacgctcgcaccgctgggtcatcctacggttgacggcgaatttgtttccgcatttagcccggaaggtctga

SEQ ID NO: 165373 - DNA, 75 bp, synthetic construct
  source 1..75: mol_type = other DNA
tgtttaaatccctgggcaaagccgcgccgatggctaccaacgcagcaagcgaaggtaaaaaaggcgaagtaccag

SEQ ID NO: 165374 - DNA, 75 bp, synthetic construct
  source 1..75: mol_type = other DNA
tttactgctggcgactggcggcgtagcctggaactacgggctggcggcggcgggcacgtttattaccttgctacc

SEQ ID NO: 165375 - DNA, 75 bp, synthetic construct
  source 1..75: mol_type = other DNA
tttatgggatggttttttcgcatcgcttggcgttacggcgctactggcggcgacacctgcactggtagggcgtga

SEQ ID NO: 165376 - DNA, 75 bp, synthetic construct
  source 1..75: mol_type = other DNA
cggtctgatgatcggtggtgtgctggcggatcgctatgagcgcaaaaaagtgattttgctggcgcgcggcacctg

SEQ ID NO: 165377 - DNA, 75 bp, synthetic construct
  source 1..75: mol_type = other DNA
aggccttgggcgagtcgttaatatggtttgttcgtactgtagggcttcctatctgttcaacccgaaatgctttag

SEQ ID NO: 165378 - DNA, 75 bp, synthetic construct
  source 1..75: mol_type = other DNA
tctgttaagccttccggcactgccgccgccaccgcagccgcgtgagcatccgctgaaatcgcttctggcagcctt

SEQ ID NO: 165379 - DNA, 75 bp, synthetic construct
  source 1..75: mol_type = other DNA
cgttgaaatcattactggcaggatttcgttttctgctcgccagcccgctggtgggagggattgcgctgctgggtg

SEQ ID NO: 165380 - DNA, 75 bp, synthetic construct
  source 1..75: mol_type = other DNA
ggaatttttctactggacgggcggcaactcaatggacattcacagctggcatcggctgggcatgtggttgattgg

SEQ ID NO: 165381 - DNA, 75 bp, synthetic construct
  source 1..75: mol_type = other DNA
aacccgggatagcgtatgcgaaagctggggtaatgctctccgctatgactgacggcacagagcaactcagcctgt

SEQ ID NO: 165382 - DNA, 75 bp, synthetic construct
  source 1..75: mol_type = other DNA
gcgtggtgaatgtcggcgtccgcgattccacctatgtgctcgacggcctgctgtaccacgagtccgacctgcgga

SEQ ID NO: 165383 - DNA, 75 bp, synthetic construct
  source 1..75: mol_type = other DNA
aaaaacttttcattaaaggtaaggcggatcaatatccggcacttcattctctgatatctccgacccgcattaatc

SEQ ID NO: 165384 - DNA, 75 bp, synthetic construct
  source 1..75: mol_type = other DNA
tggattggcgtaattcaactcgtcggatcaattattggcgcaatgatcatggacaaaatggggcgtttatcgcta

SEQ ID NO: 165385 - DNA, 75 bp, synthetic construct
  source 1..75: mol_type = other DNA
gcgatattaaagtgtctgaggaatatagtaaacgactgggcacaaaaacggttcgagtaccatcagataaccatg

SEQ ID NO: 165386 - DNA, 75 bp, synthetic construct
  source 1..75: mol_type = other DNA
agcatgtggtcagaaagtcgtgcgtttttcgccagagcgactggaaacccatcactggaatccgttaaaggtaat

SEQ ID NO: 165387 - DNA, 75 bp, synthetic construct
  source 1..75: mol_type = other DNA
agagcaccgcgaccgtgatcgatgagctggtcgatctgcatgaccgcatcctggtcaagctgttcagcggcgcga

SEQ ID NO: 165388 - DNA, 75 bp, synthetic construct
  source 1..75: mol_type = other DNA
gatgatacgcccaatgcgccggtggtgacgcgtgaagcacaactggatattcagtcgcaatcacaaccgccgacg

SEQ ID NO: 165389 - DNA, 75 bp, synthetic construct
  source 1..75: mol_type = other DNA
tttctgcgaaacgtctaatttagacgtgaattttaatagaaaattactttcaaatataactaataacagaatact

SEQ ID NO: 165390 - DNA, 75 bp, synthetic construct
  source 1..75: mol_type = other DNA
cagcctggaagaaactcgtcatcttgccagaaagaataattttgacccgctacatattattaccgaaaaatacag

SEQ ID NO: 165391 - DNA, 75 bp, synthetic construct
  source 1..75: mol_type = other DNA
gtacagcgagcgcgacgtgacccgtcgcgagcatgcccaggaactgcgcacctacctgcaactggccccgttcgg

SEQ ID NO: 165392 - DNA, 75 bp, synthetic construct
  source 1..75: mol_type = other DNA
ttccggacagcagatacccgatccggtgatcagcatacaggcaaagccagaacccatgagtacacctccggacac

SEQ ID NO: 165393 - DNA, 75 bp, synthetic construct
  source 1..75: mol_type = other DNA
cttgggggaataacaccggcgcagtggctgatggaggaatacaggcggggaaaggcggcaggatttatcaagtaa

SEQ ID NO: 165394 - DNA, 75 bp, synthetic construct
  source 1..75: mol_type = other DNA
ttcgggtgcatgcctaacgccgccacccttgggggaataacaccggcgcagtggctgatggaggaatacaggcgg

SEQ ID NO: 165395 - DNA, 75 bp, synthetic construct
  source 1..75: mol_type = other DNA
tgatccgcatagttgtgatgatggtatccatgctgccgcaactggcgctatctggctgggggcgattcagggttt

SEQ ID NO: 165396 - DNA, 75 bp, synthetic construct
  source 1..75: mol_type = other DNA
tgttgccgcacgttgtggcctgttggcgcagggatatcacttctggcgggaggggactgaaatcgatcttggtgc

SEQ ID NO: 165397 - DNA, 75 bp, synthetic construct
  source 1..75: mol_type = other DNA
aagagcgccgtttactgcaacatacctgcgcgcagcttcacgcaggtgagacgttgacgctgcaaaaacgggtgt

SEQ ID NO: 165398 - DNA, 75 bp, synthetic construct
  source 1..75: mol_type = other DNA
tgcgttaatgcattccatctcaagaagtcaaaatgtcaatcatcatgaattaattatcaccaaaccggttgataa

SEQ ID NO: 165399 - DNA, 75 bp, synthetic construct
  source 1..75: mol_type = other DNA
gaaggcggataacccgcgcaaagctttctactggcggtttgtggaaatggggaccgtgaatatgccaccgcaccc

SEQ ID NO: 165400 - DNA, 75 bp, synthetic construct
  source 1..75: mol_type = other DNA
ttttactgcagatatctccgatttcggtgagaacgttatgaatctgtcgataactgaatatgcctcaggtcagtg

SEQ ID NO: 165401 - DNA, 75 bp, synthetic construct
  source 1..75: mol_type = other DNA
catcgatagttattaatacagatggcagtgtggcgatggttaagtctcttgaagcccaatgctttgatgcggagg

SEQ ID NO: 165402 - DNA, 75 bp, synthetic construct
  source 1..75: mol_type = other DNA
caaggtatgggtagtgtagttggtcatcttcctgcggtgaaaaatttccttattcgcgccggaattgattacgcg

SEQ ID NO: 165403 - DNA, 75 bp, synthetic construct
  source 1..75: mol_type = other DNA
gcattatgccgcgtgcaaaaggtcgtgcagatcgcatcctgaagcgcaccagccacatcactgtggttgtgtccg

SEQ ID NO: 165404 - DNA, 75 bp, synthetic construct
  source 1..75: mol_type = other DNA
atgattcaacagatgaaatcggtaagcgacaaggtgagtaagacctacaacatcagtatcgataatctgttctga

SEQ ID NO: 165405 - DNA, 75 bp, synthetic construct
  source 1..75: mol_type = other DNA
aaaaagccgtaccacgtaactacgatgattcgctacctggtgacagcaaagcgttcctcgcgcaactctcgcttc

SEQ ID NO: 165406 - DNA, 75 bp, synthetic construct
  source 1..75: mol_type = other DNA
tatggtcgcgtcaatcgtgaaggctataccgtagtggcgctctctctgtactggaaaaatgcctggtgcaaagtg

SEQ ID NO: 165407 - DNA, 75 bp, synthetic construct
  source 1..75: mol_type = other DNA
aatcagtggcgctcttatcgtgtcgaaccaggtaaaacgatggcgcagctgttccgcgaccacggactacccgcc

SEQ ID NO: 165408 - DNA, 75 bp, synthetic construct
  source 1..75: mol_type = other DNA
cagtaaagcattcctcgcgcaactctcgctgcccgcccaactggcaagccagcaaagcggtgtgccacatcattt

SEQ ID NO: 165409 - DNA, 75 bp, synthetic construct
  source 1..75: mol_type = other DNA
ctcgaaactgtggtgcgttatcaaaatcaggcgctttctcagctggtgcaaaaggccgtaccacgtaactacgat

SEQ ID NO: 165410 - DNA, 75 bp, synthetic construct
  source 1..75: mol_type = other DNA
ctggaaaaatgcctggtgcaaagtgaaaatcggcgtcgccaaaggcaaaaaacagcacgataaacgttcagatat

SEQ ID NO: 165411 - DNA, 75 bp, synthetic construct
  source 1..75: mol_type = other DNA
cgtgccggtcagacttcgatgattgctcgtctggaaaaagcattccaggaactgaacgcgatcgacgttctgtaa

SEQ ID NO: 165412 - DNA, 75 bp, synthetic construct
  source 1..75: mol_type = other DNA
cgaggaagaattacagcgtagcgttcctgaaatcgccgcccgctatcgtcgccagctaaaagcccgtatcagtgc

SEQ ID NO: 165413 - DNA, 75 bp, synthetic construct
  source 1..75: mol_type = other DNA
gcgacggagaagcgttcctgtttggcgcaaatatcacgccgatggctgtggcttccacacatgtggtgtgcgatc

SEQ ID NO: 165414 - DNA, 75 bp, synthetic construct
  source 1..75: mol_type = other DNA
aattacaagttccatctttcccacaactgattaccacgccaacgttgtggcatcttgcaacgccgtttgagggca

SEQ ID NO: 165415 - DNA, 75 bp, synthetic construct
  source 1..75: mol_type = other DNA
gccgcaagtcgacaaagtggtgctgtcacggctgattgatatcaccaccgatgccgccatcgatagcggcgtatt

SEQ ID NO: 165416 - DNA, 75 bp, synthetic construct
  source 1..75: mol_type = other DNA
tggagatgatccgcagcattgccggaatcagaccaccagcaggcaaacaggaggccacgcagccggacagcgtta

SEQ ID NO: 165417 - DNA, 75 bp, synthetic construct
  source 1..75: mol_type = other DNA
atgacgagaatgagcgaaaccgaactactaaaaataatccgccgcgttaccggaatcagccagcagcatgacgaa

SEQ ID NO: 165418 - DNA, 75 bp, synthetic construct
  source 1..75: mol_type = other DNA
ggatccgcgttcttgaaatgctggcctacaatcgccgcgtggcactgtatcgggaaacggagaaaattacgtacc

SEQ ID NO: 165419 - DNA, 75 bp, synthetic construct
  source 1..75: mol_type = other DNA
tgttgttccattaggtatattgcctacattgaaaactataatggcaagccttatcattaagagtcagtatattga

SEQ ID NO: 165420 - DNA, 75 bp, synthetic construct
  source 1..75: mol_type = other DNA
ttcgctgtgcccgagccagatagggtatggtgcggagatattacgtatagtgtgcccggagttcagggcgggcat

SEQ ID NO: 165421 - DNA, 75 bp, synthetic construct
  source 1..75: mol_type = other DNA
tactccgccgtgctggtggaatcagccagcaagccgacgaacaggccacacagccggacagcgtgaccgctgaaa

SEQ ID NO: 165422 - DNA, 75 bp, synthetic construct
  source 1..75: mol_type = other DNA
atgacagaagccgaactactgaaagtaatctgccgtattaccggaatcagccagacagcaggcaaacaggaggcc

SEQ ID NO: 165423 - DNA, 75 bp, synthetic construct
  source 1..75: mol_type = other DNA
taaaataatttttgaggcattctcctcggatgtagccgaggctgattcattaaaaaacaaaagaaaactaatata

SEQ ID NO: 165424 - DNA, 75 bp, synthetic construct
  source 1..75: mol_type = other DNA
aacggcgtggatatgcgcaacatacgaaccagagttcttgagttgctggcataccgtcgccgttctcaacaacgg

SEQ ID NO: 165425 - DNA, 75 bp, synthetic construct
  source 1..75: mol_type = other DNA
gttgctggcataccgtcgccgttctcaacaacggagggagagcgcgaaaaatacttaccagtggaagaagccgga

SEQ ID NO: 165426 - DNA, 75 bp, synthetic construct
  source 1..75: mol_type = other DNA
ataccgtcgccgttctcaacaacggagggagagcgcgaaaaatacttatcagtggaagaagccggaacggttgcg

SEQ ID NO: 165427 - DNA, 75 bp, synthetic construct
  source 1..75: mol_type = other DNA
atgaccatgaccgagaccgaagcgctcgggataatccgcagtattaccggaatcagccagcaggctggcgaacag

SEQ ID NO: 165428 - DNA, 75 bp, synthetic construct
  source 1..75: mol_type = other DNA
tgcgattcaggcggcgctggacgagttacagaaaaaccgtacctcactggtgattgcacaccgtttgtctaccat

SEQ ID NO: 165429 - DNA, 75 bp, synthetic construct
  source 1..75: mol_type = other DNA
atggatagcctgactgccggtacgattaccgttgttttctcttcaatgattgcactgatgcgtccgctgaaatcg

SEQ ID NO: 165430 - DNA, 75 bp, synthetic construct
  source 1..75: mol_type = other DNA
gaaaatggtttcagcctcttccatctctgatccgatcattcagttgatcgcctctttggcgctggcgtttgttct

SEQ ID NO: 165431 - DNA, 75 bp, synthetic construct
  source 1..75: mol_type = other DNA
ctgtccttatggtcatggggttgatgaatttatagctggtataaaacgtctaaagcacacggatgcccatttctc

SEQ ID NO: 165432 - DNA, 75 bp, synthetic construct
  source 1..75: mol_type = other DNA
gcaacaaaatgcgtttgcaggggatgaagatggtgtccgcctcgtccatctctgatccgatcattcaattgatcg

SEQ ID NO: 165433 - DNA, 75 bp, synthetic construct
  source 1..75: mol_type = other DNA
tgggaatgccggtgtcattttttgacaaacagtcaactgggacactgctttcacgtattacttacgattctgaac

SEQ ID NO: 165434 - DNA, 75 bp, synthetic construct
  source 1..75: mol_type = other DNA
gaaagggcagttccagaggcgaggctcaaaaggaacaggcagtaagatccgcaaagatgttgggggtgggtgcag

SEQ ID NO: 165435 - DNA, 75 bp, synthetic construct
  source 1..75: mol_type = other DNA
gcaatgcttgcagagtttggtatgtcaccggcaagccgggctaaagtaaatatcgccggaccggatgatgttgat

SEQ ID NO: 165436 - DNA, 75 bp, synthetic construct
  source 1..75: mol_type = other DNA
ctgacgacagttttgatacggatgtactcaaagcggacggggcgatcctcgtcgatttctgggcagagtggtgcg

SEQ ID NO: 165437 - DNA, 75 bp, synthetic construct
  source 1..75: mol_type = other DNA
tgagctattcaaaattcacttccagtcaggcggcgctaattcagatatcacgacccgcacaatcgaagcggtgcg

SEQ ID NO: 165438 - DNA, 75 bp, synthetic construct
  source 1..75: mol_type = other DNA
atggcagagattattcccatgactgaagaacagaaattccagctagagatttacaaactggtcatgaaccagaac

SEQ ID NO: 165439 - DNA, 75 bp, synthetic construct
  source 1..75: mol_type = other DNA
ttattggtgctggtggttttgctaaaactgtaattgacagtttggatcatgaaaagtatgaaatagaagggttca

SEQ ID NO: 165440 - DNA, 75 bp, synthetic construct
  source 1..75: mol_type = other DNA
gaccgacgttgctgatctgctgaaatctgttgagtttgcagtatttgcaggtccggcgaacgatccgaaaggtcg

SEQ ID NO: 165441 - DNA, 75 bp, synthetic construct
  source 1..75: mol_type = other DNA
gaaaatattcattctcacgtaaatgagatacaaaaagatctagagaaagaattaataaaaaatctttctgataaa

SEQ ID NO: 165442 - DNA, 75 bp, synthetic construct
  source 1..75: mol_type = other DNA
gttacggcgcgtttcgcatcattgttgagtttttccgccagcccgacgcgcagtttaccggtgcctgggtgcagt

SEQ ID NO: 165443 - DNA, 75 bp, synthetic construct
  source 1..75: mol_type = other DNA
ctctgcgcgttccgggcggcgcatcgctgacccgtaagcagatcgacgaatacggtaacttcgttaaaatctacg

SEQ ID NO: 165444 - DNA, 75 bp, synthetic construct
  source 1..75: mol_type = other DNA
gcaccgagcttggctaacccgactgcactggctgagctgagcattcaggttgtgaagaaggcagagaataactga

SEQ ID NO: 165445 - DNA, 75 bp, synthetic construct
  source 1..75: mol_type = other DNA
agttgttcaaacagctgctgatgatgtccggttttgaccgttactatcagatcgttaaatgcttccgtgacgaag

SEQ ID NO: 165446 - DNA, 75 bp, synthetic construct
  source 1..75: mol_type = other DNA
ccacgggccgaatttatattgcgaacgtcgatcatattaacgagcatggcgctttcattcctgctcttgcacctg

SEQ ID NO: 165447 - DNA, 75 bp, synthetic construct
  source 1..75: mol_type = other DNA
caaatctggcgctgggttatgagggtttacctgcgatacaaaatattaccgggacgatacaaaaagggtccctta

SEQ ID NO: 165448 - DNA, 75 bp, synthetic construct
  source 1..75: mol_type = other DNA
ctctgtagaatccaggtgctaaattatgtacaggagttttgcgaagctgcattccctgatatggatgaatattac

SEQ ID NO: 165449 - DNA, 75 bp, synthetic construct
  source 1..75: mol_type = other DNA
cgtcttcctcgggggacgtattggttatgttctgttctacaatttcccgcagtttatggccgatccgctgtatct

SEQ ID NO: 165450 - DNA, 75 bp, synthetic construct
  source 1..75: mol_type = other DNA
tatatcagggtggcggagaaactgggattcacccacctctacaccactgagcggcggatgaattcaccggtggcg

SEQ ID NO: 165451 - DNA, 75 bp, synthetic construct
  source 1..75: mol_type = other DNA
tgatgatggttatcttgataactggctcagggcatggccggtactgaagaaatataaccttcatgcacatatttt

SEQ ID NO: 165452 - DNA, 75 bp, synthetic construct
  source 1..75: mol_type = other DNA
tcgattttttcggtcgtttaaaaaatatgagcgaagccgagcggcaaaattatttagccactgaggaagctcagc

SEQ ID NO: 165453 - DNA, 75 bp, synthetic construct
  source 1..75: mol_type = other DNA
ggctaatgccaatattggggccgcacgcgcggcatttttcccatctataagcctgaccagcggaatatcaaccgc

SEQ ID NO: 165454 - DNA, 75 bp, synthetic construct
  source 1..75: mol_type = other DNA
gtatgccttatctacttttcctgtgtgaaaaccgcattcttgcacagaatatcgatggtcatgtcattgatcttg

SEQ ID NO: 165455 - DNA, 75 bp, synthetic construct
  source 1..75: mol_type = other DNA
cgttgcacgcggctatctgcagctaaacccgaatgtatccatcgaaccactggatgaagcccctgcgccacctgc

SEQ ID NO: 165456 - DNA, 75 bp, synthetic construct
  source 1..75: mol_type = other DNA
gcagatgcgctggcattacgtcaaagcctgaacgatcaaatcagcgcccagcagcgttatctggcgtcgctgcaa

SEQ ID NO: 165457 - DNA, 75 bp, synthetic construct
  source 1..75: mol_type = other DNA
agttctcactcagccagaacggcttggttaacgcagcagataactaccagaacgtgggctggcgcaccttttttg

SEQ ID NO: 165458 - DNA, 75 bp, synthetic construct
  source 1..75: mol_type = other DNA
cagcgtctcgtgcttgatcacaacacctcccgcattatgagcagtatgtttgacggcgcattaattgaatacgca

SEQ ID NO: 165459 - DNA, 75 bp, synthetic construct
  source 1..75: mol_type = other DNA
tgttgccgcacgctgtggcctgttggcgcaaagttatcagttctggcgggaggggactgaaatcgatcttggtgc

SEQ ID NO: 165460 - DNA, 75 bp, synthetic construct
  source 1..75: mol_type = other DNA
gatgtggtgatgctcaattacatgctgccggagcagttctcagcggcatcgtgtcttgccaatctgcaattttat

SEQ ID NO: 165461 - DNA, 75 bp, synthetic construct
  source 1..75: mol_type = other DNA
gaacgcatcctgcacattgccaacgttctggtggggaaaatgcgcggcggacttggcgtggcaaacattctcgtc

SEQ ID NO: 165462 - DNA, 75 bp, synthetic construct
  source 1..75: mol_type = other DNA
ccgaacggctggccgccatgcaccgggccgtcaacaccccggcggcgaacgatgaatggctcccggaggctgcgt

SEQ ID NO: 165463 - DNA, 75 bp, synthetic construct
  source 1..75: mol_type = other DNA
gtagaaagtccccttttcctgaaaagagtttttttcaagcttacagggaggctctagaggcgttttgcaaaaaac

SEQ ID NO: 165464 - DNA, 75 bp, synthetic construct
  source 1..75: mol_type = other DNA
atggtacgcaaatgtctttgctgtcagtgccagaagaaacgtcgcctgcggtcgaagcactggaaaatctcgacc

SEQ ID NO: 165465 - DNA, 75 bp, synthetic construct
  source 1..75: mol_type = other DNA
cggaacgggcctataccctgaactacacctgcccgacctttattgataaaccgggcattcgcattaccgaaggtc

SEQ ID NO: 165466 - DNA, 75 bp, synthetic construct
  source 1..75: mol_type = other DNA
cagatcagccgtggacaaagccatctggcacccatcaactatatgcgtcgccagacgctgaaaaacgccgaacgc

SEQ ID NO: 165467 - DNA, 75 bp, synthetic construct
  source 1..75: mol_type = other DNA
tgtttcaaaattgcgttagttactgatggacgactctccggcgcttcaggtaaagtgccgtcagctatccacgta

SEQ ID NO: 165468 - DNA, 75 bp, synthetic construct
  source 1..75: mol_type = other DNA
gatgaattcataatttatggcgctccatctaattacttacttgatacctgcaacatttacaacaaggctgcctga

SEQ ID NO: 165469 - DNA, 75 bp, synthetic construct
  source 1..75: mol_type = other DNA
attcccggaatggccgcccggtgcatcaccagacctttccgactttaacgatttgatgctatgggaaatggagca

SEQ ID NO: 165470 - DNA, 75 bp, synthetic construct
  source 1..75: mol_type = other DNA
ctgtgggagtttgaaatcgacaccgcgcgccagcagttgaatctgcaatttggcacccgcgatctggtcggtttt

SEQ ID NO: 165471 - DNA, 75 bp, synthetic construct
  source 1..75: mol_type = other DNA
gcgaatctcagcctatcgcgctgacccgcctcagccatagccagtgcgaactgctggccagcgatgaaatgcgac

SEQ ID NO: 165472 - DNA, 75 bp, synthetic construct
  source 1..75: mol_type = other DNA
tgcgccataccgagatagtcagccgggaagatgttctgaaaaaagtctgggatgacaatggattaacctcatcca

SEQ ID NO: 165473 - DNA, 75 bp, synthetic construct
  source 1..75: mol_type = other DNA
tttgtgccgctggttgcctgttgcagtatgcaaaagatacccagcgcacaaccttgccacatatccgctctatca

SEQ ID NO: 165474 - DNA, 75 bp, synthetic construct
  source 1..75: mol_type = other DNA
ctgctcgcccacgcgatctggcccgtatgcgtcacgctttccagcaactgccagaactacgcgcgcagttagaaa

SEQ ID NO: 165475 - DNA, 75 bp, synthetic construct
  source 1..75: mol_type = other DNA
gcgctggctgacggcgcgaccgattatctggagcgtctggaagtccgcgagcgtgaacgtaccggcctggacacg

SEQ ID NO: 165476 - DNA, 75 bp, synthetic construct
  source 1..75: mol_type = other DNA
aggaaaaggcgatagaaaaggcgctgagcgaggggaaaaccctgccggaaggtcagcccgcgacgctctacgagg

SEQ ID NO: 165477 - DNA, 75 bp, synthetic construct
  source 1..75: mol_type = other DNA
gtcttcacggagcttctgcagggaaaactacctgatggcagcgacctgacccggatacaggatggcgtgaataag

SEQ ID NO: 165478 - DNA, 75 bp, synthetic construct
  source 1..75: mol_type = other DNA
cagaacggtcagccagatggaggcccgcccgggtgtcatcgagacggcaagagccggtattgaagccgccattgg

SEQ ID NO: 165479 - DNA, 75 bp, synthetic construct
  source 1..75: mol_type = other DNA
gccgagttaaccctgatggcccgggagcaggggcgtgacgtccatatcctggctgccgataaccgctcacgtgat

SEQ ID NO: 165480 - DNA, 75 bp, synthetic construct
  source 1..75: mol_type = other DNA
gagtggatgaacacgctgaaggagaccgggtttgacatccgggggtaccgtgaggccgccgatgcgcgagccgca

SEQ ID NO: 165481 - DNA, 75 bp, synthetic construct
  source 1..75: mol_type = other DNA
acagtgaaggaaaggagcgatttatctcaccccgggaggcatcggcagaaggcgtcacgctctatcgtcaggaaa

SEQ ID NO: 165482 - DNA, 75 bp, synthetic construct
  source 1..75: mol_type = other DNA
attagtcaaagtcaaggtgctgattttgttcctgtcaatattttctctgtaacgcaattattgcatttacttata

SEQ ID NO: 165483 - DNA, 75 bp, synthetic construct
  source 1..75: mol_type = other DNA
tcgcatcaacatttcatattactgcgttgctgttttttattgttctcgcatttgatactaatgcagttagctcaa

SEQ ID NO: 165484 - DNA, 75 bp, synthetic construct
  source 1..75: mol_type = other DNA
aatacgaagccgccatcgccgaaaaaataggggttgaacctgctgtaatctggcccagcagataccaggtggacg

SEQ ID NO: 165485 - DNA, 75 bp, synthetic construct
  source 1..75: mol_type = other DNA
atgaaagccgtgctctggcgcgtgtgcacctgagcagcccggttgaaatggcgaaggttgcagatatggcgggga

SEQ ID NO: 165486 - DNA, 75 bp, synthetic construct
  source 1..75: mol_type = other DNA
ctgcgcgtctggcgggtgtaccggttgttcgcaccaaaattattatctttgttctctctggcctggtatctgcga

SEQ ID NO: 165487 - DNA, 75 bp, synthetic construct
  source 1..75: mol_type = other DNA
tgttcgcaccaaaattattatctttgttctctctggcctggtatctgcgatagccggaattattctggcttcacg

SEQ ID NO: 165488 - DNA, 75 bp, synthetic construct
  source 1..75: mol_type = other DNA
attacccgggagaaaccaccacatgaagaaggcgtgacaacaacctcagtcattctgctctctgtttttttatat

SEQ ID NO: 165489 - DNA, 75 bp, synthetic construct
  source 1..75: mol_type = other DNA
acttagagcagatgacaaagttagaaaaagccttaaaaggaccgctgcaaaaagcggctgaggcaatgaaacaga

SEQ ID NO: 165490 - DNA, 75 bp, synthetic construct
  source 1..75: mol_type = other DNA
gagttcgatggctttgatgacacccgtgaacgattagatttactggcactggataaagatggcaacttggtcatt

SEQ ID NO: 165491 - DNA, 75 bp, synthetic construct
  source 1..75: mol_type = other DNA
gcagtaataagcaagataacagacacatactgaagctttgtgatgctggcggcacgataagaatgattgctgaag

SEQ ID NO: 165492 - DNA, 75 bp, synthetic construct
  source 1..75: mol_type = other DNA
atggaatggctggtcaaaaaatcatgttgcgataaacaagataacagacatgttcttatgctctgcggtgctggc

SEQ ID NO: 165493 - DNA, 75 bp, synthetic construct
  source 1..75: mol_type = other DNA
acaaccggctggtagaactgacaatgaacaaactttacgatcgcgcgccggcttccgtctggaaatatgtcacct

SEQ ID NO: 165494 - DNA, 75 bp, synthetic construct
  source 1..75: mol_type = other DNA
gatgcggccattgcgcagcagaaggccgggctgcataccccggcagaacaggccattcacctggccatcccgctg

SEQ ID NO: 165495 - DNA, 75 bp, synthetic construct
  source 1..75: mol_type = other DNA
gcggaagtcacctccggctgtactcggcgcaggatgcggcgcgcacgacggagaagctgtcgcggcataccgcgt

SEQ ID NO: 165496 - DNA, 75 bp, synthetic construct
  source 1..75: mol_type = other DNA
cgcccgatgcgtctgtggtgcgccaggttcctttcagcgatgccgtcagcgtgctggcgcaggatcgcccggtaa

SEQ ID NO: 165497 - DNA, 75 bp, synthetic construct
  source 1..75: mol_type = other DNA
acaggattagtcctgttaggacaaagaagttcagtgagttgggctttactgagcgcaagcatcttcaggagtggt

SEQ ID NO: 165498 - DNA, 75 bp, synthetic construct
  source 1..75: mol_type = other DNA
ggattgttatttttgatgacgttcttactgccggtagtcattttaaagcgatgaaaagcctgatactacaacata

SEQ ID NO: 165499 - DNA, 75 bp, synthetic construct
  source 1..75: mol_type = other DNA
gcggtgtcacaggaatgttcgccaatttctttgcaggatttattggtcttgtgtttggtgttataggtttgagag

SEQ ID NO: 165500 - DNA, 75 bp, synthetic construct
  source 1..75: mol_type = other DNA
tgatgcggagaaaaatccgtgggggctggcaatcgactgtaccgatgccgtaccgcaacgtctggtggcggagga

SEQ ID NO: 165501 - DNA, 75 bp, synthetic construct
  source 1..75: mol_type = other DNA
agaccgccgcaccgtctgtgtgattggcgatggcgcaattaccgcgggtatggcgtttgaagcgatgaaccatgc

SEQ ID NO: 165502 - DNA, 75 bp, synthetic construct
  source 1..75: mol_type = other DNA
tggcgtttgaagcgatgaatcacgcgggcgatatccgtcctgatatgctggtggttctcaacgacaatgaaatgt

SEQ ID NO: 165503 - DNA, 75 bp, synthetic construct
  source 1..75: mol_type = other DNA
acatcaacccgacccattatcttgatatcaatcatgcggatattgtggcgcgtatcgatttgaccgagtgggaaa

SEQ ID NO: 165504 - DNA, 75 bp, synthetic construct
  source 1..75: mol_type = other DNA
cagaacggatttattgagagtttcaatggccgctttcgggatgaatgcctgaatgaacactggttcagcgatatt

SEQ ID NO: 165505 - DNA, 75 bp, synthetic construct
  source 1..75: mol_type = other DNA
attaatgactggcggcaggattataacgagtgtcgtccacattcagcactgaattatcagacgccatcagagttt

SEQ ID NO: 165506 - DNA, 75 bp, synthetic construct
  source 1..75: mol_type = other DNA
ctggttagcatagagaacctgaaaaatgttacccgcgacccattagctgaggccagacgggtgttggtggtgggg

SEQ ID NO: 165507 - DNA, 75 bp, synthetic construct
  source 1..75: mol_type = other DNA
caatagcaagtttgtggtggcgattaatcatgacgccagcgcagcggtattttcacaggcagatgttggcgtggt

SEQ ID NO: 165508 - DNA, 75 bp, synthetic construct
  source 1..75: mol_type = other DNA
tgtcccgggtgcgcttcccgactggctggttagcacagaggatctgaaaaatgttactcgcgacccattagctga

SEQ ID NO: 165509 - DNA, 75 bp, synthetic construct
  source 1..75: mol_type = other DNA
atgaatgctgtaaccgaaggaagaaaagtcctcctcgaaatcgccgatctgaaagtgcactttgaaatcaaagat

SEQ ID NO: 165510 - DNA, 75 bp, synthetic construct
  source 1..75: mol_type = other DNA
atgaatgctgtaactgaaggaagaaaagtcctccttgaaatcgccgatctgaaagtgcactttgaaatcaaagat

SEQ ID NO: 165511 - DNA, 75 bp, synthetic construct
  source 1..75: mol_type = other DNA
accagcctgtttctgaagctttttcagaaaacgccggttttccaattgaacattctttcaacattggtgatgtag

SEQ ID NO: 165512 - DNA, 75 bp, synthetic construct
  source 1..75: mol_type = other DNA
gtcagagccgccgaatctcagaagagagaacaaatcgcttatgcgagtaagatcattgctactttgcaggacgct

SEQ ID NO: 165513 - DNA, 75 bp, synthetic construct
  source 1..75: mol_type = other DNA
aagagctgattgcatatgcaggtgaaattattgccacgctgcaggatgctgtcgatttagatatggctaccgagg

SEQ ID NO: 165514 - DNA, 75 bp, synthetic construct
  source 1..75: mol_type = other DNA
gtgatattactgcgacagtcacttttgccgggctggactgggaatcaaaggccgatgatacaaattttatcaaag

SEQ ID NO: 165515 - DNA, 75 bp, synthetic construct
  source 1..75: mol_type = other DNA
aatgtaaagaacagctacggcgaagcggtggatatcactctgctcgaccagatcccagtcagtgctaatagtgat

SEQ ID NO: 165516 - DNA, 75 bp, synthetic construct
  source 1..75: mol_type = other DNA
gcgaccagaaagtttcaccgcgcaaaatgttcgctatgcgctttcgctgccgtggcaaatcgacagcgacaacac

SEQ ID NO: 165517 - DNA, 75 bp, synthetic construct
  source 1..75: mol_type = other DNA
ccggctggctatgctgccgttttcaatgcagacgaaatgaaatggcatttgatagaggaccatcgtgggaaaact

SEQ ID NO: 165518 - DNA, 75 bp, synthetic construct
  source 1..75: mol_type = other DNA
gtgagttcaggtgcaaaggttatctcggcatttatccgggagacagttgcaggcaccacaccagcaagtggtgac

SEQ ID NO: 165519 - DNA, 75 bp, synthetic construct
  source 1..75: mol_type = other DNA
atactcgtccgctttctgtatgtcagataacgccaactgtaaatttgcgaaatgttttcctcgaaaggaaaggga

SEQ ID NO: 165520 - DNA, 75 bp, synthetic construct
  source 1..75: mol_type = other DNA
acggacgctttcgcgatgagtgtctgaatgaacactggttcagtgatattcttcatgcccggaaaactattaatg

SEQ ID NO: 165521 - DNA, 75 bp, synthetic construct
  source 1..75: mol_type = other DNA
aggcaccacgccagctagtggtgactggagtttattaaagcgcacaagctggggagtaaaaccaacccagaataa

SEQ ID NO: 165522 - DNA, 75 bp, synthetic construct
  source 1..75: mol_type = other DNA
cgcagcagatgaagcacctacgataaccagaaaaaaatgctccccgactgccgtgatcgcaaaagccagtgctga

SEQ ID NO: 165523 - DNA, 75 bp, synthetic construct
  source 1..75: mol_type = other DNA
cgcagcagatgaagcacctacgataaccagaaaaaaaaaattccccggctgccgtgatcgcaaaagccagtgctg

SEQ ID NO: 165524 - DNA, 75 bp, synthetic construct
  source 1..75: mol_type = other DNA
gtgtttatctcgagatggatttactataagattggatgattacactcctgaacagggtgctttctttattattga

SEQ ID NO: 165525 - DNA, 75 bp, synthetic construct
  source 1..75: mol_type = other DNA
caatctaaagcaaataggttaatttctgataataagaaaaaacataagagtgaactaaaaaacatttcttatgaa

SEQ ID NO: 165526 - DNA, 75 bp, synthetic construct
  source 1..75: mol_type = other DNA
gaggaatatttctccagtacagaaataacagacaccaatatagattatgtatacaataaaattaaagaacaaaat

SEQ ID NO: 165527 - DNA, 75 bp, synthetic construct
  source 1..75: mol_type = other DNA
cggtcggtatcagccagataatcacagataacggaaaagagttcctgggaaacttcgacaaaacgctgcaggaag

SEQ ID NO: 165528 - DNA, 75 bp, synthetic construct
  source 1..75: mol_type = other DNA
atgacgcccgtggaatatattttaaaagagaataaaaattgcaatatgtggtggacccatacattatattgcctc

SEQ ID NO: 165529 - DNA, 75 bp, synthetic construct
  source 1..75: mol_type = other DNA
gtggacccatacatccacttttcttcatgtaagcaaggcagtaaactatcgttgttcgtgtgaggtcgataaaag

SEQ ID NO: 165530 - DNA, 75 bp, synthetic construct
  source 1..75: mol_type = other DNA
tgaaatccgtcgctacgacagagacatgaacataatttgtcgggaatgccgtaacagcgaatcaatgcaacgtgt

SEQ ID NO: 165531 - DNA, 75 bp, synthetic construct
  source 1..75: mol_type = other DNA
cataagaacataatttgctgtgagtgccgaaatagcgaagtcatgcagcgtgtactggcgttctgtcagggtaat

SEQ ID NO: 165532 - DNA, 75 bp, synthetic construct
  source 1..75: mol_type = other DNA
gagcgacgggagcaggctggcattcagtcagacgttgccttgtggatgtactggcttgtggcgatttatacatgc

SEQ ID NO: 165533 - DNA, 75 bp, synthetic construct
  source 1..75: mol_type = other DNA
gcaataaaacatcagagcagtcttctcgcttagaaaaagctttattaggttttacaaacacaatgtacagtgatt

SEQ ID NO: 165534 - DNA, 75 bp, synthetic construct
  source 1..75: mol_type = other DNA
atttgatcctattctatgggaaaaaaaattaggtgggctaagactatctggagatgggcatggaactcacttcat

SEQ ID NO: 165535 - DNA, 75 bp, synthetic construct
  source 1..75: mol_type = other DNA
acgactgatgcaggagatccttgcgcgcgcacagcttcagacgtgggcgaatgccggaatgttaaatgcgccact

SEQ ID NO: 165536 - DNA, 75 bp, synthetic construct
  source 1..75: mol_type = other DNA
atgcgtaaattaactgcactgtttgttgcctctaccctggctcttggcgcggctaacctggcccatgccgcagac

SEQ ID NO: 165537 - DNA, 75 bp, synthetic construct
  source 1..75: mol_type = other DNA
ggcgagcgcaaaaactcgccagcaaatagagcatgattacctgctatcgctggatatggctaaagaagtggcaat

SEQ ID NO: 165538 - DNA, 75 bp, synthetic construct
  source 1..75: mol_type = other DNA
gttgatattattgttactttacctttaggtgagtatctggatgagaacgatcagccaaatctggctaatatcgaa

SEQ ID NO: 165539 - DNA, 75 bp, synthetic construct
  source 1..75: mol_type = other DNA
aacacctctcatatctcgaaagcaccaatatcacgttaattgatatgggcatggaatatgagcagcgcaaaggag

SEQ ID NO: 165540 - DNA, 75 bp, synthetic construct
  source 1..75: mol_type = other DNA
atggaatatgagcagcgcaaaggagaactcacccgcctgtcgcaacgctggctcactaaacgtctggaggtaaac

SEQ ID NO: 165541 - DNA, 75 bp, synthetic construct
  source 1..75: mol_type = other DNA
acgcgcagaaacagcagattcgcgaaatcatgaaaggccagcgtgaccagatgaaacgtccgccgctggaagaac

SEQ ID NO: 165542 - DNA, 75 bp, synthetic construct
  source 1..75: mol_type = other DNA
agcgattaaaggattccgcaaagataaacataccgaagcggcttttcagttcgccaacgttgctgattcctacgc

SEQ ID NO: 165543 - DNA, 75 bp, synthetic construct
  source 1..75: mol_type = other DNA
atgaaaaaatggaaagtacgtagcgcgttgatagcattagccgtgctgctggccggttgttccagtaatgcgcag

SEQ ID NO: 165544 - DNA, 75 bp, synthetic construct
  source 1..75: mol_type = other DNA
gtgagagtaaaaattgcaatatgtggtggccccatacactttttctggatcaactgatattgcaatgtttctttt

SEQ ID NO: 165545 - DNA, 75 bp, synthetic construct
  source 1..75: mol_type = other DNA
atgaatatggatcctgagaattacagcaaatacaccctccgtcggttcgccgccattttggatgtgatctgctgg

SEQ ID NO: 165546 - DNA, 75 bp, synthetic construct
  source 1..75: mol_type = other DNA
accagcgaagccagtaaaattgatattaataatcaagttatctattttaatgacgttatatctctgagcagcgaa

SEQ ID NO: 165547 - DNA, 75 bp, synthetic construct
  source 1..75: mol_type = other DNA
gcaaaacgcgctgccgccgtgctctggacaagcctttccggcggacaacaatggctatgcgccgccaccgtgtcg

SEQ ID NO: 165548 - DNA, 75 bp, synthetic construct
  source 1..75: mol_type = other DNA
ctcgttaaaaaaggaacgccggtttcccggggagctgctatcgcgttgtccggtaacagcgggcgctcatccggt

SEQ ID NO: 165549 - DNA, 75 bp, synthetic construct
  source 1..75: mol_type = other DNA
cataactaaagccagcatcgacactctgacccgctacgctcacgcctgcggcatcaagaaacctgtaattgccct

SEQ ID NO: 165550 - DNA, 75 bp, synthetic construct
  source 1..75: mol_type = other DNA
catcactaaagccagcatcgatacactgactcgctatgcccatgcgtgtggtatcaaaaaacctgtaattgccct

SEQ ID NO: 165551 - DNA, 75 bp, synthetic construct
  source 1..75: mol_type = other DNA
tttgcagcaaccgggaactggccggagtggagtaactgtttcagtttttcagatgctgtcgatgccgtagttgac

SEQ ID NO: 165552 - DNA, 75 bp, synthetic construct
  source 1..75: mol_type = other DNA
cccggggaggcgctattgcgttatccggtaacagcggacgttcatccggtcctcatctgcattacgagctggtca

SEQ ID NO: 165553 - DNA, 75 bp, synthetic construct
  source 1..75: mol_type = other DNA
ggctttcagggcggcagggcctgcggataacaataaactcgaacagcacgcgtacgcccatgcccgtgactatgg

SEQ ID NO: 165554 - DNA, 75 bp, synthetic construct
  source 1..75: mol_type = other DNA
aagtcatcaaaaagtctcagaaaacgccagcaaaagaaatcgatctcgccaaaaagcggttagcggaggtactta

SEQ ID NO: 165555 - DNA, 75 bp, synthetic construct
  source 1..75: mol_type = other DNA
atgtccgataaacctttaacaaaaaccgattatttgatgcgtttgcgtcgttgtcagacaattgacacgctggaa

SEQ ID NO: 165556 - DNA, 75 bp, synthetic construct
  source 1..75: mol_type = other DNA
gaatcagaccgcttataataagttcatcaacgaaatggcgatggataataaagtggcacccgcgcacaattatct

SEQ ID NO: 165557 - DNA, 75 bp, synthetic construct
  source 1..75: mol_type = other DNA
cgcaaggagaagctcagggcgttgcttgcagaatggcgtaagcatgacaacctgacaaaagcgcaggttgctgaa

SEQ ID NO: 165558 - DNA, 75 bp, synthetic construct
  source 1..75: mol_type = other DNA
cggttatttcccgcctggaaaacaacatcactaaagccagcatcgatacactcgctatgcccatgcgtgtgatat

SEQ ID NO: 165559 - DNA, 75 bp, synthetic construct
  source 1..75: mol_type = other DNA
ggaatatcgtgctgcatggcaggaagaagaacgcaaggagaagctcagggcgttgcttgcagaatggcgtaagca

SEQ ID NO: 165560 - DNA, 75 bp, synthetic construct
  source 1..75: mol_type = other DNA
cactttcctgaaagggcgagtcgggcgcaaagtggccgatttcttcatggacttcctcggtgccagcgaagggtt

SEQ ID NO: 165561 - DNA, 75 bp, synthetic construct
  source 1..75: mol_type = other DNA
cgcatcgatttaaccgaatgggaaaccaacctggaatcgacccgctatttaactttcctgaaagggcgggtaggg

SEQ ID NO: 165562 - DNA, 75 bp, synthetic construct
  source 1..75: mol_type = other DNA
ctgcaaattactttgcaacgggcgcgggcattatatcagcacggcgcagtcagttatctggaagtgctggatgcc

SEQ ID NO: 165563 - DNA, 75 bp, synthetic construct
  source 1..75: mol_type = other DNA
ttaggtgaacgcatcttctgggatccggcgaccgatacgttgaccattaaaggcacaccaccgaatttgcgtgat

SEQ ID NO: 165564 - DNA, 75 bp, synthetic construct
  source 1..75: mol_type = other DNA
caaccggtcgcctgcgtgacgaattagcgaaatatccttttgctgacggtggattcgtgctgttttgccactacc

SEQ ID NO: 165565 - DNA, 75 bp, synthetic construct
  source 1..75: mol_type = other DNA
ccgggatggtgcttccttcctggatgaacaaaggggagccggccaagttgctgaaaacggcgcggcggttctggg

SEQ ID NO: 165566 - DNA, 75 bp, synthetic construct
  source 1..75: mol_type = other DNA
tgctggcgtatgaccgcgatattacccgctttgacggtgaaccgctggcattgttccgtaagcgcgtggcatatg

SEQ ID NO: 165567 - DNA, 75 bp, synthetic construct
  source 1..75: mol_type = other DNA
ttccgttgagggatttatcaacatctttgaacggctgggtattgggtatgtggagctgcgggagcgccagccagg

SEQ ID NO: 165568 - DNA, 75 bp, synthetic construct
  source 1..75: mol_type = other DNA
attaccggcgggtttgtcatcgcaaatcttattgcaacgcccggatattatggaagccgaacatgcattaatggc

SEQ ID NO: 165569 - DNA, 75 bp, synthetic construct
  source 1..75: mol_type = other DNA
tgcaggaagcgcgtgcgcaatatcgtctgaccgatgccgatcgctacccacagctcaatggcgagggcagcggta

SEQ ID NO: 165570 - DNA, 75 bp, synthetic construct
  source 1..75: mol_type = other DNA
gtctgccccgaaccgctgttaaacctgattgcctgggaacgcgacatcgttcggtttaagggggagccgctcgac

SEQ ID NO: 165571 - DNA, 75 bp, synthetic construct
  source 1..75: mol_type = other DNA
gccatgctaaccccaaccagccagagcaatttttgcccgagccacaaaccgacgtgtttatggcagtggctgaaa

SEQ ID NO: 165572 - DNA, 75 bp, synthetic construct
  source 1..75: mol_type = other DNA
gaaggcaatgccgcgctgacttatgaaggtttactggagcagatccgcgccaagatcagccactacatcaccctg

SEQ ID NO: 165573 - DNA, 75 bp, synthetic construct
  source 1..75: mol_type = other DNA
tcgcgatgtttaacctgctgaaagtgatggaaatctgcctgcatgaaaatgaaggcaatgctgcgctgacttatg

SEQ ID NO: 165574 - DNA, 75 bp, synthetic construct
  source 1..75: mol_type = other DNA
ggcagaacctacggcttgcatgacatcgcgatgtttaacctgctgaaagtgatggaaatctgcctgcatgaaaat

SEQ ID NO: 165575 - DNA, 75 bp, synthetic construct
  source 1..75: mol_type = other DNA
cttgatcgcttatccgaataatggtattccgtcaggttacattgttagagatataagaggagagtatttagggtt

SEQ ID NO: 165576 - DNA, 75 bp, synthetic construct
  source 1..75: mol_type = other DNA
caagatcagccactacatcaccctgatggttgagggcagcaatatttgcgatatcggtcaccgtgactgggcacc

SEQ ID NO: 165577 - DNA, 75 bp, synthetic construct
  source 1..75: mol_type = other DNA
tttgacgaattgctgtcggtattaaaagccaacttcgcaacgccagaaggcgaaaaagtccgcgctcgcttaatt

SEQ ID NO: 165578 - DNA, 75 bp, synthetic construct
  source 1..75: mol_type = other DNA
tttttagtgttctttctgcttcggttgccagtcatgcggacagcaatgtttttcaacaaaaggccgagaagacaa

SEQ ID NO: 165579 - DNA, 75 bp, synthetic construct
  source 1..75: mol_type = other DNA
ccacgctgcatcaacaatgcgtcgatagcgaattaccgatgccactgctgtcttgtctggaaggttacgctcagg

SEQ ID NO: 165580 - DNA, 75 bp, synthetic construct
  source 1..75: mol_type = other DNA
tgatcgactccccgatgagatgatagatgaaggatatgtcaaacacgtccggcaacggttaagaggacagggcgt

SEQ ID NO: 165581 - DNA, 75 bp, synthetic construct
  source 1..75: mol_type = other DNA
gctgttattgttggaagcctcgcagaaacatattttgcgttacgccgaactggcagaaacgatggcagcaagctg

SEQ ID NO: 165582 - DNA, 75 bp, synthetic construct
  source 1..75: mol_type = other DNA
ctgggccaggacgcacaagggccaacagcggtactgaagtcagtcagtagctcgataacacgctgctgtctaacg

SEQ ID NO: 165583 - DNA, 75 bp, synthetic construct
  source 1..75: mol_type = other DNA
tgaaatctcgctggagcgggcgctgctttataccgccagccatcggcaaaccgaaggcgaaccggtgatattgcg

SEQ ID NO: 165584 - DNA, 75 bp, synthetic construct
  source 1..75: mol_type = other DNA
gataaattttaccgccatgctaactgtcctgatgttgctgatgatgtgccgttgacgatggttcagacttgtatg

SEQ ID NO: 165585 - DNA, 75 bp, synthetic construct
  source 1..75: mol_type = other DNA
aagacccaggtttttccactggagcgcaatgccgccgtgcgcacgcgtcttacccactcgatggaagtccagcag

SEQ ID NO: 165586 - DNA, 75 bp, synthetic construct
  source 1..75: mol_type = other DNA
gttaggcgagtcgttaattcaggatgccaaagcacaggatctttcaccggaagatttgctcaacaaaaaagcttc

SEQ ID NO: 165587 - DNA, 75 bp, synthetic construct
  source 1..75: mol_type = other DNA
ctaaccagttccaggcgctgcgtaaaagttttattccagagcgtccggtgccggtaatggttactcgcctgtttg

SEQ ID NO: 165588 - DNA, 75 bp, synthetic construct
  source 1..75: mol_type = other DNA
cctaatcgcgctcccggcatgttgttgaatgcacaaagttataccctcggtatcttgattccgtcatttcaaaat

SEQ ID NO: 165589 - DNA, 75 bp, synthetic construct
  source 1..75: mol_type = other DNA
gtgaccggttctgatgacgttgccatcggccacttctcaacattatcttatgtattggccggtttcatcggcagc

SEQ ID NO: 165590 - DNA, 75 bp, synthetic construct
  source 1..75: mol_type = other DNA
acatactgatgtgatcctgaaaaaatcgtatgaagtgatgcatggggaattggggaatgcggattcgatccagag

SEQ ID NO: 165591 - DNA, 75 bp, synthetic construct
  source 1..75: mol_type = other DNA
cgacgtgttcaaccttccggcacgccgtaacgccattaacggttgtgcaagtctgggagcagcgattaatatgta

SEQ ID NO: 165592 - DNA, 75 bp, synthetic construct
  source 1..75: mol_type = other DNA
gtcgtgcatggtcggggggatttacccagtcagcgtttacggtgctgtccgatgcgcgtttcaagactgctccag

SEQ ID NO: 165593 - DNA, 75 bp, synthetic construct
  source 1..75: mol_type = other DNA
ctgatgacggtgctggactggctgaccaatccgtgggaaccgtacaaacgcgggattatgatcggctttgattcc

SEQ ID NO: 165594 - DNA, 75 bp, synthetic construct
  source 1..75: mol_type = other DNA
cgctgatgatgaacggtaaagcactgccgaaagatccggtggcgtactggccgattatgtcttctattccggaaa

SEQ ID NO: 165595 - DNA, 75 bp, synthetic construct
  source 1..75: mol_type = other DNA
cctgtttacctctttctcagggagtttagtctccaggatttccggggcggttcaatgagtcagtttgctgggaat

SEQ ID NO: 165596 - DNA, 75 bp, synthetic construct
  source 1..75: mol_type = other DNA
gtctggccggaaggaccacgcccaccgtcgcgtgactatacgccactgtatgacgaactacgccatgaactggcg

SEQ ID NO: 165597 - DNA, 75 bp, synthetic construct
  source 1..75: mol_type = other DNA
gcgtcgccagcagctgggcaatgcaggcgcaaccgggcgataaactcacggtggcaggtccgcgcggttcgctgg

SEQ ID NO: 165598 - DNA, 75 bp, synthetic construct
  source 1..75: mol_type = other DNA
catctggataaccggcgaaggcaaagtcgttaagaatttaagccgccgctttgaagcggaacagtatgacccaca

SEQ ID NO: 165599 - DNA, 75 bp, synthetic construct
  source 1..75: mol_type = other DNA
ttctgccgttaaatggatgtatgccattgaagcgtgtctgtcgttaacgttgctctaccctatcgcccgctggag

SEQ ID NO: 165600 - DNA, 75 bp, synthetic construct
  source 1..75: mol_type = other DNA
atggctcgcgtgatgcgtgataaacgttttgtcacctacgtcctgacgctggcgggctactacatgcttgccgtt

SEQ ID NO: 165601 - DNA, 75 bp, synthetic construct
  source 1..75: mol_type = other DNA
cgctatcgccgaccgttttggtgcaaaaccaatgattgttactggtatgctgatgcgtgccgccggattcgccac

SEQ ID NO: 165602 - DNA, 75 bp, synthetic construct
  source 1..75: mol_type = other DNA
ctgcgtttaaacaattgaagatcgcattccagaaaaagatcattccgcttttacaggaatactttttcgatgact

SEQ ID NO: 165603 - DNA, 75 bp, synthetic construct
  source 1..75: mol_type = other DNA
aatataaagaaattgatgatgagttttgtgatggagagatcatttttggtattgccattatcataaaagaaatac

SEQ ID NO: 165604 - DNA, 75 bp, synthetic construct
  source 1..75: mol_type = other DNA
cagtaccgccacagtacaacacatggctgcagttacttctggcctctcctgtcgttttgtggtgtggctggccat

SEQ ID NO: 165605 - DNA, 75 bp, synthetic construct
  source 1..75: mol_type = other DNA
tgcaaatccctgccgatgattacttcatctggataaccggcgaaggcaaagtcgttaagaatttaagccgccgct

SEQ ID NO: 165606 - DNA, 75 bp, synthetic construct
  source 1..75: mol_type = other DNA
tgctgttcccgctgatcgtgatgcctggctggattctcgccttgaatcgttgaactggatgcaggttataacgct

SEQ ID NO: 165607 - DNA, 75 bp, synthetic construct
  source 1..75: mol_type = other DNA
aagccatccagcgttttgcggtggttacgttccaccaatcttacggctatgaagaatttattgaaggtatacgcg

SEQ ID NO: 165608 - DNA, 75 bp, synthetic construct
  source 1..75: mol_type = other DNA
aattatcaggatctgctgccaatcagccctgcattgtggtgttatcgtcgtgaatggcagggacaaagtctattg

SEQ ID NO: 165609 - DNA, 75 bp, synthetic construct
  source 1..75: mol_type = other DNA
gaatccaaaatttatttcctattacatgcaaaccgattcgtttatttctgaaaaagcaaagtatgtagccagaac

SEQ ID NO: 165610 - DNA, 75 bp, synthetic construct
  source 1..75: mol_type = other DNA
agaagaagcaaacaatgtttataactgcattgtcgatgcctctattagtaatatgaaacagacaaagcctgttaa

SEQ ID NO: 165611 - DNA, 75 bp, synthetic construct
  source 1..75: mol_type = other DNA
ttgatgacctgaaatttttaggatctgaagtaaaaagagaatttggcagccttgaaactatcccggatacggaag

SEQ ID NO: 165612 - DNA, 75 bp, synthetic construct
  source 1..75: mol_type = other DNA
tcggcttgctgctgttgactgtgctcggcctcgatcgctggatgagctggaaaaccgcgccttatatctacgacg

SEQ ID NO: 165613 - DNA, 75 bp, synthetic construct
  source 1..75: mol_type = other DNA
aagttttcgatactaatgatttcattattatcacccaacgtttccactgtgagcgggcattatttattgcgctgc

SEQ ID NO: 165614 - DNA, 75 bp, synthetic construct
  source 1..75: mol_type = other DNA
caagcgttttgtcacctatgtcctgacgctggcgggttactacatgctggctgtacaagtgatgctgatgctgcc

SEQ ID NO: 165615 - DNA, 75 bp, synthetic construct
  source 1..75: mol_type = other DNA
agcaggggttgggtatttttggcggcgcaattgccgaccgctttggcgctaaaccgatgattgtcaccggtatgc

SEQ ID NO: 165616 - DNA, 75 bp, synthetic construct
  source 1..75: mol_type = other DNA
caataatatgctggtcgtgctggggttctttgttgtcttcccgctgatctctatccgcttcgttgatcaaatggg

SEQ ID NO: 165617 - DNA, 75 bp, synthetic construct
  source 1..75: mol_type = other DNA
tgcattgtcgatgcctctattagtaatatgaaacagacaaaacctgttaagcttgtgaaagcagatggtatctgg

SEQ ID NO: 165618 - DNA, 75 bp, synthetic construct
  source 1..75: mol_type = other DNA
cgttaaatggatgtatgccattgaagcgtgtctgtcgttaacgttgctctaccctatcgcccgctggagtgaaaa

SEQ ID NO: 165619 - DNA, 75 bp, synthetic construct
  source 1..75: mol_type = other DNA
tgctctaccctatcgctcgctggagcgaaaagcgttttcgtctggaacatcggttgatggctgggctgttagtca

SEQ ID NO: 165620 - DNA, 75 bp, synthetic construct
  source 1..75: mol_type = other DNA
cgtaaaattgtctccgggcatgatagtcgtaactatgccttgttcggtcaggaggcgattggatctacatggtcg

SEQ ID NO: 165621 - DNA, 75 bp, synthetic construct
  source 1..75: mol_type = other DNA
acaagtttggtcgcttccgtcgcggcgtgccaccgaaaaccaaaggggattacgcctttattctgcatatgattg

SEQ ID NO: 165622 - DNA, 75 bp, synthetic construct
  source 1..75: mol_type = other DNA
agaaacatggcgcgatgatcttcgcgacggcttcgccgaagcattcagggtattgcggccccacggtgtactcat

SEQ ID NO: 165623 - DNA, 75 bp, synthetic construct
  source 1..75: mol_type = other DNA
ctggcggtacgtgctgagcgtgagcaactgaaagcggaactggtaaagctggaaatggagatggctgggtatttg

SEQ ID NO: 165624 - DNA, 75 bp, synthetic construct
  source 1..75: mol_type = other DNA
aactgaaggtggaactggcgaagctggaaacggagatggtggggtatttggaggatctggcataccacgggctcc

SEQ ID NO: 165625 - DNA, 75 bp, synthetic construct
  source 1..75: mol_type = other DNA
tgaagaagaggatgagattgacctggtggcggtgcgagcagagcgtgagcaactgaaggtggaactggcgaagct

SEQ ID NO: 165626 - DNA, 75 bp, synthetic construct
  source 1..75: mol_type = other DNA
aggttgaaacccaacgtctctatcacgtactgaataagcggttggaaaactccccctggttgggcggagaaaact

SEQ ID NO: 165627 - DNA, 75 bp, synthetic construct
  source 1..75: mol_type = other DNA
atttttgcacatttcgcctaacaacaaaattccggcaattgttgatcattccccagccgatggcggcgaaccgct

SEQ ID NO: 165628 - DNA, 75 bp, synthetic construct
  source 1..75: mol_type = other DNA
aaaattccggcgattgttgatcatgccccgactgacggcggtgaaccattaagcctctttgagtcaggtgcaatt

SEQ ID NO: 165629 - DNA, 75 bp, synthetic construct
  source 1..75: mol_type = other DNA
ggattcccggggcggttcaccaacgagcgttttgtactgccaaaaagtgccagcttttatgcgctgtacgaacgc

SEQ ID NO: 165630 - DNA, 75 bp, synthetic construct
  source 1..75: mol_type = other DNA
gtaccggtattccggctgcgattctgattttcaaaaagcagaaagtggatgacaaggtgctgtttatcgacgcca

SEQ ID NO: 165631 - DNA, 75 bp, synthetic construct
  source 1..75: mol_type = other DNA
ccctgtcatatcatgggtacaggccggagcatggaaagaagttggctattctgaggttgatttgagcacagcaga

SEQ ID NO: 165632 - DNA, 75 bp, synthetic construct
  source 1..75: mol_type = other DNA
tggaaatcgcccagcgcgaaaacgaagccacctgttttggtcgcagaacgccggatgacagtttcctcgaatggc

SEQ ID NO: 165633 - DNA, 75 bp, synthetic construct
  source 1..75: mol_type = other DNA
atccgcattttcactttgtcgaaggtgatatcagcattcattctgaatggattgagtaccacgtcaaaaaatgtg

SEQ ID NO: 165634 - DNA, 75 bp, synthetic construct
  source 1..75: mol_type = other DNA
tgcctgtggcgatggtgcgctggaaattgtcaccggacaggcgggcgatggaattactatgcaaggttcgcaatt

SEQ ID NO: 165635 - DNA, 75 bp, synthetic construct
  source 1..75: mol_type = other DNA
aggcgcagtgccggatgccgtagccgatccgaatctgaaaaaactgtttgatatcggcgttgcgggtttgacgct

SEQ ID NO: 165636 - DNA, 75 bp, synthetic construct
  source 1..75: mol_type = other DNA
tgttgtggccaaacggtgttctggtttttaaatggaatgaaacgcaaataccggtaagccagattttggcactga

SEQ ID NO: 165637 - DNA, 75 bp, synthetic construct
  source 1..75: mol_type = other DNA
catggtgcgtgccgttgccgatccgtggccgggtgccttcagctatgttggcaatcagaaattcaccgtctggtc

SEQ ID NO: 165638 - DNA, 75 bp, synthetic construct
  source 1..75: mol_type = other DNA
cgcgcgcaattacccaactcattcttaatctggttgaaggctcaccaattaagctgattgatggcggaaaacaaa

SEQ ID NO: 165639 - DNA, 75 bp, synthetic construct
  source 1..75: mol_type = other DNA
gtgctgttccgtggctccagcgaaggtaaaattcgccagaaactgatcgatgaaaatctgttggatgccgtcatt

SEQ ID NO: 165640 - DNA, 75 bp, synthetic construct
  source 1..75: mol_type = other DNA
caattgaaagtggaactggcgaagttggaagtggagatggcagagtatttgaaggagttgggttatggcgtttaa

SEQ ID NO: 165641 - DNA, 75 bp, synthetic construct
  source 1..75: mol_type = other DNA
cgaaatatcgcggccgcgcgccactgaactgggtactggtgaacggtgaaacggaaactggcgttacgttgcatc

SEQ ID NO: 165642 - DNA, 75 bp, synthetic construct
  source 1..75: mol_type = other DNA
gcttcgaaaaacatccgctgcgccatcacttcccaccgtttgcgggctttcgtgttgtcgaaagtagcagctact

SEQ ID NO: 165643 - DNA, 75 bp, synthetic construct
  source 1..75: mol_type = other DNA
ggtctacggtctggatattggcagtgatgctatcagtcgttttctaaatcatccacgttttcattttgtcgaagg

SEQ ID NO: 165644 - DNA, 75 bp, synthetic construct
  source 1..75: mol_type = other DNA
aagataccgaagaagtcgtgaaatcccaggatattaaagttggagaagattacagcctgacagttaccaacagcc

SEQ ID NO: 165645 - DNA, 75 bp, synthetic construct
  source 1..75: mol_type = other DNA
ctgtttccgctcatttaccgtccgtcagcgcagaccggacggtatcgtttgtgtggatagaaccggagaacaaaa

SEQ ID NO: 165646 - DNA, 75 bp, synthetic construct
  source 1..75: mol_type = other DNA
gccgcaggtggagatgaccagcggcaagatagtcagtgcggaagtgctactgcgtatccaacaaccggatggtcg

SEQ ID NO: 165647 - DNA, 75 bp, synthetic construct
  source 1..75: mol_type = other DNA
gccggaagaccgcttgcaacgctatccgctactcgaagagatggcggtttacagcacgatcgccaccgcgctgaa

SEQ ID NO: 165648 - DNA, 75 bp, synthetic construct
  source 1..75: mol_type = other DNA
gcaatctggcgataccgcgggtgggccaggaggtgattgttgatttcctgaacggagacccggaccagccggtgg

SEQ ID NO: 165649 - DNA, 75 bp, synthetic construct
  source 1..75: mol_type = other DNA
ccattgtcaccggtcctgcgggagaggaaatcttctgcgacgaacacggacgtgtgcgagtgcagtttcactggg

SEQ ID NO: 165650 - DNA, 75 bp, synthetic construct
  source 1..75: mol_type = other DNA
gcagttataacctcaatcagcaattgttacagcgccattatgaagaacagaatgagaatgcgatgcgctacccgg

SEQ ID NO: 165651 - DNA, 75 bp, synthetic construct
  source 1..75: mol_type = other DNA
atggtggcggccgttgtcatggtgtttgtttttattttttgcactgttttgctgttccacctggtacagcagaat

SEQ ID NO: 165652 - DNA, 75 bp, synthetic construct
  source 1..75: mol_type = other DNA
cctgattttacatccgttacgcaatattgctcgcgaacttaacgccatcccagcccaggagcttgttggtcacca

SEQ ID NO: 165653 - DNA, 75 bp, synthetic construct
  source 1..75: mol_type = other DNA
gatcgtattgagtcctgtgggctgatggttaccgtcggtcattgggtgctggaggaatcctgtcgactgcttgct

SEQ ID NO: 165654 - DNA, 75 bp, synthetic construct
  source 1..75: mol_type = other DNA
ctgccgaacaactttatggtcgtgctatttcggcggcatttaccgcccgtcataaagggaagaatcagattcagt

SEQ ID NO: 165655 - DNA, 75 bp, synthetic construct
  source 1..75: mol_type = other DNA
ttttgcaccgttttgctgttccatctggtccagcagaatcgctataacacggctacgcaactggaaagcattgct

SEQ ID NO: 165656 - DNA, 75 bp, synthetic construct
  source 1..75: mol_type = other DNA
acggtgacgacgttattgcattgatgcacgattcaggcgaaaccaccttcaagcggttgatagaagatggaacac

SEQ ID NO: 165657 - DNA, 75 bp, synthetic construct
  source 1..75: mol_type = other DNA
gtaattcgccgcggctgtggccgggaacgcggtttacgctgacggggcatccgcagaagatgctgaaccgtgaat

SEQ ID NO: 165658 - DNA, 75 bp, synthetic construct
  source 1..75: mol_type = other DNA
atccatgcgcagaagaacatggatacggaggtgctcaacgaccggacaacggatgtgaaacatgaccatacggag

SEQ ID NO: 165659 - DNA, 75 bp, synthetic construct
  source 1..75: mol_type = other DNA
cctgctctcgattgcccggtcgtcttcccttactgtcacgaacggtgcaatagtgatccacacccaacgcctgaa

SEQ ID NO: 165660 - DNA, 75 bp, synthetic construct
  source 1..75: mol_type = other DNA
ggagcatggaaagaagttggctattctgaggttgatttgagcacagcagaaacttatccctgccctgtaccctgt

SEQ ID NO: 165661 - DNA, 75 bp, synthetic construct
  source 1..75: mol_type = other DNA
gttgatcctgaagtccctgcctgccacggtgacgacgttattgcattgatgcacgatacaggcgaaaccaccttc

SEQ ID NO: 165662 - DNA, 75 bp, synthetic construct
  source 1..75: mol_type = other DNA
aggtcgccgggtgggcatttatcatgtctgtatttggggtggcttatgtcaggccatacgccaaagaaggcatag

SEQ ID NO: 165663 - DNA, 75 bp, synthetic construct
  source 1..75: mol_type = other DNA
cacaacgataaccgcgactcgcaggcgaactacgccactatcgttacgcaaatcctcgatgccgtcagcaataac

SEQ ID NO: 165664 - DNA, 75 bp, synthetic construct
  source 1..75: mol_type = other DNA
gacatcaacggcattgaagacattctcacctatatgcgccagctggcggcagcacttggcctcgattacaccctc

SEQ ID NO: 165665 - DNA, 75 bp, synthetic construct
  source 1..75: mol_type = other DNA
gaggtgctcaacgaccggacaacggatgtgaaacatgaccatacggagaccatcgggaacgaccagaagataacg

SEQ ID NO: 165666 - DNA, 75 bp, synthetic construct
  source 1..75: mol_type = other DNA
tcattctcaatggtaaaagtatccagattgaaggaaaagataaaataaatattttcggcgcagatattgatctgg

SEQ ID NO: 165667 - DNA, 75 bp, synthetic construct
  source 1..75: mol_type = other DNA
cctggcgtccacgggtgcagagcaaaccgaaggtggacgggccacagagcgccattgtcaccggtcccgcaggag

SEQ ID NO: 165668 - DNA, 75 bp, synthetic construct
  source 1..75: mol_type = other DNA
catcttataccacatgaaggtgatgataatttaaaatacaattgggataatttgttttattcatgtagtagatgc

SEQ ID NO: 165669 - DNA, 75 bp, synthetic construct
  source 1..75: mol_type = other DNA
gtggcctgcgccattgggattatgcgaattattcattcagtaaaaaagattgaacgctttttcactggtgaataa

SEQ ID NO: 165670 - DNA, 75 bp, synthetic construct
  source 1..75: mol_type = other DNA
tattctcaacttggtgggccgtccctccgcgattgatgccgtcgccaatgtgctgggaaatgcgcagcaaaaact

SEQ ID NO: 165671 - DNA, 75 bp, synthetic construct
  source 1..75: mol_type = other DNA
cagttgcgaaagcgcgtgaagcgtggccgaccaaaaccatttgtgctggcaacgtagtgactggtgaaatgtgtg

SEQ ID NO: 165672 - DNA, 75 bp, synthetic construct
  source 1..75: mol_type = other DNA
aaagagcttcatttgaagtgaagaaaaatgaatatggaaaatcaaagtataaattagcggctaagattacacagt

SEQ ID NO: 165673 - DNA, 75 bp, synthetic construct
  source 1..75: mol_type = other DNA
agaacgccacgaatacaggatgaatgacggtagcgcggcggttgagtttcccaaatatccggggttcccggtggc

SEQ ID NO: 165674 - DNA, 75 bp, synthetic construct
  source 1..75: mol_type = other DNA
gaatacgccattcataaagaaaaagagttcactttcaacaaaattcgtcagcctaaccgtaaccgcctgttgtgg

SEQ ID NO: 165675 - DNA, 75 bp, synthetic construct
  source 1..75: mol_type = other DNA
cgaaaaaactggggctgacaaatactactttccagacggtgcacgggctggatgcgccgggacaattcagcaccg

SEQ ID NO: 165676 - DNA, 75 bp, synthetic construct
  source 1..75: mol_type = other DNA
acctgatgccacctttgtgactcagcgcgtctggtttggtgataagagcgaagtgaatctcggggcaggtgaagc

SEQ ID NO: 165677 - DNA, 75 bp, synthetic construct
  source 1..75: mol_type = other DNA
tggggaatgcgcagcaaaaactgcaacaggtacagatgctgccggtgtttattggtatcgggcttggcgtattgt

SEQ ID NO: 165678 - DNA, 75 bp, synthetic construct
  source 1..75: mol_type = other DNA
ctggcaggctccatgaccgatcctcctgcactggcgtttgctaacaacctgcatgcaaccagcggtgcggcggcg

SEQ ID NO: 165679 - DNA, 75 bp, synthetic construct
  source 1..75: mol_type = other DNA
tctttgaaaccgtgacgccgattaaacctgatgccacttttgtaacccagcgtgtctggtttggtgataagagcg

SEQ ID NO: 165680 - DNA, 75 bp, synthetic construct
  source 1..75: mol_type = other DNA
cgttggggcagttaatctacgggccgatggcagatagcttcgggcgtaagccggtggtgctcggcggtacgctgg

SEQ ID NO: 165681 - DNA, 75 bp, synthetic construct
  source 1..75: mol_type = other DNA
ctggcttcggcaatgatcttcttcctgatcaaagaaaccttgccgccggagcgtcgccagccgtttcacatccgc

SEQ ID NO: 165682 - DNA, 75 bp, synthetic construct
  source 1..75: mol_type = other DNA
attgatgaaccaaaattaaatgaaataattgcgtttgatggtggacaaggctctgttcaacaatgtggttctgat

SEQ ID NO: 165683 - DNA, 75 bp, synthetic construct
  source 1..75: mol_type = other DNA
gtttggcgatatcaaactgacattgctgcaaacctggagtgaagacgacttccgtcgggtgcaggaaaatctgat

SEQ ID NO: 165684 - DNA, 75 bp, synthetic construct
  source 1..75: mol_type = other DNA
ctggcttcggcgatgatcttcttcctgatcaaagaaacgttaccgccggagcgtcgtcagccgtttcacatccgt

SEQ ID NO: 165685 - DNA, 75 bp, synthetic construct
  source 1..75: mol_type = other DNA
agaaaccttaccaccggagcgtcgccagccttttcacattcgtaccactattggtaactttgcggcgctgttccg

SEQ ID NO: 165686 - DNA, 75 bp, synthetic construct
  source 1..75: mol_type = other DNA
tttatctactccaaaattacaccgcacaacgaatggcagttaatcaaaaacaataataccgcggcgtcactggcg

SEQ ID NO: 165687 - DNA, 75 bp, synthetic construct
  source 1..75: mol_type = other DNA
taccatcaagatgggaaggtatgccattagcaatcttagaagctcaggcgactggccttccttgtattgtctctg

SEQ ID NO: 165688 - DNA, 75 bp, synthetic construct
  source 1..75: mol_type = other DNA
gcggtaatcgaatgtgccgatgctgcgcacggtctgggcgggatgatcgtcagcgatggtggctgcaccacaccg

SEQ ID NO: 165689 - DNA, 75 bp, synthetic construct
  source 1..75: mol_type = other DNA
aaggataagatgttctctaatggaaaagtaacatacggtgaaggtgaattattttggcctgaaatgccaactgtt

SEQ ID NO: 165690 - DNA, 75 bp, synthetic construct
  source 1..75: mol_type = other DNA
cggtgctgaactgcctgtacatggcgctggagatctgggactggctggagaagcattttcctgtttttaaggcgt

SEQ ID NO: 165691 - DNA, 75 bp, synthetic construct
  source 1..75: mol_type = other DNA
gttcaggcattggcgaattatacggtgcagtttgccgataaccgccagtatgttgttggcgcgacgctaccggtg

SEQ ID NO: 165692 - DNA, 75 bp, synthetic construct
  source 1..75: mol_type = other DNA
tgcaatacagcccttccagcaccaactcccagccgtggcattttatcgttgccagcactgaagaaggcaaagcgc

SEQ ID NO: 165693 - DNA, 75 bp, synthetic construct
  source 1..75: mol_type = other DNA
ttacgtgttcaacgaacgtaaaatacttgatgcctcgcacgtcgtggtgttctgcgcgaaaaccgcaatggacga

SEQ ID NO: 165694 - DNA, 75 bp, synthetic construct
  source 1..75: mol_type = other DNA
ttatgtgttcaacgaacgtaaaatacttgatgcctcgcacgtcgtggtgttctgtgcaaaaaccgcgatggacga

SEQ ID NO: 165695 - DNA, 75 bp, synthetic construct
  source 1..75: mol_type = other DNA
gcgggataccagcgcgtgttgatggtcgattttgatggctttctacctgagttctatcatccgcagctcccagca

SEQ ID NO: 165696 - DNA, 75 bp, synthetic construct
  source 1..75: mol_type = other DNA
gaaatgccgacctggccgtacgccgtcgcgctggtgattgaagctggcgatgactggcaatgtgaaacgcagtca

SEQ ID NO: 165697 - DNA, 75 bp, synthetic construct
  source 1..75: mol_type = other DNA
atgcctcgcacgtcgtggtgttctgtgcaaaaaccgcgatggacgatgcctggctgaagctggttgttgaccagg

SEQ ID NO: 165698 - DNA, 75 bp, synthetic construct
  source 1..75: mol_type = other DNA
taaatcgccggacaacccgacgctgaccctacctggcacgccggacggcaagcagaatttccaggttgcgcgttc

SEQ ID NO: 165699 - DNA, 75 bp, synthetic construct
  source 1..75: mol_type = other DNA
tatggaacggtttcagttgttcttcgaagctgctttgtttgcagtagctgaatggcagatacaggttgaggcaga

SEQ ID NO: 165700 - DNA, 75 bp, synthetic construct
  source 1..75: mol_type = other DNA
atgattcgggttgtgctggtggatgaccatgtggtggtgcgctctggtttcgcacagttactctctctggaagac

SEQ ID NO: 165701 - DNA, 75 bp, synthetic construct
  source 1..75: mol_type = other DNA
cgctgagcttaccgctgagcttaacatgcgtaaaaaacagtacaactactatcgcgaccagttgctgagttttaa

SEQ ID NO: 165702 - DNA, 75 bp, synthetic construct
  source 1..75: mol_type = other DNA
gtggggcatcccccaggccaattgttaattatcttactgaacaaggaaatggtatcccatggattaaaatcggag

SEQ ID NO: 165703 - DNA, 75 bp, synthetic construct
  source 1..75: mol_type = other DNA
atgtgttctttatgggttttcataatgaacctataaatgaaatgcacaaaatgaatattatagtttgtccttcag

SEQ ID NO: 165704 - DNA, 75 bp, synthetic construct
  source 1..75: mol_type = other DNA
aacacatcaaaaccttgttctcttcgcgctactggcggcgcacggcgtttaacagcgtcttctttgtctgcctcg

SEQ ID NO: 165705 - DNA, 75 bp, synthetic construct
  source 1..75: mol_type = other DNA
tggaccgtaggctatgtgttggcaagtattgccggacatcactttattagcgaaagcccggaggcctggcgctgg

SEQ ID NO: 165706 - DNA, 75 bp, synthetic construct
  source 1..75: mol_type = other DNA
gctattaatttatatgaattaacatcgtttctagatgtggcaagagcattcttgttatctatttttagttatatc

SEQ ID NO: 165707 - DNA, 75 bp, synthetic construct
  source 1..75: mol_type = other DNA
cgcgtctggttcggtgataagagcgaagtgaatctcggcgcaggcgaagggggatcagtgaccatcccacgcggg

SEQ ID NO: 165708 - DNA, 75 bp, synthetic construct
  source 1..75: mol_type = other DNA
aatgtggaagagggcggattctttggtcggatgtgggatttcgtgatgatgaaattccatcagtggttcggcagc

SEQ ID NO: 165709 - DNA, 75 bp, synthetic construct
  source 1..75: mol_type = other DNA
atgacgcaatactcctctttccttcgtggtcttgcagcgggttctgcatttttattcctttttgccccaacggca

SEQ ID NO: 165710 - DNA, 75 bp, synthetic construct
  source 1..75: mol_type = other DNA
cctgaaaaagcagaaacaactgcaaccagtggtacagatgcatataactacttttttgagaaagccaaagaacaa

SEQ ID NO: 165711 - DNA, 75 bp, synthetic construct
  source 1..75: mol_type = other DNA
tttattggcaagtttatagccaatatccttatgacgcgttttaatccggaaaaagtattgattctctattccgtt

SEQ ID NO: 165712 - DNA, 75 bp, synthetic construct
  source 1..75: mol_type = other DNA
tgcctgatgggtatctgaataagacccccttgttccagtttattttgttatcgtgtttattcccgctatggggat

SEQ ID NO: 165713 - DNA, 75 bp, synthetic construct
  source 1..75: mol_type = other DNA
atttagaaatgaggcaaacttgctatttttttaaagataatgatagttacaaattatctcgagatgaacttatta

SEQ ID NO: 165714 - DNA, 75 bp, synthetic construct
  source 1..75: mol_type = other DNA
attccgcctgcgccagtcgccaacgatacgctggttgccgaagtgattgacgctccgcaggcgaacgacccgaca

SEQ ID NO: 165715 - DNA, 75 bp, synthetic construct
  source 1..75: mol_type = other DNA
aaaacgctggtggtgatccgcactgtgccgtcgcaaatgtattacacaccgcagtggtttaaacgcatggaacgc

SEQ ID NO: 165716 - DNA, 75 bp, synthetic construct
  source 1..75: mol_type = other DNA
ctgcccgttgtttgtaccaccagtgataaaccggtagaagcactgggagcagggttactggatgatgaaacggcg

SEQ ID NO: 165717 - DNA, 75 bp, synthetic construct
  source 1..75: mol_type = other DNA
tgtgccgcctggctgtaatggtctgatgacggtgctggactggctgaccaatccgtgggaaccgtacaaacgcgg

SEQ ID NO: 165718 - DNA, 75 bp, synthetic construct
  source 1..75: mol_type = other DNA
tggagtggctattatcgctacacactcaccagtggttctacaagagattcccaagtccaatgtttggaaaatatt

SEQ ID NO: 165719 - DNA, 75 bp, synthetic construct
  source 1..75: mol_type = other DNA
acaattacgacaatatgtgtaatgaaatgaatcactttgcaaagcatgtgatcattactggcggcggttcgaaca

SEQ ID NO: 165720 - DNA, 75 bp, synthetic construct
  source 1..75: mol_type = other DNA
gaaccgtacaaacgcgggattatgatcggttttgattccagcatggattacgcatggatttatcgttcgattctg

SEQ ID NO: 165721 - DNA, 75 bp, synthetic construct
  source 1..75: mol_type = other DNA
ctaaccaaacatactgatgtgatcctgaaaaaatcgtatgaagtgatgcatggggaattggggaatgcggattcg

SEQ ID NO: 165722 - DNA, 75 bp, synthetic construct
  source 1..75: mol_type = other DNA
gaatgcacctctgacgggtacaccgactctcccccgcccgcagccgcactcagcctcacgggcgccgctctccac

SEQ ID NO: 165723 - DNA, 75 bp, synthetic construct
  source 1..75: mol_type = other DNA
tatttagacaatcaatatatatatctattgaccatatgcaaacatattaattgccccaagcatgaggacgtaatt

SEQ ID NO: 165724 - DNA, 75 bp, synthetic construct
  source 1..75: mol_type = other DNA
atgatgcctctgtgtgaaatgacggtaaacgacgcacttgtgccggcacataatagcaagcaccataatagatca

SEQ ID NO: 165725 - DNA, 75 bp, synthetic construct
  source 1..75: mol_type = other DNA
ttattcaaaattgccaaatagctttcaaaaacttgatgatgaattcttttcgttaggagaaggattggagtttta

SEQ ID NO: 165726 - DNA, 75 bp, synthetic construct
  source 1..75: mol_type = other DNA
gaaaatttcgaatttaccagaatccgtcaaagtttcattacttgaggcgctcaaagatattgcttatgcgccaga

SEQ ID NO: 165727 - DNA, 75 bp, synthetic construct
  source 1..75: mol_type = other DNA
tatatcgatacgcaggacgtttatcaccagccgacgcgggtgttttttgttgtgaaaccctcagcgtggggaacc

SEQ ID NO: 165728 - DNA, 75 bp, synthetic construct
  source 1..75: mol_type = other DNA
cagtctcagtccgggtggggaaatatctcttttacgtgtaacagctgcagtggaaaaaggttcgcagcatccgtt

SEQ ID NO: 165729 - DNA, 75 bp, synthetic construct
  source 1..75: mol_type = other DNA
agaatgccgaagcccttgagcgtcttgaaaaagtggacacgctggttgtcgacaaaacaggcacgctcacggaag

SEQ ID NO: 165730 - DNA, 75 bp, synthetic construct
  source 1..75: mol_type = other DNA
actgaacagggcccgtcatctgtcagaaatcaccatgaaaaatatccgacagaatctgttttttgcatttatcta

SEQ ID NO: 165731 - DNA, 75 bp, synthetic construct
  source 1..75: mol_type = other DNA
atgagctggttatgcaggaaaacaggatcgttattgataatcaaaaggccgttgcagatacgttgcggatggaag

SEQ ID NO: 165732 - DNA, 75 bp, synthetic construct
  source 1..75: mol_type = other DNA
ccgcagtcagtgatttcaatgctccgtcggggaaaggtgtttcaggcgatgttgaaggtcaacgggttgttattg

SEQ ID NO: 165733 - DNA, 75 bp, synthetic construct
  source 1..75: mol_type = other DNA
tcaaaaatgctgaatccctggaacgccttgaaaaagtgaacacactggttgtcgataaaaccggcacgctcacgg

SEQ ID NO: 165734 - DNA, 75 bp, synthetic construct
  source 1..75: mol_type = other DNA
ggtcacggatacaccaccgtcgctgatggtgtgcattaacgccaacagtgcgatgaacccggtttttcagggcaa

SEQ ID NO: 165735 - DNA, 75 bp, synthetic construct
  source 1..75: mol_type = other DNA
cgtactggccgattatgtcttctattccgcaaacattgctgtatgaaggttacggtatccgcaaaggcatgtgga

SEQ ID NO: 165736 - DNA, 75 bp, synthetic construct
  source 1..75: mol_type = other DNA
gtctgggggctgcgatcaatacggcggtaggtctggggctatacccggattacacaacggctgtcgataaaatgg

SEQ ID NO: 165737 - DNA, 75 bp, synthetic construct
  source 1..75: mol_type = other DNA
gggtgccgctcgcgtctggttattcccccatgccgatggtgctgtcgataacagcctgatgtgggtgatggcgat

SEQ ID NO: 165738 - DNA, 75 bp, synthetic construct
  source 1..75: mol_type = other DNA
taaagcgttcccggcgaaagccttatggctgacgggggcgatggtggcagtgtctggtgtgattgtcggcgggct

SEQ ID NO: 165739 - DNA, 75 bp, synthetic construct
  source 1..75: mol_type = other DNA
attgccggactttggtatgtgaaatggcaaccctactacggcaaagcgtttaccgccgccgaaacccacagtatc

SEQ ID NO: 165740 - DNA, 75 bp, synthetic construct
  source 1..75: mol_type = other DNA
aacctctccctcttctacacaaatcgatctggctgaaatgattgaagagcaacctgaacaaccgagtttcccctc

SEQ ID NO: 165741 - DNA, 75 bp, synthetic construct
  source 1..75: mol_type = other DNA
caactggaaaaaattaagctggaagacggtattcaccatcatgaatacgtaaaaacggaactgaccagcttcgcc

SEQ ID NO: 165742 - DNA, 75 bp, synthetic construct
  source 1..75: mol_type = other DNA
ttcaatatttctaaaatcaacgcgctggataatgccaaaggggccgctaaatccaaagtcgctaaaatccggcgg

SEQ ID NO: 165743 - DNA, 75 bp, synthetic construct
  source 1..75: mol_type = other DNA
gtttggcaacgtctgccagcggcgctggaaaaagtgggcatgaaagtgaccgacagcacccgttcgcagggtaac

SEQ ID NO: 165744 - DNA, 75 bp, synthetic construct
  source 1..75: mol_type = other DNA
gcagggttatcagcaggcggttacggttaaactgctgaacctggaacaggcgggcaaaccggttgcagacgcggc

SEQ ID NO: 165745 - DNA, 75 bp, synthetic construct
  source 1..75: mol_type = other DNA
gtcttattgaaccgaaaaaagccaatgaaatcgatactcctgaagttcaggccaaaacacgggcagccctgcgct

SEQ ID NO: 165746 - DNA, 75 bp, synthetic construct
  source 1..75: mol_type = other DNA
aaccggacgcagccgccattttttcgtgctagctccaaacctgaccatctatgagaaactcaagatggacttttt

SEQ ID NO: 165747 - DNA, 75 bp, synthetic construct
  source 1..75: mol_type = other DNA
tcccgatcttgatcgctggattgaattgctgcgtcagcagtatcccactgtgaaaggatttgaacgtgccttccc

SEQ ID NO: 165748 - DNA, 75 bp, synthetic construct
  source 1..75: mol_type = other DNA
tgaaagattttaccgcacgttactgcgatgcctggcatgaacagcacaacagttggccgttgagcgaggagcttt

SEQ ID NO: 165749 - DNA, 75 bp, synthetic construct
  source 1..75: mol_type = other DNA
cagttggaaaaaataaagctggaagatggaatccaccatcatgaatatgtgaaaacggaactaaccagcttcgcc

SEQ ID NO: 165750 - DNA, 75 bp, synthetic construct
  source 1..75: mol_type = other DNA
ttcactatgctttgcactggctacgggtgtaggtaaaactcgcttaatgggagcgatgattgcctggctatactt

SEQ ID NO: 165751 - DNA, 75 bp, synthetic construct
  source 1..75: mol_type = other DNA
gaaatcaagtcattgataatgatgggttgcaggcttgtgaatctcaagcaatatatcagacaaactccatatcaa

SEQ ID NO: 165752 - DNA, 75 bp, synthetic construct
  source 1..75: mol_type = other DNA
gaacctatatatatattaacagttttcaattatcttacaacaccatgccttgttgtatttttggtggataggttt

SEQ ID NO: 165753 - DNA, 75 bp, synthetic construct
  source 1..75: mol_type = other DNA
gcaaaaactgggcgtcgatgctatctggttgacccccttttatgtctctccccaggtcgataacggatacgacgt

SEQ ID NO: 165754 - DNA, 75 bp, synthetic construct
  source 1..75: mol_type = other DNA
atatctaccagggcgaagagattggcatgactaacccacatttcacgcgcattactgactatcgcgacgtggaga

SEQ ID NO: 165755 - DNA, 75 bp, synthetic construct
  source 1..75: mol_type = other DNA
aatgcattgatgtcaaaactactcatccccatcccctgcccgggcaatccggaaaaatcccttgccatccagtct

SEQ ID NO: 165756 - DNA, 75 bp, synthetic construct
  source 1..75: mol_type = other DNA
ggcggtggggcctttcggtgtagcctctcagtttgatatgccgatagggacattcatgctctggagcatgctggt

SEQ ID NO: 165757 - DNA, 75 bp, synthetic construct
  source 1..75: mol_type = other DNA
aaagccggaagttgttctgcgctggcgcgagcagaccaccgatgattttcgtttttgctttaagtttccggcgac

SEQ ID NO: 165758 - DNA, 75 bp, synthetic construct
  source 1..75: mol_type = other DNA
agcgaactatacggcgattgatcccacctacggcacgctggacgattttgacgaactggtgacgcaggcaaaatc

SEQ ID NO: 165759 - DNA, 75 bp, synthetic construct
  source 1..75: mol_type = other DNA
tgaagtgtccgaagcggacatggtctttggtgaactgcctgaagaagtgcaaaagccaaacccatttgccgtatt

SEQ ID NO: 165760 - DNA, 75 bp, synthetic construct
  source 1..75: mol_type = other DNA
gaacgttgaccaccgcattgtcattcaacacgaaatcattcaccagcaacctcattagcgacattcttgataaag

SEQ ID NO: 165761 - DNA, 75 bp, synthetic construct
  source 1..75: mol_type = other DNA
ttattggcaatcctcgccagtaaatcccgtgacaacagtcgcacacccatgcaatggagcaacggcgataatgcc

SEQ ID NO: 165762 - DNA, 75 bp, synthetic construct
  source 1..75: mol_type = other DNA
cataactacgaagaagcctcagcacaaccctgtgccatgactttacggccttttgaggccgtctggtggttacag

SEQ ID NO: 165763 - DNA, 75 bp, synthetic construct
  source 1..75: mol_type = other DNA
gcataaactgggcgtcgatgctatctggctaacccccttttatgtctctccccaggtcgataacggatacgacgt

SEQ ID NO: 165764 - DNA, 75 bp, synthetic construct
  source 1..75: mol_type = other DNA
ccgacgtgaaaccaatcatcagccagcgcactggtaagaacgataaaacacattggattatttttatgaaggagg

SEQ ID NO: 165765 - DNA, 75 bp, synthetic construct
  source 1..75: mol_type = other DNA
cgccagtggtgatggcaggaatggtcggcagcaatgttggctggaaagtcgctccttatttatccgttcctgctt

SEQ ID NO: 165766 - DNA, 75 bp, synthetic construct
  source 1..75: mol_type = other DNA
ttgccgcagctttttgaagttcgcgcctcgcatgtgctgggaacacttccccgcgaacaggtcagcgaatttctc

SEQ ID NO: 165767 - DNA, 75 bp, synthetic construct
  source 1..75: mol_type = other DNA
tccggctgcggtgttagcagaagtgacgaccgactggcgtgaagaaaatacgccagtggtgatggcaggaatggt

SEQ ID NO: 165768 - DNA, 75 bp, synthetic construct
  source 1..75: mol_type = other DNA
agccaagctttattgcttttaacgaaaacacgttcaaaacaaaagaccacattttcacagcaagatattgcaaaa

SEQ ID NO: 165769 - DNA, 75 bp, synthetic construct
  source 1..75: mol_type = other DNA
acgccagtggtgatggcaggaatggtcggcagcaatgtcggctggaaagttgctccgtatttatctgttcctgcc

SEQ ID NO: 165770 - DNA, 75 bp, synthetic construct
  source 1..75: mol_type = other DNA
tctggtttgttgattggcgcagaggtcgccagtatgcgcgactatgtggccatcaacacgccatcacccttgtcg

SEQ ID NO: 165771 - DNA, 75 bp, synthetic construct
  source 1..75: mol_type = other DNA
tccgcgagcaactcatggtggctaccgctgacttgagcggagcaacgaaaggccagcttgaagcctggctggagc

SEQ ID NO: 165772 - DNA, 75 bp, synthetic construct
  source 1..75: mol_type = other DNA
cgcgggataatccaccaatcccgggaaaacaatcactggcgaagggggcgtcaattcctctggtcagtcaggttg

SEQ ID NO: 165773 - DNA, 75 bp, synthetic construct
  source 1..75: mol_type = other DNA
cgtcgccgctgcagcggcgggtgctgattgtgctggccgccctcggtgcgaaacgtccggggccggtggcgacgc

SEQ ID NO: 165774 - DNA, 75 bp, synthetic construct
  source 1..75: mol_type = other DNA
atggctatcatcaatacgctatatctgatggaaaaaaatatgcctaaacttattttagcctccacctcgccctgg

SEQ ID NO: 165775 - DNA, 75 bp, synthetic construct
  source 1..75: mol_type = other DNA
tgaccctaacacgctggttggtttgccgcttattgcgctctgtcagatgttacgtcgggaagggaaaaacccgct

SEQ ID NO: 165776 - DNA, 75 bp, synthetic construct
  source 1..75: mol_type = other DNA
aacagaagtggagccttttgacgtccatttccgtcacctgagcgaggcggagattgataattacgtgcgtaagga

SEQ ID NO: 165777 - DNA, 75 bp, synthetic construct
  source 1..75: mol_type = other DNA
tcaccgactggatagtgaggctttattatttgtaatgagaacacgttcaaaacaaaaggcggcattttcaaagca

SEQ ID NO: 165778 - DNA, 75 bp, synthetic construct
  source 1..75: mol_type = other DNA
gaaacaatcgctggcgaaggggacgtcaattcctctggtaagtcaggttgagttttcgacatcctcatggcgacg

SEQ ID NO: 165779 - DNA, 75 bp, synthetic construct
  source 1..75: mol_type = other DNA
ccggttgagttttcgacatcatcgtggcggcgggctgttctgtctcttgaagaacatcataaagcctggttgttg

SEQ ID NO: 165780 - DNA, 75 bp, synthetic construct
  source 1..75: mol_type = other DNA
ccagagacgctggaagaagacaatagccacgcggcccagcgcggcgagcatatgatcattaacttccctatcggt

SEQ ID NO: 165781 - DNA, 75 bp, synthetic construct
  source 1..75: mol_type = other DNA
gcgcaccccaggggctaaccgttaaccctggcgaaaacgtgcaaaagctgttgtttggtatgggtatgcactccg

SEQ ID NO: 165782 - DNA, 75 bp, synthetic construct
  source 1..75: mol_type = other DNA
ggaccggcgctgtcgctgccgttatatccgtgcgataacgtcgatttccaggtcaccacctactacagcaacatt

SEQ ID NO: 165783 - DNA, 75 bp, synthetic construct
  source 1..75: mol_type = other DNA
atgaataaccactatttacagtttgtgcgtgagcagctcattatcgctaccgccgatttgagtggggcaacaaaa

SEQ ID NO: 165784 - DNA, 75 bp, synthetic construct
  source 1..75: mol_type = other DNA
cagcttgaagcctggcaggagaatgccatgttcgatacagggcgttacaggagaaaaaaattccggtacagagat

SEQ ID NO: 165785 - DNA, 75 bp, synthetic construct
  source 1..75: mol_type = other DNA
tgcaatgaaacacatttttcaccgactggatagtgaggctttattatttgtaatgagaacacgttcaaaacaaaa

SEQ ID NO: 165786 - DNA, 75 bp, synthetic construct
  source 1..75: mol_type = other DNA
tgaataccgggaactggcatcactggtgggagtgacatcaaaaaactggtctgagacattcactgaacgctgggt

SEQ ID NO: 165787 - DNA, 75 bp, synthetic construct
  source 1..75: mol_type = other DNA
tggctggcggcacaggatgtgaaggctgaattggctgggcgtgatgtctatcaatatggtgatctggctgcgctg

SEQ ID NO: 165788 - DNA, 75 bp, synthetic construct
  source 1..75: mol_type = other DNA
ctggcggcgaaaggtaaatttattcccggtgaagaagggttctcaaccgatacaagtaaaatttgtcgccactga

SEQ ID NO: 165789 - DNA, 75 bp, synthetic construct
  source 1..75: mol_type = other DNA
gctattacctttctgaagaacgctatattactcgtttacgtaaagaacttaatttggcgctttacagtcgtttcc

SEQ ID NO: 165790 - DNA, 75 bp, synthetic construct
  source 1..75: mol_type = other DNA
tccggcaattcgtcgtctgcaacaaaagacccaggtttttccactggagcgcaatgccgccgtgcgcacgcgtct

SEQ ID NO: 165791 - DNA, 75 bp, synthetic construct
  source 1..75: mol_type = other DNA
cgttatcagactttactgaactggtagaaaaagaacgggtgaaacgtttccctattgaatcgcgcttactccaca

SEQ ID NO: 165792 - DNA, 75 bp, synthetic construct
  source 1..75: mol_type = other DNA
cggacagcgatcgcttaagcgaagtcgcgcatctgctgaaaggcgatagcaacaatctggttgataaagtgcgtt

SEQ ID NO: 165793 - DNA, 75 bp, synthetic construct
  source 1..75: mol_type = other DNA
gtcgcgcatctgctgaaaggcgatagcaataatctggctgataaagtgcgctcagtactggaacgtacgcgtcag

SEQ ID NO: 165794 - DNA, 75 bp, synthetic construct
  source 1..75: mol_type = other DNA
caacggtagccgaaggtaaggtttctctgattgcaggcgtatctaaggacgtcacagatcgtgtgaaagcagggg

SEQ ID NO: 165795 - DNA, 75 bp, synthetic construct
  source 1..75: mol_type = other DNA
atgaacgatatttatccggtggattttttccctgatttcatcagaaacacaatatatgaagtgcaacagcgcaca

SEQ ID NO: 165796 - DNA, 75 bp, synthetic construct
  source 1..75: mol_type = other DNA
gatcttaccgcatggagaaatgatgaagcaatttttaatattgaaaaaaaagcactgatgtcaaaacttaaatca

SEQ ID NO: 165797 - DNA, 75 bp, synthetic construct
  source 1..75: mol_type = other DNA
tgcatgtgttcccgcagatcatcagaaatgctgtatatgaagcggagcagcagacccaggctccccaagctttga

SEQ ID NO: 165798 - DNA, 75 bp, synthetic construct
  source 1..75: mol_type = other DNA
cacgctatttttccctccttccctgcctttgtattctttcgttttcgtctccggcagccatgctgtctccgggtg

SEQ ID NO: 165799 - DNA, 75 bp, synthetic construct
  source 1..75: mol_type = other DNA
cgttggtcattgtctgtacccgtaaagcggtgcgctgtagtacctcatatcacagcgcaggtattttttatggtt

SEQ ID NO: 165800 - DNA, 75 bp, synthetic construct
  source 1..75: mol_type = other DNA
agggtaaagatgatattgaatgatgcaacttcatctgcgataaaagacgtactttgcagtacttggcgctcagtt

SEQ ID NO: 165801 - DNA, 75 bp, synthetic construct
  source 1..75: mol_type = other DNA
cgccgctggtaagcgctgcagcgttgggtgacagcaacaccggaatgcatttgctgatcggtttacttgctgctt

SEQ ID NO: 165802 - DNA, 75 bp, synthetic construct
  source 1..75: mol_type = other DNA
actggtgcgcctgaagacgttgatctggttggcgtcgcaggcggtaaaagctgagctttttggtggggaaggtta

SEQ ID NO: 165803 - DNA, 75 bp, synthetic construct
  source 1..75: mol_type = other DNA
ttcgtgagcaactcatgattgccactgcggatctcagtgggtcgacaaaaggccagctggaagcctggcaggaga

SEQ ID NO: 165804 - DNA, 75 bp, synthetic construct
  source 1..75: mol_type = other DNA
acggcacgacaacgactgaccgacgtccggcgtctgccgttacgccagacggctgccggtgacgcggtggagctg

SEQ ID NO: 165805 - DNA, 75 bp, synthetic construct
  source 1..75: mol_type = other DNA
cctggctggatcctgaaatgtaaaggctgggaaaccgatcctaacgcctatatttatttcactattcaggagcaa

SEQ ID NO: 165806 - DNA, 75 bp, synthetic construct
  source 1..75: mol_type = other DNA
gggtgacagcaacaccggaatgcatttgctgatcggtttacttgctgctttgctgcatcgcgaaaaaacggggcg

SEQ ID NO: 165807 - DNA, 75 bp, synthetic construct
  source 1..75: mol_type = other DNA
tatggctattgtggccgtgatttttctctgcacactggcgttccagccgatcagcatgaggttgcgcactctgct

SEQ ID NO: 165808 - DNA, 75 bp, synthetic construct
  source 1..75: mol_type = other DNA
tggtgccgattacaacgcaatgatccgtgttgacagtgcatctgaatttaaaggctatgaccatctggaactgaa

SEQ ID NO: 165809 - DNA, 75 bp, synthetic construct
  source 1..75: mol_type = other DNA
actggtccgtgcggcccgtgcaccgaaattttctatgatcacggcgaccatatctggggtggccctccgggaagc

SEQ ID NO: 165810 - DNA, 75 bp, synthetic construct
  source 1..75: mol_type = other DNA
ttggtgtcggctgcattgtcgacagttgtaaacattgcgaagagtgtgaagacgggctggaaaactactgtgatc

SEQ ID NO: 165811 - DNA, 75 bp, synthetic construct
  source 1..75: mol_type = other DNA
cattcaatagtccttttgaagctggtgtacgttcacttgcgattttagttgcggcatttcctgaagcctatgact

SEQ ID NO: 165812 - DNA, 75 bp, synthetic construct
  source 1..75: mol_type = other DNA
ccggaacggtcgctgcaagccaggggttttcacgcatcggaccgtagcgacagcccgaaaccgcgccagcgggtt

SEQ ID NO: 165813 - DNA, 75 bp, synthetic construct
  source 1..75: mol_type = other DNA
gtgtcaaacattgttcatctatctgataaaaaacaaaaaaacaaaccagttgatatttcttttgatgattacaca

SEQ ID NO: 165814 - DNA, 75 bp, synthetic construct
  source 1..75: mol_type = other DNA
aatcgccgggcgataccgtgccagataagcaaccgctggatctgacctggcccgttgttttcagtgtcaccggac

SEQ ID NO: 165815 - DNA, 75 bp, synthetic construct
  source 1..75: mol_type = other DNA
tccagttaacggcagaaggcgttgaattaattgaaatcgcgccgggtgtggagattgagcgcgacattctgccgt

SEQ ID NO: 165816 - DNA, 75 bp, synthetic construct
  source 1..75: mol_type = other DNA
cgtaaaactatcgcctccaatgccatcaccattaacggtgaaaaacagtccgatcctgaatacttctttaaagaa

SEQ ID NO: 165817 - DNA, 75 bp, synthetic construct
  source 1..75: mol_type = other DNA
aattgcaagagcgggggctggtggcccaggtgacggacgaggaagcgttagcagagcgactggcgcaaggcccga

SEQ ID NO: 165818 - DNA, 75 bp, synthetic construct
  source 1..75: mol_type = other DNA
aaaatctcagcaataaacaaaaaaaagaattaattagtaaaatcaaagcgatacttaaatcgaggaatgtagcgt

SEQ ID NO: 165819 - DNA, 75 bp, synthetic construct
  source 1..75: mol_type = other DNA
taaaggcatggggtgagggccagcaagagaaattagatggtgcttataatgttcagaatatcaataagatattta

SEQ ID NO: 165820 - DNA, 75 bp, synthetic construct
  source 1..75: mol_type = other DNA
gacacagcggtgcagtggctgacggataacggttcagcgtataccgcgtatgaaacgcggaggttcgcgagagag

SEQ ID NO: 165821 - DNA, 75 bp, synthetic construct
  source 1..75: mol_type = other DNA
ggcacaagtagaacaggcggccatcgaaacatttattgcgagagcaagaaatccctgtctcggcggatatccatg

SEQ ID NO: 165822 - DNA, 75 bp, synthetic construct
  source 1..75: mol_type = other DNA
tagctacagtggcacagatgaaaccggattccggagcctacccacaatttttgaataccagctttgtagtcaaaa

SEQ ID NO: 165823 - DNA, 75 bp, synthetic construct
  source 1..75: mol_type = other DNA
tgaaaatcaaaggcgaaccggtcgatccggcgaaaacttaccgcatggcgacattaaacttcaatgccaccggcg

SEQ ID NO: 165824 - DNA, 75 bp, synthetic construct
  source 1..75: mol_type = other DNA
gaaattctcttataaagaggtcagaaaactaccatttaagataaccatcaccgggcggatatcggcaagcctgac

SEQ ID NO: 165825 - DNA, 75 bp, synthetic construct
  source 1..75: mol_type = other DNA
ccttgggctacgtggtgaaaaacaatatcgaagactataacgctggtgtcgctaacgatctggataagattgtct

SEQ ID NO: 165826 - DNA, 75 bp, synthetic construct
  source 1..75: mol_type = other DNA
ggaaattcagataagggtacttaaaggactgtcgatgctgagtaagggttggcctggaatttttgctgaagccgc

SEQ ID NO: 165827 - DNA, 75 bp, synthetic construct
  source 1..75: mol_type = other DNA
agagtcattttattcattgtaacactggttgtcattgccttaatcctcatcacattgcttcgctggatacagcat

SEQ ID NO: 165828 - DNA, 75 bp, synthetic construct
  source 1..75: mol_type = other DNA
gccatgctaaccccaaccagccagagcaattcttgcccgagccacaaaccgacgtatttatggcggtggccgaaa

SEQ ID NO: 165829 - DNA, 75 bp, synthetic construct
  source 1..75: mol_type = other DNA
taatttcgttgccgagcgactgctttaagctctccggcacgggggccaaaacctcgatattatatttacaaaaac

SEQ ID NO: 165830 - DNA, 75 bp, synthetic construct
  source 1..75: mol_type = other DNA
agaacacggcacgttggctgatgtgtcaggagatttactcggcagagtgtttgatgtattcctacgcgctaactt

SEQ ID NO: 165831 - DNA, 75 bp, synthetic construct
  source 1..75: mol_type = other DNA
gatagtgcgaccattttgagacgttatcttggacgccagccatatatttctgtcgataactggcagctcgaagta

SEQ ID NO: 165832 - DNA, 75 bp, synthetic construct
  source 1..75: mol_type = other DNA
cgcagtctggttggatccgaagaaaaccagcccgtacaaattctaccagttttggatcaacactgcggatgccga

SEQ ID NO: 165833 - DNA, 75 bp, synthetic construct
  source 1..75: mol_type = other DNA
gtctggtgcatggtgaagaaggtttgcaggcggcaaaacgtattaccgaatgcctgttcagcggttccttgagtg

SEQ ID NO: 165834 - DNA, 75 bp, synthetic construct
  source 1..75: mol_type = other DNA
atagattctgacaaatgtctactaaaatcaatttattataatttatttagtggcgaagattctaataagaaacca

SEQ ID NO: 165835 - DNA, 75 bp, synthetic construct
  source 1..75: mol_type = other DNA
ttggttcctttctcttcagtctggtaggaattattgccctcaatatgggagcctacggagaaaggggaagagtca

SEQ ID NO: 165836 - DNA, 75 bp, synthetic construct
  source 1..75: mol_type = other DNA
gttgttggcaagtcaagggcaaagcattcgcgtgagaatgggcgtatgctttgtgccaaaagcaaacgttgctaa

SEQ ID NO: 165837 - DNA, 75 bp, synthetic construct
  source 1..75: mol_type = other DNA
tgcaatgaaacacatttttcatcggctggatagtgaagctttattgttggtggagggaacacgtttaaaacaaaa

SEQ ID NO: 165838 - DNA, 75 bp, synthetic construct
  source 1..75: mol_type = other DNA
agttctcgacatcatcatggcgacgggcagttctgtctcttgaagaacaccataaagcctggttgctgtggtgtt

SEQ ID NO: 165839 - DNA, 75 bp, synthetic construct
  source 1..75: mol_type = other DNA
atgttaacgaaagatctttcgattaccttttgcggcgtgaagtttcctaacccgttctgcctttcttcttcaccg

SEQ ID NO: 165840 - DNA, 75 bp, synthetic construct
  source 1..75: mol_type = other DNA
tcccgggaaagcaatcgctggcgaaggggacgtcaatacctctggtcagtccggttgagttttcgacatcatcgt

SEQ ID NO: 165841 - DNA, 75 bp, synthetic construct
  source 1..75: mol_type = other DNA
tcaggtcaccataacgcagtgggcatggagcgagtttaagactctgttgggtaccaggaaaattgcaggtaaaac

SEQ ID NO: 165842 - DNA, 75 bp, synthetic construct
  source 1..75: mol_type = other DNA
cttgatacagaatccttgatttgcacagtgaaaatgagagcgcaacaaaaagcgaccttttcgcgacgagatatt

SEQ ID NO: 165843 - DNA, 75 bp, synthetic construct
  source 1..75: mol_type = other DNA
gaagagtttattgccaacacctcacgccacgtcgcaaaagtcaccgttaaactgggggcgaaaaaagatggtcgt

SEQ ID NO: 165844 - DNA, 75 bp, synthetic construct
  source 1..75: mol_type = other DNA
tatgagcgaagagatcatttatgacgccgaaggtcacccgttaacgcgtgatttacgcagttacggcgcaccgaa

SEQ ID NO: 165845 - DNA, 75 bp, synthetic construct
  source 1..75: mol_type = other DNA
tccacgcctccacccaagtaccgtggcacctgcgccgtcaggtagcgcgtctcgttggtatgaaacagcataaag

SEQ ID NO: 165846 - DNA, 75 bp, synthetic construct
  source 1..75: mol_type = other DNA
attgtcgggcagtgaaacgtggttctacgctgccgatgctggcgaagatgacgccgaatatcggtgatatgtgcg

SEQ ID NO: 165847 - DNA, 75 bp, synthetic construct
  source 1..75: mol_type = other DNA
atttctcctgcccgcagatgacctctcatgcgatggggagcgatgtcgggcaaagtccggaactggtagaaaaat

SEQ ID NO: 165848 - DNA, 75 bp, synthetic construct
  source 1..75: mol_type = other DNA
tcggcggtattgaaacctgggaagatgcggcggagtttttattgctcggtgcagcgacgttgcaggtgaccaccg

SEQ ID NO: 165849 - DNA, 75 bp, synthetic construct
  source 1..75: mol_type = other DNA
agtccatcctctgatgaagtctggttaccagcacgccatctgttttcggatgcggctaacttctacgctactggc

SEQ ID NO: 165850 - DNA, 75 bp, synthetic construct
  source 1..75: mol_type = other DNA
cagacagtaacggacagcatcattgcagccctggaaagcggcgttaagccgtgggtgtgtccgtgggttcgcaac

SEQ ID NO: 165851 - DNA, 75 bp, synthetic construct
  source 1..75: mol_type = other DNA
cgcggtgctgtcgcttgaagaccaccagaaagcatggcttctgtggaactacagcgagaatatccgcttcgagta

SEQ ID NO: 165852 - DNA, 75 bp, synthetic construct
  source 1..75: mol_type = other DNA
ccagcactatgttccggttagccggtagtaaaagccaggtctacgttgagttttataaaccatccgaacagttgg

SEQ ID NO: 165853 - DNA, 75 bp, synthetic construct
  source 1..75: mol_type = other DNA
aagagctgatcgccgaactgggaagcgcgttcctgatggctgatctgggcgtggcgggagaggttcagcatgaaa

SEQ ID NO: 165854 - DNA, 75 bp, synthetic construct
  source 1..75: mol_type = other DNA
tcattaccccggtctataaaattgatcccctgaaacccgtaacggtaaaaaaaccggataagatcactgttgttt

SEQ ID NO: 165855 - DNA, 75 bp, synthetic construct
  source 1..75: mol_type = other DNA
atcggaattaaacccgataactggagccataactattctggctactggcgggctatgggggaaattttccaagga

SEQ ID NO: 165856 - DNA, 75 bp, synthetic construct
  source 1..75: mol_type = other DNA
cagaaagcgtggttgctgtggagttacagtgaaaacatcagctttgaataccaggtggcgatcacccagtgggcg

SEQ ID NO: 165857 - DNA, 75 bp, synthetic construct
  source 1..75: mol_type = other DNA
cgcagacctcagcggggcgacgaaagggcagctggtagctttcgccgagaacgcgcaattcaccgcgacggcgcg

SEQ ID NO: 165858 - DNA, 75 bp, synthetic construct
  source 1..75: mol_type = other DNA
tacgccagcagctcatcgttgcgactgctgatctgagcggggcgaccaaagggcagttgatggcctggctggaga

SEQ ID NO: 165859 - DNA, 75 bp, synthetic construct
  source 1..75: mol_type = other DNA
gttggtgtagcaaagtccacatggacagaaacctacctccctcattggctggcgctgcgcagcagttttgtgaag

SEQ ID NO: 165860 - DNA, 75 bp, synthetic construct
  source 1..75: mol_type = other DNA
ttcgccagcagctgatagtggccaccgccgatctgagtggtgcgacgaaagggcaactggtagctcttgcagaga

SEQ ID NO: 165861 - DNA, 75 bp, synthetic construct
  source 1..75: mol_type = other DNA
atattgatcagttaatagaactggttggtgggcgcggcaatatcgcaacggtaagtcactgtattacccgcctgc

SEQ ID NO: 165862 - DNA, 75 bp, synthetic construct
  source 1..75: mol_type = other DNA
gctggcaatggctatcgccatcatcatcccgattgtactcacctcgtttatctatcagcggaaataccgcctggg

SEQ ID NO: 165863 - DNA, 75 bp, synthetic construct
  source 1..75: mol_type = other DNA
gcgctgggcgttattgaaactcgccttaaacgcatcgtgccggattacctctatctggtggtggtgcccgtctgt

SEQ ID NO: 165864 - DNA, 75 bp, synthetic construct
  source 1..75: mol_type = other DNA
aaacaccgtggataatcgtccggggtgataaaccagttgtatgcccggttaatcatgcacctcaggcgttcactg

SEQ ID NO: 165865 - DNA, 75 bp, synthetic construct
  source 1..75: mol_type = other DNA
tctggccgaagctaaaaccttttctcagaaagtatcccgaaatcagtgttgaaccgccccgggtttcctggagag

SEQ ID NO: 165866 - DNA, 75 bp, synthetic construct
  source 1..75: mol_type = other DNA
gcgctgattggtccgtttggtcgcatgattggcgatggcgttgcctttgcggttcgtcatctgatgactggcagc

SEQ ID NO: 165867 - DNA, 75 bp, synthetic construct
  source 1..75: mol_type = other DNA
tctttctattctgccggttgaccagggcgttgagcactctgccggagcttcatttgccgctaacccgctctactt

SEQ ID NO: 165868 - DNA, 75 bp, synthetic construct
  source 1..75: mol_type = other DNA
gcaaagacgccgacaaccttttacagcaccgttgtatgactattccttctgaccagctttatctccccggacatg

SEQ ID NO: 165869 - DNA, 75 bp, synthetic construct
  source 1..75: mol_type = other DNA
ctagctaactgctatatgggccgcgcagggttgataaactccggtggagccgcaggtggcgaaactgacctcagc

SEQ ID NO: 165870 - DNA, 75 bp, synthetic construct
  source 1..75: mol_type = other DNA
cgcgcagaggcgttatatgactatttcgtcgaacgctgccgtcagcaagagatgaacacgcaaacaggacgcttc

SEQ ID NO: 165871 - DNA, 75 bp, synthetic construct
  source 1..75: mol_type = other DNA
gatgaacacgcaaacaggacgcttcgctgccgatatgcaggtatcgctggtcaatgatggccccgtgacattctg

SEQ ID NO: 165872 - DNA, 75 bp, synthetic construct
  source 1..75: mol_type = other DNA
aagagggcatcgattaccatgtttccgctgacctgaccggtcaggcgaaccatctggcggcgaccattggcgcgg

SEQ ID NO: 165873 - DNA, 75 bp, synthetic construct
  source 1..75: mol_type = other DNA
gatggcattggtttcctgacgcacgataaagcggggctaaaaagcgcgaaagagctggacggtgcaacggtctgt

SEQ ID NO: 165874 - DNA, 75 bp, synthetic construct
  source 1..75: mol_type = other DNA
tctctggtggtcagcaacaacgtgtggcgctggcgcgtgcgatgattacccgcccggatgtgatcctgtttgatg

SEQ ID NO: 165875 - DNA, 75 bp, synthetic construct
  source 1..75: mol_type = other DNA
cagttaattaaaaagccgcccgtggcacctggtgaacgtgcctgtttccgtctggcagaagacgctattcatttc

SEQ ID NO: 165876 - DNA, 75 bp, synthetic construct
  source 1..75: mol_type = other DNA
tcaacgttgccgattacttcaaggcaaacaatatgaagtacacgccagtgactttcgatcgctctgacgaatccg

SEQ ID NO: 165877 - DNA, 75 bp, synthetic construct
  source 1..75: mol_type = other DNA
tgaatgctgaagagatgggcatcaattcccagaacgtcgatgaaaaagcggctaatccagcaacgcctgatatgg

SEQ ID NO: 165878 - DNA, 75 bp, synthetic construct
  source 1..75: mol_type = other DNA
ggctaatccagcaacgcctgatatggcacatctgctgggtaaagaaggcgattacggcaaggatctgaagctgga

SEQ ID NO: 165879 - DNA, 75 bp, synthetic construct
  source 1..75: mol_type = other DNA
taaatgcagacgatcctgcccatattgcattgcgcccttcggcgaccagtcttgcgcaggtgcctggtaaacatg

SEQ ID NO: 165880 - DNA, 75 bp, synthetic construct
  source 1..75: mol_type = other DNA
cattgataaacaagggcaatggcacgtcagcgatgccagcaattatctgctaaatgcagacgatcctgcccatat

SEQ ID NO: 165881 - DNA, 75 bp, synthetic construct
  source 1..75: mol_type = other DNA
agcgaaagaagtataaagtatagtagaaatagacttgaactatattcagtaagtggagatttattaagagtaatt

SEQ ID NO: 165882 - DNA, 75 bp, synthetic construct
  source 1..75: mol_type = other DNA
atcgacaaaatggcattcatgggcaatctcaccgaggcgtgggggcataatgacgcagggctgtcggtacgtttg

SEQ ID NO: 165883 - DNA, 75 bp, synthetic construct
  source 1..75: mol_type = other DNA
tgaccaaagcgtttggtgattactacgccgcgaaagagatctccttttgtgcagaggagggagaatttgtcacgt

SEQ ID NO: 165884 - DNA, 75 bp, synthetic construct
  source 1..75: mol_type = other DNA
ccagcggtctgggttacaccgacctgatcacgcgtttgattgagctggcactggaacgtcacgctgcggataacg

SEQ ID NO: 165885 - DNA, 75 bp, synthetic construct
  source 1..75: mol_type = other DNA
aaagccctggaacccggatgcaccggatacccccatgaaacgtgccctgcgttcatcaccggcatgtgcgcggct

SEQ ID NO: 165886 - DNA, 75 bp, synthetic construct
  source 1..75: mol_type = other DNA
cattggtctgggaggcgattactcagtaggtcacactttgctggctgaattttctccgcgccgccatcgcggtat

SEQ ID NO: 165887 - DNA, 75 bp, synthetic construct
  source 1..75: mol_type = other DNA
tcttggcagcctggttttggggtggatctccgaccatatcgggcggcaaaaaatcttcaccttcagttttatgct

SEQ ID NO: 165888 - DNA, 75 bp, synthetic construct
  source 1..75: mol_type = other DNA
gaactgttgatacaaatttgaaagtttttgatatatccgagccagttgagtattttaatcgagatataatcacca

SEQ ID NO: 165889 - DNA, 75 bp, synthetic construct
  source 1..75: mol_type = other DNA
gaaccagccagtagaggaatcagcgttgccgatcaggaccaaatgattgcaacactgagagaacttacgagtaaa

SEQ ID NO: 165890 - DNA, 75 bp, synthetic construct
  source 1..75: mol_type = other DNA
ccgctttgcgtcaggatgctgcggctatcagaggcgatttccaaaaagcaatggtatccgttaacgttgaaaagc

SEQ ID NO: 165891 - DNA, 75 bp, synthetic construct
  source 1..75: mol_type = other DNA
cgtctatgtcgcatggtaccggattcctcctgttccataaaaaaacagagaagggaaacaggttttctttcattc

SEQ ID NO: 165892 - DNA, 75 bp, synthetic construct
  source 1..75: mol_type = other DNA
gccgacttccgtgcgctgccgttcgctgacaacactttccctgtggtggtgttcgacccgccacatcttgaacgt

SEQ ID NO: 165893 - DNA, 75 bp, synthetic construct
  source 1..75: mol_type = other DNA
ctggtttgataagaatgacgaacgggcgatatttagcgatatcagaaaagaagagcactcattgtgtgatggacg

SEQ ID NO: 165894 - DNA, 75 bp, synthetic construct
  source 1..75: mol_type = other DNA
gttatgggctccagaaactaaagctctcccgctggttgcggcgggaaatgtcggaggtgcgaatgaacattctgt

SEQ ID NO: 165895 - DNA, 75 bp, synthetic construct
  source 1..75: mol_type = other DNA
cgaaaacccggaggcctggcgctggctgctggcatcggcagctctgcccgcgttgttgattacgttattacgctg

SEQ ID NO: 165896 - DNA, 75 bp, synthetic construct
  source 1..75: mol_type = other DNA
gcagcgaagggcagaatgggcaaacgccatttttgctggcggaaatgctgggctggccctgcttcacccaggtgg

SEQ ID NO: 165897 - DNA, 75 bp, synthetic construct
  source 1..75: mol_type = other DNA
tggcacctgaagggaaggtaagagtctggctgggagatcgcggtaatccggtggtacctcagttggatgctaaaa

SEQ ID NO: 165898 - DNA, 75 bp, synthetic construct
  source 1..75: mol_type = other DNA
ggggttataaaaaattaccctatgatgaatggaaatttctctttatttatccaaaggctctgcctgcgctggcca

SEQ ID NO: 165899 - DNA, 75 bp, synthetic construct
  source 1..75: mol_type = other DNA
caccgacaacaatgttgctaacgtggcaaaagtaaaaacggaatcggccacaacgggtgacctggtatcagtaga

SEQ ID NO: 165900 - DNA, 75 bp, synthetic construct
  source 1..75: mol_type = other DNA
acaaacgcgctggcggaatggggctgattcttggacgtaaggcgttcaagaaatcgatggctgacggcgtgaaac

SEQ ID NO: 165901 - DNA, 75 bp, synthetic construct
  source 1..75: mol_type = other DNA
cgcattccatttctcgtcaaacttaatcacaacgagacgctaagttacccgaacacctacgatcaaacgctgtat

SEQ ID NO: 165902 - DNA, 75 bp, synthetic construct
  source 1..75: mol_type = other DNA
cgcgtcagcgtcgcatcaggcactgaatgccggatgcggcgtgaacgccttatccggcctacggttctgtgctcg

SEQ ID NO: 165903 - DNA, 75 bp, synthetic construct
  source 1..75: mol_type = other DNA
cttttgcatccgctgtcgttaacctttcctgccgggaaagtgaccggtctgattggtcacaatggttctggtaaa

SEQ ID NO: 165904 - DNA, 75 bp, synthetic construct
  source 1..75: mol_type = other DNA
tttatgttatgcccggaacccattgcaaatgggtgcaggccgatagccagcaaatcaacgattttcgcaccgtaa

SEQ ID NO: 165905 - DNA, 75 bp, synthetic construct
  source 1..75: mol_type = other DNA
tgacattcctgttaatgatgttcgctttctgtgttcagggggaaccgcctttaccacaggatgtgcagcattttc

SEQ ID NO: 165906 - DNA, 75 bp, synthetic construct
  source 1..75: mol_type = other DNA
ggatggcaatgccgggtcagttgacggtgaaaacggcgtgcagaatgcttccgacagcaccgacagcaccgacag

SEQ ID NO: 165907 - DNA, 75 bp, synthetic construct
  source 1..75: mol_type = other DNA
gtcgttacccgtggcatggcgcactagggcgctttggtgcggcagatcgcgaaaaagttgaggaagctatctcgc

SEQ ID NO: 165908 - DNA, 75 bp, synthetic construct
  source 1..75: mol_type = other DNA
ttgatgtgctggcgctggtgcaccgtttaagtcaggaacgtggcctgacggtcattgccgtgctgcacgatatca

SEQ ID NO: 165909 - DNA, 75 bp, synthetic construct
  source 1..75: mol_type = other DNA
cgaatctgcttttgcagcgtgccggtgagacacggcaggtgaccggcagtggcggggaagatgaagtactgatga

SEQ ID NO: 165910 - DNA, 75 bp, synthetic construct
  source 1..75: mol_type = other DNA
tcagtttctgtgcagtgctgacacggaaccggggctgcagcatttgccggatgaggacgcccgggccggtacgga

SEQ ID NO: 165911 - DNA, 75 bp, synthetic construct
  source 1..75: mol_type = other DNA
atcctgttctgaacgatgcagaccgtctgtggctgacgcagagcttccgctttggcccgtcagtggcccggatgg

SEQ ID NO: 165912 - DNA, 75 bp, synthetic construct
  source 1..75: mol_type = other DNA
agccgctgacattcgattgccacgccatgtacctgccagaggttcgtggcttcagcaaggaaatcgggctggcgt

SEQ ID NO: 165913 - DNA, 75 bp, synthetic construct
  source 1..75: mol_type = other DNA
tctggcgatacattctgactaacaccaccgttcagtgcgtcacatcgttcgccgcacgcaaattccgccacgggc

SEQ ID NO: 165914 - DNA, 75 bp, synthetic construct
  source 1..75: mol_type = other DNA
tttaaccgggtcaccgatgaaaaaggacgttatctgccttttgatgagttgcagtaccgcatcaaaaaaggagaa

SEQ ID NO: 165915 - DNA, 75 bp, synthetic construct
  source 1..75: mol_type = other DNA
cggatgcacagtgacagactgcggaaggactaccggggttttgacgagtaccgtcatattgcgaaggtgacgaag

SEQ ID NO: 165916 - DNA, 75 bp, synthetic construct
  source 1..75: mol_type = other DNA
atgggcagttgatattccaatcaacatcacgggaacgattataattccgccatgccagataaataacagtaatcc

SEQ ID NO: 165917 - DNA, 75 bp, synthetic construct
  source 1..75: mol_type = other DNA
acccgctgcgcgcctttgaggccgccgcccgtcatctcagttttacccgcgcggcgattgagctgaatgtcaccc

SEQ ID NO: 165918 - DNA, 75 bp, synthetic construct
  source 1..75: mol_type = other DNA
gagggacgaaactaacctgttgtacgttgcggtcacccgtgcccgtaaaaccctggtactgaacagtctgatgcg

SEQ ID NO: 165919 - DNA, 75 bp, synthetic construct
  source 1..75: mol_type = other DNA
gactactggagctgtgttttccgttacccaaaaaactggagctactcagggagcacacagtcacgaacgagcggg

SEQ ID NO: 165920 - DNA, 75 bp, synthetic construct
  source 1..75: mol_type = other DNA
cggagcggatgcacagtgacagactgcgaaaggactaccggagttttgacgagtaccgtcatattgcgaaggtga

SEQ ID NO: 165921 - DNA, 75 bp, synthetic construct
  source 1..75: mol_type = other DNA
gataagaataccaaaacaattctgttcgcaatgaatgaacacatgcgcgagtctggagaggcaataagtgaattc

SEQ ID NO: 165922 - DNA, 75 bp, synthetic construct
  source 1..75: mol_type = other DNA
ctaacagacgcaggcaggcacttcatggagcgtgtcacggcgggtgtcgatcaactcgatcacgcagtgaagacc

SEQ ID NO: 165923 - DNA, 75 bp, synthetic construct
  source 1..75: mol_type = other DNA
aaaacgctgggcgtcagcgttgatatttttgcctctccttcagaaggcgattttcaggtaatgactccaacttat

SEQ ID NO: 165924 - DNA, 75 bp, synthetic construct
  source 1..75: mol_type = other DNA
gatgtgtgccgactgaataatttgcgcagtccggtatcacttttcttactgacgctggcggaatctggtgaacgc

SEQ ID NO: 165925 - DNA, 75 bp, synthetic construct
  source 1..75: mol_type = other DNA
aataggtgattttaatatatcaccatcatccagaagaattgccctgtgctgggaggccagacagagttttgaacc

SEQ ID NO: 165926 - DNA, 75 bp, synthetic construct
  source 1..75: mol_type = other DNA
tcgtgatttttttgttgcgctcaaagaagatctaaaaaaaattcagtgtattgatctacaaacagccccaagccc

SEQ ID NO: 165927 - DNA, 75 bp, synthetic construct
  source 1..75: mol_type = other DNA
actggacagaacgggtgctgagctgacgctggacggtgcgacatttagtgtacaaacaaccttgaataacggtac

SEQ ID NO: 165928 - DNA, 75 bp, synthetic construct
  source 1..75: mol_type = other DNA
cggtccgtaaaccgggcaaactgccgcgtgaaaccatcagtgaaacttacgatctggaatacggcaccgatcagc

SEQ ID NO: 165929 - DNA, 75 bp, synthetic construct
  source 1..75: mol_type = other DNA
tactttaaaggcgtggatgacgtgactttttacagcgccacacgcgaagaactaatcgacttcctgaatcacggg

SEQ ID NO: 165930 - DNA, 75 bp, synthetic construct
  source 1..75: mol_type = other DNA
cttccatgtccagtcctccggtcgcaatgaggttaccggtgcaaacgttctggtcgctatctttagcgaacagga

SEQ ID NO: 165931 - DNA, 75 bp, synthetic construct
  source 1..75: mol_type = other DNA
ttggtgcacctccgggatacgttggttttgatcagggtggtctgctgaccgatgcggtgatcaaacatccgcacg

SEQ ID NO: 165932 - DNA, 75 bp, synthetic construct
  source 1..75: mol_type = other DNA
tcagagtgaccgcgatacgctgagaaacctcggtgatcgcctgaaaatgctggtcttcggtcaggataaagccat

SEQ ID NO: 165933 - DNA, 75 bp, synthetic construct
  source 1..75: mol_type = other DNA
tatagcgggatttttgctatatctgataatcaatttcctcttcactgctttccatcacctgccgcttgatatcct

SEQ ID NO: 165934 - DNA, 75 bp, synthetic construct
  source 1..75: mol_type = other DNA
cataaagcaatacttcccgaatctgaaagtgaacaaggtagatgaacctcagtttgcattggtaaaagcaatggt

SEQ ID NO: 165935 - DNA, 75 bp, synthetic construct
  source 1..75: mol_type = other DNA
cataaaacagtatttccccaatctgaaagtaaataaggtggatgagcctcagtttgcattggtgaaagcaatggt

SEQ ID NO: 165936 - DNA, 75 bp, synthetic construct
  source 1..75: mol_type = other DNA
ttgaaggcgacgactattacagcgtctctgaagaattttttagcaaattaccagcagatctaagagcgccttttg

SEQ ID NO: 165937 - DNA, 75 bp, synthetic construct
  source 1..75: mol_type = other DNA
cggaagtggtcaacgagaatacggacgttatctgctccacctcagtcaggtccatgaagtggtttactgaatttg

SEQ ID NO: 165938 - DNA, 75 bp, synthetic construct
  source 1..75: mol_type = other DNA
aggggaaaatctaatagattacggcttcagaaattttgatgatgtcgctgatcatttaaataaggccctagatga

SEQ ID NO: 165939 - DNA, 75 bp, synthetic construct
  source 1..75: mol_type = other DNA
cttcattactcacatgaagtagactcaataacacttggcgacccaagcagaaaatttaaactgaaaggagattct

SEQ ID NO: 165940 - DNA, 75 bp, synthetic construct
  source 1..75: mol_type = other DNA
atatgctcttctcgatagcctaagtaaacaaggcttattgcaatatacaaaaactcatatgaaagcatttagaat

SEQ ID NO: 165941 - DNA, 75 bp, synthetic construct
  source 1..75: mol_type = other DNA
atgattctgtttgattctgagttttccggtgtggtaggtgagcaatttttatatgctcttctcgatagcctaagt

SEQ ID NO: 165942 - DNA, 75 bp, synthetic construct
  source 1..75: mol_type = other DNA
atttgctattattttatttagtttttttatgttatcatcaatagatggagcattttctcttaagatagaaaaaat

SEQ ID NO: 165943 - DNA, 75 bp, synthetic construct
  source 1..75: mol_type = other DNA
ttttattctgcaattagctacggaaaaataatatcactccctgattatctgaaaaatccagcacattatcataca

SEQ ID NO: 165944 - DNA, 75 bp, synthetic construct
  source 1..75: mol_type = other DNA
gaaaacatttcagactgggaggataatatatggcacattgagcatgaaggtttcaaccctcgcgatcctattaat

SEQ ID NO: 165945 - DNA, 75 bp, synthetic construct
  source 1..75: mol_type = other DNA
agaaaagaatctaatattaaagtctttgtttatatcaaaagttgttacttacggtaagtgttttacagaggcgaa

SEQ ID NO: 165946 - DNA, 75 bp, synthetic construct
  source 1..75: mol_type = other DNA
gtagaacaatatgtggccttacagttgcttgataaagatcttcggaatgttattggttgggagaatataataaaa

SEQ ID NO: 165947 - DNA, 75 bp, synthetic construct
  source 1..75: mol_type = other DNA
atcctctggagattaaaaaggctgaatctgagaaagtcgttatcccaacatttgccgatgcagccaggcgtgtac

SEQ ID NO: 165948 - DNA, 75 bp, synthetic construct
  source 1..75: mol_type = other DNA
gcggttacagtcccgtacggaaaccccggccatgcagcaattcgcccgctggctgctgaatacggcggcggcgta

SEQ ID NO: 165949 - DNA, 75 bp, synthetic construct
  source 1..75: mol_type = other DNA
tggggtgaagtggtcagcaatccattaaaggcgcagcggctcgctgaggaatatcgggaaaggcaggaggcagca

SEQ ID NO: 165950 - DNA, 75 bp, synthetic construct
  source 1..75: mol_type = other DNA
tatcaggcgggtgtcattaaacgtgctttgcaaaactggcagcagcatattgatgaaattatgcaacgaagcgca

SEQ ID NO: 165951 - DNA, 75 bp, synthetic construct
  source 1..75: mol_type = other DNA
aaaaacgtatcgaacaattaaatcaatggataggaaacacaattattaattttttaccatattctctccaaagtt

SEQ ID NO: 165952 - DNA, 75 bp, synthetic construct
  source 1..75: mol_type = other DNA
ctggaaggggcgattaagcttctcaggcgcgcgatgtcggtcaaaattcctgaggattgccccgtactgcctggt

SEQ ID NO: 165953 - DNA, 75 bp, synthetic construct
  source 1..75: mol_type = other DNA
gtagccctgttgttgaaggcctgcgctcgcccgtcaggaatgcgaaggtggtgaccagtacttatcagcagcttg

SEQ ID NO: 165954 - DNA, 75 bp, synthetic construct
  source 1..75: mol_type = other DNA
aagttttctgcgtaaaaagaaagccgtcagtgacattccggggcgagttgccacagcacatggttttcgctcaac

SEQ ID NO: 165955 - DNA, 75 bp, synthetic construct
  source 1..75: mol_type = other DNA
ttcctcaattgggagcaaaaacgctgaatgagattacggctgcggacgtggcagagacactgcgtccaatctggt

SEQ ID NO: 165956 - DNA, 75 bp, synthetic construct
  source 1..75: mol_type = other DNA
aaagtcaaaacttctgattgaaatggcgacgggattaggcaaaacctataccgttgcccacttaattaagcgctt

SEQ ID NO: 165957 - DNA, 75 bp, synthetic construct
  source 1..75: mol_type = other DNA
aatcgtggcacagataaaactgctgacgccgcaaaaactggccgatttcttccatcaggcggtggtcgagccgca

SEQ ID NO: 165958 - DNA, 75 bp, synthetic construct
  source 1..75: mol_type = other DNA
ggctggtcgcaagctatggcctgcagagcatcggggaactgatgatctctggtctggtctggcaatggttgcaca

SEQ ID NO: 165959 - DNA, 75 bp, synthetic construct
  source 1..75: mol_type = other DNA
cactatcgttaacttcgccttctgccaacgctgggttaaacagtacggttcaaaacctgactttgaaccagtcaa

SEQ ID NO: 165960 - DNA, 75 bp, synthetic construct
  source 1..75: mol_type = other DNA
aactcgcagaccagttcttccaaaagcatattagtccagatgttgacatcaaacagctacgagatgacatcccca

SEQ ID NO: 165961 - DNA, 75 bp, synthetic construct
  source 1..75: mol_type = other DNA
tgtgccggataacgttaccgacccgctgatgtcactggaagtctatggtcgcgtattcttgcagattggtgtcgc

SEQ ID NO: 165962 - DNA, 75 bp, synthetic construct
  source 1..75: mol_type = other DNA
ttctttgcgattcgtaacgttgaacacaccattctgggtctggccgtagaacctgagcagtatcaggcactgaac

SEQ ID NO: 165963 - DNA, 75 bp, synthetic construct
  source 1..75: mol_type = other DNA
tactgggtactaaacgcgtcattatgctcggcgcaattgtactggcgatcggctatgcactggttgcctggtctg

SEQ ID NO: 165964 - DNA, 75 bp, synthetic construct
  source 1..75: mol_type = other DNA
gttccaccatatcgtgctggatgagtggtccgccaatctgctgatggatgagcttgctctggcgatgaggagtcg

SEQ ID NO: 165965 - DNA, 75 bp, synthetic construct
  source 1..75: mol_type = other DNA
aacgatctgttcagttatccgaccgcagcgcaactggcggcgtgtgcgaaaatggatgaggcacaggccagcagc

SEQ ID NO: 165966 - DNA, 75 bp, synthetic construct
  source 1..75: mol_type = other DNA
gagcatcaacagcagcagtatggtgaaagccagcattgctttgcctggaagcttgacaaccgcgtcgatagcggg

SEQ ID NO: 165967 - DNA, 75 bp, synthetic construct
  source 1..75: mol_type = other DNA
actattcagaacggtattgttgatgacagccgtgtgggtaaattctccaatatcggggatgaacctgcaggttta

SEQ ID NO: 165968 - DNA, 75 bp, synthetic construct
  source 1..75: mol_type = other DNA
tccggttcacacggcggttgggtggaatgcaaagtcgaacgcgaggtggcaaaggggctttatcagctggcgaaa

SEQ ID NO: 165969 - DNA, 75 bp, synthetic construct
  source 1..75: mol_type = other DNA
ttcagatccacgctaaaaacaagctgaacggtgcgttccgtcttgccgacgaccgggaagtgcgtttccgtcagg

SEQ ID NO: 165970 - DNA, 75 bp, synthetic construct
  source 1..75: mol_type = other DNA
tcgtttaattgctgaattttacccggatgacagcggcctgttctccccactgttactgaatgtggtaaaactgaa

SEQ ID NO: 165971 - DNA, 75 bp, synthetic construct
  source 1..75: mol_type = other DNA
gccgctctccattcaggttcatccgaataaacgcaattctgaaatcggttttgccaaagaaaatgccgccggcat

SEQ ID NO: 165972 - DNA, 75 bp, synthetic construct
  source 1..75: mol_type = other DNA
gtagttgcaacaagtaagttagctcacatacctaaacctcctaagggttttgggcaaagtagctttagacagatc

SEQ ID NO: 165973 - DNA, 75 bp, synthetic construct
  source 1..75: mol_type = other DNA
tcaggcggcggacgtactggccgggatggggctgaccatctctgacctggttcgcataaccctcacaaaggtcgc

SEQ ID NO: 165974 - DNA, 75 bp, synthetic construct
  source 1..75: mol_type = other DNA
gtttattgccgccaacgagacaccggtgacagtgaaaggccacggacgtttagcccgtgtttacaacaagctgta

SEQ ID NO: 165975 - DNA, 75 bp, synthetic construct
  source 1..75: mol_type = other DNA
tgttcaaagtattatgcgcagcccagccgctctccattcaggttcatccgaacaaacgcaattctgaaatcggtt

SEQ ID NO: 165976 - DNA, 75 bp, synthetic construct
  source 1..75: mol_type = other DNA
cacgtccggctattcgtgtctttgcaacctatgccaagtgggatgagaaatggggttatgactacacgggtaact

SEQ ID NO: 165977 - DNA, 75 bp, synthetic construct
  source 1..75: mol_type = other DNA
atgcgtgttcctaacgagcttactgctaataccatcgctaacagtgagaaaggcgtagacgttcatacagctaaa

SEQ ID NO: 165978 - DNA, 75 bp, synthetic construct
  source 1..75: mol_type = other DNA
agcaacatattgaaaatggtgggcaagcagagtactaaagatattgatggctggataaaagatgagcggatagta

SEQ ID NO: 165979 - DNA, 75 bp, synthetic construct
  source 1..75: mol_type = other DNA
ggtgctcaaagtaaataccgtcttggcaacgaatgtgaaacttatgctgaattaaaattgggtcaggaagtgtgg

SEQ ID NO: 165980 - DNA, 75 bp, synthetic construct
  source 1..75: mol_type = other DNA
tggcggttgccgtcgcagcgggcgtaatgtctgctcaggcaatggctgttgatttccacggctatgcacgttccg

SEQ ID NO: 165981 - DNA, 75 bp, synthetic construct
  source 1..75: mol_type = other DNA
agctgttccggcgaatttcgaaggcggtagcttcggtcgcggtgatagcgatgagtggacattcggtgcccagat

SEQ ID NO: 165982 - DNA, 75 bp, synthetic construct
  source 1..75: mol_type = other DNA
ggccgggattatttgacggtaacacgccccggcttctggcttgcggtatccgggacgtgttactggaagacgtgg

SEQ ID NO: 165983 - DNA, 75 bp, synthetic construct
  source 1..75: mol_type = other DNA
atgttagatgagatgaatgattttcgtctgacaccgacaggaacgctcaaaatcaatgccgcccgggtagctgca

SEQ ID NO: 165984 - DNA, 75 bp, synthetic construct
  source 1..75: mol_type = other DNA
tcttgcctgtggtatccgggaggttttactggatgaggtgtttcagcggaatatcccgctctctcataaaaaact

SEQ ID NO: 165985 - DNA, 75 bp, synthetic construct
  source 1..75: mol_type = other DNA
cgtaacgatctgaaaccgttgttgtctgtagccaaaaagtcccgcaggtatgcctggctcaaagagtttgattca

SEQ ID NO: 165986 - DNA, 75 bp, synthetic construct
  source 1..75: mol_type = other DNA
tgcctggcttaaagaatttgattcaatggcattgcaacaggcggtgattaatcttgatgtggcgttttccaactt

SEQ ID NO: 165987 - DNA, 75 bp, synthetic construct
  source 1..75: mol_type = other DNA
aaaattgcgaatccccgccatctcatcaatgccagccgtaatctgcgacgcaaacaaaaagcgctatcccgcaag

SEQ ID NO: 165988 - DNA, 75 bp, synthetic construct
  source 1..75: mol_type = other DNA
gccggtgcctgccggtatgacacggaagggtatgtgacggagcatatttctcaggaggaggaagcgtatgcggca

SEQ ID NO: 165989 - DNA, 75 bp, synthetic construct
  source 1..75: mol_type = other DNA
gcagagctggcggcaaaaaaagcgcaggccagacaggcgctgtccatttatctgaacctgccctcactggatgag

SEQ ID NO: 165990 - DNA, 75 bp, synthetic construct
  source 1..75: mol_type = other DNA
tcggcccaccagtgaaattatgtgtagcagcaacgccagagtactttgcaagatatggcaaaccccgccatcctc

SEQ ID NO: 165991 - DNA, 75 bp, synthetic construct
  source 1..75: mol_type = other DNA
acagaacatatcacacaggaagaagaacagtatgcgcaggcgcgtctggaaaaggtgcgcagacagaaccggatc

SEQ ID NO: 165992 - DNA, 75 bp, synthetic construct
  source 1..75: mol_type = other DNA
gccgtgaacaccctgaaaccctggtggccgggattatttgacggtgacacaccccgacttctggcctgcggtatc

SEQ ID NO: 165993 - DNA, 75 bp, synthetic construct
  source 1..75: mol_type = other DNA
ccggtatgacacgcaagggtatgttacggaacatatttctcaggaggaggaagcttatgcggcagagcgtctggc

SEQ ID NO: 165994 - DNA, 75 bp, synthetic construct
  source 1..75: mol_type = other DNA
aagcgtatgcggcagagcgtctggcgaaaattcgccgccagaaccggataaaggcagaacttcaggccgtactta

SEQ ID NO: 165995 - DNA, 75 bp, synthetic construct
  source 1..75: mol_type = other DNA
gctgagctggcggcaaaaaaagcgcaggccagacaggcactgtccatttatctgaacctgcccacactggatgag

SEQ ID NO: 165996 - DNA, 75 bp, synthetic construct
  source 1..75: mol_type = other DNA
aagcgtatgcggcagagcgtctggcaaaaatccgccgtcagaaccggataaaggcagaacttcaggccgtgcttg

SEQ ID NO: 165997 - DNA, 75 bp, synthetic construct
  source 1..75: mol_type = other DNA
tggatggcttaaagaatatgattctattgcgttgcagcaggcggtaattaacctcgacgtggctttttctaactt

SEQ ID NO: 165998 - DNA, 75 bp, synthetic construct
  source 1..75: mol_type = other DNA
cagttcgaaaacctgccactgctgcggtcacaaaatgtcggagatgccattacataagcgcatctggcagtgtcc

SEQ ID NO: 165999 - DNA, 75 bp, synthetic construct
  source 1..75: mol_type = other DNA
cgtaacgatctgaaaccgctgcttgcagtggcaaagaaatcccgcaggtatggatggcttaaagaatatgattct

SEQ ID NO: 166000 - DNA, 75 bp, synthetic construct
  source 1..75: mol_type = other DNA
ttgagtcaccgcagtggtggttaaaccgcctgcgccgtatccatgcccggtggcgtgagcatttgatgatcgcag

SEQ ID NO: 166001 - DNA, 75 bp, synthetic construct
  source 1..75: mol_type = other DNA
gctggcggagaaagcggctcgggaggcagagctggcggcaaaaaaagcgcaggccagacaggcgctgtccattta

SEQ ID NO: 166002 - DNA, 75 bp, synthetic construct
  source 1..75: mol_type = other DNA
tagcttcatcacaaggctggagtacaaggcggcggaaaaaggcgctcacctggtaaaactcgcccagtggtttgc

SEQ ID NO: 166003 - DNA, 75 bp, synthetic construct
  source 1..75: mol_type = other DNA
agcatattgcgttcagtgaactggtagcggaagacgaaaagccggaacgcagtaagctgctgcgtcgccgtctgg

SEQ ID NO: 166004 - DNA, 75 bp, synthetic construct
  source 1..75: mol_type = other DNA
atgaccacggcaacccgtggccgtcgcgccccttctccacctccaccgtatccgggtagcactgacaatgctatc

SEQ ID NO: 166005 - DNA, 75 bp, synthetic construct
  source 1..75: mol_type = other DNA
ataagctgccgtcacaggtgatggcagcgaagaaaaagacaagcgaccttgtgaacaggatgaaggcagcgttta

SEQ ID NO: 166006 - DNA, 75 bp, synthetic construct
  source 1..75: mol_type = other DNA
aaccacgtcgaagcagcagaactgctgcgtgtgactgctgaagcaatccagagcgaagcgcaggagatccactaa

SEQ ID NO: 166007 - DNA, 75 bp, synthetic construct
  source 1..75: mol_type = other DNA
ccttaaccagatgctgactgatgcgcgcatggaagaacgccgtgcacgtgctgcggcaatggcagcccgtcttga

SEQ ID NO: 166008 - DNA, 75 bp, synthetic construct
  source 1..75: mol_type = other DNA
tagccttgcgtgtcatatcacatcccgccagctaaaccacgtcgaagcagcagaactgctgcgtgtgactgctga

SEQ ID NO: 166009 - DNA, 75 bp, synthetic construct
  source 1..75: mol_type = other DNA
tagcctggcgtatcatatcacatcccgccagctaaaccacgtcgaagcagcagaactgctgcgtgtgaccgctga

SEQ ID NO: 166010 - DNA, 75 bp, synthetic construct
  source 1..75: mol_type = other DNA
cgtctggaagaacgccgggcaagagctgaagcaatggcagctcgccttgatagccttgcgtgccatatcacatcc

SEQ ID NO: 166011 - DNA, 75 bp, synthetic construct
  source 1..75: mol_type = other DNA
cgccagctaaaccacgtcgaagcggcagaactgctgcgtgtgaccgctgaagcaatccagaacgaagcgcaggag

SEQ ID NO: 166012 - DNA, 75 bp, synthetic construct
  source 1..75: mol_type = other DNA
atgtaccaggatcttattcgtaacgaattgaacgaagcggcggaaacgctggctaactttttaaaagatgacgcc

SEQ ID NO: 166013 - DNA, 75 bp, synthetic construct
  source 1..75: mol_type = other DNA
agcacgatgaagcaggcgaactgctggaggttatcaagcacaccactaataacgtgacaccgccgccagaagcct

SEQ ID NO: 166014 - DNA, 75 bp, synthetic construct
  source 1..75: mol_type = other DNA
agcacgatgaagcgggcgaactgctggaagtgattaaacacactaccaataacgtcacaccgccgccggaagcct

SEQ ID NO: 166015 - DNA, 75 bp, synthetic construct
  source 1..75: mol_type = other DNA
acgcaacgcaacgcaacgcaacgcaacgcaacaatatgcctgtataaaaattctgcgtcaagtacctccgtgcat

SEQ ID NO: 166016 - DNA, 75 bp, synthetic construct
  source 1..75: mol_type = other DNA
atgcgtaatattgaaatcctcacgactaaaaccggaccggatgatgctgggcttaatattttactgacagaggct

SEQ ID NO: 166017 - DNA, 75 bp, synthetic construct
  source 1..75: mol_type = other DNA
cgtctggaagaacgcagggcaagggctgaagcaatggcagctcgccttgatcgcctggcgtgtcatatcacatcc

SEQ ID NO: 166018 - DNA, 75 bp, synthetic construct
  source 1..75: mol_type = other DNA
cgggtaccggcaaaacaaccctcgctgaagtgattgcccgctatgcgaacgctgatgtggaacgtatttctgccg

SEQ ID NO: 166019 - DNA, 75 bp, synthetic construct
  source 1..75: mol_type = other DNA
cggataatacttttcaacctctggccgcgcgtatgcggccagaaaatttagcacagtatatcggccagcaacatt

SEQ ID NO: 166020 - DNA, 75 bp, synthetic construct
  source 1..75: mol_type = other DNA
gatttttatcttcctaaagccgcgatagacagatcatcaattcgtatggctgagctattaaaatcacgaggttta

SEQ ID NO: 166021 - DNA, 75 bp, synthetic construct
  source 1..75: mol_type = other DNA
gccagatgaaacgcgacgcgccattgctgaactggtgaatggcgacgcgcgccgggcgttaaatacgctggaaat

SEQ ID NO: 166022 - DNA, 75 bp, synthetic construct
  source 1..75: mol_type = other DNA
gcgtttaaagccgcgctggccgatgctcgcgaacgtccggattatgacgtgccggttcatttgcgtaatgcgccg

SEQ ID NO: 166023 - DNA, 75 bp, synthetic construct
  source 1..75: mol_type = other DNA
tgaaaacccgtcgtttgagcttaattcggcactgctttcccgtgcccgtgtctatctgttgaaatccctgagtac

SEQ ID NO: 166024 - DNA, 75 bp, synthetic construct
  source 1..75: mol_type = other DNA
accattgatgaagagtttggcggttgggcgaaagcgcaaaaagcgcatttctctaatggcggtacgtttgaccaa

SEQ ID NO: 166025 - DNA, 75 bp, synthetic construct
  source 1..75: mol_type = other DNA
tatcgccatcagagaactggcgtttggcgcaggtgcattacgcgcggcagtagcgtcttatgtgcggtctccgcg

SEQ ID NO: 166026 - DNA, 75 bp, synthetic construct
  source 1..75: mol_type = other DNA
cgcgggttctgttagccagctttgactcggtagaaaaagccggacttgcggttggtgacatcatcgccaatggca

SEQ ID NO: 166027 - DNA, 75 bp, synthetic construct
  source 1..75: mol_type = other DNA
attaatttatacaaaaaaagggagagtcatcccatttcaccttcccgtatgacaacaccgttatcacgcctgttt

SEQ ID NO: 166028 - DNA, 75 bp, synthetic construct
  source 1..75: mol_type = other DNA
gggaaaaactggacgctgaaacactgaaaaatgcgctgaagcgtggttcgccatcttcgacatccttatccggct

SEQ ID NO: 166029 - DNA, 75 bp, synthetic construct
  source 1..75: mol_type = other DNA
ggcaacgaatgaattggggaaagataaattcgaaatcgtcacgccgagcgagtctattctcgcggaaccgacggt

SEQ ID NO: 166030 - DNA, 75 bp, synthetic construct
  source 1..75: mol_type = other DNA
aggaaatcctgccggccattgatcattgccctgaatgtgacgaaccgctgcgccatatccgcgatgcggtgagtg

SEQ ID NO: 166031 - DNA, 75 bp, synthetic construct
  source 1..75: mol_type = other DNA
aacgcccggtattatccttgccggatgctgggcccacgccagaaggggcttcgccgacctgtataaaatgaacaa

SEQ ID NO: 166032 - DNA, 75 bp, synthetic construct
  source 1..75: mol_type = other DNA
ctgaaagtgtattttgccagccagggatgttttataacaaggcagacgggctattttacgatgataaagaatatt

SEQ ID NO: 166033 - DNA, 75 bp, synthetic construct
  source 1..75: mol_type = other DNA
acgagcttctgacacgggatgttattcatgccgatgaaacgtccctgaggctccctgatacccggaaaggcggta

SEQ ID NO: 166034 - DNA, 75 bp, synthetic construct
  source 1..75: mol_type = other DNA
atcttctcccgaatgggtgtggagttccccgtcagtacaatggcggatatgatcggtgttgccggagctgttctg

SEQ ID NO: 166035 - DNA, 75 bp, synthetic construct
  source 1..75: mol_type = other DNA
aaccgcgcggcacagataatgagccttctggaaacggcaaaacgtaatggtctggagccacatgcctggctgaca

SEQ ID NO: 166036 - DNA, 75 bp, synthetic construct
  source 1..75: mol_type = other DNA
ctggtttacgagcacactgcaaaaggtgatgttgcagcactgaatgtcgacgcgttgactgaagatcagaaagca

SEQ ID NO: 166037 - DNA, 75 bp, synthetic construct
  source 1..75: mol_type = other DNA
cagcaaaacagttgctgtgtcagggtatggtgctggcagatgccttctactatgttggcgaaaacggcgaacgta

SEQ ID NO: 166038 - DNA, 75 bp, synthetic construct
  source 1..75: mol_type = other DNA
ccgatcggctgggacgcgtttggtctgcctgcggaaggcgcggcggtgaaaaacaacaccgcaccggcaccgtgg

SEQ ID NO: 166039 - DNA, 75 bp, synthetic construct
  source 1..75: mol_type = other DNA
ccccggtattacatctgcctgttgctggagccacgcaaggcgcggtttcgcaaatctgtataaggccagcaggga

SEQ ID NO: 166040 - DNA, 75 bp, synthetic construct
  source 1..75: mol_type = other DNA
acagttgcccctgttgtcagaaggtgttcagtggtgaaatgtcggctcacatccttccgaaaagtgccgttgagc

SEQ ID NO: 166041 - DNA, 75 bp, synthetic construct
  source 1..75: mol_type = other DNA
ggacgtggacgtggacgtggacatcgccgaaatcactgcgcaactggataaactgctgccgccctctgttgaaga

SEQ ID NO: 166042 - DNA, 75 bp, synthetic construct
  source 1..75: mol_type = other DNA
ctgtttgttatcctggcaccgatgctttcgcaatttgcctatgacgataccgattgggcgatgatgtccagcgct

SEQ ID NO: 166043 - DNA, 75 bp, synthetic construct
  source 1..75: mol_type = other DNA
aaagtggaatagttaaaaacatcataattgcggaaagcggttatgaatatgatggtgctgaacttatcgaatatc

SEQ ID NO: 166044 - DNA, 75 bp, synthetic construct
  source 1..75: mol_type = other DNA
tgaagcgtttccgaaacaagagatgctggcccgtctggacgcgcggctggaacgcggagaggcacatccattaga

SEQ ID NO: 166045 - DNA, 75 bp, synthetic construct
  source 1..75: mol_type = other DNA
actattgtttgtaagttcatatttcgtaatgcttctgaatttttcgtgtgatggttttaaatactatgtgtttac

SEQ ID NO: 166046 - DNA, 75 bp, synthetic construct
  source 1..75: mol_type = other DNA
ctcttggggttactgcttatttataaaatacgggcatttcaatagatgcccgtatgaacagagtatgattctggc

SEQ ID NO: 166047 - DNA, 75 bp, synthetic construct
  source 1..75: mol_type = other DNA
taaatggtgtgggtatgaacaaagtaaccgacaaacataacgtcatgcaagaagaagatagagggataggtaagt

SEQ ID NO: 166048 - DNA, 75 bp, synthetic construct
  source 1..75: mol_type = other DNA
cactacatcggtaccctgttcggtaacgtgaaagtgtacgaagtacctgctggtatttgtaagaacttaacgaca

SEQ ID NO: 166049 - DNA, 75 bp, synthetic construct
  source 1..75: mol_type = other DNA
cgccgctatgtgctggtggcaagctccgatggcaccagcaaaaccgcaaccttcaagatggaagacttcgaaggc

SEQ ID NO: 166050 - DNA, 75 bp, synthetic construct
  source 1..75: mol_type = other DNA
aactgcctgattgagtccacccgcaatagcatggatgccactaataaagcgatgctggaatccgtcgcagcagag

SEQ ID NO: 166051 - DNA, 75 bp, synthetic construct
  source 1..75: mol_type = other DNA
gttgccgtgcaaaatgacaccatcgatttttaccaaatgttcgctcggatttggtcatcgcatccagaatggctg

SEQ ID NO: 166052 - DNA, 75 bp, synthetic construct
  source 1..75: mol_type = other DNA
taagtctgttgttgataacgggtccggtactctgcttcacacattcaataacaaagcaggcgaacaaatcactgt

SEQ ID NO: 166053 - DNA, 75 bp, synthetic construct
  source 1..75: mol_type = other DNA
cgccgctatgtgctggttgcaagctccgacggcaccagcaaaactgcaaccttcaagatggaagatgtcgaaggt

SEQ ID NO: 166054 - DNA, 75 bp, synthetic construct
  source 1..75: mol_type = other DNA
aacctcctgtctgatgtggtcaatttacttgttaaacgcgctgtgtttcacaagcaaatctcctccgtggatgaa

SEQ ID NO: 166055 - DNA, 75 bp, synthetic construct
  source 1..75: mol_type = other DNA
ttccggccaggtattggccgaaggcatcaatagtttttcccaggcgaaaaatgcggcagtaaaagtctatgctga

SEQ ID NO: 166056 - DNA, 75 bp, synthetic construct
  source 1..75: mol_type = other DNA
ttacctgagcagtggcaacagttgtctttccctctgttctggcagggctgcgaattacaggtcactcttgacgcg

SEQ ID NO: 166057 - DNA, 75 bp, synthetic construct
  source 1..75: mol_type = other DNA
agcgccgttgaaaactatcttgaaagcctgacgcaaattttgcaggctcccggaccgacgggcgcctgcactgcg

SEQ ID NO: 166058 - DNA, 75 bp, synthetic construct
  source 1..75: mol_type = other DNA
tcgcagatcatctggaatgacgcccgctcattaccattaccagaatctgaactggtcaacaaagcgacggcattg

SEQ ID NO: 166059 - DNA, 75 bp, synthetic construct
  source 1..75: mol_type = other DNA
atccgtggatgaactaacaaaattaacgacagaaatcgccagctattgcgctgatgaatttaagaagctgaacga

SEQ ID NO: 166060 - DNA, 75 bp, synthetic construct
  source 1..75: mol_type = other DNA
gcgcaggagaaagcgcgacgcaacggctggcagggcgcgctatttccgtgggaaagcgcgcgcagcggcgaagaa

SEQ ID NO: 166061 - DNA, 75 bp, synthetic construct
  source 1..75: mol_type = other DNA
attaccctaaacggcgagattttttcgttatcccgcgaagcgtggcagcgtgagcttgactttgccagtggagaa

SEQ ID NO: 166062 - DNA, 75 bp, synthetic construct
  source 1..75: mol_type = other DNA
ggatcgactggcgggacgacagacacgtcgctttagacgagtggggcagtgcgtcgcttcgtcagcttgaaatgt

SEQ ID NO: 166063 - DNA, 75 bp, synthetic construct
  source 1..75: mol_type = other DNA
ttacgccgtagcgttgtctggcgtaccagcaacggcgcaggttacaccatcgccagccgtcgctttgtttcggca

SEQ ID NO: 166064 - DNA, 75 bp, synthetic construct
  source 1..75: mol_type = other DNA
cggtatccacgctgccgcaactggcgctatttggctgggggcgattcagggttttgccggggtgagcgtgcgtga

SEQ ID NO: 166065 - DNA, 75 bp, synthetic construct
  source 1..75: mol_type = other DNA
gaaagcgcgcgcagcggcgaagaagagacgccggaatttgccgccattaacattcgcaccgggctgcggcaaaaa

SEQ ID NO: 166066 - DNA, 75 bp, synthetic construct
  source 1..75: mol_type = other DNA
ggcaaaacattgcgctggtttccgatgccggaacgccgctaattaacgatcctggctaccatctggtgcgtccct

SEQ ID NO: 166067 - DNA, 75 bp, synthetic construct
  source 1..75: mol_type = other DNA
attctcagggccagctttacattgtaccgacaccgatcggcaatctggcggatatcacccagcgtgcgctggagg

SEQ ID NO: 166068 - DNA, 75 bp, synthetic construct
  source 1..75: mol_type = other DNA
ccgttggcgagctgctggcgtgggtcaaagaagatgaaaaccgtcgtaaaggcgaaatggtgctgattgttgaag

SEQ ID NO: 166069 - DNA, 75 bp, synthetic construct
  source 1..75: mol_type = other DNA
acccgccgatgccctgcgcacgctggcgctgctacaggcagaactgccactgaaaaaagcggcggcgctggcagc

SEQ ID NO: 166070 - DNA, 75 bp, synthetic construct
  source 1..75: mol_type = other DNA
acgcccggttgttcgcgcttcatgaccataatgaacaacaaaaagccgaaacgctgctggcgaagctacaggaag

SEQ ID NO: 166071 - DNA, 75 bp, synthetic construct
  source 1..75: mol_type = other DNA
ccataacgaacaacaaaaagccgaaacgctgctggcgaagctgcaagaagggcagaacattgcgctggtttccga

SEQ ID NO: 166072 - DNA, 75 bp, synthetic construct
  source 1..75: mol_type = other DNA
atgtcctgttctcgttcaattgtattactgaacaatgcattaaaaatctccgttatgaaaaatggcgatttgtct

SEQ ID NO: 166073 - DNA, 75 bp, synthetic construct
  source 1..75: mol_type = other DNA
atgtcctgttctcgttcagttgtattactgaataacgccttaaaaatctccgttatgaaaaatggcgatttgtct

SEQ ID NO: 166074 - DNA, 75 bp, synthetic construct
  source 1..75: mol_type = other DNA
cttgcaccccatcccggatcgctccggcctgtggcgctatctgggcacgacattgctgttgctgacgatgctggg

SEQ ID NO: 166075 - DNA, 75 bp, synthetic construct
  source 1..75: mol_type = other DNA
aggctttttacctgccaaatcaaaaggccgccgtgatgagctaaaagccattgaagcggagccgcgcacgctgat

SEQ ID NO: 166076 - DNA, 75 bp, synthetic construct
  source 1..75: mol_type = other DNA
gtttacggtgcgcagggggtcaaagtgtcactgaatgatgcgcttcttcagtgggagaatgagtgtggcgacatt

SEQ ID NO: 166077 - DNA, 75 bp, synthetic construct
  source 1..75: mol_type = other DNA
caatgatgagcttagtaaaaactcacaactattccatgagatgttaaagcgtggttttgataatagagtccttac

SEQ ID NO: 166078 - DNA, 75 bp, synthetic construct
  source 1..75: mol_type = other DNA
gtcgctttgcctcagaggctcagcagttcgataccgctctatcgggactggcttaccaggtagccgtggccatga

SEQ ID NO: 166079 - DNA, 75 bp, synthetic construct
  source 1..75: mol_type = other DNA
gtgacgggggccaacaattattttcttgttgataatgaaacagttaaattatataaattagaacgttttgctcac

SEQ ID NO: 166080 - DNA, 75 bp, synthetic construct
  source 1..75: mol_type = other DNA
gatcatatccgccgaacaatcattaaagaaagccgcccatttattctggattatttgcacaaacagggttgggcg

SEQ ID NO: 166081 - DNA, 75 bp, synthetic construct
  source 1..75: mol_type = other DNA
aacctcgggctgaatcttaattaccgctttggtgtaccgctcaaaaaacaactttctgcgggtgaggttgccgaa

SEQ ID NO: 166082 - DNA, 75 bp, synthetic construct
  source 1..75: mol_type = other DNA
gccggttattgagtatcatcagcgtaaaactttaacggtgtttctggcgacgccgccctgggatcttaaacccgg

SEQ ID NO: 166083 - DNA, 75 bp, synthetic construct
  source 1..75: mol_type = other DNA
gcggcgttaatcggcgcaggcggttttggtgcgctggttttccaggggctgctaagcagcgccattgatttagtg

SEQ ID NO: 166084 - DNA, 75 bp, synthetic construct
  source 1..75: mol_type = other DNA
tctgcggggcacaacaggtgaggcgtacctgcaggggaggggaatactccagttaccgaccgaatccgtgcgttt

SEQ ID NO: 166085 - DNA, 75 bp, synthetic construct
  source 1..75: mol_type = other DNA
gtcgtttatccaccaacaggatattgcatcgctggtgtccgtcctgttttcccgcctgcggggtggaggaggcgg

SEQ ID NO: 166086 - DNA, 75 bp, synthetic construct
  source 1..75: mol_type = other DNA
gctggtgtcagtggtgtcggtgaagattctctcgttcatccaccagcaggatattgcatcactggtgtccggcct

SEQ ID NO: 166087 - DNA, 75 bp, synthetic construct
  source 1..75: mol_type = other DNA
ttggtcttagagctgtagataaaagcggtggaatgggcataggattacaaagaaaatccatgattggaattccat

SEQ ID NO: 166088 - DNA, 75 bp, synthetic construct
  source 1..75: mol_type = other DNA
gaaaatttcctaaaccaacgaccagatgcggacatgtattcgcttcaggttgatatctatgccgatacccctgat

SEQ ID NO: 166089 - DNA, 75 bp, synthetic construct
  source 1..75: mol_type = other DNA
atgaaaacagcagatgcagcgaaaggccgctggcctgaaatattagagcacttcggtctgccgccgataaccgga

SEQ ID NO: 166090 - DNA, 75 bp, synthetic construct
  source 1..75: mol_type = other DNA
ctgacaaaattaacgacagaacttgccagttattgcgctgatgtatccaggaaacttaacgataaaaggggtgat

SEQ ID NO: 166091 - DNA, 75 bp, synthetic construct
  source 1..75: mol_type = other DNA
atgcaggcggatgcgttcagcggttacgattggctgttctgtgccggacgtgaactgacagaagttgcgtgctgg

SEQ ID NO: 166092 - DNA, 75 bp, synthetic construct
  source 1..75: mol_type = other DNA
atctttcgccatttttacgcattaacccttgtgggtatgcgggaatggaaatggctaaaatatcgcaatggagac

SEQ ID NO: 166093 - DNA, 75 bp, synthetic construct
  source 1..75: mol_type = other DNA
tgcggcaaaaggtttgaccggggaaggctacaaaggccacgttttctgggatacggaagtatttttactgccgtt

SEQ ID NO: 166094 - DNA, 75 bp, synthetic construct
  source 1..75: mol_type = other DNA
ggctacaaaggccacgttttctgggatacagaagtatttttgctaccgttccatctgtttagcgatccgacggtt

SEQ ID NO: 166095 - DNA, 75 bp, synthetic construct
  source 1..75: mol_type = other DNA
acactgaccctgcaaaagcgggtgtggattgactggcgggacgaccgacaagccgctttagacgagtggggcagt

SEQ ID NO: 166096 - DNA, 75 bp, synthetic construct
  source 1..75: mol_type = other DNA
tgctggtgtttgatggacgcctgcgttgtgcgctggaacgtaatctacggcggcaaaaatatgcccgctttatga

SEQ ID NO: 166097 - DNA, 75 bp, synthetic construct
  source 1..75: mol_type = other DNA
cggcaaaaatatgcccgctttatgacgccaccgccatccgttaaacccgcttcgtcaggtaaaaaacgggaggcc

SEQ ID NO: 166098 - DNA, 75 bp, synthetic construct
  source 1..75: mol_type = other DNA
actcataccctgagttatccgctggtggcgtttcagtccggaaaaatgtttaaacgcctgggaggtggctatgcg

SEQ ID NO: 166099 - DNA, 75 bp, synthetic construct
  source 1..75: mol_type = other DNA
tagcatccgatgatcccgttgaacagcgtgatgcattatttaatgagcgcgcgttactgcatgtggctgcaaccc

SEQ ID NO: 166100 - DNA, 75 bp, synthetic construct
  source 1..75: mol_type = other DNA
tgcaacgctcgtcaagcaaattcaggcattgctggcgaatcaggttcgttctcaggatatctgcattactgcgcg

SEQ ID NO: 166101 - DNA, 75 bp, synthetic construct
  source 1..75: mol_type = other DNA
tgactgggcgcggcggcatgattgttcaattcacccggttaccggcgcgattcaggtcattgatattagctatat

SEQ ID NO: 166102 - DNA, 75 bp, synthetic construct
  source 1..75: mol_type = other DNA
taattataacatataatccagatctaacaattctgcgagaaagttatacgagtctatataagcaagtcgataaaa

SEQ ID NO: 166103 - DNA, 75 bp, synthetic construct
  source 1..75: mol_type = other DNA
taagcaaaacttattggagaaagtcttccctgaaatccggcaccggacacgtgaagcgctcgccgatatattgcc

SEQ ID NO: 166104 - DNA, 75 bp, synthetic construct
  source 1..75: mol_type = other DNA
tgccagtcggttttatcgaacagcagcgctggagtcgggtcacggacacctagggtgttaagcaccagcgaaaag

SEQ ID NO: 166105 - DNA, 75 bp, synthetic construct
  source 1..75: mol_type = other DNA
gacatccaacggtatcaccgttcatacgcacacccacggtggcgtcaggacgggcccgggcaccacgggaggccc

SEQ ID NO: 166106 - DNA, 75 bp, synthetic construct
  source 1..75: mol_type = other DNA
cacctccaacggtgtgacgctgcacacgcacaaacacagtggcgtgaagagcggcggcgacaccacaggaggccc

SEQ ID NO: 166107 - DNA, 75 bp, synthetic construct
  source 1..75: mol_type = other DNA
aaacgccgctggtcgagtgtaccgagatgctgaaaaccaaaaatttcaccgttacggaaggcggcaaaatgcagg

SEQ ID NO: 166108 - DNA, 75 bp, synthetic construct
  source 1..75: mol_type = other DNA
tttatccatgcgcacaaagggacgataggcgcggtgcgtcgtgtggtcgagccgctcgggtatctgattaacgtg

SEQ ID NO: 166109 - DNA, 75 bp, synthetic construct
  source 1..75: mol_type = other DNA
gcgctggaaaacaagctggtcgatgcactggcatcgagtgccgaaatcgaaaaaactctgaccaaagagttcggc

SEQ ID NO: 166110 - DNA, 75 bp, synthetic construct
  source 1..75: mol_type = other DNA
tgaaaggagtccgtaattttgagaataaagttgcggtaactttagccttacaagacaaagaacgctttgacggtg

SEQ ID NO: 166111 - DNA, 75 bp, synthetic construct
  source 1..75: mol_type = other DNA
tctgcactgaccgggcgcgatattaatgtcgagactattatgcgcgttgccttcggcgatagtcagcgtcaggag

SEQ ID NO: 166112 - DNA, 75 bp, synthetic construct
  source 1..75: mol_type = other DNA
gtacacggtgaagtttatcgtattgacaacgccacgctggccgaacttgatgccttgcgcaccaggggcggtgaa

SEQ ID NO: 166113 - DNA, 75 bp, synthetic construct
  source 1..75: mol_type = other DNA
ttggctcgtcggtgctggaggttgccgccgcccgcgcggccgcagatatcgagcgtgtgccggttccgcttcgca

SEQ ID NO: 166114 - DNA, 75 bp, synthetic construct
  source 1..75: mol_type = other DNA
gctggcggcaaaaaaagcgcaggccagacaggcactgtccatttatctgaacctgcccacgctggatgaggccgt

SEQ ID NO: 166115 - DNA, 75 bp, synthetic construct
  source 1..75: mol_type = other DNA
tggccgggattgtttgacggtaacacgcccaggcttcttgcctgtggtatccgggaggttttactggatgaggtg

SEQ ID NO: 166116 - DNA, 75 bp, synthetic construct
  source 1..75: mol_type = other DNA
cgaaaatcaaccacgacctacatgggccggttggagatttatgtcgtgttgtggttgattttttaaccagcaaag

SEQ ID NO: 166117 - DNA, 75 bp, synthetic construct
  source 1..75: mol_type = other DNA
tcagcgcgtctggcaaaaattcgtcgccagaaccggagaaaagccgaacttcaggccgtgctggataaacagtaa

SEQ ID NO: 166118 - DNA, 75 bp, synthetic construct
  source 1..75: mol_type = other DNA
gccgtgaacaccctgaaaccctggtggccgggattatttgacggtgacacgccccggcttctggcctgcggtatc

SEQ ID NO: 166119 - DNA, 75 bp, synthetic construct
  source 1..75: mol_type = other DNA
gctatcacccgttcggaaagttatctgtgtgcaatgaaagccggcgcctgccgctatgatacggaaggctatgtg

SEQ ID NO: 166120 - DNA, 75 bp, synthetic construct
  source 1..75: mol_type = other DNA
gatggaattaaacctgtaacaaggtttgatatatcaatgattaataaactgactgcggaaagaggatattggaag

SEQ ID NO: 166121 - DNA, 75 bp, synthetic construct
  source 1..75: mol_type = other DNA
cccccaccgtcacctgcacaaaccatctgaaggcggcaacgattgaggtgacagaaggcggaaccctgagcggca

SEQ ID NO: 166122 - DNA, 75 bp, synthetic construct
  source 1..75: mol_type = other DNA
cacctcaaacgacattaccgtgcatacgcataaacacggtggcgtgaaaggcggcagcgattcgacaggaggccc

SEQ ID NO: 166123 - DNA, 75 bp, synthetic construct
  source 1..75: mol_type = other DNA
ctatcagttctttagggtgcagttcttttaggaggtctaccctcttgggtaagaaggaagatattctgcaatact

SEQ ID NO: 166124 - DNA, 75 bp, synthetic construct
  source 1..75: mol_type = other DNA
cgtcgcagcttattctaaagggctttttccaatagttgttggcgcgggacttacagcgtttgtcatctggctcat

SEQ ID NO: 166125 - DNA, 75 bp, synthetic construct
  source 1..75: mol_type = other DNA
ctgtaaaacccttcttagaaaaaataatgcgcagcgattctttagaaaaaataagaaaaatgttatctaatgaaa

SEQ ID NO: 166126 - DNA, 75 bp, synthetic construct
  source 1..75: mol_type = other DNA
aaagcgcgaatggaagactgccgcctgcgtggcggcgacccgttcgatgaagtacaactgccggatgcggtgatc

SEQ ID NO: 166127 - DNA, 75 bp, synthetic construct
  source 1..75: mol_type = other DNA
gctcctggtctaatcaaacagtggatggtgatatcagcacctgcgtcaacgtgacggaagattcacaggcgtggc

SEQ ID NO: 166128 - DNA, 75 bp, synthetic construct
  source 1..75: mol_type = other DNA
gttacaaaaatgcgccgaccgtcttgcccagagtgcgcaggattttcgtctgcaattaggcgagccaggttatcg

SEQ ID NO: 166129 - DNA, 75 bp, synthetic construct
  source 1..75: mol_type = other DNA
cctgatgaagatgtttctattcaggccagtggtagtaatagagcatttgactgcgaactcgaattgaccggttgg

SEQ ID NO: 166130 - DNA, 75 bp, synthetic construct
  source 1..75: mol_type = other DNA
tggatgtgctggaaggatatctggtcgatggcacactcaaaaccgatacggtcaatctggcgactatcgccattg

SEQ ID NO: 166131 - DNA, 75 bp, synthetic construct
  source 1..75: mol_type = other DNA
atggcaatcagtaaaggaaataaatatgtcatcgaaaaaccggacccgcagaaccacaacccgcaatatccgttt

SEQ ID NO: 166132 - DNA, 75 bp, synthetic construct
  source 1..75: mol_type = other DNA
tacaaaaactggaacaccagtcaggcaggttggccgactgggtccgggagttactgtgccggaaagtaactttgt

SEQ ID NO: 166133 - DNA, 75 bp, synthetic construct
  source 1..75: mol_type = other DNA
gtcataaagcacaggaagaagacttccccgccgatgccctgcgcacgctggcgctgctacaggcagaactgccgc

SEQ ID NO: 166134 - DNA, 75 bp, synthetic construct
  source 1..75: mol_type = other DNA
tgaaaaaagcggcggcgctggccgcagacattcacggcgtgaagaaaaatgcgctgtataagtatgcgctggaac

SEQ ID NO: 166135 - DNA, 75 bp, synthetic construct
  source 1..75: mol_type = other DNA
tactgctcgatgacacccttgaactttgttatgacgtggcgaaattgtcgctggggcgttccgcgttgttggatg

SEQ ID NO: 166136 - DNA, 75 bp, synthetic construct
  source 1..75: mol_type = other DNA
tgcgcggtggcgacccgttcgatgaagtgcagctgccggatgcggtcattactctcaagcagggggtagggcgac

SEQ ID NO: 166137 - DNA, 75 bp, synthetic construct
  source 1..75: mol_type = other DNA
atgcgacttgcgctccgtctggggcgcacgttatccgaactgcggcatagcctgagtgcgagtgaagcgatgatg

SEQ ID NO: 166138 - DNA, 75 bp, synthetic construct
  source 1..75: mol_type = other DNA
ggggctgaagctctggctcgctggccacaaactgacggctcatggctgtcgccggagatatttattccactatcg

SEQ ID NO: 166139 - DNA, 75 bp, synthetic construct
  source 1..75: mol_type = other DNA
gtgagaacacgacatctggtcggcctgatttcgggagtgcttatactttcagtactactgcctgtcggcttaagc

SEQ ID NO: 166140 - DNA, 75 bp, synthetic construct
  source 1..75: mol_type = other DNA
gtctggttaacatcgcataacgatttaggcattatccgttacatggtcgccatgggaacggcacattatgtcgtc

SEQ ID NO: 166141 - DNA, 75 bp, synthetic construct
  source 1..75: mol_type = other DNA
gagttttacgaagctgaggcgaaaaagcaggcgaagcagtttttcatggatattgctgccgctttatgtgaaggg

SEQ ID NO: 166142 - DNA, 75 bp, synthetic construct
  source 1..75: mol_type = other DNA
taataaatataatgaagaaaagtcggctcaggaaagaatgcccggggctgacagtccacaggaactgatgaaaag

SEQ ID NO: 166143 - DNA, 75 bp, synthetic construct
  source 1..75: mol_type = other DNA
tagctcatggcaaattgatgccgccattattggcaatgcccataatgttgtcataaccagcagcgatgaaattgc

SEQ ID NO: 166144 - DNA, 75 bp, synthetic construct
  source 1..75: mol_type = other DNA
tcagcagtaactaaaactaaactttatgatctgattaaatatctactctggacgaccatcccatcaacgattatt

SEQ ID NO: 166145 - DNA, 75 bp, synthetic construct
  source 1..75: mol_type = other DNA
gtaaagaaaccagcgccaaatctgaagagaaagcgtccactccggcgcaacgccagcaggcgtctctggaagagc

SEQ ID NO: 166146 - DNA, 75 bp, synthetic construct
  source 1..75: mol_type = other DNA
gatttgtcttatgatggagatgatattacggatcaaaaaagcgtatctaaaagcgaagtacgttggattgacata

SEQ ID NO: 166147 - DNA, 75 bp, synthetic construct
  source 1..75: mol_type = other DNA
gagttattcagtatctgaagatgatttgctctgttgttatccgtcgttgtcgggcgatggcagttactttttcac

SEQ ID NO: 166148 - DNA, 75 bp, synthetic construct
  source 1..75: mol_type = other DNA
atgaacaggaaatattatcttaataatatgtggtggggatggtttatgggggggtatactctgtatatgtcatgg

SEQ ID NO: 166149 - DNA, 75 bp, synthetic construct
  source 1..75: mol_type = other DNA
ctcccggaaaaatgggattacttgcggtttatacgggtactgttttcatatcatctcttccgttaagtctaatat

SEQ ID NO: 166150 - DNA, 75 bp, synthetic construct
  source 1..75: mol_type = other DNA
ttgcggctgaactggctaaaggcctcaaaaccgaggccgacctcaatcagttttcccgtatgcagacgaaattaa

SEQ ID NO: 166151 - DNA, 75 bp, synthetic construct
  source 1..75: mol_type = other DNA
ctttaactctgactggaacgcaggtttttattcaaactggatttgcccctatatttccagacacctgttatcact

SEQ ID NO: 166152 - DNA, 75 bp, synthetic construct
  source 1..75: mol_type = other DNA
caaaaaatgaattagagccgtggacacctgaaggaaccgacccaaattattgctggtgggaggttgatccggttg

SEQ ID NO: 166153 - DNA, 75 bp, synthetic construct
  source 1..75: mol_type = other DNA
caaaaaatgaattagagccgtggacacctgaaggagtcgacccaaattattgctggtgggatgttgatccagttg

SEQ ID NO: 166154 - DNA, 75 bp, synthetic construct
  source 1..75: mol_type = other DNA
atgaaattaaaagtcatcgccacactgattgctactgttgccgtaggtgcaagctttaattcaaatctcgcctat

SEQ ID NO: 166155 - DNA, 75 bp, synthetic construct
  source 1..75: mol_type = other DNA
atgattatcgctgaggggagaacggttaatgatgtattaccgggtgagtttctttctcccaccactttcactatc

SEQ ID NO: 166156 - DNA, 75 bp, synthetic construct
  source 1..75: mol_type = other DNA
aaaattactggcgacgagaatgcggcaaaaaatgaattagagccgtggacacctgaaggtgtcgccccaaattat

SEQ ID NO: 166157 - DNA, 75 bp, synthetic construct
  source 1..75: mol_type = other DNA
gtgattttcattaaacaaaagactgccggaagcaggatactattagagacccgtaaacaactcagtgaagacctg

SEQ ID NO: 166158 - DNA, 75 bp, synthetic construct
  source 1..75: mol_type = other DNA
tctaggttatgaacaaaacataggtgacgactggatagccaagattgaatataaacatgcctgggaaaaagagca

SEQ ID NO: 166159 - DNA, 75 bp, synthetic construct
  source 1..75: mol_type = other DNA
ggcgaatatgcaaagttttactcaataacgattactggtgtcgggcattatcatttagccctacgaaagcgaaga

SEQ ID NO: 166160 - DNA, 75 bp, synthetic construct
  source 1..75: mol_type = other DNA
tggctgcatttggacggtgaaactctggttacgagggcagcaagattatttactcttacctatttcccctgctga

SEQ ID NO: 166161 - DNA, 75 bp, synthetic construct
  source 1..75: mol_type = other DNA
cgactggcatacacacaacgagactattgcaaacccatcacctactgatattaatagcattcatgagttatttac

SEQ ID NO: 166162 - DNA, 75 bp, synthetic construct
  source 1..75: mol_type = other DNA
tttctcatgctaataattccaaataaagaaaacatttccaattgttatttggcggcagcagatcgaaagaagctg

SEQ ID NO: 166163 - DNA, 75 bp, synthetic construct
  source 1..75: mol_type = other DNA
gtggcagttgccagtattcttcgcgcctatgtgttatttgcgatggggggattaattggcggacaactggccgac

SEQ ID NO: 166164 - DNA, 75 bp, synthetic construct
  source 1..75: mol_type = other DNA
ccgctgcattacatacacccgggctgatgaatccggagcatctctgcgggcagttggttttgttcgtgtgaaaga

SEQ ID NO: 166165 - DNA, 75 bp, synthetic construct
  source 1..75: mol_type = other DNA
tggaaaatggcaccactcaccagcgatatctgcaagataaacaaaaagagattactgctgtcgcctatgacagtt

SEQ ID NO: 166166 - DNA, 75 bp, synthetic construct
  source 1..75: mol_type = other DNA
cgccaaattgcgccattttactgttgaaaccgaagtgacgtttttgccgacccataccgaccgcaaatcgttcct

SEQ ID NO: 166167 - DNA, 75 bp, synthetic construct
  source 1..75: mol_type = other DNA
actatttatgcgccagccggaagccatcttacgtatgttctacaccatggtgcgcaacagtgcgatcaccggcat

SEQ ID NO: 166168 - DNA, 75 bp, synthetic construct
  source 1..75: mol_type = other DNA
agatttttatctggagcccggaccgcccatacctgtttgccgccgtttgtgccgagttagaccgtcgcaatttaa

SEQ ID NO: 166169 - DNA, 75 bp, synthetic construct
  source 1..75: mol_type = other DNA
gggcatcaaaaatccggtgatggtcggggcgattcccttcgatccacgtcagccttcgtcgctgtatattccccg

SEQ ID NO: 166170 - DNA, 75 bp, synthetic construct
  source 1..75: mol_type = other DNA
caggatgtggtgattgtgctgtcgctgggcggttatacaccggaaatcatcgaaagtgcggcaatcgcccgtcag

SEQ ID NO: 166171 - DNA, 75 bp, synthetic construct
  source 1..75: mol_type = other DNA
aactgaccggcttaaccgataagtggttttacaaactcatcaaggatggtgcctttccggcccccatcaaactcg

SEQ ID NO: 166172 - DNA, 75 bp, synthetic construct
  source 1..75: mol_type = other DNA
gatgttgccaaagccgtttgcaaagagatgcaggcagagtgtcagtttactaatcagagttttgacagcctcatc

SEQ ID NO: 166173 - DNA, 75 bp, synthetic construct
  source 1..75: mol_type = other DNA
acttggcaacctgacctatcaacttagcgcccgcaactttaaccccctgatagcccttgcggctgatatcacgct

SEQ ID NO: 166174 - DNA, 75 bp, synthetic construct
  source 1..75: mol_type = other DNA
tgattgagacaaatttagctaatcgcctttcatcacaaggtagaacgttatgttgcattccccactatgataaag

SEQ ID NO: 166175 - DNA, 75 bp, synthetic construct
  source 1..75: mol_type = other DNA
caaagcaagtaacattcgatgcttccagagttgttccaactgcaaacgaaaaccgacctcgtaacattgccttta

SEQ ID NO: 166176 - DNA, 75 bp, synthetic construct
  source 1..75: mol_type = other DNA
gaaatatgttcctggtgagagcgcccggacgcggctgttatgggcggaaattttacatagcggaaaattatcgcc

SEQ ID NO: 166177 - DNA, 75 bp, synthetic construct
  source 1..75: mol_type = other DNA
accagaaagcgaagatgcccggtattaccagtgtgcacaacgtttgtactgcggcgagggggaaagcctgcttgc

SEQ ID NO: 166178 - DNA, 75 bp, synthetic construct
  source 1..75: mol_type = other DNA
ttcagcagggaaaccgctggcttaactggctggagaaacaaccggaaggttcagtgcgtccgtggtcattgagtc

SEQ ID NO: 166179 - DNA, 75 bp, synthetic construct
  source 1..75: mol_type = other DNA
acaggctgaacctgaaaagtataaagtcgatatgtatgcttatacaaccggagagtattttaacggcgacgctaa

SEQ ID NO: 166180 - DNA, 75 bp, synthetic construct
  source 1..75: mol_type = other DNA
gttgcccatagcgaaatgctgaatgtcgaacaatccgggctgtttcgcgcctggtttgtacgcattgcacaataa

SEQ ID NO: 166181 - DNA, 75 bp, synthetic construct
  source 1..75: mol_type = other DNA
atcaattacgctggccgctgtgtgcaatcgctatagaagcgcgatatctttcattaaattgtgcttctttgctgg

SEQ ID NO: 166182 - DNA, 75 bp, synthetic construct
  source 1..75: mol_type = other DNA
tgctattagaaatattacaggtttcgtgagtggttcttctggcgtttcgtttgatagtttttctggtgcttttta

SEQ ID NO: 166183 - DNA, 75 bp, synthetic construct
  source 1..75: mol_type = other DNA
aacgaactggcggcggcgctggggaatgacccgaactttgccacgacaatgcttaatgcactggcaggtaaacaa

SEQ ID NO: 166184 - DNA, 75 bp, synthetic construct
  source 1..75: mol_type = other DNA
cgtggttcattcctgatgatgcgaagttacatcgcaaactgttgcgctggtacagctcggtgcaaacaggtatgg

SEQ ID NO: 166185 - DNA, 75 bp, synthetic construct
  source 1..75: mol_type = other DNA
cctggtgagagcgcccggacgcggctgctatgggcggaaattttacatagcggaaaattatcaccgttaggtcaa

SEQ ID NO: 166186 - DNA, 75 bp, synthetic construct
  source 1..75: mol_type = other DNA
actgttgcgctggtacagctcggtgcaaacaggtatggcggaactcattcctgtagccaaacagtggcaaatgga

SEQ ID NO: 166187 - DNA, 75 bp, synthetic construct
  source 1..75: mol_type = other DNA
cgaaagccggtggtaactacctctcttccctgttggtgggtagcgaagcgcgccgccacggttatcaggaaggta

SEQ ID NO: 166188 - DNA, 75 bp, synthetic construct
  source 1..75: mol_type = other DNA
cggcagaaatcacgccagtgcgcagcgtagacggtattcaggttggcgaaggccgttgtggcccggtcaccaaac

SEQ ID NO: 166189 - DNA, 75 bp, synthetic construct
  source 1..75: mol_type = other DNA
gcatccagcaagccttcttcggcctcttcactggcgaaaccgaagataaatggggctggttagatcaagttaatc

SEQ ID NO: 166190 - DNA, 75 bp, synthetic construct
  source 1..75: mol_type = other DNA
aacgttttgccgatgataagccctggaccaccgccgcaccaggcggtcatagctggtacatttaccccatctacg

SEQ ID NO: 166191 - DNA, 75 bp, synthetic construct
  source 1..75: mol_type = other DNA
atgtctatttataaaatcccgcttccactgaatattctggaagctgcaaaagaacgtattacctggacacttaac

SEQ ID NO: 166192 - DNA, 75 bp, synthetic construct
  source 1..75: mol_type = other DNA
cagtcataacgcgcatgcttgaagcgtatggattcaagacgcggcaagccctatgtgaacagttcaatgtatctg

SEQ ID NO: 166193 - DNA, 75 bp, synthetic construct
  source 1..75: mol_type = other DNA
cggcggacaagaggtgtatcacatccatatgcacttgttgggtggccgtccgctgggaccaatgctggcgcataa

SEQ ID NO: 166194 - DNA, 75 bp, synthetic construct
  source 1..75: mol_type = other DNA
cgtgtcaaccgagcatgagcaggcgctggggcgcatgatcaccgtggcggcaaaaatcgctgagcaggaagggat

SEQ ID NO: 166195 - DNA, 75 bp, synthetic construct
  source 1..75: mol_type = other DNA
gccaaccggctcaaggcctatggatgagttgagcgagctccttgtaaaggggataccggaggaatttttccggcg

SEQ ID NO: 166196 - DNA, 75 bp, synthetic construct
  source 1..75: mol_type = other DNA
ggccgttgtggcccggttaccaaacgcattcagcaagccttcttcggcctcttcactggcgaaaccgaagataaa

SEQ ID NO: 166197 - DNA, 75 bp, synthetic construct
  source 1..75: mol_type = other DNA
cggctgaaatcacgccagtgcgcagcgtcgacggtattcaggtgggcgaaggccgttgtggcccggtcaccaaac

SEQ ID NO: 166198 - DNA, 75 bp, synthetic construct
  source 1..75: mol_type = other DNA
tgcgcaagagcagcatttaacgaccctgactggtttgtagaaaatcaccacgcggttcgtcaggcaaaaagaaag

SEQ ID NO: 166199 - DNA, 75 bp, synthetic construct
  source 1..75: mol_type = other DNA
gtcgaaacgttaaatgctggcgaacgaccggtgatacacagtgacagaggtggcattatcgctggccaggctggc

SEQ ID NO: 166200 - DNA, 75 bp, synthetic construct
  source 1..75: mol_type = other DNA
ttcttgctgcacgcttacctttcatcccgttatactgtgaaaaaaaagggggtaggcgtgaaactgaaaatgcag

SEQ ID NO: 166201 - DNA, 75 bp, synthetic construct
  source 1..75: mol_type = other DNA
acctcaatgcgctgggcagtacgctgcaaactttgtctgactggtggaagcagttctgggatgcggccatgaata

SEQ ID NO: 166202 - DNA, 75 bp, synthetic construct
  source 1..75: mol_type = other DNA
ccagtgatgctgcacggatagccatgtctgcactggcagaggaaaccggtcggcgtactgcggatattgataata

SEQ ID NO: 166203 - DNA, 75 bp, synthetic construct
  source 1..75: mol_type = other DNA
aggtggtggggagtggtgcatttcgtggaaacgatatcggtatggtggcgagagctgccgcacagatggagcgat

SEQ ID NO: 166204 - DNA, 75 bp, synthetic construct
  source 1..75: mol_type = other DNA
ctggctgaagaagagcgcgctcagcgtcagcaacatgacctggatatcgccacgacagggatgggggataaacag

SEQ ID NO: 166205 - DNA, 75 bp, synthetic construct
  source 1..75: mol_type = other DNA
tgtccagaatcatggctcagatagctttaatgaaagcggtaaaaggcattgcttccgcgctgccttttgattttg

SEQ ID NO: 166206 - DNA, 75 bp, synthetic construct
  source 1..75: mol_type = other DNA
aggtatggcgatgttttccccgcagtacaacatcgagatcaataacgatggcacgaacgggcagataggtccggc

SEQ ID NO: 166207 - DNA, 75 bp, synthetic construct
  source 1..75: mol_type = other DNA
cattaagaaaaaaacgcctgccacccgtaatgatgaggccacccggttattactgcagtacagccagcaacaggc

SEQ ID NO: 166208 - DNA, 75 bp, synthetic construct
  source 1..75: mol_type = other DNA
gccagaaacagtggcgggattggtcagcaggattatctggcgctgatttctgaggttacggcgaaaacccgtgtt

SEQ ID NO: 166209 - DNA, 75 bp, synthetic construct
  source 1..75: mol_type = other DNA
agcgatgatcaagaaagtcgccaaccatcctcgccctgccctgtcaaagagcccacaatcgccacatggcacaga

SEQ ID NO: 166210 - DNA, 75 bp, synthetic construct
  source 1..75: mol_type = other DNA
tgcgttttatgagcggcactgcgggggctaagcgtcgcatctaccagctagtgttttcagcgacggtagcagcgg

SEQ ID NO: 166211 - DNA, 75 bp, synthetic construct
  source 1..75: mol_type = other DNA
ctcaacacgctcatcaggaatcgccacacaaaaaccatccgggaactcgcgaatgaactggggcgctcgacatcc

SEQ ID NO: 166212 - DNA, 75 bp, synthetic construct
  source 1..75: mol_type = other DNA
acacagcgccggagctgacaaagcaccttcagagaaccgagtcagcaatacgaagtcgcatccgtcttttgctct

SEQ ID NO: 166213 - DNA, 75 bp, synthetic construct
  source 1..75: mol_type = other DNA
cgattctgaaagtgggactggtcgcgtcgattccggcattgtgtggttttgccggcggcgtactcggcggtgtct

SEQ ID NO: 166214 - DNA, 75 bp, synthetic construct
  source 1..75: mol_type = other DNA
cgggcatgatcaccggctcatcatttgggggaggcagtgcgatcggcggcatggcaatggcggccgctgcggcgg

SEQ ID NO: 166215 - DNA, 75 bp, synthetic construct
  source 1..75: mol_type = other DNA
attcagtttgtttggacgttcggcaacctgatttggcaaagcgccgatgttggcgaaatgttccgcgagctgatc

SEQ ID NO: 166216 - DNA, 75 bp, synthetic construct
  source 1..75: mol_type = other DNA
ttggcaaaatatctcttttcttcagataataatgcgttgcaatttgagtttcagaaacgacaggatttaatttcc

SEQ ID NO: 166217 - DNA, 75 bp, synthetic construct
  source 1..75: mol_type = other DNA
attacgtttttatacagctcgcttatctgatttgcaagaaagcaacacctcattatcattaaaaaacaaagagtt

SEQ ID NO: 166218 - DNA, 75 bp, synthetic construct
  source 1..75: mol_type = other DNA
cctgaagtggctgctgcctcgtttgcattagctaagaaggcattagtgattggcgatacggagcagctcccgcca

SEQ ID NO: 166219 - DNA, 75 bp, synthetic construct
  source 1..75: mol_type = other DNA
agcagcacgacatcagcgtgaaattgcgcgtattaatgccatgcagtacgccgatcaggctgtcagggatgcggc

SEQ ID NO: 166220 - DNA, 75 bp, synthetic construct
  source 1..75: mol_type = other DNA
ctgcattacatcaagcaattgctctctaaccgcatgatgctgggcgtatttttcggacaatattttatcaacacc

SEQ ID NO: 166221 - DNA, 75 bp, synthetic construct
  source 1..75: mol_type = other DNA
aacccgacagagcacccgcgtatttcagcggaagagctgaagtttatctctgaaaatggcgcggtggtcgatatg

SEQ ID NO: 166222 - DNA, 75 bp, synthetic construct
  source 1..75: mol_type = other DNA
gaagcgccttccttccccgctaacgcccgtattgtggctgcctggttcccgacgaaagaacggggaaccgcctcc

SEQ ID NO: 166223 - DNA, 75 bp, synthetic construct
  source 1..75: mol_type = other DNA
gtactggttgctaccgatgttgccgcgcgcggtatcgacattcctgacgtcagccacgtctttaacttcgatatg

SEQ ID NO: 166224 - DNA, 75 bp, synthetic construct
  source 1..75: mol_type = other DNA
tgctatctcgaaggtgagatggtacaaggcaagcgtaacgaagcgatcaagcgtttgaccgaaggtcgcgtaaac

SEQ ID NO: 166225 - DNA, 75 bp, synthetic construct
  source 1..75: mol_type = other DNA
tgctgccagcgttgcagcaccagctcgatttcccacgtaagaaatccggtccgccgcgtattttgatcctcaccc

SEQ ID NO: 166226 - DNA, 75 bp, synthetic construct
  source 1..75: mol_type = other DNA
ccgccgcgtattttgatcctcaccccaactcgcgaactggcgatgcaggtggccgatcatgcccgcgaactggcg

SEQ ID NO: 166227 - DNA, 75 bp, synthetic construct
  source 1..75: mol_type = other DNA
aaaacgccatcgcgataccaaaaatattggtaagcgccgtaaaccaagcggaacgggcgtgccaccgcaaacgac

SEQ ID NO: 166228 - DNA, 75 bp, synthetic construct
  source 1..75: mol_type = other DNA
attgatgagttacgcccgaaaacgcgtgcaccaagcgagaagcagaccggcaagccatcgaagaaagtgctggct

SEQ ID NO: 166229 - DNA, 75 bp, synthetic construct
  source 1..75: mol_type = other DNA
cggtggctatggtcgcggcgagttacatccgctttcagatatcgatttactgatcttaagtcgtaaaaaactccc

SEQ ID NO: 166230 - DNA, 75 bp, synthetic construct
  source 1..75: mol_type = other DNA
tggattgaagccggtttcagtcagattgccgacctggcgctggtcgctgtcggtggctatggtcgtggcgagctg

SEQ ID NO: 166231 - DNA, 75 bp, synthetic construct
  source 1..75: mol_type = other DNA
tttgacaatggaatctctgcagaagagttgattgaggcgcgtaccgagtttatcgaccagctcctgcaacggtta

SEQ ID NO: 166232 - DNA, 75 bp, synthetic construct
  source 1..75: mol_type = other DNA
agaagagaacttcgattgccgcgcggttgaaacgctgatcctcgacgaagcagaccgtatgctggatatgggctt

SEQ ID NO: 166233 - DNA, 75 bp, synthetic construct
  source 1..75: mol_type = other DNA
gaagcgcaacgattaaaggcggagatataaaagatccaaaaggcgtgaatattaaatatcgctacgaaatggatc

SEQ ID NO: 166234 - DNA, 75 bp, synthetic construct
  source 1..75: mol_type = other DNA
acagccgcgtcgtcaaccggctaaactacgtcactttactgttgaaaccgaagtgacgtttttgccaacccatac

SEQ ID NO: 166235 - DNA, 75 bp, synthetic construct
  source 1..75: mol_type = other DNA
gtgtccaccacgggggaatacgatcagcaacaactggatgcgctgcaagagcgaaaacgccagcaggatttgcag

SEQ ID NO: 166236 - DNA, 75 bp, synthetic construct
  source 1..75: mol_type = other DNA
acatgatctggatatcgccacaacagggatgggggataaacagcgtcagcggtaccagacacagttcagcctgca

SEQ ID NO: 166237 - DNA, 75 bp, synthetic construct
  source 1..75: mol_type = other DNA
ggcgttctgataggtgaactggcccgcggaaatttaggtgcgctgaggggatccggaataacgctggctaaccgt

SEQ ID NO: 166238 - DNA, 75 bp, synthetic construct
  source 1..75: mol_type = other DNA
ttttgcaaaaggcgcgggtgtgatgggagaagcggggcctgaagccattctgccattgcgtcgtggtgctgatgg

SEQ ID NO: 166239 - DNA, 75 bp, synthetic construct
  source 1..75: mol_type = other DNA
gggagtggagaaacggtacaaaacgcgcgttcatgaattttactgccgacgcggataatgctgccgggactgcag

SEQ ID NO: 166240 - DNA, 75 bp, synthetic construct
  source 1..75: mol_type = other DNA
attatcaggagcagcagaaacgccggaatgctgaaaatgccgcgctgaaccggatgaacgaaacggaagcagcac

SEQ ID NO: 166241 - DNA, 75 bp, synthetic construct
  source 1..75: mol_type = other DNA
atcagcgtgaaattgcgcgtattaatgccatgcagtacgccgatcagactgtcagggatgcggcgatacaacgtg

SEQ ID NO: 166242 - DNA, 75 bp, synthetic construct
  source 1..75: mol_type = other DNA
ggagagcctgaaccgacaactgaatgagaatcgccgttactggcaacagcttgaagttgtgcagggtaactggaa

SEQ ID NO: 166243 - DNA, 75 bp, synthetic construct
  source 1..75: mol_type = other DNA
gcgaagatcctggcgcaggcaaccgtgatgaaatcgataaaagggattggcagtgtactgggatttgatctcagc

SEQ ID NO: 166244 - DNA, 75 bp, synthetic construct
  source 1..75: mol_type = other DNA
atgatctggcagcctgagttcacagataaaacactctccaggaaacccggggcggttcagtcagcaggcattgcc

SEQ ID NO: 166245 - DNA, 75 bp, synthetic construct
  source 1..75: mol_type = other DNA
ccagaacggacagattgggccggaagtcatgcaggcggtttacaacctggggaaaagggctgcagaagattttat

SEQ ID NO: 166246 - DNA, 75 bp, synthetic construct
  source 1..75: mol_type = other DNA
acggtgggtatgggtgatcagcagcggcagcgatatcaggtacaactgagtcttcgtcagaaataccagcaacag

SEQ ID NO: 166247 - DNA, 75 bp, synthetic construct
  source 1..75: mol_type = other DNA
atgaaaaataataacgcgtttatattgaatatgccttttgttgttaatggcattacatgtgcgttgatgttttct

SEQ ID NO: 166248 - DNA, 75 bp, synthetic construct
  source 1..75: mol_type = other DNA
ctgaaccgttatttcgatatatcagaccttaaaaatatttccgtgagtctgagtgcttcccgctcccggtatcag

SEQ ID NO: 166249 - DNA, 75 bp, synthetic construct
  source 1..75: mol_type = other DNA
aatggcattacatgtgcgttgatgttttctttggcagctatgcctgttcatgctgtcgattttaatactgatatt

SEQ ID NO: 166250 - DNA, 75 bp, synthetic construct
  source 1..75: mol_type = other DNA
aacttactacgagccaatcatcaaatatgcttttgaaaatgcaggtaatatttatcttcgcactcgcttcggaca

SEQ ID NO: 166251 - DNA, 75 bp, synthetic construct
  source 1..75: mol_type = other DNA
gtgtccagtatagtagacaaacctactgggatagagcgctttctaattactatacgatatcttacaataaatatt

SEQ ID NO: 166252 - DNA, 75 bp, synthetic construct
  source 1..75: mol_type = other DNA
atattcagagtgggaagcttaatataaatatcccccaggcatggcttgaatattctgatgcaacatggttacctc

SEQ ID NO: 166253 - DNA, 75 bp, synthetic construct
  source 1..75: mol_type = other DNA
gtggtcattatatggcggcggaatttttgcaggtgattataatgcaatatccgtggggcttggacacgatttagg

SEQ ID NO: 166254 - DNA, 75 bp, synthetic construct
  source 1..75: mol_type = other DNA
tgttgcgtatggctgataacagttatccaccctttggtgcaagcgttatgaatgctaaaggtcgtgaactgggaa

SEQ ID NO: 166255 - DNA, 75 bp, synthetic construct
  source 1..75: mol_type = other DNA
acccgcttactggtcgatactgacggtgtcggaggagtacccgtcgatggtggtcgagtttcgaccaacgattgg

SEQ ID NO: 166256 - DNA, 75 bp, synthetic construct
  source 1..75: mol_type = other DNA
ttgtctggagattcagggggccagtctacaaacgttgaatacttatacagtcgaaatgataagagctcctggggc

SEQ ID NO: 166257 - DNA, 75 bp, synthetic construct
  source 1..75: mol_type = other DNA
accgctactgattaacggtagcctgaatattcttaatattattattagcggcatattgatttacggccttttctc

SEQ ID NO: 166258 - DNA, 75 bp, synthetic construct
  source 1..75: mol_type = other DNA
aatatagataactggaaaatgtcagcaggagtccaatatagccatcaggtatattgggaccaacagtcttcagat

SEQ ID NO: 166259 - DNA, 75 bp, synthetic construct
  source 1..75: mol_type = other DNA
atgaaaaataaaaatagtgcctcttttgctgttaacagcattacatatgcgctgatgctttccctggcaggcaca

SEQ ID NO: 166260 - DNA, 75 bp, synthetic construct
  source 1..75: mol_type = other DNA
gttaccggaatgattttacggggcgtgagaaggaactgtataccgtcacgcttaataagaacttcgaggactgga

SEQ ID NO: 166261 - DNA, 75 bp, synthetic construct
  source 1..75: mol_type = other DNA
gcctggctggagtattctgatgcctcctggctgccgccgtcacgctgggacaacggtattcccgggttgttgttt

SEQ ID NO: 166262 - DNA, 75 bp, synthetic construct
  source 1..75: mol_type = other DNA
tggcggcgcgctgccgttggaaaaaggtgtgttgttggtgatggctcgctttaaagaaatcctcgaaatcaatcc

SEQ ID NO: 166263 - DNA, 75 bp, synthetic construct
  source 1..75: mol_type = other DNA
ttaacgacatcttgttgaaagcgggcgcgactgacgtccgtctggcacaggacgaagcagagcgcgtacgtttct

SEQ ID NO: 166264 - DNA, 75 bp, synthetic construct
  source 1..75: mol_type = other DNA
gacgaagcggagcgtgtgcgtttctgggccggtcgtaaaaacgcctttccggcggtggggcgcatctctcccgat

SEQ ID NO: 166265 - DNA, 75 bp, synthetic construct
  source 1..75: mol_type = other DNA
gtggggtacagcgatacagtaaatggtggactggacagctacagcctgaatgcgggggttaatactggtaacggt

SEQ ID NO: 166266 - DNA, 75 bp, synthetic construct
  source 1..75: mol_type = other DNA
tgtcggtgaaccgttatttcgatgccttcggattcaggaacgtctccctggggctgtccgcatcccgttcgaaat

SEQ ID NO: 166267 - DNA, 75 bp, synthetic construct
  source 1..75: mol_type = other DNA
gtcccagtcgctgaactataacggaactgcgggggctaacttcggtgcctggcgtctgcgtgcggactatcaggg

SEQ ID NO: 166268 - DNA, 75 bp, synthetic construct
  source 1..75: mol_type = other DNA
gaaaacctcgctcaacctgcagtacagccaccagacctactgggaccgccggacatcagactattacaccctgtc

SEQ ID NO: 166269 - DNA, 75 bp, synthetic construct
  source 1..75: mol_type = other DNA
taccggtgccagtctggaaagtgatgaccgcatgctgccgccaaaactgcgcggttatgcaccacaggtctcagg

SEQ ID NO: 166270 - DNA, 75 bp, synthetic construct
  source 1..75: mol_type = other DNA
ctttacggtggcggtatcgttgccggggattacaacgccctggctgtggggctgggccgggacctgaatgagttc

SEQ ID NO: 166271 - DNA, 75 bp, synthetic construct
  source 1..75: mol_type = other DNA
gctgggaaaaccagacgccgccgaccgtcagtctggtgtgggcggatgccgccacgccggatacgccgctcaatc

SEQ ID NO: 166272 - DNA, 75 bp, synthetic construct
  source 1..75: mol_type = other DNA
gaaacctggtccactttcacctggagcggggcagacagccattgcaccgtgctgccgggcatgcgccatttcggc

SEQ ID NO: 166273 - DNA, 75 bp, synthetic construct
  source 1..75: mol_type = other DNA
cgtggcacatcggatgccaacggtatggcaaccatcacagtgacccaacctaatgggcccggcgtcaaaacgccg

SEQ ID NO: 166274 - DNA, 75 bp, synthetic construct
  source 1..75: mol_type = other DNA
atcgctcgttttgtgcacagggacttgccgggcgttcgctggtcgcctgggcgcagcctgatccccagcagacca

SEQ ID NO: 166275 - DNA, 75 bp, synthetic construct
  source 1..75: mol_type = other DNA
gcgggtattgctcaggccagtgaaacggcagtgatctttaccgtcctcaccagcccggatgttccgcaggctaca

SEQ ID NO: 166276 - DNA, 75 bp, synthetic construct
  source 1..75: mol_type = other DNA
gctgcgtgagctgggggcaaaggtgttggtatttgcggaggtgagcggctgcattcacggcgagcagcagacgcc

SEQ ID NO: 166277 - DNA, 75 bp, synthetic construct
  source 1..75: mol_type = other DNA
gctgcgagagctgggtgcaaaagtactggtttttgcggaagtgagtggctgcattcacggtgagcagcagacgcc

SEQ ID NO: 166278 - DNA, 75 bp, synthetic construct
  source 1..75: mol_type = other DNA
gcaggatccggcgattgcccatccgctgacctatgcccgtctggggtataacaacctgagccgtctggcgcgcga

SEQ ID NO: 166279 - DNA, 75 bp, synthetic construct
  source 1..75: mol_type = other DNA
gcaacagtcgcattgttgcggcctggtttccggcgcaggaaaggggaacggcggtgtcgatttttaactccgctc

SEQ ID NO: 166280 - DNA, 75 bp, synthetic construct
  source 1..75: mol_type = other DNA
gaggttggtttactgctggataccggccacctgacctttgccggggccgatccgctggcggtggcacagcgatgg

SEQ ID NO: 166281 - DNA, 75 bp, synthetic construct
  source 1..75: mol_type = other DNA
ccatggcaagagtaaacacttcggatgctttgatgatctggagttagcggtactagttgctgaagaagcccgaga

SEQ ID NO: 166282 - DNA, 75 bp, synthetic construct
  source 1..75: mol_type = other DNA
aatattatctcgccagtttcgccaataaaatttggctgtctccgcaaggcgtggttgatctgcacggttttgcca

SEQ ID NO: 166283 - DNA, 75 bp, synthetic construct
  source 1..75: mol_type = other DNA
tgatcgcgccgtggccaactacctgtcgaaccttgacgcgattattcaggatcagacattcagccagttagcgat

SEQ ID NO: 166284 - DNA, 75 bp, synthetic construct
  source 1..75: mol_type = other DNA
tcttaaccataccaccggtaatgcaggagggacggagagtcagttcacctggaatcgattttacatgtaccgtgc

SEQ ID NO: 166285 - DNA, 75 bp, synthetic construct
  source 1..75: mol_type = other DNA
attaccgcagccatgcctgacccctgaaatggttaacagaatggggttaactgaagaatctcaggagaaagttac

SEQ ID NO: 166286 - DNA, 75 bp, synthetic construct
  source 1..75: mol_type = other DNA
tgggggtgattggttttgtgctgacggcgctgtggatcaagttgattcataacccgacagatcacccacgtatgt

SEQ ID NO: 166287 - DNA, 75 bp, synthetic construct
  source 1..75: mol_type = other DNA
ttggacatgtggggtaaaatagttggaataagccgttatattaatgctccaatagaagccagttctttcggattc

SEQ ID NO: 166288 - DNA, 75 bp, synthetic construct
  source 1..75: mol_type = other DNA
ttgaatttgagcttgcgccatacgaagaatctattctcacgaattatgaggtaatgcccgttccgagtggtgttc

SEQ ID NO: 166289 - DNA, 75 bp, synthetic construct
  source 1..75: mol_type = other DNA
aatactcggcaagcaaaaaactattatctatcattgacacttttaatcaggcggtaagcctcgatgacttcacag

SEQ ID NO: 166290 - DNA, 75 bp, synthetic construct
  source 1..75: mol_type = other DNA
gataaagatctcttgaattttcctccaaaaaatgatctaaatacccttgaaaataagtcagcacttacttatgat

SEQ ID NO: 166291 - DNA, 75 bp, synthetic construct
  source 1..75: mol_type = other DNA
cgtgcgactcgccagaatgcctctattgactcatttatggccgccattgatttgcaatcgtcaatctacggccgt

SEQ ID NO: 166292 - DNA, 75 bp, synthetic construct
  source 1..75: mol_type = other DNA
ctagatatgtggggtaaaatagtaggaataagtcgttatattaatgctccaatagaaaccagttctttcggattc

SEQ ID NO: 166293 - DNA, 75 bp, synthetic construct
  source 1..75: mol_type = other DNA
cggcaattgatgcgcatgatgatgcagttcaggccgtttaccggaaagcacatttcagcggcggtggctcgcccg

SEQ ID NO: 166294 - DNA, 75 bp, synthetic construct
  source 1..75: mol_type = other DNA
cagcgggctgacagagcctgcccgccgtgtggctgaccttctgaatatcgggcttcctgacaacgcaacttcgta

SEQ ID NO: 166295 - DNA, 75 bp, synthetic construct
  source 1..75: mol_type = other DNA
tctcgatccggatgtgattgtcctgggggggggggatgagcaatgtagaccgtttatatcaaacggttgggcagt

SEQ ID NO: 166296 - DNA, 75 bp, synthetic construct
  source 1..75: mol_type = other DNA
gaccggactcaaaaaagcacgccctgtcgcgtcccttctgtcagagattcccctgatgacatgggctgaaccgga

SEQ ID NO: 166297 - DNA, 75 bp, synthetic construct
  source 1..75: mol_type = other DNA
aattcacggtatggggtgatgagctggcgcattacccccagagtgttcatgacccggtgaatgtttacctgtcgc

SEQ ID NO: 166298 - DNA, 75 bp, synthetic construct
  source 1..75: mol_type = other DNA
cagggtgaaacggaagaagaaaccacgaccaatatcatcggagcagtgaccgctgaaggtaaaaaacaggcatga

SEQ ID NO: 166299 - DNA, 75 bp, synthetic construct
  source 1..75: mol_type = other DNA
tactccagaatatgacgccaacggtgattatttctttatcaatggaaacaatttaggctatcaaaaaatatcatt

SEQ ID NO: 166300 - DNA, 75 bp, synthetic construct
  source 1..75: mol_type = other DNA
tgattatcaatggtggccggaacggcatcgacgaccggcgcgcgcggtacatcactgccagtaaggtgctggtgg

SEQ ID NO: 166301 - DNA, 75 bp, synthetic construct
  source 1..75: mol_type = other DNA
cgctgggttttaatcgtacctgggatgaatggcggcgcgaggaagaggcacgaacatacgcctccgacaggagcc

SEQ ID NO: 166302 - DNA, 75 bp, synthetic construct
  source 1..75: mol_type = other DNA
gccattgttggcatggtctgcacggccagcgatgcggatgcggaaaccttccccgtcaataaaccggtgctgatc

SEQ ID NO: 166303 - DNA, 75 bp, synthetic construct
  source 1..75: mol_type = other DNA
caggatggtacaagtttttctcattacgcaggtaattttgacattgggtctggtcattcaatcaataactatgac

SEQ ID NO: 166304 - DNA, 75 bp, synthetic construct
  source 1..75: mol_type = other DNA
gtattttctggtgtaacggtctggcgcaacaaattcttggtttgcgctggccggaagataacgggcagaacatcc

SEQ ID NO: 166305 - DNA, 75 bp, synthetic construct
  source 1..75: mol_type = other DNA
aaggacatgcagggcaacaccgtcagcacctccggtctgaccctgccctctgccctgcagtccgcttcaggcacc

SEQ ID NO: 166306 - DNA, 75 bp, synthetic construct
  source 1..75: mol_type = other DNA
aaggcaccgtacaattgagcagtgacatcaacagcacgtctgaaatactggccgccacaccgaaagcggtcaagg

SEQ ID NO: 166307 - DNA, 75 bp, synthetic construct
  source 1..75: mol_type = other DNA
atgacgatttgccctattttcgtgaccagattctggaacgcatcgactcgctcaagtgttttctttcgaacaccc

SEQ ID NO: 166308 - DNA, 75 bp, synthetic construct
  source 1..75: mol_type = other DNA
aaacccatcagggttagtgttaaagacgatgcttcggttgaggaaattattcaggcacttactgacatctgtgtg

SEQ ID NO: 166309 - DNA, 75 bp, synthetic construct
  source 1..75: mol_type = other DNA
tcagaagcagaggtgtcaggctcaggattgcctgcgaccatgcgggccttggcgtttccacatactataagcttc

SEQ ID NO: 166310 - DNA, 75 bp, synthetic construct
  source 1..75: mol_type = other DNA
ctgcttaaccgtgagctgttcgcggatggcaataccaccgtctccaacgagatgaagggcaagctgcaactggtt

SEQ ID NO: 166311 - DNA, 75 bp, synthetic construct
  source 1..75: mol_type = other DNA
gtgattatcggcacgggatgcggcgcgggcgtggcattcaatgggcgggcgcatatcggcggcaatggcacggca

SEQ ID NO: 166312 - DNA, 75 bp, synthetic construct
  source 1..75: mol_type = other DNA
gtaaagttctcattagcaaaaagcagctgctggagatgattccactgtgcgagcgcacgatctacaactttgaaa

SEQ ID NO: 166313 - DNA, 75 bp, synthetic construct
  source 1..75: mol_type = other DNA
atatgtttgtggcaaaaaccggctctgtcggcgcacaggcggattacagcggtcctgcctggtatctgcttgact

SEQ ID NO: 166314 - DNA, 75 bp, synthetic construct
  source 1..75: mol_type = other DNA
cgcagcacgtcgtatgcaagaacgtgctgcggttggatgctattttttccctgaagcggaaaacattactacagt

SEQ ID NO: 166315 - DNA, 75 bp, synthetic construct
  source 1..75: mol_type = other DNA
ccattatgcacctgctctacttccgcttcttccacaaactgatgcgtgatgcaggcatggtgaactctgacgaac

SEQ ID NO: 166316 - DNA, 75 bp, synthetic construct
  source 1..75: mol_type = other DNA
cgttactggggcgcgccgattccgatggtaacgctggaagacggtactgtaatgccgactcctgacgaccagttg

SEQ ID NO: 166317 - DNA, 75 bp, synthetic construct
  source 1..75: mol_type = other DNA
cctgaactggcggcctttattgacgaatgccgtaacaccaaagttgccgaagctgaaatggcgacgatggagaaa

SEQ ID NO: 166318 - DNA, 75 bp, synthetic construct
  source 1..75: mol_type = other DNA
ggcagaacgtgatggcacagcgcgcaggccgggcgaatgaaggtgtggaccacgccgcgtgtaccgcgcatgaag

SEQ ID NO: 166319 - DNA, 75 bp, synthetic construct
  source 1..75: mol_type = other DNA
gttgggaacagaaattcttcaccgatctgtataaaaaaggcctggtatataagaagacttctgcggtcaactggt

SEQ ID NO: 166320 - DNA, 75 bp, synthetic construct
  source 1..75: mol_type = other DNA
ctggtttacgagcacactgcaaaaggtgatgttgcggcactgaacgtcgatgcactgactgaagatcagaaagct

SEQ ID NO: 166321 - DNA, 75 bp, synthetic construct
  source 1..75: mol_type = other DNA
ttaacgacatcttacggaaagcgggcgcgacagacgtccgtctggcgcaggacgaagcggaacgtgtgcgtttct

SEQ ID NO: 166322 - DNA, 75 bp, synthetic construct
  source 1..75: mol_type = other DNA
ggcgagaaaaaatcaatcaaatgtgcgcccagttcaacagcgatgaaatcacgaccttccatgcggtcaaggcgg

SEQ ID NO: 166323 - DNA, 75 bp, synthetic construct
  source 1..75: mol_type = other DNA
gcacccgttaatccttttcgatgccaacgaacccggtgaatttgcccgcgcggaagagctgggtgggaagatcct

SEQ ID NO: 166324 - DNA, 75 bp, synthetic construct
  source 1..75: mol_type = other DNA
caccgcctgcgtgtaccggtggtgacccgtggtgcaggcaccgggctttctggtggcgcgctgccgctggaaaaa

SEQ ID NO: 166325 - DNA, 75 bp, synthetic construct
  source 1..75: mol_type = other DNA
tactactgcatggatggcaccatcccgcgccgcgcgctgcctggcgtactggaaggcattgcccgtttatcgcag

SEQ ID NO: 166326 - DNA, 75 bp, synthetic construct
  source 1..75: mol_type = other DNA
cccaggaaaaaacattcccacgctacaccgctgtgctgaatttggtgccatgcatgtgcatcacggtcatttacc

SEQ ID NO: 166327 - DNA, 75 bp, synthetic construct
  source 1..75: mol_type = other DNA
cttatccagattaccggcttgaataactatcgtgactgcggaaacggtctgaaagttgacctgctggagaatcct

SEQ ID NO: 166328 - DNA, 75 bp, synthetic construct
  source 1..75: mol_type = other DNA
tctgcgatgaaagagtttggtatcagcaaacccgaagatcaggcaatgtttattgctcaggtcgggcatgagtct

SEQ ID NO: 166329 - DNA, 75 bp, synthetic construct
  source 1..75: mol_type = other DNA
tcgtcctgacacaggccgccacaaacagcgatacagatttatcaggctataccgtcatgcttgatacgctacacg

SEQ ID NO: 166330 - DNA, 75 bp, synthetic construct
  source 1..75: mol_type = other DNA
aaaagtggacctgctggagaatcctgagctgttgacgcaggacgaatacgcggctcgtagcgcggcgtggttctt

SEQ ID NO: 166331 - DNA, 75 bp, synthetic construct
  source 1..75: mol_type = other DNA
ctcactcagggccaggccaacgcgctgggccgtcgtgctggtgagccatcgttaccgctggagcgccagcgtgcg

SEQ ID NO: 166332 - DNA, 75 bp, synthetic construct
  source 1..75: mol_type = other DNA
actaccgggattgcggaaacggtctgaaggttgatctggtagcacagcctgaactgctagcgcaggatgagtatg

SEQ ID NO: 166333 - DNA, 75 bp, synthetic construct
  source 1..75: mol_type = other DNA
agattgtcaccgaccaggacatgccggacgaagtgcgcgccaaattatgcaaggcgtgcgcctttgcccgtcgtg

SEQ ID NO: 166334 - DNA, 75 bp, synthetic construct
  source 1..75: mol_type = other DNA
gtctgaccgatgcagacaacatggccttatcactgaagctgctgcgcgaagcgatgcacctgaacccgaacgcag

SEQ ID NO: 166335 - DNA, 75 bp, synthetic construct
  source 1..75: mol_type = other DNA
actgaaacaaaagctgtgatgaagcgtgacatgttgccgaattaccagggctggattgatggaactctggagggc

SEQ ID NO: 166336 - DNA, 75 bp, synthetic construct
  source 1..75: mol_type = other DNA
tcaaacatcgccagagcagaactcaaaagacacctgctgcctgactttgagggatggatagagggaaccctggcc

SEQ ID NO: 166337 - DNA, 75 bp, synthetic construct
  source 1..75: mol_type = other DNA
ccatcaaaaaagagttgttgccggacttttccggctggattgagggaacgctggaggctgacggcgggcagcagg

SEQ ID NO: 166338 - DNA, 75 bp, synthetic construct
  source 1..75: mol_type = other DNA
attgccgaaggccgtacgctgaaaggccacaaaatcggactgacctcgaaagcgatgcaggccagctcgcagatc

SEQ ID NO: 166339 - DNA, 75 bp, synthetic construct
  source 1..75: mol_type = other DNA
gccgctgcgctcggcggggcgacggtattcggactgtttaccgggacggatttcgggattgtgtttggggcgttc

SEQ ID NO: 166340 - DNA, 75 bp, synthetic construct
  source 1..75: mol_type = other DNA
ctttacgcgaagttttattacaggaagttaacttaattaaaaaaacagaagttaaggcacaaaaaataaaagaaa

SEQ ID NO: 166341 - DNA, 75 bp, synthetic construct
  source 1..75: mol_type = other DNA
tatatttttcatcgatgaatattggcctgacgcagagagatatatggcgatttatgaaggtttattttgggatgc

SEQ ID NO: 166342 - DNA, 75 bp, synthetic construct
  source 1..75: mol_type = other DNA
tggcgcgataaagacctgattggtttatatttctcatcaatgaatattggcctgacgcaaagagatatctggcga

SEQ ID NO: 166343 - DNA, 75 bp, synthetic construct
  source 1..75: mol_type = other DNA
tcaaggtgattttggtttgggtgctggtgtacatccattcacaggtccgattgatagcgaagcattagccggaaa

SEQ ID NO: 166344 - DNA, 75 bp, synthetic construct
  source 1..75: mol_type = other DNA
tgctggctatcgtaaacttgaatcaactacgttagtagtaaaccgtgttctggatgacgaacatcaagacatgtt

SEQ ID NO: 166345 - DNA, 75 bp, synthetic construct
  source 1..75: mol_type = other DNA
gggttaaatccattaactcgcacatcatttattattaccgaagatctcactcccacgattagccttgaagattat

SEQ ID NO: 166346 - DNA, 75 bp, synthetic construct
  source 1..75: mol_type = other DNA
gtagtggctttttttagccgtaaacgggtcgcaaaatataaatatcctgaacatatcgtggtaatcgaaaaacta

SEQ ID NO: 166347 - DNA, 75 bp, synthetic construct
  source 1..75: mol_type = other DNA
tgttctggacgatggcaataatgggtgtcgcggtactgatgttgtctttgtttattttaaaagaaacgcgccctg

SEQ ID NO: 166348 - DNA, 75 bp, synthetic construct
  source 1..75: mol_type = other DNA
aatcggtttttcctcagccgtgttgttatcaccaccctcagcgtttcggtgatcctcaccttcgtcaacacgtcg

SEQ ID NO: 166349 - DNA, 75 bp, synthetic construct
  source 1..75: mol_type = other DNA
ggttttacttattttgattcgtggcggttaggtaaggaaatacctcggcataaaataaaagttaatgtcgtgctc

SEQ ID NO: 166350 - DNA, 75 bp, synthetic construct
  source 1..75: mol_type = other DNA
gccgcgtttacctgcctctattctggtgcacgaaaacagctatcaaccgctggataaagacgcgctggcgcaata

SEQ ID NO: 166351 - DNA, 75 bp, synthetic construct
  source 1..75: mol_type = other DNA
ggcttatattttttctgatactgcaaacaaagaatcgctgtatgttactatactgatatcagaactaatatcata

SEQ ID NO: 166352 - DNA, 75 bp, synthetic construct
  source 1..75: mol_type = other DNA
aggtgtaaaagttagtggtaacaaaaatgttgtgattaatgctacaggctccaccatcacagctcaaggtgaagg

SEQ ID NO: 166353 - DNA, 75 bp, synthetic construct
  source 1..75: mol_type = other DNA
tccagcaacggctctacggcaatttttgctcaaaagggtagcgtattgaatggttttaaaggtgatgcaaccgac

SEQ ID NO: 166354 - DNA, 75 bp, synthetic construct
  source 1..75: mol_type = other DNA
atggcaaccgatgtaggtttacccgaaggctttgttctcgataatcagcctgataactcacagcttcctgatggt

SEQ ID NO: 166355 - DNA, 75 bp, synthetic construct
  source 1..75: mol_type = other DNA
aaatgaaaaaagtagtgcgacaggtatatctctggaagcgaccacgggaaataatttaacgctcaatggcacaac

SEQ ID NO: 166356 - DNA, 75 bp, synthetic construct
  source 1..75: mol_type = other DNA
tgggcaactcgaccgttaaaccttatctgaatctggccgcactgaacgaattctctgatggcaacaaagtccgtc

SEQ ID NO: 166357 - DNA, 75 bp, synthetic construct
  source 1..75: mol_type = other DNA
aaatgaagaaggtggttggcagctaacatgcagcactgcgggtgatccccgattgcgtgttagaactgtccagaa

SEQ ID NO: 166358 - DNA, 75 bp, synthetic construct
  source 1..75: mol_type = other DNA
aacactggaatttaaacttgaaccagatggcgggattcttgcaaggggtatcgcgaccgagggaaaaattctgcg

SEQ ID NO: 166359 - DNA, 75 bp, synthetic construct
  source 1..75: mol_type = other DNA
atcattcccgacgatcaccgaatccaccgagatagaaactcttgaggaatatgatcatgatgctactggtaaact

SEQ ID NO: 166360 - DNA, 75 bp, synthetic construct
  source 1..75: mol_type = other DNA
agatgagcggcgacgcctggctgttcgtggatgccgaacttgctcctgttaccaacaggatattgaactgaagct

SEQ ID NO: 166361 - DNA, 75 bp, synthetic construct
  source 1..75: mol_type = other DNA
tttcgaacatgcgttgggatgcccagtttttgatgagttccagctttatcaggaagcggaagaacgcagtaaacg

SEQ ID NO: 166362 - DNA, 75 bp, synthetic construct
  source 1..75: mol_type = other DNA
ggataatctcactcaccaactgcatttgcaggaaaccttcagcgccttcccggacagtgaatttctgatgcgcca

SEQ ID NO: 166363 - DNA, 75 bp, synthetic construct
  source 1..75: mol_type = other DNA
tttgcagggcaaaagcagggaacgcataccgcacgctttggtgagatagagcaacgtggtgtggcattaacgccg

SEQ ID NO: 166364 - DNA, 75 bp, synthetic construct
  source 1..75: mol_type = other DNA
catccagacactgggtgatgaattgctacaaaaagctgagaagaaaaaaaacattatctggcgttatgaaaattt

SEQ ID NO: 166365 - DNA, 75 bp, synthetic construct
  source 1..75: mol_type = other DNA
ctacaaaaagcagagaagaaaaaaacattgtctggcgttatgaaaacttttcactggagtggcagtccgccatca

SEQ ID NO: 166366 - DNA, 75 bp, synthetic construct
  source 1..75: mol_type = other DNA
tatttttgcttgtgggttaggtcttactgacattatatacaatacagttccaatcgcagaggtaactttaaattg

SEQ ID NO: 166367 - DNA, 75 bp, synthetic construct
  source 1..75: mol_type = other DNA
tgttttcctctcttggccgcattgaccagacccgaattcgtaccggaatgctgaatgatgatgactggcaacgaa

SEQ ID NO: 166368 - DNA, 75 bp, synthetic construct
  source 1..75: mol_type = other DNA
gaaggtaaacgctgtgcatgtctcaaaagtgattactttcaatataaagcgggtgtgccttatctctatgtaatg

SEQ ID NO: 166369 - DNA, 75 bp, synthetic construct
  source 1..75: mol_type = other DNA
cgttttttgtaccgtggtggcagtgccaccatcgctcattttttgtaccgtggtggcagtgccatcatcgctcat

SEQ ID NO: 166370 - DNA, 75 bp, synthetic construct
  source 1..75: mol_type = other DNA
cgcggcggggatcttccagtcaaatctgggtaatgaaacgcaggcacgcagtcacggtaatgccagtcgcgaagc

SEQ ID NO: 166371 - DNA, 75 bp, synthetic construct
  source 1..75: mol_type = other DNA
cgtctgacgccttcgggtgaggcgcatcgtcaggcgattcatcccggagacgatccacagcccttaattgaacgt

SEQ ID NO: 166372 - DNA, 75 bp, synthetic construct
  source 1..75: mol_type = other DNA
aacgcctatacaaatcacaattgaatctctacaacatcaaatttcagtatttaaagcacagacatatgcatcaat

SEQ ID NO: 166373 - DNA, 75 bp, synthetic construct
  source 1..75: mol_type = other DNA
aaattcgcgctcgcgcctttcaaagcggagtttccacgcccgcaggcgtttcctgactggcaaacgctggagcta

SEQ ID NO: 166374 - DNA, 75 bp, synthetic construct
  source 1..75: mol_type = other DNA
gtggatgctgtcgggcaaaatgttgctggtaacggctatctggatggcggtcaccatctggggcggttttgtgct

SEQ ID NO: 166375 - DNA, 75 bp, synthetic construct
  source 1..75: mol_type = other DNA
cgggattaaccagcgatgtgcgcaatatcaccattgcttttgtgcgtctgccggaactggtgcaggggatcattc

SEQ ID NO: 166376 - DNA, 75 bp, synthetic construct
  source 1..75: mol_type = other DNA
acgagaaaatagcgagtcactgcttaaccggtttttcctcagccgtgttgttatcaccaccctcagcgtttcggt

SEQ ID NO: 166377 - DNA, 75 bp, synthetic construct
  source 1..75: mol_type = other DNA
gcgctatttattatcgcctcggtgttctgttcactggctgaaaccagtgcgttatttcttgcagggcgctttcta

SEQ ID NO: 166378 - DNA, 75 bp, synthetic construct
  source 1..75: mol_type = other DNA
gcaggtggcgtttaacaagctgaacaaattcgcactcgcgcctttcaaagcagagtttccgcgcccgcaggcgtt

SEQ ID NO: 166379 - DNA, 75 bp, synthetic construct
  source 1..75: mol_type = other DNA
tacgctacctgaagcactatatctcacgcgaagtttatatattgctacgaaatcaaaacgggcaggttaaaaaca

SEQ ID NO: 166380 - DNA, 75 bp, synthetic construct
  source 1..75: mol_type = other DNA
ggaaagatcatatgaagatgtacaaaaagcggccaatctactggctattcagctccggcaaagagaaagcctttg

SEQ ID NO: 166381 - DNA, 75 bp, synthetic construct
  source 1..75: mol_type = other DNA
cggtgcctgttatcactgaaagcatcattcagacactgggtgatgaattgctacaaaaagctgagaagaaaaaaa

SEQ ID NO: 166382 - DNA, 75 bp, synthetic construct
  source 1..75: mol_type = other DNA
gcggcattaggcattggcttaattgcttttatcaatcagcgccttatcgaaacggcggataccagtctgctggtg

SEQ ID NO: 166383 - DNA, 75 bp, synthetic construct
  source 1..75: mol_type = other DNA
gaaatgcgttttggagcccctgtttgctgcattggtttttctgatttcggtaccgctaatttggcaccttgggca

SEQ ID NO: 166384 - DNA, 75 bp, synthetic construct
  source 1..75: mol_type = other DNA
tactcgggaagcgtggagactttaagatatgaagatttagatgctttaagaatgtggtgggctctttctgaacct

SEQ ID NO: 166385 - DNA, 75 bp, synthetic construct
  source 1..75: mol_type = other DNA
atcgcaaactggattacctttttgaccgtgcttcagatgcggattttggctcactgcgcgatgagctgaaggcaa

SEQ ID NO: 166386 - DNA, 75 bp, synthetic construct
  source 1..75: mol_type = other DNA
tcactggtgtattcgttctcgatatctagtccagatgcagctaccgatgaactggaaatattgggtgtgctctct

SEQ ID NO: 166387 - DNA, 75 bp, synthetic construct
  source 1..75: mol_type = other DNA
tatgtactataaatggcgtaacgtgctgtcggacaatattactttgaagcctttagaacctgtggggaaggggaa

SEQ ID NO: 166388 - DNA, 75 bp, synthetic construct
  source 1..75: mol_type = other DNA
gctttaagagtccaagattttgtttttgcgtttgaactggctcagaatctggataagtattattcatccaataat

SEQ ID NO: 166389 - DNA, 75 bp, synthetic construct
  source 1..75: mol_type = other DNA
gaagcttgggtatctccgattttcgaatgttatcttaacgctctatttctcagtgataagattgatttattttta

SEQ ID NO: 166390 - DNA, 75 bp, synthetic construct
  source 1..75: mol_type = other DNA
aactgcgcaccgatttgttcagcgatgacggggacggttatgtcgaccgcgtggcgctcgatgccgccctgctgg

SEQ ID NO: 166391 - DNA, 75 bp, synthetic construct
  source 1..75: mol_type = other DNA
aggccgtggacgtaaggccgcgcagccagagcctcagcctcaacaacagccagaacctccttatggcttcgacga

SEQ ID NO: 166392 - DNA, 75 bp, synthetic construct
  source 1..75: mol_type = other DNA
cagactcagccggaagaggcgcaacagttcagcggtcagcctcagccggaatcacagccggaaccgaaaaaagga

SEQ ID NO: 166393 - DNA, 75 bp, synthetic construct
  source 1..75: mol_type = other DNA
tgcagatgctgggacgtgccgcaggtgctcagactcagccggaagaggggcaacagttcagcggtcatcctcagc

SEQ ID NO: 166394 - DNA, 75 bp, synthetic construct
  source 1..75: mol_type = other DNA
aggccgtggacgtaaggccgcgcagccggagcctcagcagccgtctgaacccgcgtatgacttcgatgacgatat

SEQ ID NO: 166395 - DNA, 75 bp, synthetic construct
  source 1..75: mol_type = other DNA
tgctgttcggcaagctcgcggaagtggcaggtgaatatctgcgcaagggcgcgcaggtctacatcgaaggtcagc

SEQ ID NO: 166396 - DNA, 75 bp, synthetic construct
  source 1..75: mol_type = other DNA
ttcccggtactaatcagttgcttgctgagtttggcgaacggcttaagctggcgcgactgcgacgtaagctcacag

SEQ ID NO: 166397 - DNA, 75 bp, synthetic construct
  source 1..75: mol_type = other DNA
cgcagcgaggatgatgcggctgacgacgctgaccgcacggaacaggtgccggataaagcggccgtggaggaaatc

SEQ ID NO: 166398 - DNA, 75 bp, synthetic construct
  source 1..75: mol_type = other DNA
cgcagcgaggatgatgcggctgacgacgctgaccgcacggaacaggtgctggacaaagcggccgtggaggaaatc

SEQ ID NO: 166399 - DNA, 75 bp, synthetic construct
  source 1..75: mol_type = other DNA
tgtgtttggcagcggagcgtacagtaaaccagcacaaatcagcctggaatgtaaacattattcgctgaccagcga

SEQ ID NO: 166400 - DNA, 75 bp, synthetic construct
  source 1..75: mol_type = other DNA
tggactcgctggaaacggctatcggattccacatgcgcgactggtggcagccgacgaaagcaaacttcttcggac

SEQ ID NO: 166401 - DNA, 75 bp, synthetic construct
  source 1..75: mol_type = other DNA
cgagatgctcattgagtcaaccggaatggttagcttacaccgccaaaatgctggcgtagtaggtcaagactctga

SEQ ID NO: 166402 - DNA, 75 bp, synthetic construct
  source 1..75: mol_type = other DNA
cgcagcgaggatgatgcggctgacgacgctgaccgcacggaacaggtgcgggagaaagcggctgtggaggaaatc

SEQ ID NO: 166403 - DNA, 75 bp, synthetic construct
  source 1..75: mol_type = other DNA
gattcttcgcaagcgttgcgctgtgcattgggtaactcctgatggtttccctgtgtggcaggaatacaagaagcc

SEQ ID NO: 166404 - DNA, 75 bp, synthetic construct
  source 1..75: mol_type = other DNA
atcgaaggtcagcttcgcacccgtagctgggaagataacggtatcacccgttacgtcaccgaaattcttgttaag

SEQ ID NO: 166405 - DNA, 75 bp, synthetic construct
  source 1..75: mol_type = other DNA
cggaaacctggcgtgacaaacagacaggggagatgcgggagcagacagaatggcatcgcgtggtgctgttcggca

SEQ ID NO: 166406 - DNA, 75 bp, synthetic construct
  source 1..75: mol_type = other DNA
ggtaaaccggaagtgcggatcatccgtcatctggtgacggaaagtgaagtggcggtgacggggaacactaaattc

SEQ ID NO: 166407 - DNA, 75 bp, synthetic construct
  source 1..75: mol_type = other DNA
agtaagaaagcactgatgcgctacgaagacgtttacatgcctgaggtgtacaaagcgattaacattgcgcaaaac

SEQ ID NO: 166408 - DNA, 75 bp, synthetic construct
  source 1..75: mol_type = other DNA
gcggtgtggtggtgtcctggcgttatggcaacgtatgtgtccagcgtggtgtgcagttgcgcagtgaggatgacg

SEQ ID NO: 166409 - DNA, 75 bp, synthetic construct
  source 1..75: mol_type = other DNA
agcggtggaacatcttcgcgcactggagaaaaaaggcgtcatcacgataaagcgtggcgtggcccggggtatcac

SEQ ID NO: 166410 - DNA, 75 bp, synthetic construct
  source 1..75: mol_type = other DNA
cttcataccgcggtgaaggacgacgacagcgaggcggtcgggattatccgcgcactgcttgccggtgaggcaaac

SEQ ID NO: 166411 - DNA, 75 bp, synthetic construct
  source 1..75: mol_type = other DNA
ttatgcatcacctgatgttaaaagtcactacatccaagatgacgttcaatggcaccatgcgattcaatgtaagct

SEQ ID NO: 166412 - DNA, 75 bp, synthetic construct
  source 1..75: mol_type = other DNA
ttatcaggacaccatccctattttgtctgaaaacccggaaattaatgcgctctatgggataagcaataaaggtgc

SEQ ID NO: 166413 - DNA, 75 bp, synthetic construct
  source 1..75: mol_type = other DNA
ttgctggaagaaaatgcgccaggaattagatgcactgggcgtgaaagatcattatgtcgtcatccagccgacagc

SEQ ID NO: 166414 - DNA, 75 bp, synthetic construct
  source 1..75: mol_type = other DNA
cgacagcgaggcggtcgggattatccgctcactgcttgccggtgaggaaaacgccaggctgcgtgcagcccactg

SEQ ID NO: 166415 - DNA, 75 bp, synthetic construct
  source 1..75: mol_type = other DNA
catttattattaccgaagatctgacaccaaccataagtctggaagattactgtgctgactgggcgactaaccctc

SEQ ID NO: 166416 - DNA, 75 bp, synthetic construct
  source 1..75: mol_type = other DNA
ggataaaggaatagtgccgcaattacagcaagctatcgtcgatatgtctcaaggaaagggcggtgacttccgtcg

SEQ ID NO: 166417 - DNA, 75 bp, synthetic construct
  source 1..75: mol_type = other DNA
gctatatcctcaactgtcaaagaccttggaacaaatagacccaaacaccgccccgacttatggtcttcttgatgc

SEQ ID NO: 166418 - DNA, 75 bp, synthetic construct
  source 1..75: mol_type = other DNA
acgctttggtaaattcagccatctggttgagccgggtctgaactggaaaccgacgtttatcgacgaagtcaaacc

SEQ ID NO: 166419 - DNA, 75 bp, synthetic construct
  source 1..75: mol_type = other DNA
ttgagatgaacgtgcagtaccgcgtcaccaatccggaaaaatatctgtatagcgtgaccagcccggatgacagcc

SEQ ID NO: 166420 - DNA, 75 bp, synthetic construct
  source 1..75: mol_type = other DNA
cagatgttcgcgtaaagcgtatgcttattaagcgtgtcgcgacgatggtgcgcgatatgcatgctgcgggcatta

SEQ ID NO: 166421 - DNA, 75 bp, synthetic construct
  source 1..75: mol_type = other DNA
gtcctcgctgtccattctgttacatacccattatgccattcgtctttgggaaggacgtttacccggacgaaagcc

SEQ ID NO: 166422 - DNA, 75 bp, synthetic construct
  source 1..75: mol_type = other DNA
atcatgattgagaaaggaatcgaagaaaaaaaagccatcgaatgggcggcagatattgccgattatcttggtaaa

SEQ ID NO: 166423 - DNA, 75 bp, synthetic construct
  source 1..75: mol_type = other DNA
cggtgccggtcatgtagatgaaaccggattcggttctgcgctgttctacacctatatcttatctgcattgataaa

SEQ ID NO: 166424 - DNA, 75 bp, synthetic construct
  source 1..75: mol_type = other DNA
atggcagttcgtggaattaacaaggttgtactcgttggtcgtctgggtaaagacccggaagtccgttacatcccc

SEQ ID NO: 166425 - DNA, 75 bp, synthetic construct
  source 1..75: mol_type = other DNA
attccacatgcgcgactggtggcagccgacgaaagcgaacttcttcgggcaccttaaaaagccgcagattatcga

SEQ ID NO: 166426 - DNA, 75 bp, synthetic construct
  source 1..75: mol_type = other DNA
cttggatcaggcgggacgggcgtgacaattggcgcttatttgtcagttatgcagattttgggtcttgaaaaggat

SEQ ID NO: 166427 - DNA, 75 bp, synthetic construct
  source 1..75: mol_type = other DNA
tcactgcttgccggtgaggaaaacgcaaggctgcgtgcaacccactggttacatgagaggggcctgaaagtatga

SEQ ID NO: 166428 - DNA, 75 bp, synthetic construct
  source 1..75: mol_type = other DNA
atgacgacgttaactcagtgtcagcagcaggtgctggatatgctgatttcttaccagcaagaacgtggctttccg

SEQ ID NO: 166429 - DNA, 75 bp, synthetic construct
  source 1..75: mol_type = other DNA
gctcactgcttgccggtgaggaaaacgccaggctgcgtgcaacccactggttacatcagaggggcctgaaagtat

SEQ ID NO: 166430 - DNA, 75 bp, synthetic construct
  source 1..75: mol_type = other DNA
tgagaaaatcgcggcgcagttcggcaaacttaagaatgataaaactgcgcctgtcgaaaagaatcttgaaattga

SEQ ID NO: 166431 - DNA, 75 bp, synthetic construct
  source 1..75: mol_type = other DNA
gcgcactgcttgccgatgaggaaaacgcaaggctgcgtgcaacccactggctacatgagagaggcctgaaagtat

SEQ ID NO: 166432 - DNA, 75 bp, synthetic construct
  source 1..75: mol_type = other DNA
tgttctgggcgatggcaatgatgggcatcgcggtactgatgttatctttgtttattttaaaagaaacgcgcccag

SEQ ID NO: 166433 - DNA, 75 bp, synthetic construct
  source 1..75: mol_type = other DNA
cgggccatgcgtgacgtctggcgcagacagattgacaaaagggccgctgagaaaatcagcgccagtcagtcagcc

SEQ ID NO: 166434 - DNA, 75 bp, synthetic construct
  source 1..75: mol_type = other DNA
cctttgaggcctgtcaggcaaataaatcagcctggatgcaacgccgggatgaactgaagcaggccgaacatgcgt

SEQ ID NO: 166435 - DNA, 75 bp, synthetic construct
  source 1..75: mol_type = other DNA
tctttgcctggatggaacaaattgataatgcagttaatgtcacggctggtgccgtaaccgctaacgcgacctacg

SEQ ID NO: 166436 - DNA, 75 bp, synthetic construct
  source 1..75: mol_type = other DNA
aggataaagctcaacactttatcgcctcggcgatgctttccgccgccggaaatgaatattcacagcatcagggga

SEQ ID NO: 166437 - DNA, 75 bp, synthetic construct
  source 1..75: mol_type = other DNA
ggcgcgtcaaaagaactttgggatagccgccccgaggggagcggctggagctggaaagattttacctgggatgtc

SEQ ID NO: 166438 - DNA, 75 bp, synthetic construct
  source 1..75: mol_type = other DNA
ggcgcagacagattgacaaaagggccgctgagaaaatcagcgccagtcagtcagccggaagcaaacccgaagagc

SEQ ID NO: 166439 - DNA, 75 bp, synthetic construct
  source 1..75: mol_type = other DNA
ttgcgcgagaaactggaggatatatcaggcctcatcgttccggatatttctatcacaaccggcagtaatatgact

SEQ ID NO: 166440 - DNA, 75 bp, synthetic construct
  source 1..75: mol_type = other DNA
gccgccagagatgatggagatggcgaagcagaaagcgcaggaaattcagcaggcgtatgagctgattaagcagca

SEQ ID NO: 166441 - DNA, 75 bp, synthetic construct
  source 1..75: mol_type = other DNA
gatgatgccactttccttaaacctaacagtgcggaaaagatacgctggagcacagacgagatgcagcccgattag

SEQ ID NO: 166442 - DNA, 75 bp, synthetic construct
  source 1..75: mol_type = other DNA
tgtatttcagtacagcagtttgtgtgctgtatcttctttctggtgggtacagagtcgtgagagatttctggcgca

SEQ ID NO: 166443 - DNA, 75 bp, synthetic construct
  source 1..75: mol_type = other DNA
gtcatcttagcgttggtgatcattgctgcgtgggtgctgatgttaaaagggattcgagcaagaccgtgggggcag

SEQ ID NO: 166444 - DNA, 75 bp, synthetic construct
  source 1..75: mol_type = other DNA
agtggctaaacacttatcagggtgaggtatacggagatccgtcatggggcaatgttttaccgctgtttaaacacg

SEQ ID NO: 166445 - DNA, 75 bp, synthetic construct
  source 1..75: mol_type = other DNA
tattaagcctggtcagttggtcctgcttgaagcctttggcggtgggtttacctggggctccgcgctggttcgttt

SEQ ID NO: 166446 - DNA, 75 bp, synthetic construct
  source 1..75: mol_type = other DNA
tcatattgctgcaccaaacgaaaccgtttctaccatgggcttcgaagcggcgacacgtgcaattgaaatggcggg

SEQ ID NO: 166447 - DNA, 75 bp, synthetic construct
  source 1..75: mol_type = other DNA
ctacgccgtaccgacgtttaacatccacaacgccgaaacgatccaggcgatcctcgaagtgtgcagcgaaatgcg

SEQ ID NO: 166448 - DNA, 75 bp, synthetic construct
  source 1..75: mol_type = other DNA
tccgcatcaggctaacctgcgtattatcagtgcaacggcgaaaaaaactcggcatgtcgatggacaatgtcgtgg

SEQ ID NO: 166449 - DNA, 75 bp, synthetic construct
  source 1..75: mol_type = other DNA
tccagagaattcaattcatctgacgatggcgggcaacgaagtcttcaaggttgcggtaacggaactggcgcacat

SEQ ID NO: 166450 - DNA, 75 bp, synthetic construct
  source 1..75: mol_type = other DNA
tgctggctgcctctgaagagccgggaatcatctccacccatctgcatgccgacggtagctatggtgaattgctga

SEQ ID NO: 166451 - DNA, 75 bp, synthetic construct
  source 1..75: mol_type = other DNA
acctgctgaccgcgtatgttgatgaactaagcgcaccttacctggaagatgcagagattgattttgttaccgacc

SEQ ID NO: 166452 - DNA, 75 bp, synthetic construct
  source 1..75: mol_type = other DNA
gcagagatcgactttgttaccgaccagttgggttctcagctgacgctgaaagccccaaacgccaaaatgcgcaaa

SEQ ID NO: 166453 - DNA, 75 bp, synthetic construct
  source 1..75: mol_type = other DNA
acctgctgaccgcgtatgttgatgagttaagcgctccttacctggaagatgcagagatcgactttgttaccgacc

SEQ ID NO: 166454 - DNA, 75 bp, synthetic construct
  source 1..75: mol_type = other DNA
atcacggtgaagtggtgcagcagggcaatcctctggcgatgctgactcatccggcgaatgattttgtccgccagt

SEQ ID NO: 166455 - DNA, 75 bp, synthetic construct
  source 1..75: mol_type = other DNA
taggtttatttccccactggagcgtggcgcaaaatatcgccaccgtaccgcaattacaaaaatggtcgcgggcgc

SEQ ID NO: 166456 - DNA, 75 bp, synthetic construct
  source 1..75: mol_type = other DNA
gcggattacgtgcgtcgcgaagaacgggcagaaggtgaggcactggcagaagagatgacgctacgcgatgcgctc

SEQ ID NO: 166457 - DNA, 75 bp, synthetic construct
  source 1..75: mol_type = other DNA
ttaaactgaccgttgcactgcgcgaaaccactgctggcagtggtgttcctggcgatttccgcgcccaggcaactt

SEQ ID NO: 166458 - DNA, 75 bp, synthetic construct
  source 1..75: mol_type = other DNA
tgaaagcgacaacatgtaacatcactctgacatcgctgaatggttcaaacgtcgttgataatggcaatgatagtt

SEQ ID NO: 166459 - DNA, 75 bp, synthetic construct
  source 1..75: mol_type = other DNA
agggcattagcgccaactccgatcctatcgtcaatggcaacagtggcgtgttagcgatctctgcgtccttaaccg

SEQ ID NO: 166460 - DNA, 75 bp, synthetic construct
  source 1..75: mol_type = other DNA
ccgaaaggccactacacccaattagttgtgcagccgctggggtggtatgacgacccgctaaccgtggtgatgcgc

SEQ ID NO: 166461 - DNA, 75 bp, synthetic construct
  source 1..75: mol_type = other DNA
tgatgagccagggccatattgaacaggctgacgcgccggagcaggtatggcgtgaaccggcgacccgttttgtgc

SEQ ID NO: 166462 - DNA, 75 bp, synthetic construct
  source 1..75: mol_type = other DNA
gtggttgcagtgcaggtatcagccatattgatactacattgtcaggtaatgggtcccgaacctttgacagacttg

SEQ ID NO: 166463 - DNA, 75 bp, synthetic construct
  source 1..75: mol_type = other DNA
ccgaacgtgaacgtaatgcagtgaatgccgaattaaccatggcgcgtacgcgtgacgggatgcgcatggcacagg

SEQ ID NO: 166464 - DNA, 75 bp, synthetic construct
  source 1..75: mol_type = other DNA
tcagcctgattttgcgtaatccgaaagccatggacagcgcccgcaatcaggtgatgtttgcgctcaatgattatc

SEQ ID NO: 166465 - DNA, 75 bp, synthetic construct
  source 1..75: mol_type = other DNA
ttaagtaaagatttcgatcgcggcaatatgcgcttcgattcgcgtgataaaatcgtggcccagataaaactgctg

SEQ ID NO: 166466 - DNA, 75 bp, synthetic construct
  source 1..75: mol_type = other DNA
tcagtatcaggctgtgcgtctggataacggcatggtggtattgttggtttctgacccgcaggcggtaaaatccct

SEQ ID NO: 166467 - DNA, 75 bp, synthetic construct
  source 1..75: mol_type = other DNA
gcgtgatgtacaaaaacagttgggcgctgatggtactgagtggtgtcgtaacaaagatgtgctggtcgataaaaa

SEQ ID NO: 166468 - DNA, 75 bp, synthetic construct
  source 1..75: mol_type = other DNA
tgagtttcgcatcgataacaattcagcgaagtttcgcagcaaaaccgatgagttgattacctatctgattggtaa

SEQ ID NO: 166469 - DNA, 75 bp, synthetic construct
  source 1..75: mol_type = other DNA
cacagtacgtttctgttccggttgccgacggtggcgaaggaacggtggaagcgatgattgcagccacccaggggg

SEQ ID NO: 166470 - DNA, 75 bp, synthetic construct
  source 1..75: mol_type = other DNA
gtcgcacaggcgatagaaaaaggatttcgggaaatttttcctgatgcgcggtacgtttctgttccggttgctgac

SEQ ID NO: 166471 - DNA, 75 bp, synthetic construct
  source 1..75: mol_type = other DNA
gcggcagtgctaccaatgatggcggcgcgggaatggtgcaggcgctgggagcgaagttaagcgatgccagtggta

SEQ ID NO: 166472 - DNA, 75 bp, synthetic construct
  source 1..75: mol_type = other DNA
gtgatctgcaccgaatgtcctggtctcagctggaaaaagccgcggaagagtcgaccgtacatcatgattatgccc

SEQ ID NO: 166473 - DNA, 75 bp, synthetic construct
  source 1..75: mol_type = other DNA
gcttatgacaatatttaccgtgcttcacgtaatatcgccgcgacactggcgattggaatgcgcaacgcggggtga

SEQ ID NO: 166474 - DNA, 75 bp, synthetic construct
  source 1..75: mol_type = other DNA
aatcctgcaggcgctggagagcggcgcgacaaacattattatcggcattggcggcagcgccaccaacgacggcgg

SEQ ID NO: 166475 - DNA, 75 bp, synthetic construct
  source 1..75: mol_type = other DNA
gttacagatgatggtaacgataattacatactacgtatacctaatatggggttggataaaatagttaataaaaca

SEQ ID NO: 166476 - DNA, 75 bp, synthetic construct
  source 1..75: mol_type = other DNA
gacaaaattgctggagatggtgcagcttgcgcatctggcggatcgttatccggcgcagctttccggcgggcagaa

SEQ ID NO: 166477 - DNA, 75 bp, synthetic construct
  source 1..75: mol_type = other DNA
cttgcgcatctggcggatcgttatccggcccagctttcaggcgggcagaaacagcgtgtggcgctggcgcgcgcg

SEQ ID NO: 166478 - DNA, 75 bp, synthetic construct
  source 1..75: mol_type = other DNA
gaagctttcagtggggcttatgacaatatttaccgtgcttcacgcaatatcgccgcgacgctggcgattggaatg

SEQ ID NO: 166479 - DNA, 75 bp, synthetic construct
  source 1..75: mol_type = other DNA
aataaaaacctggcaaccgctaaaatcaacttctgtgctaagcgcattctgatggtaagcgactcgtcagaaccg

SEQ ID NO: 166480 - DNA, 75 bp, synthetic construct
  source 1..75: mol_type = other DNA
gcagctgaagatgcggaaatacatcatgattatgcccgggcattaatattgtggcagcatgcatatcatgctggt

SEQ ID NO: 166481 - DNA, 75 bp, synthetic construct
  source 1..75: mol_type = other DNA
cggattcgattggcattcagatcgacggcgacaaggcggttgtcaataacgacggtgacaacgccatcagtaacg

SEQ ID NO: 166482 - DNA, 75 bp, synthetic construct
  source 1..75: mol_type = other DNA
tgctggcaataacgggaaggtgattcaggacggcgatctggatgtcagcggcggcggtcacggtattgatatcac

SEQ ID NO: 166483 - DNA, 75 bp, synthetic construct
  source 1..75: mol_type = other DNA
cgcaggttaacggtgatgaagccaccgtaaacaataacggcagcaccaccgttgacggacagggctcgaccggta

SEQ ID NO: 166484 - DNA, 75 bp, synthetic construct
  source 1..75: mol_type = other DNA
attggagagaaaaacgcgcttgcagatgggtcgcaggttgcttccttggatttgcccctatatttccagacatct

SEQ ID NO: 166485 - DNA, 75 bp, synthetic construct
  source 1..75: mol_type = other DNA
aataccaccgttgacggacagggctcgaccggtaccgaaatcgcgggtaataacgcggtggtgaaccaggacggc

SEQ ID NO: 166486 - DNA, 75 bp, synthetic construct
  source 1..75: mol_type = other DNA
tgatatcaccggcgacagcgcaactgtggacaacaaaggcggcatgactgtcaccgatccggattccatcggtat

SEQ ID NO: 166487 - DNA, 75 bp, synthetic construct
  source 1..75: mol_type = other DNA
catcagcaacggcggcaccggcacgcaggttaacggtgatgaagccaccgtaaacaataacggcaatcaccaccg

SEQ ID NO: 166488 - DNA, 75 bp, synthetic construct
  source 1..75: mol_type = other DNA
caacgacggtgacagtgccatcagcaacggcggcaccggcacgcaggttaacggcgacgaagccaccgtgaacaa

SEQ ID NO: 166489 - DNA, 75 bp, synthetic construct
  source 1..75: mol_type = other DNA
ttcttagctggatatctgccgggcatcctcaccgctgttgccttaatgtttgtagctgcactttatgcacgacgt

SEQ ID NO: 166490 - DNA, 75 bp, synthetic construct
  source 1..75: mol_type = other DNA
tccatcggtattcagatcgacggcgacaaggcggtcgtgaacaacgacggtgacaacgccatcagcaacggcggc

SEQ ID NO: 166491 - DNA, 75 bp, synthetic construct
  source 1..75: mol_type = other DNA
gataacaaaggcggtatgacggttaccgatccggattccatcggtattctgatcgacggcgacaaagccatcgtc

SEQ ID NO: 166492 - DNA, 75 bp, synthetic construct
  source 1..75: mol_type = other DNA
atcgtcaacaatgacggcgacaacgccatcagcaacggcggcaccggcacacaggttaacggtgatgaagccacc

SEQ ID NO: 166493 - DNA, 75 bp, synthetic construct
  source 1..75: mol_type = other DNA
cttttttccgtgcgcttcgccctaaatcacggctaactgtttccgaatgggctgataagtatcgtcatgtagcgc

SEQ ID NO: 166494 - DNA, 75 bp, synthetic construct
  source 1..75: mol_type = other DNA
aatacagctgatgccttggcaggatatctaagagtttccttgcctaaaaatatatcttgggaaacatttcaacaa

SEQ ID NO: 166495 - DNA, 75 bp, synthetic construct
  source 1..75: mol_type = other DNA
tacgccagtttgatagaaagcgcaaagcgctctatagaccaatacaatgaggcctgtgtcgccaatggaagtgat

SEQ ID NO: 166496 - DNA, 75 bp, synthetic construct
  source 1..75: mol_type = other DNA
cactggcagcatcgctcattttttaatcagcgttaccactggcaacaccgttcactttttagccactgatggcac

SEQ ID NO: 166497 - DNA, 75 bp, synthetic construct
  source 1..75: mol_type = other DNA
gtgacggtcgaaaattacagatttcttccgtttgtattgactctggtgggcattttacgacagaggtatatcgct

SEQ ID NO: 166498 - DNA, 75 bp, synthetic construct
  source 1..75: mol_type = other DNA
gggcagacaaaagaaaagtgggtgaaagtctacgagcgtaacgagcctcttgattgccgtaactatgcaactgcc

SEQ ID NO: 166499 - DNA, 75 bp, synthetic construct
  source 1..75: mol_type = other DNA
caatgtaattggttttttgcgtggagtttcggaagagatccgtcgttcaactagagagcatagagatcaaggtga

SEQ ID NO: 166500 - DNA, 75 bp, synthetic construct
  source 1..75: mol_type = other DNA
tcccgatttttgatggcggtgactccagtagttgtctctgtgctaatggcgaccctcgccatgaaaatgtttgag

SEQ ID NO: 166501 - DNA, 75 bp, synthetic construct
  source 1..75: mol_type = other DNA
ccggcacgcagattaacggtgatgacgccacggcaaacaacaacggcaaaaccaccgttgacggcaaggattcca

SEQ ID NO: 166502 - DNA, 75 bp, synthetic construct
  source 1..75: mol_type = other DNA
actgttaatcagggcagttttgctggcatcatcgaaggtgctggtcagctcaccattgcgcaaaacggcagctac

SEQ ID NO: 166503 - DNA, 75 bp, synthetic construct
  source 1..75: mol_type = other DNA
ggggcgcagcgatgagttaatgaatgtcggcgacacgcactgtcagagcgatccgcaggattgctttggtttgat

SEQ ID NO: 166504 - DNA, 75 bp, synthetic construct
  source 1..75: mol_type = other DNA
gttgccgataaatatggcgtgcggatcaccgatatcattactccgtctgagcgaatgcgccgcctgagccgttag

SEQ ID NO: 166505 - DNA, 75 bp, synthetic construct
  source 1..75: mol_type = other DNA
aatcacgtcgcatgtctgtgagcggacgccggcagcggaactgacctgtatccgtaaggctcatattggcggtaa

SEQ ID NO: 166506 - DNA, 75 bp, synthetic construct
  source 1..75: mol_type = other DNA
ccgtgattgtgtcgttgttgtccgtcatcaggggccaaaagcgaacggaatgccagaattacataaactcatgcc

SEQ ID NO: 166507 - DNA, 75 bp, synthetic construct
  source 1..75: mol_type = other DNA
gtttgccaaataaagaaaaagtgcgtattcgccagctttatgctgaaggtaaagtggaccgcatggcgctgctgg

SEQ ID NO: 166508 - DNA, 75 bp, synthetic construct
  source 1..75: mol_type = other DNA
gaacactgcacatatcctgtgcgaaatggatggggcaggattcatcaggcgtttgatacggatatgcaggtctca

SEQ ID NO: 166509 - DNA, 75 bp, synthetic construct
  source 1..75: mol_type = other DNA
tgtccgggcattcaccggtaaaccagtggagtgtcggatggccattgccggatttaacaactgctgtaaggactc

SEQ ID NO: 166510 - DNA, 75 bp, synthetic construct
  source 1..75: mol_type = other DNA
atgaaactgcgtctgcaggtgaaagtgaaaacagaaacctggaaacctgtcgttgagtggacggaaagctgtccg

SEQ ID NO: 166511 - DNA, 75 bp, synthetic construct
  source 1..75: mol_type = other DNA
gttttacgtcaatgattgctttgttgatccagtatgccaatgccaacggtatgtggctgacgtttggtgaagcat

SEQ ID NO: 166512 - DNA, 75 bp, synthetic construct
  source 1..75: mol_type = other DNA
tattcacagtcatggtggccagtctgatccactgggcagaagaacatggctacagactgacgttcggtgaggctt

SEQ ID NO: 166513 - DNA, 75 bp, synthetic construct
  source 1..75: mol_type = other DNA
accaacagtctgcactgccagcgactggcggtggattttaatctgtttattaacggtgaataccagacccgcaca

SEQ ID NO: 166514 - DNA, 75 bp, synthetic construct
  source 1..75: mol_type = other DNA
tcactcgacagcaatgtgatcgcttccttcgaacaacctttctctcatcatggtgggacaaaaagtgttaagcgg

SEQ ID NO: 166515 - DNA, 75 bp, synthetic construct
  source 1..75: mol_type = other DNA
ctttctgatgtcgttccgctgatggcgcgtctgtatccaaacggtccagccgatataaaccacttccaggctgcg

SEQ ID NO: 166516 - DNA, 75 bp, synthetic construct
  source 1..75: mol_type = other DNA
attgggaatcgctcggcgggacgtggggcggtcgtttcagtaaaccagacggaaatcatttcagtctggaacaca

SEQ ID NO: 166517 - DNA, 75 bp, synthetic construct
  source 1..75: mol_type = other DNA
caaaaggcagcagagtgccatttatcataatcgttgcgtcgctggcttggattatcttcatcggcatcccacaca

SEQ ID NO: 166518 - DNA, 75 bp, synthetic construct
  source 1..75: mol_type = other DNA
ccggaaggctgggcgccaggtgaacattatccggaaaaatgggctcgtcgttttgccgtcgattttgtcggtggt

SEQ ID NO: 166519 - DNA, 75 bp, synthetic construct
  source 1..75: mol_type = other DNA
gacacttatcaatacggtttgtcggcgcgtggtctggcgattgatacgtacaccgatagcaaagaagagttcccg

SEQ ID NO: 166520 - DNA, 75 bp, synthetic construct
  source 1..75: mol_type = other DNA
cagaggccaccggagccgccggataacttcggagacctgagaaaggcagtagatcgcacttatgctgaaatgggt

SEQ ID NO: 166521 - DNA, 75 bp, synthetic construct
  source 1..75: mol_type = other DNA
atggtacatgaccgcatagcggaggaactcgaggcgaaaggattttaccggagggcgtcggcgcgatggggtgaa

SEQ ID NO: 166522 - DNA, 75 bp, synthetic construct
  source 1..75: mol_type = other DNA
tatagtcgttgccttgatggctggtcttgtcttcattgtcataccgaaacaggaagatagtgtcattgaggacgc

SEQ ID NO: 166523 - DNA, 75 bp, synthetic construct
  source 1..75: mol_type = other DNA
ttattcccgtatgcaacgggtgaataatgctctcccacccgagtcggggatggtgagaagccaggttattgttaa

SEQ ID NO: 166524 - DNA, 75 bp, synthetic construct
  source 1..75: mol_type = other DNA
gcctgaagggaaatggctcaggtgtcctgaataactttaagccgggagaggtgattcccggctataccgaaaatc

SEQ ID NO: 166525 - DNA, 75 bp, synthetic construct
  source 1..75: mol_type = other DNA
aaaccgtgaatgtcagtaaaacggaaatcacgtcgcatgtctgtgagcgaacgccggcggcggagctgacctgca

SEQ ID NO: 166526 - DNA, 75 bp, synthetic construct
  source 1..75: mol_type = other DNA
gaaacatggctgtatcagtatttcccgccagcgccggataaacgtcagtatgttgacgaccgcgtgatgagttaa

SEQ ID NO: 166527 - DNA, 75 bp, synthetic construct
  source 1..75: mol_type = other DNA
tatgttcagctgcggtactaatgaacgtcggatgtgcgacaccattcatccgcaaattcatgactctgatcgtct

SEQ ID NO: 166528 - DNA, 75 bp, synthetic construct
  source 1..75: mol_type = other DNA
tggcggggcaacggcgagtggatttgccgtccgctgaataatccgcaaaaattgcagttcaatgcttacaccgac

SEQ ID NO: 166529 - DNA, 75 bp, synthetic construct
  source 1..75: mol_type = other DNA
cgctgaccagcgatgcgccatcggggaaggaaggtgccgcattcctggcgctgatggcagaaaaagcccgtcttg

SEQ ID NO: 166530 - DNA, 75 bp, synthetic construct
  source 1..75: mol_type = other DNA
acgctgaccgtacggaacagatgcaggagaaagcgtcagtggaggaaataagtctgccactgctgacaaaaatgt

SEQ ID NO: 166531 - DNA, 75 bp, synthetic construct
  source 1..75: mol_type = other DNA
atgtcagttacagagtttaaggtaaaagcggggcgtaaatccagccgtaaaccgtcaaaagtgcaggagactgca

SEQ ID NO: 166532 - DNA, 75 bp, synthetic construct
  source 1..75: mol_type = other DNA
tgtggtcacacgtcacgcagtccgcttgactcgctggaaacggctatcggattccacatgcgcgactggtggcag

SEQ ID NO: 166533 - DNA, 75 bp, synthetic construct
  source 1..75: mol_type = other DNA
tggtgtcctggcgttatggaaacgtatgtgtccagcgtggtgtgcagttgcgcagtgaggatgacgtggctgacg

SEQ ID NO: 166534 - DNA, 75 bp, synthetic construct
  source 1..75: mol_type = other DNA
tgacggggacggttatgtggaccgtgtggcgcttgatgctgctctgctggaaaaactccaggctgtcgcagagta

SEQ ID NO: 166535 - DNA, 75 bp, synthetic construct
  source 1..75: mol_type = other DNA
tatggtcacacgtcacgcagtccgctggactcgctggagagcgccatcggctttcacatgcgtgactggtggcag

SEQ ID NO: 166536 - DNA, 75 bp, synthetic construct
  source 1..75: mol_type = other DNA
cggtaagggcctttcatttggcggcagtcttattcgcccggaagctaccggctacggtctggtttatttcacaga

SEQ ID NO: 166537 - DNA, 75 bp, synthetic construct
  source 1..75: mol_type = other DNA
cgatatcggcgttggtggccgtgaagtcggctttatggcagggatgatgaaaaagctctccaacaacaccgcctg

SEQ ID NO: 166538 - DNA, 75 bp, synthetic construct
  source 1..75: mol_type = other DNA
agcttatcgccaacggcgttaaagcggtggccgaaggggcaaatatgccaacgaccatcgaagcgactgagctgt

SEQ ID NO: 166539 - DNA, 75 bp, synthetic construct
  source 1..75: mol_type = other DNA
cggtatcacccgttacgtcaccgaaatccttgttaaaaccacgggcaccatgcagatgctggggagtgcaccaca

SEQ ID NO: 166540 - DNA, 75 bp, synthetic construct
  source 1..75: mol_type = other DNA
aaggccgcgcagcccgagcctcagccgcaaacgccggagggggaggattacgggttttcagacgacatcccgttc

SEQ ID NO: 166541 - DNA, 75 bp, synthetic construct
  source 1..75: mol_type = other DNA
ccgcgatggtcgagtggcagattacgccaaagaatttggtctggtctatctcgaaggccaacagccgtggtctgt

SEQ ID NO: 166542 - DNA, 75 bp, synthetic construct
  source 1..75: mol_type = other DNA
gaggatgccggaacataccgctgtctgccggagccggaagcggtgctgacggaggcggaagaagaacgcctgaac

SEQ ID NO: 166543 - DNA, 75 bp, synthetic construct
  source 1..75: mol_type = other DNA
taaaggtgtcggcctgttacagaatctggttgttcatgccctgccaggtgaccgttacggtgtcgccgcaggtgg

SEQ ID NO: 166544 - DNA, 75 bp, synthetic construct
  source 1..75: mol_type = other DNA
tgacggaggcggaagaagaacgcctgaacgaactgatggcacgttacgacgcactggaaaaccagtgtgaggaat

SEQ ID NO: 166545 - DNA, 75 bp, synthetic construct
  source 1..75: mol_type = other DNA
cagaccattcgtcgtctggtgaccgaaagtgaagtggcggtggcggggaacagtaaattccgcttcgtgggggct

SEQ ID NO: 166546 - DNA, 75 bp, synthetic construct
  source 1..75: mol_type = other DNA
ggtcacacgtcacgcagtccgcttgactcgctggaaaccgctatcggattccacatgcgcgactggtggcagccg

SEQ ID NO: 166547 - DNA, 75 bp, synthetic construct
  source 1..75: mol_type = other DNA
tgcgtgccggaagtggtgtggtggtgtcctggcgttacggtaatgtgtgtgtccagcgtggtgtgcagttgcgca

SEQ ID NO: 166548 - DNA, 75 bp, synthetic construct
  source 1..75: mol_type = other DNA
ccggagatgcgtgccggaagtggcgtggtggtgtcctggcgttatggaaacgtatgtgtccagcgtggtgtgcag

SEQ ID NO: 166549 - DNA, 75 bp, synthetic construct
  source 1..75: mol_type = other DNA
aaccgctgggtgccatgctggatgtgtgcaccacgtccacaggcagagacagaaaccacggaataccgtgacaac

SEQ ID NO: 166550 - DNA, 75 bp, synthetic construct
  source 1..75: mol_type = other DNA
aaaagtgatggcgctggcaggcagtgaaatgaagcgcctgtatgccgtcgggagtgagaacgggggtaagcgtaa

SEQ ID NO: 166551 - DNA, 75 bp, synthetic construct
  source 1..75: mol_type = other DNA
tcaccgctgaatgtgcgcacggtgccgtattctgcggagtccgtcagcgaactggcagggtccattcagggcgtc

SEQ ID NO: 166552 - DNA, 75 bp, synthetic construct
  source 1..75: mol_type = other DNA
aggtaacagtaaattccgcttcgtgggggctgatgctttctcacctgacgaactgcgtactgatttgttcagcga

SEQ ID NO: 166553 - DNA, 75 bp, synthetic construct
  source 1..75: mol_type = other DNA
cgctgaccagcgatgcgccatcggggaaggaaggtgccgcattcatggcgatgatggcagaaaaagcccgtcttg

SEQ ID NO: 166554 - DNA, 75 bp, synthetic construct
  source 1..75: mol_type = other DNA
tgaccgaaagtgaagtggcggtggctgggaacagtaaattccgcttcgtgggggctgatgccttctcgccagagg

SEQ ID NO: 166555 - DNA, 75 bp, synthetic construct
  source 1..75: mol_type = other DNA
ttaccgaaagtgaagtggcggtggcggggaacagtaaattccgcttcgtgggggctgatgccttctcgccagagg

SEQ ID NO: 166556 - DNA, 75 bp, synthetic construct
  source 1..75: mol_type = other DNA
actcaattacgtcgtcagttttcgctgcaacatgtccgggtgatccctgggcttgcggatgctgatgtcggcggg

SEQ ID NO: 166557 - DNA, 75 bp, synthetic construct
  source 1..75: mol_type = other DNA
tgcagagcacaatatgaaagacaaccgctgggttccaggctggatgtgtgcaccacatccacagacagatgccac

SEQ ID NO: 166558 - DNA, 75 bp, synthetic construct
  source 1..75: mol_type = other DNA
cgctgggtgccaggctggatgtgtgcaccacgtccacagacggataccactgaacgcactgataacctggctgat

SEQ ID NO: 166559 - DNA, 75 bp, synthetic construct
  source 1..75: mol_type = other DNA
cgctgggtgccaggctggatgtgtgcaccacgcccacagacggatgccactgaacgcaccgataacctggctgat

SEQ ID NO: 166560 - DNA, 75 bp, synthetic construct
  source 1..75: mol_type = other DNA
tgacgagcaactggcggaatattacctcacccgtggcagcaataatcgccgggatacctggaggcgatcatatcc

SEQ ID NO: 166561 - DNA, 75 bp, synthetic construct
  source 1..75: mol_type = other DNA
tgtagattcaatctgtcaatgcaacacccctttcaattatctctttcggtgtttttgaacttcagtgtctttctc

SEQ ID NO: 166562 - DNA, 75 bp, synthetic construct
  source 1..75: mol_type = other DNA
tcacccgtggcagcaataatcgccgggatacctggagcgatcatatccgccgaacaatcattaaagaaagccgcc

SEQ ID NO: 166563 - DNA, 75 bp, synthetic construct
  source 1..75: mol_type = other DNA
tgcattaatcgcagcggaatcgctgggattgggcggggtatatatcggcggcctgcgcaataatattgaagcggt

SEQ ID NO: 166564 - DNA, 75 bp, synthetic construct
  source 1..75: mol_type = other DNA
ttaccgacaaagcgttacgtgaagaactggtgacgctgaccggcgggcaaaaacacgtagcgcaagcggcggagt

SEQ ID NO: 166565 - DNA, 75 bp, synthetic construct
  source 1..75: mol_type = other DNA
actcagccaggaggtactgttatccctgctcagtttctgcaccgcgtgcagcatccacggcgttcagacccgcga

SEQ ID NO: 166566 - DNA, 75 bp, synthetic construct
  source 1..75: mol_type = other DNA
gacaaccgctgggtgcctgactggatgtgtgcaccacgtccgcaggcagagacggaaaccacggaataccgtgac

SEQ ID NO: 166567 - DNA, 75 bp, synthetic construct
  source 1..75: mol_type = other DNA
agggatggtcacgggacatgacgacgttcctgtcactcagtcaggaggtactgttatccctgctcagtttctgca

SEQ ID NO: 166568 - DNA, 75 bp, synthetic construct
  source 1..75: mol_type = other DNA
tgccctgactactctgccgatgggcggtggtaaaggcggcagcgactttgatccgaaagggaaaagcgaaggcga

SEQ ID NO: 166569 - DNA, 75 bp, synthetic construct
  source 1..75: mol_type = other DNA
cgatatcggcgttggtggccgtgaagtcggctttatggcggggatgatgaaaaaactgtctaacaataccgcctg

SEQ ID NO: 166570 - DNA, 75 bp, synthetic construct
  source 1..75: mol_type = other DNA
aggtcgccacgtcagaaacctggcgcgacaaacagacgggggaaatgaaggaacagacggaatggcaccacgtgg

SEQ ID NO: 166571 - DNA, 75 bp, synthetic construct
  source 1..75: mol_type = other DNA
cagaatatgccgttctggcaggttattgcggaagccagtcttgcagcaagagaggccggtcacgctgtccgtgag

SEQ ID NO: 166572 - DNA, 75 bp, synthetic construct
  source 1..75: mol_type = other DNA
ggcgaaggtcagggcgtggacgccggagatgcgtgccggaagcggtgtggtggtgtcctggcgttatggcaacgt

SEQ ID NO: 166573 - DNA, 75 bp, synthetic construct
  source 1..75: mol_type = other DNA
acgtcatgcagcccgctggacacgctggagagcgccatcggttttcacatgcgcgactggtggcagccgacaaaa

SEQ ID NO: 166574 - DNA, 75 bp, synthetic construct
  source 1..75: mol_type = other DNA
catccacggcgttcagacccgcgagcatggtcacacgtcacgcagtccgctggactcgctggagagcgctatcgg

SEQ ID NO: 166575 - DNA, 75 bp, synthetic construct
  source 1..75: mol_type = other DNA
gtgaaccagaaaccacccgcaaagcaagccgtaaatctgcaaaaacgcaaggaaacagtcctgtctgccctgctg

SEQ ID NO: 166576 - DNA, 75 bp, synthetic construct
  source 1..75: mol_type = other DNA
agccctgaatgaggccggactgtccggtgccgcacgggacgcagagaagatgaagaaaggcgatgccgctgaaca

SEQ ID NO: 166577 - DNA, 75 bp, synthetic construct
  source 1..75: mol_type = other DNA
tgatgaagccggggttatacccgcccgacagatgaaacagctgatggaggtaatcgagaagcataacgctcgcgc

SEQ ID NO: 166578 - DNA, 75 bp, synthetic construct
  source 1..75: mol_type = other DNA
gccagaacgtcactagcgttgtgggctactactctgatgcaaaggatgattactacagtaaggattcatcattca

SEQ ID NO: 166579 - DNA, 75 bp, synthetic construct
  source 1..75: mol_type = other DNA
ccacggcagcctggcggctgcaaattgaaaaccgccccggttcgtcctgttgttgccgcacgccccgcagaatat

SEQ ID NO: 166580 - DNA, 75 bp, synthetic construct
  source 1..75: mol_type = other DNA
gcgccaaaacgctcggcattgattttgataaccgggaatggcaggggcatggcaaaccccatgaagccgatattg

SEQ ID NO: 166581 - DNA, 75 bp, synthetic construct
  source 1..75: mol_type = other DNA
tactacagcaaggattcatcatttacgtcctggcagggaaccggagctgaagcgctcggcttatccggggatgtt

SEQ ID NO: 166582 - DNA, 75 bp, synthetic construct
  source 1..75: mol_type = other DNA
acggcgctggccccctatgggacacagaaaaaagcgcttgaagatgatggattaccggcccgcaccgttgccgct

SEQ ID NO: 166583 - DNA, 75 bp, synthetic construct
  source 1..75: mol_type = other DNA
ttcgagcggtgaagagggggagatttccccttacactgcagaaatggcgagagaattagcaatatggtacggtaa

SEQ ID NO: 166584 - DNA, 75 bp, synthetic construct
  source 1..75: mol_type = other DNA
aaagcaaaaagcactggagtcaaaattgcataaagaaattcgcgccggtaaaggttgtaaggcaacagagtcaga

SEQ ID NO: 166585 - DNA, 75 bp, synthetic construct
  source 1..75: mol_type = other DNA
tgctaaaaatgcagagtatatggcaagactggcaggacttattcaccattttagcggtgaggaaggtgacatttc

SEQ ID NO: 166586 - DNA, 75 bp, synthetic construct
  source 1..75: mol_type = other DNA
ggcaaagataaaaactcaaactgtattgtcgagtacaagcttcctgaagtttctcctggtaccttactgaaccag

SEQ ID NO: 166587 - DNA, 75 bp, synthetic construct
  source 1..75: mol_type = other DNA
cgcgcgttgggataaaactgctcatgacgctaacccacaataataagccgctgccgtttggggcgatggtgacat

SEQ ID NO: 166588 - DNA, 75 bp, synthetic construct
  source 1..75: mol_type = other DNA
aatgagcttattgatgaaagtctggcgatgagtggtgaacgacgttgccttcacttttctcctcaggctgccaga

SEQ ID NO: 166589 - DNA, 75 bp, synthetic construct
  source 1..75: mol_type = other DNA
gtacggctgcggcgcttggcggggcaacggtctacgggctgtttaccgggacggatttcgggattgtatttggtg

SEQ ID NO: 166590 - DNA, 75 bp, synthetic construct
  source 1..75: mol_type = other DNA
gtacggctgcggcgctcggcggggcgacggtattcgggctgtttaccggaacggatttcgggattgtgtttggtg

SEQ ID NO: 166591 - DNA, 75 bp, synthetic construct
  source 1..75: mol_type = other DNA
ggcagacatcgagaagaaaatcaaagagctggctgttaaaggccgtgacggcaagctgacggttgaagatctgac

SEQ ID NO: 166592 - DNA, 75 bp, synthetic construct
  source 1..75: mol_type = other DNA
ggcgcgtgtactgtcagcctggattgcatcaaaaacaggttatgacggtgcacctgttgacgcattgtgtgcagt

SEQ ID NO: 166593 - DNA, 75 bp, synthetic construct
  source 1..75: mol_type = other DNA
attctgtcgtttattcaccagcaggatattgcatcgttggtatcgggcttgttgactcgtcatcggaacggaaga

SEQ ID NO: 166594 - DNA, 75 bp, synthetic construct
  source 1..75: mol_type = other DNA
tggcgagtggcggcacattttctggtgtcatttattgttggcgtgctgggtgcacgtgcgttgtcagcctgggtt

SEQ ID NO: 166595 - DNA, 75 bp, synthetic construct
  source 1..75: mol_type = other DNA
atgacgtgttgcttgaggcggtgaagctggccgcagagggccacatatccggctcgctggcccgactcagcaata

SEQ ID NO: 166596 - DNA, 75 bp, synthetic construct
  source 1..75: mol_type = other DNA
tcttgataccactcaggcccagcggcagcacagcaaatattacgaaaaaggagccgtgattatcccggaacggga

SEQ ID NO: 166597 - DNA, 75 bp, synthetic construct
  source 1..75: mol_type = other DNA
ccgacagaccgggctaacgccctgatcatcaccggcacgaacgacagccggaaaaaaattaatgagtacattcag

SEQ ID NO: 166598 - DNA, 75 bp, synthetic construct
  source 1..75: mol_type = other DNA
gtacggctgcggcgcttggaggggcgacggcattcggtgtgttcaccggtacggattttgggatagtgtttggcg

SEQ ID NO: 166599 - DNA, 75 bp, synthetic construct
  source 1..75: mol_type = other DNA
aaaacaccatcatacactaaatcagtaagttggcagcatcacccggtgacgaaactgcttaaattaccgcagcat

SEQ ID NO: 166600 - DNA, 75 bp, synthetic construct
  source 1..75: mol_type = other DNA
gtctggtaaacagtgtaccggggctgtcggacgtcacttccagcttcgcgatggaacagattaaatacaccactt

SEQ ID NO: 166601 - DNA, 75 bp, synthetic construct
  source 1..75: mol_type = other DNA
cattccgcaggagctggcgacggccgcatcaatgactgaaaacggtcatcgtcgggatatgcaccctgccgaaca

SEQ ID NO: 166602 - DNA, 75 bp, synthetic construct
  source 1..75: mol_type = other DNA
aattccgcaggagctggcgaccgcagcatcaatgactgaaaacggtcatcgtcgggatatgcaccctgccgaaca

SEQ ID NO: 166603 - DNA, 75 bp, synthetic construct
  source 1..75: mol_type = other DNA
gaaaccctgttctggcagtggggcgagcgttttccgtcactggccggaatggaacgctggcagtggcaggatatg

SEQ ID NO: 166604 - DNA, 75 bp, synthetic construct
  source 1..75: mol_type = other DNA
atcgaaggccagcttcgtacccgtagctgggaggataacagtatcacccgttacgtcaccgaaatccttgtgaaa

SEQ ID NO: 166605 - DNA, 75 bp, synthetic construct
  source 1..75: mol_type = other DNA
ggccctgttaccggagggatggtcacgggacatgacgacgttcctgtcactcagtcaggaggtgctgttatccct

SEQ ID NO: 166606 - DNA, 75 bp, synthetic construct
  source 1..75: mol_type = other DNA
cattatgcgctgaccagcgatgcaccgtcggggaaggaaggtgccgcattcatggcgctgatggcagaacactct

SEQ ID NO: 166607 - DNA, 75 bp, synthetic construct
  source 1..75: mol_type = other DNA
gtaccaggcgctggttgctcagacagaaatcgaactggcgttccattcgccggaaacagtcggaagctggcatgc

SEQ ID NO: 166608 - DNA, 75 bp, synthetic construct
  source 1..75: mol_type = other DNA
catatgaaagacaaccgctgggtgcctggctggatgtgtgcaccacgtccacagacggataccactgaacgcacc

SEQ ID NO: 166609 - DNA, 75 bp, synthetic construct
  source 1..75: mol_type = other DNA
ccgacctgctggaagcagaaatgaagctgattgactgcatggcgaaggtcagggcgtggacgccggagatgcgtg

SEQ ID NO: 166610 - DNA, 75 bp, synthetic construct
  source 1..75: mol_type = other DNA
gcaagggaggccggtcacgctgtccgtgagatggagcggtggatggtgccgaacaaactccgggaggcagcgtga

SEQ ID NO: 166611 - DNA, 75 bp, synthetic construct
  source 1..75: mol_type = other DNA
tcgccgactggcagcactcaacatgctggcagagcgtgacatcattcaggctgactggcctgtccgtgtgaaggt

SEQ ID NO: 166612 - DNA, 75 bp, synthetic construct
  source 1..75: mol_type = other DNA
tgaccgaaagtgaagtggcggtggtggggaacagtaaattccgcttcgtgggggctgatgctttctcacctgacg

SEQ ID NO: 166613 - DNA, 75 bp, synthetic construct
  source 1..75: mol_type = other DNA
gcggcagaaactggttatagccaatcaaccgtcgttcgtgcattccgtgaagctgtaaacaaaggaatcctgtct

SEQ ID NO: 166614 - DNA, 75 bp, synthetic construct
  source 1..75: mol_type = other DNA
attacttggcagcgtggtgatgatcttcgtatgtgcatggctgatgcacaacgtagaagtcgccaatctggtgct

SEQ ID NO: 166615 - DNA, 75 bp, synthetic construct
  source 1..75: mol_type = other DNA
atttttaaccctggtctggtgactgactttgtatggcgtaatttcgttgttgatccaccagaagatacgttggtg

SEQ ID NO: 166616 - DNA, 75 bp, synthetic construct
  source 1..75: mol_type = other DNA
gaattagcaatatggtacggtaatgagtatgtgcggttgtctaatccgttaacttttgacaactctgccctgacc

SEQ ID NO: 166617 - DNA, 75 bp, synthetic construct
  source 1..75: mol_type = other DNA
ggggagaaaataaagccgaagccattgccgctgcaatgaaaggcggttatatcaacgcactggttaccgatcagg

SEQ ID NO: 166618 - DNA, 75 bp, synthetic construct
  source 1..75: mol_type = other DNA
gcaaaaggtgacgttgtcacggatattaaaatacataacgaactgattggcttacctttaagctcgctgaagacc

SEQ ID NO: 166619 - DNA, 75 bp, synthetic construct
  source 1..75: mol_type = other DNA
agacaaccgctgggtgcctggctggatgtgtacaccacgtccacaggcagagacggaaaccacggaataccgtga

SEQ ID NO: 166620 - DNA, 75 bp, synthetic construct
  source 1..75: mol_type = other DNA
gagggatggtcacgggacatgacgacgttcctgtcactcagtcaggaggtgctgttatccctgctcagtttctgc

SEQ ID NO: 166621 - DNA, 75 bp, synthetic construct
  source 1..75: mol_type = other DNA
tcgcagaggctggtatggcggcaagggaggccggtcatgttgtccgtgagatggagcggtggatggtcccgaaca

SEQ ID NO: 166622 - DNA, 75 bp, synthetic construct
  source 1..75: mol_type = other DNA
tcagtggaggaaatcagtctaccactgctgacgaaaatgtcttccgaacgcacgctggcagtccaggcggcactc

SEQ ID NO: 166623 - DNA, 75 bp, synthetic construct
  source 1..75: mol_type = other DNA
gcactggaaaaccagtgtgaggaatccgacctgctggaagcagaaatgaagctgatgcgctgcatggcgaaggtc

SEQ ID NO: 166624 - DNA, 75 bp, synthetic construct
  source 1..75: mol_type = other DNA
cgctgggtgcctggctggatgtgtgcaccacgtccacagacggatgccactgaacacgccgataacctggctgat

SEQ ID NO: 166625 - DNA, 75 bp, synthetic construct
  source 1..75: mol_type = other DNA
atgcagcagccggacaaatctctggcactgctggcatggacgctctgcctgaatgtgtttggcagcggggcgtac

SEQ ID NO: 166626 - DNA, 75 bp, synthetic construct
  source 1..75: mol_type = other DNA
cgttacatccccaacgggggcgcagtggcaaacctgcaggtggccacgtcagaaacctggcgcgacaaacagacg

SEQ ID NO: 166627 - DNA, 75 bp, synthetic construct
  source 1..75: mol_type = other DNA
caattatccttttcggttggctggcgaatgttgcaccgaaagagttcctcggacacttcaccgtgttcgcgctgg

SEQ ID NO: 166628 - DNA, 75 bp, synthetic construct
  source 1..75: mol_type = other DNA
cttcagtggttgtatgccatcgatgtgctgattgaaacacagggcgaggtctgcctccttcctcttcctggtgat

SEQ ID NO: 166629 - DNA, 75 bp, synthetic construct
  source 1..75: mol_type = other DNA
cttcagtggttgtatgccatcgatgtgctgattgaaacacagggcgaggtctgcctccttccacttcctggagat

SEQ ID NO: 166630 - DNA, 75 bp, synthetic construct
  source 1..75: mol_type = other DNA
catggcgaaggtcagggcgtggacgccggagatgcgtgccggaagtggcgtggtggtgtcctggcgttatggaaa

SEQ ID NO: 166631 - DNA, 75 bp, synthetic construct
  source 1..75: mol_type = other DNA
ttcccctcagcacagagcaacaggccgcatggcgggcagtggcagagacggaaaaacgccgcaatcagggaaaca

SEQ ID NO: 166632 - DNA, 75 bp, synthetic construct
  source 1..75: mol_type = other DNA
ttgtcgtcggtctggtcgggtttatcttatcgggcaacagcctgctactttggggaatttcagccgccgtgttta

SEQ ID NO: 166633 - DNA, 75 bp, synthetic construct
  source 1..75: mol_type = other DNA
ggtaaagcgcagcgagaaaatcatcgccacggaaacaggcagtgtctggtcgccgaaagttttattacaagataa

SEQ ID NO: 166634 - DNA, 75 bp, synthetic construct
  source 1..75: mol_type = other DNA
tgaatacaccgtgccgggtgaaatcttcactacggaaaatggtgtcaaagtgattggttataccgatcttccggg

SEQ ID NO: 166635 - DNA, 75 bp, synthetic construct
  source 1..75: mol_type = other DNA
tacccgtgaaatggttgacaccatgaagtcggggagtgtgattgtcgatctggctgcacaaaacggtggtaactg

SEQ ID NO: 166636 - DNA, 75 bp, synthetic construct
  source 1..75: mol_type = other DNA
gggaggcagagcagaaagcccgtgcgtaccaggcgctggttgctcaggctgaaatcgaactggcatttcattcac

SEQ ID NO: 166637 - DNA, 75 bp, synthetic construct
  source 1..75: mol_type = other DNA
gagcagactgaatggcaccgcgtggtgctgttcggcaagctcgcggaagtggcaggagaatatctgcgcaagggg

SEQ ID NO: 166638 - DNA, 75 bp, synthetic construct
  source 1..75: mol_type = other DNA
gagcagacagaatggcaccgcgtggtgctgttcggcaagctcgcggaagtggcaggtgaatatctgcgcaagggg

SEQ ID NO: 166639 - DNA, 75 bp, synthetic construct
  source 1..75: mol_type = other DNA
tgacaaacagacgggggagatgcgggagcagacagaatggcaacgcgtggtgctgttcggcaagctcgcggaagt

SEQ ID NO: 166640 - DNA, 75 bp, synthetic construct
  source 1..75: mol_type = other DNA
gaaggaaggtgccgcattcctggcgctgatggcagaaaaagtccgtcttgcagccctgctgccggagggatggtc

SEQ ID NO: 166641 - DNA, 75 bp, synthetic construct
  source 1..75: mol_type = other DNA
ttcgcacccgtagctgggaagataacggtattacccgttacgtcaccgaaatccttgttaaaaccacgggcacca

SEQ ID NO: 166642 - DNA, 75 bp, synthetic construct
  source 1..75: mol_type = other DNA
gagcagaccgaatggcatcgcgtggtgctgttcggcaagctcgcggaagtggcaggcgaatatctgcgcaagggg

SEQ ID NO: 166643 - DNA, 75 bp, synthetic construct
  source 1..75: mol_type = other DNA
tgtttggtactcacaaggtaccgctacacaatcgaagcaaaaccaaactacaagtcatcaactttacacgtactg

SEQ ID NO: 166644 - DNA, 75 bp, synthetic construct
  source 1..75: mol_type = other DNA
cttcagtggttgtatgccatcgatgtgctgattgaaacacagggcgaggtctgcctccttccgcttcctggggat

SEQ ID NO: 166645 - DNA, 75 bp, synthetic construct
  source 1..75: mol_type = other DNA
cttcagtggttgtatgccatcgatgtgctgattgaaacacagggcgaggtctgcctccttccccttcctggcgat

SEQ ID NO: 166646 - DNA, 75 bp, synthetic construct
  source 1..75: mol_type = other DNA
tgacaaacagaccggggagatgcgggagcagacggaatggcagcgcgtggtgctgttcggcaagctcgcggaagt

SEQ ID NO: 166647 - DNA, 75 bp, synthetic construct
  source 1..75: mol_type = other DNA
tgacaaacagactggggagatgcgggagcagaccgaatggcatcgcgtggtgctgttcggcaagctcgcggaagt

SEQ ID NO: 166648 - DNA, 75 bp, synthetic construct
  source 1..75: mol_type = other DNA
gcagaacgctcaggcgcaaccgcagcctcagcagaatggtcagccacagagtgctgacacgacgaaaaaagggag

SEQ ID NO: 166649 - DNA, 75 bp, synthetic construct
  source 1..75: mol_type = other DNA
aggtgcaggtgtttgaagctgcctgtcagtcgggatggggcggtaaaccggatgtgcgggttatccgcaatctga

SEQ ID NO: 166650 - DNA, 75 bp, synthetic construct
  source 1..75: mol_type = other DNA
tgcttcagttaagtgttattaatttatctaatgatatctgcgatgcggtagttaagtgggttgagcggatgaagg

SEQ ID NO: 166651 - DNA, 75 bp, synthetic construct
  source 1..75: mol_type = other DNA
agtctgccactgctgacgaaaatgtcttccgaacgcacgctggcagtccaggcggcactcatgcagcaaccggac

SEQ ID NO: 166652 - DNA, 75 bp, synthetic construct
  source 1..75: mol_type = other DNA
aattgtggtcacacgtcacgcagtccgctggattcgctggaaacggctatcgggttccacatgcgtgactggtgg

SEQ ID NO: 166653 - DNA, 75 bp, synthetic construct
  source 1..75: mol_type = other DNA
caaagcaagccgtaaatctgcaaaaacgcaagaaacagtcctgtctgccctgctggcgcagacggaggaagtgag

SEQ ID NO: 166654 - DNA, 75 bp, synthetic construct
  source 1..75: mol_type = other DNA
gaagcagtgctgacggaggcggaagaagaacgcctgaacgaactgatggcacgttacgacgcactggaaaaccag

SEQ ID NO: 166655 - DNA, 75 bp, synthetic construct
  source 1..75: mol_type = other DNA
tgaaacgattgtcgaagatgattttttcaccgccgttgatgatttgcgccaggcttctgaagatgccggtgccgg

SEQ ID NO: 166656 - DNA, 75 bp, synthetic construct
  source 1..75: mol_type = other DNA
cacgctggcagtccaggcagcactgatgcagcaaccggacaaatccctggcactgctggcatggacgctctgcct

SEQ ID NO: 166657 - DNA, 75 bp, synthetic construct
  source 1..75: mol_type = other DNA
ttacggaaagtgaagtggcggtgaaggacaacactaaatttcgctttgtgggggctgatgctttctcacctgacg

SEQ ID NO: 166658 - DNA, 75 bp, synthetic construct
  source 1..75: mol_type = other DNA
ttccgcaagatgtttgagcgtcaacttaaagctggtgaggttgcggataacgctgccgccaagcctctcatcact

SEQ ID NO: 166659 - DNA, 75 bp, synthetic construct
  source 1..75: mol_type = other DNA
atgacgacatttattcaacttcatttactaaccgcttaccctgctgccaaccttaaccgtgatgataccggtgcg

SEQ ID NO: 166660 - DNA, 75 bp, synthetic construct
  source 1..75: mol_type = other DNA
tacgcctcctgggcgctggcagaaaaaggcacctgtagattcaattggtcaacgcaacagttatgtgaaaacatg

SEQ ID NO: 166661 - DNA, 75 bp, synthetic construct
  source 1..75: mol_type = other DNA
acatgcccccttccacgttgtttatcatcctggcgatggtaatcattgccgcgtgggtgttaatgctgaaaggca

SEQ ID NO: 166662 - DNA, 75 bp, synthetic construct
  source 1..75: mol_type = other DNA
catggtagttacgttgcaatattccgtgggccgccgacttaacccggctaacatccgcgcgctgatgacagcagg

SEQ ID NO: 166663 - DNA, 75 bp, synthetic construct
  source 1..75: mol_type = other DNA
ggtcacacgtcacgcagtccgctggacacgctggaaaccgctatcggattccacatgcgcgactggtggcagccg

SEQ ID NO: 166664 - DNA, 75 bp, synthetic construct
  source 1..75: mol_type = other DNA
ggataagttcgacaagaaacgttatatgttactggcaattaccgccttcgccagcggttttatcgccattcccct

SEQ ID NO: 166665 - DNA, 75 bp, synthetic construct
  source 1..75: mol_type = other DNA
actgcgcctattctgtttttgctaccgtgctgaaagcctggtttgccgacaatctttcgtccaccagcaaaacga

SEQ ID NO: 166666 - DNA, 75 bp, synthetic construct
  source 1..75: mol_type = other DNA
ctggttgggcgccgctgttaatccattggtaagcggcgtggtgctcaccactctgccatcatcttctctgtttgc

SEQ ID NO: 166667 - DNA, 75 bp, synthetic construct
  source 1..75: mol_type = other DNA
tgacggggacggttatgtcgaccgcgtggcgctcgataccgccctgctggaaaaactccaggccgttgctgaaca

SEQ ID NO: 166668 - DNA, 75 bp, synthetic construct
  source 1..75: mol_type = other DNA
aaccgctgggtgccaggctggatgtgttcaccacgtccacaggcagagacagaaaccacggaataccgtgacaac

SEQ ID NO: 166669 - DNA, 75 bp, synthetic construct
  source 1..75: mol_type = other DNA
cgacgccctgaatgacgccggactgtccggtgccgcacgggacgcggagaagatgaagaaaggcgatgcggctga

SEQ ID NO: 166670 - DNA, 75 bp, synthetic construct
  source 1..75: mol_type = other DNA
tggtgtcctggcgttatggaaacgtatgtgtccagcgtggtgtgcagttacgcagtgaggatgatgcggctgacg

SEQ ID NO: 166671 - DNA, 75 bp, synthetic construct
  source 1..75: mol_type = other DNA
cgtaaaaggcgttaattacgatacggcgatgtggagttcggcaattaacacccgcaacaacgtgaccactgatgc

SEQ ID NO: 166672 - DNA, 75 bp, synthetic construct
  source 1..75: mol_type = other DNA
gggtgctcatgttgagagcgggttccgttgggttgacggattgtggagtgttagcccctatctcgcctttaccgg

SEQ ID NO: 166673 - DNA, 75 bp, synthetic construct
  source 1..75: mol_type = other DNA
ggcgtttttccgctgtctgaacggaagccgcaggatatcgctgtctgacctgcgatttttcatgccgtcactgac

SEQ ID NO: 166674 - DNA, 75 bp, synthetic construct
  source 1..75: mol_type = other DNA
gaaaggccgtggacgtaaggccgcgcagccggagcctcagccgcaaccgccggagggtgacgattacgggttttc

SEQ ID NO: 166675 - DNA, 75 bp, synthetic construct
  source 1..75: mol_type = other DNA
gctgggaagataacggtatcacccgttacgtcaccgaaattcttgttaagaccacgggcaccatgcagatgctgg

SEQ ID NO: 166676 - DNA, 75 bp, synthetic construct
  source 1..75: mol_type = other DNA
ctgggtgcctggtgcgtattttcatgaaaggagatcactcaataacggcgtttttcaaggtagttgtcgcctttt

SEQ ID NO: 166677 - DNA, 75 bp, synthetic construct
  source 1..75: mol_type = other DNA
gagatgcgtgccggaagcggtgtggtggtgtcctggcgttatggcaacgtgtgtgtccagcgtggtgtgcagttg

SEQ ID NO: 166678 - DNA, 75 bp, synthetic construct
  source 1..75: mol_type = other DNA
tggacgccggagatgcgtgccggaagtggcgtggtggtgtcctggcgttatggaaacgtatgtgtccagcgtggt

SEQ ID NO: 166679 - DNA, 75 bp, synthetic construct
  source 1..75: mol_type = other DNA
aactgcgcaccgatttgttcagcgacgacgaaggtggctatgtggactgcgtggcgctcgatgccgccctgctgg

SEQ ID NO: 166680 - DNA, 75 bp, synthetic construct
  source 1..75: mol_type = other DNA
actgattaagtcaccgctgaatgtgcgcacggtgccgtattctgcggagtccgtcagcgaactggctgagtccat

SEQ ID NO: 166681 - DNA, 75 bp, synthetic construct
  source 1..75: mol_type = other DNA
tggacgccggaaatgcgtgccggaagcggtgtggtggtgtcctggcgttatggcaacgtatgtgtccagcgtggt

SEQ ID NO: 166682 - DNA, 75 bp, synthetic construct
  source 1..75: mol_type = other DNA
tggcatcgcgtggtgctgttcggcaagctcgcggaagtggctggtgaatatctgcgcaagggcgcgcaggtctac

SEQ ID NO: 166683 - DNA, 75 bp, synthetic construct
  source 1..75: mol_type = other DNA
tgcgaggaatccgacctgctggaagcagaaatgaagttgattgactgtatggcgaaggtcagggcgtggacaccg

SEQ ID NO: 166684 - DNA, 75 bp, synthetic construct
  source 1..75: mol_type = other DNA
ccgtcagcgaactggcagggtccattcagggcgtcggactgctgcagaatctggtcgtgcataccctgcctggtg

SEQ ID NO: 166685 - DNA, 75 bp, synthetic construct
  source 1..75: mol_type = other DNA
gttctggcaggttattgcggaagccagtcttgcagcaagagaggccggtcacgctgtccgtgagatggagcggtg

SEQ ID NO: 166686 - DNA, 75 bp, synthetic construct
  source 1..75: mol_type = other DNA
ttctggcaggttattgcggaagccagtcttgcagccagagaggccggtcatgccgtccgtgagatggagcggtgg

SEQ ID NO: 166687 - DNA, 75 bp, synthetic construct
  source 1..75: mol_type = other DNA
aggaaggtgtcgcattcatggcgctgatggcagaaaaagcccgtcttgcagccctgctgccggagggatggtcac

SEQ ID NO: 166688 - DNA, 75 bp, synthetic construct
  source 1..75: mol_type = other DNA
tgacgagcaactggcggaatattacctcacccgtggcagcaataatccgccgggatacctggagcgatcatatcc

SEQ ID NO: 166689 - DNA, 75 bp, synthetic construct
  source 1..75: mol_type = other DNA
gaagctggcatgcacgctggagtgaccgggttgcgtattttcatgaaaggagatcactcaataacttccatcgag

SEQ ID NO: 166690 - DNA, 75 bp, synthetic construct
  source 1..75: mol_type = other DNA
tacggttccgcgtcagggagcgcagtcgccataaatccgcgttggtcatgcagaagtacagccgtcagcaggctc

SEQ ID NO: 166691 - DNA, 75 bp, synthetic construct
  source 1..75: mol_type = other DNA
gatgcggctgaacatgcagagcaccatatgaaagacaaccgctgggctccaggctggatgtgtgcaccacatcca

SEQ ID NO: 166692 - DNA, 75 bp, synthetic construct
  source 1..75: mol_type = other DNA
acgctggcagtccaggcggcattcatgcagcaaccggacaaatctctggcactgctggcatggacgctctgcctg

SEQ ID NO: 166693 - DNA, 75 bp, synthetic construct
  source 1..75: mol_type = other DNA
atgtgtccagcgtggtgtgcagttacgcagtgaggatgatgcggctgacgacgctgaccgcacggaacaggtgca

SEQ ID NO: 166694 - DNA, 75 bp, synthetic construct
  source 1..75: mol_type = other DNA
ctctgcctgaatgtgtttggcagcggagcgtacagtaaaccagcacaaatcagcctggaatgtaaacattattcg

SEQ ID NO: 166695 - DNA, 75 bp, synthetic construct
  source 1..75: mol_type = other DNA
cagaagtacagccgtcagcaggcacgggaggcagagcagaaagcccgtgcgtaccaggcgctggtcgctcaggct

SEQ ID NO: 166696 - DNA, 75 bp, synthetic construct
  source 1..75: mol_type = other DNA
ccgtcagcgaactggctgagtccattaagggcgttggcctgttgcagaatctggtcgtgcatactctgcctggtg

SEQ ID NO: 166697 - DNA, 75 bp, synthetic construct
  source 1..75: mol_type = other DNA
gctccaggctggatgtgtgcaccacatccacagacagatgccactgaacgcaccgataacctggctgatgccgcc

SEQ ID NO: 166698 - DNA, 75 bp, synthetic construct
  source 1..75: mol_type = other DNA
cggggcgtacagcaatcccgcaaaaattcgtctggaatgtgagcattatgcgctgaccagcgatgcgccatcggg

SEQ ID NO: 166699 - DNA, 75 bp, synthetic construct
  source 1..75: mol_type = other DNA
acgggatatgacgacgttcctgtcactcagccaggaggtgctgttatccctgctcagtttctgtaccgcgtgcag

SEQ ID NO: 166700 - DNA, 75 bp, synthetic construct
  source 1..75: mol_type = other DNA
tatgcgggggcgtttttccgctgtctgaacggaagccgcaggatatcgctgtctgacctgcgatttttcatgccg

SEQ ID NO: 166701 - DNA, 75 bp, synthetic construct
  source 1..75: mol_type = other DNA
actggtggcagccgacgaaagcaaacttcttcggacacctgcaaaagccgcagattatcgatgccctgaatgatg

SEQ ID NO: 166702 - DNA, 75 bp, synthetic construct
  source 1..75: mol_type = other DNA
cgtgccggaggtggagtggtggtgtcctggcgttatggcaacgtgtgtgtccagcgtggtgtgcagttgcgcagt

SEQ ID NO: 166703 - DNA, 75 bp, synthetic construct
  source 1..75: mol_type = other DNA
ttgacccgctggaaaccgctatcggattccacatgcgcgactggtggcagccgacgaaagcaaacttcttcggac

SEQ ID NO: 166704 - DNA, 75 bp, synthetic construct
  source 1..75: mol_type = other DNA
cgctgcgccgtcagggaaggaaggtaccgcattcatggcgctgatggcagagcactttcgccttgctgccctgct

SEQ ID NO: 166705 - DNA, 75 bp, synthetic construct
  source 1..75: mol_type = other DNA
cctcagagcgcacgctggcagtccaggcggcactgatgcagcaaccggacaaatccctggcactgctggcatgga

SEQ ID NO: 166706 - DNA, 75 bp, synthetic construct
  source 1..75: mol_type = other DNA
ccgtcagcgaactggctgagtccattaagggcgttggcctgctgcagaatctggtcgtgcataccctgcctggtg

SEQ ID NO: 166707 - DNA, 75 bp, synthetic construct
  source 1..75: mol_type = other DNA
gcttcgtgggggctgatgccttctcgccagacgaactgcgcaccgatttgttcagcgatgacggggacggttatg

SEQ ID NO: 166708 - DNA, 75 bp, synthetic construct
  source 1..75: mol_type = other DNA
cgctggcagtccaggcagcactgatgcagcaaccggacaaatccctggcactgctggcatggacgctctgcctga

SEQ ID NO: 166709 - DNA, 75 bp, synthetic construct
  source 1..75: mol_type = other DNA
ccgccacgttcagcgaatgctgaaactggcggaccttgccccagtgatcctagatgcgctggcagaagacctcat

SEQ ID NO: 166710 - DNA, 75 bp, synthetic construct
  source 1..75: mol_type = other DNA
ccgccacgttcagcgaatgctgaaactggctgaccttgccccagtgatcctagatgcgctggcagaagaccacat

SEQ ID NO: 166711 - DNA, 75 bp, synthetic construct
  source 1..75: mol_type = other DNA
cctcagagcgcacgctggcagtccaggcagcactgatgcagcagccggacaaatccctggcactgctggcatgga

SEQ ID NO: 166712 - DNA, 75 bp, synthetic construct
  source 1..75: mol_type = other DNA
ttcatggcgatgatggcagaaaaagcccgtcttgccgccctgctgccggatggatgggcacgggatatgacgacg

SEQ ID NO: 166713 - DNA, 75 bp, synthetic construct
  source 1..75: mol_type = other DNA
tgcagagttccatatgaaagacaaccgctgggtgcctggctggatgtgtgcaccacgtccacagacggataccac

SEQ ID NO: 166714 - DNA, 75 bp, synthetic construct
  source 1..75: mol_type = other DNA
ccgccacgttcagcgaatgctgaaactggcggaccttgccccagtgatccttgatgcgctggcagaagaccacat

SEQ ID NO: 166715 - DNA, 75 bp, synthetic construct
  source 1..75: mol_type = other DNA
tttttgaagccggggaggccggtcgtggtgcaccggtacaggtacgtgcacttgagcagtggatgatcccgaaca

SEQ ID NO: 166716 - DNA, 75 bp, synthetic construct
  source 1..75: mol_type = other DNA
tgctggcatggacgctctgcctgaatgtgtttagcagcggagcgtacagtaaaccagcacaaatcagcctggaat

SEQ ID NO: 166717 - DNA, 75 bp, synthetic construct
  source 1..75: mol_type = other DNA
gtacctgtaaagcaatgcgccggagttcctcacgccacggcgctgatgttttttattctttgggttcaataccgc

SEQ ID NO: 166718 - DNA, 75 bp, synthetic construct
  source 1..75: mol_type = other DNA
aacgggggcgcagtggcaaacctgcaggtggccacgtcagaaacctggcgcgacaaacagacgggggaaatgaag

SEQ ID NO: 166719 - DNA, 75 bp, synthetic construct
  source 1..75: mol_type = other DNA
tgacaaacagacgggggatatgcgggagcagacagaatggcatcgcgtggtgctgttcggcaagctcgcggaagt

SEQ ID NO: 166720 - DNA, 75 bp, synthetic construct
  source 1..75: mol_type = other DNA
tgggtgcccggctggatgtgtgcaccacgtccacagacggataccactgaacgcactgataacctggctgatgcc

SEQ ID NO: 166721 - DNA, 75 bp, synthetic construct
  source 1..75: mol_type = other DNA
tggcttcgatattggcttgtgtaccgtcaatttaggtcaggaatggccgtgtatacatcaagaattactcgacat

SEQ ID NO: 166722 - DNA, 75 bp, synthetic construct
  source 1..75: mol_type = other DNA
atgtggttacttgaccagtgggcagagcgtcatatagcagaagcgcaagcgaaaggtgagtttgataacctggca

SEQ ID NO: 166723 - DNA, 75 bp, synthetic construct
  source 1..75: mol_type = other DNA
cctggcgagcaggagactgatatcaccgatgggataaggttgtctgattggtattataaatataagaagtcatca

SEQ ID NO: 166724 - DNA, 75 bp, synthetic construct
  source 1..75: mol_type = other DNA
cgttataccgtctgggctggcctgatggcgggtgttggtctgactctgctgtacctggcgctgttccgtctgggt

SEQ ID NO: 166725 - DNA, 75 bp, synthetic construct
  source 1..75: mol_type = other DNA
ctacaggtatttcaggcctgctcggaattaactcgcagggcaggtaacattattttccctccaatggtcggctta

SEQ ID NO: 166726 - DNA, 75 bp, synthetic construct
  source 1..75: mol_type = other DNA
gtaatatctattacatgcttacctatgcatggggttatttacaggaaattaagcaggcaaaccttgaagccatac

SEQ ID NO: 166727 - DNA, 75 bp, synthetic construct
  source 1..75: mol_type = other DNA
atttatcagccggaaaacctaccggattgatggtagtggtcaaatggcgattaccgttgatgttgaagtagcgag

SEQ ID NO: 166728 - DNA, 75 bp, synthetic construct
  source 1..75: mol_type = other DNA
taatcacgacgcactgtatcgctggatcaaatctgtcgatccttcccgcccggtgcagtatgaaggcggcggagc

SEQ ID NO: 166729 - DNA, 75 bp, synthetic construct
  source 1..75: mol_type = other DNA
tacaccaacgtgacctatcccattgcggtcaatccgccgtgtgttcccgcagagaatccgactggatgttactcg

SEQ ID NO: 166730 - DNA, 75 bp, synthetic construct
  source 1..75: mol_type = other DNA
tggtgcagcgcgatcgtaatcacccgagtgtgatcatctggtcgctggggaatgaatcaggccacggcgctaatc

SEQ ID NO: 166731 - DNA, 75 bp, synthetic construct
  source 1..75: mol_type = other DNA
catctggtcgcattgggtcaccagcaaatcgcgctgttagcgggcccattaagttctgtctcggcgcgtctgcgt

SEQ ID NO: 166732 - DNA, 75 bp, synthetic construct
  source 1..75: mol_type = other DNA
caaaccgaccacacaaatcagcgatttccatgttgccactcgctttaatgatgatttcagccgcgcggtactgga

SEQ ID NO: 166733 - DNA, 75 bp, synthetic construct
  source 1..75: mol_type = other DNA
gccgttgccagaagccgtatttgccactgacagcctgaaattaatgagcatttatcgtgcggcagcagagaaaaa

SEQ ID NO: 166734 - DNA, 75 bp, synthetic construct
  source 1..75: mol_type = other DNA
gttttgatgccattatggtgatttctacccgttcgaccaaaactacggcgggtaatccatttttctctgaagttt

SEQ ID NO: 166735 - DNA, 75 bp, synthetic construct
  source 1..75: mol_type = other DNA
atgtttattctgtcgataccgataattttggtgacagcattgcgttgaccgatgcgttaattgaaagtggacatc

SEQ ID NO: 166736 - DNA, 75 bp, synthetic construct
  source 1..75: mol_type = other DNA
cgtgcggatgccatcttcattgaagaactgcgtaaagctgatctgtacgacaaagtcagccaggcattcactgtc

SEQ ID NO: 166737 - DNA, 75 bp, synthetic construct
  source 1..75: mol_type = other DNA
tgcgtaagattggtctggagctgggtctgccgtatgacatgctgtatcgccatccgttcccgggaccgggccttg

SEQ ID NO: 166738 - DNA, 75 bp, synthetic construct
  source 1..75: mol_type = other DNA
ggtagcccgcatccgcgagcaggtgggtgacgataaagtgatccttggcctctctggtggcgtggactcttccgt

SEQ ID NO: 166739 - DNA, 75 bp, synthetic construct
  source 1..75: mol_type = other DNA
cgggtaaatggttataagcaaagcctggctgcgcataatattgcagtgcgtgatgaatggattgttgacggcggt

SEQ ID NO: 166740 - DNA, 75 bp, synthetic construct
  source 1..75: mol_type = other DNA
caaaccaatatctccccggaagcgcgcgaaaaagtgttacgggccattgaagaattacagtatcagccaaacaag

SEQ ID NO: 166741 - DNA, 75 bp, synthetic construct
  source 1..75: mol_type = other DNA
ttctggtttccctctatccgggcaaactgctggatacagtcggtaacttccttgcgccgctgaaaattatcgcgc

SEQ ID NO: 166742 - DNA, 75 bp, synthetic construct
  source 1..75: mol_type = other DNA
atacgatattccggtggtagtaattggcaaagttgaaggtgaatacgcccatgtttattctgtcgacaccgataa

SEQ ID NO: 166743 - DNA, 75 bp, synthetic construct
  source 1..75: mol_type = other DNA
tttatcgtgcggcagcagagaaaaatattgctattccgcagcagttagcggtggtgggttatagtaatgaaacgc

SEQ ID NO: 166744 - DNA, 75 bp, synthetic construct
  source 1..75: mol_type = other DNA
tctctgaagttttgcatgccatcaccgccaaagctgaagaagaaggtttcgacgtgatattgcagacgtcgcaca

SEQ ID NO: 166745 - DNA, 75 bp, synthetic construct
  source 1..75: mol_type = other DNA
tcatgcaggacaaagatattgaagagaactatcacgctcagtttatggagcaggcgctgcaacaggcgggctttg

SEQ ID NO: 166746 - DNA, 75 bp, synthetic construct
  source 1..75: mol_type = other DNA
attcgtgaagttagcgaccgtgagtttgctgcggtgccgatccgtaccggtcatccgcaaaatgaagtgcgtctt

SEQ ID NO: 166747 - DNA, 75 bp, synthetic construct
  source 1..75: mol_type = other DNA
tcagcaactgtggtgtttgccgaaagtggacggtaaatacattcaggtatgtaccttcaccgttggcggcaacta

SEQ ID NO: 166748 - DNA, 75 bp, synthetic construct
  source 1..75: mol_type = other DNA
caacgagctgcacctgatgtatcttcacgctaccgataaggtgctgaaagatgacaacctgctggcattgttcga

SEQ ID NO: 166749 - DNA, 75 bp, synthetic construct
  source 1..75: mol_type = other DNA
tcaggtgatcaatcaggatccgtatcattactacaccattaccgagagtgccgagcaggagctgattaaagccac

SEQ ID NO: 166750 - DNA, 75 bp, synthetic construct
  source 1..75: mol_type = other DNA
ccagcaactgtggtgcctgccaaaagtggacggtaagtatatccaggtgtgtaccttcactgttggtggtaacta

SEQ ID NO: 166751 - DNA, 75 bp, synthetic construct
  source 1..75: mol_type = other DNA
gatctgataatgcgtgaaggccggaccaccgtttttgtcgaggtgcgttaccgccgctctgcgctttatggcggc

SEQ ID NO: 166752 - DNA, 75 bp, synthetic construct
  source 1..75: mol_type = other DNA
caagcgcgtcgctggctggaaggcaaaggactgcgatttgtcgccgctaacgtgaacgagcgtggcggcgagatc

SEQ ID NO: 166753 - DNA, 75 bp, synthetic construct
  source 1..75: mol_type = other DNA
ctcgatagcatcggtctgacgttgcagcacggcgatgccattgctgattatgaagagaagcaaccggcgtttatg

SEQ ID NO: 166754 - DNA, 75 bp, synthetic construct
  source 1..75: mol_type = other DNA
tatcgacctcgtcagccatcatgaagaggtgctggacaaaaccagcggtaaatttgccgagcagaaaaacatcta

SEQ ID NO: 166755 - DNA, 75 bp, synthetic construct
  source 1..75: mol_type = other DNA
atgagcaaaggaacgaccagccaggatgccccgttcgggacattattgggctacgccccaggtggggtagcaatc

SEQ ID NO: 166756 - DNA, 75 bp, synthetic construct
  source 1..75: mol_type = other DNA
atggatacgttacaggatgattatacaaaattgttgtatggcctgatgccgccgggacctgcatggtcagatacc

SEQ ID NO: 166757 - DNA, 75 bp, synthetic construct
  source 1..75: mol_type = other DNA
cgcattgacccgaacgcctgggtagaacgctggaaagcagcgggacattaccaggcagaagcggtgttgttgcag

SEQ ID NO: 166758 - DNA, 75 bp, synthetic construct
  source 1..75: mol_type = other DNA
attaaatctgtcgatccttcccgcccggtgcagtatgaaggcggcggagcagacaccacagccaccgatattatt

SEQ ID NO: 166759 - DNA, 75 bp, synthetic construct
  source 1..75: mol_type = other DNA
ctgctgcacgcggaagaaggcacatggctgaatatcgacggtttccatatggggattggtggcgacgactcctgg

SEQ ID NO: 166760 - DNA, 75 bp, synthetic construct
  source 1..75: mol_type = other DNA
taatcacgacgcactctatcgctggattaaatctgtcgatccatcccgcccggtgcagtatgaaggcggcggagc

SEQ ID NO: 166761 - DNA, 75 bp, synthetic construct
  source 1..75: mol_type = other DNA
tgaagtgcctatgaatgtcgctccgcaaggtaaacaggtaattgaattgcctgaactaccgcgactggagagcac

SEQ ID NO: 166762 - DNA, 75 bp, synthetic construct
  source 1..75: mol_type = other DNA
gtcgcagagcgggtaaactggctcggattagggccgcaagaaaactatcccgaccgccttactgcggcctgtttt

SEQ ID NO: 166763 - DNA, 75 bp, synthetic construct
  source 1..75: mol_type = other DNA
gcgttgaatttgctcgccgttttctctttctgaactacggtgtggtcttcactgacgtgggtatggcgtgggaga

SEQ ID NO: 166764 - DNA, 75 bp, synthetic construct
  source 1..75: mol_type = other DNA
atgccccgtttgggacattattaggctatgcccccggtggtgtagcaatctactcttcagattacagttctctcg

SEQ ID NO: 166765 - DNA, 75 bp, synthetic construct
  source 1..75: mol_type = other DNA
attcattccccgttgccgcaagggcaacagtggacacgcgagctggagatggtggtcgaaaacggctgctatacc

SEQ ID NO: 166766 - DNA, 75 bp, synthetic construct
  source 1..75: mol_type = other DNA
ggcaggcgtttcgtcagtacccccgtttacagggcggcttcgtctgggactgggtggatcagtcgctgattaaat

SEQ ID NO: 166767 - DNA, 75 bp, synthetic construct
  source 1..75: mol_type = other DNA
ggggattggtggcgacgactcctggagcccgtcagtgtcggcggaattccagcttagcgccggtagctaccatta

SEQ ID NO: 166768 - DNA, 75 bp, synthetic construct
  source 1..75: mol_type = other DNA
gaaattctgcactggtcggtggcactgaatggcaagccgctggcaagtggcgaagtgcctctgactgtcgctcca

SEQ ID NO: 166769 - DNA, 75 bp, synthetic construct
  source 1..75: mol_type = other DNA
atccggcgttatggtgtcagtcccattcatctggatgccagtgccggatatctgccgggtttacccactttcgac

SEQ ID NO: 166770 - DNA, 75 bp, synthetic construct
  source 1..75: mol_type = other DNA
ccgacagcgttaacgtacaggcactgaacatggggcgaatcgtcgttgacgtcgatggtattgagctcgctgaac

SEQ ID NO: 166771 - DNA, 75 bp, synthetic construct
  source 1..75: mol_type = other DNA
cgttatggcgtcagtctcattcatctggatgccagcgctgaatgcctgccggacctgcccactttcgactggtaa

SEQ ID NO: 166772 - DNA, 75 bp, synthetic construct
  source 1..75: mol_type = other DNA
tgacgtcgatggtgttaatctcagtgaactgattaacaaagtcactgaaaacggttattcactccgggtggttga

SEQ ID NO: 166773 - DNA, 75 bp, synthetic construct
  source 1..75: mol_type = other DNA
tgacgtcgatggtgttaatctcattgaactgattaacaaagtctctgaaaacggttattcactccgggtggttga

SEQ ID NO: 166774 - DNA, 75 bp, synthetic construct
  source 1..75: mol_type = other DNA
tgacgtcgatggtgttaatctcaatgaactgattaacaaagtcgctgaaaacggttattcactccgggtggttga

SEQ ID NO: 166775 - DNA, 75 bp, synthetic construct
  source 1..75: mol_type = other DNA
gtcgatggtattgagctcgctgaactgattaataaggtcgctgaaaacggttattcactccgcgtggtggatgct

SEQ ID NO: 166776 - DNA, 75 bp, synthetic construct
  source 1..75: mol_type = other DNA
actgaacatggggcgaattgtcgttgacgtcgatggcgttgagcttgccgaactgattaacgtggtctgcgataa

SEQ ID NO: 166777 - DNA, 75 bp, synthetic construct
  source 1..75: mol_type = other DNA
tggtcgccctgtcttttctcgcccctctgtggctcaacgccgcaccgcgcgtcatcacgctttcacccgccaaca

SEQ ID NO: 166778 - DNA, 75 bp, synthetic construct
  source 1..75: mol_type = other DNA
ctgacagcgttaacgtgcaggcactgaacatggggcgcattgtcgttgacgtcgatggcgttaatctcactgaac

SEQ ID NO: 166779 - DNA, 75 bp, synthetic construct
  source 1..75: mol_type = other DNA
tctgaccgggcctcaacagactgcacgctaccatttgccgcccttaccggcatacgctgcagtaccgctcatatc

SEQ ID NO: 166780 - DNA, 75 bp, synthetic construct
  source 1..75: mol_type = other DNA
tccaaccaacagtcaacctacactccaccaccgtttacgactctttccggcatacgctgcagtaccgcacatatc

SEQ ID NO: 166781 - DNA, 75 bp, synthetic construct
  source 1..75: mol_type = other DNA
catgtagtcccgctatccaggcaggctatcaccttgcttgaggaccagtttacccgcagcggatacagtgatttc

SEQ ID NO: 166782 - DNA, 75 bp, synthetic construct
  source 1..75: mol_type = other DNA
caacgacgggccatgatgcaggattatagcgactgtattgattcaatactggctggtgacggtaatccacttgaa

SEQ ID NO: 166783 - DNA, 75 bp, synthetic construct
  source 1..75: mol_type = other DNA
caacccttgcccgcatacgatgcagtaccgcacatatcacggaaacggacaacgcctggttgtactcgctgtcac

SEQ ID NO: 166784 - DNA, 75 bp, synthetic construct
  source 1..75: mol_type = other DNA
ctactcccttcgtgttgttgatgcatctgaccggaccgcaactgacagcatgcccccctctgctgccctgagcgg

SEQ ID NO: 166785 - DNA, 75 bp, synthetic construct
  source 1..75: mol_type = other DNA
gattggattgagatccaactagcccacgtcccgaagggaattaggggagtttacaaccaagcggcctatctcaaa

SEQ ID NO: 166786 - DNA, 75 bp, synthetic construct
  source 1..75: mol_type = other DNA
ttgctgtcctgaccggcatacgctgcagtaccgcgcatatcacggcaaaggacaacgcctggctgtactcgctgt

SEQ ID NO: 166787 - DNA, 75 bp, synthetic construct
  source 1..75: mol_type = other DNA
caacccttcccagcatacggtgcagtaccgcacatatcacggaaacggacaacgcctggttgtactcgctgtcac

SEQ ID NO: 166788 - DNA, 75 bp, synthetic construct
  source 1..75: mol_type = other DNA
caacccttaccggcatacgctgcagtaccgcacatatcacggaaacggacaacgcctggttgtactcgctgtcac

SEQ ID NO: 166789 - DNA, 75 bp, synthetic construct
  source 1..75: mol_type = other DNA
caacccttacccgcatacggtgcagtaccgcacatatcacggaaacggacaacgcctggttgtactcgctgtcac

SEQ ID NO: 166790 - DNA, 75 bp, synthetic construct
  source 1..75: mol_type = other DNA
caacccttgccagcatacgctgcagtaccgcacatatcacggaaacggacaacgcctggttgtactcgctgtcac

SEQ ID NO: 166791 - DNA, 75 bp, synthetic construct
  source 1..75: mol_type = other DNA
caacccttcccggcatacgatgcagtaccgcacatatcacggaaacggacaacgcctggttgtactcgctgtcac

SEQ ID NO: 166792 - DNA, 75 bp, synthetic construct
  source 1..75: mol_type = other DNA
caacccttccctgcatacgttgcagtaccgcacatatcacggaaacggacaacgcctggttgtactcgctgtcac

SEQ ID NO: 166793 - DNA, 75 bp, synthetic construct
  source 1..75: mol_type = other DNA
tcacactcatccggcgttatggcgtcagtctcattcatctggatgccagcgctgaatgtctgcctgacctgccca

SEQ ID NO: 166794 - DNA, 75 bp, synthetic construct
  source 1..75: mol_type = other DNA
gcgtcggaatccatcaaaaaaaccggttttgacccgtcagaatctggtggggatccgtcagtaaaatcaactact

SEQ ID NO: 166795 - DNA, 75 bp, synthetic construct
  source 1..75: mol_type = other DNA
cgccaccatttgctgcccttaccggcatacgctgcagtaccgcacatatcacggaaacggacaacacctggctgt

SEQ ID NO: 166796 - DNA, 75 bp, synthetic construct
  source 1..75: mol_type = other DNA
tctgcggcttaaacgcctggggctgtcaaaaacgttccgtcgtctggttatcacacttaacctacgttatggcgt

SEQ ID NO: 166797 - DNA, 75 bp, synthetic construct
  source 1..75: mol_type = other DNA
ggacaagccctacaaactcactgattcaatgacgcctggccttttcttgctggtacatcccaacggcagcaaata

SEQ ID NO: 166798 - DNA, 75 bp, synthetic construct
  source 1..75: mol_type = other DNA
caacggcgggccatgatgcagaactacagcgacgccatcgaccagatattggctggtgacggtaatccacttgaa

SEQ ID NO: 166799 - DNA, 75 bp, synthetic construct
  source 1..75: mol_type = other DNA
ccgtgagctaaaacgactggtccacccgaacgccgtctatagtattaagctgggtaaccgtgcactaccggaacg

SEQ ID NO: 166800 - DNA, 75 bp, synthetic construct
  source 1..75: mol_type = other DNA
ggtggggctggattcactccctcatgccatcctcttttatcgccagatgctgcaatggtttggcgggatggggat

SEQ ID NO: 166801 - DNA, 75 bp, synthetic construct
  source 1..75: mol_type = other DNA
gcccggaaagtaccaccgaagaaaacagcccgcgtgcgccgcagtatgtctttgaagcaggcgtaccggtattcg

SEQ ID NO: 166802 - DNA, 75 bp, synthetic construct
  source 1..75: mol_type = other DNA
atcgataagcactttggacggcaataagtttattgcttcagttatggcattaaatcagaaaaagaaagcaaatgt

SEQ ID NO: 166803 - DNA, 75 bp, synthetic construct
  source 1..75: mol_type = other DNA
ttgtcagtatgctggcgattatcgccacgggcgtggatgacttttctgcctttgcgtcggttgttgcgacattga

SEQ ID NO: 166804 - DNA, 75 bp, synthetic construct
  source 1..75: mol_type = other DNA
tctatgctgtggtggccgaaccgtaaagagaagggcgaactgaaatcccgtgaagggtttctgatagtggtgctg

SEQ ID NO: 166805 - DNA, 75 bp, synthetic construct
  source 1..75: mol_type = other DNA
gtctggttgtcacactaaaccgacgttatggcgtcagtctcattcatctggatgccagcgctgaatgcctgccgg

SEQ ID NO: 166806 - DNA, 75 bp, synthetic construct
  source 1..75: mol_type = other DNA
gtctggttctcacactaacccaacgttatggcgtcagtctcattcatctggatgccagcgctgaatgcctgccgg

SEQ ID NO: 166807 - DNA, 75 bp, synthetic construct
  source 1..75: mol_type = other DNA
gtctggttctcacactaaacccacgttatggcgtcagtctcattcatctggatgccagcgctgaatgcctgccgg

SEQ ID NO: 166808 - DNA, 75 bp, synthetic construct
  source 1..75: mol_type = other DNA
cctggcgcggaggtaatgccgaacggcaggttgaccagcttgcttcgctgggcataaaagtgatgtgggtcgatg

SEQ ID NO: 166809 - DNA, 75 bp, synthetic construct
  source 1..75: mol_type = other DNA
aagccgcgcaaaccttactggaacagtatgcgcaactgaaagcgcaatatgctgataaaccgaaaaaacgtgttt

SEQ ID NO: 166810 - DNA, 75 bp, synthetic construct
  source 1..75: mol_type = other DNA
gtctggttgtcacactaagccaacgttatggcgtcagtctcattcatctggatgccagcgctgaatgcctgccgg

SEQ ID NO: 166811 - DNA, 75 bp, synthetic construct
  source 1..75: mol_type = other DNA
tctgcggcttaaacgcctggggctgtcaaaaacgttccgtcgtctggttgtcacactcaaccgacgttatggcgt

SEQ ID NO: 166812 - DNA, 75 bp, synthetic construct
  source 1..75: mol_type = other DNA
tctgcggcttaaacgcctggggctgtcaaaaacgttccgtcgtctggttctcacactgaaccgacgttatggcgt

SEQ ID NO: 166813 - DNA, 75 bp, synthetic construct
  source 1..75: mol_type = other DNA
tctgcggcttaaacgcctggggctgtcaaaaacgttccgtcgtctggttttcacactaaacctacgttatggcgt

SEQ ID NO: 166814 - DNA, 75 bp, synthetic construct
  source 1..75: mol_type = other DNA
gtctggttttcacactaaacctacgttatggcgtcagtctcattcatctggatgccagcgctgaatgcctgccgg

SEQ ID NO: 166815 - DNA, 75 bp, synthetic construct
  source 1..75: mol_type = other DNA
gtctggttatcacactaaaccaacgttatggcgtcagtctcattcatctggatgccagcgctgaatgcctgccgg

SEQ ID NO: 166816 - DNA, 75 bp, synthetic construct
  source 1..75: mol_type = other DNA
tctgcggcttaaacgcctggggctgtcaaaaacgttccgtcgtctggttgtcacactgaacccacgttatggcgt

SEQ ID NO: 166817 - DNA, 75 bp, synthetic construct
  source 1..75: mol_type = other DNA
aaaagaagactgctgcgctgtttgtcgtcacgtttatcttcattggctatgcaagtcataatacaaggtgggaca

SEQ ID NO: 166818 - DNA, 75 bp, synthetic construct
  source 1..75: mol_type = other DNA
caagtcgtaatacaaggtgggacaaaactgagacacataaggcctcgcaatggcttgcaaggctttacatgtttt

SEQ ID NO: 166819 - DNA, 75 bp, synthetic construct
  source 1..75: mol_type = other DNA
ggcttaggaagcacaaagcttaaaccaaagtttaaactcatacttgacgacttttttcctcgctatctaaaagtc

SEQ ID NO: 166820 - DNA, 75 bp, synthetic construct
  source 1..75: mol_type = other DNA
acaaagcgctggcgcgacagctgcaggctatcgggttcggctgggatgttaacgcgcaggatatcagggggagag

SEQ ID NO: 166821 - DNA, 75 bp, synthetic construct
  source 1..75: mol_type = other DNA
tctggccggcggtcattaccggaatgcgaagggaaatctgcctgccggcgtggtggggtatgtccagcagaacgg

SEQ ID NO: 166822 - DNA, 75 bp, synthetic construct
  source 1..75: mol_type = other DNA
cagcagtcgccggagggtgataagtggcaggcgcgacagacccggcgtaaaggcaaaatgttgcgcaatatgccg

SEQ ID NO: 166823 - DNA, 75 bp, synthetic construct
  source 1..75: mol_type = other DNA
gcgttaattggcgaagtggtggaacgtaaaggtgttcgtctcgcagggctttatggcgtgaaacgaactctcgat

SEQ ID NO: 166824 - DNA, 75 bp, synthetic construct
  source 1..75: mol_type = other DNA
gtaaaggtgttcgtcttgccggtctgtatggcgtgaaacgaaccctcgatttaccacacgccgaaccgcttccgc

SEQ ID NO: 166825 - DNA, 75 bp, synthetic construct
  source 1..75: mol_type = other DNA
ctatctctcctgtggctttatcctcgaagaaggattgccgatggagacactgaaagccgtagtgaccagcatggc

SEQ ID NO: 166826 - DNA, 75 bp, synthetic construct
  source 1..75: mol_type = other DNA
atgctcgccaaaggtgtggttcatgatacctggccacaggcattaattgccagagaagcaggtgatgctgccaac

SEQ ID NO: 166827 - DNA, 75 bp, synthetic construct
  source 1..75: mol_type = other DNA
ttacccaggaaaaagccttccacatactcgaacgattagaaacgctcgctacggaggagaagatatccccggaga

SEQ ID NO: 166828 - DNA, 75 bp, synthetic construct
  source 1..75: mol_type = other DNA
tgaaagccgtagtgaccagcatggcagaaaccgcccgcgcggcaggcattgccatcgttactggcgatactaaag

SEQ ID NO: 166829 - DNA, 75 bp, synthetic construct
  source 1..75: mol_type = other DNA
tttttttacagcgacctgtgcgtgtggtggagctggttatcagcaaccataagatagcagtactccatccatttg

SEQ ID NO: 166830 - DNA, 75 bp, synthetic construct
  source 1..75: mol_type = other DNA
atgaaaaaccgtaaggcaaaacgactttttttacagcgacctgtgcgtgtggtggagctggttattagcaaccat

SEQ ID NO: 166831 - DNA, 75 bp, synthetic construct
  source 1..75: mol_type = other DNA
accgcccaacctgcccgtaccacaattaccagcgtgacggcatgcatcggatgggaatcgacactaacccagcaa

SEQ ID NO: 166832 - DNA, 75 bp, synthetic construct
  source 1..75: mol_type = other DNA
tggttcatttaaaggtactgtagaggcttctagcttcattggtgacgtagtaaacatgggtacaggtaatgcatg

SEQ ID NO: 166833 - DNA, 75 bp, synthetic construct
  source 1..75: mol_type = other DNA
ggttactggtgcgttgcacgtttccgggcaaagctctgctcgacagcgtactgcatctaccgctggtgttaccgc

SEQ ID NO: 166834 - DNA, 75 bp, synthetic construct
  source 1..75: mol_type = other DNA
tggcggcgaaagcggcgcggcaagactttgtattatctctattgcgctggcgatgatctccctgctgatctcgga

SEQ ID NO: 166835 - DNA, 75 bp, synthetic construct
  source 1..75: mol_type = other DNA
caagggcgggaactaccggaacgggacgaagcccattgcggcgggtctggtcggtgcggtccagcaggacggcgc

SEQ ID NO: 166836 - DNA, 75 bp, synthetic construct
  source 1..75: mol_type = other DNA
aatcaggaaacaccggacggggaaggctgggaaggtcgcaaaacaaagcgcaaagggaagatgctgcgcaacatg

SEQ ID NO: 166837 - DNA, 75 bp, synthetic construct
  source 1..75: mol_type = other DNA
aaaagcagctggcagaactgcgcaaggcactggcgggcatggaattgccacccagaaagcggcaacggcttatct

SEQ ID NO: 166838 - DNA, 75 bp, synthetic construct
  source 1..75: mol_type = other DNA
cgactccagcgaagcgaaaccgggaatggactcactggcacctgaagacggatctcatcgtccagcggctgaacc

SEQ ID NO: 166839 - DNA, 75 bp, synthetic construct
  source 1..75: mol_type = other DNA
gacgtggttgtcaccagttcctctgcggatattgcctgtgacgcgttactgctgaagccggcgtcatttactttc

SEQ ID NO: 166840 - DNA, 75 bp, synthetic construct
  source 1..75: mol_type = other DNA
agcagtatgaatttggcatcacgctgccattgcgcaatcaggccgggatgagtgacagcggacaggagagcatct

SEQ ID NO: 166841 - DNA, 75 bp, synthetic construct
  source 1..75: mol_type = other DNA
gatggattttaacgtcggaaaaatggctggagtcgttcatgtgttacgttttgggcttccatgcgcagtaactga

SEQ ID NO: 166842 - DNA, 75 bp, synthetic construct
  source 1..75: mol_type = other DNA
aggcaattgaaaaaccgctctcctccctgccttactcactttcccgtcacatcctggaacatctgcgcaaactca

SEQ ID NO: 166843 - DNA, 75 bp, synthetic construct
  source 1..75: mol_type = other DNA
ctgattaaagccgatgaccgtgccctgtctgtggatgagtatttctggcgacacatcctgcaccggggacatcag

SEQ ID NO: 166844 - DNA, 75 bp, synthetic construct
  source 1..75: mol_type = other DNA
cagtttgccgcatttggcagagctggctttgggcggtacggcagttggtacaggattaaatactcatccagagta

SEQ ID NO: 166845 - DNA, 75 bp, synthetic construct
  source 1..75: mol_type = other DNA
aactcaccctttctggcgccacgggagagccggttggtgttgtgaattcggagaatattttgaacgtgcttttct

SEQ ID NO: 166846 - DNA, 75 bp, synthetic construct
  source 1..75: mol_type = other DNA
cccgaatgatgccggaggttattttattgttaagcaattccctattgtcaaaccgaccggaagagttacatcact

SEQ ID NO: 166847 - DNA, 75 bp, synthetic construct
  source 1..75: mol_type = other DNA
atttttacagagataccccgcaccacgatcactgcccgctttcagcattttccagaccatcccagcaattcaccg

SEQ ID NO: 166848 - DNA, 75 bp, synthetic construct
  source 1..75: mol_type = other DNA
aagaaattgaaaagttaaaaaaagtaaggccccatgccattattacaacaaactatgacgatctgcttgaaaaga

SEQ ID NO: 166849 - DNA, 75 bp, synthetic construct
  source 1..75: mol_type = other DNA
ggatcgctatccagagacatactttgaaggaacgactccaaaagatatttatattaagcatgaaattgcatccat

SEQ ID NO: 166850 - DNA, 75 bp, synthetic construct
  source 1..75: mol_type = other DNA
ttcaaagttggtcgaactcttgtcgacgaacattatgaaaaatcacgcgtaacagtgttggatgtcggggcccct

SEQ ID NO: 166851 - DNA, 75 bp, synthetic construct
  source 1..75: mol_type = other DNA
tgggttaatccttcgtttgtctggaagggtgattcagctaaccgctacttatctggatatttgcagggcttccca

SEQ ID NO: 166852 - DNA, 75 bp, synthetic construct
  source 1..75: mol_type = other DNA
attttttcagagataccccgcaacacgatcacccgctttcagcattttccagacctacccaacaactcgtttctt

SEQ ID NO: 166853 - DNA, 75 bp, synthetic construct
  source 1..75: mol_type = other DNA
cgttggggataaggctgcggatttggcagaggcgttttgtaatgttatgagaggacatcgtatttggtccagaga

SEQ ID NO: 166854 - DNA, 75 bp, synthetic construct
  source 1..75: mol_type = other DNA
gtaaacttccacgaaattcctattaataaaccaatttgtcctttccacaaccatcagcgtgatgggatgcatcgt

SEQ ID NO: 166855 - DNA, 75 bp, synthetic construct
  source 1..75: mol_type = other DNA
ttaacgttggaaagatggcggggatcgtccatgtgctgcgtttgggtcttccatgtgcggtaactgaaatcatca

SEQ ID NO: 166856 - DNA, 75 bp, synthetic construct
  source 1..75: mol_type = other DNA
tcccggcgtgaaagcgctgcgtgatgccacccgtggtggtgtaaacgcggtggttcatgagttcgcggcagcctg

SEQ ID NO: 166857 - DNA, 75 bp, synthetic construct
  source 1..75: mol_type = other DNA
tgttcatgcagtgaagccagagcctcataatgaaataccgcaaggacaaagcgcgcatgatactttttgggatta

SEQ ID NO: 166858 - DNA, 75 bp, synthetic construct
  source 1..75: mol_type = other DNA
gcagaggcgttttgtaatgttatgagaggacatcgtatttggtccagagaaagtgtagcacaggaaattgctggc

SEQ ID NO: 166859 - DNA, 75 bp, synthetic construct
  source 1..75: mol_type = other DNA
ttatatctgctggttaaaaccacgggagcccgctactggcggcttaaataccggatagcaggaaaagagaaaaaa

SEQ ID NO: 166860 - DNA, 75 bp, synthetic construct
  source 1..75: mol_type = other DNA
tcggtttgcatatcgacaaccatgctgcttttgtcggagccgtctacgatcgagtaattgccgatgccaacaacc

SEQ ID NO: 166861 - DNA, 75 bp, synthetic construct
  source 1..75: mol_type = other DNA
attgccgccgcgcttgcgaagttaggtaagacagcagctgctcaaatgctcaacgatctccttccgcaaactgcg

SEQ ID NO: 166862 - DNA, 75 bp, synthetic construct
  source 1..75: mol_type = other DNA
ctacgagcagtttgttaaagccgtgcgtgaaaaaacagagctggcctcactgtatggtctggtgcaggcatctac

SEQ ID NO: 166863 - DNA, 75 bp, synthetic construct
  source 1..75: mol_type = other DNA
ttatatctgctggtaaaaaccacgggtgcccgctactggcggcttaaataccggatagcaggaaaagagaaaaaa

SEQ ID NO: 166864 - DNA, 75 bp, synthetic construct
  source 1..75: mol_type = other DNA
tccgaagggggtgacccgggcgaaaagaagcgaaaggaaaaactcactcagaaaatctctgccaccaatacgttc

SEQ ID NO: 166865 - DNA, 75 bp, synthetic construct
  source 1..75: mol_type = other DNA
ccgtgttatcacgaacgactataaccaccgcgaggcccagaacatactgatgtccgtaccggcggacatgacccg

SEQ ID NO: 166866 - DNA, 75 bp, synthetic construct
  source 1..75: mol_type = other DNA
ataaaaatggtaaaacagcgccagtcaacacctccattccgtcagtagtaaaagttgagtttgggaaggtaaaaa

SEQ ID NO: 166867 - DNA, 75 bp, synthetic construct
  source 1..75: mol_type = other DNA
gacagccaggcagcgctgacgtttgataagacgctggcgataaacagtccgtccggaatgaatgataacagagcg

SEQ ID NO: 166868 - DNA, 75 bp, synthetic construct
  source 1..75: mol_type = other DNA
aaatttgcaggcggcagtaaaaggagcaaaagctacgccatcggatattgacggtcagaagaagcttaatagtgc

SEQ ID NO: 166869 - DNA, 75 bp, synthetic construct
  source 1..75: mol_type = other DNA
aagtatggcgaaggccgcaactgctgcaaatgctactcagggagatataagttgtcagcaacggttgaatgcatc

SEQ ID NO: 166870 - DNA, 75 bp, synthetic construct
  source 1..75: mol_type = other DNA
atcacgttaccgataagaacggtacgcgcaatgttatccgtacgccggcaaataacaagttgcggatggaggaca

SEQ ID NO: 166871 - DNA, 75 bp, synthetic construct
  source 1..75: mol_type = other DNA
atgaccattatttccgttgagggcaaatcgttgggggcagagctggctgtgtggggcgtcccgcataactacgca

SEQ ID NO: 166872 - DNA, 75 bp, synthetic construct
  source 1..75: mol_type = other DNA
ggcaatgcccgggtggagcctaaaggtaacgccattcttatcaccaaacaggccagtggacggggaaaaattgac

SEQ ID NO: 166873 - DNA, 75 bp, synthetic construct
  source 1..75: mol_type = other DNA
attttacggaactaactcaacgtgaggaagttgatgattctccaattaagccatttttggatttcttggcgttgt

SEQ ID NO: 166874 - DNA, 75 bp, synthetic construct
  source 1..75: mol_type = other DNA
gatgcagaagtggatgagctgtttgcgctagtgaaagccaatccggggatccatttcgacgtggacctggaagcg

SEQ ID NO: 166875 - DNA, 75 bp, synthetic construct
  source 1..75: mol_type = other DNA
tctctgttacataatccatatggcgatggaacagctgctcaaaaaattcttaatgtgctcgcccaagagctaatt

SEQ ID NO: 166876 - DNA, 75 bp, synthetic construct
  source 1..75: mol_type = other DNA
gtagcgtttgcagcgaaaaacgccagtaaagatggccgtattgctttgcatccgttcttcttcaatgacaccgag

SEQ ID NO: 166877 - DNA, 75 bp, synthetic construct
  source 1..75: mol_type = other DNA
acgagagcgcccgttactggagtcgtcgcctgagctggttaagcagtttgataggttatggcctgattgtggccg

SEQ ID NO: 166878 - DNA, 75 bp, synthetic construct
  source 1..75: mol_type = other DNA
gtcgattcgatccgtgggcgtgcgccaggataccggggcttatcacattattccgtggtcctcgataaccacctt

SEQ ID NO: 166879 - DNA, 75 bp, synthetic construct
  source 1..75: mol_type = other DNA
ttcgcgggctgattattggtgaaccgaactttgccgggattgtcggcttaagcaataccgcgtttacactgcgtg

SEQ ID NO: 166880 - DNA, 75 bp, synthetic construct
  source 1..75: mol_type = other DNA
cggacttcgtgctgaacttcccgcagtatcagggcgcttccattttgctggcacgagaaaacttcggctgtggct

SEQ ID NO: 166881 - DNA, 75 bp, synthetic construct
  source 1..75: mol_type = other DNA
cgcaagtccatttaccacctttaatggtcgttattatggtgatcacaccggcggaacagcagttcgtctgacttc

SEQ ID NO: 166882 - DNA, 75 bp, synthetic construct
  source 1..75: mol_type = other DNA
ggcgctgaaaacggcgcgtattctgaccgtctgcgtggcggtaatgttgctgttgagcgcatggggattgttcga

SEQ ID NO: 166883 - DNA, 75 bp, synthetic construct
  source 1..75: mol_type = other DNA
cctgggttttcgaactatacgcccgctactttgaagtattggcaccaggtgaagaagcattaagcattgacgaat

SEQ ID NO: 166884 - DNA, 75 bp, synthetic construct
  source 1..75: mol_type = other DNA
tgctgaccattactgacagtattccaccagtattgccggcaccgttacaggagccggttttgctcacgcaggttc

SEQ ID NO: 166885 - DNA, 75 bp, synthetic construct
  source 1..75: mol_type = other DNA
gcggggagaaggggctgaattaagaacagacaggcatgtgtcgatacgtggtggtgcaggcatactgattagcgc

SEQ ID NO: 166886 - DNA, 75 bp, synthetic construct
  source 1..75: mol_type = other DNA
tggaacggatgtcgattcgctccgtgggcgtgcgccaggataccggggcgtatcacatcattccgtggtcttcga

SEQ ID NO: 166887 - DNA, 75 bp, synthetic construct
  source 1..75: mol_type = other DNA
ggcttcggatattcacggtcgcccgctgcccagcgcccgcacgcgtaccctgctgacactgtttcgcaatgcgct

SEQ ID NO: 166888 - DNA, 75 bp, synthetic construct
  source 1..75: mol_type = other DNA
cgcccggtcgatattctggccgttactggtaacatggatgaagaacatagaacctggttttgcgcacgttatgcc

SEQ ID NO: 166889 - DNA, 75 bp, synthetic construct
  source 1..75: mol_type = other DNA
ctgcatacattgctgatctagccgttactaacgctaagattgcaaacctagcagtaaacaccgctaaaattgttg

SEQ ID NO: 166890 - DNA, 75 bp, synthetic construct
  source 1..75: mol_type = other DNA
atggtttaggactagaacccgctttaatcaatcaacaatctttcactgaagttagtcaatggtgttttcaacagg

SEQ ID NO: 166891 - DNA, 75 bp, synthetic construct
  source 1..75: mol_type = other DNA
cgaatggtaattagtaataacatcattcagatctatgattctaacggtacgttacgtgtgcgtatgggactatgg

SEQ ID NO: 166892 - DNA, 75 bp, synthetic construct
  source 1..75: mol_type = other DNA
taagttgagtagttccggtacttggacgtatgcgggaagtactaatacccagaaaaccgactttgaactattcgg

SEQ ID NO: 166893 - DNA, 75 bp, synthetic construct
  source 1..75: mol_type = other DNA
ttcaccacaagtgaaggctgggatctgaaggtatgggatgcgatcaacgtcagcaatactgaactgaatatttca

SEQ ID NO: 166894 - DNA, 75 bp, synthetic construct
  source 1..75: mol_type = other DNA
ccgggccgaagtggacaaataagtttcttggtaaaggcattgtttctgtcagtgcggttattaaaaaaacacaac

SEQ ID NO: 166895 - DNA, 75 bp, synthetic construct
  source 1..75: mol_type = other DNA
acgtacagattacgcgtaagggtgatactactactggtagtgttgttaatatttcatgggatgcaagcccgtccg

SEQ ID NO: 166896 - DNA, 75 bp, synthetic construct
  source 1..75: mol_type = other DNA
aagtggactactaattacaaatgaaacagattttaatctacgatgggatagtcagaagaatttaaaagtaaatgg

SEQ ID NO: 166897 - DNA, 75 bp, synthetic construct
  source 1..75: mol_type = other DNA
atagaaacaatcctacaatcgtttggcggtattatgtatgtccacgcaggacaggtacacgtaacagtagaccgt

SEQ ID NO: 166898 - DNA, 75 bp, synthetic construct
  source 1..75: mol_type = other DNA
actcagcttaaatcatcaactgatgcaggctttgcgagtgttaaccaggaaatgagcacaaaggcaaataaagat

SEQ ID NO: 166899 - DNA, 75 bp, synthetic construct
  source 1..75: mol_type = other DNA
cggaatcaatcgaaccagattatgcaggtgcacatatcgtaatgcgtactgatattagcactacttcatatatta

SEQ ID NO: 166900 - DNA, 75 bp, synthetic construct
  source 1..75: mol_type = other DNA
aaagtaatgagtatactaatactaaggtagcagtagtacagaatagtgtagatggtaacactgcaaagattacca

SEQ ID NO: 166901 - DNA, 75 bp, synthetic construct
  source 1..75: mol_type = other DNA
gcaatctactttcgacaactttgcgatgcagcatatccgcgaccaggatgatatttatccggtgttccgtgaact

SEQ ID NO: 166902 - DNA, 75 bp, synthetic construct
  source 1..75: mol_type = other DNA
gtcgatgaacatgaatttttctactcgcaggaaaccggcggcactatcgtttccagcgcactgaaattgatggat

SEQ ID NO: 166903 - DNA, 75 bp, synthetic construct
  source 1..75: mol_type = other DNA
ccgccatcatacccaggcgaaagaagtcgatgaacatgagtttttctactcgcaggaaactggcggcaccattgt

SEQ ID NO: 166904 - DNA, 75 bp, synthetic construct
  source 1..75: mol_type = other DNA
aggctaagtatgccctgcgtactatcagcttcaccacaagtgaaggttgggatctcgaagtatgggatgcgatca

SEQ ID NO: 166905 - DNA, 75 bp, synthetic construct
  source 1..75: mol_type = other DNA
gacagattgccactgttaaccagtcaatgagtactaaagccgataaatctactgtagatgctcagtactcactat

SEQ ID NO: 166906 - DNA, 75 bp, synthetic construct
  source 1..75: mol_type = other DNA
cgcaggaaactggcggcaccattgtttccagtgccctgaaactgatggatgaggtagtgaaagagcgttataacc

SEQ ID NO: 166907 - DNA, 75 bp, synthetic construct
  source 1..75: mol_type = other DNA
tcttaccgaacctgggatcaatgagaaataccgagttatacagaaagatattagtacaaagcaagattctatggg

SEQ ID NO: 166908 - DNA, 75 bp, synthetic construct
  source 1..75: mol_type = other DNA
acaattgaaaatgcagttaatgaaagtaatgaatacaccaatacgcaaatctctacattgaaaaacacggtagac

SEQ ID NO: 166909 - DNA, 75 bp, synthetic construct
  source 1..75: mol_type = other DNA
gttaacgggattagtgccgacatataactttgcattaccttccgtaactggtgtcgtactggcaaatcgcaccgt

SEQ ID NO: 166910 - DNA, 75 bp, synthetic construct
  source 1..75: mol_type = other DNA
gctgatgactctccgctttgccatgagattctggcgaaaaaattgttgcccgttgttcgttattacagctatatc

SEQ ID NO: 166911 - DNA, 75 bp, synthetic construct
  source 1..75: mol_type = other DNA
gcgtggcggcctgcgccatcgcgttcacccgggtaacgaccatttcatccagaacgatcgcattgaacgtcccca

SEQ ID NO: 166912 - DNA, 75 bp, synthetic construct
  source 1..75: mol_type = other DNA
atgttttgcctgatggacgtttccggttcaatggatcagtccactaaagatatggctaagcgtttttatattctg

SEQ ID NO: 166913 - DNA, 75 bp, synthetic construct
  source 1..75: mol_type = other DNA
tctgcagcttaaacgcctgggcctgtcaaaaacgttccgtcgtctggttgtcactctcatccggcgttatggcgt

SEQ ID NO: 166914 - DNA, 75 bp, synthetic construct
  source 1..75: mol_type = other DNA
agaggctgaaaccaatggcctacgttctcattattgtcacgaacggtgcaatagtgatccacacccaacgcctga

SEQ ID NO: 166915 - DNA, 75 bp, synthetic construct
  source 1..75: mol_type = other DNA
cgaagcgaaaaatgcacggcctttagtgaaggagaaaaacaacaaggacagttcgaatggaaaattttcaaagaa

SEQ ID NO: 166916 - DNA, 75 bp, synthetic construct
  source 1..75: mol_type = other DNA
acaccatggcaaacctgtcagcacgcaaacagtttgatgaaggaaccattcgcactgttggtgccaatctgtcac

SEQ ID NO: 166917 - DNA, 75 bp, synthetic construct
  source 1..75: mol_type = other DNA
attgtgattaacagcgcagagatgcgtctgtattactatccgaaagggactaacaccgttatcgtactgccgatc

SEQ ID NO: 166918 - DNA, 75 bp, synthetic construct
  source 1..75: mol_type = other DNA
aaggatgggcggatatcgataagctcatactctgtgcccaaaaagcgggcaagcggttaacccgcgcattactgg

SEQ ID NO: 166919 - DNA, 75 bp, synthetic construct
  source 1..75: mol_type = other DNA
gctgaatgaacgtttagataagcaagcgtcagttgttgcgaacgtgggggcgattgttacctctggttcttcacg

SEQ ID NO: 166920 - DNA, 75 bp, synthetic construct
  source 1..75: mol_type = other DNA
tgtaattctccggcgaatcttcttttttcaataagagctgcagatatgcaggacggacagataaataaaacaaag

SEQ ID NO: 166921 - DNA, 75 bp, synthetic construct
  source 1..75: mol_type = other DNA
acagatgttcctttatctgtgaattttaaaagcgactcgcctgttgcggggctctttgaaggatctgctgtactg

SEQ ID NO: 166922 - DNA, 75 bp, synthetic construct
  source 1..75: mol_type = other DNA
ttagcataacaataaactccaaatgtgatattggcgagaaagtgttaaatgtaaatatgggagatagtatcaccc

SEQ ID NO: 166923 - DNA, 75 bp, synthetic construct
  source 1..75: mol_type = other DNA
agcagtttgatgaagggaccattcgcactgttggtgccaatctgtcacgagccatctccggcgataccggtgatg

SEQ ID NO: 166924 - DNA, 75 bp, synthetic construct
  source 1..75: mol_type = other DNA
agcggaacgctgaacgtcaatagcgcggcggacggctacgtcaataccaacttaaccgccaatggcagcgtcggc

SEQ ID NO: 166925 - DNA, 75 bp, synthetic construct
  source 1..75: mol_type = other DNA
tgctcgacggctcgctgtacgggatcggtagcggtcaacaggacagtgaattatataaagcgatgtatgaacgcg

SEQ ID NO: 166926 - DNA, 75 bp, synthetic construct
  source 1..75: mol_type = other DNA
ggtggctaccatgccgtgttacctgtacctggtacgcaatgagaaggggaaggaggcccgcgagtggcttgattc

SEQ ID NO: 166927 - DNA, 75 bp, synthetic construct
  source 1..75: mol_type = other DNA
gggtgagtacgtatcatcggggacagcggaatcactgcccgccgtcatgaacgccgtgacggtcatctctgaggc

SEQ ID NO: 166928 - DNA, 75 bp, synthetic construct
  source 1..75: mol_type = other DNA
gctggcctcccgtcgcttctccattgaagacatcgcccggatgttcaacgtatcgcctatttttctgcaggaata

SEQ ID NO: 166929 - DNA, 75 bp, synthetic construct
  source 1..75: mol_type = other DNA
aaaaagcgtttgcgggcgtggttaatcggattatcgccagcggctggcaggtgatggcgctctctacctgtacgg

SEQ ID NO: 166930 - DNA, 75 bp, synthetic construct
  source 1..75: mol_type = other DNA
tgcaaccgccttatctggaacaaaaaaaataatatgtattgaagcagacaaacgcataaaagagtctttcgagga

SEQ ID NO: 166931 - DNA, 75 bp, synthetic construct
  source 1..75: mol_type = other DNA
gagtccttcgaggaaattattaaagcagacagcactcataacagggctatatcatttatgtttttttgtaaaatt

SEQ ID NO: 166932 - DNA, 75 bp, synthetic construct
  source 1..75: mol_type = other DNA
ccctgaaacagaccagagccatgacgggcgaaatactcgaaacgtgggaggacggtcacacactctgggcaagcg

SEQ ID NO: 166933 - DNA, 75 bp, synthetic construct
  source 1..75: mol_type = other DNA
atgagaaagggattaagagcgggatcatgaatccgaacgaagctcgcgaacgcgagggtatgccgccgcgtgaag

SEQ ID NO: 166934 - DNA, 75 bp, synthetic construct
  source 1..75: mol_type = other DNA
gggtgagtacgtatcatcggggacagcggaatcactccccgccgtcatgaacgccgtcacggtcatctctgaggc

SEQ ID NO: 166935 - DNA, 75 bp, synthetic construct
  source 1..75: mol_type = other DNA
acctgtacctggtatccggtatcaggtggagtttgacagcgcggacctgttacgggccactcctggcgaacgctt

SEQ ID NO: 166936 - DNA, 75 bp, synthetic construct
  source 1..75: mol_type = other DNA
ggcgctattgcatcactgacgcctacaccggaaacacccgcaactatttaccgtgggaagtacttcaccttcgtt

SEQ ID NO: 166937 - DNA, 75 bp, synthetic construct
  source 1..75: mol_type = other DNA
cgccaggacacgccttgaaattctttgtcgtgagggcgcggaaaatgacagaagaacttatcaccctggaagaag

SEQ ID NO: 166938 - DNA, 75 bp, synthetic construct
  source 1..75: mol_type = other DNA
tattaaacaagagattaatcctgatgaaaaatatgcgtttgtggaatattgggcaagaggctatactcaaacttg

SEQ ID NO: 166939 - DNA, 75 bp, synthetic construct
  source 1..75: mol_type = other DNA
ttatgatcttgtctctgctggcgtgaaaaaattcattcgttatatttttgattatgatgatgaacaacacatcat

SEQ ID NO: 166940 - DNA, 75 bp, synthetic construct
  source 1..75: mol_type = other DNA
gggggggtatccacgttgcatttaccaatcattgtataatccaatagttacatatgaccatgatataatatctaa

SEQ ID NO: 166941 - DNA, 75 bp, synthetic construct
  source 1..75: mol_type = other DNA
gcgtgtggggctgccgggatgctgatcgcctatgcagagtgcctgcttgaagccgatatcaacccctcaatgcac

SEQ ID NO: 166942 - DNA, 75 bp, synthetic construct
  source 1..75: mol_type = other DNA
tgggcgataattttcgcgggcagtattttaccccgtattcagtgcagtgtctgatggcgcggatgctaatgccag

SEQ ID NO: 166943 - DNA, 75 bp, synthetic construct
  source 1..75: mol_type = other DNA
ccagctgtctctactgggaattgccgccgaagtggtaacggggaataccctcacaatgcagtttaaccgggtgag

SEQ ID NO: 166944 - DNA, 75 bp, synthetic construct
  source 1..75: mol_type = other DNA
atataatctaaatgacagtcaaattactaagctaatggattgggaagtacaggctgaatatgaaaacgtaattcc

SEQ ID NO: 166945 - DNA, 75 bp, synthetic construct
  source 1..75: mol_type = other DNA
gatcttaaccttgcgcaggcggtagcaaaaaatctcggtattgagctgactgacgatcaactgaatattacgccg

SEQ ID NO: 166946 - DNA, 75 bp, synthetic construct
  source 1..75: mol_type = other DNA
aggatccatccttaagtttgtacgccattcctgacggtgatgtgaaaggtcgcgtggtagcgattttgcttaatg

SEQ ID NO: 166947 - DNA, 75 bp, synthetic construct
  source 1..75: mol_type = other DNA
aaaattgttagacttgctggcaaaacggcatttaacccaatattaaagccagtgctgggcaatgtaataattaag

SEQ ID NO: 166948 - DNA, 75 bp, synthetic construct
  source 1..75: mol_type = other DNA
agattagaacaactcaactagatcgaatatctgagctagtaagcagagcatctaccaatttgatgcaatatacag

SEQ ID NO: 166949 - DNA, 75 bp, synthetic construct
  source 1..75: mol_type = other DNA
gaaaaatatgcattcgtagaatattgggccagagggtatacacagacatgtttaagaaaacttatagataatgct

SEQ ID NO: 166950 - DNA, 75 bp, synthetic construct
  source 1..75: mol_type = other DNA
gagttccctgagcggcccgaaatttttacttggcttctttcccttgataagaagaaaccaccacacgaagaaaca

SEQ ID NO: 166951 - DNA, 75 bp, synthetic construct
  source 1..75: mol_type = other DNA
aagaaaccaccgcacgaagaaacagaagattttgtaaaacgtgcattagattcaaagaatatctgtcttgagaaa

SEQ ID NO: 166952 - DNA, 75 bp, synthetic construct
  source 1..75: mol_type = other DNA
tacctgatccttctgagaaagaagacgaatctaatggaatattgaatgtttccgaaatcatcattgaagaagaaa

SEQ ID NO: 166953 - DNA, 75 bp, synthetic construct
  source 1..75: mol_type = other DNA
tcagcataacgataagctcaaagtgtaatgttggtgaacaaagtttgagtgttaatatgggtgataatattactc

SEQ ID NO: 166954 - DNA, 75 bp, synthetic construct
  source 1..75: mol_type = other DNA
tatacagttaccagtaaaagttgcatatgaggaaaataaagggaattatgacggtaaaaatggtagcggttggac

SEQ ID NO: 166955 - DNA, 75 bp, synthetic construct
  source 1..75: mol_type = other DNA
gaatatctttcttttctttactcccattatctgcagaagccgaaagctactgtaacctcctttgggcgaataata

SEQ ID NO: 166956 - DNA, 75 bp, synthetic construct
  source 1..75: mol_type = other DNA
tgcggcgcggcgggtatggtgattgcgtatgctgaatgcctgcttgacgccgggtttaatccttcggaacacatg

SEQ ID NO: 166957 - DNA, 75 bp, synthetic construct
  source 1..75: mol_type = other DNA
aactttggtaagcggctggacgatcagcgccgtatcagtgccatgcgcgaatttttgcgctgtataaatgacgct

SEQ ID NO: 166958 - DNA, 75 bp, synthetic construct
  source 1..75: mol_type = other DNA
ccgtttattacttcaatgactggcagggacgtctggcgttccgcagccgtttcgaagctatgaaaaaatttctgg

SEQ ID NO: 166959 - DNA, 75 bp, synthetic construct
  source 1..75: mol_type = other DNA
aatcgccggagcgttgccgttcattaccgatcactttgtgctgaccagtcgtttgatcttacccagcaatagtgg

SEQ ID NO: 166960 - DNA, 75 bp, synthetic construct
  source 1..75: mol_type = other DNA
caggctggaagcatgctgacctgtttgatttgggtatgcagtcccttagccattatggcattacagagggaagca

SEQ ID NO: 166961 - DNA, 75 bp, synthetic construct
  source 1..75: mol_type = other DNA
cacaggcttgcggaactcacaatgaataaactctacgataaaatccccccatccgtctggaaatatgtatattag

SEQ ID NO: 166962 - DNA, 75 bp, synthetic construct
  source 1..75: mol_type = other DNA
cggtctggaagtgcaaagctacgcagacggttcactttttgctgaagcatcaactggctggcgtgcctgctacga

SEQ ID NO: 166963 - DNA, 75 bp, synthetic construct
  source 1..75: mol_type = other DNA
aggtaaccgatccttttctgctcgacgtgatccttgatgaagaaacacttgatccctttcattcgtggctgatcc

SEQ ID NO: 166964 - DNA, 75 bp, synthetic construct
  source 1..75: mol_type = other DNA
taaaaaacatatattgtgcatccggcagttttcacaaattatcgccgcaagagcgtttattctacgaagcaagaa

SEQ ID NO: 166965 - DNA, 75 bp, synthetic construct
  source 1..75: mol_type = other DNA
gtaattgctacttttcaggccagcctcggggaaaccgttcgtcggttacccggtctggagctacaaaactacgcc

SEQ ID NO: 166966 - DNA, 75 bp, synthetic construct
  source 1..75: mol_type = other DNA
cgaacaaaaaacgtcatcaacgcaggttattaatctgctggtatggagcgggctttgtggctggataaatcgctt

SEQ ID NO: 166967 - DNA, 75 bp, synthetic construct
  source 1..75: mol_type = other DNA
ccagttccttggtaacaacaaaatccagccatcaacttgctgccttactcagtgcacgaattaacgggagcgttg

SEQ ID NO: 166968 - DNA, 75 bp, synthetic construct
  source 1..75: mol_type = other DNA
gtgcgcagacagaaagcgcggtgtttttgctgtggtgagcaagcagtgattgaaaagaccttctggaaagatgat

SEQ ID NO: 166969 - DNA, 75 bp, synthetic construct
  source 1..75: mol_type = other DNA
tgttttttcctggatgaggataatttctttaatgatttgtcagtcatcgtatatacctgtaaccctgtgcgccac

SEQ ID NO: 166970 - DNA, 75 bp, synthetic construct
  source 1..75: mol_type = other DNA
actcgtgcctcaagttttttggattttccattaactgctttcgttgccatatctgatttccttgttattaggtgg

SEQ ID NO: 166971 - DNA, 75 bp, synthetic construct
  source 1..75: mol_type = other DNA
caaataacaaagtagaatccagggggcacgttattcgtgttaccaaaaatggaagaaatatatatcaaagaaata

SEQ ID NO: 166972 - DNA, 75 bp, synthetic construct
  source 1..75: mol_type = other DNA
ccaaattaagcgcagtgctgcgataaaagggataagtaaaaagaaagttcaaggtctagaaattatggtatctat

SEQ ID NO: 166973 - DNA, 75 bp, synthetic construct
  source 1..75: mol_type = other DNA
taaaaaatgttctttttggttttttttataaacgtgatatttatgaaggaatattagaggcaatgaaagccagag

SEQ ID NO: 166974 - DNA, 75 bp, synthetic construct
  source 1..75: mol_type = other DNA
tgccggatctgaaagttgagcaggcatttgagttgaccgatgcttccgctgaacgttccgcggcgggctgtacca

SEQ ID NO: 166975 - DNA, 75 bp, synthetic construct
  source 1..75: mol_type = other DNA
gccaattgaagtggacgtttccaacctgaatatgggcgacgtgattgacgtttacccgtacaaaggtgaagtgcg

SEQ ID NO: 166976 - DNA, 75 bp, synthetic construct
  source 1..75: mol_type = other DNA
aagccgatgcagatgcggaatacgcggcagtgattgacatcgatctggcggatattaaagagccaatcctctgtg

SEQ ID NO: 166977 - DNA, 75 bp, synthetic construct
  source 1..75: mol_type = other DNA
agcgtctgtgtggttgcggaaagcatgatgaccgtgaacacgtgcagtcgcttacagcacaactgcgtctggggc

SEQ ID NO: 166978 - DNA, 75 bp, synthetic construct
  source 1..75: mol_type = other DNA
cgtgatgttctggcattgcttcagaagaaagagcgcaccgcaccggaggctgcccgcaagttacgccagcgcatc

SEQ ID NO: 166979 - DNA, 75 bp, synthetic construct
  source 1..75: mol_type = other DNA
ggtaaaattgcaccaatcttctttaacacgatggaagatgccggtgcgttgccaattgaagtggacgtttccagc

SEQ ID NO: 166980 - DNA, 75 bp, synthetic construct
  source 1..75: mol_type = other DNA
tgcgaagcaggtaatgcagtcctgggcggatgccgaatggttcctgaatcgcccggcactggctgaaaaactgac

SEQ ID NO: 166981 - DNA, 75 bp, synthetic construct
  source 1..75: mol_type = other DNA
gcgaatgtcttcctggcttctgcggaactggcggctgttgcggcgctgattggcaaactgccgacgccggaagag

SEQ ID NO: 166982 - DNA, 75 bp, synthetic construct
  source 1..75: mol_type = other DNA
catggatacagattagtgaaattccggccttctacaaagcccttgagagagccgggagcgtccagattcagacgg

SEQ ID NO: 166983 - DNA, 75 bp, synthetic construct
  source 1..75: mol_type = other DNA
gcgcacaaaggccagttaccgacccgtttgtgggtggcgccgccaacgcgtatggacgccgcgcaactaaccgaa

SEQ ID NO: 166984 - DNA, 75 bp, synthetic construct
  source 1..75: mol_type = other DNA
cgtttcccgatcggtatctccttcccggcgggctccggtatggtggcgtttgctgccgcgactggcgtgatgccg

SEQ ID NO: 166985 - DNA, 75 bp, synthetic construct
  source 1..75: mol_type = other DNA
tatggacgccgcgcagttgaccgaagaaggctactacagcgtcttcggtaagagcggtgcgcgtatcgagatccc

SEQ ID NO: 166986 - DNA, 75 bp, synthetic construct
  source 1..75: mol_type = other DNA
gcatcgacagctataacaaagacgaccgcatggtggcgctcaacctgcgccagcacatcagcgatcctgcccgtt

SEQ ID NO: 166987 - DNA, 75 bp, synthetic construct
  source 1..75: mol_type = other DNA
gggcattctctcttattgccggttggtacaaaccacagtttaagagggaatatcaggcggtccactatgagaatg

SEQ ID NO: 166988 - DNA, 75 bp, synthetic construct
  source 1..75: mol_type = other DNA
tgaactggcaccgttcgacaaacgtctcggcaccactcaacaagcgtatgaaaaagcctttgccggggtggtcaa

SEQ ID NO: 166989 - DNA, 75 bp, synthetic construct
  source 1..75: mol_type = other DNA
gtaacgatgtcagtgacttgatcgattatgatgatcacaccctgaaatattacaacgaagggaaagcgcggatta

SEQ ID NO: 166990 - DNA, 75 bp, synthetic construct
  source 1..75: mol_type = other DNA
aaaaagcctttgccggggtggtcaatcgcattctcgacgaaggctatcaggtgattgcgctctccacctgtacgg

SEQ ID NO: 166991 - DNA, 75 bp, synthetic construct
  source 1..75: mol_type = other DNA
aatatcgccatcgcccagggattcaccgacttcgtgcgcctactgtcaggttacgacgccattattcaggtcggc

SEQ ID NO: 166992 - DNA, 75 bp, synthetic construct
  source 1..75: mol_type = other DNA
gtcgagcacggggtggataccgcgtggctggtggatcaccaggatgacagcttccagccgagctacgcggtgcag

SEQ ID NO: 166993 - DNA, 75 bp, synthetic construct
  source 1..75: mol_type = other DNA
gtatcgatagctacaacaaggatgatcgcatggtggcgctgaacctgcgccatctggtgaacgatccgtcccggt

SEQ ID NO: 166994 - DNA, 75 bp, synthetic construct
  source 1..75: mol_type = other DNA
gcgtgacgcagtttgagcacgcgctgtgtacctttatggcgaaaaaaccgatttatatggtcgggcacagcgtgg

SEQ ID NO: 166995 - DNA, 75 bp, synthetic construct
  source 1..75: mol_type = other DNA
atgaaattacttattctgggcaaccacacttgcggcaatcgcggcgacagcgccatcctgcgcggcttacttgat

SEQ ID NO: 166996 - DNA, 75 bp, synthetic construct
  source 1..75: mol_type = other DNA
gtagagatgggcgtggataccgcctggcttgtggaacagcgtaatgatacctttgtgccaggctatgcggtgcag

SEQ ID NO: 166997 - DNA, 75 bp, synthetic construct
  source 1..75: mol_type = other DNA
cgagctggcaccttttgataagcgtttaggtacgactcaggccgcctacgagaaggcctttgccgaggtcgttaa

SEQ ID NO: 166998 - DNA, 75 bp, synthetic construct
  source 1..75: mol_type = other DNA
atgactgaagagatagcaggtttccagacctccccgaaggcgcaagtacaggcagcttttgaagaaattgcccgg

SEQ ID NO: 166999 - DNA, 75 bp, synthetic construct
  source 1..75: mol_type = other DNA
tgattttgcgtttactgcttttgtcgccatgttgtgtaccccttacaaaaaacaaatgcagtatgcaggaaaaaa

SEQ ID NO: 167000 - DNA, 75 bp, synthetic construct
  source 1..75: mol_type = other DNA
taatgcgggagattctaatgccctcgccgccgcaatgctatcattggctgaagacgaattattagctagtcaaat

SEQ ID NO: 167001 - DNA, 75 bp, synthetic construct
  source 1..75: mol_type = other DNA
cgtcttttccgtgccggtgataatgttttggtcaattctttatcggtcattgtgttgtcctgcatagcaatgcgc

SEQ ID NO: 167002 - DNA, 75 bp, synthetic construct
  source 1..75: mol_type = other DNA
ttgcagcagtaactaaaaaaccagcggtactttcgccaggttctttaagttgctcaatatcatccattacttcat

SEQ ID NO: 167003 - DNA, 75 bp, synthetic construct
  source 1..75: mol_type = other DNA
gacctttaccgttggcgaactggacggtgtttcgcaatacctctcctgttcgctgatgtcgccgctttcgcacag

SEQ ID NO: 167004 - DNA, 75 bp, synthetic construct
  source 1..75: mol_type = other DNA
tataagcacaggttaaagctaccaaatggtattgaggcatattttgctaagaaacatcccaaagtatacgaagac

SEQ ID NO: 167005 - DNA, 75 bp, synthetic construct
  source 1..75: mol_type = other DNA
cggaggactggctggctaccagggtgagcggatggagtgagagctatacaaagcaggtcagatcagcactggaga

SEQ ID NO: 167006 - DNA, 75 bp, synthetic construct
  source 1..75: mol_type = other DNA
aattgcaaaaatgctaaagacggtttatttagatataagcaattacatcctaagcacgttgattataaagatgca

SEQ ID NO: 167007 - DNA, 75 bp, synthetic construct
  source 1..75: mol_type = other DNA
tcagtcccaacgtacccatcaaaatgcttggattatatgaagctcagtatcccaattattgcttcaattgaggac

SEQ ID NO: 167008 - DNA, 75 bp, synthetic construct
  source 1..75: mol_type = other DNA
tccttgccttacccaaagggaccacaacgcctgtcattcgcaaactggagatagaagggccggatattcttttag

SEQ ID NO: 167009 - DNA, 75 bp, synthetic construct
  source 1..75: mol_type = other DNA
gtgtgcagcttgtcggagaaatcccggccaatacctttgctgttgttctagagagtgacagtatgtcgacatctg

SEQ ID NO: 167010 - DNA, 75 bp, synthetic construct
  source 1..75: mol_type = other DNA
cacgccgttaacgctggggcaggagatttccggctgggtagcgatgctggagcataatctcaaacatatcgaata

SEQ ID NO: 167011 - DNA, 75 bp, synthetic construct
  source 1..75: mol_type = other DNA
tctcaatcccggaaaatgagccgggcagctcaatcatgccgggaaaagtgaacccaacacagtgtgaggcattaa

SEQ ID NO: 167012 - DNA, 75 bp, synthetic construct
  source 1..75: mol_type = other DNA
aacatcgctcttgaccagaaaggttcaggaaatttttctgcgtgggtcattgaatcttgccgccgggagctggca

SEQ ID NO: 167013 - DNA, 75 bp, synthetic construct
  source 1..75: mol_type = other DNA
actggcgacctgcgatgcactggttcaggctcatggcgcgttgaaagggctggcggcgtcactgatgaaaattgc

SEQ ID NO: 167014 - DNA, 75 bp, synthetic construct
  source 1..75: mol_type = other DNA
cacgcctgaacttattcactataacgacaatatcgtcggttatggctcccgtgagttacgggttgagacaataag

SEQ ID NO: 167015 - DNA, 75 bp, synthetic construct
  source 1..75: mol_type = other DNA
atgcggccatgtatcgaaacatacggtgccgacactgcaataagctactggcacgggccagtttcagctatctgg

SEQ ID NO: 167016 - DNA, 75 bp, synthetic construct
  source 1..75: mol_type = other DNA
atcagattcctgaacaagcgagcaaggaagcggctaaataccaaactattcaaggttcagccataccctaagtga

SEQ ID NO: 167017 - DNA, 75 bp, synthetic construct
  source 1..75: mol_type = other DNA
actcggcggcgtgcgcgggatggagcgtaaagttcaccctaacgacgacgtgaacaaaagccaaagttccaacga

SEQ ID NO: 167018 - DNA, 75 bp, synthetic construct
  source 1..75: mol_type = other DNA
tgaacttgatggcgagtggtatcacgagatttgcaggaatgccattaaacgaggcggacaacgaggtgaacatct

SEQ ID NO: 167019 - DNA, 75 bp, synthetic construct
  source 1..75: mol_type = other DNA
aaatttaatcagtatcgctacatcagattcctgaacaagcgagcaaggaagcggctaaataccaaactattcaag

SEQ ID NO: 167020 - DNA, 75 bp, synthetic construct
  source 1..75: mol_type = other DNA
ctgcgcacttttagcacacaaaacctaccgacagttacattgcttgtatgctcccggtgcggaggcaggatcatc

SEQ ID NO: 167021 - DNA, 75 bp, synthetic construct
  source 1..75: mol_type = other DNA
agtatccaaatcctctgcgccgtccgcaagatgagtggctccagcgtgtgctgtggcggatgcacgacacatcct

SEQ ID NO: 167022 - DNA, 75 bp, synthetic construct
  source 1..75: mol_type = other DNA
tctacctttattcaaggacataaccaatacagcgatcagccgaccctgttgacgctacgcaaagccaacgcggcg

SEQ ID NO: 167023 - DNA, 75 bp, synthetic construct
  source 1..75: mol_type = other DNA
agctaatgttcgtccttcatcaatactgagcaaagactacacctttaaaacccccggctgggaaggcaaatatat

SEQ ID NO: 167024 - DNA, 75 bp, synthetic construct
  source 1..75: mol_type = other DNA
atgagcatgggcgtgtacgggtgaagtttcactgggacagaacccagaccaaagatgaaaataactcctgctggg

SEQ ID NO: 167025 - DNA, 75 bp, synthetic construct
  source 1..75: mol_type = other DNA
cgctgaaagtggacggccaaaatgcggacaccttcgccgtggtaaatttctggctgatgcagaatttctcgtttc

SEQ ID NO: 167026 - DNA, 75 bp, synthetic construct
  source 1..75: mol_type = other DNA
tgtgtgtcagaaaatacagacgctatgcagcgattatcgtatcacccccgcagtaatcttctatgtggcctgggg

SEQ ID NO: 167027 - DNA, 75 bp, synthetic construct
  source 1..75: mol_type = other DNA
aactctatggagcggctgtggtcagtggtgtgagggatgatagcgccattatcccctcatctctgaaaccccttg

SEQ ID NO: 167028 - DNA, 75 bp, synthetic construct
  source 1..75: mol_type = other DNA
aaatgaacaatcaagacctctgcctgatgtggctcagcgtctggtgcagcatcttgcagagcatggcattaatac

SEQ ID NO: 167029 - DNA, 75 bp, synthetic construct
  source 1..75: mol_type = other DNA
atatgtcaagcatggagtaggggtgcgcctgccggatgtggcttatacattgcaaactggacgcacagcctttga

SEQ ID NO: 167030 - DNA, 75 bp, synthetic construct
  source 1..75: mol_type = other DNA
ttgcggtatctcctgcccgcaactcagtgcaacgccgtgtccaccacgatatcagaggtgcatagtgacatggaa

SEQ ID NO: 167031 - DNA, 75 bp, synthetic construct
  source 1..75: mol_type = other DNA
tgatgaattgtgcgcgttgacctattcggagttggcagcacaagctgagcagctcgcggcttatttggtacagca

SEQ ID NO: 167032 - DNA, 75 bp, synthetic construct
  source 1..75: mol_type = other DNA
ccggcgttatggcgtcagtcttattcatctggatgccagcgccgggtgtctgccggatttacccactttcgactg

SEQ ID NO: 167033 - DNA, 75 bp, synthetic construct
  source 1..75: mol_type = other DNA
cggtcgagctattacaggaccagtttacaaggagcggatacagtgctttcgtcttccctggtcgattcatggata

SEQ ID NO: 167034 - DNA, 75 bp, synthetic construct
  source 1..75: mol_type = other DNA
tacaaggagcggatacagtgctttcgtcttccctggtcgattcatggataaaccattgtcagccagtgcgatact

SEQ ID NO: 167035 - DNA, 75 bp, synthetic construct
  source 1..75: mol_type = other DNA
cgccggcgaaaattatcgacgacgctgtagctcgcatccgcgagcaggtgggcgacgataaagtcatcctcggcc

SEQ ID NO: 167036 - DNA, 75 bp, synthetic construct
  source 1..75: mol_type = other DNA
gcccggaaagtaccactgaagaaaacagcccgcgtgcgccgcagtatgtttttgaagcaggcgtaccggtattcg

SEQ ID NO: 167037 - DNA, 75 bp, synthetic construct
  source 1..75: mol_type = other DNA
gcatcctcattctggacttcggttcccagtatactcaactggttgcgcgccgcgtgcgtgaactgggggtttact

SEQ ID NO: 167038 - DNA, 75 bp, synthetic construct
  source 1..75: mol_type = other DNA
taacgagtcaggcaggtactcaccagactggatcgaaatccaattggcccacgttccgaagggaatcaggggagt

SEQ ID NO: 167039 - DNA, 75 bp, synthetic construct
  source 1..75: mol_type = other DNA
tcacgctcattcgccgttatggcgtcagtctcattcatctggatgcctgcgatgaatgtctgccgggtctgccca

SEQ ID NO: 167040 - DNA, 75 bp, synthetic construct
  source 1..75: mol_type = other DNA
gaacatggggcgaattgtcgttgacgtcgatggtgttgagcttgccgaactgattaacgtggtctgcgataacgg

SEQ ID NO: 167041 - DNA, 75 bp, synthetic construct
  source 1..75: mol_type = other DNA
tgattaacaaagtcgctgaaaacggttattcactccgtgtggtggacgactccgaccaacagtcaacctgcacac

SEQ ID NO: 167042 - DNA, 75 bp, synthetic construct
  source 1..75: mol_type = other DNA
acggaaacagacaacgcttggctgtactcgctgtcgcatcagacgaatgacaccggcgaatcagaatggattcat

SEQ ID NO: 167043 - DNA, 75 bp, synthetic construct
  source 1..75: mol_type = other DNA
tctgcggcttaaacgactgggcctgtccagaacgttccgtcgtctggttgtcactctcatccgccgttatggcgt

SEQ ID NO: 167044 - DNA, 75 bp, synthetic construct
  source 1..75: mol_type = other DNA
tcgtctggttgtcacgcttagccggagttatggcgtccgtctcattcatctggttgccagcgccgaatttctgcc

SEQ ID NO: 167045 - DNA, 75 bp, synthetic construct
  source 1..75: mol_type = other DNA
tcgtctggttgtcacccttagccggggttatggcgtccgtctcattcatctggttgccagcgccggatttctgcc

SEQ ID NO: 167046 - DNA, 75 bp, synthetic construct
  source 1..75: mol_type = other DNA
tcgtctggttgtcactcttagccggcgttatggcgtccgtctcattcatctggttgccagcgccgtatttctgcc

SEQ ID NO: 167047 - DNA, 75 bp, synthetic construct
  source 1..75: mol_type = other DNA
ccaccgttaacaacccttaccggcatacgctgcagcaccgcacatatcacggaaacagacaacgcctggttgtac

SEQ ID NO: 167048 - DNA, 75 bp, synthetic construct
  source 1..75: mol_type = other DNA
cagtctcattcatctggatgccagcgctgaatgcctgccgggtttacccactttcgtaagcgtgcagcaagaacc

SEQ ID NO: 167049 - DNA, 75 bp, synthetic construct
  source 1..75: mol_type = other DNA
ggtcgtacccggttctgcggcttaaacgcctgggtctgtcaaaaacgttccgtcgtctggtcgtcacactcatcc

SEQ ID NO: 167050 - DNA, 75 bp, synthetic construct
  source 1..75: mol_type = other DNA
ctactcccttcgtattgttgatgaatctgaccggacatcagcagagcgcacgccaccatttgctgccctgacagg

SEQ ID NO: 167051 - DNA, 75 bp, synthetic construct
  source 1..75: mol_type = other DNA
ggcgacgataaagtcatcctcggcctctctggtggcgtggattcctccgtaaccgcaatgctgttgcaccgcgct

SEQ ID NO: 167052 - DNA, 75 bp, synthetic construct
  source 1..75: mol_type = other DNA
atcaatgaagtgaacggtatttcccgcgtggtgtatgacatcagcggcaagccgccagctaccattgagtgggaa

SEQ ID NO: 167053 - DNA, 75 bp, synthetic construct
  source 1..75: mol_type = other DNA
tcgtctggttgtcactcttagccggtgttatggcgtccgtctcattcatctggttgccagcgccgcatttctgcc

SEQ ID NO: 167054 - DNA, 75 bp, synthetic construct
  source 1..75: mol_type = other DNA
tttaccggcagcggctatctgttacgtactgatacgtggccgtatccggttctgcggcttaaacgattgggcctg

SEQ ID NO: 167055 - DNA, 75 bp, synthetic construct
  source 1..75: mol_type = other DNA
cgtctggttgtcacactcatccggcgttatggcgtcagtctcattcacctggatgccagcgctgaatgcctgccg

SEQ ID NO: 167056 - DNA, 75 bp, synthetic construct
  source 1..75: mol_type = other DNA
acagagggtaagccacagcgtggaatcctcggtttctatcagggattcggcgaagcgggcgcagttgtcgaccaa

SEQ ID NO: 167057 - DNA, 75 bp, synthetic construct
  source 1..75: mol_type = other DNA
ggtggaagggaagcaggagcataagacgacggggaaccatatcagtctggtggagggaacgcacagtctggaggt

SEQ ID NO: 167058 - DNA, 75 bp, synthetic construct
  source 1..75: mol_type = other DNA
cagcgactcttttatgcagacggcggagatgctgctggagaagaacgcaacgctgaccatctggcagggcgtcat

SEQ ID NO: 167059 - DNA, 75 bp, synthetic construct
  source 1..75: mol_type = other DNA
atcagcagtttgccaccttctttaaatccttttttgccaccccggagtcgggtacccgcgcttttggttttgcga

SEQ ID NO: 167060 - DNA, 75 bp, synthetic construct
  source 1..75: mol_type = other DNA
attattaaccgcatcggggcgaaaaatacgttactgattgccgggatggtgatggcggcaaggatgatcggttca

SEQ ID NO: 167061 - DNA, 75 bp, synthetic construct
  source 1..75: mol_type = other DNA
acccggctgttgctgaatccggcctcaccggtaaccctgacgctcattgcggtcttgaccgttatgtgaatgtca

SEQ ID NO: 167062 - DNA, 75 bp, synthetic construct
  source 1..75: mol_type = other DNA
cggataaggaacaggtctatatccacgcgcagaagaacatggacacggaggtacttaacgaccggacgacggatg

SEQ ID NO: 167063 - DNA, 75 bp, synthetic construct
  source 1..75: mol_type = other DNA
taattcgccgaagctgtggccgggaacgcggtttacgctgacggggcatccgcagaagatgctgaaccgtgaatg

SEQ ID NO: 167064 - DNA, 75 bp, synthetic construct
  source 1..75: mol_type = other DNA
accgtgaatggcaggtggtacagagcattctgtcaggagaccagccgcaggcgcttcacggcagccaggggagag

SEQ ID NO: 167065 - DNA, 75 bp, synthetic construct
  source 1..75: mol_type = other DNA
accggacaacggatgtgaaacatgaccatacggagaccatcgggaacgaccagaagataacggtggtgaaggggc

SEQ ID NO: 167066 - DNA, 75 bp, synthetic construct
  source 1..75: mol_type = other DNA
ctacattgccttctttgaggatggcacgcagacccgcggagaaacggatgaagaggggtatacagagcgtttttt

SEQ ID NO: 167067 - DNA, 75 bp, synthetic construct
  source 1..75: mol_type = other DNA
gggacctgccggggacgaagacgcagatgacgatacggtcgaagacctataaaggaagcgggtttaacgagctgc

SEQ ID NO: 167068 - DNA, 75 bp, synthetic construct
  source 1..75: mol_type = other DNA
catcacggtacgtaacgaccagatgctgaaggtgacgaacgaccggacggtgagcgtgagtcacgatgacagtct

SEQ ID NO: 167069 - DNA, 75 bp, synthetic construct
  source 1..75: mol_type = other DNA
gatgaacagcacggcaaggatttcacgctgtaccagatggagagcctgcgcagtgatgcggaaaaggccacaggg

SEQ ID NO: 167070 - DNA, 75 bp, synthetic construct
  source 1..75: mol_type = other DNA
aaaggaagcggatttaacgagctgcggtttgaagacgccaccagtaatgagcaggtgtatatccatgcccagaag

SEQ ID NO: 167071 - DNA, 75 bp, synthetic construct
  source 1..75: mol_type = other DNA
cgttgttgaccagctggcgcatattgatctcactctggcccaggcggtggcgaaaaatctcggtatcgaactgac

SEQ ID NO: 167072 - DNA, 75 bp, synthetic construct
  source 1..75: mol_type = other DNA
ttcgatcttctcgatccaactaaacttatcccggaagaactggtgcccgttcagcgtgtcggcaaaatggtgctc

SEQ ID NO: 167073 - DNA, 75 bp, synthetic construct
  source 1..75: mol_type = other DNA
cgccattcctgacggtgatgtgaaaggtcgcgtggtagcgattttacttaatgatgaagtgagatcggcagacct

SEQ ID NO: 167074 - DNA, 75 bp, synthetic construct
  source 1..75: mol_type = other DNA
gaaacgatggggtataatgcgatatgggccggacttgcctatgcgcccatcggcatcatgccactattaatatca

SEQ ID NO: 167075 - DNA, 75 bp, synthetic construct
  source 1..75: mol_type = other DNA
agtagtatcagttatttctctgatctctttagtcatttgggagtcgacctcagagaatccgattcttgatctcag

SEQ ID NO: 167076 - DNA, 75 bp, synthetic construct
  source 1..75: mol_type = other DNA
actgagtaaaacggatactggtatagtcttttcatgtctttcgctgtttgccattagttttcagccattgcttgg

SEQ ID NO: 167077 - DNA, 75 bp, synthetic construct
  source 1..75: mol_type = other DNA
cccgcagcgttatgtcacaggcgtggtggcagggtttggtatgcaggagaacaacggctggcagatgcgttatca

SEQ ID NO: 167078 - DNA, 75 bp, synthetic construct
  source 1..75: mol_type = other DNA
acccgctgaagtcatgaaagcccgccgcgcgcatgtagtaccgctatcccggcaggcggtcgagctattacatga

SEQ ID NO: 167079 - DNA, 75 bp, synthetic construct
  source 1..75: mol_type = other DNA
gcctgctgctggtcctgtttgcaccgttctttctgtacgtttttgcgccgctgctgcggttcaacatctgggccg

SEQ ID NO: 167080 - DNA, 75 bp, synthetic construct
  source 1..75: mol_type = other DNA
tgacgacggcgtgcatcagcctgttccgctaccaggcgcaggtgcggccctcgcaggtgcgttcaaaagaccaca

SEQ ID NO: 167081 - DNA, 75 bp, synthetic construct
  source 1..75: mol_type = other DNA
gtgagcggtgtggtgtcggggttcggcatgaaggagcacaacggctggcagatgcagtaccaccttcagatacgc

SEQ ID NO: 167082 - DNA, 75 bp, synthetic construct
  source 1..75: mol_type = other DNA
acgttaacgacggcactgaacatgcgcaccaactggcggagctactgaaagatacgccgtgtaagatcaacctga

SEQ ID NO: 167083 - DNA, 75 bp, synthetic construct
  source 1..75: mol_type = other DNA
gcgtatgtccgcccgtcgtcggtgcagagccaggattacacgtttaaggtgccggactggccggggatgtatgag

SEQ ID NO: 167084 - DNA, 75 bp, synthetic construct
  source 1..75: mol_type = other DNA
gcatggtacaaatatcatatctggggacagtattgagctaatttgtgggcagggagagagcgggacttgttccat

SEQ ID NO: 167085 - DNA, 75 bp, synthetic construct
  source 1..75: mol_type = other DNA
tgctgacggtctggcagggcgacactgcacagcgttacgtcagcggtatcgtgacagaggtgcagctcggtgaga

SEQ ID NO: 167086 - DNA, 75 bp, synthetic construct
  source 1..75: mol_type = other DNA
cagccgctggagtattttgccgccgagtaccagatgggcctttccaacatgatggaagctaatccgggcgtggac

SEQ ID NO: 167087 - DNA, 75 bp, synthetic construct
  source 1..75: mol_type = other DNA
tggccgggaacgcggtttacgctgacggggcatccgcagaagatgctgaaccgtgaatggcaggtggtacagagc

SEQ ID NO: 167088 - DNA, 75 bp, synthetic construct
  source 1..75: mol_type = other DNA
accggacaacaacggtagaccacgaccataccgaaacggtgaagaacaaccagacggtcacagtggttgtggggc

SEQ ID NO: 167089 - DNA, 75 bp, synthetic construct
  source 1..75: mol_type = other DNA
tgtgcgtaaaacgcgtggtgatgatatcgatgctgcctgtggtcagttggcgggcgatgttatcgaccgtacgaa

SEQ ID NO: 167090 - DNA, 75 bp, synthetic construct
  source 1..75: mol_type = other DNA
cgatcaggtgatgaagtggatgtatcactattgctgcgacaactttgatgagatgacagacatcaacaaagtgtt

SEQ ID NO: 167091 - DNA, 75 bp, synthetic construct
  source 1..75: mol_type = other DNA
gttgtgtgcgtctgcgtaacgaagacatcaaattcctgttcgagaaagtaccggtcggtacccgcgtacagttta

SEQ ID NO: 167092 - DNA, 75 bp, synthetic construct
  source 1..75: mol_type = other DNA
tgaagtttcactgggaccgttatcacgggatgacggaggagagttcgtgctgggtgagtgtgtcgcaggcgtggg

SEQ ID NO: 167093 - DNA, 75 bp, synthetic construct
  source 1..75: mol_type = other DNA
ggagaccagccgcaggcgcttcacggcagccaggggagaggaaccacgctgggcaatcagttagaggtgataccg

SEQ ID NO: 167094 - DNA, 75 bp, synthetic construct
  source 1..75: mol_type = other DNA
agtgtgtcagtatgttccgttatgaggcgcatgtccgcccgtcatcggtgcagagccaggattacacgtttaagg

SEQ ID NO: 167095 - DNA, 75 bp, synthetic construct
  source 1..75: mol_type = other DNA
tccgttatgaggcgcatgtccgcccgtcgtcggtgcagagccaggattacacgtttaaggtgccggactggccgg

SEQ ID NO: 167096 - DNA, 75 bp, synthetic construct
  source 1..75: mol_type = other DNA
gccggggttcggtaacctggcgataccgcgcgtgggccaggaagtgatagtggacttcctgaacggggacccgga

SEQ ID NO: 167097 - DNA, 75 bp, synthetic construct
  source 1..75: mol_type = other DNA
gaaggttcaaggatgagcagcacggcaaggatttcacgctgtaccagatggacagcctgcgcagtgatgcggaaa

SEQ ID NO: 167098 - DNA, 75 bp, synthetic construct
  source 1..75: mol_type = other DNA
atgaaggcatggacgatgttattctgctggattttctgcccaaagagttagggaaggtgcgaataagcaggtcat

SEQ ID NO: 167099 - DNA, 75 bp, synthetic construct
  source 1..75: mol_type = other DNA
atccattccggcggcgtggatattaagggcgcgaaaatcaatcttaacggcggaggcagtccgggagacgtgatc

SEQ ID NO: 167100 - DNA, 75 bp, synthetic construct
  source 1..75: mol_type = other DNA
caccggaactcctgtcgaaccagttgatctacctgatatttatgttaatccgatacccgatgaaaaaacagatat

SEQ ID NO: 167101 - DNA, 75 bp, synthetic construct
  source 1..75: mol_type = other DNA
ccttgcaagccggttatggcgtagggcgcggtgaagcgtttagttatatttattcgaaagattgcaaccgcgacg

SEQ ID NO: 167102 - DNA, 75 bp, synthetic construct
  source 1..75: mol_type = other DNA
tctacaccaaagctgggcgctacgtttgtcgattatctggtcacgctgcatcaaaacggcggtaatcagcagggt

SEQ ID NO: 167103 - DNA, 75 bp, synthetic construct
  source 1..75: mol_type = other DNA
gatgtgatcctgctggattttctgcccaaagagttagggaaggtgcgaataagcggggaaattcttctcggctga

SEQ ID NO: 167104 - DNA, 75 bp, synthetic construct
  source 1..75: mol_type = other DNA
catgatgatgcattagcaaaaatgtatggtatcgctgaactcaataatgggcaggcactaaatgctagtttccca

SEQ ID NO: 167105 - DNA, 75 bp, synthetic construct
  source 1..75: mol_type = other DNA
ccttctggcatgatttagcggctccggtcattgctggcattcttgccagtatgatcatgaactggctgaacaagc

SEQ ID NO: 167106 - DNA, 75 bp, synthetic construct
  source 1..75: mol_type = other DNA
ccaacctttcatctgtcttccgtctgtcaaaagcggtaatgcgcgctatgatgaaaaagcgtcatggtcgtatta

SEQ ID NO: 167107 - DNA, 75 bp, synthetic construct
  source 1..75: mol_type = other DNA
gcactgcgaccagtgaaaatggcgctcaggcgatcagtgattatttaggtgctaacggcaaaggtctgatgttga

SEQ ID NO: 167108 - DNA, 75 bp, synthetic construct
  source 1..75: mol_type = other DNA
gcggttgacccgaatgcgctggtgatgaactttactgccgattgctggctggaagtcaccgatgctaccggtaaa

SEQ ID NO: 167109 - DNA, 75 bp, synthetic construct
  source 1..75: mol_type = other DNA
aagggaaacctgtcgatctgagtcgttttataagaactaaccaggttgcgcgtctgaccctcaatgccgaacaat

SEQ ID NO: 167110 - DNA, 75 bp, synthetic construct
  source 1..75: mol_type = other DNA
ccttctggcacgatttagcggctccggtcattgctggcatccttgccagcctgatcgtgagctggttgaataagt

SEQ ID NO: 167111 - DNA, 75 bp, synthetic construct
  source 1..75: mol_type = other DNA
aaagatgccggattcagtcgggagaacgtggagcacataacttacgcgcagtgcgccctgctggacgaaacagtg

SEQ ID NO: 167112 - DNA, 75 bp, synthetic construct
  source 1..75: mol_type = other DNA
ctagatcactatgctagaacaagaaatgcttcattacatcaaataatagagcaggggatttcatctattgcgcag

SEQ ID NO: 167113 - DNA, 75 bp, synthetic construct
  source 1..75: mol_type = other DNA
gaaccagtaagcaaccgcgccggatggtggcgaccggggagcaacggcgaccgggtttactggtttttaccggaa

SEQ ID NO: 167114 - DNA, 75 bp, synthetic construct
  source 1..75: mol_type = other DNA
ttccaacgacggcacccgtgaatatctggaaaacctcaatggtatctataacctacgctttgttagcgaaccgga

SEQ ID NO: 167115 - DNA, 75 bp, synthetic construct
  source 1..75: mol_type = other DNA
gctgtacggtagtcgtcttacacttcgacgcctatggtgaacaaatggcggcggcagcatcgcttcccaaaattg

SEQ ID NO: 167116 - DNA, 75 bp, synthetic construct
  source 1..75: mol_type = other DNA
gcccgcgcctgcacaggcggtgctgacctgctttcaccgtgtcctgctgctgggatttcgcgggcgttatcagga

SEQ ID NO: 167117 - DNA, 75 bp, synthetic construct
  source 1..75: mol_type = other DNA
gacccgaatgcgctggtgatgaactttactgccgattgctggctggaagtcactgatgctaccggtaaaaaactg

SEQ ID NO: 167118 - DNA, 75 bp, synthetic construct
  source 1..75: mol_type = other DNA
cgttccagattgcgaaaccgtctgacctaatcccggaactgcaaggtcgtctgccaatccgcgttgaactgcagg

SEQ ID NO: 167119 - DNA, 75 bp, synthetic construct
  source 1..75: mol_type = other DNA
tccgcaaaaaactgcgtgaaggccagcttgatgacaaagaaatcgagatcgatcttgccgcagcaccgatgggcg

SEQ ID NO: 167120 - DNA, 75 bp, synthetic construct
  source 1..75: mol_type = other DNA
taataacggcggtaaacttaagatcaaaatggtagacgatgttcctgtatcttttgtgtattccgacaagtatga

SEQ ID NO: 167121 - DNA, 75 bp, synthetic construct
  source 1..75: mol_type = other DNA
atgatgtaagaacactggactatcatcatatttatgttgacaaccgtaccggaaaggaaatcgaatggaaatatt

SEQ ID NO: 167122 - DNA, 75 bp, synthetic construct
  source 1..75: mol_type = other DNA
gattttgatttcattaataaagtatggactgtaccaccagaacgacataagacaggggagataacaggcgaaccg

SEQ ID NO: 167123 - DNA, 75 bp, synthetic construct
  source 1..75: mol_type = other DNA
cgccgctggcgcagaagtttattcagtcgaccctgcatctggatatcccggaagattaccaggaacgtctgcaag

SEQ ID NO: 167124 - DNA, 75 bp, synthetic construct
  source 1..75: mol_type = other DNA
cctgctctcttcgcgtactgtttttggtaacgtggcactgccgctagagctggacaacacgccaaaagaggagat

SEQ ID NO: 167125 - DNA, 75 bp, synthetic construct
  source 1..75: mol_type = other DNA
cggtgggcagaaacaacgtgtggcgattgcccgtgcattagccagcaatcccaaagtattgctgtgtgatgaagc

SEQ ID NO: 167126 - DNA, 75 bp, synthetic construct
  source 1..75: mol_type = other DNA
ccaaattcaccgaagtgggctacgtcggtaaggaagtggattctattattcgcgatctgaccgatgccgccgtga

SEQ ID NO: 167127 - DNA, 75 bp, synthetic construct
  source 1..75: mol_type = other DNA
tattctgaccgaaccgaatgcttccattactgtgcagtacaaagcactgatggcgaccgaaggcgtgaatattga

SEQ ID NO: 167128 - DNA, 75 bp, synthetic construct
  source 1..75: mol_type = other DNA
ccttctggcacgatttagcggctccggtcattgctggcattcttgccagcatgatcgtgaactggctgaacaagc

SEQ ID NO: 167129 - DNA, 75 bp, synthetic construct
  source 1..75: mol_type = other DNA
cgggcttgcccagcaaattgctgtgccggagctgcgccaacaggtgaccgatattactggtacgttaagcacgtc

SEQ ID NO: 167130 - DNA, 75 bp, synthetic construct
  source 1..75: mol_type = other DNA
atgcgcttaatcttttttctacttactttatggtgccttcctgggcttgcccagcaaattgctgtgccggagctg

SEQ ID NO: 167131 - DNA, 75 bp, synthetic construct
  source 1..75: mol_type = other DNA
catatcaccattattggtagcaaaggcctatcagcaatatcagatttaccttaattttaatacaatcagccattc

SEQ ID NO: 167132 - DNA, 75 bp, synthetic construct
  source 1..75: mol_type = other DNA
atggatgcaaaacaaacgcggcagggcgtattactcgctcttgccgcttattttatttggagtatagcgccagcg

SEQ ID NO: 167133 - DNA, 75 bp, synthetic construct
  source 1..75: mol_type = other DNA
cgataagatggtgactttcgcctttatttgggtggcgctggcaatttttgtgatggatgcgatttatacgcagcg

SEQ ID NO: 167134 - DNA, 75 bp, synthetic construct
  source 1..75: mol_type = other DNA
cgatttacctgtttgctattgccgacagctcaaccagccatatggggcaaaacccgatgtcgctgaatttactgc

SEQ ID NO: 167135 - DNA, 75 bp, synthetic construct
  source 1..75: mol_type = other DNA
tgatagattttggaataaaaaaaataattgtagttatccacctgatttacatggatattgtcgaccatcaattcc

SEQ ID NO: 167136 - DNA, 75 bp, synthetic construct
  source 1..75: mol_type = other DNA
aactcaatggcctggtgtctgaattttctatgggtggggtatctaccaccaataatatggaattgtgtgctgacg

SEQ ID NO: 167137 - DNA, 75 bp, synthetic construct
  source 1..75: mol_type = other DNA
tgaaaccgtctcaggttccccgtcaggagggcgcatgggcaccggagcactccgtgacggagttcagtcacagcc

SEQ ID NO: 167138 - DNA, 75 bp, synthetic construct
  source 1..75: mol_type = other DNA
ctgcaggatattacacataaaacacgggcgcaggtcgctgtattagtagtgccgtccatcggagacgattccatt

SEQ ID NO: 167139 - DNA, 75 bp, synthetic construct
  source 1..75: mol_type = other DNA
atgcgctatttcatactaatattcacactcgtgtgttcctttgttgcagcccaaccaactattgtcccacaatta

SEQ ID NO: 167140 - DNA, 75 bp, synthetic construct
  source 1..75: mol_type = other DNA
cgtctttttttgacgatctgcactatctcacacaattgcatcacctgtcaggtgatctcgacatggttcttgctt

SEQ ID NO: 167141 - DNA, 75 bp, synthetic construct
  source 1..75: mol_type = other DNA
atcccaaacctgactctttaatcagcgaacatccgaccgctcaggaagcgatggatgctaaaaaacgctatgagg

SEQ ID NO: 167142 - DNA, 75 bp, synthetic construct
  source 1..75: mol_type = other DNA
aaggcacccgccgatcttgcttcaacattcttgcgcgggtatatccgctcttatgcgcgtctggtccatattccg

SEQ ID NO: 167143 - DNA, 75 bp, synthetic construct
  source 1..75: mol_type = other DNA
ggctactactacaccagcggcgccagttgcaacaacaacgccagatggcgctgcgccgttgccaattgatcaggc

SEQ ID NO: 167144 - DNA, 75 bp, synthetic construct
  source 1..75: mol_type = other DNA
ggcaacggaacaggccgtcagcgtggcaaggtgtccggcatggcccgcccggtcaacacatggcgcaccatgatt

SEQ ID NO: 167145 - DNA, 75 bp, synthetic construct
  source 1..75: mol_type = other DNA
tggcgcagcataagtttgttgcgggcgatgagtacaccattgcggatatggcgatttggccgtggtttggcaacg

SEQ ID NO: 167146 - DNA, 75 bp, synthetic construct
  source 1..75: mol_type = other DNA
atcaaccgctttaccatggaagccaaacgtctgctcgacgtgctggataagcaactggcgcagcataagtttatt

SEQ ID NO: 167147 - DNA, 75 bp, synthetic construct
  source 1..75: mol_type = other DNA
gaactctggcagctgccggggggaaatcagtgtgccactaatcaggtgctttaccatctcggttcacgagggatt

SEQ ID NO: 167148 - DNA, 75 bp, synthetic construct
  source 1..75: mol_type = other DNA
ggctgacctggaaaacgccatcacccgcggagcgcaggggctcatcgtctccccgaacgacgtgaacgcggtctc

SEQ ID NO: 167149 - DNA, 75 bp, synthetic construct
  source 1..75: mol_type = other DNA
cgacacgcctgcgtctctcaacgttaggctttttccagtacattggcccgacgctgatgttcctgctggctgtga

SEQ ID NO: 167150 - DNA, 75 bp, synthetic construct
  source 1..75: mol_type = other DNA
gacgacgccagcccccgctgtagcgccacagcaagacgcggttgttcctccttcacaggcaaatgttgatatcgc

SEQ ID NO: 167151 - DNA, 75 bp, synthetic construct
  source 1..75: mol_type = other DNA
tgctcacaatatcagcgcggcacaagtattgttggcgtgggtgatcagtcatcagggggtgatggcgattccaaa

SEQ ID NO: 167152 - DNA, 75 bp, synthetic construct
  source 1..75: mol_type = other DNA
cgtctcaatactgattatctcgatctctacttattacactggtctggcagtttcgcttttgaagagactgttgca

SEQ ID NO: 167153 - DNA, 75 bp, synthetic construct
  source 1..75: mol_type = other DNA
tggtgactgctgcaggggcttatcagacgaccaaaggtttcaatgttcagccacactcaagttatagcggagatg

SEQ ID NO: 167154 - DNA, 75 bp, synthetic construct
  source 1..75: mol_type = other DNA
ggatactggattgcgttttaattcgggagtctactcttcgcaactggtggtaaattatcagcgcattaaggacta

SEQ ID NO: 167155 - DNA, 75 bp, synthetic construct
  source 1..75: mol_type = other DNA
cccgtgtaacacttcttggtgattatacctatactagggggtttgatgctgttgcctatggcagtacagggatgc

SEQ ID NO: 167156 - DNA, 75 bp, synthetic construct
  source 1..75: mol_type = other DNA
aggggaaaacaccagataacgtcaatgtctgacattgtcagggacctttcgcgtctgggctggacagatgagcgt

SEQ ID NO: 167157 - DNA, 75 bp, synthetic construct
  source 1..75: mol_type = other DNA
tgaaaccgtttaacgagcaactggcaaataactatccgtttaatccgcgttctgcacaggatgcctcactggatg

SEQ ID NO: 167158 - DNA, 75 bp, synthetic construct
  source 1..75: mol_type = other DNA
caaacggggagacagcgaatccgccgcccgtctggcagcacctgtgggcgtcatcagtgatgagcagatcggccg

SEQ ID NO: 167159 - DNA, 75 bp, synthetic construct
  source 1..75: mol_type = other DNA
ttatcgctgcgctggtgcacgatcctcgactccgtgccgctttagctgactctcatcatagaccggtcatctatg

SEQ ID NO: 167160 - DNA, 75 bp, synthetic construct
  source 1..75: mol_type = other DNA
gattttggcgttgattatgactggcttcatctcgtaccgaatggcaccagttatgagaagcatattaagcgcaca

SEQ ID NO: 167161 - DNA, 75 bp, synthetic construct
  source 1..75: mol_type = other DNA
attctgcgctggtcaccatgcacagtctggcctgtgaactgttgccggagtggcgtgagttttttgatgctctgc

SEQ ID NO: 167162 - DNA, 75 bp, synthetic construct
  source 1..75: mol_type = other DNA
cggcgtgttctgtcacagccttttctgcttgggcacaggataccagcccggatactctcgttgttactgctaacc

SEQ ID NO: 167163 - DNA, 75 bp, synthetic construct
  source 1..75: mol_type = other DNA
tgcgtaagatgctacatgaactgagtccttttgcgcaggaacccgtggattgcgttctctgggtcagagctgagc

SEQ ID NO: 167164 - DNA, 75 bp, synthetic construct
  source 1..75: mol_type = other DNA
taagcaacacaatattccggtttattacactgcccagccaaaagagcagagcgatgaagatcgggcgctgctgaa

SEQ ID NO: 167165 - DNA, 75 bp, synthetic construct
  source 1..75: mol_type = other DNA
atggcgatatcgattttgtcatgctggcgaaaaatccgaccatcgatgcctggtggaagctactctcccgcgagg

SEQ ID NO: 167166 - DNA, 75 bp, synthetic construct
  source 1..75: mol_type = other DNA
cttcaatgtctgaaattgtcagggacctatcacgcctgggctggacagatgagcgaattggaacagaggctgggc

SEQ ID NO: 167167 - DNA, 75 bp, synthetic construct
  source 1..75: mol_type = other DNA
cgagccagggggaaacaccagataacgtcaatgtctgaaattgtcagggacctttcccggctgggctggaccgat

SEQ ID NO: 167168 - DNA, 75 bp, synthetic construct
  source 1..75: mol_type = other DNA
cgagccagggggaaacaccagataacgtcaatgtctgaaattgtcagggacctttcccgcctgggctggacggat

SEQ ID NO: 167169 - DNA, 75 bp, synthetic construct
  source 1..75: mol_type = other DNA
gaaagggacaggcctcacgtattgctgcgaccattcgacataaccgggccagggggaaacaccagataacctcaa

SEQ ID NO: 167170 - DNA, 75 bp, synthetic construct
  source 1..75: mol_type = other DNA
ggtgtcagaggagaagaatcatttcctcgtggtggatggttttcatcgtcagttgctgggcagggaagcggatac

SEQ ID NO: 167171 - DNA, 75 bp, synthetic construct
  source 1..75: mol_type = other DNA
taattggcaacatgattcgtcagtacttcagccaggaacgaccagaggaagagaccatacaggcccttaatcacc

SEQ ID NO: 167172 - DNA, 75 bp, synthetic construct
  source 1..75: mol_type = other DNA
gcgatgaagatcgggcattactgaatgatatgtgggggcctggcctgacccgttcgccagaacagcaaaaagtag

SEQ ID NO: 167173 - DNA, 75 bp, synthetic construct
  source 1..75: mol_type = other DNA
atggctattccaaaattacaggcttacgcactgccggagtctcacgatattccgaagaataaagttgactgggcc

SEQ ID NO: 167174 - DNA, 75 bp, synthetic construct
  source 1..75: mol_type = other DNA
attggtacagagctggggatggaccaggatgaagtgctgagactgaaacagattagcgggctggcggaactgttt

SEQ ID NO: 167175 - DNA, 75 bp, synthetic construct
  source 1..75: mol_type = other DNA
gctctggtttgaacttaaaaaagggcaaggactcgcagaagatacactacgcgatatatggcgttcgctggagcg

SEQ ID NO: 167176 - DNA, 75 bp, synthetic construct
  source 1..75: mol_type = other DNA
cgaagtaactacctggaaaaacgtgtagtacttatgcgctggtggggtgaatttgtggaagccgcagcaaccgga

SEQ ID NO: 167177 - DNA, 75 bp, synthetic construct
  source 1..75: mol_type = other DNA
cacctatccccgccagcaaagcggcgctgcgtgaggtgatcctgccgttgctggacgagtccgatgaacccttcg

SEQ ID NO: 167178 - DNA, 75 bp, synthetic construct
  source 1..75: mol_type = other DNA
tactgataatcttcagtgcctgccttgtacacaagtctggtcaagagcaatgtacttccgtttatttgcttttca

SEQ ID NO: 167179 - DNA, 75 bp, synthetic construct
  source 1..75: mol_type = other DNA
gacaagagtgattatttagaagaacagcgtaaagcctaccaggcatggtgggagagagttgaatcgattgttact

SEQ ID NO: 167180 - DNA, 75 bp, synthetic construct
  source 1..75: mol_type = other DNA
gacaagagcaattatctagaagaacagcgtaaagcctaccaagcgtggtgggagagggttgaggcgatagttact

SEQ ID NO: 167181 - DNA, 75 bp, synthetic construct
  source 1..75: mol_type = other DNA
gggtgaaagtgatagtggtggtgatgtgttttcgcaggataacactgacgcgtttctgaccaaagcagagcaaaa

SEQ ID NO: 167182 - DNA, 75 bp, synthetic construct
  source 1..75: mol_type = other DNA
aacgtggctaaacagtctgatttaaagatccctacgttgctacctgatgggcagaacgaggaagcggagagccag

SEQ ID NO: 167183 - DNA, 75 bp, synthetic construct
  source 1..75: mol_type = other DNA
tcaaatccaaaacttgatgaatgtattatctaaagaagagaccgcgtcagggagcgtttcagagacttctgcgaa

SEQ ID NO: 167184 - DNA, 75 bp, synthetic construct
  source 1..75: mol_type = other DNA
atcgactttgtcatgctagcgaaaaacccgaccatcgatgcctggtggaagctactctcccgcgaggtgaaataa

SEQ ID NO: 167185 - DNA, 75 bp, synthetic construct
  source 1..75: mol_type = other DNA
acgcactgccggagtctcacgatattccgcagaataaagtcgactgggcctttgaaccgcaacgtgccgcgttgt

SEQ ID NO: 167186 - DNA, 75 bp, synthetic construct
  source 1..75: mol_type = other DNA
aagatgcgacgtgatcacgttatcccgctttgcggtcaggctatggcagtgctggaggccatgaaaccaatcagc

SEQ ID NO: 167187 - DNA, 75 bp, synthetic construct
  source 1..75: mol_type = other DNA
taccgtggatttggtattaccttgccgtcaatgaaaatcctggtcaactgcatggattacaccctgctggctgaa

SEQ ID NO: 167188 - DNA, 75 bp, synthetic construct
  source 1..75: mol_type = other DNA
ggcctgcgaattatttcccgaatggcgcgaccgttttgatgccgtactgcaaaaccagccgaagggggataaata

SEQ ID NO: 167189 - DNA, 75 bp, synthetic construct
  source 1..75: mol_type = other DNA
taagaatcacgctttatagaattaatactgataagcttcagtgcttgccttgtacacaggtctggtcaagagcaa

SEQ ID NO: 167190 - DNA, 75 bp, synthetic construct
  source 1..75: mol_type = other DNA
cctggcctgtgagttgttgccggagtggagtgagttttttgatgtactgctggaaaacggaggtgaaagcctgtg

SEQ ID NO: 167191 - DNA, 75 bp, synthetic construct
  source 1..75: mol_type = other DNA
atgaaaattttaccggttatatccactaaaggtggcgaaggaaaatcaacccagtctgctaatcttgccggtttt

SEQ ID NO: 167192 - DNA, 75 bp, synthetic construct
  source 1..75: mol_type = other DNA
acttctgccgacagcgatgctgcatgcggcagacggtcgtatccgcttaaggaatattcttcagcatcctgcctt

SEQ ID NO: 167193 - DNA, 75 bp, synthetic construct
  source 1..75: mol_type = other DNA
tgatggtcaggccacactgggtaacaccgtaatgaaaggcaacgtaaaaaaagttcgccgcctgtataacgataa

SEQ ID NO: 167194 - DNA, 75 bp, synthetic construct
  source 1..75: mol_type = other DNA
ctggtcgctattcaccttcctgcaaggctttgttgatatgttcccgctggcctgggcagggatctccatgttctt

SEQ ID NO: 167195 - DNA, 75 bp, synthetic construct
  source 1..75: mol_type = other DNA
gacgaaagaacgtggtactgcctccgccatctttaactcggcgcaatatttctcgttggcgctcttttcgccgct

SEQ ID NO: 167196 - DNA, 75 bp, synthetic construct
  source 1..75: mol_type = other DNA
gcaatttatccatcggtaaaatactataaaatagctttagaaaattcaccatggaaagatgactctccacgagat

SEQ ID NO: 167197 - DNA, 75 bp, synthetic construct
  source 1..75: mol_type = other DNA
attgcatctggatttaaacggagcggtggctgctgttgttaaagatgttgagccaatgcaggaaaaggcagtatc

SEQ ID NO: 167198 - DNA, 75 bp, synthetic construct
  source 1..75: mol_type = other DNA
cagcttgcccgcgaggtgggaatgagtcgccaaggactggacaaggctctttcaggcgatggcgaccatagcttc

SEQ ID NO: 167199 - DNA, 75 bp, synthetic construct
  source 1..75: mol_type = other DNA
aatgctgcagaaaagatactatcaacattagttccgaagtttgagcaagaaataatatcaaaaatacctgaaata

SEQ ID NO: 167200 - DNA, 75 bp, synthetic construct
  source 1..75: mol_type = other DNA
cgaaggaagcagtccagtcatgtaaatcagttaagtcgtggatgcaggctctggaatcggggcacaattctctgt

SEQ ID NO: 167201 - DNA, 75 bp, synthetic construct
  source 1..75: mol_type = other DNA
cgcaggaagcaaggcagttttatcgaaaaagtggatatggagataaagaaatttacgcaagggtttccatggacc

SEQ ID NO: 167202 - DNA, 75 bp, synthetic construct
  source 1..75: mol_type = other DNA
cactggatgccttcgaacgcttctttaaaccggatggcatactggataccttctaccagcagaacctgaagctgt

SEQ ID NO: 167203 - DNA, 75 bp, synthetic construct
  source 1..75: mol_type = other DNA
gaggattttttcatgtattgggaggaggttgatttatcgttaaaaataaaaaaaatgaatgggaagtgttgcttt

SEQ ID NO: 167204 - DNA, 75 bp, synthetic construct
  source 1..75: mol_type = other DNA
aacgtggccacgctgtcccgcgcgtccgtcaacctcaagaagttccagtccgaagtccgggccagagcgcagcag

SEQ ID NO: 167205 - DNA, 75 bp, synthetic construct
  source 1..75: mol_type = other DNA
gtgcattacagatggttaaggttaatgctgcatcactagaatcatttgccccggattacagccttttcagtctgc

SEQ ID NO: 167206 - DNA, 75 bp, synthetic construct
  source 1..75: mol_type = other DNA
ccgcccggaatgcttaacaagtgaaggtaatttacagcgttttcatgcccacaatggctttggtcaacacgccgg

SEQ ID NO: 167207 - DNA, 75 bp, synthetic construct
  source 1..75: mol_type = other DNA
gattgagatgatggcggggatcttatctggtggcgacacgatcgccgaagatcaccaggcggatggatcggcaca

SEQ ID NO: 167208 - DNA, 75 bp, synthetic construct
  source 1..75: mol_type = other DNA
ctgaattcaggatgcgattctcttttggtcgtttttggtacgaaaggtggaagaccaagaaataccacaattatt

SEQ ID NO: 167209 - DNA, 75 bp, synthetic construct
  source 1..75: mol_type = other DNA
aagttgaagtctttcgcaagtcattcatctcacttgcccgtgattgtggtggcagctacgcaacaaccgctgaca

SEQ ID NO: 167210 - DNA, 75 bp, synthetic construct
  source 1..75: mol_type = other DNA
atgaaagcacttcgtcctctgacggcatcgcttatgctgttaaccagttgttttttagtttccaataccacactg

SEQ ID NO: 167211 - DNA, 75 bp, synthetic construct
  source 1..75: mol_type = other DNA
aaaaactgaaagcacgtacaagcaagatccaggggcaggttgctgcgctgaaaaaaatgcttgatgaacctcacg

SEQ ID NO: 167212 - DNA, 75 bp, synthetic construct
  source 1..75: mol_type = other DNA
atcaaacaaacctgaccttcgctattggctgggctgatggaacggatgaaccaacggtagcgacttcaggtgatc

SEQ ID NO: 167213 - DNA, 75 bp, synthetic construct
  source 1..75: mol_type = other DNA
ttccagggttatgtatcagatttcccgtttgattttcaggccaatacggtagttcagacttccgcgactattcag

SEQ ID NO: 167214 - DNA, 75 bp, synthetic construct
  source 1..75: mol_type = other DNA
ctggtggaggagatgaccggattacgcttccgtaacaaacgcgccagcgctttcggctctcacggctggagcggc

SEQ ID NO: 167215 - DNA, 75 bp, synthetic construct
  source 1..75: mol_type = other DNA
aatgtcttccgctcaaaaggcgtgctggtcggcacttcgacgatgaataacgtgatgatgccgaaaatcgccggg

SEQ ID NO: 167216 - DNA, 75 bp, synthetic construct
  source 1..75: mol_type = other DNA
cgaccggaccaggacgcactggaattatgtcgtgaacacggtcgtgaaatcgcccgtcagtgggcgctcacgccg

SEQ ID NO: 167217 - DNA, 75 bp, synthetic construct
  source 1..75: mol_type = other DNA
ggcggtgaacaatcaccatatgctggaagcgagccttggttactttattaacccgctggtgaacattgtgctggg

SEQ ID NO: 167218 - DNA, 75 bp, synthetic construct
  source 1..75: mol_type = other DNA
cgctatggccagaagattgagcgccgctatggcgctatccgtgcagccactgaagcggcccggatgctgaccgaa

SEQ ID NO: 167219 - DNA, 75 bp, synthetic construct
  source 1..75: mol_type = other DNA
cgaaatccggctccgggcgcattgacgcagaaacgttgcgccgggtgcgcgaggaaatctacgggatcgtcaaat

SEQ ID NO: 167220 - DNA, 75 bp, synthetic construct
  source 1..75: mol_type = other DNA
ggtttctggtatttctccgttactggtcattgatggtcaacaacggctgacgaccgcaatgttgctgattgaggc

SEQ ID NO: 167221 - DNA, 75 bp, synthetic construct
  source 1..75: mol_type = other DNA
ttctggcgatatgtggcgtgttggttcagttgtggacttttggttcactgccgatcatcgcgctggggctggcgt

SEQ ID NO: 167222 - DNA, 75 bp, synthetic construct
  source 1..75: mol_type = other DNA
tcaaccagccatatggggcaaaacccgatgtcgctgaatttactgctgatcgccgccggtattgtcactaccgta

SEQ ID NO: 167223 - DNA, 75 bp, synthetic construct
  source 1..75: mol_type = other DNA
tttcttttttcaatgcccttgcccctgaacggacgcagggagtgattgaacatatttttgtctacgataacaaat

SEQ ID NO: 167224 - DNA, 75 bp, synthetic construct
  source 1..75: mol_type = other DNA
gcatattatttcgccgacgtttgtcgacgagtgtttaaatttccgtgacagttttacccgccgcgatttaaacct

SEQ ID NO: 167225 - DNA, 75 bp, synthetic construct
  source 1..75: mol_type = other DNA
ctggatgattttggtacgggctactcagggctttcttatctccatgatctgcacatcgattatattaagattgat

SEQ ID NO: 167226 - DNA, 75 bp, synthetic construct
  source 1..75: mol_type = other DNA
gacatctgttggaagttcggttccgggccagtcattatcagcaacgatcaacgactggtcgatacagggattacg

SEQ ID NO: 167227 - DNA, 75 bp, synthetic construct
  source 1..75: mol_type = other DNA
ctattccgctaaaagcgggtgaacgtctggccggtctcaatcatgtagctgaattgcgcgcgagatattggggcg

SEQ ID NO: 167228 - DNA, 75 bp, synthetic construct
  source 1..75: mol_type = other DNA
ggacgacaatgacaatatggatgacgtatctcttgctgaagatttcgggttcaatcatgcaatagaactgatgag

SEQ ID NO: 167229 - DNA, 75 bp, synthetic construct
  source 1..75: mol_type = other DNA
ttgaacgatattaatggcgggaatttccctctttctttgctacccgttcctcgtattacaggaattcgtgttggc

SEQ ID NO: 167230 - DNA, 75 bp, synthetic construct
  source 1..75: mol_type = other DNA
gcacaggtgcatataaccccagatacgttaacctttttaaaaccggatgatgttatcaagcaaagttacttttca

SEQ ID NO: 167231 - DNA, 75 bp, synthetic construct
  source 1..75: mol_type = other DNA
tgaacgggaaagaaaccagcaatacgtcaaacgccgcgacaaggagaacgaggatattgcactaacggtagggag

SEQ ID NO: 167232 - DNA, 75 bp, synthetic construct
  source 1..75: mol_type = other DNA
tgatctggatgaacaatatcagctaggtacagaggccgcgctgaaaccccatctgcggacgatcatcattctcaa

SEQ ID NO: 167233 - DNA, 75 bp, synthetic construct
  source 1..75: mol_type = other DNA
atggggagatcgtccctttttaccaacctgtggtaaatggtcgggaagggacattgcggggagttgaggtgttag

SEQ ID NO: 167234 - DNA, 75 bp, synthetic construct
  source 1..75: mol_type = other DNA
ctctggtattccgcaaaagcagagtacctggcgggagcgagatatgccgccaacaatatcaatcatatacttgaa

SEQ ID NO: 167235 - DNA, 75 bp, synthetic construct
  source 1..75: mol_type = other DNA
agatcaaagtctctgttggcgataaaacccagaccggcgcactgattatgattttcgattccgccgacggtgcag

SEQ ID NO: 167236 - DNA, 75 bp, synthetic construct
  source 1..75: mol_type = other DNA
ccagccaagtcctggcgcagttgaaatgatcaaagtcatgggcggtaacccgacgccactggattacggcgagtt

SEQ ID NO: 167237 - DNA, 75 bp, synthetic construct
  source 1..75: mol_type = other DNA
caaaagaagaccttcttgcctctggtcgcggtgaactgtttggcgcaaaaggcccacaattgccagcaccgaaca

SEQ ID NO: 167238 - DNA, 75 bp, synthetic construct
  source 1..75: mol_type = other DNA
taatcatctttttgcgttgattatcgatcctgatcaattcaccgactggcaggggagaaagggcagttctttgcg

SEQ ID NO: 167239 - DNA, 75 bp, synthetic construct
  source 1..75: mol_type = other DNA
tgggtagttgaacattacgcccgcaaaggtatcgatttggggttacatcctcaggaatcagcattagctggatga

SEQ ID NO: 167240 - DNA, 75 bp, synthetic construct
  source 1..75: mol_type = other DNA
taatcatgagaatgttagttggtcgccaattgctgcggggtttaaaggcctcatcccctcaaaagtaaaatttcg

SEQ ID NO: 167241 - DNA, 75 bp, synthetic construct
  source 1..75: mol_type = other DNA
atagaattgcgccgtctgcggcaactggaggatgaaaatcagcggctccgtcgtctggtggcagacctcagtctg

SEQ ID NO: 167242 - DNA, 75 bp, synthetic construct
  source 1..75: mol_type = other DNA
cccattcggcataaattagagtttatatcgaccaatattgcagagttgctggacaagttaaccaaaattacagat

SEQ ID NO: 167243 - DNA, 75 bp, synthetic construct
  source 1..75: mol_type = other DNA
tgaacgttatgttctgggtgattttcatcctgatttttgtcggactggcgttgcaggattccggagcccggatga

SEQ ID NO: 167244 - DNA, 75 bp, synthetic construct
  source 1..75: mol_type = other DNA
gaatggacggggtgggggaggttttcaggacaaacccctctcagcgaggaaccacccgccccctcaaatttttac

SEQ ID NO: 167245 - DNA, 75 bp, synthetic construct
  source 1..75: mol_type = other DNA
ttcaaagaatatctatcttgagaaacaggcttttcacgatctgataatatatctaagagaaaaaagtgaaatata

SEQ ID NO: 167246 - DNA, 75 bp, synthetic construct
  source 1..75: mol_type = other DNA
atgaaaaagacccgctataccgaagaacagatcgcttttgcgctgaaacaggcagaaaccggtactcgggtggag

SEQ ID NO: 167247 - DNA, 75 bp, synthetic construct
  source 1..75: mol_type = other DNA
atggaaaacagcgaagcttttatagaagaagtcgtaccgcacgagctggcgcatttactggtgtggaaacacttt

SEQ ID NO: 167248 - DNA, 75 bp, synthetic construct
  source 1..75: mol_type = other DNA
ttggaaaacagtgaagcctttattgaagaagtggtgccgcacgaactggcacatttgctggtatggaaacatttc

SEQ ID NO: 167249 - DNA, 75 bp, synthetic construct
  source 1..75: mol_type = other DNA
tggcggtagtcctgtcccttactttttgcagtcagtcgatggccgcatttgtgctgaatggcacccgttttattt

SEQ ID NO: 167250 - DNA, 75 bp, synthetic construct
  source 1..75: mol_type = other DNA
agtgacgtgaatctcggtaaaaaagtgagcggaaaaatcagcgtggatgctgtaaatgactggggtggagttcag

SEQ ID NO: 167251 - DNA, 75 bp, synthetic construct
  source 1..75: mol_type = other DNA
tggtatggaaacatttcggccgcgtagcgccacatggcaaagagtggaagtggatgatggaaaacgtgctgggcg

SEQ ID NO: 167252 - DNA, 75 bp, synthetic construct
  source 1..75: mol_type = other DNA
cccaggccaacctgaagctggggcgtaattacccggagccaaaaatttcgtacacccagcgtggtacatccgccg

SEQ ID NO: 167253 - DNA, 75 bp, synthetic construct
  source 1..75: mol_type = other DNA
gcaattgcgatgaattccagagtgaagctgatttatcgtccatccgctcttaagaacgggagggaaaatgctgag

SEQ ID NO: 167254 - DNA, 75 bp, synthetic construct
  source 1..75: mol_type = other DNA
ggacagtaacctgccaaaggaccgtgaatccctgttctggctgaacgtccaggaagtaccaccgaagccaaaagt

SEQ ID NO: 167255 - DNA, 75 bp, synthetic construct
  source 1..75: mol_type = other DNA
aacgtgaagcatgacggtaaggacgtaacgctcagtgacaaggtgatgaaggaagttgcacagcttaagccgttc

SEQ ID NO: 167256 - DNA, 75 bp, synthetic construct
  source 1..75: mol_type = other DNA
agctgatttatcgtccatccggtcttaagaacgggagggaaaatgctgagaagaaactgaccatggagcaaaggg

SEQ ID NO: 167257 - DNA, 75 bp, synthetic construct
  source 1..75: mol_type = other DNA
tctaccgtccgaaagcactgatggcgggccgtaagggggcagagaagaagattgaggttattcgtcgtaatggta

SEQ ID NO: 167258 - DNA, 75 bp, synthetic construct
  source 1..75: mol_type = other DNA
gatggcaaacagccgttggcgatggcgcgtaaatcgctgacggaaatggcagatttacttaacctgcaaagcgca

SEQ ID NO: 167259 - DNA, 75 bp, synthetic construct
  source 1..75: mol_type = other DNA
gaatgcagcgacggtcgatctacgtatcatggaaaccactgatctgcatagcaacatgatggatttcgattatta

SEQ ID NO: 167260 - DNA, 75 bp, synthetic construct
  source 1..75: mol_type = other DNA
gttggctgctgggcggtatagtggctgtacttagcggctgcaatatcgcctggaaatttggtcagcgtgcggagg

SEQ ID NO: 167261 - DNA, 75 bp, synthetic construct
  source 1..75: mol_type = other DNA
actcaacatggttaagttacctgtctcctgaacagtttgcgtatacggttccttcttatagtgatgacagagggg

SEQ ID NO: 167262 - DNA, 75 bp, synthetic construct
  source 1..75: mol_type = other DNA
gtagtggtgggtccgctcgtcgtgcatccgtatcaccccttccgggatgcggtccgtcttctccgccagcctgcc

SEQ ID NO: 167263 - DNA, 75 bp, synthetic construct
  source 1..75: mol_type = other DNA
atgcggtggtggctaatgtcacgcagcataacggtgagtggaagacactgagcagtgacaaagtggggaaaacgg

SEQ ID NO: 167264 - DNA, 75 bp, synthetic construct
  source 1..75: mol_type = other DNA
acgccgttttcccgggtaaagattttgctgatatcgaaggggctgatatcaccaaaggcacgctgaatggtgttc

SEQ ID NO: 167265 - DNA, 75 bp, synthetic construct
  source 1..75: mol_type = other DNA
ggacagtctgcaggatgggatcagggaaacactcaatgagctgaagcaggagcagaaacatgagtcagcgcataa

SEQ ID NO: 167266 - DNA, 75 bp, synthetic construct
  source 1..75: mol_type = other DNA
tatcagataacccgcatcttcggccaggagccgcaggttatttttgacggtcaggcccggcatggggtggcgctt

SEQ ID NO: 167267 - DNA, 75 bp, synthetic construct
  source 1..75: mol_type = other DNA
gtaacttattattatgaagatattgaatttcagcttaaagtaatgtcattgatgaatttcgtttttgtaattgat

SEQ ID NO: 167268 - DNA, 75 bp, synthetic construct
  source 1..75: mol_type = other DNA
gcgcggatgtataagtcgggatatgcctttaaacgtattaaaggcttggtgtcggaattttcgatgggcggcgtg

SEQ ID NO: 167269 - DNA, 75 bp, synthetic construct
  source 1..75: mol_type = other DNA
acagaagcgctgagccgattgcatgaactgtgggtggaagagtatcaggaaattgaagccgtgctgaccggcatc

SEQ ID NO: 167270 - DNA, 75 bp, synthetic construct
  source 1..75: mol_type = other DNA
aaaagccatgctggccgttctgaaagaagcctgtactggcagccggttgagggaaagtacctaccagaccgtggt

SEQ ID NO: 167271 - DNA, 75 bp, synthetic construct
  source 1..75: mol_type = other DNA
tcaacaagcacaatgggggcaacaggaggccaggataactcagcatccggtgatgcaacgtcctctcagagcaca

SEQ ID NO: 167272 - DNA, 75 bp, synthetic construct
  source 1..75: mol_type = other DNA
tgaaaatggacgtctaccgttaagcagcctgggcagcacaacaatgactacctccactcagccattaacgctgaa

SEQ ID NO: 167273 - DNA, 75 bp, synthetic construct
  source 1..75: mol_type = other DNA
aggctcttacctggctcgataatcaatggataaaccctgttccggtcgctcaggtatcaagagagaaaaaacaaa

SEQ ID NO: 167274 - DNA, 75 bp, synthetic construct
  source 1..75: mol_type = other DNA
tatctgaacggtcagatccacaggagttcgtatctggtatccagattgatgggagatatctggaggcgggttacc

SEQ ID NO: 167275 - DNA, 75 bp, synthetic construct
  source 1..75: mol_type = other DNA
gcgcggagatgctgcaactgattaacgaggtgggagataaactggtcgggtatgcctgggtgatggaatatacag

SEQ ID NO: 167276 - DNA, 75 bp, synthetic construct
  source 1..75: mol_type = other DNA
gatcgccgtcgctctttccatctccggatgtactttcagcgaaatcaataaaatgcagaaaaaagcacaggagga

SEQ ID NO: 167277 - DNA, 75 bp, synthetic construct
  source 1..75: mol_type = other DNA
cgatggcgtaagccgctttgatgtttccgctatccgccagtggctcgctgaccgcaaaggcacgaccagcacgcg

SEQ ID NO: 167278 - DNA, 75 bp, synthetic construct
  source 1..75: mol_type = other DNA
ctttataatcatttgaacattatcccaatgatacacatctatgatgatgaagatttttcagaagtgcagaatttt

SEQ ID NO: 167279 - DNA, 75 bp, synthetic construct
  source 1..75: mol_type = other DNA
aagcgataaaaaccgaaatcctgaccaatgtcttccgctcaaaaggcgtactggtcggcacttctacgatgaata

SEQ ID NO: 167280 - DNA, 75 bp, synthetic construct
  source 1..75: mol_type = other DNA
tgaagctggcggtgctcccctgcatgatcgccgtcgctctttccatctccggatgtactttcagcgaaatcaaca

SEQ ID NO: 167281 - DNA, 75 bp, synthetic construct
  source 1..75: mol_type = other DNA
acaatctggttggcgttaagcctggcaaagaatcgtacatgaggctaaacgaaaaagcccttgatgatttttgtc

SEQ ID NO: 167282 - DNA, 75 bp, synthetic construct
  source 1..75: mol_type = other DNA
atatgcgcccaactcaggtgatgcaccacttccaaatcagcgaatccacgttatggagctgggttaaaaagggta

SEQ ID NO: 167283 - DNA, 75 bp, synthetic construct
  source 1..75: mol_type = other DNA
aagaattgatggatatgattgtcctcggtcaggttgagcgaatcaccgctcgtcacggggaatatttgcaaatac

SEQ ID NO: 167284 - DNA, 75 bp, synthetic construct
  source 1..75: mol_type = other DNA
aaaccagccacgtgcgccacaaactcaaacgcgtactgtggataccggttgaaggcgagcgcagcatcccgctgg

SEQ ID NO: 167285 - DNA, 75 bp, synthetic construct
  source 1..75: mol_type = other DNA
gcccgaaagcagcgaatgcgaaagcgcttaccgaagccattggtgcccggggcgaacggattctgacgctgccgc

SEQ ID NO: 167286 - DNA, 75 bp, synthetic construct
  source 1..75: mol_type = other DNA
tcactgagttagttacttatttctctgaatataaattaaaaaatgttttcgagaatattaactcaagagggaaaa

SEQ ID NO: 167287 - DNA, 75 bp, synthetic construct
  source 1..75: mol_type = other DNA
tttgcaccaatcgtacggtgcaacatcatgttctgttcaccgacaatatggtgttaatttgccgcgagggaaatc

SEQ ID NO: 167288 - DNA, 75 bp, synthetic construct
  source 1..75: mol_type = other DNA
gcggcttttatctgaagaagaatttcaccggcgcgctgctggcgcgtcattttctgatccaacagccatcgcttt

SEQ ID NO: 167289 - DNA, 75 bp, synthetic construct
  source 1..75: mol_type = other DNA
tgaaacatattgaagatgcactagctaacccttattccttcggtactaatgattgtaatattgttgccttgcgag

SEQ ID NO: 167290 - DNA, 75 bp, synthetic construct
  source 1..75: mol_type = other DNA
cgtctttgacggtcagccattgcaaaatttaaatcgtcgccagctattgccaatccgccatcgcattcaggttgt

SEQ ID NO: 167291 - DNA, 75 bp, synthetic construct
  source 1..75: mol_type = other DNA
tcccttccccgccggttgaatatctctctggtgatattcgttttcatggcgaatcgctgcttcatgccagcgagc

SEQ ID NO: 167292 - DNA, 75 bp, synthetic construct
  source 1..75: mol_type = other DNA
gttttggcgggcgcggtgaagtcaaaacgctgcgcagtgccgaagccgtctcgctggcgctgccattaagtggta

SEQ ID NO: 167293 - DNA, 75 bp, synthetic construct
  source 1..75: mol_type = other DNA
cagcctttcacccctctcttgctacgtttcggcgggcgtggcgaagtcaaaacgctgcgcagtgctgaagctgtc

SEQ ID NO: 167294 - DNA, 75 bp, synthetic construct
  source 1..75: mol_type = other DNA
ctaaaagaaggtgtagcacaattaaaagaattaggattcgaaagtacacaagatattattagacaagaatgccag

SEQ ID NO: 167295 - DNA, 75 bp, synthetic construct
  source 1..75: mol_type = other DNA
cttcaatgtctgaaattgtcagggacctttcacgcctgggctggacagatgatcgaattggaacagaggctgggc

SEQ ID NO: 167296 - DNA, 75 bp, synthetic construct
  source 1..75: mol_type = other DNA
ggttgttgccgtatcggcccgcaccggctgggaactggatacgctggtcagtgcgctcatgacagcgcttcccga

SEQ ID NO: 167297 - DNA, 75 bp, synthetic construct
  source 1..75: mol_type = other DNA
ggcgggatctggaccaaatcgccgctgacaacggtttcgactttcatatcatcgacaatgaaatctattgggacg

SEQ ID NO: 167298 - DNA, 75 bp, synthetic construct
  source 1..75: mol_type = other DNA
gcggtaacgtcaccattttcgatggtcagaataacgtcgttgaccacgctgagggtgattatgccgatgaaccga

SEQ ID NO: 167299 - DNA, 75 bp, synthetic construct
  source 1..75: mol_type = other DNA
atttctggcgacacatcctgcaccggggacatcagcgggtgctgtttgtggtgacgcaggccgacaaaacggagc

SEQ ID NO: 167300 - DNA, 75 bp, synthetic construct
  source 1..75: mol_type = other DNA
gaccggatatttgacacggcggagagcgtctgtattgcctctgttgcatgcacggttctgcgtgccgtccgtgac

SEQ ID NO: 167301 - DNA, 75 bp, synthetic construct
  source 1..75: mol_type = other DNA
catgacagcgcttcccgaccatgccgccagtcccctgatgacccgcctgcaggacgagctgcgcacggaatctgt

SEQ ID NO: 167302 - DNA, 75 bp, synthetic construct
  source 1..75: mol_type = other DNA
atgcgccggtgaagctgctggagtacaacgccgatacgccaacttcattgtacgagtcggcttatttccagtggc

SEQ ID NO: 167303 - DNA, 75 bp, synthetic construct
  source 1..75: mol_type = other DNA
cctggtcatcctaatcttcttgcgtcctggttcgatggcgagaaaccgcagattgccgctggcgaaagctatgtg

SEQ ID NO: 167304 - DNA, 75 bp, synthetic construct
  source 1..75: mol_type = other DNA
cggtattccgtctgttccggcctgtacatccggttgtggccgtatcggcccgcaccggctgggaactggatacgc

SEQ ID NO: 167305 - DNA, 75 bp, synthetic construct
  source 1..75: mol_type = other DNA
atgctgagacataacgtccctgtgcggcaggatcttgaccagatcgccgccgacaacggtttcgactttcatatc

SEQ ID NO: 167306 - DNA, 75 bp, synthetic construct
  source 1..75: mol_type = other DNA
tcgcggtttatctacattgaagatctcggtttgggcgtcggcggcgtactgaccgatcttgatgataatgtcatc

SEQ ID NO: 167307 - DNA, 75 bp, synthetic construct
  source 1..75: mol_type = other DNA
gaccgatcttgatgataacgtcatccagcgtgcatttaagctgtatccgctggagtggatgatgcgtgacgataa

SEQ ID NO: 167308 - DNA, 75 bp, synthetic construct
  source 1..75: mol_type = other DNA
agcgccactctacctggaggcttcagttcgctgtgggttaaccaggaaaaaacccgcattggcaatcaattgcga

SEQ ID NO: 167309 - DNA, 75 bp, synthetic construct
  source 1..75: mol_type = other DNA
gggaggtcaccccggtcagtgatgttcacgccggcacccgggaagtgcagcgcttccgtctgagtggtcacggtc

SEQ ID NO: 167310 - DNA, 75 bp, synthetic construct
  source 1..75: mol_type = other DNA
tccggcccgtacatccggttgttgccgtatcggcccgcaccggctgggaactggatacgctggtcagtgcgctca

SEQ ID NO: 167311 - DNA, 75 bp, synthetic construct
  source 1..75: mol_type = other DNA
aacagtttgatgaaggaaccattcgcactgttggtgccaatctgtcacgagccatctccggcgataccggtgatg

SEQ ID NO: 167312 - DNA, 75 bp, synthetic construct
  source 1..75: mol_type = other DNA
gggccggtattcagcgctataacaacggcgacagcagcgccaatacagggaaatatatcgctctcgatctctcgc

SEQ ID NO: 167313 - DNA, 75 bp, synthetic construct
  source 1..75: mol_type = other DNA
actgtggtcgaagctgggtacgttcagcatcagctacaatgatgaccgccgctacaacagccattattacacggc

SEQ ID NO: 167314 - DNA, 75 bp, synthetic construct
  source 1..75: mol_type = other DNA
tgggcgagagccgggacagggatgcagagtatgaggccctgtaccgtgacattctgcctgaactggacctggtac

SEQ ID NO: 167315 - DNA, 75 bp, synthetic construct
  source 1..75: mol_type = other DNA
gttaactgctctcaggggaatgctgaaacttccgttaacgtcgcaatacatacaattttgactgatgcaaactgg

SEQ ID NO: 167316 - DNA, 75 bp, synthetic construct
  source 1..75: mol_type = other DNA
tcacgccggcacccgggaagtgcagcgcttccgtctgagtggccacggtcacagcatggttatcactgacctgcc

SEQ ID NO: 167317 - DNA, 75 bp, synthetic construct
  source 1..75: mol_type = other DNA
atggctacatacggcggtcagtttacgcttacgtttcagggggaggtcaccccggtcagtgatgttcacgccggc

SEQ ID NO: 167318 - DNA, 75 bp, synthetic construct
  source 1..75: mol_type = other DNA
attgcctctgttgcacgcacggttctgcgcgccgtccgtgactcggtggtctctgttgcccgcgcggtatggaac

SEQ ID NO: 167319 - DNA, 75 bp, synthetic construct
  source 1..75: mol_type = other DNA
gggacatcagcgggtactgtttgtggtgacgcaggccgataaaacggagccctgccatgaatgggatatggccgg

SEQ ID NO: 167320 - DNA, 75 bp, synthetic construct
  source 1..75: mol_type = other DNA
gaagtctttctttagcgcgcatgaggtgtccacctgcaaaataagtgggtgcttaagttacaggatcctggattc

SEQ ID NO: 167321 - DNA, 75 bp, synthetic construct
  source 1..75: mol_type = other DNA
agacgcaatcaaggcgaaattcggcgctcgctggctgccagcgaaggcgaagaacagcgatttcccgggcaactg

SEQ ID NO: 167322 - DNA, 75 bp, synthetic construct
  source 1..75: mol_type = other DNA
tcgatgaataccgactgaagacgctgaagcgtaaagcaggctggatctccgatatcctccgttcagataagtcag

SEQ ID NO: 167323 - DNA, 75 bp, synthetic construct
  source 1..75: mol_type = other DNA
ttggtctgaattatcgcgtatccaccgccgacctgaagatgatgtacgcaccaaaattcgccgctggcgaggtat

SEQ ID NO: 167324 - DNA, 75 bp, synthetic construct
  source 1..75: mol_type = other DNA
aagcggaacttgaaaagaccaccgccgacgtcgacaaattcaaacaagcagcaatggccaaagcagctgataacg

SEQ ID NO: 167325 - DNA, 75 bp, synthetic construct
  source 1..75: mol_type = other DNA
gtttgctttccgtggtgcaattaagctggatggcactatttctgacgagctgacaggaaagctggttacgcatga

SEQ ID NO: 167326 - DNA, 75 bp, synthetic construct
  source 1..75: mol_type = other DNA
tttgtagcggctgatgtttgtaatgccatcgggattatcaatcatcgtgatgctgttggtaagttggatgaagac

SEQ ID NO: 167327 - DNA, 75 bp, synthetic construct
  source 1..75: mol_type = other DNA
ctttaagactcgttaattcccggaaggcgctaatgtctctggatgaggatgaaaagggtgtaactttaagttaca

SEQ ID NO: 167328 - DNA, 75 bp, synthetic construct
  source 1..75: mol_type = other DNA
gcataaaagtgattttattgcgtctgcaccggataaagaccaggaaccccgtcggcctttcagggtttcctgtga

SEQ ID NO: 167329 - DNA, 75 bp, synthetic construct
  source 1..75: mol_type = other DNA
gtaatggccaaagcagctgataacgcagactggaaggcccgctgggggagcgtccatcacacagaccgtatgttg

SEQ ID NO: 167330 - DNA, 75 bp, synthetic construct
  source 1..75: mol_type = other DNA
ggcgaagaacagcgatttcccgggtaactggtggattatcgagacaaaacacaacgtggcggacgttctggccgt

SEQ ID NO: 167331 - DNA, 75 bp, synthetic construct
  source 1..75: mol_type = other DNA
acggaaagctgaatttcttggtgcccaccgcttgcctaccggtacttttgacgcaaacgggaccagtacggtcgt

SEQ ID NO: 167332 - DNA, 75 bp, synthetic construct
  source 1..75: mol_type = other DNA
ttggcgttcggctgatgccccgagtgaacactatggagtggaccattctagcttctgcaggcactatcggcgcgc

SEQ ID NO: 167333 - DNA, 75 bp, synthetic construct
  source 1..75: mol_type = other DNA
tattgcggtggggttggttatccgtttcagccagggtcatgccggaccagaccccgcctgtgaaccgctgatcgg

SEQ ID NO: 167334 - DNA, 75 bp, synthetic construct
  source 1..75: mol_type = other DNA
tcagttgtacgtcttcgccgatcaggatgctggttttgtggggagcgataacatgcacatcatcgagatgccgca

SEQ ID NO: 167335 - DNA, 75 bp, synthetic construct
  source 1..75: mol_type = other DNA
atcgtctctttgcgccgttaatggcggcagcagctggtgcacttactaccggattatttttccatcctcattttt

SEQ ID NO: 167336 - DNA, 75 bp, synthetic construct
  source 1..75: mol_type = other DNA
aagccgatgatgatggtcaatcgtccgaagcaacagccccccacgataacgtttagcaaaaaatgctctccttta

SEQ ID NO: 167337 - DNA, 75 bp, synthetic construct
  source 1..75: mol_type = other DNA
gcaacgactgccgggaactctggggatagcccaggattcacctttctggatcatcgccatattaacgctaacagg

SEQ ID NO: 167338 - DNA, 75 bp, synthetic construct
  source 1..75: mol_type = other DNA
ttgctggaaaaactgaaatccaacattgaagaagttcgcgcgcgtggcggccaattgtatgtcttcgccgatcag

SEQ ID NO: 167339 - DNA, 75 bp, synthetic construct
  source 1..75: mol_type = other DNA
acagttaggccaattctttgcttatctgccttttaacaaggagacctggacccgagtctctcattatcctcaagc

SEQ ID NO: 167340 - DNA, 66 bp, synthetic construct
  source 1..66: mol_type = other DNA
atgtccttaaaaggtcttcgctttacgctggaggttgacggccaggagccggacacctttgcagtg

SEQ ID NO: 167341 - DNA, 75 bp, synthetic construct
  source 1..75: mol_type = other DNA
ttgaagaagttcgcgcgcgtagcggtcagttgtatgtcttcgccgatcaggatgcgggttttgtaagtagcgata

SEQ ID NO: 167342 - DNA, 75 bp, synthetic construct
  source 1..75: mol_type = other DNA
ttaccttggttcactggcaatctgtaacgttccgggttcttctctggtgcgcgaatccgatctggcgctaatgac

SEQ ID NO: 167343 - DNA, 75 bp, synthetic construct
  source 1..75: mol_type = other DNA
cagtgatcatggactcccgtcacccggataccctgctggcggcacgttctggtagtccgctggtgattggcctgg

SEQ ID NO: 167344 - DNA, 75 bp, synthetic construct
  source 1..75: mol_type = other DNA
gctctcaggcccgtgaacagtttaccggtgcggtggaccggatatttgacacagcggagagcgtctgtgttgcct

SEQ ID NO: 167345 - DNA, 75 bp, synthetic construct
  source 1..75: mol_type = other DNA
cacatcctggaacatctgcgcaaactcaccagtcacgaacccgtgattggcattatgggtaaaagcggggccggt

SEQ ID NO: 167346 - DNA, 75 bp, synthetic construct
  source 1..75: mol_type = other DNA
catgacagcgcttcccgaccatgccgccagtcccctgatgacccgcctgcaggacgggctgcgcacggagtctgt

SEQ ID NO: 167347 - DNA, 75 bp, synthetic construct
  source 1..75: mol_type = other DNA
ttggctttgagattgaagggaccggtaagaagtacgcgctgcgtaatggtgaatatgtcgatgcgtattatatgg

SEQ ID NO: 167348 - DNA, 75 bp, synthetic construct
  source 1..75: mol_type = other DNA
atgagtgagatagtgatacgccatgctgaaacacgggattacgaggccatcaggcagattcacgcccagccggag

SEQ ID NO: 167349 - DNA, 75 bp, synthetic construct
  source 1..75: mol_type = other DNA
tctgtgttgactcccgctggcacaaccgcggcgtcgccagcgccctgatccgcgaattgattgaaatgtgcgaca

SEQ ID NO: 167350 - DNA, 75 bp, synthetic construct
  source 1..75: mol_type = other DNA
ggagagcgtctgcattgcctctgttgcccgtacggttctgcgcgccgtccgtgacacggtggtctctgttgcccg

SEQ ID NO: 167351 - DNA, 75 bp, synthetic construct
  source 1..75: mol_type = other DNA
ctctgttgcacgcacggttctgcgtgccgtccgtgacacagtggtctctgttgcccgcgcggtatggaactggat

SEQ ID NO: 167352 - DNA, 75 bp, synthetic construct
  source 1..75: mol_type = other DNA
ctgcgcgccaccgacgaacgtttactgttggcctgcggcgcaaatatggttattccatggaacgccccgctctct

SEQ ID NO: 167353 - DNA, 75 bp, synthetic construct
  source 1..75: mol_type = other DNA
ggtgtgcgcagactgccggagcgttgtgtacctgttcatatgctgttgctagcgcaggttcacgactttagagca

SEQ ID NO: 167354 - DNA, 75 bp, synthetic construct
  source 1..75: mol_type = other DNA
cctgccatgaatgggatatggccggcattcagccttctcccgcacaggcacagaacattcgggagaaaacggagg

SEQ ID NO: 167355 - DNA, 75 bp, synthetic construct
  source 1..75: mol_type = other DNA
gaccgtgccctgtctgtggatgagtatttctggcgacacatcctgcaccggggacatcagcgggtgcgtattacc

SEQ ID NO: 167356 - DNA, 75 bp, synthetic construct
  source 1..75: mol_type = other DNA
catcatgaaagtttcttgtatacattaagttattttgcaacaactcgatcaagttcatatacaagaaaaatgtat

SEQ ID NO: 167357 - DNA, 75 bp, synthetic construct
  source 1..75: mol_type = other DNA
accccgcacaccggaaagatggcggggggattcacggagataatatctgcctgaaattatttggaatgcaggtat

SEQ ID NO: 167358 - DNA, 75 bp, synthetic construct
  source 1..75: mol_type = other DNA
gatgcagagtatgaagccctgtaccgtgacattctgcccgaactggacctggtgctgtggctgattaaagccgat

SEQ ID NO: 167359 - DNA, 75 bp, synthetic construct
  source 1..75: mol_type = other DNA
aatgcggtaactggtatcaaaacattccgcaatggattgacttctaaatttaaatcaccagtaaactatctttta

SEQ ID NO: 167360 - DNA, 75 bp, synthetic construct
  source 1..75: mol_type = other DNA
tatctataataaaaaacttccaaaaatctgactccagaattcggctagttgatgataatttgaaaggtcaaggtg

SEQ ID NO: 167361 - DNA, 75 bp, synthetic construct
  source 1..75: mol_type = other DNA
aaccattctaatggccacctacaatggcgaggccttcatcaaaaatcagattttgtcactacaacaacaaacatt

SEQ ID NO: 167362 - DNA, 75 bp, synthetic construct
  source 1..75: mol_type = other DNA
ggcggtattccgtctgttccggcccgtacatccggttgttgccgtatcggcccgcaccggctgggaactggatac

SEQ ID NO: 167363 - DNA, 75 bp, synthetic construct
  source 1..75: mol_type = other DNA
tcggctttgagattgaagggactggcaagaagtacgcattacgtaatggtgaatatgtcgatgcgtattatatgg

SEQ ID NO: 167364 - DNA, 75 bp, synthetic construct
  source 1..75: mol_type = other DNA
gtcgataacgccccggcaattaaggtctataaaaaatacggctttgaaattgaagggactggtaagaagtacgca

SEQ ID NO: 167365 - DNA, 75 bp, synthetic construct
  source 1..75: mol_type = other DNA
gtctgtgttgcctctgttgcccgtaaggttctgcgcgctgttcgtgacacggtggtctctgttgcccgcgcggta

SEQ ID NO: 167366 - DNA, 75 bp, synthetic construct
  source 1..75: mol_type = other DNA
acgagctgcgcacggaatctgtccgctctcaggcccgtgaacagtttaccggtgcggtggaccggatatttgaca

SEQ ID NO: 167367 - DNA, 75 bp, synthetic construct
  source 1..75: mol_type = other DNA
ggctgggaactggatacgctggtcagtgcgctcatgacagcgcttcccgaccatgccgccagtcccctgatgacc

SEQ ID NO: 167368 - DNA, 75 bp, synthetic construct
  source 1..75: mol_type = other DNA
tggcttccagggcgataaagtgacggaagagacgcgccgcttctccggtggggaaaaagcgcgcctggtgctggc

SEQ ID NO: 167369 - DNA, 75 bp, synthetic construct
  source 1..75: mol_type = other DNA
cgctgcgtaaagagatcgcccgtctggaaaaagagatggaaaagctgaacgcacagctggcgcaggcggaagaga

SEQ ID NO: 167370 - DNA, 75 bp, synthetic construct
  source 1..75: mol_type = other DNA
tggtttccagggcgataaagtaacggaagaaacccgccgtttctccggtggggaaaaagcacggctggtgctggc

SEQ ID NO: 167371 - DNA, 75 bp, synthetic construct
  source 1..75: mol_type = other DNA
tgctctggttattgaatcaggctagacacacaaaaacagtcgatgaatttttgaggaacgttcaaaaagccaagt

SEQ ID NO: 167372 - DNA, 75 bp, synthetic construct
  source 1..75: mol_type = other DNA
ggacgagctgcgcacggagtctgtccggtctcaggcccgtgaacagtttaccggtgcggtggaccggatatttga

SEQ ID NO: 167373 - DNA, 75 bp, synthetic construct
  source 1..75: mol_type = other DNA
gcctgcctgcaacagcaagccagcgccaaatccgggctggaagagtgcgaaatggcgtggctggaagcccaggag

SEQ ID NO: 167374 - DNA, 75 bp, synthetic construct
  source 1..75: mol_type = other DNA
ggtactgtggctgattaaagccgatgaccgcgccctgtctgtggatgagtatttctggcgacacatcctgcagtg

SEQ ID NO: 167375 - DNA, 75 bp, synthetic construct
  source 1..75: mol_type = other DNA
ccgcctgcaggacgagctgcgcacggaatctgtccgcgctcaggcccgtgaacagtttaccggtgcggtggaccg

SEQ ID NO: 167376 - DNA, 75 bp, synthetic construct
  source 1..75: mol_type = other DNA
agaggtgaagcagatggttaccgtctccggtcgtatccgtgcggaagacggcacactgctggctaacgcacggat

SEQ ID NO: 167377 - DNA, 75 bp, synthetic construct
  source 1..75: mol_type = other DNA
ctcgatctcgatgccgttatctggctggaaaaatggttgaagagctatcagggcacgctgatcctgatctctcac

SEQ ID NO: 167378 - DNA, 75 bp, synthetic construct
  source 1..75: mol_type = other DNA
aactgcgtgactacctcggcggctttggtttccagggcgataaagtaaccgaagaaacgcgccgcttctcaggtg

SEQ ID NO: 167379 - DNA, 75 bp, synthetic construct
  source 1..75: mol_type = other DNA
accggctgggaactggatacgctggtcagtgcgctcatgacagcgcttcccgaccatgccgccagtcccctgatg

SEQ ID NO: 167380 - DNA, 75 bp, synthetic construct
  source 1..75: mol_type = other DNA
cacatgcccgtatggatggtcataccgataactatggtgaagatagctacaacgaagccttatcactgaagcgag

SEQ ID NO: 167381 - DNA, 75 bp, synthetic construct
  source 1..75: mol_type = other DNA
gccgacaaaacggagccctgccatgaatgggatatggccggtattcagccttctcccgcacaggcacagaatatt

SEQ ID NO: 167382 - DNA, 75 bp, synthetic construct
  source 1..75: mol_type = other DNA
ctggttctgggccagtattacaagagtgcgactcccgcccagcgtgatgcttactttgccgctttccgtgagtat

SEQ ID NO: 167383 - DNA, 75 bp, synthetic construct
  source 1..75: mol_type = other DNA
aaagtcgcggtcattagcatggacaacgatcctgacaaatacttcaaattagatgattctcaaggaccagaaaaa

SEQ ID NO: 167384 - DNA, 75 bp, synthetic construct
  source 1..75: mol_type = other DNA
acgcagcgatgaaaagcgtattctcagtaatattgccgtactggaaggcgcgccaccgctatcggaacactggaa

SEQ ID NO: 167385 - DNA, 75 bp, synthetic construct
  source 1..75: mol_type = other DNA
accgctcaggcggcgacggtggtcttttctttacagcaaaatgcgcaaatcgagccactggcccgcagcattcat

SEQ ID NO: 167386 - DNA, 75 bp, synthetic construct
  source 1..75: mol_type = other DNA
tgcctctgttgcacgcacggttctgcgcgccgtccgtgactcggtggtctctgttgcccgcgcggtatggaactg

SEQ ID NO: 167387 - DNA, 75 bp, synthetic construct
  source 1..75: mol_type = other DNA
ttttttcaccgggaatacatgtatgaatccgtctgatgccattgaggcaattgaaaaaccgctctcctccctgcc

SEQ ID NO: 167388 - DNA, 75 bp, synthetic construct
  source 1..75: mol_type = other DNA
actggatacgctggtcagtgcgctcatgacagcgcttcccgaccatgccgccagtcccctgatgacccgcctgca

SEQ ID NO: 167389 - DNA, 75 bp, synthetic construct
  source 1..75: mol_type = other DNA
ctgaagcaggcttacggtcaggcgctggcgatgtatcacggtcaaacctatcagattgcgccagaacagccgctg

SEQ ID NO: 167390 - DNA, 75 bp, synthetic construct
  source 1..75: mol_type = other DNA
cacgcacggttctgcgggccgtccgtgactcggtggtctctgttgcccgcacggtatggaactggattttcttct

SEQ ID NO: 167391 - DNA, 75 bp, synthetic construct
  source 1..75: mol_type = other DNA
gtgacgcaggccgacaaaacggaaccctgccatgaatgggatatggcaggtattcagccttctcccgcacaggaa

SEQ ID NO: 167392 - DNA, 75 bp, synthetic construct
  source 1..75: mol_type = other DNA
agtgtctactggctcgctgatcatggtcttcgaagtggcgggcgcggcagcaccggcagcgaaacaggaagccgc

SEQ ID NO: 167393 - DNA, 75 bp, synthetic construct
  source 1..75: mol_type = other DNA
cagcgcctgcggcagctcctgcgaaacaggaagcggcagcgccggctccggcagcaaaagctgaagctccggcag

SEQ ID NO: 167394 - DNA, 75 bp, synthetic construct
  source 1..75: mol_type = other DNA
cacctgctcaggcagaagagaagaaagaagcagctccggcagcagcaccagcggctgcagcggcaaaagacgtta

SEQ ID NO: 167395 - DNA, 75 bp, synthetic construct
  source 1..75: mol_type = other DNA
gctcacgttcgtgcctgctatcaactggtgaaagagcacgaccgtgtgggccgaatggcggacacccaggagttt

SEQ ID NO: 167396 - DNA, 75 bp, synthetic construct
  source 1..75: mol_type = other DNA
gagcagcggaataataattatttgcaactagctgttcgtagtcgcataaaatttttctttcgtcctgctcacctg

SEQ ID NO: 167397 - DNA, 75 bp, synthetic construct
  source 1..75: mol_type = other DNA
tgaatactgcaggactattggaaactgtcccagaagatgtgctttttagtatacgtgagcaaagctctgctggag

SEQ ID NO: 167398 - DNA, 75 bp, synthetic construct
  source 1..75: mol_type = other DNA
agccaccccggaggccatgcgccatcactggaaggtgctgaacagactgctgaccaccgcgttacgccagggtaa

SEQ ID NO: 167399 - DNA, 75 bp, synthetic construct
  source 1..75: mol_type = other DNA
accctgtagaaatcgccgccgatattgaaaagaaaatcctgtcggatgctttagataatgtagatatggcgcgag

SEQ ID NO: 167400 - DNA, 75 bp, synthetic construct
  source 1..75: mol_type = other DNA
ggtaacgtgtcagaacggggcgacggttttgaaatggtaatacgtggcctgagtgtggatcagctcataaaggta

SEQ ID NO: 167401 - DNA, 75 bp, synthetic construct
  source 1..75: mol_type = other DNA
tgtcatgccacaggtccagcagtatgcgtgggataaagcggcaaacagcaaccaaccgctggcgcacacggttgt

SEQ ID NO: 167402 - DNA, 75 bp, synthetic construct
  source 1..75: mol_type = other DNA
gctttacctggtggggtgaagatggcaatggtgacgccttccttacggcatgggcatggtatgccgactggcagg

SEQ ID NO: 167403 - DNA, 75 bp, synthetic construct
  source 1..75: mol_type = other DNA
ttgaaacgtgaacgtcttattccactggccatgctgggcggctggtgtgtattcgtactgttcatatccctgccg

SEQ ID NO: 167404 - DNA, 75 bp, synthetic construct
  source 1..75: mol_type = other DNA
tcttgaactggcggatacggtgagtgagttgcgccccatcaaacatgcgtttgatgccggtgtaaaagcgcagat

SEQ ID NO: 167405 - DNA, 75 bp, synthetic construct
  source 1..75: mol_type = other DNA
atgagtgacgaacgctaccaacagcgtcagcaacgtgttaaagaaaaagtggatgcccgcgtggcgcaggcccag

SEQ ID NO: 167406 - DNA, 75 bp, synthetic construct
  source 1..75: mol_type = other DNA
tgatatcgactttgttggaaaaacagcccatgttcagagcgcaagtgttgtcggagttatcaaaggaacaaagac

SEQ ID NO: 167407 - DNA, 75 bp, synthetic construct
  source 1..75: mol_type = other DNA
cacctggcctaatggcgaacgcaatctgctggagccacacggcgttgagtttcaggtaatggcaacgggctttac

SEQ ID NO: 167408 - DNA, 75 bp, synthetic construct
  source 1..75: mol_type = other DNA
tcttgaactggcggatacggtaagtgaattacgccccgtcaaacatgcgtttgatgccggtgtaaaagcgcagat

SEQ ID NO: 167409 - DNA, 75 bp, synthetic construct
  source 1..75: mol_type = other DNA
tcttgaactggcggatacggtaagtgaattacgccctgtcaaacatgcgtttgatgccggtgttaaggcgcaaat

SEQ ID NO: 167410 - DNA, 75 bp, synthetic construct
  source 1..75: mol_type = other DNA
atcttcgaccagccagactataaaaaagtcattgatgaaatgcgcagtgaactggcaaaggtaagtcatgaataa

SEQ ID NO: 167411 - DNA, 75 bp, synthetic construct
  source 1..75: mol_type = other DNA
ggtttcttaactaagaaagatttaaaagactttgctgataatccggctggtctggttagtaaagctgtcaatgga

SEQ ID NO: 167412 - DNA, 75 bp, synthetic construct
  source 1..75: mol_type = other DNA
ttaatggcaacagaaaagctcaattagcccccgttaagggaggaggatcagggaattccgccactatgggcgctc

SEQ ID NO: 167413 - DNA, 75 bp, synthetic construct
  source 1..75: mol_type = other DNA
aaaacaattcgcaaccagttatctttcctgcggtcagcacttgatgaagccgtgaccgatggggtacttcaaatt

SEQ ID NO: 167414 - DNA, 75 bp, synthetic construct
  source 1..75: mol_type = other DNA
ggtgatagtgtcaagcgtgctgccgttgcaccttctttaaatcaactgtgtactgaattagcacaggttgccgga

SEQ ID NO: 167415 - DNA, 75 bp, synthetic construct
  source 1..75: mol_type = other DNA
tgaaaaagaatttgttaaacgcctgaagctgatccgcgctgacattcacagccagcttgcgagcgttggatgtga

SEQ ID NO: 167416 - DNA, 75 bp, synthetic construct
  source 1..75: mol_type = other DNA
cctgccggaagagtggggcggtgaaagccagttcgtacacgtatctgcgaaagcgggtaccggtatcgatgaact

SEQ ID NO: 167417 - DNA, 75 bp, synthetic construct
  source 1..75: mol_type = other DNA
catcaaccaggttatcgatcaggaaaccgcacagctggttgctgaagagatgggccataaagttatcctgcgtcg

SEQ ID NO: 167418 - DNA, 75 bp, synthetic construct
  source 1..75: mol_type = other DNA
ctgtctccggaactgaaacagcagattatcggtctggcggaagttcgtgacgtgttcaaatcgccgaaatttggt

SEQ ID NO: 167419 - DNA, 75 bp, synthetic construct
  source 1..75: mol_type = other DNA
tctataaccgcgtcaaaggggagatggaagaagcattaatcgcccagaactggccgaaattgaccattgctcgcc

SEQ ID NO: 167420 - DNA, 75 bp, synthetic construct
  source 1..75: mol_type = other DNA
acgaaacgctttttgcgccgctgttccgtttgttacccggtaactggaaatccattgatgcgagagacgtggcgc

SEQ ID NO: 167421 - DNA, 75 bp, synthetic construct
  source 1..75: mol_type = other DNA
ttcgccgtttttctataaccgcgtcaaaggggagatggaagaagcgttaatcgcccagaactggccgaaactgac

SEQ ID NO: 167422 - DNA, 75 bp, synthetic construct
  source 1..75: mol_type = other DNA
acacagcaacaactgggggataagacacgggtaacgctgttgggcgattatgcccatactcatggttatgatgtt

SEQ ID NO: 167423 - DNA, 75 bp, synthetic construct
  source 1..75: mol_type = other DNA
cttcaatgtctgaaattgtcagggacctgtcacgcctgggctggacagatgaacgaattggaacagaggctgggc

SEQ ID NO: 167424 - DNA, 75 bp, synthetic construct
  source 1..75: mol_type = other DNA
cttcaatgtctgaaattgtcagggacctctcacgactgggctggacagatgaccgaattggaacagaggctgggc

SEQ ID NO: 167425 - DNA, 75 bp, synthetic construct
  source 1..75: mol_type = other DNA
caggctgaagtcctggaactgaaagccgtgcgtaacgggatggcgagcggtgcggttatcgaatccttcctcgat

SEQ ID NO: 167426 - DNA, 75 bp, synthetic construct
  source 1..75: mol_type = other DNA
tgaaaatgggcggggtgagcttgtgggatcttgctgttgcatatccggtcacctctcacctgacagttcgtggta

SEQ ID NO: 167427 - DNA, 75 bp, synthetic construct
  source 1..75: mol_type = other DNA
aaccagcgccggttgggagttcatcgaaggttatcgctttattgcttcctacggaacatcttataaggcaccaaa

SEQ ID NO: 167428 - DNA, 75 bp, synthetic construct
  source 1..75: mol_type = other DNA
aggaaggaatggggaattctatgataccagagatggaagtactgagcaacatgattcgtcagtacttcagccaag

SEQ ID NO: 167429 - DNA, 75 bp, synthetic construct
  source 1..75: mol_type = other DNA
ctggtcgtggatggttttcatcgtcagttactgggcagggaagcaggtacgggaaaacgcctgaaggggtggttg

SEQ ID NO: 167430 - DNA, 75 bp, synthetic construct
  source 1..75: mol_type = other DNA
ccagtgacctgtattaatccggaaagaaagggacaggcctcacgtattgctgcaaccattagacataaccgggcc

SEQ ID NO: 167431 - DNA, 75 bp, synthetic construct
  source 1..75: mol_type = other DNA
agttgctgggcagggaagcaggtacgggaaaacgcctgaaaggctggttgccagtggcctgtattaatccggaaa

SEQ ID NO: 167432 - DNA, 75 bp, synthetic construct
  source 1..75: mol_type = other DNA
attggtacagaactgggtatggaccgggatgaagtgctgagactgaaacagattagcgggctgacggaattgttt

SEQ ID NO: 167433 - DNA, 75 bp, synthetic construct
  source 1..75: mol_type = other DNA
tgtgtcctgtgggtgaaggctgatgaagtggtggccaatgattacaatcctaatgttatggctgccggagagaag

SEQ ID NO: 167434 - DNA, 75 bp, synthetic construct
  source 1..75: mol_type = other DNA
aaaggggagatggaagaagcgttaatcgcccagaactggccgaaactgaccattgcccgtccgtcgatgttgctg

SEQ ID NO: 167435 - DNA, 75 bp, synthetic construct
  source 1..75: mol_type = other DNA
ggataccgcattaaccgggcggcggttgggcgcacagcatatgctggtagtcagtgctatggggtgccaaggccc

SEQ ID NO: 167436 - DNA, 75 bp, synthetic construct
  source 1..75: mol_type = other DNA
caacggggctggtgggtgggcatctactgcggatgttgattaatgaaccgaaagtacaggctattgccgcgccga

SEQ ID NO: 167437 - DNA, 75 bp, synthetic construct
  source 1..75: mol_type = other DNA
gggaaaacgcctccggggatggcttcctgtcacctgcattaatccggagagaaaggggcaggcggcacgtatggc

SEQ ID NO: 167438 - DNA, 75 bp, synthetic construct
  source 1..75: mol_type = other DNA
aattactgggcagggaagcaggtacgggaaaacgcctgaagggctggttgccagtgacctgtattaatccggaaa

SEQ ID NO: 167439 - DNA, 75 bp, synthetic construct
  source 1..75: mol_type = other DNA
ctcaggttgaaacagattagcgggctgacggagctgtttcaggaagaggatttcagcccggcatggacggttcgc

SEQ ID NO: 167440 - DNA, 75 bp, synthetic construct
  source 1..75: mol_type = other DNA
aacgggtattgctcatacccgttgggcgacccacggtgaaccttcagaagtgaatgcgcatccgcatgtttctga

SEQ ID NO: 167441 - DNA, 75 bp, synthetic construct
  source 1..75: mol_type = other DNA
ggtgatgtgcttgagttgaaatggcaggatattatggataaagggatctacattgagcaaaacaaaaccggcacc

SEQ ID NO: 167442 - DNA, 75 bp, synthetic construct
  source 1..75: mol_type = other DNA
gggaaggttctgagtagtcatcgccgtgaagaacgttttcctatgatgagcacattcaaagttttgttatgtgga

SEQ ID NO: 167443 - DNA, 75 bp, synthetic construct
  source 1..75: mol_type = other DNA
ttctacaccgttccgctgcagctgctggcttaccacgtcgcgctgatcaaaggcaccgacgttgaccagccgcgt

SEQ ID NO: 167444 - DNA, 75 bp, synthetic construct
  source 1..75: mol_type = other DNA
gacgcaggttttgtaagtagcgataatatgcacatcatcgagatgccgcatgtggaagaagtgattgccccaatc

SEQ ID NO: 167445 - DNA, 75 bp, synthetic construct
  source 1..75: mol_type = other DNA
acggttaaaacgcatctttataaccttttcaagaagatagctgtaaaaaaccggacacaagcggtttcctgggca

SEQ ID NO: 167446 - DNA, 75 bp, synthetic construct
  source 1..75: mol_type = other DNA
cgaatgctactttacgcaaaagcttgccagttacctgattacgcattcaggtaactatcgttataacagcacgga

SEQ ID NO: 167447 - DNA, 75 bp, synthetic construct
  source 1..75: mol_type = other DNA
gcgtatcggcgcgtctaataacgagatcgctcgttcgttgttcatcagcgaaatacggttaaaacgcatctttat

SEQ ID NO: 167448 - DNA, 75 bp, synthetic construct
  source 1..75: mol_type = other DNA
cgtctccatcgccgggattaacgacatcatttcctgtgacgatttctaccgtttccagcagcgcggcatgatcaa

SEQ ID NO: 167449 - DNA, 75 bp, synthetic construct
  source 1..75: mol_type = other DNA
atgcgagtgagttccttgttatcggcgatcgctcatggcgtgtaggccaatactacgattgtgccggtgatatcg

SEQ ID NO: 167450 - DNA, 75 bp, synthetic construct
  source 1..75: mol_type = other DNA
gtaagttcggtgagcttgaatcaaaactggaaacggcgttgcgggagtgtcgttctgctggaatcacgattgata

SEQ ID NO: 167451 - DNA, 75 bp, synthetic construct
  source 1..75: mol_type = other DNA
gcttcagtcgcctggaaaatgaaattgctgaactgaataaaaaactgtcggcgctgatgccttctgaagatgaaa

SEQ ID NO: 167452 - DNA, 75 bp, synthetic construct
  source 1..75: mol_type = other DNA
ggcggcgcgtcgccgggtattgtcggagtattcagataccggtaccgaaaaagcagagaagtatccgtactttga

SEQ ID NO: 167453 - DNA, 75 bp, synthetic construct
  source 1..75: mol_type = other DNA
cgatgtaatcgcgtcatacggagatacgctatcccctgaagcaattcaggagaaaatagcggatgcgatcgccag

SEQ ID NO: 167454 - DNA, 75 bp, synthetic construct
  source 1..75: mol_type = other DNA
gaaaagattgcagccgacttccaggagggccggactccgatcatcatctgcaacaaaaaggcagaggtgggtatc

SEQ ID NO: 167455 - DNA, 75 bp, synthetic construct
  source 1..75: mol_type = other DNA
gttccgctctgtactgccagctggctggatgatagcggataaaacaggagcaggtgatcacggatctcggggcat

SEQ ID NO: 167456 - DNA, 75 bp, synthetic construct
  source 1..75: mol_type = other DNA
ttattggccagcacccctggcattgcggtttcaccgtatggcgggattgttccgttcgcccgcgccaccagcggc

SEQ ID NO: 167457 - DNA, 75 bp, synthetic construct
  source 1..75: mol_type = other DNA
cgcctggccaggtttggcattgacgaacagaccgtaactcaccccgttacgcccaaatacgcgaagctgattgcc

SEQ ID NO: 167458 - DNA, 75 bp, synthetic construct
  source 1..75: mol_type = other DNA
cgtgaacgcttgtatcgcggggcgatgattggccggatgttaattgaatatcaggatatgaaggccgccgggcat

SEQ ID NO: 167459 - DNA, 75 bp, synthetic construct
  source 1..75: mol_type = other DNA
cattatatgaattgcagtggcgcggaaattttgccgatacctggtatctttactgtgggccgatggtttttatct

SEQ ID NO: 167460 - DNA, 75 bp, synthetic construct
  source 1..75: mol_type = other DNA
tttatggtttttcttcgcgattgcggtgatttatctggtttcgccgctgattcaggtaaagcacgtcggcggtaa

SEQ ID NO: 167461 - DNA, 75 bp, synthetic construct
  source 1..75: mol_type = other DNA
gtactgagtgataatgaatcgaaggaattcttcgggaaagtcaaaacccggcatcccgaaatggatataaaaata

SEQ ID NO: 167462 - DNA, 75 bp, synthetic construct
  source 1..75: mol_type = other DNA
ttttttatagcgcaatcgcgctgctctacattgcgctgtttacctccatcaatgtggagttagcgctgaaaaacc

SEQ ID NO: 167463 - DNA, 75 bp, synthetic construct
  source 1..75: mol_type = other DNA
ctggatattatttggatcttttgcgcgacgttggcagcgagtttgttactttctgtgctgcttcaacgaatcgac

SEQ ID NO: 167464 - DNA, 75 bp, synthetic construct
  source 1..75: mol_type = other DNA
gtcagcgtgccgctatttttcatgatttccggctatctcttttttggcgaacgcagcgcccagccgcgccatttc

SEQ ID NO: 167465 - DNA, 75 bp, synthetic construct
  source 1..75: mol_type = other DNA
ccgggtcgagacagagaacggcgagcgggaaaaagcgcagcggcgcagcctggcagagacgctccagcaggaagg

SEQ ID NO: 167466 - DNA, 75 bp, synthetic construct
  source 1..75: mol_type = other DNA
cagtgatcatggactcccgtcacccggataccctgctggcggcacgttctggtagcccgctggtgattggcttgg

SEQ ID NO: 167467 - DNA, 75 bp, synthetic construct
  source 1..75: mol_type = other DNA
tttcatttctgcgcagcgccatagatgaagcggtgaccgatggtttgttaacaataaatcctgtcacgctggtca

SEQ ID NO: 167468 - DNA, 75 bp, synthetic construct
  source 1..75: mol_type = other DNA
gttgttattgctggccaggatagtgttaatccaccggaacagggaagagcattatatgatgctgttgcttctggt

SEQ ID NO: 167469 - DNA, 75 bp, synthetic construct
  source 1..75: mol_type = other DNA
gcatcctgaaatgaatataaaaatacctttccttacagtcatggagacgttgcaatataaaccggcagaaagtgc

SEQ ID NO: 167470 - DNA, 75 bp, synthetic construct
  source 1..75: mol_type = other DNA
gcaggcgtgcattgataatcagcgtatcggattatggggaacatcgctgggtggctgtcatgtgttcagtgcagc

SEQ ID NO: 167471 - DNA, 75 bp, synthetic construct
  source 1..75: mol_type = other DNA
cctgtacgcgctgatcatgctggcgggcctgtggttattcctgcccaaacgaaaaacgccggaaagaggcataac

SEQ ID NO: 167472 - DNA, 75 bp, synthetic construct
  source 1..75: mol_type = other DNA
gctgtacggtagtcgtcttacacttcgacgcctatggtgaaaaaatggcggcggcagcatcgcttccaaaaattg

SEQ ID NO: 167473 - DNA, 75 bp, synthetic construct
  source 1..75: mol_type = other DNA
cggctatctctcgtataacgtgcagaaaaaaccactggatgacgtgaaagttcgccaggcactgacctatgcggt

SEQ ID NO: 167474 - DNA, 75 bp, synthetic construct
  source 1..75: mol_type = other DNA
tatgcatgctggcaggctgtaaattattgcaaggacgttatcgactactggcggtggttggcgggctgttatgcg

SEQ ID NO: 167475 - DNA, 75 bp, synthetic construct
  source 1..75: mol_type = other DNA
gtgggcgtggcccgttttgattatcttagtgttcccgattgcaattgtgtttgcgattctgggtcgccactatcc

SEQ ID NO: 167476 - DNA, 75 bp, synthetic construct
  source 1..75: mol_type = other DNA
gattgcctgcgtgattggctatctggcctgctttgccagtctcaacatttatatacagagcttcgcccgcctggt

SEQ ID NO: 167477 - DNA, 75 bp, synthetic construct
  source 1..75: mol_type = other DNA
attgtcagccagctggcttttgctgacggtgaggttctggttaccggagagatgaatgaatcggagagagcgtct

SEQ ID NO: 167478 - DNA, 75 bp, synthetic construct
  source 1..75: mol_type = other DNA
cccttgctttgcgaatgccttcacagaagcaggattcgcaacgattacttttgattatcgaggattcggtgagag

SEQ ID NO: 167479 - DNA, 75 bp, synthetic construct
  source 1..75: mol_type = other DNA
tggcttaatctcccgccattcgttaggtatatacgggttccatgcattgattatccatgcactgcgcacccgggg

SEQ ID NO: 167480 - DNA, 75 bp, synthetic construct
  source 1..75: mol_type = other DNA
cgtataacccgaacgctcgccgcatggcggagatgattcaggcagactgggcgaaagtgggcgtacaggccaaaa

SEQ ID NO: 167481 - DNA, 75 bp, synthetic construct
  source 1..75: mol_type = other DNA
atgaagcaggataaatccatcaatctgatggaaatgccggggctgaacgtcggctatctttcatataacgtgcag

SEQ ID NO: 167482 - DNA, 75 bp, synthetic construct
  source 1..75: mol_type = other DNA
ttgaaaaagtcagggatgctgaagcttggtctcagcctggtggctatgaccgtcgcagcctggtggctatgaccg

SEQ ID NO: 167483 - DNA, 75 bp, synthetic construct
  source 1..75: mol_type = other DNA
taatgtctgggcagatggcgaaccgccaactgaaaatatcttaaaagatcaattcaaaaagcagtatcacggcat

SEQ ID NO: 167484 - DNA, 75 bp, synthetic construct
  source 1..75: mol_type = other DNA
cgaagcacgtcgtgccgcaacatcggtgaaagacgccaacttcgtcgaagaagttgaagaagttgaagaagagta

SEQ ID NO: 167485 - DNA, 75 bp, synthetic construct
  source 1..75: mol_type = other DNA
atgctgaaacagcaggatatgacagaaaccgccagagtggtgtttaatgaattaagtgtcaccgaaccggcgaca

SEQ ID NO: 167486 - DNA, 75 bp, synthetic construct
  source 1..75: mol_type = other DNA
ccctgatttcgatctttattccagtaataccgtccggaccattcagtcggcgacctggttttccgcgggtaaaaa

SEQ ID NO: 167487 - DNA, 75 bp, synthetic construct
  source 1..75: mol_type = other DNA
ttaaccggaaaagggaaaaagacatgcagaaacagcaggatatgacagaaaccgccagagtggtgtttaatgaat

SEQ ID NO: 167488 - DNA, 75 bp, synthetic construct
  source 1..75: mol_type = other DNA
gagtcatttctgcgctcaccggcgtttactgtgcctgaatctgcccaacgttgggcaaatcagatccgccaggaa

SEQ ID NO: 167489 - DNA, 75 bp, synthetic construct
  source 1..75: mol_type = other DNA
gcgttctggttgccagtggtaaacatgaagatatgtacactgcaattaacgaattgatcaacaagctggaacggc

SEQ ID NO: 167490 - DNA, 75 bp, synthetic construct
  source 1..75: mol_type = other DNA
ccagtcatctggtcagaaatatggcatttgacctgggtgaaaaaaatattcgggtgaatggcattgcgccggggg

SEQ ID NO: 167491 - DNA, 75 bp, synthetic construct
  source 1..75: mol_type = other DNA
ggtgaataatgccggtggtggcggtcctaaaccgtttgatatgccaatggcggattttcgccgtgcttatgagct

SEQ ID NO: 167492 - DNA, 75 bp, synthetic construct
  source 1..75: mol_type = other DNA
aaactgccagagtggtgtttaatgagttaagcgtcaccgaaccggcgaccgtcggggaaattgcgcagaatactt

SEQ ID NO: 167493 - DNA, 75 bp, synthetic construct
  source 1..75: mol_type = other DNA
ggggagattgcacaaaacacatatctttcacgcgaacgctgtcagttaatactgacccagttggttatggcgggg

SEQ ID NO: 167494 - DNA, 75 bp, synthetic construct
  source 1..75: mol_type = other DNA
gaaggttccggtgaaattcactttaaaggtgaagttattgaagcaccgtgtgaaatccatcaggatgatatcgat

SEQ ID NO: 167495 - DNA, 75 bp, synthetic construct
  source 1..75: mol_type = other DNA
caaagagccacaagggtttgttgctgacgccacaatcaatacacctaacggcgttctggttgccagtggtaaaca

SEQ ID NO: 167496 - DNA, 75 bp, synthetic construct
  source 1..75: mol_type = other DNA
atgagcaacattattaagcaacttgaacaagagcagatgaagcaggacgtaccttccttccgtccgggtgatacc

SEQ ID NO: 167497 - DNA, 75 bp, synthetic construct
  source 1..75: mol_type = other DNA
aaacgctgaatttctttgcctggatggaacaaattgatcaggctacacctgtaacgccaggcgcagttacggcga

SEQ ID NO: 167498 - DNA, 75 bp, synthetic construct
  source 1..75: mol_type = other DNA
acctccagcgaacaaacgttaaatttctttgcgtggatggaacaaattgatcaggctacgcccgtaacaccaggt

SEQ ID NO: 167499 - DNA, 75 bp, synthetic construct
  source 1..75: mol_type = other DNA
cagaaatagtgctcaatattctaccggaaggccagaaaggagcgtttaccaaagaggatggcgagaaggtcattg

SEQ ID NO: 167500 - DNA, 75 bp, synthetic construct
  source 1..75: mol_type = other DNA
ctgaagtcgtgctggatattcttcccgatgcgcagaaaagcgcgttcacgaaagaggacggtgagaaggtagttg

SEQ ID NO: 167501 - DNA, 75 bp, synthetic construct
  source 1..75: mol_type = other DNA
ttaatactgacccagcttgttatggcgggactggcagactatcagttcggttgttacagacgccttcagtcctga

SEQ ID NO: 167502 - DNA, 75 bp, synthetic construct
  source 1..75: mol_type = other DNA
tgagttggtcaaacttatcgcagatatggggattacagtacgggcgctgctgcgtaaaaatgtcgaaccttatga

SEQ ID NO: 167503 - DNA, 75 bp, synthetic construct
  source 1..75: mol_type = other DNA
ctcaccagcaactgctggcggcccagggacgctactggcagatgtatcaactgcaacttgcgggcgaagagctgg

SEQ ID NO: 167504 - DNA, 75 bp, synthetic construct
  source 1..75: mol_type = other DNA
tcccgcgtcactaatgacactgaagtgatccgcgatctctacgttaccgtagtggcaactgtcctgcgcagtacc

SEQ ID NO: 167505 - DNA, 75 bp, synthetic construct
  source 1..75: mol_type = other DNA
gacggcacaaaaagggatagtccagctcagtagtgccaccaacagcacgtctgaaacgcaggctgcaacgccgaa

SEQ ID NO: 167506 - DNA, 75 bp, synthetic construct
  source 1..75: mol_type = other DNA
accatgactaacgcgcttgcgggtaagcaaccgaaagatgccaccctgacggcgctggccgggcttgctactgcg

SEQ ID NO: 167507 - DNA, 75 bp, synthetic construct
  source 1..75: mol_type = other DNA
cgggagatgttggtgcatatacgcgggcagaatgtaactcaaggtttattacaggtattcgccttggcggtctgt

SEQ ID NO: 167508 - DNA, 75 bp, synthetic construct
  source 1..75: mol_type = other DNA
tcagcagtttcgccagcaggcgcgatttggcgaacgtatgggcgaggccagtcgttcgcactatatggcgcggat

SEQ ID NO: 167509 - DNA, 75 bp, synthetic construct
  source 1..75: mol_type = other DNA
tgcctattttgctctgcgtaaacgaatcacaaaaccggctcatcatacctggcgcagctacgcaatgttcatgct

SEQ ID NO: 167510 - DNA, 75 bp, synthetic construct
  source 1..75: mol_type = other DNA
tgtaccggcatgtgacagacaatttttactgggtagcgcttcctctgactacggtaaatggcgtctctcagtttc

SEQ ID NO: 167511 - DNA, 75 bp, synthetic construct
  source 1..75: mol_type = other DNA
gaagtcgccagtagaaaaaaacgtcgtttttcggttttattcattgactgggaagcccaatatcagtgcacgatt

SEQ ID NO: 167512 - DNA, 75 bp, synthetic construct
  source 1..75: mol_type = other DNA
ggccggtattccgttgcaccggcctcgttctgtcaaacaggccagagaagtggctgacggtattctcaggcgtgt

SEQ ID NO: 167513 - DNA, 75 bp, synthetic construct
  source 1..75: mol_type = other DNA
ggccggtattccgttgcatcggccccgttctgtcaaacaggtcagagaagtggctgactgtattctcaggcgtgt

SEQ ID NO: 167514 - DNA, 75 bp, synthetic construct
  source 1..75: mol_type = other DNA
agcgaagcgatgaacgatgcgttctgggacgagctgttgaaagtgcgtggcgaagtgaacaaagtcattgagcaa

SEQ ID NO: 167515 - DNA, 75 bp, synthetic construct
  source 1..75: mol_type = other DNA
tttatgacgtcacgcatgacaaaaaatggctggatcgcgccattcgcgtggcttccgtgattatccacgatgtcg

SEQ ID NO: 167516 - DNA, 75 bp, synthetic construct
  source 1..75: mol_type = other DNA
cggccctggaagcccgttgcgaacaaccgccagcatggctgctagaagatgccaaaggtctgtttaacgccaccg

SEQ ID NO: 167517 - DNA, 75 bp, synthetic construct
  source 1..75: mol_type = other DNA
tgctgcattgcctggtgatcccgcgtatcccgttagcgcccggcatggctccagcggttgcagcgggtctgctgg

SEQ ID NO: 167518 - DNA, 75 bp, synthetic construct
  source 1..75: mol_type = other DNA
catcgcgcagctgtagcatctggtgccaatgccagaaccaaggagccaggaaagtttctttccagccaacaaact

SEQ ID NO: 167519 - DNA, 75 bp, synthetic construct
  source 1..75: mol_type = other DNA
tggtatccgcctgacggctaatcaggcatatcaccagatggtgaagctggggatcgtcgagcagcgcgaacgata

SEQ ID NO: 167520 - DNA, 75 bp, synthetic construct
  source 1..75: mol_type = other DNA
tgctgcattgcctggtgatcccgcgtatcccgttagcgccaggcctggctccggcagttgcagcgggtctgctgg

SEQ ID NO: 167521 - DNA, 75 bp, synthetic construct
  source 1..75: mol_type = other DNA
aaagggcttgagatggcactgtatagaacgcggcaaaaccgaaaaaatgtattgcacaatacgcatgataagagt

SEQ ID NO: 167522 - DNA, 75 bp, synthetic construct
  source 1..75: mol_type = other DNA
accaccatgactaacgcgcttgcgggtaagcaaccgaaagatgccaccctgacggcgctggccggacttactact

SEQ ID NO: 167523 - DNA, 75 bp, synthetic construct
  source 1..75: mol_type = other DNA
tctttgcctggatggaacaaattgatcaggttacaccagtaactccaggcgcagttacggctaacgcgacctacg

SEQ ID NO: 167524 - DNA, 75 bp, synthetic construct
  source 1..75: mol_type = other DNA
atgttgcacgtttattccgttgctgcggcgatgggtcgacctggcgcttactcgttggttgatcacggtatcaaa

SEQ ID NO: 167525 - DNA, 75 bp, synthetic construct
  source 1..75: mol_type = other DNA
atgcacgcagtggaagctttcttaattgtttatgacgtaacgcatgacaaaaaatggctggatcgcgcgattcgc

SEQ ID NO: 167526 - DNA, 75 bp, synthetic construct
  source 1..75: mol_type = other DNA
gtgcagacccgatactcaacaataccagcactggagaagccaccggtgtcggtgtgcgtttaatgaataaggatc

SEQ ID NO: 167527 - DNA, 75 bp, synthetic construct
  source 1..75: mol_type = other DNA
cccaactccggataacagcgagccatcaacaccagcggatagcgttaacgattactcattgcaagcgtggagcgg

SEQ ID NO: 167528 - DNA, 75 bp, synthetic construct
  source 1..75: mol_type = other DNA
gtgtaaatattgaaaatagtgcaataattgttaaccgtagtaatcatcctgctctacttgagggactttctttta

SEQ ID NO: 167529 - DNA, 75 bp, synthetic construct
  source 1..75: mol_type = other DNA
gctaatcaggcatatcaccagatggtgaagctggggatcgttgaacaacgcgaacgatacagccgtaccgcgatt

SEQ ID NO: 167530 - DNA, 75 bp, synthetic construct
  source 1..75: mol_type = other DNA
aataaagaacgtttcaagtttggaaatggtgtacattttttggcacctgaagcaatgcaattaattaacgatttt

SEQ ID NO: 167531 - DNA, 75 bp, synthetic construct
  source 1..75: mol_type = other DNA
tgcacaggtcacaattctgcagagcatcgataacccgcggcttatttcgctgatagagcactatatccagaacta

SEQ ID NO: 167532 - DNA, 75 bp, synthetic construct
  source 1..75: mol_type = other DNA
ctgccacaccgattactccagaccagcaacgtatccgcgagctggaaaagcaggttcgccgcctggaggaacaaa

SEQ ID NO: 167533 - DNA, 75 bp, synthetic construct
  source 1..75: mol_type = other DNA
gcaacgtattcgcgagctggaaaagcaggttcgccgactggaggaacaaaatacgatattaaaaaagctaccgcg

SEQ ID NO: 167534 - DNA, 75 bp, synthetic construct
  source 1..75: mol_type = other DNA
aactgccaggtaagcgaaaccgacatcccaaacgtatttgccgtgagggtgaattatctactttatcgggcacaa

SEQ ID NO: 167535 - DNA, 75 bp, synthetic construct
  source 1..75: mol_type = other DNA
taatgacaccaaagaccagctggaacggcgaatcgcccgtctggaaacgggtatggcctgggcagaagaaccgcc

SEQ ID NO: 167536 - DNA, 75 bp, synthetic construct
  source 1..75: mol_type = other DNA
tctctccggagtttaagcaggaatgcgcccaacttatcgttgataaaggttactcataccgggaagccagtgaag

SEQ ID NO: 167537 - DNA, 75 bp, synthetic construct
  source 1..75: mol_type = other DNA
gtcgcgcaacgtgggaaacacagacgacaacccgtcgcctgacctttgagatccgcgtatataacgccactggcg

SEQ ID NO: 167538 - DNA, 75 bp, synthetic construct
  source 1..75: mol_type = other DNA
ttgcgcagcaaattcagtcaaccaactataaagctggttcggctggctggatgctaaataaaaacggcaatgcgg

SEQ ID NO: 167539 - DNA, 75 bp, synthetic construct
  source 1..75: mol_type = other DNA
gcacatattcaggtttatggcttggtgggtttaaaaaggcgtataccaataaccctgcatggcttttccggtatc

SEQ ID NO: 167540 - DNA, 75 bp, synthetic construct
  source 1..75: mol_type = other DNA
gcgcgtattccggtttatggcttggtggctttaaaaaagcgtataccaataaccctgcatggcttttccggtatc

SEQ ID NO: 167541 - DNA, 75 bp, synthetic construct
  source 1..75: mol_type = other DNA
gaaaccagtgcaagaactgaagctatcagcagtgttaacgcctcaataaacagcattgacactaaggttacaagc

SEQ ID NO: 167542 - DNA, 75 bp, synthetic construct
  source 1..75: mol_type = other DNA
taaggggtaacgtcattgttaaaggcaatcaaaatttcgatgtacgcaatagtgacggacgggtaattattaaca

SEQ ID NO: 167543 - DNA, 75 bp, synthetic construct
  source 1..75: mol_type = other DNA
aaacaccaacattattgaacgataacctgtatcacaaacagttttatcgtgttttagatattctcagcgaagggc

SEQ ID NO: 167544 - DNA, 75 bp, synthetic construct
  source 1..75: mol_type = other DNA
tgcatcctttcgccaggcactgttagatatcagtggtgaaaacgcaaattacacagcaggttgtcatgagttaag

SEQ ID NO: 167545 - DNA, 75 bp, synthetic construct
  source 1..75: mol_type = other DNA
ttgcatcgcgttccttctgcggtcagctataccgtgcgtcagctggaagagtggctgggggggggggggtttttt

SEQ ID NO: 167546 - DNA, 75 bp, synthetic construct
  source 1..75: mol_type = other DNA
tgtcaacgcaaaggtaactcacgacacaccaataatcaggactgtttcagatccaaacgttacccgcgtcaggtt

SEQ ID NO: 167547 - DNA, 75 bp, synthetic construct
  source 1..75: mol_type = other DNA
gtattcgcgggcgtaatgacactggcatgaagggcgcggaaagtattgtggatctggttattggtgcaccagcgg

SEQ ID NO: 167548 - DNA, 75 bp, synthetic construct
  source 1..75: mol_type = other DNA
attgactcaggaatctattcattaggtattcgcgggcgtaatgacactggcatgaagggcgcggaaagtattgtg

SEQ ID NO: 167549 - DNA, 75 bp, synthetic construct
  source 1..75: mol_type = other DNA
ggtgctggaaattctgccagatgcgcaaaaaggcgcattctccaaggaagatggcgagaaagtggttgatgaagc

SEQ ID NO: 167550 - DNA, 75 bp, synthetic construct
  source 1..75: mol_type = other DNA
cagaagtggtgctggaaattctgccagatgcgcaaaaaggcgcattctccaaggaagatggcgagaaagtggttg

SEQ ID NO: 167551 - DNA, 75 bp, synthetic construct
  source 1..75: mol_type = other DNA
gccaaactgcgatcgattcagatgccattttgcacaaaatcccggcaacggtaatcgctcgcgagatcagagacc

SEQ ID NO: 167552 - DNA, 75 bp, synthetic construct
  source 1..75: mol_type = other DNA
aaattaaaatcctgcataagcagggaatgagcagtcgcgctatcgcaaaaaaactgggcatctcccgcaacaccg

SEQ ID NO: 167553 - DNA, 75 bp, synthetic construct
  source 1..75: mol_type = other DNA
gctgatcccggaagagctggtgcctgccgtacagcaagctgtcgctgaacaatatgaagaaaaaacaggtattaa

SEQ ID NO: 167554 - DNA, 75 bp, synthetic construct
  source 1..75: mol_type = other DNA
aaacatctgcaactgcgcaataacagctttggtggcgtggacatggtgatcagcggcaacgtgccgcagggtgcc

SEQ ID NO: 167555 - DNA, 75 bp, synthetic construct
  source 1..75: mol_type = other DNA
aggaagcagaaaaccagtttgtaggctgtaactgtggaatcatggatcaactgatttccgcgctcggcaagaaag

SEQ ID NO: 167556 - DNA, 75 bp, synthetic construct
  source 1..75: mol_type = other DNA
cagcaacgtatccgcgaacaggaaaagcaggttcgccgcctggaggaacaaaatacgatattaaaaaaggctacc

SEQ ID NO: 167557 - DNA, 75 bp, synthetic construct
  source 1..75: mol_type = other DNA
cgagagcgccagggtattacgccctctgccacaccctttactccagaccagcaacgtatccgcgagctggaaaag

SEQ ID NO: 167558 - DNA, 75 bp, synthetic construct
  source 1..75: mol_type = other DNA
ggcgcacaaatcgcgcttaacggccaggaagcagaaaaccagtttgttggctgtaactgcgggatcatggatcag

SEQ ID NO: 167559 - DNA, 75 bp, synthetic construct
  source 1..75: mol_type = other DNA
tcaaggttacgttggatcattacgttcgcgagagcaacttcacacagctggatgatgagctgaaaaactggattg

SEQ ID NO: 167560 - DNA, 75 bp, synthetic construct
  source 1..75: mol_type = other DNA
gcagcgtgatgcttaccagaccgggcagcaccggttccatccttccctgtggcagttcggcaaagagatgggctt

SEQ ID NO: 167561 - DNA, 75 bp, synthetic construct
  source 1..75: mol_type = other DNA
atgagcaacattaccatttatcacaacccggcctgcggcacgtcgcgtaatacgctggagatgatccgcaacagc

SEQ ID NO: 167562 - DNA, 75 bp, synthetic construct
  source 1..75: mol_type = other DNA
cgttctgccctgcgcgattgattatcaaaccgtgatcagttgtgcaccacgcgatgaccgtaaagttcgcgtgat

SEQ ID NO: 167563 - DNA, 75 bp, synthetic construct
  source 1..75: mol_type = other DNA
atgagtctgaaagaaaaaacgcaatctctgtttgccaacgcatttggctaccctgccactcataccattcaggcg

SEQ ID NO: 167564 - DNA, 75 bp, synthetic construct
  source 1..75: mol_type = other DNA
ctcactgggcaccaaagcagtctccatgccgaaaggtgtggctgtggtcatcatcaacagtaacttcaaacgtac

SEQ ID NO: 167565 - DNA, 75 bp, synthetic construct
  source 1..75: mol_type = other DNA
atcacagcgaacgccgcgcccgccgtgatgcgcagcgtattgaaaatggtatgaaacgtgccgtgatgctctttg

SEQ ID NO: 167566 - DNA, 75 bp, synthetic construct
  source 1..75: mol_type = other DNA
tggcgcagcgtatgggcaaacgcgcgtttttgattgatgatgcgacagatatccaggaagagtgggtgaaagacg

SEQ ID NO: 167567 - DNA, 75 bp, synthetic construct
  source 1..75: mol_type = other DNA
gaagtggaagggacgatgggccagtacagtaacccggaagggggaatgtatctggtcgaatcgccggacgatgtg

SEQ ID NO: 167568 - DNA, 75 bp, synthetic construct
  source 1..75: mol_type = other DNA
ctcacataaagcacatgaattaaatcagagtgactggccatttggtcaggtatggtttgagcagcgccaatattg

SEQ ID NO: 167569 - DNA, 75 bp, synthetic construct
  source 1..75: mol_type = other DNA
ttattgaatatcagccactaaaaagatggttgaataatgactatgttgaaatctatctttcgagaataaatgttc

SEQ ID NO: 167570 - DNA, 75 bp, synthetic construct
  source 1..75: mol_type = other DNA
ttgagggcgaacggtgcaaacggtgtcatacagtatcgctataaaatgaactgtctttcttgcaggactaccagt

SEQ ID NO: 167571 - DNA, 75 bp, synthetic construct
  source 1..75: mol_type = other DNA
gattctggttgtcacgaataccgaagccatcacgctgaaaatcgacccgtcggtggtactggcgacccgtaaata

SEQ ID NO: 167572 - DNA, 75 bp, synthetic construct
  source 1..75: mol_type = other DNA
ggcgagtggctgaccatcatccgcgtgaacaaaagcaacggggcggtgagttcagtcacaacgccgaattacagt

SEQ ID NO: 167573 - DNA, 75 bp, synthetic construct
  source 1..75: mol_type = other DNA
gagcacagcgtgaagccgcgcaaaaaaatgcagtggtggagcaaaatgtggagcaaattcaggagccacaaaaaa

SEQ ID NO: 167574 - DNA, 75 bp, synthetic construct
  source 1..75: mol_type = other DNA
cgaaaagccgtgatttgacggtatttgacgccacctgtccgctggtgaccaaagtgcatatggaagtcgcccgcg

SEQ ID NO: 167575 - DNA, 75 bp, synthetic construct
  source 1..75: mol_type = other DNA
cgctatcagcattgttgaaaacgcgctggccatttacggcgcaccgatatatgtccgtcacgaagtggtacataa

SEQ ID NO: 167576 - DNA, 75 bp, synthetic construct
  source 1..75: mol_type = other DNA
tcatacccagtatgcacagaaacataatccgacatttaccggagaaccaaaagcgccgacgcctgccgcaggaaa

SEQ ID NO: 167577 - DNA, 75 bp, synthetic construct
  source 1..75: mol_type = other DNA
aggtcagccatttccgcccggatctggtggtgtcggcttacagcaacaccgggcaaaatccgtgggcggagatga

SEQ ID NO: 167578 - DNA, 75 bp, synthetic construct
  source 1..75: mol_type = other DNA
ggcgattaccacgccggagatcgcagcctctgcgcttacgccggactgcgtgaactaccgggtggtcggcctgtg

SEQ ID NO: 167579 - DNA, 75 bp, synthetic construct
  source 1..75: mol_type = other DNA
acgagccggggcgctcagccagacgcatgactacaaggccggggcagtcatcgcccaacgcaccgccgatctggt

SEQ ID NO: 167580 - DNA, 75 bp, synthetic construct
  source 1..75: mol_type = other DNA
ccatgcgcaatatctggatggtcgccgtgaaatgatgcagtggtacgctgactacattgattcacttatggagaa

SEQ ID NO: 167581 - DNA, 75 bp, synthetic construct
  source 1..75: mol_type = other DNA
gcaaatgaaagtcctaggcaaccttatgtctctggtaacgcgagttcttgttctgactgcagtacgaactggaga

SEQ ID NO: 167582 - DNA, 75 bp, synthetic construct
  source 1..75: mol_type = other DNA
tttatggcatttggggagtgtttttattccttgcatcaatggagaaatttggtgatcttttcgcagtcggtacag

SEQ ID NO: 167583 - DNA, 75 bp, synthetic construct
  source 1..75: mol_type = other DNA
tgatagtaatccatattatgcgcgtgaagatcaaatggaggaaagcgatttaaaatttctccatcgactttgcca

SEQ ID NO: 167584 - DNA, 75 bp, synthetic construct
  source 1..75: mol_type = other DNA
tgatgctcctctttatgcgacattcagacaggggagacatcgataaacatcatctgcgggcaaatagttacacag

SEQ ID NO: 167585 - DNA, 75 bp, synthetic construct
  source 1..75: mol_type = other DNA
gccgccctaaaaatgcctggaccctcgaaagtctgggtctggtagccattcactatccattcattgataaagtta

SEQ ID NO: 167586 - DNA, 75 bp, synthetic construct
  source 1..75: mol_type = other DNA
tcgcctggcgcagcggcgtaccggaaatgttttacccggaggcgttaacgccaggactccgtgaggtgagtaaag

SEQ ID NO: 167587 - DNA, 75 bp, synthetic construct
  source 1..75: mol_type = other DNA
tccggtcacggaaggcgacagcaataaccaccagtggcaaatgctggctcccaaaaaatctgcctcctgcgcgat

SEQ ID NO: 167588 - DNA, 75 bp, synthetic construct
  source 1..75: mol_type = other DNA
ctcaagagatgtttgagcaaaaagatcctatcgctacgcttacgttaggtattgatgagataatcagatatagct

SEQ ID NO: 167589 - DNA, 75 bp, synthetic construct
  source 1..75: mol_type = other DNA
tgttctggctggcaccgattgtcttctcgttgatcctgtcaccgtttgtttcggtgatttccagccgtgccaccg

SEQ ID NO: 167590 - DNA, 75 bp, synthetic construct
  source 1..75: mol_type = other DNA
tcttcatgggtgagttattacgaagggataaagctcaatccactggcattgcgtaaaccggatgcggcttcgcaa

SEQ ID NO: 167591 - DNA, 75 bp, synthetic construct
  source 1..75: mol_type = other DNA
tcatggacagcgcataaatctacagacctcctgactttctgcgtcctggtgctgcgcaacggcttcaccgtcacc

SEQ ID NO: 167592 - DNA, 75 bp, synthetic construct
  source 1..75: mol_type = other DNA
ttgcgagggggcagtaacgatcgtcaggggagcaataaattgtgccacggtcatgtgcataaagatctgtggttg

SEQ ID NO: 167593 - DNA, 75 bp, synthetic construct
  source 1..75: mol_type = other DNA
tctccattggttaaatcaccaggccgatcagctggcggataaacttaaacgccttactcagggaaccgtactgat

SEQ ID NO: 167594 - DNA, 75 bp, synthetic construct
  source 1..75: mol_type = other DNA
agtagtcatgaccgtatcagtgcctgtttcccgctggatacgtatccgcgcccggcagaaaaaagccagtatgaa

SEQ ID NO: 167595 - DNA, 75 bp, synthetic construct
  source 1..75: mol_type = other DNA
tgctggcagaatattctcattttgtcccggagtgggtcatgctggtgctctttttgctagcattcttcctctatg

SEQ ID NO: 167596 - DNA, 75 bp, synthetic construct
  source 1..75: mol_type = other DNA
cccggcgttgatggcgtgaacaaaacaatgctacaggccagactggctgttgagctgcaactcctcagggatgaa

SEQ ID NO: 167597 - DNA, 75 bp, synthetic construct
  source 1..75: mol_type = other DNA
ggctgaacatggataagactaaaatcacccatgttaatgacggctttatctttctggggcacaggatcattcgca

SEQ ID NO: 167598 - DNA, 75 bp, synthetic construct
  source 1..75: mol_type = other DNA
tacccgaaggtaatccctatctgaggacggagaccagaaacacgtatacatcgcgctttacagaagtggcaatgg

SEQ ID NO: 167599 - DNA, 75 bp, synthetic construct
  source 1..75: mol_type = other DNA
gtccagctacttcgatacagtacatcatcgactgctgatgaaagcagtacgccgcaggatcagggatccacgctt

SEQ ID NO: 167600 - DNA, 75 bp, synthetic construct
  source 1..75: mol_type = other DNA
gcaaacgcagtcgttatggcgagatgcgagtggtctcaacgatcccgcaggagaaagccagaaacttcgccgcat

SEQ ID NO: 167601 - DNA, 75 bp, synthetic construct
  source 1..75: mol_type = other DNA
cttacagagaatacaacagagattacttcagagagtactacagagagtaaaaacactattggcgcatccgctgac

SEQ ID NO: 167602 - DNA, 75 bp, synthetic construct
  source 1..75: mol_type = other DNA
agtgttctacaaccgggcccggcgccacagtcacctccgcggcgtcagtccggaggccttcgaacaggcctcgtc

SEQ ID NO: 167603 - DNA, 75 bp, synthetic construct
  source 1..75: mol_type = other DNA
tgcctaaaaccaaaaatgcaaagggagaggcaactcgctcgattgttcacaacaatccgggtacattcgatatgt

SEQ ID NO: 167604 - DNA, 75 bp, synthetic construct
  source 1..75: mol_type = other DNA
actttcttacatttttgatggtatttctggtatcgttagttcttattagtgcaaaaataaagtcgaatggcctgt

SEQ ID NO: 167605 - DNA, 75 bp, synthetic construct
  source 1..75: mol_type = other DNA
actttcatacatttttgatggtttttctggtatcgttagttcttattagtgcaaaaataaagtcgaatggcctgt

SEQ ID NO: 167606 - DNA, 75 bp, synthetic construct
  source 1..75: mol_type = other DNA
ttctgtatttcttgttcctgtatatgaagagattgtatttcgagggtgtctttttaactcttttaaattctggtt

SEQ ID NO: 167607 - DNA, 75 bp, synthetic construct
  source 1..75: mol_type = other DNA
aacgctgtcgcgcgagctggcactggatgcgctgctgatggcagtctggcggcgtaagcctgcagaaaacgtcat

SEQ ID NO: 167608 - DNA, 75 bp, synthetic construct
  source 1..75: mol_type = other DNA
actttcgtacatttttgatgttctttctggtatcgttagttcttattagtgcaaaaataaagtcgaatggcctgt

SEQ ID NO: 167609 - DNA, 75 bp, synthetic construct
  source 1..75: mol_type = other DNA
actttcctacatttttgatgttgtttctggtatcgttagttcttattagtgcaaaaataaagtcgaatggcctgt

SEQ ID NO: 167610 - DNA, 75 bp, synthetic construct
  source 1..75: mol_type = other DNA
tgttcgtgctgatgaatcgctcaatcgctttatgggactggtgtctcagcgcaaactgagatatgcagatgataa

SEQ ID NO: 167611 - DNA, 75 bp, synthetic construct
  source 1..75: mol_type = other DNA
tttcccattttatcggtatgccatgacgtttgaagaatttgttccggcattttcttcctggtttgcagacaataa

SEQ ID NO: 167612 - DNA, 75 bp, synthetic construct
  source 1..75: mol_type = other DNA
tgctgccgggctttaccttaagcctcggcaccagtctgctgtttgtttgcctgattttgctgctgccgctctccg

SEQ ID NO: 167613 - DNA, 75 bp, synthetic construct
  source 1..75: mol_type = other DNA
tcctaacccgttatcgcttcccaggccgcacgctgcttgatgcgctgatggatttaccctttgcgctgccaacgg

SEQ ID NO: 167614 - DNA, 75 bp, synthetic construct
  source 1..75: mol_type = other DNA
gttttcggcctgcttatggcgtggattttaacccgctaccgctttccgggtcgcacgctgctcgatgcgttgatg

SEQ ID NO: 167615 - DNA, 75 bp, synthetic construct
  source 1..75: mol_type = other DNA
ggcgattgatctgtctttgcctctggcggacaacttgcgtaacgtggcgcgggcgttaggtaaaccgctggacaa

SEQ ID NO: 167616 - DNA, 75 bp, synthetic construct
  source 1..75: mol_type = other DNA
tcacgggcggcgagttggtgaacggtatccaacagacggcgaatggagtgcggacgcagacattactgatcggcg

SEQ ID NO: 167617 - DNA, 75 bp, synthetic construct
  source 1..75: mol_type = other DNA
agccggtgctgcaagtgtcgcgctgacgccgttcgtcggcgtgccggtgggtattttcgtggggatttatgtctt

SEQ ID NO: 167618 - DNA, 75 bp, synthetic construct
  source 1..75: mol_type = other DNA
cggaaattgctgaactggcggaaacgtatccggaagtgaaagcttttaccgatttctttgcacgctcaacgcgcg

SEQ ID NO: 167619 - DNA, 75 bp, synthetic construct
  source 1..75: mol_type = other DNA
gtgattgataaatccgcctttgtgcatccaaccgccattgtggaagagggcgcgtcgattggcgcgaacgcacac

SEQ ID NO: 167620 - DNA, 75 bp, synthetic construct
  source 1..75: mol_type = other DNA
ggctgcctggccgcaaaccggatgtggcgacaaaaataaaatcgatggcctggcggtcaccgcgatgcgccaggc

SEQ ID NO: 167621 - DNA, 75 bp, synthetic construct
  source 1..75: mol_type = other DNA
ccttttggtcctgaacagcgtaagggactgtggctttaccatgttctggagccggaaacctgggccaggatgtgt

SEQ ID NO: 167622 - DNA, 75 bp, synthetic construct
  source 1..75: mol_type = other DNA
cgtcatggcggcgtatatgtaagacgctcataaagaatgatttctggtgccggaccctgtccttcagcccaaaca

SEQ ID NO: 167623 - DNA, 75 bp, synthetic construct
  source 1..75: mol_type = other DNA
ggaatggatatgctgggaacccggtgtgacatgggttcgccagccaccggaagaagctattactgatatggagta

SEQ ID NO: 167624 - DNA, 75 bp, synthetic construct
  source 1..75: mol_type = other DNA
tgcctattttgccctgcgtaagcgtatcacgaagccgcctcatcatacctggcgtagctatgcgatgttcctgct

SEQ ID NO: 167625 - DNA, 75 bp, synthetic construct
  source 1..75: mol_type = other DNA
agcctgagtggatatgctgggagcttggtgttacttgggttcgccatccaccagaatatgctattacggatatgg

SEQ ID NO: 167626 - DNA, 75 bp, synthetic construct
  source 1..75: mol_type = other DNA
ttactgggtggcccttcccctgaccacagtaaacggtgtttctcaatttcagccagagtggatatgctgggaacc

SEQ ID NO: 167627 - DNA, 75 bp, synthetic construct
  source 1..75: mol_type = other DNA
actgaatcgttttatgggactggtatccggacgtaagctccgttatgcggaggataaaccctggaccacggcatc

SEQ ID NO: 167628 - DNA, 75 bp, synthetic construct
  source 1..75: mol_type = other DNA
cagccaccggaagaggccattacggatatggcgtattttcccttttaccggtatgccatgacgtttgaagaattt

SEQ ID NO: 167629 - DNA, 75 bp, synthetic construct
  source 1..75: mol_type = other DNA
cgctggtatcagacgcggggcttcccggatgacatcccggatgaacaggagaatgacctggggagccgggatatc

SEQ ID NO: 167630 - DNA, 75 bp, synthetic construct
  source 1..75: mol_type = other DNA
gaagatgccattacggatactgaatattttccgttttaccgttacgccatgacatttgaggaatttgtcccggcc

SEQ ID NO: 167631 - DNA, 75 bp, synthetic construct
  source 1..75: mol_type = other DNA
ctgggttgcgttgcctctgaccaccgtaaacggtgtttcccagtatcagccggaatgggtgtgctggaagaccgg

SEQ ID NO: 167632 - DNA, 75 bp, synthetic construct
  source 1..75: mol_type = other DNA
tcgaagccggagcatcatacctggcgcagttatgcgatgtttcttcttgatgtcatgccggagaaaacggcagag

SEQ ID NO: 167633 - DNA, 75 bp, synthetic construct
  source 1..75: mol_type = other DNA
gcgttgacgttaaccgtgtatactcgctcgatgaactggtgaggggaacgatatcctctttagcgctacgggcgt

SEQ ID NO: 167634 - DNA, 75 bp, synthetic construct
  source 1..75: mol_type = other DNA
tggcgaagaggtgggcaaaggcgatgggccagaagtcgatatcgcggttgatccgattgatggcaccaggatggt

SEQ ID NO: 167635 - DNA, 75 bp, synthetic construct
  source 1..75: mol_type = other DNA
gttcacagtcaggagttccgtactgaaaaagcctgtcgggatgccttcaccgcgctgaaaaaagaaaacgtgggg

SEQ ID NO: 167636 - DNA, 75 bp, synthetic construct
  source 1..75: mol_type = other DNA
gcagcagaggtagctcgcaggagaaaacgtcatttctctgtattgttcattgactgggaggctcagtatcagtgc

SEQ ID NO: 167637 - DNA, 75 bp, synthetic construct
  source 1..75: mol_type = other DNA
cgctcacggaggtgggcgacagcgacaggtcgatgtcctggctggcctgggagccatgtctgacaaatacggtaa

SEQ ID NO: 167638 - DNA, 75 bp, synthetic construct
  source 1..75: mol_type = other DNA
gggttgaggtcaaccgtgtgtactcgctcgacgaactggtgagagataaaaatatcctctttagcgccacgggtg

SEQ ID NO: 167639 - DNA, 75 bp, synthetic construct
  source 1..75: mol_type = other DNA
acattatggaaaattgccaccgggttgaacgtgccattttcaacatttatttctccgccgcagtccgctacgcct

SEQ ID NO: 167640 - DNA, 75 bp, synthetic construct
  source 1..75: mol_type = other DNA
cccatatggcacgtcgatggacagcaggttaccaggcagaccagcgtgcaagacttgaaaatcatgttttccctg

SEQ ID NO: 167641 - DNA, 75 bp, synthetic construct
  source 1..75: mol_type = other DNA
cagggagagtatggcctgcacattccgcaccattgcagaggaactgcttacccatatggcacgtcgatggacagc

SEQ ID NO: 167642 - DNA, 75 bp, synthetic construct
  source 1..75: mol_type = other DNA
ccttaattgcggagaaggtgctcgttttgctgccgacgtcatgcatatctatggtaatggcggcaagcaagccgt

SEQ ID NO: 167643 - DNA, 75 bp, synthetic construct
  source 1..75: mol_type = other DNA
aagcgatgttagggcagatcgagcgcaatgaatccagcccgacggtcgcgacattatggaaaattgccaccggga

SEQ ID NO: 167644 - DNA, 75 bp, synthetic construct
  source 1..75: mol_type = other DNA
ttatgatccacaactctgctttgaacacttctcgattcagatggcacctggtgcaataagtgaatcgacgcccca

SEQ ID NO: 167645 - DNA, 75 bp, synthetic construct
  source 1..75: mol_type = other DNA
accgaaaaaattcttaccggagaaaatgttttgcgtgccgcaatcgcccgcattgagtggatttttgaaacattt

SEQ ID NO: 167646 - DNA, 75 bp, synthetic construct
  source 1..75: mol_type = other DNA
ccgcgatatctggatatataatgccagaacccggtccatctataatcccctgtatgatctgatgtaccgtgccgg

SEQ ID NO: 167647 - DNA, 75 bp, synthetic construct
  source 1..75: mol_type = other DNA
tccctcaaccgctttatgggactggtgtctcagcgcaaactgagatatgccgatgataaaccctggaccacagcg

SEQ ID NO: 167648 - DNA, 75 bp, synthetic construct
  source 1..75: mol_type = other DNA
acaagataaaaacatattctctggatgatgaattgagtaatatctttggtcaagataattttcatattcatgatg

SEQ ID NO: 167649 - DNA, 75 bp, synthetic construct
  source 1..75: mol_type = other DNA
tgcagcagtaaaacgtgctggtattcgccgccgtaatccgtaccatacgcggcatacttttgcctgctggctgtt

SEQ ID NO: 167650 - DNA, 75 bp, synthetic construct
  source 1..75: mol_type = other DNA
tgtctcagcgcaaactgagatatgccgatgataaaccctggaccacagcgtcacctgaagggttttattacacta

SEQ ID NO: 167651 - DNA, 75 bp, synthetic construct
  source 1..75: mol_type = other DNA
aagaaccagtcaatgaatcaactattggcgcatccgctgacgcgtctgcaccagcgcgttccgcccgacaggaat

SEQ ID NO: 167652 - DNA, 75 bp, synthetic construct
  source 1..75: mol_type = other DNA
ccatctacaatcccctgtatgacctgatgtaccgtgccggcgtgccgttacgcaacatgcgtgtctgtgagcctt

SEQ ID NO: 167653 - DNA, 75 bp, synthetic construct
  source 1..75: mol_type = other DNA
ccatctacaatcccctgtatgacctgatgtaccgcgctggcgtgccgttacgtaacatgcgtgtctgtgaaccct

SEQ ID NO: 167654 - DNA, 75 bp, synthetic construct
  source 1..75: mol_type = other DNA
ccggatgaacaggagaatgacctggggagccgggatattccgtcctggcgacgtatctgtaagacactcataaag

SEQ ID NO: 167655 - DNA, 75 bp, synthetic construct
  source 1..75: mol_type = other DNA
cctgctggatgtgatgccggaaaaaacggcagaacattaccgcaacaagatagctgtctatctccgctggtatca

SEQ ID NO: 167656 - DNA, 75 bp, synthetic construct
  source 1..75: mol_type = other DNA
tttctactgggtggcattacctctgacaacagtgaatggtgtttcccagtttcagcctgaatggatatgctggga

SEQ ID NO: 167657 - DNA, 75 bp, synthetic construct
  source 1..75: mol_type = other DNA
ttcaaccagatctcagcgtctttcgaagcggtaaactcaagcatcacagaatggtcgcagaccatgacaacggcg

SEQ ID NO: 167658 - DNA, 75 bp, synthetic construct
  source 1..75: mol_type = other DNA
gggcttgtcgaacaaaaaactattctacatcaatcttatcaactcaaattttatttttctgataagttaaaagga

SEQ ID NO: 167659 - DNA, 75 bp, synthetic construct
  source 1..75: mol_type = other DNA
gccttgcagcacataagccattgtcggtaccgacaacgctgaaggcggggccgttgttgagttctgaaaaactga

SEQ ID NO: 167660 - DNA, 75 bp, synthetic construct
  source 1..75: mol_type = other DNA
gcaacgacggcgcggcgggaatgttggcgatgcgtcaggcgggggcatggacccttgcgcaaaacgaagcaagtt

SEQ ID NO: 167661 - DNA, 75 bp, synthetic construct
  source 1..75: mol_type = other DNA
gtgcacccaccgacatcgtgactcactggcacaatatcaactgggccaggtgccgtcgcgaggtcagaaggctgc

SEQ ID NO: 167662 - DNA, 75 bp, synthetic construct
  source 1..75: mol_type = other DNA
atttaatctgaaaccaaagatatattattcacatcacgacaaaccccaaaagaaaaagggaaagaaaaagggaaa

SEQ ID NO: 167663 - DNA, 75 bp, synthetic construct
  source 1..75: mol_type = other DNA
tataaaaaacaacgacataaaggatatcaataaagtttttgttaagataactaatgaaaataacagtggtcatac

SEQ ID NO: 167664 - DNA, 75 bp, synthetic construct
  source 1..75: mol_type = other DNA
aacaagggcaaggaacgcagttacttcatgaaattgcgctgatgttgccggagcttctggagcgttggattgaac

SEQ ID NO: 167665 - DNA, 75 bp, synthetic construct
  source 1..75: mol_type = other DNA
agtctcgacgatatgctgatgcgttttcaccgctgggcgcgcgatctcggcctggcaggtgcgagtctgcgcctg

SEQ ID NO: 167666 - DNA, 75 bp, synthetic construct
  source 1..75: mol_type = other DNA
tacgccgtggactctgcctgcgaaccgcgcaatctctattgcaccggatttcgactatgcgctggtgcagatcga

SEQ ID NO: 167667 - DNA, 75 bp, synthetic construct
  source 1..75: mol_type = other DNA
atgaagcaaccaggggaagaactgcaggatacactcacggagcttgatgaccgggcggttgtcgattatctgatt

SEQ ID NO: 167668 - DNA, 75 bp, synthetic construct
  source 1..75: mol_type = other DNA
gcagcgcagtctcaccgccgccagtagtctcgacgatatgctgatgcgtttccatcgctgggcgcgtgatttagg

SEQ ID NO: 167669 - DNA, 75 bp, synthetic construct
  source 1..75: mol_type = other DNA
tcgattatctaattaagaatcctgagttttttatccgcaatgcgcgtgcggtagaggcaattcgcgtaccgcacc

SEQ ID NO: 167670 - DNA, 75 bp, synthetic construct
  source 1..75: mol_type = other DNA
taatagccaaaaagctgcaaaaaccagtgaaactaacgcaaagacgagtgaaacaaaagcagcagccagcgagac

SEQ ID NO: 167671 - DNA, 75 bp, synthetic construct
  source 1..75: mol_type = other DNA
cgtttctatgacgaaaataataatcccatgccctcggaattgagtaaggatttattcaaaatcttgccatttttc

SEQ ID NO: 167672 - DNA, 75 bp, synthetic construct
  source 1..75: mol_type = other DNA
tcagtacagaagaatcaaaggataggacaagaaaaaaaatacaatataaagcttcaactgattcttatgctaatt

SEQ ID NO: 167673 - DNA, 75 bp, synthetic construct
  source 1..75: mol_type = other DNA
tggcgttgatcctcgggcgtatcggcagtatcggtaagctgtactggtttatgccgccaagcgccaacctcgcgc

SEQ ID NO: 167674 - DNA, 75 bp, synthetic construct
  source 1..75: mol_type = other DNA
taattgcagagaaagcagaactgtccaaaacccaagctaaagctgctctggagtccactctggctgcaattactg

SEQ ID NO: 167675 - DNA, 75 bp, synthetic construct
  source 1..75: mol_type = other DNA
cacagccttaaaaatccctgatggtatagagcttaatatagaaaaaacttatcctggattgaatacatcaataga

SEQ ID NO: 167676 - DNA, 75 bp, synthetic construct
  source 1..75: mol_type = other DNA
tctgccacctgccagtgaacgccacaacaggctggcaacttcgacacattgtgccgaaatccgaagggggactgg

SEQ ID NO: 167677 - DNA, 75 bp, synthetic construct
  source 1..75: mol_type = other DNA
caaacgtgagttactggcgctatatgaaatctcggatatgccagtcaaaagacacagacaaataaaaagcactgc

SEQ ID NO: 167678 - DNA, 75 bp, synthetic construct
  source 1..75: mol_type = other DNA
cagtcagccagagcacactgatatggcatctcaacccagtcctcaaaggctgggccagatactatcgtcatgttg

SEQ ID NO: 167679 - DNA, 75 bp, synthetic construct
  source 1..75: mol_type = other DNA
cgttttatgcatgataatgtaaaagatattaatatttataatttgtctgatgatacggctatttcttacgatgta

SEQ ID NO: 167680 - DNA, 75 bp, synthetic construct
  source 1..75: mol_type = other DNA
ggtaaaggaattcctgaaaagggtccgccagacgataaaagacaatccgacagtcagccagagcacattgatatg

SEQ ID NO: 167681 - DNA, 75 bp, synthetic construct
  source 1..75: mol_type = other DNA
cagtcatgaaatatggaaagcactatggcgctgggcatgtcgacgacacccaaagaaaggtacaggctggataag

SEQ ID NO: 167682 - DNA, 75 bp, synthetic construct
  source 1..75: mol_type = other DNA
atgcctggaatgggaaaaatgaaacatgtcagtttgactctgcaggttgagaacgacctgaaacatcagcttagt

SEQ ID NO: 167683 - DNA, 75 bp, synthetic construct
  source 1..75: mol_type = other DNA
aactggggggaagaagaaggacgtacctcaaaaattctgacagacccggtcaccattggcgagggcggtgatttt

SEQ ID NO: 167684 - DNA, 75 bp, synthetic construct
  source 1..75: mol_type = other DNA
tgaaaaagtgaccgatccgcaatacttcggcaccggtctgggcatcgctgtacgtccggataacaagctctgctg

SEQ ID NO: 167685 - DNA, 75 bp, synthetic construct
  source 1..75: mol_type = other DNA
tttttttccgcgaatccgacaacgaaattacggctatcaaggtcgatgatcgcgatattgcgttgacacaagggg

SEQ ID NO: 167686 - DNA, 75 bp, synthetic construct
  source 1..75: mol_type = other DNA
cttgccgcaaatgctggggtatgccgatatctcaccgactaacatcccgctgctgattaccgccggaagttctgc

SEQ ID NO: 167687 - DNA, 75 bp, synthetic construct
  source 1..75: mol_type = other DNA
tatattggccttgatgccatggcctcagacctgatccgcacttacatcccggcgcagtatcacaacgacccgcga

SEQ ID NO: 167688 - DNA, 75 bp, synthetic construct
  source 1..75: mol_type = other DNA
ttcctgaatctgatcaccgttgccgatgtcgatcagctgcaggggcaggtggttccggttggcagctctggcctg

SEQ ID NO: 167689 - DNA, 75 bp, synthetic construct
  source 1..75: mol_type = other DNA
gaacgcgggcagcgaagaggagtttttccagcgtattcaggcattcagcaacgaatctttcgcgctggacatgtt

SEQ ID NO: 167690 - DNA, 75 bp, synthetic construct
  source 1..75: mol_type = other DNA
ccaacccgaatggcgaagacgtcaacatcggctggcacaaaatcgttaaagaccgttcatctgagcagattattt

SEQ ID NO: 167691 - DNA, 75 bp, synthetic construct
  source 1..75: mol_type = other DNA
tacttgcatcctgtgcattcggcgcttctgccgcagagaaaatcaatttcggcgtctctgccacttatccgccat

SEQ ID NO: 167692 - DNA, 75 bp, synthetic construct
  source 1..75: mol_type = other DNA
ggatcagcacccggaagtgaaaactgtctcctatgacagttatcagaatgcctttatcgatctgaaaaatggccg

SEQ ID NO: 167693 - DNA, 75 bp, synthetic construct
  source 1..75: mol_type = other DNA
aaatgctggggcaatatgccgccgcgctggcaaagtcctacggcgtcgcgacaactaaacatcagtttactatta

SEQ ID NO: 167694 - DNA, 75 bp, synthetic construct
  source 1..75: mol_type = other DNA
tgcgttatccgaagggctcaaaaaacttctctttaaagtcatcatgcgaaaacgtaatatcctcacctatgagtt

SEQ ID NO: 167695 - DNA, 75 bp, synthetic construct
  source 1..75: mol_type = other DNA
acaactggggcgtcgataaatacgaactcggcaccgcttatggtcatattgcgcttagcgtcgataacgccgccg

SEQ ID NO: 167696 - DNA, 75 bp, synthetic construct
  source 1..75: mol_type = other DNA
ttttattttgtgacgaatgctgcaaaattgaatctgcactctgatgtaacttttatctgtttcagtgaagcatgc

SEQ ID NO: 167697 - DNA, 75 bp, synthetic construct
  source 1..75: mol_type = other DNA
ctggaaaccgctaacccggttggcccggacggcacttatctgccgggtacttacccgactctggatggcgttaac

SEQ ID NO: 167698 - DNA, 75 bp, synthetic construct
  source 1..75: mol_type = other DNA
gatctggttgaaagcgtaatgcagcgtatcggcgttagcgattacaccattcttggcacggtgaaaggtgccgag

SEQ ID NO: 167699 - DNA, 75 bp, synthetic construct
  source 1..75: mol_type = other DNA
tcatcatttcgcaggctgcagggaaagatgcaactttttgaaattgatcctgaaaaattcaacagaaacagatta

SEQ ID NO: 167700 - DNA, 75 bp, synthetic construct
  source 1..75: mol_type = other DNA
agacaattattaaagataaaggaacaatgtcagttttaacgaatgctaaagctgatgcgacccgaatagataacg

SEQ ID NO: 167701 - DNA, 75 bp, synthetic construct
  source 1..75: mol_type = other DNA
gacgaacttaccaaaagcgttatttttgaacatctcagtaatgtaagaaaaaccagttctgaagcagttcgtaaa

SEQ ID NO: 167702 - DNA, 75 bp, synthetic construct
  source 1..75: mol_type = other DNA
ttccagacggtacatggtctggatgctgatggtcagtacagctccgcgcgagatatggcgctgatcggccaggca

SEQ ID NO: 167703 - DNA, 75 bp, synthetic construct
  source 1..75: mol_type = other DNA
cgcgcgtttcatgaagccgggctgtggaaccactttcaggaaatcgccttcgatatgagcgcggtgctctcaact

SEQ ID NO: 167704 - DNA, 75 bp, synthetic construct
  source 1..75: mol_type = other DNA
caaccgttgccgctttccagcccggcactgttaattacccagcatatgccgcccggtttcacccgctcttttgcc

SEQ ID NO: 167705 - DNA, 75 bp, synthetic construct
  source 1..75: mol_type = other DNA
gcggtgatcgccgtggtgatcctcacctggatggttttctggatgcgcaaagtgtcgcgcaacgtcaaagtgcaa

SEQ ID NO: 167706 - DNA, 75 bp, synthetic construct
  source 1..75: mol_type = other DNA
atgcgtgaacaaatcaaacaggatatcgatctgattgagattttattttatctgaagaaaaaagattcgtgttat

SEQ ID NO: 167707 - DNA, 75 bp, synthetic construct
  source 1..75: mol_type = other DNA
atatgaaagccgtgcgctggacacgacgattgaaggcggaactcagtctctgaatagtaagtcaacggcaaaaaa

SEQ ID NO: 167708 - DNA, 75 bp, synthetic construct
  source 1..75: mol_type = other DNA
ttacttgtccgcgttacgaataagaagagcaaaactcgcacttataatatttattctctggatgtgtcttattct

SEQ ID NO: 167709 - DNA, 75 bp, synthetic construct
  source 1..75: mol_type = other DNA
taagccatctgaagctcagtcaaagctggccgatctgattgaagaccttctgaacagccagaaaatccagcagga

SEQ ID NO: 167710 - DNA, 75 bp, synthetic construct
  source 1..75: mol_type = other DNA
gcggcgctgctgcaaaccgctatgcagttgtgcccagatgccgacgacaacgacctaatccttgacctcaacggt

SEQ ID NO: 167711 - DNA, 75 bp, synthetic construct
  source 1..75: mol_type = other DNA
agatgcacaagtggcaaggaccggcatggcaaccgttccgtcttgccatcaatgtgtccgccagccaggttgggc

SEQ ID NO: 167712 - DNA, 75 bp, synthetic construct
  source 1..75: mol_type = other DNA
atcggtgtcggaatggggccaaccaaaacgttggcaaagtcaacacaatgggcttccaaagagtggccacagttt

SEQ ID NO: 167713 - DNA, 75 bp, synthetic construct
  source 1..75: mol_type = other DNA
ggcaccgacaacgctgaaagcggggccgttgttgagttctgaaaaactgattgcgattggtgcttcaacgggggg

SEQ ID NO: 167714 - DNA, 75 bp, synthetic construct
  source 1..75: mol_type = other DNA
gcgatagattttgtcaccaaaccgcaactgggtattcgcgaaggaatgctggcgtatagcgaaatgattgctgaa

SEQ ID NO: 167715 - DNA, 75 bp, synthetic construct
  source 1..75: mol_type = other DNA
taatatttattctctggatgtgtcttattctcgcattaactattcgttattttattatgttttctgatgcatgga

SEQ ID NO: 167716 - DNA, 75 bp, synthetic construct
  source 1..75: mol_type = other DNA
gccattgtcttactgataaacatttcaccggactatatggtacaaaagaactgtccatcaattatcatgctctct

SEQ ID NO: 167717 - DNA, 75 bp, synthetic construct
  source 1..75: mol_type = other DNA
acgcacggcgcaactactttgccaatggcgtaatccactttggcgggttcattggggcaacgcgttatgggcaat

SEQ ID NO: 167718 - DNA, 75 bp, synthetic construct
  source 1..75: mol_type = other DNA
cgcacaattactctctctggaagacgatctggaggtcattggtcagtacagtagtgccgcgcaggcttggtcagc

SEQ ID NO: 167719 - DNA, 75 bp, synthetic construct
  source 1..75: mol_type = other DNA
gcgaactcagcacgcacaccaccgcggcgtgggttaactatattcgcggattaaaagctcagtgggaagtggatc

SEQ ID NO: 167720 - DNA, 75 bp, synthetic construct
  source 1..75: mol_type = other DNA
tgcgactttcggcaatccacaaatcctgctgacggccttttgccagcagtacgcgacgcataaacatgatgttga

SEQ ID NO: 167721 - DNA, 75 bp, synthetic construct
  source 1..75: mol_type = other DNA
gggatatcgccctcaggatcaataatctttcgctgacccaccctgatgaggtttcacaggcattaagggaaggtg

SEQ ID NO: 167722 - DNA, 75 bp, synthetic construct
  source 1..75: mol_type = other DNA
gagaacagatatacgggcttcgattgaaccctcgtaagggcctcaatgcatttaccaccagcttgctacaaccag

SEQ ID NO: 167723 - DNA, 75 bp, synthetic construct
  source 1..75: mol_type = other DNA
gcttaatggcattgtactcacatcgaatgatgagacttcttttgtcttaattaatgaggggagcgaacaaaagcg

SEQ ID NO: 167724 - DNA, 75 bp, synthetic construct
  source 1..75: mol_type = other DNA
atagtatttaatctcttttttagactcttattcattctctcgaaaatgatattaatgtcacgacatataagaaag

SEQ ID NO: 167725 - DNA, 75 bp, synthetic construct
  source 1..75: mol_type = other DNA
ctaaaacatacgtctgtgtctgattttatttattatttaatggaaaaacacaacaaatatcccgtgtatgtatta

SEQ ID NO: 167726 - DNA, 75 bp, synthetic construct
  source 1..75: mol_type = other DNA
aattacatatcaaaaataaaggataatcataatacccccatggttattaaacaacgaaaatgttcaggaataaaa

SEQ ID NO: 167727 - DNA, 75 bp, synthetic construct
  source 1..75: mol_type = other DNA
ttacagtacagtacgttaataaaaaccagatgaactaccctacggcaatgggatcatctcaggtacaaatagccc

SEQ ID NO: 167728 - DNA, 75 bp, synthetic construct
  source 1..75: mol_type = other DNA
cagcaggtaaactaacaatagattcagataatagagctattgttatgtcttctgtcaaagcaatgggtagtttat

SEQ ID NO: 167729 - DNA, 75 bp, synthetic construct
  source 1..75: mol_type = other DNA
attaatgtcacaacacataaggaagatgcaaaaaaaactaaaacagatgcctgtatctgattttatttattattt

SEQ ID NO: 167730 - DNA, 75 bp, synthetic construct
  source 1..75: mol_type = other DNA
gatcctcaaacagatcgaagccctctccgggcatctggcctttatctttcccggtgagtacgaccaggataagtg

SEQ ID NO: 167731 - DNA, 75 bp, synthetic construct
  source 1..75: mol_type = other DNA
acccggcgctgtatctggatggtgagtttgccgcgccagaaaccagtcactacccggccctgtcgctggacaaac

SEQ ID NO: 167732 - DNA, 75 bp, synthetic construct
  source 1..75: mol_type = other DNA
atggcattaactgataccacgattcgcaagatcaaaccctccgacaaatctttcaaaatgacagacagttccgga

SEQ ID NO: 167733 - DNA, 75 bp, synthetic construct
  source 1..75: mol_type = other DNA
gccgtacagcaggggattatcaaatataacccggcgtatgatttagatggcgtcgtgacccctgttgtgacccag

SEQ ID NO: 167734 - DNA, 75 bp, synthetic construct
  source 1..75: mol_type = other DNA
aaacgtgcgcttctcttaccggggggcgaaaatgaaaatccagcacattgtgccgctgtcggatcaggcgattgc

SEQ ID NO: 167735 - DNA, 75 bp, synthetic construct
  source 1..75: mol_type = other DNA
gcagtggtggtctgattatcttgatgcaaacagtgacgggtatgtttcggcttatcagtatgcccgccgactgaa

SEQ ID NO: 167736 - DNA, 75 bp, synthetic construct
  source 1..75: mol_type = other DNA
atgcggagtcttatccgtggaaatcaaacgcgcactactggctggttaccaacctgtaactcagcaaatatagtg

SEQ ID NO: 167737 - DNA, 75 bp, synthetic construct
  source 1..75: mol_type = other DNA
gatgctcatccatattatgatggtttggggaaaggagttaagaaatattttaattttacaccattgcataattat

SEQ ID NO: 167738 - DNA, 75 bp, synthetic construct
  source 1..75: mol_type = other DNA
tctctcggtggttggcctgaaatccggcggcgattttatccatacactggtggatggcgaagggctaagctggat

SEQ ID NO: 167739 - DNA, 75 bp, synthetic construct
  source 1..75: mol_type = other DNA
gtgagtgagtcaaaatgccaaattaatggcaacaagatagaaccgtgcgcggcgttggcaaaatctctcgaatat

SEQ ID NO: 167740 - DNA, 75 bp, synthetic construct
  source 1..75: mol_type = other DNA
aatatgtcggtcgtggcgttgcaatgtgtttttgcccgttctgtggtgaaagtctgaaaacgtgggagaacagaa

SEQ ID NO: 167741 - DNA, 75 bp, synthetic construct
  source 1..75: mol_type = other DNA
aggtcattgatgaaaaaacgcctattctttttcagtggtttgaacctaatcctgaacgatataagaaagatgagg

SEQ ID NO: 167742 - DNA, 75 bp, synthetic construct
  source 1..75: mol_type = other DNA
cgacatccgctattcgtgaaacggtattttcggaagccaatctggaaaacctttcctttgctgctcaacatggta

SEQ ID NO: 167743 - DNA, 75 bp, synthetic construct
  source 1..75: mol_type = other DNA
cattaaagcgcctgaatttacccccagccagactgaagaaggcgacctgcattacggtcatggcgaagcgggcac

SEQ ID NO: 167744 - DNA, 75 bp, synthetic construct
  source 1..75: mol_type = other DNA
cacgcccgaagatgaaaatcaccggcattaaagcgcctgaatttacccccagccagactgaagaaggcgacctgc

SEQ ID NO: 167745 - DNA, 75 bp, synthetic construct
  source 1..75: mol_type = other DNA
agctcgaaacccaaaaatcaccataacgatgccggcagctgtacctcctgcggtagcgcgttcatttaaagtttt

SEQ ID NO: 167746 - DNA, 75 bp, synthetic construct
  source 1..75: mol_type = other DNA
tactggttggttttttatgtttaggtgtggcgacaatgatctatttacctttgttattgccgccaacaaagtcaa

SEQ ID NO: 167747 - DNA, 75 bp, synthetic construct
  source 1..75: mol_type = other DNA
gggaactggctggctttactggttggttttttatgtttaggtgtggcgacaatgatctatttaccttttgttatt

SEQ ID NO: 167748 - DNA, 75 bp, synthetic construct
  source 1..75: mol_type = other DNA
ggcgttgcgtgggctttctctggcggttatctggcggcgtcactggcgcaacggcacctggttttccgcaacgta

SEQ ID NO: 167749 - DNA, 75 bp, synthetic construct
  source 1..75: mol_type = other DNA
gtaacagtatggcggtggccgccgcaggttttgcgctgacgctccttacgctgccgtggctgggtaatcatggtt

SEQ ID NO: 167750 - DNA, 75 bp, synthetic construct
  source 1..75: mol_type = other DNA
tattcgacatgaaggcctctatattatctgtagtctgtgtgtcttttattttttctgcctggaggtggaaattag

SEQ ID NO: 167751 - DNA, 75 bp, synthetic construct
  source 1..75: mol_type = other DNA
ctccgtcgctgatgtgcgcggatttgctcaatttgagcgatgcggtaaaagcgctggaggagattggcgtcgatg

SEQ ID NO: 167752 - DNA, 75 bp, synthetic construct
  source 1..75: mol_type = other DNA
acaccaatagagtttaaatttcttcttcttttagctggagaacaccctgattatatactttgtaaaaggaatagc

SEQ ID NO: 167753 - DNA, 75 bp, synthetic construct
  source 1..75: mol_type = other DNA
tgtggctggcgttaaccgtctttctggcgttgcgcgggctttctctggcggctatctggcggcgtcactggcgca

SEQ ID NO: 167754 - DNA, 75 bp, synthetic construct
  source 1..75: mol_type = other DNA
tcagacggtattttgtctggtgcgttttctgcacgtcgcatggcaaaactcggtatcaacgacaatatggctgcg

SEQ ID NO: 167755 - DNA, 75 bp, synthetic construct
  source 1..75: mol_type = other DNA
acgaaaaggaattacggaaagaacagtccagactttcaaaatcaagagcaaatgatctcagagacataacagcat

SEQ ID NO: 167756 - DNA, 75 bp, synthetic construct
  source 1..75: mol_type = other DNA
aaagtcatgcaacgtggacgggatgcaaccagtgtggttgctctgacgatgacctcaacgcaacacattccggcg

SEQ ID NO: 167757 - DNA, 75 bp, synthetic construct
  source 1..75: mol_type = other DNA
gcatttcccgtggtcacagcctgtcatgtaccacatctgcgtcgaactgcgccaccgtagcattgagcgccagtt

SEQ ID NO: 167758 - DNA, 75 bp, synthetic construct
  source 1..75: mol_type = other DNA
cggcctactattcagagattatccgtgctggtattcaaagtatttctcgtggtcagtcgagcgccgcgctggcgt

SEQ ID NO: 167759 - DNA, 75 bp, synthetic construct
  source 1..75: mol_type = other DNA
ttcagccgccgacaacctggatttttaatgacaccaaagaccagctggaacggcgaatcgcccgtctggaaacgg

SEQ ID NO: 167760 - DNA, 75 bp, synthetic construct
  source 1..75: mol_type = other DNA
tgctgtgggttaagctggaaggaaaaccgcttccgtcacagatgccgacactgaaatgggcctgtctgaaactgg

SEQ ID NO: 167761 - DNA, 75 bp, synthetic construct
  source 1..75: mol_type = other DNA
cagggtggtatcagtgaagaaacacaaaatgacagctgtgagaaaatactgacaccgacagagtggaaactgctg

SEQ ID NO: 167762 - DNA, 75 bp, synthetic construct
  source 1..75: mol_type = other DNA
gtcgccccggttgggtagtcatgtgggatggctggttcagacttcaggatatggttgagggttacctggtgatga

SEQ ID NO: 167763 - DNA, 75 bp, synthetic construct
  source 1..75: mol_type = other DNA
ttaataaagagaataatcagggtggtagacttactcaatgattccgggaaacgagattctattcttttatctgtt

SEQ ID NO: 167764 - DNA, 75 bp, synthetic construct
  source 1..75: mol_type = other DNA
aaagcagtggtgtaataagcggccaagacattgatatgaaaacggcttcagagcttattgtttttgctaagaaaa

SEQ ID NO: 167765 - DNA, 75 bp, synthetic construct
  source 1..75: mol_type = other DNA
tgacagcaaacgcacaggccgtcccggttgggtcgtcatgtgggatggctggttcagacttcaggatatggttga

SEQ ID NO: 167766 - DNA, 75 bp, synthetic construct
  source 1..75: mol_type = other DNA
gctggtgcatggctacgttaacaagatgaagctcgacaataagcggacctgggctgatgttctgaagcgtcttga

SEQ ID NO: 167767 - DNA, 75 bp, synthetic construct
  source 1..75: mol_type = other DNA
ggagcagttcgcagaagccactaatgttgggccgctgatgcagcatttaatccgcttttgcgtttatgttggcgg

SEQ ID NO: 167768 - DNA, 75 bp, synthetic construct
  source 1..75: mol_type = other DNA
ttggcgttaaggttcagccttcaggcagcaaagttttttatttccgttactacgttgagaaagggaagaaagaaa

SEQ ID NO: 167769 - DNA, 75 bp, synthetic construct
  source 1..75: mol_type = other DNA
atgagtatgattttaaggatataaaggaactatacgccaatggtattctaatactggagtttataccattgcttg

SEQ ID NO: 167770 - DNA, 75 bp, synthetic construct
  source 1..75: mol_type = other DNA
aagcagcaatagattacccatctagtatggtattgacggcttgtcctggaagtgggaaaacagcagtaatcgtag

SEQ ID NO: 167771 - DNA, 75 bp, synthetic construct
  source 1..75: mol_type = other DNA
tatttatgtgccgaagtatggaagaaccgtattgtcggcggtaacagcctgccgacggcgatccatgcgttgcgc

SEQ ID NO: 167772 - DNA, 75 bp, synthetic construct
  source 1..75: mol_type = other DNA
atgacgaaacaggaatggatttttcgactaaggcgctgtacatcaaaggaaaccctggaaaggataatagaaaaa

SEQ ID NO: 167773 - DNA, 75 bp, synthetic construct
  source 1..75: mol_type = other DNA
cctgacgcgatgtattactctgccagcggaacggtaagcctgctgttggggagcagccaggacaacaatgaccat

SEQ ID NO: 167774 - DNA, 75 bp, synthetic construct
  source 1..75: mol_type = other DNA
gccgccggaaaggtcctggccggatgggaagagcgcgtcgccgcgggtaagcccgtaccgccaatccgtcgcgcc

SEQ ID NO: 167775 - DNA, 75 bp, synthetic construct
  source 1..75: mol_type = other DNA
agtcagtggtgtgatgttgattttcagcaaaaaacgctgctggtgactgcggatgtctctaaaaataagcgagaa

SEQ ID NO: 167776 - DNA, 75 bp, synthetic construct
  source 1..75: mol_type = other DNA
cggctggcaataaaaattattgcagaaccaccggataagcgccgccgtgacttggacaatattctgaaagcgccg

SEQ ID NO: 167777 - DNA, 75 bp, synthetic construct
  source 1..75: mol_type = other DNA
gtgctcagccagtatctggtggacgtctgggggtgaaaatttaccccataatgcttgaagggcaggtcaaaaaat

SEQ ID NO: 167778 - DNA, 75 bp, synthetic construct
  source 1..75: mol_type = other DNA
aaacaccaacactattaaacgataacctgttccacaaacagttttatcgtgttttggacattctcagcgaaggcc

SEQ ID NO: 167779 - DNA, 75 bp, synthetic construct
  source 1..75: mol_type = other DNA
aaaccagcgcaagaagtgaggctatcagcggtgtgaacgcaagcatcaacacgcttgaaagcaacactgaatccg

SEQ ID NO: 167780 - DNA, 75 bp, synthetic construct
  source 1..75: mol_type = other DNA
gaccgcttcgtattgatgaccgcagcaaacggcacatatacaacgcctttctatgtgtctaacggtgcaatgtat

SEQ ID NO: 167781 - DNA, 75 bp, synthetic construct
  source 1..75: mol_type = other DNA
gtgaacgcatcaataagcgatctcgacaagaaaaccgacgccagcgttaaccgccttgatcaagctatcgccgac

SEQ ID NO: 167782 - DNA, 75 bp, synthetic construct
  source 1..75: mol_type = other DNA
tacccttgcggaagcgccagcatggatccgcaacggaaccgtattcgccgtgtctactgaatctgcaaaacctgt

SEQ ID NO: 167783 - DNA, 75 bp, synthetic construct
  source 1..75: mol_type = other DNA
atattcgcgttcgtcgcgtaacgccagacagcacaggcgatctacttcacaacgacaccaggtggagcagttaca

SEQ ID NO: 167784 - DNA, 75 bp, synthetic construct
  source 1..75: mol_type = other DNA
cgaagaccttaaaatagctacagaggatcttaaagctgacacagatacacttaaaaaagacaccgaagaccttta

SEQ ID NO: 167785 - DNA, 75 bp, synthetic construct
  source 1..75: mol_type = other DNA
gacggcaaatttaaaaaacatcagattactggtgtaaacggaaacgaaatcacactagcggcggccccggcatgg

SEQ ID NO: 167786 - DNA, 75 bp, synthetic construct
  source 1..75: mol_type = other DNA
gttgacgacggcgcattatacacactttcccaatactgcgaccagttggtcgatgatggttacggtggccttgag

SEQ ID NO: 167787 - DNA, 75 bp, synthetic construct
  source 1..75: mol_type = other DNA
aatgacagcccaatcactgacgccaacggcggtacatcagtctcaggcgttagcgtggcgtggcgtaatggtacg

SEQ ID NO: 167788 - DNA, 75 bp, synthetic construct
  source 1..75: mol_type = other DNA
aaacaccaacattattaaacgataacctgtttcataaacagttttatcgtgttttggatattctcagcgaaggcc

SEQ ID NO: 167789 - DNA, 75 bp, synthetic construct
  source 1..75: mol_type = other DNA
cttacttgataatatagctggcatgttccgtggtattgcgttatgggatgggcaacgtcttacagtgatgattga

SEQ ID NO: 167790 - DNA, 75 bp, synthetic construct
  source 1..75: mol_type = other DNA
acgtcgagttatgtattacatgagatagtttttgaatctaaacattgcgatgaaattcgcaatattaaaaatgat

SEQ ID NO: 167791 - DNA, 75 bp, synthetic construct
  source 1..75: mol_type = other DNA
gcaatacgtcgagttatgtattacatgagatagtttctcaatgtgaacattgcgatgaaattcgcaatattaaaa

SEQ ID NO: 167792 - DNA, 75 bp, synthetic construct
  source 1..75: mol_type = other DNA
ggatggctggttcagacttcaggatatgcaggatatggttgagggttacctggtgatgaagtctcttgatcagga

SEQ ID NO: 167793 - DNA, 75 bp, synthetic construct
  source 1..75: mol_type = other DNA
agcaagattttctaaaagaatataaaaaacacatctcaaatactctacaaaaaacaatcaaacagtgcattaaaa

SEQ ID NO: 167794 - DNA, 75 bp, synthetic construct
  source 1..75: mol_type = other DNA
cggccagttacttatatttttgatgtataaaacagtttactactcgattcataacatcagggtaagccataagca

SEQ ID NO: 167795 - DNA, 75 bp, synthetic construct
  source 1..75: mol_type = other DNA
aagtctttggtgatgttggtagtattgaggctgatttgagggaaatcagtacactgattcatcggcgaaagtcat

SEQ ID NO: 167796 - DNA, 75 bp, synthetic construct
  source 1..75: mol_type = other DNA
aacgctacacagtttgcgcagattagcgcatcactggaagcaaacgaggcgtcgattacggagtggagcgaagcg

SEQ ID NO: 167797 - DNA, 75 bp, synthetic construct
  source 1..75: mol_type = other DNA
ccgtgacgcgattcactttacaccaggggatatcatcgagatcctcgacaataaccgcgcgggcgctcgtttagg

SEQ ID NO: 167798 - DNA, 75 bp, synthetic construct
  source 1..75: mol_type = other DNA
ccggtatctcgcttggcctgactggcagcggcacaagcacacaatcgcagtgcattttccttgttgaccgctttg

SEQ ID NO: 167799 - DNA, 75 bp, synthetic construct
  source 1..75: mol_type = other DNA
acagctgtaagaaaatactgacgccgacagagtggaaactgctgtgggttaagctggaaggaaaacagcttccgt

SEQ ID NO: 167800 - DNA, 75 bp, synthetic construct
  source 1..75: mol_type = other DNA
cgttagcgggcctttagccaacagcacgcttcagggggaaatatttctcaagcgtaaggggcatatccaacaata

SEQ ID NO: 167801 - DNA, 75 bp, synthetic construct
  source 1..75: mol_type = other DNA
gcgcgtttactcgttcaagtatcgcccgcgcagaatgctacaacgccgtgattgtgtcatggacagacccggaaa

SEQ ID NO: 167802 - DNA, 75 bp, synthetic construct
  source 1..75: mol_type = other DNA
ttatacatcatacttcaaactgataatacctttcctgttaatcatttcttactttatgtcatccatatctgtggc

SEQ ID NO: 167803 - DNA, 75 bp, synthetic construct
  source 1..75: mol_type = other DNA
ttgccgataacagcctgcaataccagatgagccttagcgcgttgagtagccaaatcaaaggcgtgatgaatgttt

SEQ ID NO: 167804 - DNA, 75 bp, synthetic construct
  source 1..75: mol_type = other DNA
ctggcagcaaacatcgccaatgctgatacccctggttatcaggcgcgcgatatcgattttgccagtgaacttaaa

SEQ ID NO: 167805 - DNA, 75 bp, synthetic construct
  source 1..75: mol_type = other DNA
atcatatggtttgtatacccatgatactggctatatcaccatttttgggattttattttttatgctgttgtttgc

SEQ ID NO: 167806 - DNA, 75 bp, synthetic construct
  source 1..75: mol_type = other DNA
tctccaccggctgattgggatgaagcacacaaacaaagagtggaaaaacattttaacgattttgatttgtcttta

SEQ ID NO: 167807 - DNA, 75 bp, synthetic construct
  source 1..75: mol_type = other DNA
ctccgcctgcgttttaggtggcgtttctctgaaaggtggcatcggaaaaatctcatatgtggtggcgggtatctt

SEQ ID NO: 167808 - DNA, 75 bp, synthetic construct
  source 1..75: mol_type = other DNA
ttgtcccttccctgccatatctgctcgacgggctggtgatcaccctgaaaatcaccgtcacggcagtcgtgattg

SEQ ID NO: 167809 - DNA, 75 bp, synthetic construct
  source 1..75: mol_type = other DNA
aaatgatatccgtttaatttcggcgatggtggcgttttcgatgtttgaagcggcctactattcagagattatccg

SEQ ID NO: 167810 - DNA, 75 bp, synthetic construct
  source 1..75: mol_type = other DNA
ttgctgatggttcgcatagccgggtgttattcgatcatcttcgcgatgaagttatgcgcctggacgcagggatca

SEQ ID NO: 167811 - DNA, 75 bp, synthetic construct
  source 1..75: mol_type = other DNA
gatatggatcgcgaacgcacccagtttgccgataacagcctgcaataccagatgagccttagcgcgttgagcggg

SEQ ID NO: 167812 - DNA, 75 bp, synthetic construct
  source 1..75: mol_type = other DNA
tctgcgcgcccagcgtcaggaagtgctggcagcaaacatcgccaatgccgatacccctggttatcaggcgcgcga

SEQ ID NO: 167813 - DNA, 75 bp, synthetic construct
  source 1..75: mol_type = other DNA
ccggagtaacggatacagaatgtggatgtggtcgtcggggatgcgttgaagcggtttcatctggtcgggccatca

SEQ ID NO: 167814 - DNA, 75 bp, synthetic construct
  source 1..75: mol_type = other DNA
accgtctggtctggcaacaagacgatcgttatctctggattgaagcctggggcgaaaacagcttacgcgtgcgaa

SEQ ID NO: 167815 - DNA, 75 bp, synthetic construct
  source 1..75: mol_type = other DNA
tatggcgctctggtgtggtcaggcgatattcactcctctttccgttctttgcgtaatcagtttgccgctggcttg

SEQ ID NO: 167816 - DNA, 75 bp, synthetic construct
  source 1..75: mol_type = other DNA
gcgcaatcagtttgctgcggggctgaacatgggaattgccgggatcccgtggtggacgacggatattggcggttt

SEQ ID NO: 167817 - DNA, 75 bp, synthetic construct
  source 1..75: mol_type = other DNA
ttcctgcgtctgctgcctaacgtgctggatgtggaccagatcaccggccaggtggtcagcaccggtaaaccgggt

SEQ ID NO: 167818 - DNA, 75 bp, synthetic construct
  source 1..75: mol_type = other DNA
aaaactcatactggcgttatgagggttacgccctgggcgatccagatttatatgctgccgtggatgagtctgcgg

SEQ ID NO: 167819 - DNA, 75 bp, synthetic construct
  source 1..75: mol_type = other DNA
aaaactcatactggcgttacgaggggtacgccctgggcgatccggatttatatgctgccgtagatgagtctgcgg

SEQ ID NO: 167820 - DNA, 75 bp, synthetic construct
  source 1..75: mol_type = other DNA
atgaataacgaacagatgcttatcaaatgcagagatccccgtaaatgtcggttttatgccgaatatctgaatcac

SEQ ID NO: 167821 - DNA, 75 bp, synthetic construct
  source 1..75: mol_type = other DNA
ggtttgaagaacaactggagtgtaaaaaaaggccaaactctgtatggtatactatctgactgggcagtatctaat

SEQ ID NO: 167822 - DNA, 75 bp, synthetic construct
  source 1..75: mol_type = other DNA
aactaaaatatggtctgttgatattttctttattcgctataacttgtaatgtgcaggcgtatcagacattgacgc

SEQ ID NO: 167823 - DNA, 75 bp, synthetic construct
  source 1..75: mol_type = other DNA
gataccattgaactgttcagaacacgaataaatcatgcctggcatcagaaaaaacaaaaggacaaatatcggagt

SEQ ID NO: 167824 - DNA, 75 bp, synthetic construct
  source 1..75: mol_type = other DNA
ttgcgcctgacaacccacacaactgtatcagaaatgttaatgcatttttaaaagaaaagtattgtaatacttcag

SEQ ID NO: 167825 - DNA, 75 bp, synthetic construct
  source 1..75: mol_type = other DNA
ccatacaaatttcccggaaatgaaccataattcatcaggaataaaaaacggaattgatgtcagaaaaagacgaac

SEQ ID NO: 167826 - DNA, 75 bp, synthetic construct
  source 1..75: mol_type = other DNA
ggaaaaactgaataacgcactggcagcgattaaagcagatggtacgtatcagaaaatcaatgaccagtggttccc

SEQ ID NO: 167827 - DNA, 75 bp, synthetic construct
  source 1..75: mol_type = other DNA
tactttcatcctgtgcattcggcgcttctgccgcagagaaaatcaatttcggcgtatcagcgacctatcctccct

SEQ ID NO: 167828 - DNA, 75 bp, synthetic construct
  source 1..75: mol_type = other DNA
ggagaaactgaataacgcgctggcggcaattaaagctgacggtacatatcagaaaatcaatgaccagtggttccc

SEQ ID NO: 167829 - DNA, 75 bp, synthetic construct
  source 1..75: mol_type = other DNA
gtttattataagcattttattaatgataaaatttcatatgagcatataggttatgtgaatttaggaatagatcag

SEQ ID NO: 167830 - DNA, 75 bp, synthetic construct
  source 1..75: mol_type = other DNA
tgattgtctataccggcggtattgcacatggggttaaccaggagacgggcattgctttagttgccaacacgggcg

SEQ ID NO: 167831 - DNA, 75 bp, synthetic construct
  source 1..75: mol_type = other DNA
gacggtaacgcctacgagctgctgttggatctgttcgaaaccaaaatcgaacagctggcagatgaaattgaaaat

SEQ ID NO: 167832 - DNA, 75 bp, synthetic construct
  source 1..75: mol_type = other DNA
gtaatcgcctgaccgcaggctacatgaccagttactttattggcggtgctgccggttcactgatttctgcatccg

SEQ ID NO: 167833 - DNA, 75 bp, synthetic construct
  source 1..75: mol_type = other DNA
tactgccagcagtcagtcgctggcgatgatgatcctcggtacggcattaaccggtttgttctcggtcgtggcaca

SEQ ID NO: 167834 - DNA, 75 bp, synthetic construct
  source 1..75: mol_type = other DNA
cgccgcctgattgtctcgatgaccttactggcggcaggcggcatgttaattactgccagcagtcagtcgctggcg

SEQ ID NO: 167835 - DNA, 75 bp, synthetic construct
  source 1..75: mol_type = other DNA
ccccctcggggatatgtttgaacgccgccgcctgattgtcttcatgaccttactggcagccggaggcatgttgct

SEQ ID NO: 167836 - DNA, 75 bp, synthetic construct
  source 1..75: mol_type = other DNA
cgtttgtctggctggcgcggtgatcgccctggttaacctggtggtctggtggcgaggttttcatcgtcaggaagc

SEQ ID NO: 167837 - DNA, 75 bp, synthetic construct
  source 1..75: mol_type = other DNA
atgactaaacctaatcatgagcttagcccggcgctgatcgtgctgatgtctatcgccaccggtctggcggtcgcc

SEQ ID NO: 167838 - DNA, 75 bp, synthetic construct
  source 1..75: mol_type = other DNA
aaaaactggcggcctgcgcgaccttgatccccggcgctacctctctctattactgggaaggaagctggagcaaga

SEQ ID NO: 167839 - DNA, 75 bp, synthetic construct
  source 1..75: mol_type = other DNA
cgcaccggatgaagcgacagcccaggatttagccgccaaagtgctggcggaaaaactggcggcctgcgcgacctt

SEQ ID NO: 167840 - DNA, 75 bp, synthetic construct
  source 1..75: mol_type = other DNA
tatatcaatcatattacccaggcgatgagtttatgtcactactaggacaggtaaaccaagctaaccaaacatgga

SEQ ID NO: 167841 - DNA, 75 bp, synthetic construct
  source 1..75: mol_type = other DNA
acgcagagagcgcgtggaagagtttacgattgagcatattatgccgcagaacgaaaatttgtcggctaaatggcg

SEQ ID NO: 167842 - DNA, 75 bp, synthetic construct
  source 1..75: mol_type = other DNA
cgtttgccactttttataaggtcattaataaagaaaaatatctggaaagtattcaggtacattttatgaacctgc

SEQ ID NO: 167843 - DNA, 75 bp, synthetic construct
  source 1..75: mol_type = other DNA
ccgcgtctgtcgtggtgctgtgtaccgcaccggatgaagcgacagcccaggatttagccgccaaagtgctggcag

SEQ ID NO: 167844 - DNA, 75 bp, synthetic construct
  source 1..75: mol_type = other DNA
aactgatctctaaacaaaaagatcaaatattcgagaatgcatataacatagaaagatattttgaaataagattaa

SEQ ID NO: 167845 - DNA, 75 bp, synthetic construct
  source 1..75: mol_type = other DNA
cagaactgaagtggagcttcggctaccctggcgcgattatctttatgatcctcgcgggcctggcaccgtatctgt

SEQ ID NO: 167846 - DNA, 75 bp, synthetic construct
  source 1..75: mol_type = other DNA
atgcaaatctactaaaatattggaacttaacccgcaatagtgggacaccaaaaactaaactatctgatcaagaaa

SEQ ID NO: 167847 - DNA, 75 bp, synthetic construct
  source 1..75: mol_type = other DNA
gatgaactttgaatttatgccagagttgaagtggagtttcggctacccaggcgcgattatctttatgatcctcgc

SEQ ID NO: 167848 - DNA, 75 bp, synthetic construct
  source 1..75: mol_type = other DNA
gacggtaacgcctacgagttactgctggatttgttcgaaaccaaaattgaacagttggcagatgaaattgaaaac

SEQ ID NO: 167849 - DNA, 75 bp, synthetic construct
  source 1..75: mol_type = other DNA
caaccatgcttgctgtcattaacgaaccgattggcggcgaaggagaaaacgagcgtttcacggttatggagttct

SEQ ID NO: 167850 - DNA, 75 bp, synthetic construct
  source 1..75: mol_type = other DNA
ccagttccttctatggagatacaggaacgtatagtatccattctcgataaattcgacaccctgacaaactccatc

SEQ ID NO: 167851 - DNA, 75 bp, synthetic construct
  source 1..75: mol_type = other DNA
ataaatatgtttccttgacagagttaagttctgaaataaaattcaataacgatgctttttctcgttggttcgtct

SEQ ID NO: 167852 - DNA, 75 bp, synthetic construct
  source 1..75: mol_type = other DNA
cagtttttatgagccggtgggtgaagattcgatccgttatatcaaagacttgtcacatggtatgcagcggataga

SEQ ID NO: 167853 - DNA, 75 bp, synthetic construct
  source 1..75: mol_type = other DNA
ctactcgcgagcgagccagtttaatcctgacgaaaagtgctaatcatgcggtagaagaagtcagattacgcaaat

SEQ ID NO: 167854 - DNA, 75 bp, synthetic construct
  source 1..75: mol_type = other DNA
aaagtgcttaaagaacgcgggctgatgaaaaagaaaggcttcccggaatcgtatgatatgcatcgtctggtgaag

SEQ ID NO: 167855 - DNA, 75 bp, synthetic construct
  source 1..75: mol_type = other DNA
ctactcgcgaacgtgccagcctgatcctgaccaaaagtgctaatcatgcggtagaagaagtcagactacgcaaat

SEQ ID NO: 167856 - DNA, 75 bp, synthetic construct
  source 1..75: mol_type = other DNA
accggcacccgaatccacactccgttcctgtttaccaaggaaatcgattcctccagcccatatctgtacaaggcg

SEQ ID NO: 167857 - DNA, 75 bp, synthetic construct
  source 1..75: mol_type = other DNA
tacttcaatacgaagcttgagaacgtgaaggtggtgaaggttaatccggtcatgcacgacatcaagaatcccgtt

SEQ ID NO: 167858 - DNA, 75 bp, synthetic construct
  source 1..75: mol_type = other DNA
cgtgagggcagcattgaggtggtggctcaggagcactgcctttacattccgacggataacaataccggtaagctg

SEQ ID NO: 167859 - DNA, 75 bp, synthetic construct
  source 1..75: mol_type = other DNA
ggcgaacgttattgtgttaactctgcttctttacgcttcaccgatggcgaaaacggcgaagaaatcaacggttga

SEQ ID NO: 167860 - DNA, 75 bp, synthetic construct
  source 1..75: mol_type = other DNA
atggcaattccagtttatctgtggctgaaagatgatggcggtgcagatatcaaagggtccgtggatgttcaggac

SEQ ID NO: 167861 - DNA, 75 bp, synthetic construct
  source 1..75: mol_type = other DNA
aggtggaactgcgttacgagaaaattacctggacttacaaggacggcaacatcattcattctgatgcgtggaatg

SEQ ID NO: 167862 - DNA, 75 bp, synthetic construct
  source 1..75: mol_type = other DNA
ctgtacttaatgataatactataaaagtaattgatgttgaatttaaccataatgcaaccattacacaaatttgtt

SEQ ID NO: 167863 - DNA, 75 bp, synthetic construct
  source 1..75: mol_type = other DNA
ggaagcgcgcaaacgagccacagagagccgtttactcatcgccaagggtgacgatccgatcgaggtggcgaggaa

SEQ ID NO: 167864 - DNA, 75 bp, synthetic construct
  source 1..75: mol_type = other DNA
cgctgcagcatccggggctacgctcgcaaccggagccgcgctctttgatgatgaatggctgaatgacatgaaaaa

SEQ ID NO: 167865 - DNA, 75 bp, synthetic construct
  source 1..75: mol_type = other DNA
ggccttgcttcacgcgtcattgcttttaacggctcgctatgcgagcctgccggaaactgcgtctacagccacgac

SEQ ID NO: 167866 - DNA, 75 bp, synthetic construct
  source 1..75: mol_type = other DNA
cgccaggcgcgtgtggatgccatcatgccgacgtttattgagacggtacgctactggcagaaacagagcggagta

SEQ ID NO: 167867 - DNA, 75 bp, synthetic construct
  source 1..75: mol_type = other DNA
gctggagagcattaaagccgaaccgggccttgcttcgcgcgtcattgcctttaacggacgctatgcgagcctgcc

SEQ ID NO: 167868 - DNA, 75 bp, synthetic construct
  source 1..75: mol_type = other DNA
gattcctatcccaagtaaagttgagcaagaccgaattgttgccattctggataaattcgacactctgaccaactc

SEQ ID NO: 167869 - DNA, 75 bp, synthetic construct
  source 1..75: mol_type = other DNA
aaatcgagttacgccagaaacaatacgagtactatcgtgatttactgttcagtttcccaaaacctgaaactgtca

SEQ ID NO: 167870 - DNA, 75 bp, synthetic construct
  source 1..75: mol_type = other DNA
tgttactattctggataaattcgacaccctgactaactccatcaccgaaggtctcccgcgtgaaatcgagttacg

SEQ ID NO: 167871 - DNA, 75 bp, synthetic construct
  source 1..75: mol_type = other DNA
agagttatcagcagaggactggaaaatgctgtttatgtgcgaatggccccagactgacaaggagcaggcggcatg

SEQ ID NO: 167872 - DNA, 75 bp, synthetic construct
  source 1..75: mol_type = other DNA
agcctgatttaacaaaaacatcgagaaggggaaaatttcatactgaacggttaccagagaatgaaatcagatcat

SEQ ID NO: 167873 - DNA, 75 bp, synthetic construct
  source 1..75: mol_type = other DNA
actgtgtaagtgtcagattaaatgaaaatgaattatctattctggaagaaaaaagaggttcctataaaaaaggag

SEQ ID NO: 167874 - DNA, 75 bp, synthetic construct
  source 1..75: mol_type = other DNA
aattactgatcttgaaagggatgttgatgagttacaaagaaaatctaatcagttggatgctgatattagcaagtt

SEQ ID NO: 167875 - DNA, 75 bp, synthetic construct
  source 1..75: mol_type = other DNA
acagtgtaacagttggtatcgatgtatcaaaactcactcttgatgttcatgtgtctcctgcacagcttcatcaga

SEQ ID NO: 167876 - DNA, 75 bp, synthetic construct
  source 1..75: mol_type = other DNA
gacactttctgccgtgcgttttaacccggctatccgggtgttttatatgcgactgatttctcagggtaagcccag

SEQ ID NO: 167877 - DNA, 75 bp, synthetic construct
  source 1..75: mol_type = other DNA
ccttatttatccggtgccggtcgtctggtgttgaaggataccctgatgctggctggcgcagtcatgataatggcc

SEQ ID NO: 167878 - DNA, 75 bp, synthetic construct
  source 1..75: mol_type = other DNA
aatcacgggggggagcgtcatggacattcttcagagaaagtcagtgttatcagtagaggatatacgaaagtcgtt

SEQ ID NO: 167879 - DNA, 75 bp, synthetic construct
  source 1..75: mol_type = other DNA
ggtgaaattccaaaggggattgctggcagagtatgcgctagtattactcgtcatgattggaacagaaaccactcg

SEQ ID NO: 167880 - DNA, 75 bp, synthetic construct
  source 1..75: mol_type = other DNA
cgctgcggcattcgtttcagattttttcgcagcagttgcactcgcacttgcggcactttgtgaggatgccgcagc

SEQ ID NO: 167881 - DNA, 75 bp, synthetic construct
  source 1..75: mol_type = other DNA
gtggcgctgcccctcgctgctgacgcctgtctggtcgcctcatcttttgaagcagacgcagatgatgccgatgac

SEQ ID NO: 167882 - DNA, 75 bp, synthetic construct
  source 1..75: mol_type = other DNA
ggcactgactgctgcctcctctgccttaatggacgcctcacgggccgatgatgcagctgctgtctcagagtctgc

SEQ ID NO: 167883 - DNA, 75 bp, synthetic construct
  source 1..75: mol_type = other DNA
tcgctgcggaagcagacctcgctgctgcgctggcctgttcagtggcttcgccagccttcgttgtggctgttgaag

SEQ ID NO: 167884 - DNA, 75 bp, synthetic construct
  source 1..75: mol_type = other DNA
tgtgctgtcgttgcattctgtgcggtgtatttcccgttagccaggtcatacgcggccttaactgcttttggcgtt

SEQ ID NO: 167885 - DNA, 75 bp, synthetic construct
  source 1..75: mol_type = other DNA
cgttgtggctgttgaagccgctgacgcggcgctttctgccgctttttcggcggcggcggtaccggctcaggcccg

SEQ ID NO: 167886 - DNA, 75 bp, synthetic construct
  source 1..75: mol_type = other DNA
gccagcatttaacgcaggtatgcgaaaagcattttttaatcaacccaaagaacaacgcgatgcatggctgttatg

SEQ ID NO: 167887 - DNA, 75 bp, synthetic construct
  source 1..75: mol_type = other DNA
aaggtagcgggcaggtcactatcggcaatgaaaccttcagctttagtgcaaaagatatcttcgtggtgccgacct

SEQ ID NO: 167888 - DNA, 75 bp, synthetic construct
  source 1..75: mol_type = other DNA
gcaaccagtgggcagctctgcgtgattccgtacccatgacgttaacggaagaagagattgcccgcctcaaaggta

SEQ ID NO: 167889 - DNA, 75 bp, synthetic construct
  source 1..75: mol_type = other DNA
cggcggaatttaagttttaccgcatcaacgacgccggtcaggaagtggagtacttcaacatcacgctggataacg

SEQ ID NO: 167890 - DNA, 75 bp, synthetic construct
  source 1..75: mol_type = other DNA
gatggggcggtttttactgaattaaataagctacttactgaagtaaatgaaaaagttaaaggaataagttatgtt

SEQ ID NO: 167891 - DNA, 75 bp, synthetic construct
  source 1..75: mol_type = other DNA
caaccgtcagaaccatgattgacgctgcaaagttaccaacgattgactttgtaaaaccaggttcagtgaagacgc

SEQ ID NO: 167892 - DNA, 75 bp, synthetic construct
  source 1..75: mol_type = other DNA
tatcagggcgtgcagcaggatgattttaccgccgctaaccatgcgcgcgtgtcacaatcgcagggtgatgatatt

SEQ ID NO: 167893 - DNA, 75 bp, synthetic construct
  source 1..75: mol_type = other DNA
aactcgcgccgataaccagaaccacggttatgccgttgggctgacctcaagctggtatcagcacggtaatcagaa

SEQ ID NO: 167894 - DNA, 75 bp, synthetic construct
  source 1..75: mol_type = other DNA
ggcaggtgctgtcatgataatggcagattcggcgcgggaaattcttaaacaacgcagtaatgaatcatgttcaac

SEQ ID NO: 167895 - DNA, 75 bp, synthetic construct
  source 1..75: mol_type = other DNA
atcccttcgctggcctgcataaagttcccatcgcagccgagcgacttggcagacgttggctggcgacggacaaaa

SEQ ID NO: 167896 - DNA, 75 bp, synthetic construct
  source 1..75: mol_type = other DNA
tggcgcggatcaggatattcagtctatcgatgctacttccagcggcactatcgatatcagcgatggtacggtttt

SEQ ID NO: 167897 - DNA, 75 bp, synthetic construct
  source 1..75: mol_type = other DNA
gcgatgggacgctggtgaatgccaccgatggtgtgacgttgacaggtgagcttaataccaaccttgaaactgaca

SEQ ID NO: 167898 - DNA, 75 bp, synthetic construct
  source 1..75: mol_type = other DNA
gtttttcgaatagaaacattaattctttgctgaagacccaatatgtcataagggccggtgctctatttttactat

SEQ ID NO: 167899 - DNA, 75 bp, synthetic construct
  source 1..75: mol_type = other DNA
actaatttacccgttcaagctggtaaagcacgggatatgctgcgatttaaatacgaaggtaaacagctaagagtc

SEQ ID NO: 167900 - DNA, 75 bp, synthetic construct
  source 1..75: mol_type = other DNA
aggtttgtgacgtattttgtcttccttccattcatgaatcagaagcttttggcgtggttcaaattgaggcaatga

SEQ ID NO: 167901 - DNA, 75 bp, synthetic construct
  source 1..75: mol_type = other DNA
ttatttcaggaactatatggacggattgcggaggaatgcaccagatgatttttattattttatcaacaataaata

SEQ ID NO: 167902 - DNA, 75 bp, synthetic construct
  source 1..75: mol_type = other DNA
ttggctggtgaaattacttatcaaacaattaatgactttggcgctacgacggagcggcagaaaggaataatgcag

SEQ ID NO: 167903 - DNA, 75 bp, synthetic construct
  source 1..75: mol_type = other DNA
ctgtgtaaagctgctgaagctctgaaagaacgtggtgctaaacgtgtatttgcgtacgcgactcacccgatcttc

SEQ ID NO: 167904 - DNA, 75 bp, synthetic construct
  source 1..75: mol_type = other DNA
acaagcaggcgttccattctgcccatgttcaacccgtatttgccgtgctcgatccggtttatacctacactctgc

SEQ ID NO: 167905 - DNA, 75 bp, synthetic construct
  source 1..75: mol_type = other DNA
cagacgagcaggcggcggaacaggttgagattcaggttaaatatgagggttatattgcgcgccaacaggatgaga

SEQ ID NO: 167906 - DNA, 75 bp, synthetic construct
  source 1..75: mol_type = other DNA
ctgcgttgacagacgaacaggcggcggaacaggttgagattcaggttaaatacgaaggttatatcgcgcgccagc

SEQ ID NO: 167907 - DNA, 75 bp, synthetic construct
  source 1..75: mol_type = other DNA
tcgcaaattattcactagagataaaatgatctcaagtttgattggactttatcagaatattaaaataggaaatga

SEQ ID NO: 167908 - DNA, 75 bp, synthetic construct
  source 1..75: mol_type = other DNA
gactgcgatgcacggtctggatcacgcgcaaacactggctatcgtcctgcctgcactgtggaatgaaaaacgcga

SEQ ID NO: 167909 - DNA, 75 bp, synthetic construct
  source 1..75: mol_type = other DNA
tatgctggggcatgaactgacggcgatgcacggtctggatcacgcgcaaacgctggctatcgtcctgcctgcgct

SEQ ID NO: 167910 - DNA, 75 bp, synthetic construct
  source 1..75: mol_type = other DNA
gtgagcggtgaaaacgcgcccgcgtttaccctgccgaaaatggcagtcgcggcggtggcggagcgcgttcatagc

SEQ ID NO: 167911 - DNA, 75 bp, synthetic construct
  source 1..75: mol_type = other DNA
ggcgctaatggcgctgttacttccgcaacctgccgcgccgcatcaggacacgccgcagccgcgaaacgtcgcaac

SEQ ID NO: 167912 - DNA, 75 bp, synthetic construct
  source 1..75: mol_type = other DNA
atcaggagacgccgctaccgcgatacgtggcgacatcgccggttatccggcaactgacgaaagcggtggcgcaac

SEQ ID NO: 167913 - DNA, 75 bp, synthetic construct
  source 1..75: mol_type = other DNA
tcaggaaaagaagagcattcttctcatcgttccactgataacgcgccacatgaatatatcagcaaatatactgaa

SEQ ID NO: 167914 - DNA, 75 bp, synthetic construct
  source 1..75: mol_type = other DNA
tacagtgttattctgcttgatgaaattgaaaaagcacatccggatgtcctggagttcttcttccagatatttgac

SEQ ID NO: 167915 - DNA, 75 bp, synthetic construct
  source 1..75: mol_type = other DNA
tcaggaaaaacagaacattctgcttctcatcgctccactgataacactccacataaatatatcagtaaatatact

SEQ ID NO: 167916 - DNA, 75 bp, synthetic construct
  source 1..75: mol_type = other DNA
caggcccttctggtgccggcaaaactgagactgctaaagcattggccgagtttatttatggagatgaaaataaac

SEQ ID NO: 167917 - DNA, 75 bp, synthetic construct
  source 1..75: mol_type = other DNA
attaagatgtctggagcaacgagttttaggtcaaccatatgctatgtctgttatagcatcgcaagttctcatttg

SEQ ID NO: 167918 - DNA, 75 bp, synthetic construct
  source 1..75: mol_type = other DNA
ttaatatttccttataatgtatcggaagcattatgttgtaatgtagatgaagcagagaggttacttatctctatt

SEQ ID NO: 167919 - DNA, 75 bp, synthetic construct
  source 1..75: mol_type = other DNA
cagtcgggccatcagcaggaagaggtgagtgccgccttacagcttgatgatgcgcctcaatttcaacagaacgaa

SEQ ID NO: 167920 - DNA, 75 bp, synthetic construct
  source 1..75: mol_type = other DNA
tgattagcgatcatcaggagattgccactaaacccgtcacgctctcaatggacgagctgggcgaaaagctgacga

SEQ ID NO: 167921 - DNA, 75 bp, synthetic construct
  source 1..75: mol_type = other DNA
ggcatgaaggcgagacagataatgaaaaaataaaagaaaacattcttcctttatttatttctcattttggagcag

SEQ ID NO: 167922 - DNA, 75 bp, synthetic construct
  source 1..75: mol_type = other DNA
tgaagcgctaaataagttctctcaacgatatcaggttacgtattggttttggtgtttattagtccctataattat

SEQ ID NO: 167923 - DNA, 75 bp, synthetic construct
  source 1..75: mol_type = other DNA
aaggatgtgttattggtgatggcgcagtaattcaacccaatacatatgttaattttgacattgaggattatgcta

SEQ ID NO: 167924 - DNA, 75 bp, synthetic construct
  source 1..75: mol_type = other DNA
gaagagaatctgagttctgaaaacaaagatgattcacctaaattcaccccacacccaggtggagtgagtgagatt

SEQ ID NO: 167925 - DNA, 75 bp, synthetic construct
  source 1..75: mol_type = other DNA
cgaaccagagaaagcagacaataagacgataaaagactcagagtcaaaatcggttgaagacgaagatattattcg

SEQ ID NO: 167926 - DNA, 75 bp, synthetic construct
  source 1..75: mol_type = other DNA
ttctttatctattcctttgccccaacaaccatatttattctattatggatttctttgggttttatactgaccatt

SEQ ID NO: 167927 - DNA, 75 bp, synthetic construct
  source 1..75: mol_type = other DNA
ttataactttggtgacgatagttataagagcactattcaaatatagaaaatctcatgatgtaattttgaaaaaat

SEQ ID NO: 167928 - DNA, 75 bp, synthetic construct
  source 1..75: mol_type = other DNA
ggttttctggaataacataaaaaaacataccgtaagaaaggatttctatttatccagacaaaagaaaacagatgc

SEQ ID NO: 167929 - DNA, 75 bp, synthetic construct
  source 1..75: mol_type = other DNA
tacctttgcagagtttgaacttaaccgcatcagagagcgaaccagagagggcttagaacgtgcaaaatcacaagg

SEQ ID NO: 167930 - DNA, 75 bp, synthetic construct
  source 1..75: mol_type = other DNA
ctactggcagaaacagagcggagtaggggctaacgccacggcgctgatcgggttctcacaaggggccattatggc

SEQ ID NO: 167931 - DNA, 75 bp, synthetic construct
  source 1..75: mol_type = other DNA
aattccaggaaatggcagtgattatagttcgttcccaactggcgactcttgacctgagtaccgtagaaaaagaaa

SEQ ID NO: 167932 - DNA, 75 bp, synthetic construct
  source 1..75: mol_type = other DNA
gaagagaagctgagttctgaaaacaaagattattcacctaaattcaccccacccccaggtggagtgagtgagatt

SEQ ID NO: 167933 - DNA, 75 bp, synthetic construct
  source 1..75: mol_type = other DNA
acgatggaggcacggcacagcccgcacacgacgctgaggccacagagctgaaaacccacaaggccatgccccgca

SEQ ID NO: 167934 - DNA, 75 bp, synthetic construct
  source 1..75: mol_type = other DNA
gcttcgcgtatttctggcgtcacgcctgctgccatctccattctactggtgtggctaaaaaaacagggtatgctg

SEQ ID NO: 167935 - DNA, 75 bp, synthetic construct
  source 1..75: mol_type = other DNA
ttccgctttctcgccgtttgcgtgaactgccgctgcgcgttggtcgtctgaaaaccgggacaccaccgcgtattg

SEQ ID NO: 167936 - DNA, 75 bp, synthetic construct
  source 1..75: mol_type = other DNA
aattctcccggcccctgcgggtctgtcaaaaaattcacccatcagcctgaaaacgcgaacgctgctggggcgtac

SEQ ID NO: 167937 - DNA, 75 bp, synthetic construct
  source 1..75: mol_type = other DNA
gtttgctggccggtcttaacgccgctcgcctgtctgcagacaaagaaggctgggcaccggcgcgctcccaggcgt

SEQ ID NO: 167938 - DNA, 75 bp, synthetic construct
  source 1..75: mol_type = other DNA
acgcatgacgtgatccgcagtaacctcgatcgcagtccgatgtatgccggagtgatcgaaggtgtcggcccacgc

SEQ ID NO: 167939 - DNA, 75 bp, synthetic construct
  source 1..75: mol_type = other DNA
tatatcgctcgtcagcaagatgagatcgaaaagcagcagcgaaacgagaacacgctactgcctgcgacgctggat

SEQ ID NO: 167940 - DNA, 75 bp, synthetic construct
  source 1..75: mol_type = other DNA
acttagacggcaccttattgaccccgaaaaagaccttgcttccttcatcgatagaagccctggcccgcgctcgcg

SEQ ID NO: 167941 - DNA, 75 bp, synthetic construct
  source 1..75: mol_type = other DNA
agacgccggagctgctcagcgatcatcaggagattgtcgccaaaccagccacgctttcgatggacgaactgggcg

SEQ ID NO: 167942 - DNA, 75 bp, synthetic construct
  source 1..75: mol_type = other DNA
cgaaccagagaaagcagacaataagacgatcaaagactaagagtcaaaatcggttgaagacgaagatattattcg

SEQ ID NO: 167943 - DNA, 75 bp, synthetic construct
  source 1..75: mol_type = other DNA
cgttttctggccctgctcagcgtgatgcgcctgccgacgcgcacggcggaaggtgtcacggcactggtgggattg

SEQ ID NO: 167944 - DNA, 75 bp, synthetic construct
  source 1..75: mol_type = other DNA
tgccgatgacgcagtaaaagcccgcgccaatattgtgattggagataacaccaccgacagcattgctcagttcat

SEQ ID NO: 167945 - DNA, 75 bp, synthetic construct
  source 1..75: mol_type = other DNA
ttaacgccgtatggaagttcgccctgacgcacgatgacctgccgcaattgcagcattttggtaagcatgtcgaac

SEQ ID NO: 167946 - DNA, 75 bp, synthetic construct
  source 1..75: mol_type = other DNA
gaaagcggttttctctgagctggggatgcctgcggagcgttgcaatctacgcggtccgcgattcattgctcgctg

SEQ ID NO: 167947 - DNA, 75 bp, synthetic construct
  source 1..75: mol_type = other DNA
tttcaggcgccagcaaaggtgctgaaattaccggaagtgcagattcatgatatcgttagtcactttgcgagaatg

SEQ ID NO: 167948 - DNA, 75 bp, synthetic construct
  source 1..75: mol_type = other DNA
tttcaggcgccagcaaaggtgctgaaattaccggaagtgcacattcatgacatcgttagtcactgtgcgagaatg

SEQ ID NO: 167949 - DNA, 75 bp, synthetic construct
  source 1..75: mol_type = other DNA
cggcagacattctggagtcagatgagaatggcattatcccggagcaggacagggtaatcacgcaggtggtgatac

SEQ ID NO: 167950 - DNA, 75 bp, synthetic construct
  source 1..75: mol_type = other DNA
tggatgcggataaaaagcagatacagtgtgtggtaagaccgctgcaaatcctgcgtgctgacgggaggtgggaaa

SEQ ID NO: 167951 - DNA, 75 bp, synthetic construct
  source 1..75: mol_type = other DNA
gatggccgtgaaaacgggcagtcacttacagcacaactgcgactggggccggcagacattctggagtcagatgag

SEQ ID NO: 167952 - DNA, 75 bp, synthetic construct
  source 1..75: mol_type = other DNA
attttcaggcggcagcaaaggtgctgaaattcccggaagtgcaaattcaggaaatcattagtaactgtgcgagat

SEQ ID NO: 167953 - DNA, 75 bp, synthetic construct
  source 1..75: mol_type = other DNA
attttcaggcggcagcaaaggtgctgaaattcccggaagtgcaaattcaggaaatcataagtaactgtgcgagag

SEQ ID NO: 167954 - DNA, 75 bp, synthetic construct
  source 1..75: mol_type = other DNA
attttcaggcgccagcaaaggtgctgaaattcccggaagtgcaaattcaggaaatcatcagtaactgtgcgagaa

SEQ ID NO: 167955 - DNA, 75 bp, synthetic construct
  source 1..75: mol_type = other DNA
tttcaggcgccagcaaaggtgctgaaattaccggaagtgcatattcatgatatcgttagtcactatgcgagaatg

SEQ ID NO: 167956 - DNA, 75 bp, synthetic construct
  source 1..75: mol_type = other DNA
tttcaggcgccagcaaaggtgctgaaattaccggaagtgcaaattcatgaaatcgttagtcactctgcgagaatg

SEQ ID NO: 167957 - DNA, 75 bp, synthetic construct
  source 1..75: mol_type = other DNA
attttcaggcggcagcaaaggtgctgaaattcccggaagtgcaaattcaggaaatcatgagtaactgtgcgagaa

SEQ ID NO: 167958 - DNA, 75 bp, synthetic construct
  source 1..75: mol_type = other DNA
agcatgatggccgtgaacacgtgcagtcgcttacagcacaactgcgactggggccggcagacatcctggagtcag

SEQ ID NO: 167959 - DNA, 75 bp, synthetic construct
  source 1..75: mol_type = other DNA
gcgcggatcatggcttttttgatggggtccagcgaggcgctgaaagatcgctatgattttatgaaattccaggtc

SEQ ID NO: 167960 - DNA, 75 bp, synthetic construct
  source 1..75: mol_type = other DNA
agcgtctgtgtggttgcggaaagcatgatgactgtgaacacgtacagtcgcttacagcacaactgcgactggggc

SEQ ID NO: 167961 - DNA, 75 bp, synthetic construct
  source 1..75: mol_type = other DNA
gcagtgatacaggcagaacaggagaatgacatgaatatactaaaaaaacttatgcagcgtctgtgtggttgcgga

SEQ ID NO: 167962 - DNA, 75 bp, synthetic construct
  source 1..75: mol_type = other DNA
cgactggggccggcagacatcctggagtcagatgagaatggcattattccggagcaggacagggtaatcacacag

SEQ ID NO: 167963 - DNA, 75 bp, synthetic construct
  source 1..75: mol_type = other DNA
caggtggtgatactggatgcggataaaaagcagatacagtgtgtggtaagaccgctgcaaatcctgcgtgctgac

SEQ ID NO: 167964 - DNA, 75 bp, synthetic construct
  source 1..75: mol_type = other DNA
ttctccgtatttattcaggctggcggcagttatcgactcacgccattttacgacatcatttcagcatttccggtc

SEQ ID NO: 167965 - DNA, 75 bp, synthetic construct
  source 1..75: mol_type = other DNA
gcgacagcaaaggtgctgagattcccggaagtgcagatgcatgaaatcctgagtgactttgccagaatgattccg

SEQ ID NO: 167966 - DNA, 75 bp, synthetic construct
  source 1..75: mol_type = other DNA
agggtaatcacacaggtggtgatactggatgcggataacaaagcagatacagtgcgtggtaagaccgctgcaaat

SEQ ID NO: 167967 - DNA, 75 bp, synthetic construct
  source 1..75: mol_type = other DNA
tcaccaccaaggcgggtgcccagcgcgtggcggcagaactggggattgtactggtgatgccagacaccagcccgc

SEQ ID NO: 167968 - DNA, 75 bp, synthetic construct
  source 1..75: mol_type = other DNA
agcgtctgtgtggttgcggaaagcatgatgaccgtgaacacggggagttacttacagcacaactgcgtctggggc

SEQ ID NO: 167969 - DNA, 75 bp, synthetic construct
  source 1..75: mol_type = other DNA
actgttgcaggccatgctctatccgctggtattgctggtggtggcaacgggcgtagtcactattttgctgacggc

SEQ ID NO: 167970 - DNA, 75 bp, synthetic construct
  source 1..75: mol_type = other DNA
tttgttcgatggtggccgccggagaaaaatccgggcatcttgacgtggtgctcaatcgcctggcggattacaccg

SEQ ID NO: 167971 - DNA, 75 bp, synthetic construct
  source 1..75: mol_type = other DNA
tatgattgcatcaggagaacaaagcggccaactggaaaaaatgcttgatcaggctgcagtaaaccaggaacgaga

SEQ ID NO: 167972 - DNA, 75 bp, synthetic construct
  source 1..75: mol_type = other DNA
gatatataagagtaaataaagatgatacaaattttcaaaatattgctgtgaacaatgagagctattctattcctg

SEQ ID NO: 167973 - DNA, 75 bp, synthetic construct
  source 1..75: mol_type = other DNA
atttattcaggctggcggcagttatcggctcacaccattttacgacatcatttcggcatttccggtccttggcgg

SEQ ID NO: 167974 - DNA, 75 bp, synthetic construct
  source 1..75: mol_type = other DNA
atcatcagcgcagattattaatctgctggtatggagcgggctgtgtggctggataaatcgcttaaaaatcgcgtt

SEQ ID NO: 167975 - DNA, 75 bp, synthetic construct
  source 1..75: mol_type = other DNA
cgtgaatagcgaagatttcaattatcgctttagtcagcttgagtctgcgttgaataaccagaagaactcgattcc

SEQ ID NO: 167976 - DNA, 75 bp, synthetic construct
  source 1..75: mol_type = other DNA
atgaactgctcgaacagacctgggcgaaagataaaccggtaaaattctcagcaatgctgaccagtaaaggaacgc

SEQ ID NO: 167977 - DNA, 75 bp, synthetic construct
  source 1..75: mol_type = other DNA
cggtaaaattctcggcgatgttaaccagtaaaggaacgcccgcgtctggctggtcggtgaacttttactcttttc

SEQ ID NO: 167978 - DNA, 75 bp, synthetic construct
  source 1..75: mol_type = other DNA
gcgattggtatcgtactggaccgtgaaggatgggcggatatcgataagctcatactctgtgcccaaaaagcgggc

SEQ ID NO: 167979 - DNA, 75 bp, synthetic construct
  source 1..75: mol_type = other DNA
cagtttctctaccacggtacggcaagccgtttccttgacgagataaaaaaaacaggggctgattgcaggggatcg

SEQ ID NO: 167980 - DNA, 75 bp, synthetic construct
  source 1..75: mol_type = other DNA
cattacgtacatctctctgctgatgaagcaacggcacgcaaagtgggagcaagacacggatcgccggttatctta

SEQ ID NO: 167981 - DNA, 75 bp, synthetic construct
  source 1..75: mol_type = other DNA
attttcaggcgacagcaaaggtgctgaaattcccggaagtgcaaattcaggaaatcataagtaactgtgcgagaa

SEQ ID NO: 167982 - DNA, 75 bp, synthetic construct
  source 1..75: mol_type = other DNA
aaactggcaatggggcttaacgcatccaaaggcaaaaaaacggcaatcgataaaatttatccgcgacattttctg

SEQ ID NO: 167983 - DNA, 75 bp, synthetic construct
  source 1..75: mol_type = other DNA
ttcaggtcttccagtggttgattggcgcaacagatggccatgcaaaaaacttctccgtatttattcaggctggcg

SEQ ID NO: 167984 - DNA, 75 bp, synthetic construct
  source 1..75: mol_type = other DNA
attttcaggcgccagcaaaggtgctgaaattcccggaagtgcaaattcaggaaatcataagtaactgtgcgagac

SEQ ID NO: 167985 - DNA, 75 bp, synthetic construct
  source 1..75: mol_type = other DNA
attttcaggcgtcagcaaaggtgctgaaattcccggaagtgcaaattcaggaaatcattagtaactgtgcgagaa

SEQ ID NO: 167986 - DNA, 75 bp, synthetic construct
  source 1..75: mol_type = other DNA
attttcaggcgtcagcaaaggtgctgaaattcccggaagtgcaaattcaggaaatcataagtaactgtgcgagat

SEQ ID NO: 167987 - DNA, 75 bp, synthetic construct
  source 1..75: mol_type = other DNA
tttgatcatctcggacacgcgctgcccgcctccacccgaatgctcatcgccatgagcgacacgttacagaccagc

SEQ ID NO: 167988 - DNA, 75 bp, synthetic construct
  source 1..75: mol_type = other DNA
gaggcgttgtgccgttgggtttctgcggagcgggggatcatttcaccgctgaagttcattaccattgctgaagat

SEQ ID NO: 167989 - DNA, 75 bp, synthetic construct
  source 1..75: mol_type = other DNA
taaccgtaagtacttataaggttggaactaatgctaatgctattagttatggcacttataacgttaactacgtgt

SEQ ID NO: 167990 - DNA, 75 bp, synthetic construct
  source 1..75: mol_type = other DNA
gctgtttcgttactgccaaagacggcaacaaccgctttatgaggatgccagaagatattctgaactatcgtcatc

SEQ ID NO: 167991 - DNA, 75 bp, synthetic construct
  source 1..75: mol_type = other DNA
agtagtgccgaaaattatcgaacagtttgatcatctcggacacgcgctacccgcctccacccgaatgctcatcgc

SEQ ID NO: 167992 - DNA, 75 bp, synthetic construct
  source 1..75: mol_type = other DNA
aaaatccgggcatctcgacgtggtgctcaatcgcctggcggattacaccgaacagcgacagcgcctgaaatcacg

SEQ ID NO: 167993 - DNA, 75 bp, synthetic construct
  source 1..75: mol_type = other DNA
tgcttgcatcctcaagcgccacggcggatgcaatatcctctgcacgttttgccgctgtctcagcgcgcgttgctg

SEQ ID NO: 167994 - DNA, 75 bp, synthetic construct
  source 1..75: mol_type = other DNA
tggtttccgacgctttcgcgttcgtctcggatgtcttcgctgcggaagctgacctcgcggctgcgctggcctgta

SEQ ID NO: 167995 - DNA, 75 bp, synthetic construct
  source 1..75: mol_type = other DNA
cgcagctgaggcgctctgtcccgctgctgtttcagaagacttagcgttcgtctcggacgtttttgccgccttcgc

SEQ ID NO: 167996 - DNA, 75 bp, synthetic construct
  source 1..75: mol_type = other DNA
aaccagcaccaccgctgaatgacattgttgttgagttaagcgtaccaatatctttcggcgtcagtgttatatccg

SEQ ID NO: 167997 - DNA, 75 bp, synthetic construct
  source 1..75: mol_type = other DNA
gttgaagcagacgatgcggcactttctgccaactttccggcagcggtggcactggctgaggcctgcccggcactt

SEQ ID NO: 167998 - DNA, 75 bp, synthetic construct
  source 1..75: mol_type = other DNA
gctttttgaggactctgcagcagcagcactttttgctgcttcacgggcctttgtcgatgccgttcctgcgctgga

SEQ ID NO: 167999 - DNA, 75 bp, synthetic construct
  source 1..75: mol_type = other DNA
gtttgtctcagacgtctttgccgccttcgcggaatttcctgccgccgttgccgaggaagcggcactactggcgct

SEQ ID NO: 168000 - DNA, 75 bp, synthetic construct
  source 1..75: mol_type = other DNA
gccgacgcatcccgggctgaggtggcagcttctgacgctttcgtggtcgcggtggatgctgaagtggctgctgat

SEQ ID NO: 168001 - DNA, 75 bp, synthetic construct
  source 1..75: mol_type = other DNA
gacgccgaactggctgacgatgcggcagccgtttttgaggattctgcgctggtttccgacgctttcgcgttcgtt

SEQ ID NO: 168002 - DNA, 75 bp, synthetic construct
  source 1..75: mol_type = other DNA
atgttcccgctggtatccgtggcgtttataaccaggcgctgtatttaaagcagcggcggcagatgcttcaggatt

SEQ ID NO: 168003 - DNA, 75 bp, synthetic construct
  source 1..75: mol_type = other DNA
cttagaaataactccatactcttttctgatggctttaatataaaatttaagtacccttatctattctatttcttc

SEQ ID NO: 168004 - DNA, 75 bp, synthetic construct
  source 1..75: mol_type = other DNA
gctgttgaagcggatgatgcggcgctttctgccgattttccggcggcggtggcactgactgctgcctcctctgcc

SEQ ID NO: 168005 - DNA, 75 bp, synthetic construct
  source 1..75: mol_type = other DNA
ctgccgccgttgccgaggaagctgcgctactggcgctcgaggatgcgttcgtttctgatgattttgccgcctctt

SEQ ID NO: 168006 - DNA, 75 bp, synthetic construct
  source 1..75: mol_type = other DNA
tctgcagcagcagcacttttcgatgcttcactggcctttgttgatgccgttcctgcgctggaagacgctgactga

SEQ ID NO: 168007 - DNA, 75 bp, synthetic construct
  source 1..75: mol_type = other DNA
gctgcctctgtcgccttcgtggatgccgtcgtggcgctgcccttcgctgctgacgcctgtctggtcgcctcatct

SEQ ID NO: 168008 - DNA, 75 bp, synthetic construct
  source 1..75: mol_type = other DNA
tctcggacgtttttgccgccttcgcggaatttcctgccgctgttgccgaggaagctgcgctactggcgctcgagg

SEQ ID NO: 168009 - DNA, 75 bp, synthetic construct
  source 1..75: mol_type = other DNA
ctcgctgctgcgctggcctgttcagtggcttcgccagccttcgttgtggctgttgaagcggatgatgcggcgctt

SEQ ID NO: 168010 - DNA, 75 bp, synthetic construct
  source 1..75: mol_type = other DNA
tgtctggtcgcctcatcttttgaagcagacgccgatgatgccgatgacgccgccgaactggctgacgatgcggca

SEQ ID NO: 168011 - DNA, 75 bp, synthetic construct
  source 1..75: mol_type = other DNA
cgcagctgaggcgctctgtcccgctgccgtttcagaagacctggcgttcgtctcggacgtttttgccgccttcgc

SEQ ID NO: 168012 - DNA, 75 bp, synthetic construct
  source 1..75: mol_type = other DNA
gctttttgaggactctgcagcagcactttttgctgcttcacgggcctttgtcgatgccgttcctgcgctggaaga

SEQ ID NO: 168013 - DNA, 75 bp, synthetic construct
  source 1..75: mol_type = other DNA
cgtttctgacgttttcgcggcaccggcactggtagctgccgcgctttttgaggactctgcagcggcagcactttt

SEQ ID NO: 168014 - DNA, 75 bp, synthetic construct
  source 1..75: mol_type = other DNA
cgcagctgaggcactctgtcccgctgccgtttcagaagacctggcgtttgtctcagacgtctttgccgccttcgc

SEQ ID NO: 168015 - DNA, 75 bp, synthetic construct
  source 1..75: mol_type = other DNA
ccttcgtggatgctgtcgtggcgctgcccttcgctgctgacgcctgtctggtcgcctcatcttttgaagcagacg

SEQ ID NO: 168016 - DNA, 75 bp, synthetic construct
  source 1..75: mol_type = other DNA
ttgtgacgctgccgcattcgtttctgacgttttcgcggcactggcactggtagctgccgcgctttttgaggactc

SEQ ID NO: 168017 - DNA, 75 bp, synthetic construct
  source 1..75: mol_type = other DNA
acgcacatcgtcgcgtggcggcggcagatcttgcgctgttcacgcgccaactggcaacgctggtacaggcagcaa

SEQ ID NO: 168018 - DNA, 75 bp, synthetic construct
  source 1..75: mol_type = other DNA
caagcacggcaacacgcctggctcaagcgccatcctgttccactggtctcctttaccgtggttgcgcctgggccg

SEQ ID NO: 168019 - DNA, 75 bp, synthetic construct
  source 1..75: mol_type = other DNA
tgcaccaccatgtgcaaattactgacccggcaattgttgcagctgcgacgttgtctcatcgctacattgctgacc

SEQ ID NO: 168020 - DNA, 75 bp, synthetic construct
  source 1..75: mol_type = other DNA
ggtaatgaagaaaaaacaaatgaaattgtaaaaaaacttccgggttatgtcattaagatttttgaagaaaagatg

SEQ ID NO: 168021 - DNA, 75 bp, synthetic construct
  source 1..75: mol_type = other DNA
atcaatatatatgaatatattaataaagaacagttagaaaaattaaatcctccggaagatttacgtatagcaata

SEQ ID NO: 168022 - DNA, 75 bp, synthetic construct
  source 1..75: mol_type = other DNA
ctaacctcggttccgatttgattcaggaacgcttcggtgaactggattatgcgcacatgaaagagctggtgctcg

SEQ ID NO: 168023 - DNA, 75 bp, synthetic construct
  source 1..75: mol_type = other DNA
atcgctctctggtacgcagaccattaaagcggaactggagcaggcgaaaatcgccattgaacaggctcgccgtgt

SEQ ID NO: 168024 - DNA, 75 bp, synthetic construct
  source 1..75: mol_type = other DNA
aggccatagacgccgcccagccacaggacaagccctacaaactcacagattcacaaacgccaggccttttcttgc

SEQ ID NO: 168025 - DNA, 75 bp, synthetic construct
  source 1..75: mol_type = other DNA
atccggtagcagatctggatacggcactgaaagcccgacgcccaggccataacgcatggatacagatcagtgaaa

SEQ ID NO: 168026 - DNA, 75 bp, synthetic construct
  source 1..75: mol_type = other DNA
tcaacggcactatcgacaacgaaacaattcttctagttaacgctcgtgagctacactcttttcttggtgtgggca

SEQ ID NO: 168027 - DNA, 75 bp, synthetic construct
  source 1..75: mol_type = other DNA
cggtctggagatacaaaactacgccgacgcgtcactgtttgctgatgaatcaatacgctggcgaagcagctatga

SEQ ID NO: 168028 - DNA, 75 bp, synthetic construct
  source 1..75: mol_type = other DNA
cctttcatggctggtccctgcgcgcgttcttgcagtggaattgttccctgaccagcttaccgtgacccgttcaca

SEQ ID NO: 168029 - DNA, 75 bp, synthetic construct
  source 1..75: mol_type = other DNA
ttgcgtcaggataacgatttcctttacgaccaaggagcgcccatagaacaacgccacatcaccggcaaaagccac

SEQ ID NO: 168030 - DNA, 75 bp, synthetic construct
  source 1..75: mol_type = other DNA
gcgcgctgcgctggcggagttgcgcctgttccccccgatgatgctgtacatgatcgcctccggcgaacagagcgg

SEQ ID NO: 168031 - DNA, 75 bp, synthetic construct
  source 1..75: mol_type = other DNA
tttgttcgatggtggctgccggagaaaaatccgggcatctcgacgtggtgctcaatcgcctggcggattacaccg

SEQ ID NO: 168032 - DNA, 75 bp, synthetic construct
  source 1..75: mol_type = other DNA
cgatgatgctgtacatgatcgcctccggcgaacagagcggcgaactggaaaccatgcttgagcaggccgctgtta

SEQ ID NO: 168033 - DNA, 75 bp, synthetic construct
  source 1..75: mol_type = other DNA
tgatggagttcctgaatacagagggaatattaattcagaaaattcagatacccaaggtgtgagcattacttttac

SEQ ID NO: 168034 - DNA, 75 bp, synthetic construct
  source 1..75: mol_type = other DNA
ggaatggagagccattcaacagggttatcgaagcagagaacatcaacgactgctatgaccactggatgatatggg

SEQ ID NO: 168035 - DNA, 75 bp, synthetic construct
  source 1..75: mol_type = other DNA
atgaaattcaaattcacaggtgaatggaatggagaaccattcaacagagttatcgaagcggagaatatcaatgac

SEQ ID NO: 168036 - DNA, 75 bp, synthetic construct
  source 1..75: mol_type = other DNA
caaactgatgcagcgaatttacttaagcctgctcttgcccgtggggaattgcgcattatagccgccacgacatgg

SEQ ID NO: 168037 - DNA, 75 bp, synthetic construct
  source 1..75: mol_type = other DNA
aaggaaattgaccttctcacgcgccagctgaaaaaactgaatgacggtcagggagaacaggctgtttccggtaag

SEQ ID NO: 168038 - DNA, 75 bp, synthetic construct
  source 1..75: mol_type = other DNA
atatgcccgctttctgcgccattctggtggcattattcgcctttgcgatgatgcgcgataccccgcaatcttgtg

SEQ ID NO: 168039 - DNA, 75 bp, synthetic construct
  source 1..75: mol_type = other DNA
cccggcaggtaatccgactgttgatatggtttgcatgattgtcattggcttcctgatctacggtcctgtcatgct

SEQ ID NO: 168040 - DNA, 75 bp, synthetic construct
  source 1..75: mol_type = other DNA
aaggaaatcggggtgagcattaacacgatctacagttggcgccgccgctacgaatgggataaagccacccccatg

SEQ ID NO: 168041 - DNA, 75 bp, synthetic construct
  source 1..75: mol_type = other DNA
cagccacggcgaccttgcgtgggcaaccatgcttgctgtcattaacgaaccgattggcggcgaaggagaaaacga

SEQ ID NO: 168042 - DNA, 75 bp, synthetic construct
  source 1..75: mol_type = other DNA
gaagtggatgttgagctgaaagggggcgacaagatcgtgctgtccaacggcgcggagctgcacttcctcggtacg

SEQ ID NO: 168043 - DNA, 75 bp, synthetic construct
  source 1..75: mol_type = other DNA
gattttcacgcggcgacttaggttttgcgctttccgggatctctatcgcctatggattttcgaaatttatcatgg

SEQ ID NO: 168044 - DNA, 75 bp, synthetic construct
  source 1..75: mol_type = other DNA
ggtttttccctgctgctattccgtacaccttcacgctgtcatccaaacggtcgctggtactgaaaatgctgcaaa

SEQ ID NO: 168045 - DNA, 75 bp, synthetic construct
  source 1..75: mol_type = other DNA
ttcgaacggtggagacgcgacgcgttcaggggctggagtttgaagaacaggccagagtcattgaagagttcacgc

SEQ ID NO: 168046 - DNA, 75 bp, synthetic construct
  source 1..75: mol_type = other DNA
attcttgctgcggcagtgatgctgtttatgggctttgtgccgtgggcgacttccagcattgcggtgatgttcgtg

SEQ ID NO: 168047 - DNA, 75 bp, synthetic construct
  source 1..75: mol_type = other DNA
gattctctcgtggggatttaggttttgccctttccggtatctccattgcttacggattttcgaaattcatcatgg

SEQ ID NO: 168048 - DNA, 75 bp, synthetic construct
  source 1..75: mol_type = other DNA
ctatcgccaacgtgttcgtttatctgttgcgttacggcattcttgactggtcgccaacttacctgaaagaagtga

SEQ ID NO: 168049 - DNA, 75 bp, synthetic construct
  source 1..75: mol_type = other DNA
tggcgatcctgcattattccgccgttagcattaccgttattttgctgtgtaatattgtcgccctgatgtggctgg

SEQ ID NO: 168050 - DNA, 75 bp, synthetic construct
  source 1..75: mol_type = other DNA
gtcccggcggcgattgttcacggttttattcttagcctgttagtgccgatcctcatcgcctttttttccgcgtaa

SEQ ID NO: 168051 - DNA, 75 bp, synthetic construct
  source 1..75: mol_type = other DNA
atggcaaggacgcgtttcagtttcgccctggcaaagtgtgccacctgatgaatccggacattaaccaggaaattt

SEQ ID NO: 168052 - DNA, 75 bp, synthetic construct
  source 1..75: mol_type = other DNA
cttgaatcatggtggtatgtgcaggatggcaaggacgcgtttcagtttcgccctggcaaagtgtgccacctgatg

SEQ ID NO: 168053 - DNA, 75 bp, synthetic construct
  source 1..75: mol_type = other DNA
accatgcttgctgtcattaacgaaccgattggcggcgaaggagaaaacgagcgtttcacggttatggagttctga

SEQ ID NO: 168054 - DNA, 75 bp, synthetic construct
  source 1..75: mol_type = other DNA
aacagcgccagcaacgaaaccgcatgatcctgaaaagccgccagattggcgcaacctggtactttgcccgcgagg

SEQ ID NO: 168055 - DNA, 75 bp, synthetic construct
  source 1..75: mol_type = other DNA
accggcgcaacccttcaagaaggcgcgcgcgagcaagaagaaaaaccacttcaccgaagcgcagatcgccgcgct

SEQ ID NO: 168056 - DNA, 75 bp, synthetic construct
  source 1..75: mol_type = other DNA
agagagcaaagcagctttactggcagggctacccgccagcagagatttcacgcctgatgggtatcagttcaaaca

SEQ ID NO: 168057 - DNA, 75 bp, synthetic construct
  source 1..75: mol_type = other DNA
cgcacaacaaacggatgaagggtcattccactgcccctgggcagtattccctgctggattttacgcacgtgcctt

SEQ ID NO: 168058 - DNA, 75 bp, synthetic construct
  source 1..75: mol_type = other DNA
ttccgtacaacttcaatatcgcgtccaaacgggcgctggtcatgaagatgcttcaggtggtccgtgccggacgct

SEQ ID NO: 168059 - DNA, 75 bp, synthetic construct
  source 1..75: mol_type = other DNA
ggaagccttttgctgtccgccctatgggggtgagggaagtctggctcgggtatgacgccaacggcagcagcggga

SEQ ID NO: 168060 - DNA, 75 bp, synthetic construct
  source 1..75: mol_type = other DNA
atatattattaatggacgaagccttctcggcgctcgatccattaattcgcaccgagatgcaggatgagctggtaa

SEQ ID NO: 168061 - DNA, 75 bp, synthetic construct
  source 1..75: mol_type = other DNA
cgtgaggggcgcagaaaaaagattgcgatggtcttccagtcctttgccttaatgccgcatatgaccgtgctggac

SEQ ID NO: 168062 - DNA, 75 bp, synthetic construct
  source 1..75: mol_type = other DNA
ttgctcttacggttgggaagctgagagttgagctggaagccgcagagaagcgcattgcagaactggaagcacggg

SEQ ID NO: 168063 - DNA, 75 bp, synthetic construct
  source 1..75: mol_type = other DNA
aaaggcgaagttcttgtcgttgtttctggttttactggttgcggaaaaagcgccatcgccggggaaatagaaatt

SEQ ID NO: 168064 - DNA, 75 bp, synthetic construct
  source 1..75: mol_type = other DNA
atcgattcgcttaaagccgcgttaacgcagcagcaaggtcttgatgcggcgctgattgatgcgccgttagcggtc

SEQ ID NO: 168065 - DNA, 75 bp, synthetic construct
  source 1..75: mol_type = other DNA
gcggagattgattgtaagccagtccgggactttgttgccaaggctaatccggctaccgtgctggaattactggat

SEQ ID NO: 168066 - DNA, 75 bp, synthetic construct
  source 1..75: mol_type = other DNA
ctcaacactggagaaaaatttcccggaagataatgctgtcggtgtgcttgaggtttttgctgccggcaattttgc

SEQ ID NO: 168067 - DNA, 75 bp, synthetic construct
  source 1..75: mol_type = other DNA
cgatatggacacccgataaatgcagatgagctacatgtcatgatacctaaagaaaatggcagttggctttacctg

SEQ ID NO: 168068 - DNA, 75 bp, synthetic construct
  source 1..75: mol_type = other DNA
tcttctcaatatcgtggcgcgtgaccttccacacgtgcgagcagttacagagcaatatgccgcgcctgttggcag

SEQ ID NO: 168069 - DNA, 75 bp, synthetic construct
  source 1..75: mol_type = other DNA
atacaaatggaatggtccctctggcttcagttggcaatcagccagtatcggtaaacgtctcttcaggtggcacat

SEQ ID NO: 168070 - DNA, 75 bp, synthetic construct
  source 1..75: mol_type = other DNA
cgggccgcttttctgcatgtcatcaacgcccagttagaacatatcggggtttccacccccaacagtaacaccccg

SEQ ID NO: 168071 - DNA, 75 bp, synthetic construct
  source 1..75: mol_type = other DNA
atgcagaacaatccgaacaaatgtcgaacgctatgggtgcggttatatatttatgccgtcctctgtttgattgtg

SEQ ID NO: 168072 - DNA, 75 bp, synthetic construct
  source 1..75: mol_type = other DNA
gaagttatggaagactacgcaacccgtgaggatgcggaagaattacaaggtaaacacggcaaccaaccgcgcttt

SEQ ID NO: 168073 - DNA, 75 bp, synthetic construct
  source 1..75: mol_type = other DNA
tctggacggcgagagcgatcatgaaagtggacgccctctgaaggaaaccgctaagcacgcaacagcctgggcgtc

SEQ ID NO: 168074 - DNA, 75 bp, synthetic construct
  source 1..75: mol_type = other DNA
catttcgcggcattggtaaaacctttcccggcgttaaggcgcttacggacatcagttttgactgctatgccggtc

SEQ ID NO: 168075 - DNA, 75 bp, synthetic construct
  source 1..75: mol_type = other DNA
gcagtatggtttatgagcatcgttgagaagcagttgcgtcgcgcaatccccgatgccctggatttgatcctgacg

SEQ ID NO: 168076 - DNA, 75 bp, synthetic construct
  source 1..75: mol_type = other DNA
ccctggtgcacaaaaaaggatgatggatgttctgtactctattgttgagcagaaaaaacatcaagtggtaatatc

SEQ ID NO: 168077 - DNA, 75 bp, synthetic construct
  source 1..75: mol_type = other DNA
ttacaacttaaacatctggggatggatattgaccccggtacgccactgaaatatctctccatcggccagtggcag

SEQ ID NO: 168078 - DNA, 75 bp, synthetic construct
  source 1..75: mol_type = other DNA
tacctgaagtcctcggcgttgccgaccggattgtggtgatgcgggaaggtgaaatcgccggtgaattgttacacg

SEQ ID NO: 168079 - DNA, 75 bp, synthetic construct
  source 1..75: mol_type = other DNA
caccgtatggaagaaatatttgccctcagcgatgccatcactgtctttaaagatggacgttatgtcaaaaccttt

SEQ ID NO: 168080 - DNA, 75 bp, synthetic construct
  source 1..75: mol_type = other DNA
aagtagaaggcggtgtagtagacctgaacacgctgaaagcggctaacattatcggtattcagatcgagttcgcga

SEQ ID NO: 168081 - DNA, 75 bp, synthetic construct
  source 1..75: mol_type = other DNA
cgtggtcatgtccgtcacaatccactgcaaaaccagagtctggttaccctgaagataaaggcaatggggttctgg

SEQ ID NO: 168082 - DNA, 75 bp, synthetic construct
  source 1..75: mol_type = other DNA
tggaagatcctgacttcaacgaagcacgtaatgtcagcgcactgttcctcgtgcgcgagtggttgaaggagcagg

SEQ ID NO: 168083 - DNA, 75 bp, synthetic construct
  source 1..75: mol_type = other DNA
tattgaagataaagaattagaacaagctttatcattaataataaaagaaaaaataaaggcatcaacaataaactt

SEQ ID NO: 168084 - DNA, 75 bp, synthetic construct
  source 1..75: mol_type = other DNA
cgttggctggatttatttgaagaaaaattagccatttataaacctaatgataaactcgcgcttagcgaattacac

SEQ ID NO: 168085 - DNA, 75 bp, synthetic construct
  source 1..75: mol_type = other DNA
gcccggccccggatgaaagcgtgattaacgcagtcagggaccacatccttcctctggcacctgttgccggaagcg

SEQ ID NO: 168086 - DNA, 75 bp, synthetic construct
  source 1..75: mol_type = other DNA
tgctgacgtatgagctgggtaaagagggtgaaaccgggagtcttgccctgcgcttaaccgccaatggcgaagggg

SEQ ID NO: 168087 - DNA, 75 bp, synthetic construct
  source 1..75: mol_type = other DNA
aagccgccgtcaccgaaagctataccgtgttctacaggggtgaagccgagaaaatcagcccccacagtaaaggac

SEQ ID NO: 168088 - DNA, 75 bp, synthetic construct
  source 1..75: mol_type = other DNA
gcactggagcttttacattatttgccgattatgaaattaatgatctcactgtaaaggctgatgacggtgagacct

SEQ ID NO: 168089 - DNA, 75 bp, synthetic construct
  source 1..75: mol_type = other DNA
gattcgtgatcaactgctggaaaccgttggtattactgaacaagcatggagacgtgcggttagccagaaacttaa

SEQ ID NO: 168090 - DNA, 75 bp, synthetic construct
  source 1..75: mol_type = other DNA
aagccgccgtcaccgaaagctataccgtgttctacatgggggaagccgagaaaatcagcccccacagtaaaggac

SEQ ID NO: 168091 - DNA, 75 bp, synthetic construct
  source 1..75: mol_type = other DNA
cgcttaaccgccaatggcgaagggggcctgttctcccgtgaatggatagcgcttgatgcgattcacgccattctg

SEQ ID NO: 168092 - DNA, 75 bp, synthetic construct
  source 1..75: mol_type = other DNA
agcgggcacgccagctgtactggcagggttaccctgttgcggaaatttcccgccttatgggtatcaaccagaaca

SEQ ID NO: 168093 - DNA, 75 bp, synthetic construct
  source 1..75: mol_type = other DNA
tccggcctgagcgcagtgtccaccactcgatccgcacggtgaaattacagctcaccgactgcggtgaaacccggg

SEQ ID NO: 168094 - DNA, 75 bp, synthetic construct
  source 1..75: mol_type = other DNA
gaaattacagctcacagactgtggtgaaacccggggacgctgggtgattgaaggcgacctgtccagttacttcga

SEQ ID NO: 168095 - DNA, 75 bp, synthetic construct
  source 1..75: mol_type = other DNA
cgaccgcagcgagcgcgaactggtgagcgcctttaacgcggtacgcaaaacaaaaacgcaggccggatttatcac

SEQ ID NO: 168096 - DNA, 75 bp, synthetic construct
  source 1..75: mol_type = other DNA
cgacctggtattttgcacaggaagcactgctgatggcgctgcgtgacgatgtggcacaaccttaccagcgtaacc

SEQ ID NO: 168097 - DNA, 75 bp, synthetic construct
  source 1..75: mol_type = other DNA
aaacgccacccgtgcagcgtgtcacgcagtccatcgatgcgcgcctcatccagcttactgaaaaacagaataaaa

SEQ ID NO: 168098 - DNA, 75 bp, synthetic construct
  source 1..75: mol_type = other DNA
agcgttaacgactgcgcaaaacattatgcaggcaaatgccaacctgaatggtctgtttggctttggtgatgatgc

SEQ ID NO: 168099 - DNA, 75 bp, synthetic construct
  source 1..75: mol_type = other DNA
tacaatcggtggttgcgcgcgttgatggttttaagaaagggttaagtgatacaccggatattaaaattgttgctg

SEQ ID NO: 168100 - DNA, 75 bp, synthetic construct
  source 1..75: mol_type = other DNA
taaagcgattgatgccgctgtggatcatctcaatggtaaaccggtagaaaaaatgatcccggtacaacccggcgt

SEQ ID NO: 168101 - DNA, 75 bp, synthetic construct
  source 1..75: mol_type = other DNA
tgatgaagtaggggcatactatacggaccgtattgctgtggaagccactcaggtgcgttcactggattttgctct

SEQ ID NO: 168102 - DNA, 75 bp, synthetic construct
  source 1..75: mol_type = other DNA
atcgttctaattttggtgacgtgattatagccaccacattttctcagcgtgctattactgtatgctctgttatta

SEQ ID NO: 168103 - DNA, 75 bp, synthetic construct
  source 1..75: mol_type = other DNA
acctgaagatatctatacaaactttggtcttaaatttgaaaatgcttgttacaggattgtgattaaaattactga

SEQ ID NO: 168104 - DNA, 75 bp, synthetic construct
  source 1..75: mol_type = other DNA
aaagtgcgcagaaaaaatctgcgcagactgcgcaaaagcggaacggaaaatctcagaaaaaaaagccagtatccg

SEQ ID NO: 168105 - DNA, 75 bp, synthetic construct
  source 1..75: mol_type = other DNA
aaggtgcgcaaaagaaaactgcgcaaaagcgaaccggcaaaacggggaaggaaaaatccagagtggttgtttctc

SEQ ID NO: 168106 - DNA, 75 bp, synthetic construct
  source 1..75: mol_type = other DNA
ccgataccaccctgcttgatggtgatgcgcgactgctttatgccggggccaagtacgggaaattcggcgtcgaaa

SEQ ID NO: 168107 - DNA, 75 bp, synthetic construct
  source 1..75: mol_type = other DNA
ccgggacactgatattagcagctcgagcaacgaaatatgctcaatatgtttgcccagtttgtaaaaaaggtgtta

SEQ ID NO: 168108 - DNA, 75 bp, synthetic construct
  source 1..75: mol_type = other DNA
atgcttgttgctcaggggaaaaagccgacagaggcataccgactggctggttatgaggggcaaggtgcgacagct

SEQ ID NO: 168109 - DNA, 75 bp, synthetic construct
  source 1..75: mol_type = other DNA
atatagcagaattcgacaacgcagcggcacaggcttccagagatggcaaacccgaaccggaatatggaggcctcg

SEQ ID NO: 168110 - DNA, 75 bp, synthetic construct
  source 1..75: mol_type = other DNA
ggccgggataagttcttttgccggccgtaaaagcccggaatatgcgttcgaagagctgattgccgagatgggcag

SEQ ID NO: 168111 - DNA, 75 bp, synthetic construct
  source 1..75: mol_type = other DNA
cccgtgatgatgtgctggctgcgcaccgcgttccgccgcaactgatgggggcgatgccgggtgaaaaaagtgcgt

SEQ ID NO: 168112 - DNA, 75 bp, synthetic construct
  source 1..75: mol_type = other DNA
tcggcggacatgttcagaaaactgtattacgacaatggatcccacgccgggtgcatcatctacatcggtgcagcg

SEQ ID NO: 168113 - DNA, 75 bp, synthetic construct
  source 1..75: mol_type = other DNA
cagcgtgtacaggcttcaggaaacaatcaggtgtccagcacagccggagcgcacgcccatacggtggatattggt

SEQ ID NO: 168114 - DNA, 75 bp, synthetic construct
  source 1..75: mol_type = other DNA
gtttagggatgtgcctgatgatacaccgcaaaattacggtgtcggtgttggggcgttatatagaactggaactgc

SEQ ID NO: 168115 - DNA, 75 bp, synthetic construct
  source 1..75: mol_type = other DNA
cctgaagtctgacaaaaaagcactgtttcgcgcctgccggcaggcacgtgaagcatcagagtatttactgatgca

SEQ ID NO: 168116 - DNA, 75 bp, synthetic construct
  source 1..75: mol_type = other DNA
ctcaccgagcacgcgagcaaaatcgatgcgattataagtcgcaatggcacaaatacggcacaagaggagaacgta

SEQ ID NO: 168117 - DNA, 75 bp, synthetic construct
  source 1..75: mol_type = other DNA
atggaaacccgccgccatcgcctgaactgggagatgagccgggacaggtgtttgcggcttggcaagccagtgccg

SEQ ID NO: 168118 - DNA, 75 bp, synthetic construct
  source 1..75: mol_type = other DNA
gtccgaatatcaggatttgatgactgtccgcgggaaaaagatgaagcccggcacgcagctgcacaagatgagaaa

SEQ ID NO: 168119 - DNA, 75 bp, synthetic construct
  source 1..75: mol_type = other DNA
ggtatcttcatgatatgggtgatggatatatcggctgtacgacttgggatggcaaagaagtagcatttctatcct

SEQ ID NO: 168120 - DNA, 75 bp, synthetic construct
  source 1..75: mol_type = other DNA
aaacgccgacgccataaccaatcttggcattatgtatgagaatggggaaggtgtaaaaaaggactataaaaaagc

SEQ ID NO: 168121 - DNA, 75 bp, synthetic construct
  source 1..75: mol_type = other DNA
ggggactggatggtattctggttcgcctggtatcctttatcactgggcctgaggttctgagatgtctgaagctcc

SEQ ID NO: 168122 - DNA, 75 bp, synthetic construct
  source 1..75: mol_type = other DNA
tgttaactgccgttattgctggggcgagaatcatctctaccagtggcgcgatatagcagaattcgacaaggcagc

SEQ ID NO: 168123 - DNA, 75 bp, synthetic construct
  source 1..75: mol_type = other DNA
atgagcagaccggactgggggacgttgcagcaggaatatattgctgaatacacccgctccggtgtgtctccggtg

SEQ ID NO: 168124 - DNA, 75 bp, synthetic construct
  source 1..75: mol_type = other DNA
atgcgggcctgaatgagggcgacgcggaggaattttcgttctgtcccgatgaattcggcatttctgaccagcagg

SEQ ID NO: 168125 - DNA, 75 bp, synthetic construct
  source 1..75: mol_type = other DNA
atgaatcagatgaacatcaccgtaatgtgccaggcacaccatacagcagctgttgggcagcagataaccatgtcc

SEQ ID NO: 168126 - DNA, 75 bp, synthetic construct
  source 1..75: mol_type = other DNA
atgaacagaccggactggggggcgttgcagcaggaatatattgctgaatacacccgttccggtatatctccggtt

SEQ ID NO: 168127 - DNA, 75 bp, synthetic construct
  source 1..75: mol_type = other DNA
cgaaattcgcaatgctggttgcccaggggaaaaaactcgttgaggcatatcgcctggcaggatacgagtcagagg

SEQ ID NO: 168128 - DNA, 75 bp, synthetic construct
  source 1..75: mol_type = other DNA
ccgatcgtgattgatgttaaaaacgcgggcgcggaattttacgatcaggaagtggtggtcgataaagatcagctg

SEQ ID NO: 168129 - DNA, 75 bp, synthetic construct
  source 1..75: mol_type = other DNA
cgtgctacgtttttggagatgtttggtgatcctgttgaaaaccctaaaggatggaaaaaggataaaataaaaaaa

SEQ ID NO: 168130 - DNA, 75 bp, synthetic construct
  source 1..75: mol_type = other DNA
acggcagacagaaaagaatatcctgagaaatgcttcagtgcactggaagaggccgtgaacagcggaaaaatcacc

SEQ ID NO: 168131 - DNA, 75 bp, synthetic construct
  source 1..75: mol_type = other DNA
atgctggctatatccttggggtctctcctcgggaagcccccccccgactcaatctttccgctgaaaggaaaatcc

SEQ ID NO: 168132 - DNA, 75 bp, synthetic construct
  source 1..75: mol_type = other DNA
tgtgacacccaggctggctgggtgacaagcacaaaaaaatactatgtcaaattcagaatacaggtatttaaaaag

SEQ ID NO: 168133 - DNA, 75 bp, synthetic construct
  source 1..75: mol_type = other DNA
gccatctgtcacggtccgcagctgctgatcagcgccgatgtgattcgggggcgcaaactgaccgcagttaaaccg

SEQ ID NO: 168134 - DNA, 75 bp, synthetic construct
  source 1..75: mol_type = other DNA
tccggaaagattctggtattgtgctacaacattaccctggccagctatctgcgggaatgcattgaagccagaggg

SEQ ID NO: 168135 - DNA, 75 bp, synthetic construct
  source 1..75: mol_type = other DNA
gtctggtatttcttgaagtcaaggactggaccgttcacacgttgcatcaggtaaatcacgaacaggtcattcttg

SEQ ID NO: 168136 - DNA, 75 bp, synthetic construct
  source 1..75: mol_type = other DNA
cagagggttggcgtcacgggttacggtatcccattttcacagctggtgtgcctcaatggtaaaacgtcacggtat

SEQ ID NO: 168137 - DNA, 75 bp, synthetic construct
  source 1..75: mol_type = other DNA
ctgaacttttctctggccagtgtggggattcaggcacagggacgcacttctgtcctgccggtcaattatcgtaat

SEQ ID NO: 168138 - DNA, 75 bp, synthetic construct
  source 1..75: mol_type = other DNA
gtactggtttatgccgccaagtgccaacctcgcgctgcgggagctggggatcgtgctgttcctctcggtcgttgg

SEQ ID NO: 168139 - DNA, 75 bp, synthetic construct
  source 1..75: mol_type = other DNA
gtgctttatgtggcgttcacccgggcaacccgcgaattactggtgacctgttaccgtgaaaacagtatcagtcgt

SEQ ID NO: 168140 - DNA, 75 bp, synthetic construct
  source 1..75: mol_type = other DNA
atgacgcccggggagaggagggtggcttcacgactggagagctttctgaatgatgactgccttgtctggtacgat

SEQ ID NO: 168141 - DNA, 75 bp, synthetic construct
  source 1..75: mol_type = other DNA
cagcaggagattctggccagaaatattggtgacgggcatcgtgtcattcatggtgtggctggttccggaaaaacc

SEQ ID NO: 168142 - DNA, 75 bp, synthetic construct
  source 1..75: mol_type = other DNA
ctcattttcacagctggtgtgcctcaatgataaaacgccacggtattcaagtgacggctgacagaaagaattacc

SEQ ID NO: 168143 - DNA, 75 bp, synthetic construct
  source 1..75: mol_type = other DNA
atgagagatattctgcgcgcccatctgtttcctgaagtgaccgtgaaacagaactcacaaatcaaaatcatggat

SEQ ID NO: 168144 - DNA, 75 bp, synthetic construct
  source 1..75: mol_type = other DNA
cttcacgactggagagctttctgaatgatgactgccttgtctggtacgatatcccggtgggacggaaaaaccgac

SEQ ID NO: 168145 - DNA, 75 bp, synthetic construct
  source 1..75: mol_type = other DNA
tgatgaagccagacaggttgcagactggctggagaagcgccatgccctgtgcggtcactggagtgatatggctgt

SEQ ID NO: 168146 - DNA, 75 bp, synthetic construct
  source 1..75: mol_type = other DNA
tattctcagataattatccggaaataaagtttacagcagctcaggataaatatgaaggtaaaccatatgcaacgt

SEQ ID NO: 168147 - DNA, 75 bp, synthetic construct
  source 1..75: mol_type = other DNA
caacgtacagaattggtctattttttaatggcgatacggataaccagcctgtggattttcgtctggttggttttc

SEQ ID NO: 168148 - DNA, 75 bp, synthetic construct
  source 1..75: mol_type = other DNA
attcagaatacaggcatttaaaaagggagaagaaaaaccgtttctcgacacagtaatggaattgaaggataaatc

SEQ ID NO: 168149 - DNA, 75 bp, synthetic construct
  source 1..75: mol_type = other DNA
tcccgcgagtattttgaaaaacatcagaaccgtgaaataccgctcgttcagccacaggcggggggggaagagggc

SEQ ID NO: 168150 - DNA, 75 bp, synthetic construct
  source 1..75: mol_type = other DNA
acgggattcagaacccgggtgacaccccggatgagagatattctgcgcgcccatctgtttcctgaagtgaccgtg

SEQ ID NO: 168151 - DNA, 75 bp, synthetic construct
  source 1..75: mol_type = other DNA
atttattacgacatgccagtttttttgtcggtttagccagtggattgtcatggctggcatgggcctgccgcatcc

SEQ ID NO: 168152 - DNA, 75 bp, synthetic construct
  source 1..75: mol_type = other DNA
ccggccgtgtgcctgacgcactgaagaatgtcaggatccttgcgcttgatatgggtgctctgcttgcgggggcca

SEQ ID NO: 168153 - DNA, 75 bp, synthetic construct
  source 1..75: mol_type = other DNA
ggaatgatggtgaaaaaaataatgaaaaaataaaagaaatgcttcttcctttatttaatgcgcattttggggcag

SEQ ID NO: 168154 - DNA, 75 bp, synthetic construct
  source 1..75: mol_type = other DNA
tacatttatctgaccgttatctgcatgagcgtcgccagcctgataaatctgtcagtctgttagatacagcctgct

SEQ ID NO: 168155 - DNA, 75 bp, synthetic construct
  source 1..75: mol_type = other DNA
agatggcaattgatatccgtcatttattagacggcagcctgcaagcgatggttgcggataccttaggccagcttc

SEQ ID NO: 168156 - DNA, 75 bp, synthetic construct
  source 1..75: mol_type = other DNA
aaaagaactggaaagtgcatacaggaaagacagccctatggtttttgagtgtgttgataaaaactgtgttgctga

SEQ ID NO: 168157 - DNA, 75 bp, synthetic construct
  source 1..75: mol_type = other DNA
ataaccgaaaagttttctgaactgtctttatttaaccctgacagggtccttaatgccattgaaagtgagctcatc

SEQ ID NO: 168158 - DNA, 75 bp, synthetic construct
  source 1..75: mol_type = other DNA
gatgctgtacttaatacatctgttctccctgttcttgcaagacatttaattgattctgaagttaagaaaacaaca

SEQ ID NO: 168159 - DNA, 75 bp, synthetic construct
  source 1..75: mol_type = other DNA
gtttatggggatgaaaataaactcatcacgattaatatgacggaatttcaagaagctcatacggtttccactctg

SEQ ID NO: 168160 - DNA, 75 bp, synthetic construct
  source 1..75: mol_type = other DNA
atcgatgcagtacttaatacatctgttcttcctgtgcttgccagatgtttaattgattctaaagataagaaagca

SEQ ID NO: 168161 - DNA, 75 bp, synthetic construct
  source 1..75: mol_type = other DNA
ctgaagggagctcctccaggatatgtcggttttggtcagggagggactcttacagaaagagtaagtcataatcca

SEQ ID NO: 168162 - DNA, 75 bp, synthetic construct
  source 1..75: mol_type = other DNA
ctaatgtaagaggagaatttgaaaatcgcttgaaatcgttattagcggaacttaattctttagatggtacagcta

SEQ ID NO: 168163 - DNA, 75 bp, synthetic construct
  source 1..75: mol_type = other DNA
gatcctattggaaaaaacatggttacatgccactgctaaatgggaatgcgatcgtattgatatacctgtcttgtt

SEQ ID NO: 168164 - DNA, 75 bp, synthetic construct
  source 1..75: mol_type = other DNA
tctggtaatgacgctgttgttggtgatggtgtttatcatccctattgccttactggttaacagtattgtcgatgg

SEQ ID NO: 168165 - DNA, 75 bp, synthetic construct
  source 1..75: mol_type = other DNA
tggagcggtgtggttggcacgctggataacgtcatccgcccaatgttaattcgcatgggtgccgatttaccgctg

SEQ ID NO: 168166 - DNA, 75 bp, synthetic construct
  source 1..75: mol_type = other DNA
actgattccggcgattatctggctctactggactggcgataccacctggggaacggtattgttagtgtggagcgg

SEQ ID NO: 168167 - DNA, 75 bp, synthetic construct
  source 1..75: mol_type = other DNA
gtcaaggactggacggtttccacgctgcgccaggtaaatcaggagcaggtcacgctggaaaccgacggtcttctg

SEQ ID NO: 168168 - DNA, 75 bp, synthetic construct
  source 1..75: mol_type = other DNA
tattgaagcgtttccgcctggtgttccgctgccgtggccatcagatacaccacctgcaggctatgcaatcatgca

SEQ ID NO: 168169 - DNA, 75 bp, synthetic construct
  source 1..75: mol_type = other DNA
gacaggcggtctcagcggattaagcattatgagtttgggctctctatacagctcctctgacgccgaatacattca

SEQ ID NO: 168170 - DNA, 75 bp, synthetic construct
  source 1..75: mol_type = other DNA
gcttccggcgctgaacgcacgacttaacgaagccgtcagtcgcgaacgtcagacaggaatgcagatggtgcagtc

SEQ ID NO: 168171 - DNA, 75 bp, synthetic construct
  source 1..75: mol_type = other DNA
ccactctgcatagcggaataccggaactggtggaggccgataaatccggctggctggtgcctgagaacgatgctc

SEQ ID NO: 168172 - DNA, 75 bp, synthetic construct
  source 1..75: mol_type = other DNA
tgtgcttgagcgcagtcggggaggtgaaatgaaggtcggcttctttttactgaaattcccgctgtcttcggaaac

SEQ ID NO: 168173 - DNA, 75 bp, synthetic construct
  source 1..75: mol_type = other DNA
aacgaagccgtcagtcgcgaacgtcagacgggaatgcagatggtgcagtctgtactggaacgcatcggggaggtg

SEQ ID NO: 168174 - DNA, 75 bp, synthetic construct
  source 1..75: mol_type = other DNA
ctatccggtcagttcttcctggctgctcaaccgcccggtaatgggcgatccgctgttcctgcaaatgaaacaaca

SEQ ID NO: 168175 - DNA, 75 bp, synthetic construct
  source 1..75: mol_type = other DNA
agtgaaagcgatgctcgacgacgcggatgtcttcctgttgccatcggttacaggtgcggatggtgatatggaagg

SEQ ID NO: 168176 - DNA, 75 bp, synthetic construct
  source 1..75: mol_type = other DNA
tgatgtacctgttcctctccttccttgaggactccgggtatatggcgcgtgcggcgtttgtgatggaccgtctga

SEQ ID NO: 168177 - DNA, 75 bp, synthetic construct
  source 1..75: mol_type = other DNA
tttgccctataaccggacgtgcatttttcatgtggattgagcatccggaattgggaaatgtaccgacgtacggtg

SEQ ID NO: 168178 - DNA, 75 bp, synthetic construct
  source 1..75: mol_type = other DNA
tcgatgaagatttccaaatggaacagcaggccaatgctgaattcatcaccgcagccaatccggctaccgtcttgg

SEQ ID NO: 168179 - DNA, 75 bp, synthetic construct
  source 1..75: mol_type = other DNA
atggcaccgtttatgtcctgcggtgctcgtctggcaatcttcgcagtatttgctgccgcgttcttcgggcagaat

SEQ ID NO: 168180 - DNA, 75 bp, synthetic construct
  source 1..75: mol_type = other DNA
gcggcgtttgtgatggaccgtctgatgcaggcgctgggcttgccggggaaatcctttgtgccgctgatcgtcggt

SEQ ID NO: 168181 - DNA, 75 bp, synthetic construct
  source 1..75: mol_type = other DNA
ttgatgcgctgtcggcgcgtcttggctgcccggtgatcccgctggtttccacgcgtggtcgcggtatcgaagctc

SEQ ID NO: 168182 - DNA, 75 bp, synthetic construct
  source 1..75: mol_type = other DNA
tggctggcatccacaacacaatccgaatggatggcggctatacgccactggcagcaatccttaacgctgctaaac

SEQ ID NO: 168183 - DNA, 75 bp, synthetic construct
  source 1..75: mol_type = other DNA
tgcgtgaaaaggcagagaaagcaacgtgtggtgtgtggtcgctagaatatggagatggcagatttgatggtgatg

SEQ ID NO: 168184 - DNA, 75 bp, synthetic construct
  source 1..75: mol_type = other DNA
tgtggatattgatgcgctcaacgccttcaaatttctggccggaccagaaaccgtgctggcactactggatgaacg

SEQ ID NO: 168185 - DNA, 75 bp, synthetic construct
  source 1..75: mol_type = other DNA
ggaaaattattctgggctttgacggatgaaagcaataaagatcaatcggacgttattcctgtttatgctgccgcg

SEQ ID NO: 168186 - DNA, 75 bp, synthetic construct
  source 1..75: mol_type = other DNA
aatcgaaaacggccggcttgttgccgatacgctacgccacttagctgataacgaaatcgactctgattattttgc

SEQ ID NO: 168187 - DNA, 75 bp, synthetic construct
  source 1..75: mol_type = other DNA
actgatgcgcaaaaggctgcgcaatggcttcaggcatgcgacggaaacagggttcaggaatacgtgaagctggag

SEQ ID NO: 168188 - DNA, 75 bp, synthetic construct
  source 1..75: mol_type = other DNA
caaccctgaagtagtgcaggcgttgctggatgaacgggaaagaaaccagcaatacataaaacgccgtgaccagga

SEQ ID NO: 168189 - DNA, 75 bp, synthetic construct
  source 1..75: mol_type = other DNA
ccgtgcatctcggtaatgggcgccatcgctcgtgaatcaagccgtggctggatgggcttctccatcctgtggggg

SEQ ID NO: 168190 - DNA, 75 bp, synthetic construct
  source 1..75: mol_type = other DNA
agccgattggcgtacatgaagataactggcaggcaacggttggcctgtttacgggcgcaatggcgaaagaagtgg

SEQ ID NO: 168191 - DNA, 75 bp, synthetic construct
  source 1..75: mol_type = other DNA
ataaaacgccgcgatcagaagaacgaggatattgtgctaacggtagggaagctgcgtgctgagctggaagccgca

SEQ ID NO: 168192 - DNA, 75 bp, synthetic construct
  source 1..75: mol_type = other DNA
ttgccggggaaatagaaatcgcgatgaaggctattggtgtaccggttaagtggactaatggcgatgcagaaaagc

SEQ ID NO: 168193 - DNA, 75 bp, synthetic construct
  source 1..75: mol_type = other DNA
cttgatggacaggaaaacgcagagaataacgcgcgttatatcgcagctttcaaccctgaagtagtgcaggcgttg

SEQ ID NO: 168194 - DNA, 75 bp, synthetic construct
  source 1..75: mol_type = other DNA
ctcaacgaagcagattcactggcaaaagtgatgccttccgacatcccgctgaaacaacgtcgctggctgggcctg

SEQ ID NO: 168195 - DNA, 75 bp, synthetic construct
  source 1..75: mol_type = other DNA
aaaatcgtgcttaaccgtttcctcggtctgccgattttcctgttcgtcatgtacctgatgttcctgcttgccatc

SEQ ID NO: 168196 - DNA, 75 bp, synthetic construct
  source 1..75: mol_type = other DNA
atggcaccgtttatgtcctgcggcgcacgtctggccatcttcgcagtatttgcggccgccttcttcggacagaac

SEQ ID NO: 168197 - DNA, 75 bp, synthetic construct
  source 1..75: mol_type = other DNA
gcgccgcgcgcgtagccgggtcgatatcgaactgctggcaacgcgcaaatcagtaagcagttgctgcgctgccag

SEQ ID NO: 168198 - DNA, 75 bp, synthetic construct
  source 1..75: mol_type = other DNA
ccttccttgaggactccgggtatatggcgcgtgcggcgtttgtgatggaccgtctgatgcaggcgctgggcttgc

SEQ ID NO: 168199 - DNA, 75 bp, synthetic construct
  source 1..75: mol_type = other DNA
tgcaggcgctgggcttgccgggaaaatcctttgtaccgttgatcgtcggttttggctgtaacgtaccgtcggtga

SEQ ID NO: 168200 - DNA, 75 bp, synthetic construct
  source 1..75: mol_type = other DNA
cgtatacggtgctgaagagttcgtagtgaaagacattcatttcgaaggccttcagcgtgtcgccgttggtgcggc

SEQ ID NO: 168201 - DNA, 75 bp, synthetic construct
  source 1..75: mol_type = other DNA
ccgtgcgtggcttccagtccaataccattggtccgaaagcagtttacttcccgcatcaggccagtaattatgatc

SEQ ID NO: 168202 - DNA, 75 bp, synthetic construct
  source 1..75: mol_type = other DNA
gctctctggtgttgaagtgagcggcaatcttgccggccactccgctgaaattgagcaactgacgaaaatcgagcc

SEQ ID NO: 168203 - DNA, 75 bp, synthetic construct
  source 1..75: mol_type = other DNA
accgcgagtcgccatattactgcctgtttaataatgatctcactcgcgatatgccgccctgctttatcgcgggtg

SEQ ID NO: 168204 - DNA, 75 bp, synthetic construct
  source 1..75: mol_type = other DNA
atgagcgagattaaccatcaggcactgcgtgaggcggcggaaaatgcaactaaggggagctacatcgtagggcat

SEQ ID NO: 168205 - DNA, 75 bp, synthetic construct
  source 1..75: mol_type = other DNA
gctggggctatggcgatggtttaggcggtaaagagatgccgttctatgagaatttctatgccggtggctccagca

SEQ ID NO: 168206 - DNA, 75 bp, synthetic construct
  source 1..75: mol_type = other DNA
acaacgaagccggactcacagaacaggaacgcaaacttctccacgtactggcaacagcggaaaaaaacgacttac

SEQ ID NO: 168207 - DNA, 75 bp, synthetic construct
  source 1..75: mol_type = other DNA
gcggaaaaaaacgacttacaggcacaggagagcgaacgaaaacaggcggtccaaaaacgaatcgagggaaaaaaa

SEQ ID NO: 168208 - DNA, 75 bp, synthetic construct
  source 1..75: mol_type = other DNA
ggttgtgggctggctggagaaacgctatacactgtgcggtcactggagtgatatggctgttttgtgtcctgcaga

SEQ ID NO: 168209 - DNA, 75 bp, synthetic construct
  source 1..75: mol_type = other DNA
tgaaatgcgccagatggaaggggcatggctgggtagcgatctggtcgatcagggtaaagagcgtctgaatcgtct

SEQ ID NO: 168210 - DNA, 75 bp, synthetic construct
  source 1..75: mol_type = other DNA
ctccacgtactggcaacagcggaaaaaaacgacttacaggcacaggagagcgaacgaaaacaggcggtccaaaaa

SEQ ID NO: 168211 - DNA, 75 bp, synthetic construct
  source 1..75: mol_type = other DNA
tgtttctggttttactggttgcggaaaaagcgccattgccggggaaatagaaatcgcgatgaaggctattggtgt

SEQ ID NO: 168212 - DNA, 75 bp, synthetic construct
  source 1..75: mol_type = other DNA
aaaagcgcatgactggcgctgactggctgactgcgattgagatgtacaaaccaactgtgcgcatcgtggaagtta

SEQ ID NO: 168213 - DNA, 75 bp, synthetic construct
  source 1..75: mol_type = other DNA
acgaggattaccaaacggtaatggcatacaaagtttctgaggtcatcgctgcaatccgcgccgctggcattcgca

SEQ ID NO: 168214 - DNA, 75 bp, synthetic construct
  source 1..75: mol_type = other DNA
ggagacaaaatcaaaactcaacgagcagcgtgagtattacgaaggtgttatctcggatggaagtaagcgcatagc

SEQ ID NO: 168215 - DNA, 75 bp, synthetic construct
  source 1..75: mol_type = other DNA
gccaataagcgattcatagcagcagccaatccggctgctgtgctggcattactggatgaactggaagcagcaaaa

SEQ ID NO: 168216 - DNA, 75 bp, synthetic construct
  source 1..75: mol_type = other DNA
tgctggatgaacgggaaagaaacctgcaatacatcaaaagccgcgatcaggagaacgaggatattgcgcttacgg

SEQ ID NO: 168217 - DNA, 75 bp, synthetic construct
  source 1..75: mol_type = other DNA
gttccgccctgttttattgccggggcggagttcgatccgctgctggatgacagccgtctgctttaccagacgtta

SEQ ID NO: 168218 - DNA, 75 bp, synthetic construct
  source 1..75: mol_type = other DNA
gattatcaaatcaatatgtcccgcattggctttgccggtgattccgcaggtgccatgctggcgctcgccagtgcg

SEQ ID NO: 168219 - DNA, 75 bp, synthetic construct
  source 1..75: mol_type = other DNA
cttaaaaaaagaacaaatggtagtgtccgctattgccagtacacctcagaggattatcaaatcaatatgtcccgc

SEQ ID NO: 168220 - DNA, 75 bp, synthetic construct
  source 1..75: mol_type = other DNA
ttatggctacgagataagcagattgattgcggtaaagttgttggtgttttgctgtggtatgggctttacggatta

SEQ ID NO: 168221 - DNA, 75 bp, synthetic construct
  source 1..75: mol_type = other DNA
cgccatgctggcgctcgccagtgctttatggttgcgtgaaaagcagatcgattgcggcaaagttgtgggtgtttt

SEQ ID NO: 168222 - DNA, 75 bp, synthetic construct
  source 1..75: mol_type = other DNA
ttgtcacttccaccagcaggcgggcgattatcagatcaatatgtcacgcattggttttgccggtgattccgctgg

SEQ ID NO: 168223 - DNA, 75 bp, synthetic construct
  source 1..75: mol_type = other DNA
aagagctggcgcttatggatgaactgacaccgttgctacacaaactggcacaagggcgtgagatcacggggctat

SEQ ID NO: 168224 - DNA, 75 bp, synthetic construct
  source 1..75: mol_type = other DNA
tgagttatttgacagcattcagacaaaaaatgcagaacaaaatactgaatttcgaccattgaacgtagcatgtgt

SEQ ID NO: 168225 - DNA, 75 bp, synthetic construct
  source 1..75: mol_type = other DNA
tcaagtacaaccgaggcagcaaaggcgagcgtcacgcaatagttaacggcgtcctgatggtcaaacagggcaaga

SEQ ID NO: 168226 - DNA, 75 bp, synthetic construct
  source 1..75: mol_type = other DNA
aagcgcctcgccagtttgttaaccgggcagggactggcgtttcgcgttcaggacgccagtctgcccggacgcccg

SEQ ID NO: 168227 - DNA, 75 bp, synthetic construct
  source 1..75: mol_type = other DNA
cacgcagcaaaaatatgcgcgcgattgccacgcgtgatacggcgattgagaagcgcctcgccagtttgttaaccg

SEQ ID NO: 168228 - DNA, 75 bp, synthetic construct
  source 1..75: mol_type = other DNA
gctgactttatgcaatcacagggactggctaatgcaccggaagaagtcgctaaccttaaaggcgatgttgccaga

SEQ ID NO: 168229 - DNA, 75 bp, synthetic construct
  source 1..75: mol_type = other DNA
attggtggaattgatcgtcctgatagcggtaatattatcactgatagtacaatctcttggccagtgggtcttgct

SEQ ID NO: 168230 - DNA, 75 bp, synthetic construct
  source 1..75: mol_type = other DNA
gatttggactcagcatggcatttgattttgattattatcttgttgatgaagttatggctgtgggagacgccagat

SEQ ID NO: 168231 - DNA, 75 bp, synthetic construct
  source 1..75: mol_type = other DNA
gagataatgctattcattattatgacgatgttgaacaggccataaaaaaatacactgaagaagagaatattacct

SEQ ID NO: 168232 - DNA, 75 bp, synthetic construct
  source 1..75: mol_type = other DNA
cagtttagtctgaaagcggtatacggcagcaataaaaccgtgcccgttgagtataaaaacgcgacggtgattacg

SEQ ID NO: 168233 - DNA, 75 bp, synthetic construct
  source 1..75: mol_type = other DNA
acactatgtctttaaggatttaaatattgaaatcccttcaggaaaaagtgttgcctttattggtcgcaacggagc

SEQ ID NO: 168234 - DNA, 75 bp, synthetic construct
  source 1..75: mol_type = other DNA
ggcgattgtatttaaggatgataatgtggttagttttcatgaggatgttcaggaagggatagaagagtatataac

SEQ ID NO: 168235 - DNA, 75 bp, synthetic construct
  source 1..75: mol_type = other DNA
gatgcggcagaattatcagcgcaatttggcgctttatacctgctggatacgggaatattttccctgcgaaatctg

SEQ ID NO: 168236 - DNA, 75 bp, synthetic construct
  source 1..75: mol_type = other DNA
cccgcggaccattcattcctgggatatcgacggccgggtgctgctgtgcagttcgttcagtaaaagcattgcacc

SEQ ID NO: 168237 - DNA, 75 bp, synthetic construct
  source 1..75: mol_type = other DNA
aggagcacggcgtcagcatcagcaccgtgcagcaggcgtatcagacgctggaaacgatgaagctcatcactccgc

SEQ ID NO: 168238 - DNA, 75 bp, synthetic construct
  source 1..75: mol_type = other DNA
aggaatgtctcgggaagacgttgcagaggtgacaactttacctcttacagagattgataagctaattaactctaa

SEQ ID NO: 168239 - DNA, 75 bp, synthetic construct
  source 1..75: mol_type = other DNA
cccgcggaccattcattcctgggatatcgacgggcgagtgctgttgtgcagctcgttcagtaaaagtattgctcc

SEQ ID NO: 168240 - DNA, 75 bp, synthetic construct
  source 1..75: mol_type = other DNA
gacagccgccgggtgatccaaagcattcagttgatgaaatcgctgggcggcgggtatcaggcggctcccgtcgtc

SEQ ID NO: 168241 - DNA, 75 bp, synthetic construct
  source 1..75: mol_type = other DNA
caattgcttcatcccaccggcagcacccgactacgcgaaggtgatgtgttgtgtgtaattggtcgggaacgcgat

SEQ ID NO: 168242 - DNA, 75 bp, synthetic construct
  source 1..75: mol_type = other DNA
gggatgatctggacggtggctgagaaagaagataacgaagtgttgaagattggcgttcgggtggcggaggaagaa

SEQ ID NO: 168243 - DNA, 75 bp, synthetic construct
  source 1..75: mol_type = other DNA
gtgtgatatttgcccacggttgcttctggcaccatcaccattgctacctgtttaaagtccccgccacgcgaacag

SEQ ID NO: 168244 - DNA, 75 bp, synthetic construct
  source 1..75: mol_type = other DNA
ttactgtggatcgaattgcctgaacaggtcgatatggtctgcgtcgcgcggcagctgtgccgcatgaaaatccag

SEQ ID NO: 168245 - DNA, 75 bp, synthetic construct
  source 1..75: mol_type = other DNA
gcgcatcaactgcgctttgccgctcagcgaaacctatcgcgaagcactaaagcaaattggcgaggccgtgtatcg

SEQ ID NO: 168246 - DNA, 75 bp, synthetic construct
  source 1..75: mol_type = other DNA
ctgagctacgcaacaaagccaaagaattggctttatccgtactcagaactcacccagatggtcaaaaaaacggta

SEQ ID NO: 168247 - DNA, 75 bp, synthetic construct
  source 1..75: mol_type = other DNA
tcatattccaaccgaccagttgcgtagccagaatgcaatcaaatctgacagtccgcttcgagcgagaagcggaag

SEQ ID NO: 168248 - DNA, 75 bp, synthetic construct
  source 1..75: mol_type = other DNA
acgtgaaggccatcagggcacagctgaacgtttcacagagcgagatggcgaaagtgctgggaaccagcctcgaca

SEQ ID NO: 168249 - DNA, 75 bp, synthetic construct
  source 1..75: mol_type = other DNA
gcccttgacgtcacccattcacgaactcaactcccggaagcgggcgaatatggacacggtactctccaggggaac

SEQ ID NO: 168250 - DNA, 75 bp, synthetic construct
  source 1..75: mol_type = other DNA
gcggttggtttttatgaggatgttcaggaggggatagaggaatacaaaaatttaaaatattacatattgagtaat

SEQ ID NO: 168251 - DNA, 75 bp, synthetic construct
  source 1..75: mol_type = other DNA
ttcataatggtttcacataatttgaattctctaaaagattactgcgatatggcttttgtttttatgatgagaatc

SEQ ID NO: 168252 - DNA, 75 bp, synthetic construct
  source 1..75: mol_type = other DNA
taattcaaagaggggaaaatcgtgtttcataatggtttcacataatttgaattctctaaaagattactgcgatat

SEQ ID NO: 168253 - DNA, 75 bp, synthetic construct
  source 1..75: mol_type = other DNA
aatgctctcccactatttcaatatgggcggcattcgtaacatgagtatttctctgaccggttatcgctacgagta

SEQ ID NO: 168254 - DNA, 75 bp, synthetic construct
  source 1..75: mol_type = other DNA
caacagccgcgtcaccttcgccggataccgcttctcggaagagaactatatgaccatgagcgagtatctggacgc

SEQ ID NO: 168255 - DNA, 75 bp, synthetic construct
  source 1..75: mol_type = other DNA
attacctcgattccgatattttcgatggctttaactacatcggcggtagtatcagtactgacgatcaaatgctgc

SEQ ID NO: 168256 - DNA, 75 bp, synthetic construct
  source 1..75: mol_type = other DNA
gggaaattttcccataaaggttatgtccttccgggaaattacaacttgcaggttgtcgtaaataaatatcctctg

SEQ ID NO: 168257 - DNA, 75 bp, synthetic construct
  source 1..75: mol_type = other DNA
tcaacatacccgcagcgatgatgacgatgacaacagtgatgatacgcaaaaaaactgggagtggagccgctacta

SEQ ID NO: 168258 - DNA, 75 bp, synthetic construct
  source 1..75: mol_type = other DNA
gaaatggtacattgatgagaagtcgcaagatcagctttatgttatgggtaaggcactgattcatgagtcgattaa

SEQ ID NO: 168259 - DNA, 75 bp, synthetic construct
  source 1..75: mol_type = other DNA
tatctggcaggcgttaaaccgggtgaacatatgaccgttttctgggagggtgaatctcactgcgatatcagcctg

SEQ ID NO: 168260 - DNA, 75 bp, synthetic construct
  source 1..75: mol_type = other DNA
cgttaagcgccggaaccagcgaaaaccacagcagcgtggatggctactacagccacgatggtactctggcaaaag

SEQ ID NO: 168261 - DNA, 75 bp, synthetic construct
  source 1..75: mol_type = other DNA
tttataatggtatcgcatagtttaaattcattaaaagactattgtgatatagcattcgtttttcacgacgcaaca

SEQ ID NO: 168262 - DNA, 75 bp, synthetic construct
  source 1..75: mol_type = other DNA
acgtttatatgcagataaaaaggatcttaaagaaaaaattaattttgtagaagaattttcggaattaggtacata

SEQ ID NO: 168263 - DNA, 75 bp, synthetic construct
  source 1..75: mol_type = other DNA
ggcgtcatgggggattgcgaatggctggtcgctctacggcggggcattggccgatgaaaactaccagtcggcagc

SEQ ID NO: 168264 - DNA, 75 bp, synthetic construct
  source 1..75: mol_type = other DNA
actaccgctaaagtgaccgtaacccaaatgggccgtgtcatttacgaaacccaggtgcccgcaggtccattccgc

SEQ ID NO: 168265 - DNA, 75 bp, synthetic construct
  source 1..75: mol_type = other DNA
agtcatatcgcacgtcaacaggtcgacactatgtgtttaaggatttaaatatcgaactcccttcaggaaaaagtg

SEQ ID NO: 168266 - DNA, 75 bp, synthetic construct
  source 1..75: mol_type = other DNA
gtcggcggaattgacagacctgatagtggaagaattatcactaataaaacaatttcatggcctgttggtttagct

SEQ ID NO: 168267 - DNA, 75 bp, synthetic construct
  source 1..75: mol_type = other DNA
gggtaaatcaacgttactgagaatgattggtggtattgaccgccccgacagtggaaagatcatcaccaataaaac

SEQ ID NO: 168268 - DNA, 75 bp, synthetic construct
  source 1..75: mol_type = other DNA
ggcgattgtgtttaaagacgataatgcggttagtttttatgaggatgttcaggaggggatagaggagtatagggc

SEQ ID NO: 168269 - DNA, 75 bp, synthetic construct
  source 1..75: mol_type = other DNA
cctttgggttaagcatggcctttaaatttgattattatattgttgatgaagtgactgcggtcggggattttagat

SEQ ID NO: 168270 - DNA, 75 bp, synthetic construct
  source 1..75: mol_type = other DNA
gacgcgaaaacgtaaaatttgttgcgcggttatacgcgaagcaagaagaactgaaagagaaaattgagtttgtcg

SEQ ID NO: 168271 - DNA, 75 bp, synthetic construct
  source 1..75: mol_type = other DNA
aagaaaaaagatggtgctaagtttgatgccgtgctgaatcttaaccgtgatggaagcgttgtaccgacatttaaa

SEQ ID NO: 168272 - DNA, 75 bp, synthetic construct
  source 1..75: mol_type = other DNA
tgcagatatgattattcatgcaggggatccagatgaggaagggcagttacttattgaagagatactttcttattg

SEQ ID NO: 168273 - DNA, 75 bp, synthetic construct
  source 1..75: mol_type = other DNA
tacggatttaaaaaaggtgtggattttgaggttgtagaaaatttgtactttgattccccgaaacgggggagccaa

SEQ ID NO: 168274 - DNA, 75 bp, synthetic construct
  source 1..75: mol_type = other DNA
aaccaacttccgaatcaccgattgatgaaaatgtatcaatttttcaaaatctacaaaaatgtaaccgccacggac

SEQ ID NO: 168275 - DNA, 75 bp, synthetic construct
  source 1..75: mol_type = other DNA
agtgcaacccccctcaacaaagatttccttgaatatgaaattcagaatcttttttctggagagtgtgatgttgca

SEQ ID NO: 168276 - DNA, 75 bp, synthetic construct
  source 1..75: mol_type = other DNA
agaacttaaactggcagctatcccacatcaggcatctgctgttaatgcatttgttacggttagtcaggggattac

SEQ ID NO: 168277 - DNA, 75 bp, synthetic construct
  source 1..75: mol_type = other DNA
cggatggcagttgttgatgatttgtattcatcttttttcctttttaagtcaattggttatgaatataaagatgct

SEQ ID NO: 168278 - DNA, 75 bp, synthetic construct
  source 1..75: mol_type = other DNA
gtttcctggaacaaggtggcttccacgcgttcaccaccacctttgaagatttgcacggtctgaaacagcttcctg

SEQ ID NO: 168279 - DNA, 75 bp, synthetic construct
  source 1..75: mol_type = other DNA
gctcgttcagtaaaagcattgcacctggcctgcgcgtgggttgggtcgcaccggggcgctatcacgataaactgc

SEQ ID NO: 168280 - DNA, 75 bp, synthetic construct
  source 1..75: mol_type = other DNA
gagtatcgaggcagctatgagaaatcatatcacacacccgcaagggcgggactcgcacaacctgaataaattcac

SEQ ID NO: 168281 - DNA, 75 bp, synthetic construct
  source 1..75: mol_type = other DNA
atgtggagtggctgggaaactatttttcagggaaggcgtagattttctagaaaaaaaggtgaatgggttcgtata

SEQ ID NO: 168282 - DNA, 75 bp, synthetic construct
  source 1..75: mol_type = other DNA
ttgtctcatctcaaataccatcgggcaatggcaaaaaatgaatcaaaactatgggttgttgttgatcgaacggaa

SEQ ID NO: 168283 - DNA, 75 bp, synthetic construct
  source 1..75: mol_type = other DNA
gatacgcgcggcggcgtacggttgtcagagcagatccagaatgatttattgctgcgggcgacggggggagtgtgt

SEQ ID NO: 168284 - DNA, 75 bp, synthetic construct
  source 1..75: mol_type = other DNA
tgatgcgccgtgcattctcgctggcgatttatcatgcacatcaacgccatgtttttggtaatccattgatccaac

SEQ ID NO: 168285 - DNA, 75 bp, synthetic construct
  source 1..75: mol_type = other DNA
gtgagttgccgcggctgtaccgggaaatgccggtgaacagtatctgggaagattccggcaacattatgtgtctgg

SEQ ID NO: 168286 - DNA, 75 bp, synthetic construct
  source 1..75: mol_type = other DNA
gaaaaacccgaatgatgtggcctgtagccatatttcacgtactggacgccccggcaaagattatttactcacact

SEQ ID NO: 168287 - DNA, 75 bp, synthetic construct
  source 1..75: mol_type = other DNA
cagcggcgaggtggagtttcaggatgccataggctggttattggggcaggaaggggaaggaattcacctgatcct

SEQ ID NO: 168288 - DNA, 75 bp, synthetic construct
  source 1..75: mol_type = other DNA
gcgcggcggcgtacggttgtcagagcagatccagaatgatttattgctgcgggcgacgggaggagtgtgtttgta

SEQ ID NO: 168289 - DNA, 75 bp, synthetic construct
  source 1..75: mol_type = other DNA
gatgccggtaaacagtatttgggaaggttccggcggtaatgactccaacttactgatagtgttttatgttcagat

SEQ ID NO: 168290 - DNA, 75 bp, synthetic construct
  source 1..75: mol_type = other DNA
cagatccagaatgatttattgctgcgggcgacgggggagtgtgtgtgtaagcgtatacgactgatgcgacgctgg

SEQ ID NO: 168291 - DNA, 75 bp, synthetic construct
  source 1..75: mol_type = other DNA
gtgtcaccgttgccagtttttttaagcctatgtgcgctgcgctggagttgtaccgcgcagagctgggaaaagaga

SEQ ID NO: 168292 - DNA, 75 bp, synthetic construct
  source 1..75: mol_type = other DNA
ggttccggcaatattatgtgctggatgtgctgcgcgttctcaataagcaagcgggcgtatacgacttattgtcgg

SEQ ID NO: 168293 - DNA, 75 bp, synthetic construct
  source 1..75: mol_type = other DNA
agccccttatgcgtcatgtcttaagtcgcatggcgcttcagcttgaagggcaaacggcgctgttgtttcgtctgg

SEQ ID NO: 168294 - DNA, 75 bp, synthetic construct
  source 1..75: mol_type = other DNA
ggaacggctgaatcccttgaactggggcgactggcgaatgtaaacccacctgaactattgcgctacgatgcccag

SEQ ID NO: 168295 - DNA, 75 bp, synthetic construct
  source 1..75: mol_type = other DNA
ttaaaccttttgaccgtgtagtggttaccggacgtttcaatgccattggcgaggcggtcaaagccgtatcccgcc

SEQ ID NO: 168296 - DNA, 75 bp, synthetic construct
  source 1..75: mol_type = other DNA
gaagtctcctatcaggttgcgaaacgtgccgcgaagaaaggtgctaagtattaccacatcacccgccaggtggca

SEQ ID NO: 168297 - DNA, 75 bp, synthetic construct
  source 1..75: mol_type = other DNA
gaagtctcctatcaggttgcgaaacgtgccgcgaagaaaggtgctaagtattaccacatcacccgccagtggcag

SEQ ID NO: 168298 - DNA, 75 bp, synthetic construct
  source 1..75: mol_type = other DNA
gaagcaggccggacaaacggacgtacagctgctgcaaaagcacggcgcactggacgatattctggctgagctggg

SEQ ID NO: 168299 - DNA, 75 bp, synthetic construct
  source 1..75: mol_type = other DNA
cgtcggggtagccagcatccggtaggctctcatctggaaagcgttattcgtctgcaaaagaaacccctactggtt

SEQ ID NO: 168300 - DNA, 75 bp, synthetic construct
  source 1..75: mol_type = other DNA
gatcgaaccgtttgatacagttaccgtccagggcttttaccgtagccaacctgaagttaatgacgccatcaccaa

SEQ ID NO: 168301 - DNA, 75 bp, synthetic construct
  source 1..75: mol_type = other DNA
tgacgaagggtacactagcggaagtcagttagttgccatgcaaaactatatgctgcaacgcggtcatactgaacg

SEQ ID NO: 168302 - DNA, 75 bp, synthetic construct
  source 1..75: mol_type = other DNA
attcgcccagcgttttctgagtaaagggatgtctcgggaagacgttgcagagatgacaaatttatctcttgctga

SEQ ID NO: 168303 - DNA, 75 bp, synthetic construct
  source 1..75: mol_type = other DNA
aagggattgagcgggggattgagaaaggaatggtgaaaggaatagagataggaattgagaaggggattcagcaag

SEQ ID NO: 168304 - DNA, 75 bp, synthetic construct
  source 1..75: mol_type = other DNA
ctctggcaactacggcaacatgaccgaagtctcctatcaggttgcgaaacgtgccgcgaagaaaggtgctaagta

SEQ ID NO: 168305 - DNA, 75 bp, synthetic construct
  source 1..75: mol_type = other DNA
ttcctcgacatacacctgcctgaggaattgcgtgagatctgcgatctcaacacgctgcatctggagtcggggagt

SEQ ID NO: 168306 - DNA, 75 bp, synthetic construct
  source 1..75: mol_type = other DNA
atgacgcggtgtttaaacaatttttaatgcatgcggataccgctcgcgacttcctcgacatacacctgcctgagg

SEQ ID NO: 168307 - DNA, 75 bp, synthetic construct
  source 1..75: mol_type = other DNA
agagatgaagaatgagctacgttatcttcgcgcagaaaatgcatatctgaaagccatgcaggagcatctcctgga

SEQ ID NO: 168308 - DNA, 75 bp, synthetic construct
  source 1..75: mol_type = other DNA
caaacatgacgccggaagagatgaagaatgagctgcgttatcttcgcgcagaaaatgcatatctgaaagccatgc

SEQ ID NO: 168309 - DNA, 75 bp, synthetic construct
  source 1..75: mol_type = other DNA
agagattacttaagggggaatacatcaataggtctgaaacgtatttgtggtaattcttccgaggaaataatgtcg

SEQ ID NO: 168310 - DNA, 75 bp, synthetic construct
  source 1..75: mol_type = other DNA
atgggggtggggcgcgacctcgcacagtttggcgcgctggcgttcgatgtgactcactcgcacgtcaacctggat

SEQ ID NO: 168311 - DNA, 75 bp, synthetic construct
  source 1..75: mol_type = other DNA
caggatatcggcgactccgtctccggcacactgcacgtccgcgttgaagaacagaatggtcaggtgcaggaatat

SEQ ID NO: 168312 - DNA, 75 bp, synthetic construct
  source 1..75: mol_type = other DNA
acgatcacctataaccagaactttgccgcagcgggtgtctcggtctatctcaactactcccatcgtacttactgg

SEQ ID NO: 168313 - DNA, 75 bp, synthetic construct
  source 1..75: mol_type = other DNA
tgattatcattaacatgatgaagggggagttataccgttcggaaagccggctgacgctgtggcaacatcacagtc

SEQ ID NO: 168314 - DNA, 75 bp, synthetic construct
  source 1..75: mol_type = other DNA
gccgggcttgaggagatcagcggcggcgatctgttgatcgacggcaaacgaatgaatgacgttccggccaaagcg

SEQ ID NO: 168315 - DNA, 75 bp, synthetic construct
  source 1..75: mol_type = other DNA
gaagcagaccggacagccggacgcacagctgctgcaaaagcacggcgcactggacgaaatcctggcggagctggg

SEQ ID NO: 168316 - DNA, 75 bp, synthetic construct
  source 1..75: mol_type = other DNA
ctatgtattttacaacaccggctgaattcattaaggataaaagtattgagtgggctgagttacttgatcaacatg

SEQ ID NO: 168317 - DNA, 75 bp, synthetic construct
  source 1..75: mol_type = other DNA
agactcgatgtcaaataacgcaattatagagagtgctatccttaggttatataatattaagaatagtaaagtacg

SEQ ID NO: 168318 - DNA, 75 bp, synthetic construct
  source 1..75: mol_type = other DNA
tctcgccaaagattctcctgatgcgaaacaggagcttcttgggggaaccgcagaattcggaaaaaatcgtacgct

SEQ ID NO: 168319 - DNA, 75 bp, synthetic construct
  source 1..75: mol_type = other DNA
tcacggcgcgacaggggcggcgcgaccggaatggtcgctgcaagccgggttttcacgcatcggaccgtagcggca

SEQ ID NO: 168320 - DNA, 75 bp, synthetic construct
  source 1..75: mol_type = other DNA
cgcgcctgcgtggttcattactgttaggttcattgctcgttgcttcatcattcagtacgcaggccgcagaagaaa

SEQ ID NO: 168321 - DNA, 75 bp, synthetic construct
  source 1..75: mol_type = other DNA
ccaggcgaatgccacaacacagggagcgaatcatgactattgcagagcgaattcataatgcgggatggctgttgg

SEQ ID NO: 168322 - DNA, 75 bp, synthetic construct
  source 1..75: mol_type = other DNA
cggcagaccggacatggcgaccccagccgcggctaaaaccgctggtggacggtccgcagagcgccgtcgtgacgg

SEQ ID NO: 168323 - DNA, 75 bp, synthetic construct
  source 1..75: mol_type = other DNA
aggtcacggcgcgacagaggcggcgcgaccggaacggtcgctgcaagccgggggggtggcgtcagggatggaagc

SEQ ID NO: 168324 - DNA, 75 bp, synthetic construct
  source 1..75: mol_type = other DNA
gaaacaggccgcaggggtggcggcggaagggaggactgcgccatcaggcgcagtggccttacacaccgtcaggtg

SEQ ID NO: 168325 - DNA, 75 bp, synthetic construct
  source 1..75: mol_type = other DNA
ggaacaacgcctccttagattgcttttgcagaacggtgcggatcctgaatggatacaacgatatactggactttc

SEQ ID NO: 168326 - DNA, 75 bp, synthetic construct
  source 1..75: mol_type = other DNA
ccaaccatcccgacaagccgtacatgagctatgaagaattcttccgcgaacgccagaacgcgcgctacggcggcg

SEQ ID NO: 168327 - DNA, 75 bp, synthetic construct
  source 1..75: mol_type = other DNA
aggtagcggtattctggctgtttatctgtgcggttttctgctgggtaatcggccgattcgcaaccgctacggcat

SEQ ID NO: 168328 - DNA, 75 bp, synthetic construct
  source 1..75: mol_type = other DNA
atgacaaacttcacgaccagtacgccgcatgacgcattatttaaatcctttctcacccaccctgacaccgcgcgg

SEQ ID NO: 168329 - DNA, 75 bp, synthetic construct
  source 1..75: mol_type = other DNA
gaagggagagggggaggaaagaagggaaagtagaaggggaacggagcctcctccgattgttgttgcagaatgggg

SEQ ID NO: 168330 - DNA, 75 bp, synthetic construct
  source 1..75: mol_type = other DNA
ctttcgtctgatgcgatattccatggcggtgatgcagcgccatatcgaacatgataaacgccggcagctaccgct

SEQ ID NO: 168331 - DNA, 75 bp, synthetic construct
  source 1..75: mol_type = other DNA
acagcaaagtgacaaactctttaaaccgggaatgacggttgtcgaccttggtgctgctccgggtggttggtcaca

SEQ ID NO: 168332 - DNA, 75 bp, synthetic construct
  source 1..75: mol_type = other DNA
tcgtccaggcatttaaaaaaggtgagcttacacgccaccaagtagtaatgaatcgtaatatggcaaggagtcgag

SEQ ID NO: 168333 - DNA, 75 bp, synthetic construct
  source 1..75: mol_type = other DNA
tcaaccctgattcactcgtttctgaactggaaatcgctggtggcaattgcagtaggcgttattgtctcctggctg

SEQ ID NO: 168334 - DNA, 75 bp, synthetic construct
  source 1..75: mol_type = other DNA
gttatccagagcgagctgcttgcttcaatgaagcactcaagattattgatgaactaagaaaaaatgaaaaagaat

SEQ ID NO: 168335 - DNA, 75 bp, synthetic construct
  source 1..75: mol_type = other DNA
agggaaattcgctccctgtttacgaaggttaaagttcgtaagccggactcttctcgtgcacgttcgcgggaagtg

SEQ ID NO: 168336 - DNA, 75 bp, synthetic construct
  source 1..75: mol_type = other DNA
aaagttcgtaagccggactcttctcgtgctcgttcgcgggaagtgtatatagtagcgaccgggcgtaaaccctaa

SEQ ID NO: 168337 - DNA, 75 bp, synthetic construct
  source 1..75: mol_type = other DNA
aataggaacacagcgcgacgctgtggttatccagagcgtgaaaaatgctttgacgatgcactaaaaattattgat

SEQ ID NO: 168338 - DNA, 75 bp, synthetic construct
  source 1..75: mol_type = other DNA
aggatgaggtcatgcagtcatggccgaccgaactggttgccgaagcggaatataaggtgaaactcctgtccggga

SEQ ID NO: 168339 - DNA, 75 bp, synthetic construct
  source 1..75: mol_type = other DNA
atacccgtaatggcaatattctggcgaaggttgcggcaccggaatcactggctgtgctgtttaacccggcgcgta

SEQ ID NO: 168340 - DNA, 75 bp, synthetic construct
  source 1..75: mol_type = other DNA
ttgtttctgcgtatctcgctggtgagatgacccgctaccaggttcgccagaatcgtaatacagcccgtcgccgtg

SEQ ID NO: 168341 - DNA, 75 bp, synthetic construct
  source 1..75: mol_type = other DNA
agcccggtcaactgacaccgtcggctatttctgagcgtgtcaccgccgagtttcccccgcagcaaccggagaaaa

SEQ ID NO: 168342 - DNA, 75 bp, synthetic construct
  source 1..75: mol_type = other DNA
tcgtagaggcatttaaaaaaggtgagcttacacgccaccaaatagtaatgaatcgtaatatggcaaggagtcgag

SEQ ID NO: 168343 - DNA, 75 bp, synthetic construct
  source 1..75: mol_type = other DNA
gaaggagcgcatccagaaagcggtttcgataaagatttccaaatggaacagcaggccaatgctgaattcatcgcc

SEQ ID NO: 168344 - DNA, 75 bp, synthetic construct
  source 1..75: mol_type = other DNA
taaaggggtaaaatttgcattagatttcacagccagccagccagccagccagccagccagccagccagccagcca

SEQ ID NO: 168345 - DNA, 75 bp, synthetic construct
  source 1..75: mol_type = other DNA
atgtatgggcatcggatagtaaacttaaatgtaagctacgatcgtcaccttattgataaggttgttgttcaactt

SEQ ID NO: 168346 - DNA, 75 bp, synthetic construct
  source 1..75: mol_type = other DNA
gactttgaccaaaactaaccctatcaattgccatctcacgctttatcgtagcaaacctaaggggcgtacaaatca

SEQ ID NO: 168347 - DNA, 75 bp, synthetic construct
  source 1..75: mol_type = other DNA
tcatctcggatggaagtaagcgcatagcagagttgcagacaaaatctgcaccagattcgtttggcatcatcggtg

SEQ ID NO: 168348 - DNA, 75 bp, synthetic construct
  source 1..75: mol_type = other DNA
gtcaccacacagttccacatccaggaattcagtgagtatattgcgccactgcaggatgctgtagatctggaaatc

SEQ ID NO: 168349 - DNA, 75 bp, synthetic construct
  source 1..75: mol_type = other DNA
tttcagataaccagcaaagatcctattaatttattaagtattgccgtttatattagggcttatttaagatcatat

SEQ ID NO: 168350 - DNA, 75 bp, synthetic construct
  source 1..75: mol_type = other DNA
ctgacacgaaaatcgctgtgcgaaattcgttacagagacggatacagggaggtggcggctttcatggcttacgaa

SEQ ID NO: 168351 - DNA, 75 bp, synthetic construct
  source 1..75: mol_type = other DNA
atgaaaactgatatcactgccatgtctgaaaatatagttggattctttgagaaaacaacactacgtgaccacatc

SEQ ID NO: 168352 - DNA, 75 bp, synthetic construct
  source 1..75: mol_type = other DNA
ttcgaacacaggacaatcatataacgtcagaccctatgttttgtgtgtatcaaaagcgcgaaatcgttgttgatg

SEQ ID NO: 168353 - DNA, 75 bp, synthetic construct
  source 1..75: mol_type = other DNA
ggaccacggatgtgaaggtaaaccataccgaaacggtgggaggcaaccaggctaccggtatgacagccgcagtca

SEQ ID NO: 168354 - DNA, 75 bp, synthetic construct
  source 1..75: mol_type = other DNA
ttgctgacatgagcccggtttcactggaaaccactgatttaagctaccggtatgacagccagtcagcacaggtat

SEQ ID NO: 168355 - DNA, 75 bp, synthetic construct
  source 1..75: mol_type = other DNA
tccgggggaaagtgtggctataactggtgcttccggtgcgggaaaaaccacattaatgaaagtactatgtggact

SEQ ID NO: 168356 - DNA, 75 bp, synthetic construct
  source 1..75: mol_type = other DNA
ctgattggttcattatcgccatcaccgctggacggtaatgactccaacttactgatagtgttttatgttcagata

SEQ ID NO: 168357 - DNA, 75 bp, synthetic construct
  source 1..75: mol_type = other DNA
atgtcacgagtctcatttacggcagttatattctcgttttctgccatgagaacggagcgcagagagggattatcc

SEQ ID NO: 168358 - DNA, 75 bp, synthetic construct
  source 1..75: mol_type = other DNA
atgtcgcggatctcatttgcggcggtcattttttctttttctgccatgagaagtgagcgcagagagggattatct

SEQ ID NO: 168359 - DNA, 75 bp, synthetic construct
  source 1..75: mol_type = other DNA
ctgaaccaggcagaaggatacaaagctatctcagatctgtcacatcactattttcgtgcagaaggctctagccct

SEQ ID NO: 168360 - DNA, 75 bp, synthetic construct
  source 1..75: mol_type = other DNA
agcatttgtggtgctgaatgaaggtgaaacattgagcgaagaggaatttttccgcttctgcgaacaaaatatggc

SEQ ID NO: 168361 - DNA, 75 bp, synthetic construct
  source 1..75: mol_type = other DNA
acttgggcgaagtattggcaaatttcattgatccacaaagtatcataggaagctggaattctaacccaacatttt

SEQ ID NO: 168362 - DNA, 75 bp, synthetic construct
  source 1..75: mol_type = other DNA
ggaaaccaatggtttaagctatcgttatgacagtcagtcagcaccgatattcagtgctctgagtttatcagtagc

SEQ ID NO: 168363 - DNA, 75 bp, synthetic construct
  source 1..75: mol_type = other DNA
gtttgaaccagatagtggaaaagtactggttaatggcacggatatacgtcaacttggaataaataattatcaccg

SEQ ID NO: 168364 - DNA, 75 bp, synthetic construct
  source 1..75: mol_type = other DNA
cagaaggatacaaagctatctcagatctgtcgcatcactattttcgtgcagaaggctctagcccccccaatcttt

SEQ ID NO: 168365 - DNA, 75 bp, synthetic construct
  source 1..75: mol_type = other DNA
ccggcgcgaaaaatccacctgtaccactgcgaccatcgcggcctgccgctggcgcttatcagtgcggaaggggca

SEQ ID NO: 168366 - DNA, 75 bp, synthetic construct
  source 1..75: mol_type = other DNA
cgatccataacgatctcaagccgtttggtgccaccatcaataacacgactcagacgttgtggtttggtaacaccg

SEQ ID NO: 168367 - DNA, 75 bp, synthetic construct
  source 1..75: mol_type = other DNA
aacaaagcaatttaacatcaaatggctttattcagatgatggaaaaaactggtatgaggaacaaaagaatttcca

SEQ ID NO: 168368 - DNA, 75 bp, synthetic construct
  source 1..75: mol_type = other DNA
tcgattccagaactggaaacctgggtagaaacctgggcgttttcggaaactattcactcccgttcctacacgcac

SEQ ID NO: 168369 - DNA, 75 bp, synthetic construct
  source 1..75: mol_type = other DNA
ccgttagcctgcgcgagctgaagaaaaaactgtatctctgcctgatgagcgttaacgcgctggaagcgattcgtt

SEQ ID NO: 168370 - DNA, 75 bp, synthetic construct
  source 1..75: mol_type = other DNA
gaagtggaagtgagttcttatctggtcgggcagattgacgcggaagtggacaccgacgatttgagtaacttccag

SEQ ID NO: 168371 - DNA, 75 bp, synthetic construct
  source 1..75: mol_type = other DNA
cattgcgcaggcggtggaaagccggacgggaacgccaccggcccgcctgctggcgatgagcggtaaaaatgtgct

SEQ ID NO: 168372 - DNA, 75 bp, synthetic construct
  source 1..75: mol_type = other DNA
gcagattgtggtggacagcgccggtaacgcagaagaagtgcaactgggcagtccccgccgtctggcgctgattta

SEQ ID NO: 168373 - DNA, 75 bp, synthetic construct
  source 1..75: mol_type = other DNA
tatggtgctggggcgagaagggccaaccgtgcagattggcggtaacattggtcgcatggtgcttgatattttccg

SEQ ID NO: 168374 - DNA, 75 bp, synthetic construct
  source 1..75: mol_type = other DNA
aagaacagaggcagcaggcagagaatgaaaagcaaagcctgttgcaacttgtcagggataaaacccagctatggg

SEQ ID NO: 168375 - DNA, 75 bp, synthetic construct
  source 1..75: mol_type = other DNA
caaatcgccgtgctgacatttcgggtaaatggatgttcaaagatggcgtagtgataaagcgaacttataccgagg

SEQ ID NO: 168376 - DNA, 75 bp, synthetic construct
  source 1..75: mol_type = other DNA
tgatgagggcatttcacagaaaacatttatccgcacgctgaccccccgcctgcaaaagctgggatggtggggaaa

SEQ ID NO: 168377 - DNA, 75 bp, synthetic construct
  source 1..75: mol_type = other DNA
atgacttctcccgtcaatgtggacgtcaaactgggcgtcaataaattcaatgtcgatgaagagcagccgcagcaa

SEQ ID NO: 168378 - DNA, 75 bp, synthetic construct
  source 1..75: mol_type = other DNA
ctaatgaactcttcccgacggatatccgcgcctctgctgtgggcgttattatgtccttaagccgtattggcacca

SEQ ID NO: 168379 - DNA, 75 bp, synthetic construct
  source 1..75: mol_type = other DNA
gggcgggaacgctcgccgggctgtttgtcggtacatcgctgtttggctatatctccgataaagtcggacggcgca

SEQ ID NO: 168380 - DNA, 75 bp, synthetic construct
  source 1..75: mol_type = other DNA
cgccgaacctgcgcggctatgctccggatatttccggcgtggcgcatacagcggcgaaagtcaccgttagtcagg

SEQ ID NO: 168381 - DNA, 75 bp, synthetic construct
  source 1..75: mol_type = other DNA
ccgtattttgctgtggggaagcggtggcccgtttctggatggctatgtgctggtaatgatcggcgtggcgctgga

SEQ ID NO: 168382 - DNA, 75 bp, synthetic construct
  source 1..75: mol_type = other DNA
ctaatgaactcttcccgacagatatccgcgcctctgccgtgggcgtgattatgtccttaagccgtattggcacca

SEQ ID NO: 168383 - DNA, 75 bp, synthetic construct
  source 1..75: mol_type = other DNA
accgagtggatgctctatgcgcagaaggtcgaatccacagacacctccagcctgcctgtaacgtttccagaacaa

SEQ ID NO: 168384 - DNA, 75 bp, synthetic construct
  source 1..75: mol_type = other DNA
gaagcatgggaacgctacagcgttctggtcagccgtgtggatcctgcaaatcctgaatggccggaaatgccgcaa

SEQ ID NO: 168385 - DNA, 75 bp, synthetic construct
  source 1..75: mol_type = other DNA
cgggtaacgctaaaactctggaacagtatgagttaacaaagaagcacggagtcatctggctttactctgaagaag

SEQ ID NO: 168386 - DNA, 75 bp, synthetic construct
  source 1..75: mol_type = other DNA
accgttttctgatgtccgcgaggtgctgccgtgcggcacatttgcttatacccgtgttccgacgatgattattcg

SEQ ID NO: 168387 - DNA, 75 bp, synthetic construct
  source 1..75: mol_type = other DNA
atgattgcgcagaaatcgggcgatattatctttaccagctctatcgccggtgtcgtgccagttatctgggaacct

SEQ ID NO: 168388 - DNA, 75 bp, synthetic construct
  source 1..75: mol_type = other DNA
accgagtggatgctctatgcgcagaaagtcgaatctacagacccctccagcctgccagtaacatttccagaacaa

SEQ ID NO: 168389 - DNA, 75 bp, synthetic construct
  source 1..75: mol_type = other DNA
cgcatccgatggaaagtccattggtagcgccgtacaactgccgagtatgtctggagggacaatcaattcaaacta

SEQ ID NO: 168390 - DNA, 75 bp, synthetic construct
  source 1..75: mol_type = other DNA
gggtggagaaatagtcttttctgctgctgttcaaaactttatgcttgcattaaatgtaatcggctggatttatac

SEQ ID NO: 168391 - DNA, 75 bp, synthetic construct
  source 1..75: mol_type = other DNA
cgatgttgttaaacaaacaggttcattttgtaggtttgaccgttttgccgatcttgatgtaggcactaagcgttt

SEQ ID NO: 168392 - DNA, 75 bp, synthetic construct
  source 1..75: mol_type = other DNA
tcgatgatgcaacgggtaatgagcagttgtacatgcatgcccagaagaacatggataccgaggtgctgaataacc

SEQ ID NO: 168393 - DNA, 75 bp, synthetic construct
  source 1..75: mol_type = other DNA
acattctgccgtttcgatcggtttaaagatatggatgttggcacaaagcggcttccggaaagcgtgctttcaatg

SEQ ID NO: 168394 - DNA, 75 bp, synthetic construct
  source 1..75: mol_type = other DNA
tgttgagacctctaaaaaaacagtaaccacacactatcctgattacaaagagttctactgtaactcgcctaagca

SEQ ID NO: 168395 - DNA, 75 bp, synthetic construct
  source 1..75: mol_type = other DNA
gaaggaggtaaagccctctggcagcatatagcgcgtcgttcaacgaatcttaaggtgtttatcttagctacagat

SEQ ID NO: 168396 - DNA, 75 bp, synthetic construct
  source 1..75: mol_type = other DNA
aaactatctgcctggatggactacaaaaaagaagtaaaagccgtcgacactttgacggctcctgagattagctgg

SEQ ID NO: 168397 - DNA, 75 bp, synthetic construct
  source 1..75: mol_type = other DNA
atgatttatttctcaaaatcgactaatggttttttctttgatggtataaacagcgacatgcctgctgacattgtt

SEQ ID NO: 168398 - DNA, 75 bp, synthetic construct
  source 1..75: mol_type = other DNA
aagtcaggaattcgccctgcgtcttctgagtaaaggaatgtctcgggaagacgttgcagagatggcaaatttacc

SEQ ID NO: 168399 - DNA, 75 bp, synthetic construct
  source 1..75: mol_type = other DNA
aggtaagacaggaggtaagacaggaggtaagacaggaggtaatacaagaggttagacaggaagtaagacaggaag

SEQ ID NO: 168400 - DNA, 75 bp, synthetic construct
  source 1..75: mol_type = other DNA
gtccagaaattctgggaagaacaggatgttgctcagattgaagggattgttgtcgatggcgctgtacgtgatgtt

SEQ ID NO: 168401 - DNA, 75 bp, synthetic construct
  source 1..75: mol_type = other DNA
ttatctgatcctcggtattatttttggcattttcggccctatttttaataaatgggtgctggggatgcaggattt

SEQ ID NO: 168402 - DNA, 75 bp, synthetic construct
  source 1..75: mol_type = other DNA
cctgaaaggtgacgaagctcgccatacgctgctggcaaccggtgctgctgcggggctggctgcggcctttaacgc

SEQ ID NO: 168403 - DNA, 75 bp, synthetic construct
  source 1..75: mol_type = other DNA
cggcacgcttgtcgggctggctgcggttgcttttgacaaaggtgtcgcctggttgcagaaccaacgtatgggggc

SEQ ID NO: 168404 - DNA, 75 bp, synthetic construct
  source 1..75: mol_type = other DNA
gggggctgggaacgctgggcggcggtatggtgctggggcgagaagggccaaccgtgcagattggcggtaacattg

SEQ ID NO: 168405 - DNA, 75 bp, synthetic construct
  source 1..75: mol_type = other DNA
cggaatgggggcgttactggcggcatctattcgcgcgccgttaacggggatcattctggttctggagatgaccga

SEQ ID NO: 168406 - DNA, 75 bp, synthetic construct
  source 1..75: mol_type = other DNA
ttgaagcagggacatttgctattgctggaatgggcgcgttactggcggcatccgttcgtgcgccgctaaccggga

SEQ ID NO: 168407 - DNA, 75 bp, synthetic construct
  source 1..75: mol_type = other DNA
agaaagctcgtcaggataaactggacgccgaagccactgcggacaaaaaacgcgatcaaagttatgaagatgagc

SEQ ID NO: 168408 - DNA, 75 bp, synthetic construct
  source 1..75: mol_type = other DNA
tgagtcggtacagcgttacatcgtgaagccgggagaagtccacgccgtgaggccgcacccgttgccgtcagggca

SEQ ID NO: 168409 - DNA, 75 bp, synthetic construct
  source 1..75: mol_type = other DNA
atcagcgtggtttagctctgtattgtattgcggctctttcacttatttgcgccttttttctttacgcctttcccg

SEQ ID NO: 168410 - DNA, 75 bp, synthetic construct
  source 1..75: mol_type = other DNA
atcggtagctgaagccgtacatcagcgcaccgggaatatgccagcccgtttactggtgatgaatggagaaagtct

SEQ ID NO: 168411 - DNA, 75 bp, synthetic construct
  source 1..75: mol_type = other DNA
ctacagagtcaaaaaggaggcattacttgatgatctgcgcggtggaaagctggaattactggagggtgaattgta

SEQ ID NO: 168412 - DNA, 75 bp, synthetic construct
  source 1..75: mol_type = other DNA
tgaacaacacggacacgcatccgttctggcagtatgtggcggtcatggacagccgcacccgcccggcgcattccg

SEQ ID NO: 168413 - DNA, 75 bp, synthetic construct
  source 1..75: mol_type = other DNA
ctgccgggaaacccacccaccctcataactacgcaacagaggccaatatgatagcccggcttgtactggatggaa

SEQ ID NO: 168414 - DNA, 75 bp, synthetic construct
  source 1..75: mol_type = other DNA
ccgaaacggttctgatattcctaatccagccttgtttgttcaaaacattggtttgcagagtactgtaaataaagc

SEQ ID NO: 168415 - DNA, 75 bp, synthetic construct
  source 1..75: mol_type = other DNA
cctgtggagcagattgtgcaccggcagcctgttacccgcactggcgtggtgaatgaaaatggcgtggtgtattcc

SEQ ID NO: 168416 - DNA, 75 bp, synthetic construct
  source 1..75: mol_type = other DNA
catttgagcactggaaagcgcagcagggtgcaaccggcgagccggtgttactggatgaatttgtgtttgcgaatg

SEQ ID NO: 168417 - DNA, 75 bp, synthetic construct
  source 1..75: mol_type = other DNA
ccggtaatggcgataaacagctatggctcatactgctttctttgttatccccgcttgtggcgtgtttttgtgaac

SEQ ID NO: 168418 - DNA, 75 bp, synthetic construct
  source 1..75: mol_type = other DNA
cacaccgaaagcggtcaaggctgcatacgatctggcaaacggaaaacaaccggcagatgccacgctcactgctct

SEQ ID NO: 168419 - DNA, 75 bp, synthetic construct
  source 1..75: mol_type = other DNA
ccagtaactctttgggtgatggtgtgaattttgttgctgtcagaccgcgaaatattgcatttaactttctggtga

SEQ ID NO: 168420 - DNA, 75 bp, synthetic construct
  source 1..75: mol_type = other DNA
atttttatgccatcgctgaaattgatgaagacggcaacgtgactgacctgcgccccagaggaaccccggaagagc

SEQ ID NO: 168421 - DNA, 75 bp, synthetic construct
  source 1..75: mol_type = other DNA
ttgcggtggcgagtattgatgctgccggaaatatcactgacctgcgcccgaaaggcacgctaaatgaccaggcgg

SEQ ID NO: 168422 - DNA, 75 bp, synthetic construct
  source 1..75: mol_type = other DNA
acggctgggagcgcgacggaacaacaggaaggatccgtcagtggggttacacgaaccagacgtccggttatcaaa

SEQ ID NO: 168423 - DNA, 75 bp, synthetic construct
  source 1..75: mol_type = other DNA
gggaagaactaccccgaagtaaacgccggatcgcttgaagtccttaaacatgcgggtgtcacgcagatttaccgg

SEQ ID NO: 168424 - DNA, 75 bp, synthetic construct
  source 1..75: mol_type = other DNA
tgttcggtatcgcaatattccaatacgacagcaaggcttaacgcaaaccagaactatccgttgttctggcaggca

SEQ ID NO: 168425 - DNA, 75 bp, synthetic construct
  source 1..75: mol_type = other DNA
tcacacagttaagcagcgccaccaccagtacatcagagacacaggcagccacgccaaaggctataaagatcgcca

SEQ ID NO: 168426 - DNA, 75 bp, synthetic construct
  source 1..75: mol_type = other DNA
tgggctaacagtgaaagagtttttacttataccactggtggaagaaatggtgctgaatcagtgagttcacctgat

SEQ ID NO: 168427 - DNA, 75 bp, synthetic construct
  source 1..75: mol_type = other DNA
aataataccacgcagcttgcgaccaccgcgtttgttcaggcggcactcacggcccttattaatgatgcgccagcc

SEQ ID NO: 168428 - DNA, 75 bp, synthetic construct
  source 1..75: mol_type = other DNA
tgctctgtatgttcttgttaaagcccttttcagcagtgaagtaaaaatatctacagtcaatgcgctgaggatatt

SEQ ID NO: 168429 - DNA, 75 bp, synthetic construct
  source 1..75: mol_type = other DNA
gtcagcgtcttccagcgcaggaacggcatcagcaaaagcctctgaggcatcaaaaagtgctgccgctgcagagtc

SEQ ID NO: 168430 - DNA, 75 bp, synthetic construct
  source 1..75: mol_type = other DNA
cagctcagtagcgccactaacagcccgtctgaaacgctggctgcgacaccaaaagcggttaaggcggtaatggat

SEQ ID NO: 168431 - DNA, 75 bp, synthetic construct
  source 1..75: mol_type = other DNA
atgacagcccgccggttcaggcgggcttttttgtggggggggaatatggcagtactgatttcaggtgtactgaaa

SEQ ID NO: 168432 - DNA, 75 bp, synthetic construct
  source 1..75: mol_type = other DNA
atggacaactggcatttgggcttcaacccgcatctgctgatttttataagcgggttgcatatactcatcagggaa

SEQ ID NO: 168433 - DNA, 75 bp, synthetic construct
  source 1..75: mol_type = other DNA
acaagaaagcgcccttaaacagtcctgcactgaccggaacgccaacaacgccaactgcgccaaaagggactaata

SEQ ID NO: 168434 - DNA, 75 bp, synthetic construct
  source 1..75: mol_type = other DNA
tgtgggcgggcggaatactctctcaggctgaaaaaatggatatggttgacctcgtcactcagagctatgaaggga

SEQ ID NO: 168435 - DNA, 75 bp, synthetic construct
  source 1..75: mol_type = other DNA
tgcagaaaggggtgatgtatgagaaagcagggcacgtaattaccgggcttggtattgtcggtgaagtcgatggtg

SEQ ID NO: 168436 - DNA, 75 bp, synthetic construct
  source 1..75: mol_type = other DNA
attttacggggaatgatgtcgccagcctggcaactctgacaaaagtcgggcgggatattcttgcgaaatctaccg

SEQ ID NO: 168437 - DNA, 75 bp, synthetic construct
  source 1..75: mol_type = other DNA
tgacactgattcatacatgtggtttgaaacaggcgacaacggcaatgaatatttcaaatggagaagcaaacaaag

SEQ ID NO: 168438 - DNA, 75 bp, synthetic construct
  source 1..75: mol_type = other DNA
caaaggttttcgtgaagcagggctggcgctcggtctttcacgttgggaaaccattcgctacgtcattttaccgct

SEQ ID NO: 168439 - DNA, 75 bp, synthetic construct
  source 1..75: mol_type = other DNA
ggcggtggtcaccatcatgatcaactccggcgcgtacattgcggaaatcacgcgtggtgcggtgctgtctattca

SEQ ID NO: 168440 - DNA, 75 bp, synthetic construct
  source 1..75: mol_type = other DNA
tgctgaccgagcgcacgctggtcagtgaggttgacggcgcactgcatgtgaagaatatcccggaacccccgccgc

SEQ ID NO: 168441 - DNA, 75 bp, synthetic construct
  source 1..75: mol_type = other DNA
aacgtggtggtgaccgacttcaccggcgaccttgatttgatattcgtgccggtgcaggcgtggctgcgcgaacat

SEQ ID NO: 168442 - DNA, 75 bp, synthetic construct
  source 1..75: mol_type = other DNA
tgaggtggacggcgcgctgcatgtgaagaatatcccggaacctccgccgccggagccggtcacccgcccgatgga

SEQ ID NO: 168443 - DNA, 75 bp, synthetic construct
  source 1..75: mol_type = other DNA
actgcgtaccaaccccgacatgcttcgcctacgtctggatgatggcaacaatacggcgacgctggcgcgctccct

SEQ ID NO: 168444 - DNA, 75 bp, synthetic construct
  source 1..75: mol_type = other DNA
tggttgccaccggggccagctccatgtcatgggagtaccgctacacccttaacgtggtgattgaagatttcagcg

SEQ ID NO: 168445 - DNA, 75 bp, synthetic construct
  source 1..75: mol_type = other DNA
attgctcgcgcactcaacgttcaccctgcggaaatctggcctggccgttatgaggaagaaggcgagctgcggcaa

SEQ ID NO: 168446 - DNA, 75 bp, synthetic construct
  source 1..75: mol_type = other DNA
ggccataaatccactgtcgcgctggatgacgccagccatcagcatgcgctcaaagtgctcttcgcgaagctcgac

SEQ ID NO: 168447 - DNA, 75 bp, synthetic construct
  source 1..75: mol_type = other DNA
cagcccgacatcatgaccaccgacgcaggtcagaaaaagggcttcacgttttatgcagacatcaaaatgacagca

SEQ ID NO: 168448 - DNA, 75 bp, synthetic construct
  source 1..75: mol_type = other DNA
gaaaagcgttacacgctcaatgtcattgtgaccgactttaccggtgattttgacctgctcatcgtgccggtgctg

SEQ ID NO: 168449 - DNA, 75 bp, synthetic construct
  source 1..75: mol_type = other DNA
aactgacggagcgtgtgctggtcagcactgatggcagtgtgtcgagtgttgaagctgtagcggaacccgatgaac

SEQ ID NO: 168450 - DNA, 75 bp, synthetic construct
  source 1..75: mol_type = other DNA
atgctcaaacccgacagcctgcgcagggcgctgactgatgccgtcacggtgctgaaaacaagccccgagatgctt

SEQ ID NO: 168451 - DNA, 75 bp, synthetic construct
  source 1..75: mol_type = other DNA
gattattgatatcaataacgacgattcgctcgatatcagtatcagcctgagactcaccgagcgcacgctcgtcaa

SEQ ID NO: 168452 - DNA, 75 bp, synthetic construct
  source 1..75: mol_type = other DNA
gtcgtttgaaaaggtgtacgtgcttaacgtggtagtgaccgacttcaccggcgacctcgatttgatattcgtgcc

SEQ ID NO: 168453 - DNA, 75 bp, synthetic construct
  source 1..75: mol_type = other DNA
tatcaggcgacatcaacggggggatcatcaggatcacgacaggtctcgaaagcccaaaccctgccgacatgcacc

SEQ ID NO: 168454 - DNA, 75 bp, synthetic construct
  source 1..75: mol_type = other DNA
taaagatcgccatggacaacgccgatggtcggcttgcgaaaaaccgcaatggtgaggacatccccaacaaggagc

SEQ ID NO: 168455 - DNA, 75 bp, synthetic construct
  source 1..75: mol_type = other DNA
gcgtctcaaatactgaccttggcacaaaaacgacctcatccttcaattacggcacaaaaacaacaaacagcgcgg

SEQ ID NO: 168456 - DNA, 75 bp, synthetic construct
  source 1..75: mol_type = other DNA
actgaccccgacttatctgggtgagtctatcgcggtgccacacggtacggttgaagcgaaagatcgcgtactgaa

SEQ ID NO: 168457 - DNA, 75 bp, synthetic construct
  source 1..75: mol_type = other DNA
agctttgatatcagtatcagcctgatgctgaccgagcgcacgctggtcagtgaggttgacggcgcactgcatgtg

SEQ ID NO: 168458 - DNA, 75 bp, synthetic construct
  source 1..75: mol_type = other DNA
aagaatatcccggaacccacgccgccggagccggtcacccgcccgatgaagctttatatcaatggcgaactggtg

SEQ ID NO: 168459 - DNA, 75 bp, synthetic construct
  source 1..75: mol_type = other DNA
aaggggcttacttcgctaacatcgcaggtgtgtgtgcggcgatggcggtttccttcgttgtctctgccattctgc

SEQ ID NO: 168460 - DNA, 75 bp, synthetic construct
  source 1..75: mol_type = other DNA
cgtggcggtgtcgtaggcgccatcactacaatgggcgttatcgtcggtgctgatatgccgatgttcctcggtgcg

SEQ ID NO: 168461 - DNA, 75 bp, synthetic construct
  source 1..75: mol_type = other DNA
ctggtcatcactcaccgtgatctgaccgaacgcgctatgcgccaggttccgcaggcacagcatatttcgctgacc

SEQ ID NO: 168462 - DNA, 75 bp, synthetic construct
  source 1..75: mol_type = other DNA
actctccggtaactccggatagttggataagctgtagtgagcgaatgccgaaagggtatgctgatgtgttagtga

SEQ ID NO: 168463 - DNA, 75 bp, synthetic construct
  source 1..75: mol_type = other DNA
ggaatagttggacggaacttaactcagatatctttgccgatgaaataactcactggatgccgctaccagagcctc

SEQ ID NO: 168464 - DNA, 75 bp, synthetic construct
  source 1..75: mol_type = other DNA
caccgaatatccggatccgcactcagttacgcactggtgtgaaatgccagcagcaccgcagcaggaggtgaagtg

SEQ ID NO: 168465 - DNA, 75 bp, synthetic construct
  source 1..75: mol_type = other DNA
aagaacccggcaactctccggtaactccggctcgcctgcctggtggtttcaccattgaggatgcgaaggcattac

SEQ ID NO: 168466 - DNA, 75 bp, synthetic construct
  source 1..75: mol_type = other DNA
caaatgccgaaaactatataccactccgccagttcctgtaatacaggctgatgtcgcgcaggcaattgaaaaact

SEQ ID NO: 168467 - DNA, 75 bp, synthetic construct
  source 1..75: mol_type = other DNA
tgacgctaatgacgggtggctaattcctggggcgtcatggaaaccgtcacactggatgccactgccagaaccgcc

SEQ ID NO: 168468 - DNA, 75 bp, synthetic construct
  source 1..75: mol_type = other DNA
cggtaactccggatggttggataagctgtagtgagcgaatgccggaagacaccaaaatgttactggcatttagtc

SEQ ID NO: 168469 - DNA, 75 bp, synthetic construct
  source 1..75: mol_type = other DNA
gtgtaacggttatgccaggtaatggtattgagcaagcaactcactggatgccgctaccggaaccgccgcaggagg

SEQ ID NO: 168470 - DNA, 75 bp, synthetic construct
  source 1..75: mol_type = other DNA
ggtactgtgacgcgcgcggtgggtcatggcaaaacggtgggggttgcgcagtacatcaaggggcaatgggacaac

SEQ ID NO: 168471 - DNA, 75 bp, synthetic construct
  source 1..75: mol_type = other DNA
gttgagcgacggcactttatcgtggttagggaacgccttgttctggatgccgctaccagaaccgccgcaggaggc

SEQ ID NO: 168472 - DNA, 75 bp, synthetic construct
  source 1..75: mol_type = other DNA
ctggaagcaaaaccaataggtgctttccacattgcagaacagcaagttgacggcacaagtgattatctcaaggat

SEQ ID NO: 168473 - DNA, 75 bp, synthetic construct
  source 1..75: mol_type = other DNA
gcttatattttcaaacatccggccggaaaattattctgggctttgacggatgaaagcaataaagatcaatcggac

SEQ ID NO: 168474 - DNA, 75 bp, synthetic construct
  source 1..75: mol_type = other DNA
gtagattcagaagaacatgtatcaaccagcaaagcggttgttgatgcctgggttgaagaatggaatcaggttgac

SEQ ID NO: 168475 - DNA, 75 bp, synthetic construct
  source 1..75: mol_type = other DNA
tatcaggctgtgacgaccattgaaggagcacaacaactgttaccgatggggccggtggcttctcaggaagcgatt

SEQ ID NO: 168476 - DNA, 75 bp, synthetic construct
  source 1..75: mol_type = other DNA
agcactatctgccgcttaatccgcagcaactgccgggtttgtcgtgggatctggcgctgaatactgctgtcagct

SEQ ID NO: 168477 - DNA, 75 bp, synthetic construct
  source 1..75: mol_type = other DNA
ctgtagtgagcgaatgccagatgacgggcagtggtgcgtagtgaacacagaatacgggtattacgtgcaatgctg

SEQ ID NO: 168478 - DNA, 75 bp, synthetic construct
  source 1..75: mol_type = other DNA
gccaaaatcagaggaggaaggactcctcaacgttgtgataaccgacagaaaaagcggcgagcaaaaatgctgtca

SEQ ID NO: 168479 - DNA, 75 bp, synthetic construct
  source 1..75: mol_type = other DNA
gaattcgtcaaccaacaattttcgggaaatctcggaaacgtcaaccagatctccgataactctggatggctggat

SEQ ID NO: 168480 - DNA, 75 bp, synthetic construct
  source 1..75: mol_type = other DNA
ttcctcttcccggtacggcgggcgttgagtgcgtactctttcgcgcacttggcgtctctggtcgcgagatgaact

SEQ ID NO: 168481 - DNA, 75 bp, synthetic construct
  source 1..75: mol_type = other DNA
cgttcttgttgccgtggagtttgacaggaaaggtgactggcgaatgaagtgggcgacttacatcccggggcatcc

SEQ ID NO: 168482 - DNA, 75 bp, synthetic construct
  source 1..75: mol_type = other DNA
agtgaatgccatgttgctgaactggaagaagcgctacgcgataagcaggcgttacttgaagcatcagagaagcgc

SEQ ID NO: 168483 - DNA, 75 bp, synthetic construct
  source 1..75: mol_type = other DNA
tgaacgcgtactctttcgcgcacttggcgtctctgaccgtgagatgaactggaagcagtatctgtctgccattct

SEQ ID NO: 168484 - DNA, 75 bp, synthetic construct
  source 1..75: mol_type = other DNA
ctactgtattttatgttgctcggtcagcattatctgccgcttaatccgcagcaactgccggggctgtcgtgggat

SEQ ID NO: 168485 - DNA, 75 bp, synthetic construct
  source 1..75: mol_type = other DNA
gcatgagcacgctcggtaatgcctgggttgatctgctacgcattacgttatgggtgttagctcctgtagcgttgt

SEQ ID NO: 168486 - DNA, 75 bp, synthetic construct
  source 1..75: mol_type = other DNA
acgctaccacagcgcgaaaaggtcttgtccagctcagtagtgccaccaacagcacgtctgaaacattggccgcga

SEQ ID NO: 168487 - DNA, 75 bp, synthetic construct
  source 1..75: mol_type = other DNA
cctttgagtaatgaagggatgaaacagcatctttctaatctcgttcctgatcaatataaaggcgctggcactgca

SEQ ID NO: 168488 - DNA, 75 bp, synthetic construct
  source 1..75: mol_type = other DNA
aaatacactgcacaggacgccaccacagcgcgaaaagggcttgctcagctcagtagcgccaccaacagcgattct

SEQ ID NO: 168489 - DNA, 75 bp, synthetic construct
  source 1..75: mol_type = other DNA
caagctggatgagaaaacctccgagtgggacgaacgcgcttcattaggcgtggtgatcgccgcgggcggttatcc

SEQ ID NO: 168490 - DNA, 75 bp, synthetic construct
  source 1..75: mol_type = other DNA
ccgtgcgcgacatgctggcgggcaacgcgtttggcgacgcgggtcatcgcattgttatcgaagagttcctcgacg

SEQ ID NO: 168491 - DNA, 75 bp, synthetic construct
  source 1..75: mol_type = other DNA
tggccaccagccaggatcacaaacgcgtgggcgataaagataccgggccaaacactggcggaatgggcgcatatt

SEQ ID NO: 168492 - DNA, 75 bp, synthetic construct
  source 1..75: mol_type = other DNA
tacaggaaacggtaaatcaggcttctggcgcattacagaaaaaccagaacggcgcagatattccggggaaagata

SEQ ID NO: 168493 - DNA, 75 bp, synthetic construct
  source 1..75: mol_type = other DNA
gaggttatgggcgttaaagcagcaatgaccattcgtgtgaccactccgagtacatcaagcggtggtggtaccacc

SEQ ID NO: 168494 - DNA, 75 bp, synthetic construct
  source 1..75: mol_type = other DNA
tgaattacaggaacggcggtattttttatcgttcagcgcgtgatggttacggattcgaagctgactggtcagaaa

SEQ ID NO: 168495 - DNA, 75 bp, synthetic construct
  source 1..75: mol_type = other DNA
acaatgctgaaaaacgtcttcagaaagatcaaaatggcgcggatattcctgataaaagattattcctgcgcaata

SEQ ID NO: 168496 - DNA, 75 bp, synthetic construct
  source 1..75: mol_type = other DNA
tttactcagttaagcaatgcgaccaacagcatgtctgaaacactggccgcaacgccgaaagcggtaaaggccgcg

SEQ ID NO: 168497 - DNA, 75 bp, synthetic construct
  source 1..75: mol_type = other DNA
tgattatgcgccgggctggcgacgcgactacaatacgaaaaataagcaaccggcttttgcattagggaaaacagg

SEQ ID NO: 168498 - DNA, 75 bp, synthetic construct
  source 1..75: mol_type = other DNA
acttgggatgacggtgatggcgaagacctgcatctcaaagaagtaacccactggatgccgctaccagaaccgccg

SEQ ID NO: 168499 - DNA, 75 bp, synthetic construct
  source 1..75: mol_type = other DNA
tcgaattattcattaaaaatccgcttgataacgggcttacccgtggcgaacaaatggaagtggcacggattgcgc

SEQ ID NO: 168500 - DNA, 75 bp, synthetic construct
  source 1..75: mol_type = other DNA
gggcttgttactgagcctgattgtcgccgttgcggcgtttaacattattacctcgctggggctaatggtgatgga

SEQ ID NO: 168501 - DNA, 75 bp, synthetic construct
  source 1..75: mol_type = other DNA
tgaggagttcttcgaaacacagagccgcaatgtaacccactggatgccactaccagaaccgccggagatgaatcg

SEQ ID NO: 168502 - DNA, 75 bp, synthetic construct
  source 1..75: mol_type = other DNA
cggaaactttcgggaaaataaagattcgtcaaccaataattttcggaaaatcccggaagcgtcaaccagctctcc

SEQ ID NO: 168503 - DNA, 75 bp, synthetic construct
  source 1..75: mol_type = other DNA
acgcgctggatggcaactctccggtaactccggatggttggataagctgtagtgagcgaatgccggacgacaggc

SEQ ID NO: 168504 - DNA, 75 bp, synthetic construct
  source 1..75: mol_type = other DNA
acgcaggcactgcactggaacccgcgctgcaaaacgtcgctatcggcgtgaccgatatcccggcactgttggatt

SEQ ID NO: 168505 - DNA, 75 bp, synthetic construct
  source 1..75: mol_type = other DNA
cggttttctctatgcaggtttgatgatcgacaaacagggcaacccgaaggttatcgaatttaactgccgctttgg

SEQ ID NO: 168506 - DNA, 75 bp, synthetic construct
  source 1..75: mol_type = other DNA
gcggacgcgagcacgcactggcctggaaagcggcgcagtcgccgctggttgagaccgtatttgtcgcaccgggta

SEQ ID NO: 168507 - DNA, 75 bp, synthetic construct
  source 1..75: mol_type = other DNA
ccgtacgcatggaaaaaaatatgatgggcttgctgctgagcctgattgtcgccgttgcggcgtttaacattatta

SEQ ID NO: 168508 - DNA, 75 bp, synthetic construct
  source 1..75: mol_type = other DNA
tccacgtacaaattaaccgatagcgagcgcgatattgctgccgaaatatggaacgcctgccgcgccgctatgctt

SEQ ID NO: 168509 - DNA, 75 bp, synthetic construct
  source 1..75: mol_type = other DNA
gaaggttattgaatttaactgccgctttggcgatccggaaacccagccgattatgctgcgcatgaagtccgatct

SEQ ID NO: 168510 - DNA, 75 bp, synthetic construct
  source 1..75: mol_type = other DNA
gggattatcgcagcgcgcaacgctatggcatgtgattatgccgctggccctgcgccgcatgatcccggcgttggg

SEQ ID NO: 168511 - DNA, 75 bp, synthetic construct
  source 1..75: mol_type = other DNA
gacccgcgaactgaccacgctacgtacgcagctacaggcacaggacagcgacacgcatcagcgcttctccgcaac

SEQ ID NO: 168512 - DNA, 75 bp, synthetic construct
  source 1..75: mol_type = other DNA
tgcagtaccggatacgccggcagcatctgccgcgccggtgtccgggtcggatacccgggaaataaagaaaaatat

SEQ ID NO: 168513 - DNA, 75 bp, synthetic construct
  source 1..75: mol_type = other DNA
gtagtctggggatgctgtgggtagaaaacgccgccacgctgctggtattgcgttttgtacaggctgtgggtgtct

SEQ ID NO: 168514 - DNA, 75 bp, synthetic construct
  source 1..75: mol_type = other DNA
tcctgcccttgctcctcttttaggtagctggctgctggttcatttttcctggcaggcgattttcgccaccttgtt

SEQ ID NO: 168515 - DNA, 75 bp, synthetic construct
  source 1..75: mol_type = other DNA
actgtgcttcctcgcaagtctggtggtttcctggcttattagcgtcagtacgccgttatttaccaccaccagcgt

SEQ ID NO: 168516 - DNA, 75 bp, synthetic construct
  source 1..75: mol_type = other DNA
gcctgctacctttttccttttcgtcactgtcggcaaccacagacttaggggcgaaaggaacgttgaaattctctc

SEQ ID NO: 168517 - DNA, 75 bp, synthetic construct
  source 1..75: mol_type = other DNA
aatcgcttcatgattcgaacaggtaatacagaagccgcgcaagattacctgttttctcatggatatatggaccca

SEQ ID NO: 168518 - DNA, 75 bp, synthetic construct
  source 1..75: mol_type = other DNA
tcgtaaagaagccaatgcgggaactgcatctgccatcgctatcgcctcacaaccccaggtgaaaaccggtgactt

SEQ ID NO: 168519 - DNA, 75 bp, synthetic construct
  source 1..75: mol_type = other DNA
gcctgctggccagtatgccggtaccgcccacctcggtcagtgagctgcagtcactggttcagcagatggccggca

SEQ ID NO: 168520 - DNA, 75 bp, synthetic construct
  source 1..75: mol_type = other DNA
tggccggagtggggaacgggtggaaagtgtgctgacggaagcgtcatcccgtctgcgtggggatctgctgagaaa

SEQ ID NO: 168521 - DNA, 75 bp, synthetic construct
  source 1..75: mol_type = other DNA
atgacactagccacctcatctattggtgactatagctggttacaccgccttcatagctgggttatggaggtggct

SEQ ID NO: 168522 - DNA, 75 bp, synthetic construct
  source 1..75: mol_type = other DNA
tcgccgtcacctcaaccgccatgccgatgacgcaagtggaagatatggtggaaacccgcgtcgcgcagaaaatct

SEQ ID NO: 168523 - DNA, 75 bp, synthetic construct
  source 1..75: mol_type = other DNA
tatccgacgattcaggtggttacgctttaccccggtgccagcccggatgtgatgacctctgccgttaccgcgcca

SEQ ID NO: 168524 - DNA, 75 bp, synthetic construct
  source 1..75: mol_type = other DNA
tgctgacgctgttcaccacgccggtgatttatttgctgttcgaccgcctggcattgtggaccaaaagccgctttg

SEQ ID NO: 168525 - DNA, 75 bp, synthetic construct
  source 1..75: mol_type = other DNA
catgacctctgccgttaccgcgccgctcgaacgccagttcgggcagatgtccggcctgaaacagatgtcgtcgca

SEQ ID NO: 168526 - DNA, 75 bp, synthetic construct
  source 1..75: mol_type = other DNA
tcgatgacgccatcgtggtgatcgaaaacatttcccgctatatcgaaaaaggcgaaaaaccgttggcggcggcgc

SEQ ID NO: 168527 - DNA, 75 bp, synthetic construct
  source 1..75: mol_type = other DNA
aacctcaaaccgttggatgaacgtgatgaccgggtgcaaaaagttatctcccgtctgcaatcggcggtcgataaa

SEQ ID NO: 168528 - DNA, 75 bp, synthetic construct
  source 1..75: mol_type = other DNA
aaattcagccgaactttgccaacaccggcaagtgttatctggtggggctggccgtcaccgatgacccggcaagcc

SEQ ID NO: 168529 - DNA, 75 bp, synthetic construct
  source 1..75: mol_type = other DNA
gcctgtacaccagcctgaccgaacgtctggttgctgcccagcgccatactgaaaacgaagtgaaagtgaaagaca

SEQ ID NO: 168530 - DNA, 75 bp, synthetic construct
  source 1..75: mol_type = other DNA
gtgatgttatcaacagtagtgctggtcgctctgggttacatgatgcaacgttgtgaagaagttgactgccagaat

SEQ ID NO: 168531 - DNA, 75 bp, synthetic construct
  source 1..75: mol_type = other DNA
aggcttgtctgttgcgttttcgtccgatcctgatgaccactctggcggctctgcttggcgcgctgccgctgatgt

SEQ ID NO: 168532 - DNA, 75 bp, synthetic construct
  source 1..75: mol_type = other DNA
tggatgcactcagcacctgggtgccacagttgatggaaaaactccagcagttgccacagctttctgatgtctcca

SEQ ID NO: 168533 - DNA, 75 bp, synthetic construct
  source 1..75: mol_type = other DNA
ccaaaattgagcagcgttttgcgccgctctccatcaaccatctggatcagttcccggtaacgaccatctccttta

SEQ ID NO: 168534 - DNA, 75 bp, synthetic construct
  source 1..75: mol_type = other DNA
tctggcgaagcgctggaagcaaaactcgcggggctaaaagccaatgaaaggcacacggaacgggttattcgcaca

SEQ ID NO: 168535 - DNA, 75 bp, synthetic construct
  source 1..75: mol_type = other DNA
gagtattttaggttggcttgatatccctttattatattcttttaagagtaaattaatatttacttttcataacag

SEQ ID NO: 168536 - DNA, 75 bp, synthetic construct
  source 1..75: mol_type = other DNA
aaagtgcgacggacagtttttcgcaggttaaaaacgcggccacgcagacctttgacggtattgcacagaatatgg

SEQ ID NO: 168537 - DNA, 75 bp, synthetic construct
  source 1..75: mol_type = other DNA
aatctgagcctcagaaagaagaggcgaaacagccaatgtctctggcgaatgttcttgcgattattaacgaacagg

SEQ ID NO: 168538 - DNA, 75 bp, synthetic construct
  source 1..75: mol_type = other DNA
ccgccgaaaaattacgctgcgacaccgtcgtgacggtgccgaataactttacgctccccgaaaacagtgagggcg

SEQ ID NO: 168539 - DNA, 75 bp, synthetic construct
  source 1..75: mol_type = other DNA
tcatcctgacagaaatttcgggtggtcagtatgcggtggcggtagcccgcgtagagggggatgattttgcgaaac

SEQ ID NO: 168540 - DNA, 75 bp, synthetic construct
  source 1..75: mol_type = other DNA
ctgttagccatctgtattgggctcagcatgagatggatcacctggtcggcaaactgtttatggattatctgtcac

SEQ ID NO: 168541 - DNA, 75 bp, synthetic construct
  source 1..75: mol_type = other DNA
tgacgaacggctggtgttaatcaatccggagcttttagaaaaagcggcgaaacaggcattgaagaaggttgcctg

SEQ ID NO: 168542 - DNA, 75 bp, synthetic construct
  source 1..75: mol_type = other DNA
ttagccatctgtattcagcatgagatggatcacctggtcggcaaactgtttatggattatctgtcaccgttgaaa

SEQ ID NO: 168543 - DNA, 75 bp, synthetic construct
  source 1..75: mol_type = other DNA
agaacgctggagtacaaacgccagctggctgagctgggcgacaaggttgaataccagaaacgcctgaatgaactt

SEQ ID NO: 168544 - DNA, 75 bp, synthetic construct
  source 1..75: mol_type = other DNA
aagcacagcgctggcgcgtcggtattctcggcggcatgttgtgtgaaacgttgaccatgattctggtgattgtct

SEQ ID NO: 168545 - DNA, 75 bp, synthetic construct
  source 1..75: mol_type = other DNA
aggtccaggcttttgggggctttttgactgcaatggtcatccccaatatcggtgcctttattgcctggggattta

SEQ ID NO: 168546 - DNA, 75 bp, synthetic construct
  source 1..75: mol_type = other DNA
tgccaatgcgcaacaggcacaagctgacacccagcagcaacaaatggacgatcagcagaaacaaatcgacgcgac

SEQ ID NO: 168547 - DNA, 75 bp, synthetic construct
  source 1..75: mol_type = other DNA
cgcgacaacgggcaggataccgccattcaggacgcacaacatgccgccaactgggcttcactgaaagctgatgac

SEQ ID NO: 168548 - DNA, 75 bp, synthetic construct
  source 1..75: mol_type = other DNA
ccaaacgcatcagcagttaacaaatacccaaaaacgtgtcgcagataacagccaacaaatcaattcactcaataa

SEQ ID NO: 168549 - DNA, 75 bp, synthetic construct
  source 1..75: mol_type = other DNA
gtgtcgtcagcgacaacaaaaaccagattgaaaaaaacagtacggcgattaccgaacagcaggaacaaatcactg

SEQ ID NO: 168550 - DNA, 75 bp, synthetic construct
  source 1..75: mol_type = other DNA
cagatcgtccgcgacaacgggcaggataccgccattcaggacgcacaacatgccgccaactgggcttcactgaaa

SEQ ID NO: 168551 - DNA, 75 bp, synthetic construct
  source 1..75: mol_type = other DNA
gcacatgcccagtcaacggctgaccatgccaacgctaacgccaacaccgctctgattaacggcgtcaaactctcc

SEQ ID NO: 168552 - DNA, 75 bp, synthetic construct
  source 1..75: mol_type = other DNA
tatcactctctggacctgaatgatgacctcgaaatcgaagacgactacgacgaagaggaagaaacagaccctgac

SEQ ID NO: 168553 - DNA, 75 bp, synthetic construct
  source 1..75: mol_type = other DNA
tgagcgctaaagagcgggcggaaattcgcaaagtagacgctgacacggacgctgtctatgtggccgccagcgtgc

SEQ ID NO: 168554 - DNA, 75 bp, synthetic construct
  source 1..75: mol_type = other DNA
cgaacacgcgacagcgtgggcgatatgctgcattcgttttcgctgagcgggattaagacggatatgacacaggta

SEQ ID NO: 168555 - DNA, 75 bp, synthetic construct
  source 1..75: mol_type = other DNA
acgcaaattacagagcaacaggcgcagatcgtagccacacaaaaaacgctcgccgcgactggagatacgcaaaat

SEQ ID NO: 168556 - DNA, 75 bp, synthetic construct
  source 1..75: mol_type = other DNA
acagccccgctgcatatacctatttgactgaacatcactacatcccttctgaaacacctgataccactcagactc

SEQ ID NO: 168557 - DNA, 75 bp, synthetic construct
  source 1..75: mol_type = other DNA
acgcacattatcaagagatggttaacgccggactgagagcacaaaatgatgcgaatgcgcgtactgcagcagaac

SEQ ID NO: 168558 - DNA, 75 bp, synthetic construct
  source 1..75: mol_type = other DNA
cggcagatgcggcgcgtgaccgccttaacgagatggggatcgtgctggaagatggcccgcaagggaccacctggc

SEQ ID NO: 168559 - DNA, 75 bp, synthetic construct
  source 1..75: mol_type = other DNA
gtggagtttaacgagcctcgaatgatgctaccaattacagacaacaccatgaaaagattggttatcgagcaaacg

SEQ ID NO: 168560 - DNA, 75 bp, synthetic construct
  source 1..75: mol_type = other DNA
tcgttgataacgacaccgccatgatgattcaggctttcagtgatgtaggtgttggcattgactttgataagttgt

SEQ ID NO: 168561 - DNA, 75 bp, synthetic construct
  source 1..75: mol_type = other DNA
tctgcgatcgtggcgatcgctacctttccaccggggtgtttggggaagagcattttagccagggggcggggattt

SEQ ID NO: 168562 - DNA, 75 bp, synthetic construct
  source 1..75: mol_type = other DNA
caccagtggtaacaccggcattgcgctggcaatgattgccgcgctgaaaggctatcgcatgaaattgctgatgcc

SEQ ID NO: 168563 - DNA, 75 bp, synthetic construct
  source 1..75: mol_type = other DNA
gcgaatggggccggataacggcagtgaagtctggttaaagctggaaggtaataatccggcaggttcggtgaaaga

SEQ ID NO: 168564 - DNA, 75 bp, synthetic construct
  source 1..75: mol_type = other DNA
aacaaatacagtatttccccagagcaatttttgaaaggtgctgtaacaatcctatacagcgataatattctggtg

SEQ ID NO: 168565 - DNA, 75 bp, synthetic construct
  source 1..75: mol_type = other DNA
tcgttgatagcgacaccgctctgatggtgcaaagcttcattgatgtaggtgtgtcaattgactttgacaggctgt

SEQ ID NO: 168566 - DNA, 75 bp, synthetic construct
  source 1..75: mol_type = other DNA
aaatatctcaaggcggctatagcaattttgtacagcgataatattctggtgacggattcgaaggtggtgcattaa

SEQ ID NO: 168567 - DNA, 75 bp, synthetic construct
  source 1..75: mol_type = other DNA
aacaattgaagattttattcagtcggtggagtttaacgagcctcgaatgatgctaccaattaaagacagcaacat

SEQ ID NO: 168568 - DNA, 75 bp, synthetic construct
  source 1..75: mol_type = other DNA
aaccgatacagcgttagccctgaacaatatctcaaggcggctatagcaattttgtacgctgacaatattttggtt

SEQ ID NO: 168569 - DNA, 75 bp, synthetic construct
  source 1..75: mol_type = other DNA
atgaataattacccaatgcaaattatggttgataacgacactgctatgatggtgcaaagcttcattgatgcaggt

SEQ ID NO: 168570 - DNA, 75 bp, synthetic construct
  source 1..75: mol_type = other DNA
atccagcagcagatgcagcgccgtgaagaggtgaatatcaacgtgcaccgggagcgcggggaggatgttgagccg

SEQ ID NO: 168571 - DNA, 75 bp, synthetic construct
  source 1..75: mol_type = other DNA
atgagaaccctggtacaggctttacggaagaaacaaaaaatacattggatcaaatatttaaatctcctgttcctc

SEQ ID NO: 168572 - DNA, 75 bp, synthetic construct
  source 1..75: mol_type = other DNA
cttctcaggaagcaaatgagtttcttgaaatatctacttttatttatgagaatgatttcttgagagaaaagattg

SEQ ID NO: 168573 - DNA, 75 bp, synthetic construct
  source 1..75: mol_type = other DNA
cacatcgctggaagcgaaacctgttgcatggactgatgatgaggaactgcgtgatgtcaagcagtatggtttcgg

SEQ ID NO: 168574 - DNA, 75 bp, synthetic construct
  source 1..75: mol_type = other DNA
actccggcaaaaccaatgggaccaaacgactacatggttattggccttgcgcgtatcgacgaccgtctgattcac

SEQ ID NO: 168575 - DNA, 75 bp, synthetic construct
  source 1..75: mol_type = other DNA
tcgttgctgtaactgtcctgttctctgtcgtagctacagcggaacaaataaagctgccagataacatcaaatacg

SEQ ID NO: 168576 - DNA, 75 bp, synthetic construct
  source 1..75: mol_type = other DNA
ataatccggcaggttcggtgaaagatcgcgcggcactatcgatgattgtcgaggcggaaaaacgcggagaaatta

SEQ ID NO: 168577 - DNA, 75 bp, synthetic construct
  source 1..75: mol_type = other DNA
ataacccggcaggttcggtgaaagatcgtgcggcgctttcgatgatcgtcgaggcggaaaagcgcggggaaatta

SEQ ID NO: 168578 - DNA, 75 bp, synthetic construct
  source 1..75: mol_type = other DNA
gaggcggaaaagcgcggggaaattaaaccgggtgatgtgttgatcgaagccaccagtggtaacaccggcattgcg

SEQ ID NO: 168579 - DNA, 75 bp, synthetic construct
  source 1..75: mol_type = other DNA
aaacacatgtttaattcattttttctagaaaacatgattaaacttcaggataatttcttcaactattgcattgtc

SEQ ID NO: 168580 - DNA, 75 bp, synthetic construct
  source 1..75: mol_type = other DNA
gcaatacgcctctggtgaagttgcagcgaatggggccgaataacggcagtgaagtctggttgaaactggaaggca

SEQ ID NO: 168581 - DNA, 75 bp, synthetic construct
  source 1..75: mol_type = other DNA
gtagcgatcatctgcgatcgtggcgaccgctacctttcgactggagtgttcggcgaagagcattttagccagagg

SEQ ID NO: 168582 - DNA, 75 bp, synthetic construct
  source 1..75: mol_type = other DNA
gcgtgcaacaggcgtcagcaaaggtccggggcagcagtaagccgtcaggaacgcagcgtcggctgaagagctgac

SEQ ID NO: 168583 - DNA, 75 bp, synthetic construct
  source 1..75: mol_type = other DNA
tacgccagggggaaatggggtacatcaaccgctcgcgtgcaacaggcgtcagcaaaggtccggggcagcaggaag

SEQ ID NO: 168584 - DNA, 75 bp, synthetic construct
  source 1..75: mol_type = other DNA
agggggaaatggggtacatcaaccgctcgcgtgcaacaggcgtcagcaaaggtccagggcagcaggaagccgtca

SEQ ID NO: 168585 - DNA, 75 bp, synthetic construct
  source 1..75: mol_type = other DNA
gcgtgcaacaggcgtcagcaaaggtccggggcagcaggaagccgtcaggatcgccgcgtcggctgaagagctgac

SEQ ID NO: 168586 - DNA, 75 bp, synthetic construct
  source 1..75: mol_type = other DNA
gcgtgcaacaggcgtcagcaaaggtccggggcagcagcaagccgtcaggagcgctgcgtcggctgaagagctgac

SEQ ID NO: 168587 - DNA, 75 bp, synthetic construct
  source 1..75: mol_type = other DNA
gcgtgcaacaggcgtcagcaaaggtccggggcagcagcaagccgtcaggatcgcggcgtcggctgaagagctgac

SEQ ID NO: 168588 - DNA, 75 bp, synthetic construct
  source 1..75: mol_type = other DNA
gttgtttggtgaactggcagaagagaaccgcgtatttattgagaaaacaaaacgcgatgaactggcgctgagaaa

SEQ ID NO: 168589 - DNA, 75 bp, synthetic construct
  source 1..75: mol_type = other DNA
ggctgcggcggcgaacttccattttgcgaccggcggatttacgggcacgggcggcaaatatgagcctgcggggat

SEQ ID NO: 168590 - DNA, 75 bp, synthetic construct
  source 1..75: mol_type = other DNA
ccgctgtcgttaatcggcaccttcgcagtcatggtgtttctcgatttttcgatcaataacctgacgctgatggcg

SEQ ID NO: 168591 - DNA, 75 bp, synthetic construct
  source 1..75: mol_type = other DNA
acgaaggaggcaaccagccggattggcgtggggaatctttaccgtctgatgcgcggctatgcggaaggggggtat

SEQ ID NO: 168592 - DNA, 75 bp, synthetic construct
  source 1..75: mol_type = other DNA
tgcttaaacaggccatggtgggcattgtcgggcgtatcggcagcgccattggcggtgctttcggtggtggtgcgt

SEQ ID NO: 168593 - DNA, 75 bp, synthetic construct
  source 1..75: mol_type = other DNA
caggcccgggctgcacaaaaagccggaatatccctcgggcagtataaggcggccatgcgcacactgcccgcacag

SEQ ID NO: 168594 - DNA, 75 bp, synthetic construct
  source 1..75: mol_type = other DNA
ccaggcgtttgcagtcctgtgtgcctgtgcaatattacgctggcaattggggacgcgttggcgttatggattgac

SEQ ID NO: 168595 - DNA, 75 bp, synthetic construct
  source 1..75: mol_type = other DNA
gcgcagaaggtctatacctcaatggaaattcagccgaactttgccaataccggcaaatgttatctggtggggctg

SEQ ID NO: 168596 - DNA, 75 bp, synthetic construct
  source 1..75: mol_type = other DNA
tgatctgatcgcaatgaataaaaaattgcagaaggtctacacctcaatggaaattcagccgaatttcgccaatag

SEQ ID NO: 168597 - DNA, 75 bp, synthetic construct
  source 1..75: mol_type = other DNA
aacaattgaagattttattcaggaaattgaaactggtgacccacgttttatgtttcccgttaccgactcaaacat

SEQ ID NO: 168598 - DNA, 75 bp, synthetic construct
  source 1..75: mol_type = other DNA
ctgtttcccgcaggctaaaaacaccaacctcttacctccaggcaaccgacaaacccacctgttcccgtccggcta

SEQ ID NO: 168599 - DNA, 75 bp, synthetic construct
  source 1..75: mol_type = other DNA
catgattcgtttaccgctcttggtggcatggtgccgatgtggctgatgcaaattggtgaagtggtattcggcggt

SEQ ID NO: 168600 - DNA, 75 bp, synthetic construct
  source 1..75: mol_type = other DNA
gcgctgggccgtccggtggatatcgcctcctggcgtcatgcggatcagcttccggcactgtttaacggtatgcca

SEQ ID NO: 168601 - DNA, 75 bp, synthetic construct
  source 1..75: mol_type = other DNA
gccgtcaccgatgacccggcaagcctcggcacggaatacctggaattctgccgcacggcaaaacacaaccctctg

SEQ ID NO: 168602 - DNA, 75 bp, synthetic construct
  source 1..75: mol_type = other DNA
gcgtgcaacaggcgtcagcaaaggtccggggcagcaggaagccgtcaggaccgctgcgtcggctgaagagctgac

SEQ ID NO: 168603 - DNA, 75 bp, synthetic construct
  source 1..75: mol_type = other DNA
ttcgcatcggcgtcgaaggcgatacctgtgacggccgcgttatcagcgcgacggatattcaggaaatggccgaga

SEQ ID NO: 168604 - DNA, 75 bp, synthetic construct
  source 1..75: mol_type = other DNA
tcggcactgaatacctcgaattctgccgcaacgcgaagcacaacccgctgcagcgctttaagaccaaccctgaaa

SEQ ID NO: 168605 - DNA, 75 bp, synthetic construct
  source 1..75: mol_type = other DNA
acagacgaagggcaactgatgaacgtcaatgctgaccaggcagcgacggcgctggcggcaacgctgggcgcggat

SEQ ID NO: 168606 - DNA, 75 bp, synthetic construct
  source 1..75: mol_type = other DNA
cactatcgcctgcaaggctacgttcaggcgctgcgtcgctgcggaattatggttgatccgcaatatatcgcccga

SEQ ID NO: 168607 - DNA, 75 bp, synthetic construct
  source 1..75: mol_type = other DNA
tttccctgctggcggttatattactggctggctgtagctcacccgcttcccgcatcgcagattgccaggcgcagg

SEQ ID NO: 168608 - DNA, 75 bp, synthetic construct
  source 1..75: mol_type = other DNA
ttgccaggcgcagggcgtcagcatgacacctgttatctcgcagaacaacagcgtcagacggctattttaagtgca

SEQ ID NO: 168609 - DNA, 75 bp, synthetic construct
  source 1..75: mol_type = other DNA
aacgtcattgtttatcatcacacaggaaaagtcgccttaatgaaagaaggccagtttgtgggttatttaaaatga

SEQ ID NO: 168610 - DNA, 75 bp, synthetic construct
  source 1..75: mol_type = other DNA
aacaatggcctctacgtatcaatttatatctaaatacatcccattttttaaacatcctagttttatcgaagaaaa

SEQ ID NO: 168611 - DNA, 75 bp, synthetic construct
  source 1..75: mol_type = other DNA
tgtgagcttttctcaaaatatttatttaaattgtgttgcacatgatgttatatattcaaataataacgatgttac

SEQ ID NO: 168612 - DNA, 75 bp, synthetic construct
  source 1..75: mol_type = other DNA
aaacgataagttaagtcagtggagaggttacggaaataaacagggtgtttgcattgagtttgatgcggatgaact

SEQ ID NO: 168613 - DNA, 75 bp, synthetic construct
  source 1..75: mol_type = other DNA
agaagaatcttttacgcgggcaatcgagttgattgccgcacctgaagatgttcaggaacagaatccgcttacgct

SEQ ID NO: 168614 - DNA, 75 bp, synthetic construct
  source 1..75: mol_type = other DNA
gcgatagacagtaatgaccaggcaccagaacaacccctgatagatatcactgtaggaaacgccgatgaaataatc

SEQ ID NO: 168615 - DNA, 75 bp, synthetic construct
  source 1..75: mol_type = other DNA
aaggagattcgattggttagggtacgttcagcagcctataggttgaaagattctgatattgtcttcttccgcaca

SEQ ID NO: 168616 - DNA, 75 bp, synthetic construct
  source 1..75: mol_type = other DNA
ttatgatccggcattttctaccgctgtaaacgtctcatcttgtattactggattactgataccgccctcaaacgt

SEQ ID NO: 168617 - DNA, 75 bp, synthetic construct
  source 1..75: mol_type = other DNA
catctcatacgcgacgaagttttgttgcataacaaaaaagcccacaacaatattgtttgtcgtgagcttggcgtt

SEQ ID NO: 168618 - DNA, 75 bp, synthetic construct
  source 1..75: mol_type = other DNA
ctgaccacgacctggtattttggcgcagcgctgattgtgctgtggctgttgtcccgcgtactggaaaacaacttt

SEQ ID NO: 168619 - DNA, 75 bp, synthetic construct
  source 1..75: mol_type = other DNA
attttggcaatccgggacagctggacgccgggggcgtggtcacccgcggtgccgatgatggtattcgcgtggatg

SEQ ID NO: 168620 - DNA, 75 bp, synthetic construct
  source 1..75: mol_type = other DNA
tccggtgccacagttcagggctgctcagcctttaaggccgggcaggtcgccaccctggattttggtaacccgggc

SEQ ID NO: 168621 - DNA, 75 bp, synthetic construct
  source 1..75: mol_type = other DNA
gtgagtattaaatatattgtgtttgtctctgctttattaatttccaatacgggaaaggggggggggcagcgagtt

SEQ ID NO: 168622 - DNA, 75 bp, synthetic construct
  source 1..75: mol_type = other DNA
agttctttatcaacgttgccgataacgccttccttgaccatggtcagcgtgatttcggttacgcggtatttggta

SEQ ID NO: 168623 - DNA, 75 bp, synthetic construct
  source 1..75: mol_type = other DNA
taacccgtggagcaggcgatgatattcgcattgaagtaagaggaatggatccacaggccgattataaagggccga

SEQ ID NO: 168624 - DNA, 75 bp, synthetic construct
  source 1..75: mol_type = other DNA
acgtgaatttacgattcgtatgtacgaaacgggagcctccgttttaggctgctctgcgtttctcgcaggtgagca

SEQ ID NO: 168625 - DNA, 75 bp, synthetic construct
  source 1..75: mol_type = other DNA
gcgctggaaaaattaggttataccgtcaacaaacccagcgaagtggattacaacgttggttatacgtcactggct

SEQ ID NO: 168626 - DNA, 75 bp, synthetic construct
  source 1..75: mol_type = other DNA
ggcaaaccggtgttttactacacctggacgccgtactgggtgagtaatgagctgaagccaggcaaagatgtggtc

SEQ ID NO: 168627 - DNA, 75 bp, synthetic construct
  source 1..75: mol_type = other DNA
cgacaccatcagtcgttacaaagagggcaaaccggtgttttactacacctggacgccgtactgggtgagtaatga

SEQ ID NO: 168628 - DNA, 75 bp, synthetic construct
  source 1..75: mol_type = other DNA
gttttcgtgcgcagccggtgtttccggcgaacgtgaaggcgggggaatacacgggtgcactgacctttgtggtca

SEQ ID NO: 168629 - DNA, 75 bp, synthetic construct
  source 1..75: mol_type = other DNA
gattttggtaacccgggacagctggacgcagggggcgtggtcacccgcggtgccggtgatggtattcgcgtggat

SEQ ID NO: 168630 - DNA, 75 bp, synthetic construct
  source 1..75: mol_type = other DNA
atgatatttgttgtgggagggggggtgaagatctttatatcgctaattgctttaattagttcttctgtttatgcg

SEQ ID NO: 168631 - DNA, 75 bp, synthetic construct
  source 1..75: mol_type = other DNA
tatcagcgtattcaggagttattttggtgttacaccggcaggttacaggatggctgcattcaatgagatgagttt

SEQ ID NO: 168632 - DNA, 75 bp, synthetic construct
  source 1..75: mol_type = other DNA
ttcaaacagtatattcaaattcattcatcttgaatgctcctgcggtcgtctttccatttgaaaatgattcagcaa

SEQ ID NO: 168633 - DNA, 75 bp, synthetic construct
  source 1..75: mol_type = other DNA
ctttctgagccgtccagcgggcgtggataccagcagaaatccccgcgtattgatgggcgtcaaatcaacgtttat

SEQ ID NO: 168634 - DNA, 75 bp, synthetic construct
  source 1..75: mol_type = other DNA
gctgagcgtatgtttgtttatttcagtcatctatgcggggggaatactgcatattattaagtattttttggatgt

SEQ ID NO: 168635 - DNA, 75 bp, synthetic construct
  source 1..75: mol_type = other DNA
ttgtcaatggtgttccgtttaaaattattggtgtcagattaaactcaaaaacagattttcttgatagtcttgggt

SEQ ID NO: 168636 - DNA, 75 bp, synthetic construct
  source 1..75: mol_type = other DNA
gtaatgttgctattgttaatgatataggaatatttggaaaaagcaagcaggtattcatcaatggtataccattta

SEQ ID NO: 168637 - DNA, 75 bp, synthetic construct
  source 1..75: mol_type = other DNA
gccggacgcgcagcggctgacctggtacggcacagcgttaggtatcgccaacgaagcagaggcacacaatgacgg

SEQ ID NO: 168638 - DNA, 75 bp, synthetic construct
  source 1..75: mol_type = other DNA
tggcgctacagattgaaaccctgctggcagtggctggtgttaaggaagcctgtttttgtgacgagaacggcgatt

SEQ ID NO: 168639 - DNA, 75 bp, synthetic construct
  source 1..75: mol_type = other DNA
accagccagccgacaaaatgacggaggttatcatttttgcgggtagtgatgcctgggcacatgcgaatcagtggc

SEQ ID NO: 168640 - DNA, 75 bp, synthetic construct
  source 1..75: mol_type = other DNA
atgaagatgaagaatgccccgaatattaaattcctgccgaaagataaatttacagaggcgattatctttgcgggt

SEQ ID NO: 168641 - DNA, 75 bp, synthetic construct
  source 1..75: mol_type = other DNA
caatacagatgagcgtgatttaccgattaaagagcttgccggatacagaaaagggagcattcgcaacgaagatga

SEQ ID NO: 168642 - DNA, 75 bp, synthetic construct
  source 1..75: mol_type = other DNA
gagcgcggggaaagtctggtgttgcccttaaagaaaaaaatcacagaaagccagggcgatgatgaattaaagccc

SEQ ID NO: 168643 - DNA, 75 bp, synthetic construct
  source 1..75: mol_type = other DNA
acgtctcctagatcgagaaagtgtgctgcctgacttaattgacttgttcgatccatcctgcaaacaggcggctca

SEQ ID NO: 168644 - DNA, 75 bp, synthetic construct
  source 1..75: mol_type = other DNA
gtaacatgttttatgttatcaaaacgcaatttttactctagaagtactgagttttcattaaaaataattcatggt

SEQ ID NO: 168645 - DNA, 75 bp, synthetic construct
  source 1..75: mol_type = other DNA
ttgtttctggtgatgatgtcgatctcaaccgcattcccattatgacctgctggccggaagatgctgctccgttga

SEQ ID NO: 168646 - DNA, 75 bp, synthetic construct
  source 1..75: mol_type = other DNA
ccgtaagcttttatccgtaggcgcagtcgagataaaagatatgcttgatgagggcgagcttacgccttttcagca

SEQ ID NO: 168647 - DNA, 75 bp, synthetic construct
  source 1..75: mol_type = other DNA
gctggaaatcccaacggtgaaactgtggcgtgcaatcctggatactgaaacagaatcctatccgaacattgaagt

SEQ ID NO: 168648 - DNA, 75 bp, synthetic construct
  source 1..75: mol_type = other DNA
aagatcagcacggaaacaagatcagtctgaatgaacagcaaagaaaggcgtttaacaaactggtcaataatggcc

SEQ ID NO: 168649 - DNA, 75 bp, synthetic construct
  source 1..75: mol_type = other DNA
ggcatggggcaggaagatgtttcggcgctacgtgaagttggtaaattattggcgtttctgaaagagccggagccg

SEQ ID NO: 168650 - DNA, 75 bp, synthetic construct
  source 1..75: mol_type = other DNA
cagttcccggaaattgtcgatttttacctgccgccggaaggctgttcttatcgtctggcggtagtgacgatcaaa

SEQ ID NO: 168651 - DNA, 75 bp, synthetic construct
  source 1..75: mol_type = other DNA
ttcccggtatttaccgtgacgcatattacccagcgtgaagatgcgatttaccattccacctataccgggcgtccg

SEQ ID NO: 168652 - DNA, 75 bp, synthetic construct
  source 1..75: mol_type = other DNA
agcgtttctgaaagaaccggagccgccaaaaggctttcgcgatctgtttgataagctgccgcagtttaagcaggt

SEQ ID NO: 168653 - DNA, 75 bp, synthetic construct
  source 1..75: mol_type = other DNA
ataaactgccgcagtttaaacaggtgttgaacatgccaacgaaacggttacgtggtgcgccttgtcagcaaaaaa

SEQ ID NO: 168654 - DNA, 75 bp, synthetic construct
  source 1..75: mol_type = other DNA
accaaaaccgaagtagtaaagtgtatttccaatgacctcgaagtgccagccagtgccgaaatcgtcctggaaggg

SEQ ID NO: 168655 - DNA, 75 bp, synthetic construct
  source 1..75: mol_type = other DNA
atgaaaaaaattgccatcacctgtgcattactctcaagcttagtagcaagcagcgtttgggctgatgccgcaagc

SEQ ID NO: 168656 - DNA, 75 bp, synthetic construct
  source 1..75: mol_type = other DNA
aattttccgccgcatcacagcctgctgctccggtgacgaaagaggttcgcgttgcgtcacctgctatcgtcgaag

SEQ ID NO: 168657 - DNA, 75 bp, synthetic construct
  source 1..75: mol_type = other DNA
tccgacattttacggcgcatgttgaaattttccgccgcatcacagcctgttgctccggtgacgaaagaggttcgc

SEQ ID NO: 168658 - DNA, 75 bp, synthetic construct
  source 1..75: mol_type = other DNA
atgccgatgaaacgctgtttacttttgactcgttcaccggcctgcagcggatgttccttgactacagcgtcacct

SEQ ID NO: 168659 - DNA, 75 bp, synthetic construct
  source 1..75: mol_type = other DNA
aaatcccagcaaaatggcgcagtggatccagcaaaatttaccttcaccccgccgcaaggtgtcacggtagatgat

SEQ ID NO: 168660 - DNA, 75 bp, synthetic construct
  source 1..75: mol_type = other DNA
ccatcacctgtgcattactctcaagcttagtagcaagcagcgtttgggctgatgctgcaagcgatctgaaaagcc

SEQ ID NO: 168661 - DNA, 75 bp, synthetic construct
  source 1..75: mol_type = other DNA
atgaaactttgttttggtgttgttgaccagccgtatgactacggtgacgaaccgggaaaaaccacgttcgacgtg

SEQ ID NO: 168662 - DNA, 75 bp, synthetic construct
  source 1..75: mol_type = other DNA
attcgcactggaagttaagccgtgtgaagaaggctatttgctggccaacctttatggattatggatggctgctaa

SEQ ID NO: 168663 - DNA, 75 bp, synthetic construct
  source 1..75: mol_type = other DNA
aaggtgtggataagctgcgtcagaagctggatacctggtttagcgagatgcagcctgtcgaagaggcgcagagcg

SEQ ID NO: 168664 - DNA, 75 bp, synthetic construct
  source 1..75: mol_type = other DNA
aaaagcgagcggtcaatcgctttatgctgctgttgtctacactatattctcttgacgcccaggcgtttgccgagg

SEQ ID NO: 168665 - DNA, 75 bp, synthetic construct
  source 1..75: mol_type = other DNA
tactggctttgccttttttggggcaggctaaatgtaccttggggcctaatacaacagcaagccaaacgatagagc

SEQ ID NO: 168666 - DNA, 75 bp, synthetic construct
  source 1..75: mol_type = other DNA
tggtcaatcacttcaagtataaggctccgctacctggcgagcattttctggaagggaccgggaagattttccata

SEQ ID NO: 168667 - DNA, 75 bp, synthetic construct
  source 1..75: mol_type = other DNA
ctgtaaaggccgctatcacagtgagcaaaactatcgtgcgctggctgcattgtttggcgtaacagtgccggattt

SEQ ID NO: 168668 - DNA, 75 bp, synthetic construct
  source 1..75: mol_type = other DNA
tgctccggtgacgaaagaggttcgcattgcgtcgcctgctatcgtcgaagcgaagccgatcaaaacggtgaaaga

SEQ ID NO: 168669 - DNA, 75 bp, synthetic construct
  source 1..75: mol_type = other DNA
cgatgctcaccgatttcacctgcgacctgcttaatgcgccgctgttggataaacaggctgaatggtgtgaagtgt

SEQ ID NO: 168670 - DNA, 75 bp, synthetic construct
  source 1..75: mol_type = other DNA
tctacccgtacatttgtgcgacggtgtttttcctcggcagctggctgcgctacgactacgggcagtacacctggc

SEQ ID NO: 168671 - DNA, 75 bp, synthetic construct
  source 1..75: mol_type = other DNA
gcctgacgatcaggcgaaagaaggattgctcaatgttgcgccgatcctcgccctgcttggcggtcgcttaaaaca

SEQ ID NO: 168672 - DNA, 75 bp, synthetic construct
  source 1..75: mol_type = other DNA
gtctttttctacgccgtgtcgttcacgctggcgatgggacatgacgaagcggtaaaagcctatgagcagaatatt

SEQ ID NO: 168673 - DNA, 75 bp, synthetic construct
  source 1..75: mol_type = other DNA
atggaaattgcatcgaataaaggcgttattgcagacgcttcgaccccggcgggtcgtgctggaatgagcgaaagt

SEQ ID NO: 168674 - DNA, 75 bp, synthetic construct
  source 1..75: mol_type = other DNA
gagtggcgagaagcgatcaaattcgacagtactgacaccggctgggtgattatgagtatcgggatggcgattggc

SEQ ID NO: 168675 - DNA, 75 bp, synthetic construct
  source 1..75: mol_type = other DNA
agaaatcatcgatggttctaaagttagcgacggcgatgtgctgattgcactcggatccagcggcccgcactcgaa

SEQ ID NO: 168676 - DNA, 75 bp, synthetic construct
  source 1..75: mol_type = other DNA
ggtgaagattacgatgtcgctggtttctgcgttggcgtggtagaaaaatcagaaatcatcgacggctctaaagtc

SEQ ID NO: 168677 - DNA, 75 bp, synthetic construct
  source 1..75: mol_type = other DNA
gactggtactgatttgtattctggtggcgatctcctcacgcggcgagaaactgttattcaaaatttcaaccggca

SEQ ID NO: 168678 - DNA, 75 bp, synthetic construct
  source 1..75: mol_type = other DNA
gtgcagttaatggaatctgcccgtgcaagtgcccaaccgccaaccgaaccggtgattaataataatccggaaccg

SEQ ID NO: 168679 - DNA, 75 bp, synthetic construct
  source 1..75: mol_type = other DNA
gttgttgctggcacttctgatgaaatgctgactgaagcatttaagaaggttgttcgtaatggtgagatcaaactc

SEQ ID NO: 168680 - DNA, 75 bp, synthetic construct
  source 1..75: mol_type = other DNA
tatcagtgtattcaggcgttattttggggtcaccccggaaggttacaggatggctgcattcagtgagatgagttc

SEQ ID NO: 168681 - DNA, 75 bp, synthetic construct
  source 1..75: mol_type = other DNA
tctctgctgggtgcgggtgctgctgtgtatcttctcattaagggctttatgctcaaaatcaacaaaatcggctgg

SEQ ID NO: 168682 - DNA, 75 bp, synthetic construct
  source 1..75: mol_type = other DNA
cgtccggtccgtcgctttttctccattctttttctcattgttctattagtttgcattcattcactgataacaact

SEQ ID NO: 168683 - DNA, 75 bp, synthetic construct
  source 1..75: mol_type = other DNA
ggattcattcgaattaaaaaagccagcgggtaactttttatctgataatcaatgcagttcaaatattttttcatg

SEQ ID NO: 168684 - DNA, 75 bp, synthetic construct
  source 1..75: mol_type = other DNA
gtagaaccttcccactgcaactgtttggtttccattacaaatcccgtactcactcgacctacggcaatattgatc

SEQ ID NO: 168685 - DNA, 75 bp, synthetic construct
  source 1..75: mol_type = other DNA
atgatgtccaccacgttatttaaagatttcaccttcgaagccgctcaccgcttgccacacgtcccacaagggcat

SEQ ID NO: 168686 - DNA, 75 bp, synthetic construct
  source 1..75: mol_type = other DNA
atgatgtccaccacgttatttaaagatttcaccttcgaagccgctcaccgcttaccacacgtcccgcaagggcat

SEQ ID NO: 168687 - DNA, 75 bp, synthetic construct
  source 1..75: mol_type = other DNA
atcaacttgctatattaatactttatgaaactggaatgcgaggaggggagcttttaaacttaaagatatcagatt

SEQ ID NO: 168688 - DNA, 75 bp, synthetic construct
  source 1..75: mol_type = other DNA
gtggctataattttacatcttattttatcagcgtattcaggagttattttggtgttacaccggcaggttacagga

SEQ ID NO: 168689 - DNA, 75 bp, synthetic construct
  source 1..75: mol_type = other DNA
gcacgaggccaatatgtctggcgataaaatcgaccatggcggctgtgtgaatacgctaaccactctgcgcccttc

SEQ ID NO: 168690 - DNA, 75 bp, synthetic construct
  source 1..75: mol_type = other DNA
atttcttaccctcctgaatacacactgtaaatcatcagaagctgcacttgctatgctgagtacactctgctacga

SEQ ID NO: 168691 - DNA, 75 bp, synthetic construct
  source 1..75: mol_type = other DNA
gccgataagcttgaaaattgtctgatgagcttaacgctgagtatccagagccttgaaaagcacaccatgcttgcg

SEQ ID NO: 168692 - DNA, 75 bp, synthetic construct
  source 1..75: mol_type = other DNA
atgagcaccgaccttaaattttcactggtaacaacgattatcgtcctcggtttgatcgtggccgtgggtttgact

SEQ ID NO: 168693 - DNA, 75 bp, synthetic construct
  source 1..75: mol_type = other DNA
cgcattttgtgatgagtgcgcctaatattcgccacctaccttccgataccggaattgaagtggcttttgcaggcc

SEQ ID NO: 168694 - DNA, 75 bp, synthetic construct
  source 1..75: mol_type = other DNA
gcgagcggcgcacgtaaagcgcaattgaatatggtgcgtgaagcggttctggcgtttaacggtgatgtgcaagtt

SEQ ID NO: 168695 - DNA, 75 bp, synthetic construct
  source 1..75: mol_type = other DNA
ggaattgaagtggcttttgcaggccgttccaacgcaggtaaatccagcgcgctgaacacgctgactaaccagaaa

SEQ ID NO: 168696 - DNA, 75 bp, synthetic construct
  source 1..75: mol_type = other DNA
attaaggcaagttagtgattgtataagcataaaagaatgggggggaatcaacttaaaaaccaatatgatgggggt

SEQ ID NO: 168697 - DNA, 75 bp, synthetic construct
  source 1..75: mol_type = other DNA
atgaaaaatttagctcatattgctctggtgacggtgatacagttcattgcctgttatctggctgattgggggaat

SEQ ID NO: 168698 - DNA, 75 bp, synthetic construct
  source 1..75: mol_type = other DNA
aatctaacgatattgcacaaatgggagaatatattaaaaacctagctcaacaaggaagtaagaaagatggcaaaa

SEQ ID NO: 168699 - DNA, 75 bp, synthetic construct
  source 1..75: mol_type = other DNA
ctatgtttattacgtggtcgcttcctgaatttaacgacattgggaatattctttttgcagcccgcgctttattgg

SEQ ID NO: 168700 - DNA, 75 bp, synthetic construct
  source 1..75: mol_type = other DNA
tggcgggtatttacgagatggccgcaccacatggcatcatctgtaacgaggtttccaagttccttgcggccaacc

SEQ ID NO: 168701 - DNA, 75 bp, synthetic construct
  source 1..75: mol_type = other DNA
gccgaaacagtttttatgctgttcttcatagtactatggcagggactgtttatatggttgttctctcaaatacga

SEQ ID NO: 168702 - DNA, 75 bp, synthetic construct
  source 1..75: mol_type = other DNA
aagcgaatgtttcatcggcagatctgcgtcgcgcggcgtggacctgctctctcggcagcgcactggaatactacg

SEQ ID NO: 168703 - DNA, 75 bp, synthetic construct
  source 1..75: mol_type = other DNA
aaacgcaaatcgctggtgaaagtctgcatcttaaccttcaacagcggttgacgcgatttgccgcagaaaatgcgc

SEQ ID NO: 168704 - DNA, 75 bp, synthetic construct
  source 1..75: mol_type = other DNA
gcatctcaaccttcaacagcggctgacgcgatttgccgcagagaatgcgcctcagttactcaacgaattaagtga

SEQ ID NO: 168705 - DNA, 75 bp, synthetic construct
  source 1..75: mol_type = other DNA
ggcttacgtctggcagaaaacggcggctcgtcgatttatcaggctttagcgatcagttatatcgttggtgtggtt

SEQ ID NO: 168706 - DNA, 75 bp, synthetic construct
  source 1..75: mol_type = other DNA
gctcctgacggcaaacggggttattacgccgcgctgccgttcctcggaatccagattggtacgtttatggcatct

SEQ ID NO: 168707 - DNA, 75 bp, synthetic construct
  source 1..75: mol_type = other DNA
agggatctgggcaccgatcatgcttatcgcattacgcctgttacaagggcttggcgcgggtgcggaacaggctgg

SEQ ID NO: 168708 - DNA, 75 bp, synthetic construct
  source 1..75: mol_type = other DNA
gcatctcaccttgcttccggggcgctttgacgcctacaaagaagcctcaaatcatatccgcgaaatcttctcgcg

SEQ ID NO: 168709 - DNA, 75 bp, synthetic construct
  source 1..75: mol_type = other DNA
ggtgtgcgactggtggggctgcatgtgacgttgcttgacccgcaaatggaaagacaactggtgctgggattatga

SEQ ID NO: 168710 - DNA, 75 bp, synthetic construct
  source 1..75: mol_type = other DNA
cgtcggcgtggaacgcacgatggcggaagatattcatcactggtctgaatgtgaagcgattattgagcggctgta

SEQ ID NO: 168711 - DNA, 75 bp, synthetic construct
  source 1..75: mol_type = other DNA
atgaagaaactgtttgcctcccttgccctcgccgccgctgttgccccggtgtgggccgctacccagaccgtcacg

SEQ ID NO: 168712 - DNA, 75 bp, synthetic construct
  source 1..75: mol_type = other DNA
agatttgtttgaccttataaaagacaacaatggaatggttagagtttttgatgagaatggcaaatttttatcata

SEQ ID NO: 168713 - DNA, 75 bp, synthetic construct
  source 1..75: mol_type = other DNA
aataaggggtttagcacgtatgaagaacttctgtgattatgctccccgtctgcaagatatacgatggacaatcgt

SEQ ID NO: 168714 - DNA, 75 bp, synthetic construct
  source 1..75: mol_type = other DNA
cacagaagccaccgtagggctattcgctggcctggatctcgatctgtggggagtgcatcgctcatcggttgctgc

SEQ ID NO: 168715 - DNA, 75 bp, synthetic construct
  source 1..75: mol_type = other DNA
ggtatgttcaggcgtcattagatcaggtggattccgcgcgggcgttgttctacccgagctttgatatcaaagcgt

SEQ ID NO: 168716 - DNA, 75 bp, synthetic construct
  source 1..75: mol_type = other DNA
ttccacggcgcgcgggcacagattctggcggtcgataaacaaattgctgccgtcaaagggcaaatcaccgaaacg

SEQ ID NO: 168717 - DNA, 75 bp, synthetic construct
  source 1..75: mol_type = other DNA
gagatttgcgcatgggcgatctctatgtcacaggcgtttgcaaaaaggtgaaagacaaagaaaaggactacacca

SEQ ID NO: 168718 - DNA, 75 bp, synthetic construct
  source 1..75: mol_type = other DNA
tcgagatgaaccctaagcgctctgctgaagtaaatgtactgatgacgcgcatggcggccgaaatggggctgggag

SEQ ID NO: 168719 - DNA, 75 bp, synthetic construct
  source 1..75: mol_type = other DNA
ccaataattttcggaaaatcccggaagcgtcaaccagctctccggtaactccggctcttctgcctggtggtttca

SEQ ID NO: 168720 - DNA, 75 bp, synthetic construct
  source 1..75: mol_type = other DNA
gccagttagaaagcgtaagcagttttattgcctatcggcaaaagcaaatgcataccctgaaagagattattgcca

SEQ ID NO: 168721 - DNA, 75 bp, synthetic construct
  source 1..75: mol_type = other DNA
gcaggaggagaagagtgggaacgccgactgtaccgccacttctggtaaaactgacaatccacaagcatccggaaa

SEQ ID NO: 168722 - DNA, 75 bp, synthetic construct
  source 1..75: mol_type = other DNA
ccggtgtggtggtctttcagccacggtaatgttcctgtcactattgtctctctttctctggccttagggattgga

SEQ ID NO: 168723 - DNA, 75 bp, synthetic construct
  source 1..75: mol_type = other DNA
tgctggatagccgccgcgtgatccaaagtattcagttgatgaaatcgctgggcggcgggtatcaggcggctccca

SEQ ID NO: 168724 - DNA, 75 bp, synthetic construct
  source 1..75: mol_type = other DNA
agcccttatgcgatggatgcgccagcactgggtatggacgggccgtactatacggaagccacagtaggtttgttt

SEQ ID NO: 168725 - DNA, 75 bp, synthetic construct
  source 1..75: mol_type = other DNA
tattgcctatcggcaaaagcaaatgcataccctgaaagagataattgccaaaccgcgactaaccggcagggaatt

SEQ ID NO: 168726 - DNA, 75 bp, synthetic construct
  source 1..75: mol_type = other DNA
tcgtcgatatcgatcttgatgacgtgatgttgcacagcgaagttaacctgctgattgatttcctcgttaaccaga

SEQ ID NO: 168727 - DNA, 75 bp, synthetic construct
  source 1..75: mol_type = other DNA
taccgtagaatacggtgaatacctgaccggcgtgcgaattgaagggctcacctattcactattctcatttacccg

SEQ ID NO: 168728 - DNA, 75 bp, synthetic construct
  source 1..75: mol_type = other DNA
tcgcgaggatcggtaaaaagaataccttcctgattggcgctttgctgggaacctgcggttatctgctgttcttct

SEQ ID NO: 168729 - DNA, 75 bp, synthetic construct
  source 1..75: mol_type = other DNA
gtaatgcccagaccacgggcgatctggcaggggccaactatatcgcgggtgccggggcgtatacctataacgagc

SEQ ID NO: 168730 - DNA, 75 bp, synthetic construct
  source 1..75: mol_type = other DNA
ctggaacggtggctgggataacggcgtgaccaccagcaactgggtgcagtacgaacacacccgtaactcgcgtat

SEQ ID NO: 168731 - DNA, 75 bp, synthetic construct
  source 1..75: mol_type = other DNA
atgcccgacagttgcaattcgtggcaaaaatgcaagaataaaacaatgaacaagaagattcattccctggccttg

SEQ ID NO: 168732 - DNA, 75 bp, synthetic construct
  source 1..75: mol_type = other DNA
attggtgtcttcttcctgccagacagcccacgttggtttgccgccaaacgccgttttgttgatgccgaacgcgtg

SEQ ID NO: 168733 - DNA, 75 bp, synthetic construct
  source 1..75: mol_type = other DNA
accatgctcaacacgctgggtaacgccaacaccttctgggtgtatgcggctctgaacgtactgtttatcctgctg

SEQ ID NO: 168734 - DNA, 75 bp, synthetic construct
  source 1..75: mol_type = other DNA
accatcggcatcctcggtgcttatctttctgataccgccttcagctacaccggcgcatggcgctggatgctgggt

SEQ ID NO: 168735 - DNA, 75 bp, synthetic construct
  source 1..75: mol_type = other DNA
caaacacatgatcgaagaagcggcagcaatgactaaccagtccatttcgcagttcatggtcagtaccgcctcagc

SEQ ID NO: 168736 - DNA, 75 bp, synthetic construct
  source 1..75: mol_type = other DNA
cctagcgattattcctgcctggttcgtcagcttacgccatgagattgttacattcctttttatcctggagatggt

SEQ ID NO: 168737 - DNA, 75 bp, synthetic construct
  source 1..75: mol_type = other DNA
cggtgcggtgggcagcggctggctctcctttaaactcgggcgcaaaaagagcctgatgatcggcgcaatcctgtt

SEQ ID NO: 168738 - DNA, 75 bp, synthetic construct
  source 1..75: mol_type = other DNA
gcgcactggagcaccgtgtatctcgacggttcgctgccggattcgcaaatctattatctggtggatgcgtcttat

SEQ ID NO: 168739 - DNA, 75 bp, synthetic construct
  source 1..75: mol_type = other DNA
accggaaaccaaagaagttagcccctacagcattgttggtctgagtgcgacctgggacgtgacgaaaaacgttag

SEQ ID NO: 168740 - DNA, 75 bp, synthetic construct
  source 1..75: mol_type = other DNA
acgccccagaacataaagaggaaggcgccaccaaacgcaccaacttcagcctgaccggtccgctgggcgatgaat

SEQ ID NO: 168741 - DNA, 75 bp, synthetic construct
  source 1..75: mol_type = other DNA
ggcaccagtaaagtttctcgccaaaatcgcctccgacatgaataaacccaacggtcagtttgtgattacgccggc

SEQ ID NO: 168742 - DNA, 75 bp, synthetic construct
  source 1..75: mol_type = other DNA
atgaccatttcggagttgctacaatattgcatggctaaagctggcgcggaacagagcgttcacagcgactggaaa

SEQ ID NO: 168743 - DNA, 75 bp, synthetic construct
  source 1..75: mol_type = other DNA
tgccggattcgcaaatctattatctggtggatgcgtcttatcagcaggcggtgaatttgctgccggaagaaaaac

SEQ ID NO: 168744 - DNA, 75 bp, synthetic construct
  source 1..75: mol_type = other DNA
gcagaacttgcaggcgcccggcgtttcgaccatcaccgcagatgaaatccgcaaaaacccggttgcccgcgatgt

SEQ ID NO: 168745 - DNA, 75 bp, synthetic construct
  source 1..75: mol_type = other DNA
gaccgacagcaccatcgtaacgccggggctgcgtttcgatcatcacagtattgtcggcaataactggagcccggc

SEQ ID NO: 168746 - DNA, 75 bp, synthetic construct
  source 1..75: mol_type = other DNA
atcgctggaactggaagcgggttacagccgccagggtaacctgtatgcgggcgatacccagaacaccaactctga

SEQ ID NO: 168747 - DNA, 75 bp, synthetic construct
  source 1..75: mol_type = other DNA
attctctacagtaaaggacagggatgctacgccagcgcgggcggctgctatctgcagggtaacgatgacctgaaa

SEQ ID NO: 168748 - DNA, 75 bp, synthetic construct
  source 1..75: mol_type = other DNA
tttaacgaaaaagcgacacaggatttcgtcgatatcgatcttgatgacgtgatgctgcacagtgaagttaacctg

SEQ ID NO: 168749 - DNA, 75 bp, synthetic construct
  source 1..75: mol_type = other DNA
gatattaaccagggacatcagtccgcacgtgccggaacctacgccacaaccttacctgccggacgcgaaggggtt

SEQ ID NO: 168750 - DNA, 75 bp, synthetic construct
  source 1..75: mol_type = other DNA
gacactgccggcagagcgctttccgtcacacttccgtcagtgatccccgatcacgtcatcctctggatgaattag

SEQ ID NO: 168751 - DNA, 75 bp, synthetic construct
  source 1..75: mol_type = other DNA
cattcgttatatgaacgccatcaatgattatctgcatcaacatccggaacgacggacagccggcggtcggctgac

SEQ ID NO: 168752 - DNA, 75 bp, synthetic construct
  source 1..75: mol_type = other DNA
gaatcagattaagcctcagctatctatcctgagcgcggtgatagtgaaagagacatgctccgcaggctgcattta

SEQ ID NO: 168753 - DNA, 75 bp, synthetic construct
  source 1..75: mol_type = other DNA
gtcgtgctggctgatgagcaacttaaagatattggcaatctgcaaattgtacccgacgggcgcaaatcagcgcgg

SEQ ID NO: 168754 - DNA, 75 bp, synthetic construct
  source 1..75: mol_type = other DNA
gcaacggtaaggaacatgcggacgcgttaaaagaagcctggaaggaaaaccacggggcggcgggtcgtgagtggg

SEQ ID NO: 168755 - DNA, 75 bp, synthetic construct
  source 1..75: mol_type = other DNA
atagggcaggcaggaagcccccgtgacgtgtacgtatcctcatacactttgttcaatggattcggaaaattacag

SEQ ID NO: 168756 - DNA, 75 bp, synthetic construct
  source 1..75: mol_type = other DNA
atggcaattaatggcgctgcggtgactgttccattaagcccaggtgaacgcctgaatggacttaatcatattgcg

SEQ ID NO: 168757 - DNA, 75 bp, synthetic construct
  source 1..75: mol_type = other DNA
atgcattatttggtataacttataaatatatgccagaaggttctcctttacttccttctgaaaacgatgaaaaaa

SEQ ID NO: 168758 - DNA, 75 bp, synthetic construct
  source 1..75: mol_type = other DNA
attatcgggcaagaccatgaccagatagggactattgcagctgcacttgacgattacaggagcgtaaatggtgag

SEQ ID NO: 168759 - DNA, 75 bp, synthetic construct
  source 1..75: mol_type = other DNA
atgttatctctcgtttatgaaaatccgtggacgacgatttttctgatgattgtcgccagcatgtgcctcaacagt

SEQ ID NO: 168760 - DNA, 75 bp, synthetic construct
  source 1..75: mol_type = other DNA
cgtggacgacgatttttctgatgattgttgccagcatgtgcctcaacagtgttattggcgcattgcgcggccatt

SEQ ID NO: 168761 - DNA, 75 bp, synthetic construct
  source 1..75: mol_type = other DNA
cctgaatggacttaatcatattgcggagttaagggcgaaagtatttggccttaatattgagtcagagcttgagcg

SEQ ID NO: 168762 - DNA, 75 bp, synthetic construct
  source 1..75: mol_type = other DNA
gcgtggagccatgcgaaagagtggcaggaatgggcaggtaagcatattgccgccgacaatgtgccgcctgtcgtt

SEQ ID NO: 168763 - DNA, 75 bp, synthetic construct
  source 1..75: mol_type = other DNA
atattcagggccggacatcttgcaccagtaatgatcaaggcgattggtcaaaagctggcggcggctggtgtacag

SEQ ID NO: 168764 - DNA, 75 bp, synthetic construct
  source 1..75: mol_type = other DNA
cgcggggaaagtctggtgttgcccttaaagaaaaaaatcacagaaagccagggcgatgatgaattaaagccccgc

SEQ ID NO: 168765 - DNA, 75 bp, synthetic construct
  source 1..75: mol_type = other DNA
cagttaagcggaaaccatgaggaatggcagttaagcacaacaacggggtggcattttggcgcgtacatcatgccg

SEQ ID NO: 168766 - DNA, 75 bp, synthetic construct
  source 1..75: mol_type = other DNA
cttggaccggaacaactggcgagtctggcagatacgcaaatcatcgacaaagggcgctattacgtgcgcgtttat

SEQ ID NO: 168767 - DNA, 75 bp, synthetic construct
  source 1..75: mol_type = other DNA
ttaccggttatcaaattattgatgatagccgtcagtgtgtgcgtgtttaccgcgcagggcacatcactgaacgta

SEQ ID NO: 168768 - DNA, 75 bp, synthetic construct
  source 1..75: mol_type = other DNA
aaatcaggacaccacgactaaaacacctgaaaggggcgcggctaagagtgtatggccttttgctgacgcaggacc

SEQ ID NO: 168769 - DNA, 75 bp, synthetic construct
  source 1..75: mol_type = other DNA
ggtggcaatcagcaccggagaaatggacgttgagacattcctcaaaagtgaggggataaaagttaaggcggggca

SEQ ID NO: 168770 - DNA, 75 bp, synthetic construct
  source 1..75: mol_type = other DNA
ccaacgaggcagaggcacacaacgacgggctgttacccctggatgaaataggccaggccggaaacgcgcgggagg

SEQ ID NO: 168771 - DNA, 75 bp, synthetic construct
  source 1..75: mol_type = other DNA
ggccaggccggaaacgcgcgggaggtgtccacgtcagcctatacgttgtttaacggttccgggaaattacagggg

SEQ ID NO: 168772 - DNA, 75 bp, synthetic construct
  source 1..75: mol_type = other DNA
gaaacgggtaacgatcgccgctacaagaaaaaggcgctgggcaagattggaggtaagcagcatgtattttacgtg

SEQ ID NO: 168773 - DNA, 75 bp, synthetic construct
  source 1..75: mol_type = other DNA
atcatgccggacggttcgatcattggtgattctgaaaaaccgatcctgtttaccggaaaaagcgccgcgattaac

SEQ ID NO: 168774 - DNA, 75 bp, synthetic construct
  source 1..75: mol_type = other DNA
agactattttaagaaatgctcagggggttattcgagtttgtttgttgatcagtttggtcgcgcatctatttgtgc

SEQ ID NO: 168775 - DNA, 75 bp, synthetic construct
  source 1..75: mol_type = other DNA
ggtggcttggtgatgatatcagcatccctgaatgcgatgtaacccactggatgcctctaccagaaccgccgcagg

SEQ ID NO: 168776 - DNA, 75 bp, synthetic construct
  source 1..75: mol_type = other DNA
tccgtctttaaataatggcatagtcggctttgatgaaggctggaacgcttgccgcgccgccatgattcatgccgg

SEQ ID NO: 168777 - DNA, 75 bp, synthetic construct
  source 1..75: mol_type = other DNA
aattaatgcaatatctacaaagattaaaacaaatgatcttaatattgtatattttgagggtggatgtgattggtc

SEQ ID NO: 168778 - DNA, 75 bp, synthetic construct
  source 1..75: mol_type = other DNA
cgatactgatgacgactatcggtctggtcagtatcatagaaaacccctatattgctgttttattaatcagtattg

SEQ ID NO: 168779 - DNA, 75 bp, synthetic construct
  source 1..75: mol_type = other DNA
tattgcggtctgctgtgagaatccggggatgcgtgtcatctgtgttgatgacgcagagagcgacttctggctctc

SEQ ID NO: 168780 - DNA, 75 bp, synthetic construct
  source 1..75: mol_type = other DNA
acttctccctgggagagtcggctctaaaagcagaaaacgcggtgaaaatcgcgagagacgctggctacaccgctg

SEQ ID NO: 168781 - DNA, 75 bp, synthetic construct
  source 1..75: mol_type = other DNA
tcaaccctgagcgtctcgacttgccggatgctgatttagacttcagtcaggcacgtcgtcatgaggtgatcgagt

SEQ ID NO: 168782 - DNA, 75 bp, synthetic construct
  source 1..75: mol_type = other DNA
taaatcacactccgttgcttattctttaatcagttatcagtctatgtggctaaagacgcactaccctgctgagtt

SEQ ID NO: 168783 - DNA, 75 bp, synthetic construct
  source 1..75: mol_type = other DNA
ttggcctcttgggtatagtgattatgctgaaggctggaacgactgctgtgcagccatgcttcaggctggaaactt

SEQ ID NO: 168784 - DNA, 75 bp, synthetic construct
  source 1..75: mol_type = other DNA
gcacgtcgtcatgaggtgatcgagtatctgaatgaacgctatggcgaagattacgttgccggtattccaaacttc

SEQ ID NO: 168785 - DNA, 75 bp, synthetic construct
  source 1..75: mol_type = other DNA
gggccagggcgtggttcgtcagcgggttctctggtagcgtggtgcataggcataaccaacgtcgatcctatccgt

SEQ ID NO: 168786 - DNA, 75 bp, synthetic construct
  source 1..75: mol_type = other DNA
aaattaatacacccgcccgacttgccgcctttattgctcaaaccggccatgagagcgcgggtttcagtcggctca

SEQ ID NO: 168787 - DNA, 75 bp, synthetic construct
  source 1..75: mol_type = other DNA
ttgttcaggaccgttccggcagccacggaatgacgctgaactcgctggtttctggcggatgcataatttcaggtt

SEQ ID NO: 168788 - DNA, 75 bp, synthetic construct
  source 1..75: mol_type = other DNA
cgaaacgcgccgaagattacctgcgctctactggcattgccgacaccgtactgttcgggccagaaccagaatttt

SEQ ID NO: 168789 - DNA, 75 bp, synthetic construct
  source 1..75: mol_type = other DNA
cctgaatggacttaatcatattgcggagttaagggcgaaagtttttggtttgaatattgagtcagagcttgagcg

SEQ ID NO: 168790 - DNA, 75 bp, synthetic construct
  source 1..75: mol_type = other DNA
gtagagtagacagtcagaatcgtaagttattccctccattacatgaagctcttttgaaactaagtaaaaagaaaa

SEQ ID NO: 168791 - DNA, 75 bp, synthetic construct
  source 1..75: mol_type = other DNA
gagcattggccagatgttcctcgctacggtgatatccagtcacttgatgcaaaggatataccagatgcctcagtt

SEQ ID NO: 168792 - DNA, 75 bp, synthetic construct
  source 1..75: mol_type = other DNA
aaaggtaaagaacagcacgtcactatccctgctcatcaggtgaatgctgaattcttcgaagaaggcaaaatgttt

SEQ ID NO: 168793 - DNA, 75 bp, synthetic construct
  source 1..75: mol_type = other DNA
cgggatatcaataacgaacaaaataaacgggcactggcagccatattctttatggcaaaaattccggctgaacgt

SEQ ID NO: 168794 - DNA, 75 bp, synthetic construct
  source 1..75: mol_type = other DNA
ggcatatgattgccctcgtatgctttatcactgtaatcaattatctggacagaacggcattaggtattgcggctc

SEQ ID NO: 168795 - DNA, 75 bp, synthetic construct
  source 1..75: mol_type = other DNA
tgttgatttgcgcttcaccgacaccaaaggtaaagaacagcacgtcactatccctgctcatcaggtgaatgctga

SEQ ID NO: 168796 - DNA, 75 bp, synthetic construct
  source 1..75: mol_type = other DNA
ggtgtaatcaaacacgcgaaagcgattaacgcgctggcaaacccgaccaccaactcttacaagcgactggttccg

SEQ ID NO: 168797 - DNA, 75 bp, synthetic construct
  source 1..75: mol_type = other DNA
cgaagcgcgctgaagattacctgcgctctactggcattgccgacaccgttctgttcggaccagaaccagaatttt

SEQ ID NO: 168798 - DNA, 75 bp, synthetic construct
  source 1..75: mol_type = other DNA
tttgacgccctgctgcatctggcgggaagtacactctcaagtgacagtgtcacaaaacagatacgcagcgaggag

SEQ ID NO: 168799 - DNA, 75 bp, synthetic construct
  source 1..75: mol_type = other DNA
atggcgggcaccagtgcggtcaccgccagcattaacagcagcagtcagagcggggatgtcacatttatcgccgat

SEQ ID NO: 168800 - DNA, 75 bp, synthetic construct
  source 1..75: mol_type = other DNA
tgtcgctgtcgcgtaaaccggaggtgacgtggtacggatgggacggcgaccggctgacgacggtacagaccgaca

SEQ ID NO: 168801 - DNA, 75 bp, synthetic construct
  source 1..75: mol_type = other DNA
taattgacactttgaataagggaattggtcagccagttgtaatcacttccactggtggtaacaaaggtggtggga

SEQ ID NO: 168802 - DNA, 75 bp, synthetic construct
  source 1..75: mol_type = other DNA
ctcgcgataatgcattaatcaatagagttccttctgatttctttgatttaattatcattgatgaggctcatcatg

SEQ ID NO: 168803 - DNA, 75 bp, synthetic construct
  source 1..75: mol_type = other DNA
gcaccatgaaccagagacgggaggactacgcagacaatatttatgccatctaccggaaactgaaccgggagcgcc

SEQ ID NO: 168804 - DNA, 75 bp, synthetic construct
  source 1..75: mol_type = other DNA
acagggaacaccaaagacattctttcaaagacaaatataaaaacagatctaacccctatagtccccgctggggac

SEQ ID NO: 168805 - DNA, 75 bp, synthetic construct
  source 1..75: mol_type = other DNA
aaagaacagtttacactatggcagtacaattcatataagtatggacttaagccacatcagctaaatgaacctttg

SEQ ID NO: 168806 - DNA, 75 bp, synthetic construct
  source 1..75: mol_type = other DNA
aaattgatacgattaaaaaaataattatcaaatggaatggtaaattgacgtgggatttactctgcgaaaagattg

SEQ ID NO: 168807 - DNA, 75 bp, synthetic construct
  source 1..75: mol_type = other DNA
atggttgttttcggttccgacaacggttgccggatgcggcgtgaacgccttatccggcctacggttctgtgctcg

SEQ ID NO: 168808 - DNA, 75 bp, synthetic construct
  source 1..75: mol_type = other DNA
attttattttggtcagaccccgaatttacattaatgacaacatctcgctggggccgggtaaaattgatctattgc

SEQ ID NO: 168809 - DNA, 75 bp, synthetic construct
  source 1..75: mol_type = other DNA
tgactcccagcttcagtgctggatggatgtctgtgagcgctggcgtaatggtaatcccgatcatgaagctcttgc

SEQ ID NO: 168810 - DNA, 75 bp, synthetic construct
  source 1..75: mol_type = other DNA
aaagaacagtttacactatggcagtacaattcatataaatatggacttaagccacaccagctaaatgaaccatta

SEQ ID NO: 168811 - DNA, 75 bp, synthetic construct
  source 1..75: mol_type = other DNA
aaaacatcccctgtcggtgagcgtaatttaaaagaggaaattaaacgcgtcgaaaaacgcatcattatggaagtg

SEQ ID NO: 168812 - DNA, 75 bp, synthetic construct
  source 1..75: mol_type = other DNA
gcattctgcaggaacgggaatttgaacggattggcggccatcagaccataaaagttgatatccgcatcattgctg

SEQ ID NO: 168813 - DNA, 75 bp, synthetic construct
  source 1..75: mol_type = other DNA
taaagtgttccttgaaaaatacactaccgggtatcgaaaaatatacgggcaatgcaccgaagttaacggcgtttg

SEQ ID NO: 168814 - DNA, 75 bp, synthetic construct
  source 1..75: mol_type = other DNA
ctaacctgcaacttgccgttaaaggtgaatacttcgatgccatgattcgcggagagaagacggaagagtatcgcc

SEQ ID NO: 168815 - DNA, 75 bp, synthetic construct
  source 1..75: mol_type = other DNA
tcgtagtatcgcttttcacatcgatgaagacgattaccacggcaaacatattgcgtatttcatgcgacaagcatt

SEQ ID NO: 168816 - DNA, 75 bp, synthetic construct
  source 1..75: mol_type = other DNA
tggtagtcatgcgcccggaccgcttcgtggccgccatcgccattccgcaaaccctgggcagcaccctgaataaac

SEQ ID NO: 168817 - DNA, 75 bp, synthetic construct
  source 1..75: mol_type = other DNA
ctcggtgccgcaaagcgatgcgcatctggtgctggcgcagactacgggcggtttgtcctgcttttttgtgccgcg

SEQ ID NO: 168818 - DNA, 75 bp, synthetic construct
  source 1..75: mol_type = other DNA
taaaagcactatcattaaaataattgaagaaatatcgtcgttgacagttgctgacaaccctattgactttaaatt

SEQ ID NO: 168819 - DNA, 75 bp, synthetic construct
  source 1..75: mol_type = other DNA
tataccttacgatatgataaacatatccaaagtaattgattttttgtttttgatggaattagttatgctattaac

SEQ ID NO: 168820 - DNA, 75 bp, synthetic construct
  source 1..75: mol_type = other DNA
acgttggggagcgatgaacgtagaagtgaaggacggcaagattgtttcttcaacaggcgcgctggcgaaaaccat

SEQ ID NO: 168821 - DNA, 75 bp, synthetic construct
  source 1..75: mol_type = other DNA
gattgtgccctgggtagccatgccatgatgcgccgcgcgttttcgctggcggtttatcatactcatcaacgtcat

SEQ ID NO: 168822 - DNA, 75 bp, synthetic construct
  source 1..75: mol_type = other DNA
ctcggtgccgcaaagtgatgcacatctggtgctggcgcagaccacgggcggcttgtcctgtttttttgtgccgcg

SEQ ID NO: 168823 - DNA, 75 bp, synthetic construct
  source 1..75: mol_type = other DNA
tggtcagacagcctatgcaagcatgaaaaagataacgtcttcctttcagtccttgctggatgaattacaaaatcc

SEQ ID NO: 168824 - DNA, 75 bp, synthetic construct
  source 1..75: mol_type = other DNA
aaaaacgtccgcaaacttattcggctgggccacacacaatggcttcaaccgcaattaattgaacaatcactataa

SEQ ID NO: 168825 - DNA, 75 bp, synthetic construct
  source 1..75: mol_type = other DNA
acgtcattaaaggcagcctgaccagcaaaggctatttaatcgttacggtgcaggaagatgattttaaggtagcgc

SEQ ID NO: 168826 - DNA, 75 bp, synthetic construct
  source 1..75: mol_type = other DNA
cattgccgggctgatgagcaccgacacggcgcagtcgctggcggagcaaattgacgccttgaaagccgccgcccg

SEQ ID NO: 168827 - DNA, 75 bp, synthetic construct
  source 1..75: mol_type = other DNA
tactggcacccggcaagcaggccgatatcgtcctgttgagcgatgcgcgtaaggtcacggtgcagcaggtactgg

SEQ ID NO: 168828 - DNA, 75 bp, synthetic construct
  source 1..75: mol_type = other DNA
cataatattgtggtgatcggtcgtagtgccgaagagatggcgctggcggtcaatcaggtgattcaggatggcggc

SEQ ID NO: 168829 - DNA, 75 bp, synthetic construct
  source 1..75: mol_type = other DNA
attcgtgcaacagactcattgcatgatgagattgattctatttatgaatacattgattcaccttatcattatgga

SEQ ID NO: 168830 - DNA, 75 bp, synthetic construct
  source 1..75: mol_type = other DNA
actcgcgccacggatgctatttcccatgacatggataagttggtttcctatattttttcagagcatcattttggt

SEQ ID NO: 168831 - DNA, 75 bp, synthetic construct
  source 1..75: mol_type = other DNA
cttttaacatgtgctagttctttggctttctcaagtgatgagaaatgccaagatgcagccttaaggattgcacag

SEQ ID NO: 168832 - DNA, 75 bp, synthetic construct
  source 1..75: mol_type = other DNA
atgacaaacatcgaacgattagaacgctgtgctgatattatgcggcgcagatggatttatgaccctgaagcgggt

SEQ ID NO: 168833 - DNA, 75 bp, synthetic construct
  source 1..75: mol_type = other DNA
caagaatattcgactgatgacgaaagaaatgcatcgtcgtattcataaaaacgtacgcaagatagctcagctggg

SEQ ID NO: 168834 - DNA, 75 bp, synthetic construct
  source 1..75: mol_type = other DNA
atgcggcgtgaacgccttatccgacctacgtccgacaaacaaattttgtgcgaattaccgctaaaatcgcatttt

SEQ ID NO: 168835 - DNA, 75 bp, synthetic construct
  source 1..75: mol_type = other DNA
gcccacagcgcctacaaaaacactgcctgctgggctttgatctcaaccaatctagcggaagttcgcccatgactt

SEQ ID NO: 168836 - DNA, 75 bp, synthetic construct
  source 1..75: mol_type = other DNA
tgttcggacttgatcccattttaccggaaacagatgctgagtttcctcttaacagagtggagatagcgaacaaaa

SEQ ID NO: 168837 - DNA, 75 bp, synthetic construct
  source 1..75: mol_type = other DNA
atgtcgagccttataaagtgccgtggatcgctgatggtaaacgggatattggcggctgggcaaatatcactacgc

SEQ ID NO: 168838 - DNA, 75 bp, synthetic construct
  source 1..75: mol_type = other DNA
gataaaggctttattactcacatgccaaaaagtaaggaggatgcagtcagcatcgtcacgcagatagaggcgaaa

SEQ ID NO: 168839 - DNA, 75 bp, synthetic construct
  source 1..75: mol_type = other DNA
gacaaaggcgtagtgtcttactttcctaaaactaaggaggctgcactccagatcgtaaatcaaattgaatcacga

SEQ ID NO: 168840 - DNA, 75 bp, synthetic construct
  source 1..75: mol_type = other DNA
tgttgatgatacttaatgaagactataaaccgaaggataagggcggacgccacctaaatctcaatgaggaacgct

SEQ ID NO: 168841 - DNA, 75 bp, synthetic construct
  source 1..75: mol_type = other DNA
ttgctcgctgcgcagaacaggcaaagcagaatcagtatttgcaagtcagctcttgcgtacccgcactggaaggct

SEQ ID NO: 168842 - DNA, 75 bp, synthetic construct
  source 1..75: mol_type = other DNA
cacatcgatgccttaattcgccgcctgatcgaacaacacaatgtgccgctgcatgtggcatatcgcgtcgccagc

SEQ ID NO: 168843 - DNA, 75 bp, synthetic construct
  source 1..75: mol_type = other DNA
aggtcgccgaaaattacaactcggcatgtcgttaatgatccgcgaaggctccgctgcccgtaatctcaacgcgct

SEQ ID NO: 168844 - DNA, 75 bp, synthetic construct
  source 1..75: mol_type = other DNA
tgtgtgctttattgccgtacttgagcgttacgggcaacggctggctccggcttgtggtttgcttggcggctttgg

SEQ ID NO: 168845 - DNA, 75 bp, synthetic construct
  source 1..75: mol_type = other DNA
ttgatcaacgaatttaacagcccgcaatgcatgctctgtaccgatgaccgtaacccgtgggagatcgcccatgaa

SEQ ID NO: 168846 - DNA, 75 bp, synthetic construct
  source 1..75: mol_type = other DNA
agtttccgccagcgactttgcgctgcaatttactcccggaaaacgctatcgtgtcattgacgttattcataacga

SEQ ID NO: 168847 - DNA, 75 bp, synthetic construct
  source 1..75: mol_type = other DNA
ggcgcaggaagtggtgaacttaataacgcaagccggtggcaaagcattcgtgctccaggcggatatcagcgacga

SEQ ID NO: 168848 - DNA, 75 bp, synthetic construct
  source 1..75: mol_type = other DNA
aaatagaacaacgacaacatatccagaatggtatggagctgttaataaaggtcttgcagcaatcagcaaggctct

SEQ ID NO: 168849 - DNA, 75 bp, synthetic construct
  source 1..75: mol_type = other DNA
cctggcaatgatggactgaggaatgctggcgccaatgcccgttatatcgctgctatcccaccaaaagttgcgttg

SEQ ID NO: 168850 - DNA, 75 bp, synthetic construct
  source 1..75: mol_type = other DNA
tctggcgattgccacctttggcgataacgaattgctcgacttcttacaatgtcctgtgctggccgtggctcagcg

SEQ ID NO: 168851 - DNA, 75 bp, synthetic construct
  source 1..75: mol_type = other DNA
gcaccagagccggattatgtctgggctgcctccatttgtgcggtctgtgcgccctccctgtcaacggatccggcc

SEQ ID NO: 168852 - DNA, 75 bp, synthetic construct
  source 1..75: mol_type = other DNA
ctgccgtgaccgcgccgctggagcagatagaccatacggtcatcgacctgatcgtggtcgatgaccgcgaccggc

SEQ ID NO: 168853 - DNA, 75 bp, synthetic construct
  source 1..75: mol_type = other DNA
gtcgtaatcaaattactgttcgcgatcttgaaagcaaacgtgaagtgtcaggagacgctgccttcagtaaccagc

SEQ ID NO: 168854 - DNA, 75 bp, synthetic construct
  source 1..75: mol_type = other DNA
tggtctgacttcgccgttgatgttgtccggcacattgatgttgctgactgcattgttggttactgcaaaggtgaa

SEQ ID NO: 168855 - DNA, 75 bp, synthetic construct
  source 1..75: mol_type = other DNA
ttccgcttattacaacgtccgggagtgatggccgggatgatcgccatctttatgtcctttgccggacagtttgct

SEQ ID NO: 168856 - DNA, 75 bp, synthetic construct
  source 1..75: mol_type = other DNA
ggctgaaacacgcaatggccgtaactcttgagcatgtgtcggtcacggatgcagggcaggccggagttgctgcaa

SEQ ID NO: 168857 - DNA, 75 bp, synthetic construct
  source 1..75: mol_type = other DNA
atgagtgaatacgataccggcaatcctgtgccgtctgcatcaatacctgatgcatgggataatatgcagtctatt

SEQ ID NO: 168858 - DNA, 75 bp, synthetic construct
  source 1..75: mol_type = other DNA
atggcctgtccggtgaatatgcggagaaatcccttgaagaatgggcggaacagattcgcaaaggagctgacaagt

SEQ ID NO: 168859 - DNA, 75 bp, synthetic construct
  source 1..75: mol_type = other DNA
gcaaggtgcaacgtgcgcgacccaagaagcggatggtgaaatcctctactgggacgccccggttcaggtagtaga

SEQ ID NO: 168860 - DNA, 75 bp, synthetic construct
  source 1..75: mol_type = other DNA
gaccgatggtttgctctgcatctatattggtggacgacgctatgcgctgcccgtaaaagccggacaaaaaggaaa

SEQ ID NO: 168861 - DNA, 75 bp, synthetic construct
  source 1..75: mol_type = other DNA
ccttcacggcctcctctggtgcaggaagtggtgataatggcgcaggtctgaaagggtctctggggatcaccgccc

SEQ ID NO: 168862 - DNA, 75 bp, synthetic construct
  source 1..75: mol_type = other DNA
gagaaagagccattttaaatacatcacaatcagaaacatgcaaacataaaatcgatgagatttatgaaaaaagat

SEQ ID NO: 168863 - DNA, 75 bp, synthetic construct
  source 1..75: mol_type = other DNA
tgatataccattggccttagctatattaggtgactcatggtataaagcttataaacatggttcttctgataaccc

SEQ ID NO: 168864 - DNA, 75 bp, synthetic construct
  source 1..75: mol_type = other DNA
tcgaaaacaaagcctttatggtggaaccgttccgggatccgacagctaacgaatgtaatgtcgtgatagcaaacg

SEQ ID NO: 168865 - DNA, 75 bp, synthetic construct
  source 1..75: mol_type = other DNA
tcacacaacgttttccgcgccataaactggctgatgacgggacgcccgttcgtgccggtcagaatatcgtgacgc

SEQ ID NO: 168866 - DNA, 75 bp, synthetic construct
  source 1..75: mol_type = other DNA
ctcgatcgtgaacatttcaccagcgtggttggtgccgatcaggatgatgccgaaatgctggcggaagagttacgt

SEQ ID NO: 168867 - DNA, 75 bp, synthetic construct
  source 1..75: mol_type = other DNA
tatacccgcatcgctaattatcttgaacgtcaggcgcggcaacggggttatcaactgctgattgcttgctcagaa

SEQ ID NO: 168868 - DNA, 75 bp, synthetic construct
  source 1..75: mol_type = other DNA
agtgtgtgctgctgtttggtcaggcgagaatgaaagagaatgccgtggacggtaccggtgttctggatgttccgg

SEQ ID NO: 168869 - DNA, 75 bp, synthetic construct
  source 1..75: mol_type = other DNA
cagcgactggcgatatctgtcgcagcaggtgctacaggggcggcgctggctgacctgctggttgcccgaatcaaa

SEQ ID NO: 168870 - DNA, 75 bp, synthetic construct
  source 1..75: mol_type = other DNA
cacgctgagttatctgcgttattcgctgcgaacccgcatcacgcagaaattcccgaactacaaactggcaagtga

SEQ ID NO: 168871 - DNA, 75 bp, synthetic construct
  source 1..75: mol_type = other DNA
gggtagccaacctgtaagccaaacttacaacttgccagaattaatcgaaggcatggaagtttccattgatgtaag

SEQ ID NO: 168872 - DNA, 75 bp, synthetic construct
  source 1..75: mol_type = other DNA
cagggttcaggaatacgttaagctggaacgattgcagaacgcactgtctggcaactctccggtaactccggatgg

SEQ ID NO: 168873 - DNA, 75 bp, synthetic construct
  source 1..75: mol_type = other DNA
tgattaaagaaatcaaagaacgcataggcagcctggacgttcgagacaatattgagcgccgggcttatgaaattg

SEQ ID NO: 168874 - DNA, 75 bp, synthetic construct
  source 1..75: mol_type = other DNA
tgcactatgcggatgccattcgttataatgctcgaatgcctctgcaaggttctttgctgccgttaacccgtctgg

SEQ ID NO: 168875 - DNA, 75 bp, synthetic construct
  source 1..75: mol_type = other DNA
gaacctgtaagccaaacttacaacttgccagaattaatcgaaggcatggaagtttccattgatgtaagcacttgt

SEQ ID NO: 168876 - DNA, 75 bp, synthetic construct
  source 1..75: mol_type = other DNA
ttactgacgatggggaagaaccggcatcgaaagtaacccactggataccgctaccggagccgccgcaggaggtga

SEQ ID NO: 168877 - DNA, 75 bp, synthetic construct
  source 1..75: mol_type = other DNA
cgcgagccaaaaaattgaatcgctggcgcagcagcggcagtggcatgactatcgctacacctttaaggtctatat

SEQ ID NO: 168878 - DNA, 75 bp, synthetic construct
  source 1..75: mol_type = other DNA
gtatgaagacggtgagatgtggtctgcaatgtggaatggtaatcgctgggatgatggcaccgaatatccggatcc

SEQ ID NO: 168879 - DNA, 75 bp, synthetic construct
  source 1..75: mol_type = other DNA
atcaagacaatcacacatccgcacttcggtgataaaccggtaaaggtgttcgcgataaaggtgaatatcggcaat

SEQ ID NO: 168880 - DNA, 75 bp, synthetic construct
  source 1..75: mol_type = other DNA
actcgtcccacctggaatagcggtgttccgtggacggaatggaaagaacgaagtcgtgagtgctacgaagacgat

SEQ ID NO: 168881 - DNA, 75 bp, synthetic construct
  source 1..75: mol_type = other DNA
cctcaaccggatgaacttcaccgtcagttgcccgcaaagctggcagatgaacgtggcggtgcgcccggatgtact

SEQ ID NO: 168882 - DNA, 75 bp, synthetic construct
  source 1..75: mol_type = other DNA
tggtcgagcgcgatcaaccggtgatgattgtttaccagaacgcggggatcaccgcctcgatgcccggcgtggcgc

SEQ ID NO: 168883 - DNA, 75 bp, synthetic construct
  source 1..75: mol_type = other DNA
tgccagcgcgcaggggctctttatgaccatggtaaatggtgtcggcgcatgggttggctcgattctgagtggcat

SEQ ID NO: 168884 - DNA, 75 bp, synthetic construct
  source 1..75: mol_type = other DNA
ggatcatcgcagacaaatggctgcgcgcagaacgtgcatacatgctgtgtcacctggtgtgtgcgggcgtacttt

SEQ ID NO: 168885 - DNA, 75 bp, synthetic construct
  source 1..75: mol_type = other DNA
atgcgacaaggaaacgattatgagcacgcgatgcgcttaaaggtaatgtcctttttgcaatattttatctggggg

SEQ ID NO: 168886 - DNA, 75 bp, synthetic construct
  source 1..75: mol_type = other DNA
gggatgatcgccatcttcatgtctttcgccgggcagtttgctttcttcacatatattcgcccggtgtatatgaac

SEQ ID NO: 168887 - DNA, 75 bp, synthetic construct
  source 1..75: mol_type = other DNA
tggtaccgccgcgtacggtgccgaaggcgctgtcggtgatcttcggcgcggtttctattgcgctggtgattgccg

SEQ ID NO: 168888 - DNA, 75 bp, synthetic construct
  source 1..75: mol_type = other DNA
ccgtcatgctgatgagtatggtggcctggacgctgcgctttggcttcttcgcctatggcgatccgtcaacaaccg

SEQ ID NO: 168889 - DNA, 75 bp, synthetic construct
  source 1..75: mol_type = other DNA
atgaagaacatcaaccccaaatttattaatttggcccagcttattgagctgaccaatattagccgcagcaccatt

SEQ ID NO: 168890 - DNA, 75 bp, synthetic construct
  source 1..75: mol_type = other DNA
gctcacagaaaatgaatcctgtctggataacatcgtctgtgttgctcccccatttggtcagttcagtacccttat

SEQ ID NO: 168891 - DNA, 75 bp, synthetic construct
  source 1..75: mol_type = other DNA
ctctggcatcgctagaagaggagccggtggcatggctgcattcagaaaatggcttaggtattccggcaataacga

SEQ ID NO: 168892 - DNA, 75 bp, synthetic construct
  source 1..75: mol_type = other DNA
tttcacagatggctgaagtcggtttcattctgacgattccgttctttttgaagcgtttcggcatcaaaacggtca

SEQ ID NO: 168893 - DNA, 75 bp, synthetic construct
  source 1..75: mol_type = other DNA
gtatggccatctttttcctcttcgccatgatgctgggcgcggtactgcaaattaccaacgtttttggcaacccgt

SEQ ID NO: 168894 - DNA, 75 bp, synthetic construct
  source 1..75: mol_type = other DNA
gtcctataaaagaatcacataaaattggtaatacgacaaatccttatggaacttcaaagtttataatggaattaa

SEQ ID NO: 168895 - DNA, 75 bp, synthetic construct
  source 1..75: mol_type = other DNA
ccgcaggtaatcgtcaaggatactcgtctggcgtttggtgaactggctgcatgggttcgccagcaagttccggcg

SEQ ID NO: 168896 - DNA, 75 bp, synthetic construct
  source 1..75: mol_type = other DNA
gaatgcggataacaacgactggctgaactggcagagtgtgattggctcacgcaaagtatggcgcttctctccgaa

SEQ ID NO: 168897 - DNA, 75 bp, synthetic construct
  source 1..75: mol_type = other DNA
tgacgccgggctgcctgtttgttgccctgaaaggcgaacgtttcgatgcccatgattttgccgaccaggcgaaag

SEQ ID NO: 168898 - DNA, 75 bp, synthetic construct
  source 1..75: mol_type = other DNA
caacctatcagcaaatagtgtaatgttgtattcattcccatgcccaccattaactgaacaatatagaatattttc

SEQ ID NO: 168899 - DNA, 75 bp, synthetic construct
  source 1..75: mol_type = other DNA
aaagctcaactggtgaaagaagggaaaataaaaaaacaaaaaccactaccgccaattagcaatgaggaaaaaccg

SEQ ID NO: 168900 - DNA, 75 bp, synthetic construct
  source 1..75: mol_type = other DNA
taaaaccctgattgctgagcaacaggtgattacgattttagttaaaggttcacgtagtgccgccatggaagaggt

SEQ ID NO: 168901 - DNA, 75 bp, synthetic construct
  source 1..75: mol_type = other DNA
gcgacgaggaaaaaccgtttgaactgcctaatggatgggaatggtgcaggctcggagagcttattgattccattg

SEQ ID NO: 168902 - DNA, 75 bp, synthetic construct
  source 1..75: mol_type = other DNA
ttttataactctaaagagtcaaatccaatccgcccaacaaacccaactgcaccttgcagatgcactcactgacgc

SEQ ID NO: 168903 - DNA, 75 bp, synthetic construct
  source 1..75: mol_type = other DNA
tgaaaatgaaatacctgttctttattttcattatttcatgatgacaataaaatccactctggaaaaattcgcccc

SEQ ID NO: 168904 - DNA, 75 bp, synthetic construct
  source 1..75: mol_type = other DNA
gacggcggcgattttaagccagtgcggcaacacgctttatacggctggcaacctcaacaatgacatcggcgtgcc

SEQ ID NO: 168905 - DNA, 75 bp, synthetic construct
  source 1..75: mol_type = other DNA
ggcgaagcggcgaaggcggcgggtattgaccgcgtgttaagtgtgggtaaacaaagccatgctatcagcaccgcc

SEQ ID NO: 168906 - DNA, 75 bp, synthetic construct
  source 1..75: mol_type = other DNA
gccgaggaactggctgaaaactggacgcgtattagcgagcatttcgacacactatttaccaccgaagccagcgtg

SEQ ID NO: 168907 - DNA, 75 bp, synthetic construct
  source 1..75: mol_type = other DNA
cgcgcgtacttgagaaagttggttttaccgtcgatgtggtaactccgaaaacgtatggttaccgtcgtggagaac

SEQ ID NO: 168908 - DNA, 75 bp, synthetic construct
  source 1..75: mol_type = other DNA
atgtatttacgaccagacgaggtggcgcgcgtacttgagaaagtcggttttaccgtcgatgtggtaacccaaaaa

SEQ ID NO: 168909 - DNA, 75 bp, synthetic construct
  source 1..75: mol_type = other DNA
tgcggagtgtgcatacacacttgaacatcatgatcacgcagtagcttttgccgccgagctacgtgaaggaggcaa

SEQ ID NO: 168910 - DNA, 75 bp, synthetic construct
  source 1..75: mol_type = other DNA
ggcatacagttctaaaggcattgcggccattattatgccagccattatgggcattattgccgataaatggttacg

SEQ ID NO: 168911 - DNA, 75 bp, synthetic construct
  source 1..75: mol_type = other DNA
gcgctgactttgccgaagattccggttgctgagaaaaaagcgaccacatcgcttgccagcaagctgggtctggat

SEQ ID NO: 168912 - DNA, 75 bp, synthetic construct
  source 1..75: mol_type = other DNA
cagcatgtcaggtcgcctgctaaatcgctggggaaaattaagaagcctcagctactggcgagaattgaacgcctt

SEQ ID NO: 168913 - DNA, 75 bp, synthetic construct
  source 1..75: mol_type = other DNA
gcacccgattgatggcctgtccggtgaatatgcggagaaatcccttgaagaatgggcggaacagattcgcaaagg

SEQ ID NO: 168914 - DNA, 75 bp, synthetic construct
  source 1..75: mol_type = other DNA
gctgagtgcgcatacacacttgaacatcatgatcacgcagtagcttttgccgctgagcttcgtacaggaaataaa

SEQ ID NO: 168915 - DNA, 75 bp, synthetic construct
  source 1..75: mol_type = other DNA
aaattcctactagttgggaatgggttcgttttggtacaattacgacatcccgacttggaaaaatgctcgataaag

SEQ ID NO: 168916 - DNA, 75 bp, synthetic construct
  source 1..75: mol_type = other DNA
aacgtccaacgcggatatcttgatcttacggaaattaaacagattgaaatccctattgaggaaaaagaaaaatat

SEQ ID NO: 168917 - DNA, 75 bp, synthetic construct
  source 1..75: mol_type = other DNA
ttgaacgcaaagcaatccgcaagttcattaacagcattgaacacatcctgcgtgacaagctgtcaccgtatgaca

SEQ ID NO: 168918 - DNA, 75 bp, synthetic construct
  source 1..75: mol_type = other DNA
gtcaaaaatttactcggcatataacgccactatcacagagcctgacggggattttatggacatgcagacattgca

SEQ ID NO: 168919 - DNA, 75 bp, synthetic construct
  source 1..75: mol_type = other DNA
ttacaaaaaatatagagctttcacgtatttatcaggaaatatcttggatgacgtaactcactggatgccgctacc

SEQ ID NO: 168920 - DNA, 75 bp, synthetic construct
  source 1..75: mol_type = other DNA
gtggacagttaattgccgtgaaagacacgcagggccatgaaacgcggtatgaatataacgccgccggtgacctga

SEQ ID NO: 168921 - DNA, 75 bp, synthetic construct
  source 1..75: mol_type = other DNA
ggtcgaccagcttccattgagtatgcgtgcccgataccagcatcttgttgaacgcatgaaggtatatggcagcaa

SEQ ID NO: 168922 - DNA, 75 bp, synthetic construct
  source 1..75: mol_type = other DNA
tggagcaacaggtcaataccctgacgttacaattgagtgaagaaacacagcgtgcatctcaccttactctcgcgc

SEQ ID NO: 168923 - DNA, 75 bp, synthetic construct
  source 1..75: mol_type = other DNA
ataacataagcgaattgtttattgccgttgatgaaaaaggatatctaatcgtcccacaaaaagaaacatcagaga

SEQ ID NO: 168924 - DNA, 75 bp, synthetic construct
  source 1..75: mol_type = other DNA
tggcgaaactgggggaagttatccacaacgctcagcggcggttatggtcattataagaaatacaatgcgcaacct

SEQ ID NO: 168925 - DNA, 75 bp, synthetic construct
  source 1..75: mol_type = other DNA
gcgctgcgcagcttccagaatgaagatctgcaacgcctgcgccaggcggtacgggaagcggaacccgagatttat

SEQ ID NO: 168926 - DNA, 75 bp, synthetic construct
  source 1..75: mol_type = other DNA
ccggtgattttgcgcaccgagcgagaggcgcttacctttgtgcaaaattatcatccggcgctgcgcagcttccag

SEQ ID NO: 168927 - DNA, 75 bp, synthetic construct
  source 1..75: mol_type = other DNA
tttgacgcccttttgcaactggcaggaagtcccctgtcaagtgacagtgtcacaaaacaaattcgtagtgaagag

SEQ ID NO: 168928 - DNA, 75 bp, synthetic construct
  source 1..75: mol_type = other DNA
agttttcatgtgagcgttacgatcatgattttggcggttgggtagaaagcgaatgtcttgggttatatctgattg

SEQ ID NO: 168929 - DNA, 75 bp, synthetic construct
  source 1..75: mol_type = other DNA
gagcgccacgtcatgatacctaaagaaaatggctgctggctttatctggctgacttagaacatgcactacgtgtt

SEQ ID NO: 168930 - DNA, 75 bp, synthetic construct
  source 1..75: mol_type = other DNA
tctagggttatatctgattgatgatgaagaacaatgcagagtctacgaactcaaggagcgcgttaaagagctgga

SEQ ID NO: 168931 - DNA, 75 bp, synthetic construct
  source 1..75: mol_type = other DNA
accattctgcaactggccgtaatgggcaaacttgtgccgcaggatccgaatgatgaaccagcctctgaactgctc

SEQ ID NO: 168932 - DNA, 75 bp, synthetic construct
  source 1..75: mol_type = other DNA
acaccacatgataaattatcaaaagaatatttataccaatgtcttagaagtaatttttgtcaaaatcagttcaca

SEQ ID NO: 168933 - DNA, 75 bp, synthetic construct
  source 1..75: mol_type = other DNA
ggtaaactggtgccgcaggatccgaatgatgaaccggcgtcggagctgctgaagcgtattgcggcggaaaaagcc

SEQ ID NO: 168934 - DNA, 75 bp, synthetic construct
  source 1..75: mol_type = other DNA
tatcttatgaggatacccgagcacttaaaataacaaaagaaatgaaagaaaaatatagtatgtcagttaatgaca

SEQ ID NO: 168935 - DNA, 75 bp, synthetic construct
  source 1..75: mol_type = other DNA
gctatcattagcaaatcagatttaccctgtttactactccaacgagtagcaaaatttaaaaattatgcaaacact

SEQ ID NO: 168936 - DNA, 75 bp, synthetic construct
  source 1..75: mol_type = other DNA
gaaaaacttaaatcaaaaatccagtccgcccaacaaacccaactgcaccttgcagacgcactcactgacgcggcg

SEQ ID NO: 168937 - DNA, 75 bp, synthetic construct
  source 1..75: mol_type = other DNA
atcgcgttatggaacacggtatacatagaaagagccattgagtccctgaaacgaaaaaagctcctgattaatgac

SEQ ID NO: 168938 - DNA, 75 bp, synthetic construct
  source 1..75: mol_type = other DNA
gtctgcgccgacgcgtgcaggcggggctgaataagggtgaggcccgtaatgcccttgcgcgagcggtctttttgc

SEQ ID NO: 168939 - DNA, 75 bp, synthetic construct
  source 1..75: mol_type = other DNA
cgaacaaacctcaagctgggacagggaaaataccgttcgttacgctcagtagatagcagtctgtataaaaaacag

SEQ ID NO: 168940 - DNA, 75 bp, synthetic construct
  source 1..75: mol_type = other DNA
agcgagcatttcgacacactttttaccaccgaagccagcgtggatacgttaaaacagaccattctgcaactggcc

SEQ ID NO: 168941 - DNA, 75 bp, synthetic construct
  source 1..75: mol_type = other DNA
gaaagaagggaaaataaaaaaacaaaaaccgttgctgccaattagcgatgaggaaaaaccgtttgaactgcctaa

SEQ ID NO: 168942 - DNA, 75 bp, synthetic construct
  source 1..75: mol_type = other DNA
tcttaagtactgtcaaaaaactcatgtctctttgcgaccaactggaacagcaatccctgaccactctggacgcac

SEQ ID NO: 168943 - DNA, 75 bp, synthetic construct
  source 1..75: mol_type = other DNA
caaccaataattttcgggaaatcgcggaaacgtcaaccaactatccggtaattcctagtgaggtattgtccgcaa

SEQ ID NO: 168944 - DNA, 75 bp, synthetic construct
  source 1..75: mol_type = other DNA
ttcgggaaaacaagaattcgtcaaccaataattttcgtgaaatcgcggaaacgtcaaccaactatccggtaattc

SEQ ID NO: 168945 - DNA, 75 bp, synthetic construct
  source 1..75: mol_type = other DNA
aagagcttatcgttaccattaacaaatatgccagtcagttggcagcagaacctatagcgcctaatgacgttcgag

SEQ ID NO: 168946 - DNA, 75 bp, synthetic construct
  source 1..75: mol_type = other DNA
ctttgccattcagatgtgtcgggaaatcaagctgcctctgttcccgggttttaccgagcgcgccagagaaacatt

SEQ ID NO: 168947 - DNA, 75 bp, synthetic construct
  source 1..75: mol_type = other DNA
tgaaaacacatcacttccagaattgccgctggatttacgtgagtttcagatgcaacaggaaaaagagttgctgca

SEQ ID NO: 168948 - DNA, 75 bp, synthetic construct
  source 1..75: mol_type = other DNA
tacgcggttgatgctgttgctgctattgcagaggtgagaggctggaacgcctgccgcgccgccatgcttcagtcc

SEQ ID NO: 168949 - DNA, 75 bp, synthetic construct
  source 1..75: mol_type = other DNA
gtccagaaatacttataaaattcgggtaaatcaactggagacaataaaagaaaaattgggagagattttactgac

SEQ ID NO: 168950 - DNA, 75 bp, synthetic construct
  source 1..75: mol_type = other DNA
ttccgctccattgctgcggccaacgatatgaaacatggggagctgttcgaggcgtaccaggaattctggaaaaaa

SEQ ID NO: 168951 - DNA, 75 bp, synthetic construct
  source 1..75: mol_type = other DNA
gcatgaccatgaacggcgggcgatgggtgaattttaactgggagagctggcgtccgaatgtcgtccagccaggaa

SEQ ID NO: 168952 - DNA, 75 bp, synthetic construct
  source 1..75: mol_type = other DNA
tggctaatgacagtgattacggcctgacctcatcaatctatacccaaaatctgaacgtcgcgatgaaagccatta

SEQ ID NO: 168953 - DNA, 75 bp, synthetic construct
  source 1..75: mol_type = other DNA
gctggtctacgtcttggtacagtagttgaacggtgccgcctggtaagccggggagattttctaatcagtgccgga

SEQ ID NO: 168954 - DNA, 75 bp, synthetic construct
  source 1..75: mol_type = other DNA
gcattcacccggacggcctgacaaaaaaatttgtcgcagccagaaaattaacaggtatccagttcagtgaaaacc

SEQ ID NO: 168955 - DNA, 75 bp, synthetic construct
  source 1..75: mol_type = other DNA
acggaggtaaaattgataaacagttagcgaataaaatttttaaacaatattaccacgagttaataactgaagtaa

SEQ ID NO: 168956 - DNA, 75 bp, synthetic construct
  source 1..75: mol_type = other DNA
tagtggaaaaaatgaacaaaacatcaatgcttgtcataaccatgacatacaaacaagccctgcgcgttgctgctc

SEQ ID NO: 168957 - DNA, 75 bp, synthetic construct
  source 1..75: mol_type = other DNA
tttgcaaaggtcgttggacttaagcaaaacgcccttttctcatggttgcgccagaacggcattctcatggctttt

SEQ ID NO: 168958 - DNA, 75 bp, synthetic construct
  source 1..75: mol_type = other DNA
attcgcaagaatggcggtaacggctggcagttcttcagcccggtgatgaacgaaatggtgaaagaacgattgata

SEQ ID NO: 168959 - DNA, 75 bp, synthetic construct
  source 1..75: mol_type = other DNA
aatcacggaaagcatgatgatggaacacgataccgaaatctttaagcgcattcagatcctgcgcgatatgggcgt

SEQ ID NO: 168960 - DNA, 75 bp, synthetic construct
  source 1..75: mol_type = other DNA
aaccgtgaaggcggtaaagcgcgcgtcgaggggatgagtcgggagctgcagctggagaaaaaagacggcagtaaa

SEQ ID NO: 168961 - DNA, 75 bp, synthetic construct
  source 1..75: mol_type = other DNA
gatgcagggttgttggaggccgcagatattctgttatgtatgcggcattgcgaagcaagtaatgtgttgcatccc

SEQ ID NO: 168962 - DNA, 75 bp, synthetic construct
  source 1..75: mol_type = other DNA
ctgggcgtcagttctgatgcaggattgttggaggccgcagatattctgttatgtatgcggcattgcgaagcaagt

SEQ ID NO: 168963 - DNA, 75 bp, synthetic construct
  source 1..75: mol_type = other DNA
gttcattgtcgccatcaccgctggacggtgtattaagtaaagcgtcaacgctggagatttttcatcaggaactct

SEQ ID NO: 168964 - DNA, 75 bp, synthetic construct
  source 1..75: mol_type = other DNA
atgagaacgtcattagtcacccgtgaagagatgatcgaggcaatagaacagcacacaacctgtatcagcaccagg

SEQ ID NO: 168965 - DNA, 75 bp, synthetic construct
  source 1..75: mol_type = other DNA
gtcagccggatgaaattcccgttctagagtggcagggagtgcgtgtagtgacaactaagatccttgctaaggggt

SEQ ID NO: 168966 - DNA, 75 bp, synthetic construct
  source 1..75: mol_type = other DNA
caaagccggacgttaagcccgacggagagagaaatattgcgctttatgtcgcgtggctactcaatgacacaaatt

SEQ ID NO: 168967 - DNA, 75 bp, synthetic construct
  source 1..75: mol_type = other DNA
cataagctgcgttgttaacgcgagaatacatgatgcaacatgtctttcggcggataatgcggtttataaaacgtg

SEQ ID NO: 168968 - DNA, 75 bp, synthetic construct
  source 1..75: mol_type = other DNA
ccgtaacccgaataacgtgatcgatatgaactctcgtcagtaccagtgcgaacaggtgaactacgatacctttat

SEQ ID NO: 168969 - DNA, 75 bp, synthetic construct
  source 1..75: mol_type = other DNA
ccgtaacccgaataacgtggttgatctgaaaaaccgcaaatatcagtgcgaacaggtgaactacgacacgtttat

SEQ ID NO: 168970 - DNA, 75 bp, synthetic construct
  source 1..75: mol_type = other DNA
tgatggagacagtgcgccagttgcgtcgttctggaatcattacggggcacatgtaactcactggatgccgctacc

SEQ ID NO: 168971 - DNA, 75 bp, synthetic construct
  source 1..75: mol_type = other DNA
attaccttgccgaccgtgccggtaacagaggccggttcagagatgcggatgcgtaccctctggaccaggcctttc

SEQ ID NO: 168972 - DNA, 75 bp, synthetic construct
  source 1..75: mol_type = other DNA
gtactgccgccagtttgcgccggtgctgaagtcactgtcgcagcagagcggtctcagtgtcttcccggtaagcct

SEQ ID NO: 168973 - DNA, 75 bp, synthetic construct
  source 1..75: mol_type = other DNA
ccgcaacccgattaacgctgtcgacctgaaatcccgtcagtaccagtgtgagcaggtgaactacgacacgtttat

SEQ ID NO: 168974 - DNA, 75 bp, synthetic construct
  source 1..75: mol_type = other DNA
ctgtcgctgcatattatgcaaaatattacctgaatggtggggatgctttaatttcaccgtttttaacttcaggcg

SEQ ID NO: 168975 - DNA, 75 bp, synthetic construct
  source 1..75: mol_type = other DNA
gcgttaacgttaccgaaaattccagtggcggaacataaggccagtacgacgctttccagtaaattaggtctggat

SEQ ID NO: 168976 - DNA, 75 bp, synthetic construct
  source 1..75: mol_type = other DNA
gcatcagcgcacagattgcccggcaggtggcgcttgaccgcatcatgatcggtttcaacggcacgtctcacgcgg

SEQ ID NO: 168977 - DNA, 75 bp, synthetic construct
  source 1..75: mol_type = other DNA
atttactggcagaaaggttcaatgcgtcgtctgatgaaagacgaaccggaatacaaccgcatcgccacctaccag

SEQ ID NO: 168978 - DNA, 75 bp, synthetic construct
  source 1..75: mol_type = other DNA
aaaaatccaatttcagcaccaacaagctgcttcaggacgttaacgtgggctggctggagcacatcagaaccgatg

SEQ ID NO: 168979 - DNA, 75 bp, synthetic construct
  source 1..75: mol_type = other DNA
atgtcgctgggttcaattcctgatgatatccgcgtcccgctcgtcgtgatcgatattgacaattcacaggcgctg

SEQ ID NO: 168980 - DNA, 75 bp, synthetic construct
  source 1..75: mol_type = other DNA
gacatctgtgaatggcagggctcgtggggcagggaggagtgtgagcaaaagcacattgagtttcaaaatcttggg

SEQ ID NO: 168981 - DNA, 75 bp, synthetic construct
  source 1..75: mol_type = other DNA
gaacccgcactgccacctgatgatctccgagcggatcaatgacggcatcgagcggcccgccgctcagtggttcaa

SEQ ID NO: 168982 - DNA, 75 bp, synthetic construct
  source 1..75: mol_type = other DNA
aactgatgaccgggtgtacaaattttgcgttcagcggaaaacctggtaccgggaagaatcacttagcggcagcta

SEQ ID NO: 168983 - DNA, 75 bp, synthetic construct
  source 1..75: mol_type = other DNA
cgaaaggcgttcgaccggagacgttgcctcggcaggttaacaccgtctcgttgccggacagcgcgatcccgccag

SEQ ID NO: 168984 - DNA, 75 bp, synthetic construct
  source 1..75: mol_type = other DNA
caggtgagcgtgagcgccggggctacgaaggaaaacattgcaaaagccattgctgatgcggtgacgaaaaagcca

SEQ ID NO: 168985 - DNA, 75 bp, synthetic construct
  source 1..75: mol_type = other DNA
tgctgatcaacgaactggctccgcgtgtgcataacagtggtcactggacgcaaaacggtgccagcatcagccagt

SEQ ID NO: 168986 - DNA, 75 bp, synthetic construct
  source 1..75: mol_type = other DNA
agaatgattgtgactggctaacggcccttgattttgtaaaggatgtcaacggttcaccaacgcatctcacttttt

SEQ ID NO: 168987 - DNA, 75 bp, synthetic construct
  source 1..75: mol_type = other DNA
gacatgcccgaattcgatggaccaactccgataacgccggaggccattgaaaacgcaattgaatatatccgcagt

SEQ ID NO: 168988 - DNA, 75 bp, synthetic construct
  source 1..75: mol_type = other DNA
tcaatcggacgttattcctgtttatgctgcctcacctgcaccgatagcgtcggagtccattgaaaacgctattga

SEQ ID NO: 168989 - DNA, 75 bp, synthetic construct
  source 1..75: mol_type = other DNA
gattgttaagcgtcgcactggtggctatgacggtcgcggtcaatggcgtttacgcgccgatgaaaccgaacagtt

SEQ ID NO: 168990 - DNA, 75 bp, synthetic construct
  source 1..75: mol_type = other DNA
gggctatgtgggcgtgatggcgatggagtgttttgtcaccccgcaaggtctgctgatcaacgaactggctccgcg

SEQ ID NO: 168991 - DNA, 75 bp, synthetic construct
  source 1..75: mol_type = other DNA
taggtgattttcgggcagaaataacaccgctttacgcagcgccgtcagcgccggtaattccggatggttggataa

SEQ ID NO: 168992 - DNA, 75 bp, synthetic construct
  source 1..75: mol_type = other DNA
ggagatggaagccttcctcggtgcggaagggcggtctgagtttgtatgcggtgattttgcagcggtgattgaagc

SEQ ID NO: 168993 - DNA, 75 bp, synthetic construct
  source 1..75: mol_type = other DNA
gcggagctgtcttcatgaatgccggataccaggaaaatctgctaaatgatgtgaatgctgacctgattaactttt

SEQ ID NO: 168994 - DNA, 75 bp, synthetic construct
  source 1..75: mol_type = other DNA
gctgacggaccgcgttacaaagcgatcggcaatagtatggcaataccagtaatgcgctggattggcgatcggatt

SEQ ID NO: 168995 - DNA, 75 bp, synthetic construct
  source 1..75: mol_type = other DNA
agtggaacctctctttgccagacgttctgtgtcttgtaagggagacactcgtggtgttgctcatgacgttatggc

SEQ ID NO: 168996 - DNA, 75 bp, synthetic construct
  source 1..75: mol_type = other DNA
taactaatttcaatattgcatttccagatatttgttctcggttcttgtctgaagaacaggctatgtatcttgcgg

SEQ ID NO: 168997 - DNA, 75 bp, synthetic construct
  source 1..75: mol_type = other DNA
agtggaacctctttttgccagacgttctgtgtcttgtaagggagacactcgaggtgttgctcatgacgttatagc

SEQ ID NO: 168998 - DNA, 75 bp, synthetic construct
  source 1..75: mol_type = other DNA
cacggattttaaagtctggctggggataattcgttccatgtcggagtatggggtaaaaagtgacaccctggaact

SEQ ID NO: 168999 - DNA, 75 bp, synthetic construct
  source 1..75: mol_type = other DNA
gtgaaacaactgcaaaaagagatgtttcgtaaggagcacttcccacgcgtcagcatgaatccgcaagaagccaac

SEQ ID NO: 169000 - DNA, 75 bp, synthetic construct
  source 1..75: mol_type = other DNA
tttatcccgatgatggcggactgttcaccactgttgctggatcttaatgagaacggtccgggtattctggttacg

SEQ ID NO: 169001 - DNA, 75 bp, synthetic construct
  source 1..75: mol_type = other DNA
cgccggaatattgcgccgagccgaaaaaagaaggaaatcgcttccgccattattgcaaatggcgctgcaatcagt

SEQ ID NO: 169002 - DNA, 75 bp, synthetic construct
  source 1..75: mol_type = other DNA
tcttcctgctcgtcccattccaatatcatttgcccgaatcagagaacgtttggctttgatgtcgtctgtaagtga

SEQ ID NO: 169003 - DNA, 75 bp, synthetic construct
  source 1..75: mol_type = other DNA
atcaccggtcctcgactcgatatggatactgatttcaaaacgtggatcggtgtcatctacgcgttcagcaaatac

SEQ ID NO: 169004 - DNA, 75 bp, synthetic construct
  source 1..75: mol_type = other DNA
tggagcgcctgatccgtgaacctaaacgctaccaggatctgctggaatttctctggatctgcttttctctgggtt

SEQ ID NO: 169005 - DNA, 75 bp, synthetic construct
  source 1..75: mol_type = other DNA
tatgtgggggtcgcctcagaaaacggaatctatggtcactcccgtttttgcaacaccgattttgacgaaaagtgg

SEQ ID NO: 169006 - DNA, 75 bp, synthetic construct
  source 1..75: mol_type = other DNA
tgcgggctttatcttcgcctttcgcgtactcccggcgattattttcgttaccgcgcttatcagcttgctgtacta

SEQ ID NO: 169007 - DNA, 75 bp, synthetic construct
  source 1..75: mol_type = other DNA
tctcaactttcagttaacgcaaaacggcaaaatggcggcgtttgcgattacgcaagtggtgctggatgaagctac

SEQ ID NO: 169008 - DNA, 75 bp, synthetic construct
  source 1..75: mol_type = other DNA
cggctacgcgactcaggtgtcacacagcaggacatccttgccaaccttatcgacaacgcaacacagtgccgcatc

SEQ ID NO: 169009 - DNA, 75 bp, synthetic construct
  source 1..75: mol_type = other DNA
cagtctgaatttaatcagtaccggagagtacaggccgagcgggagaacgccgcgctcaaagcctgggccgcccgc

SEQ ID NO: 169010 - DNA, 75 bp, synthetic construct
  source 1..75: mol_type = other DNA
ggaaagtattgaaaaaggcgaattaggtgagaatggttacttacctcatatgatgagcgttcgccgtctgactcc

SEQ ID NO: 169011 - DNA, 75 bp, synthetic construct
  source 1..75: mol_type = other DNA
gttgcgtattcgctacaacatgcacaaattgggcgaaaagatgatgctggaccgcagggtaaagggtggcaaaaa

SEQ ID NO: 169012 - DNA, 75 bp, synthetic construct
  source 1..75: mol_type = other DNA
caatgtcggttatgggaagtataaaactccgtatttcccattgcaggagatggaagccttccttggtgcggaagg

SEQ ID NO: 169013 - DNA, 75 bp, synthetic construct
  source 1..75: mol_type = other DNA
ccgggaaaatgggcagtagagcaggcggcattaggcgtccataaagtgatgtcctacagtgacgcaggaagtgcc

SEQ ID NO: 169014 - DNA, 75 bp, synthetic construct
  source 1..75: mol_type = other DNA
gcgtggaaatcactggaatttagggaaggtgcgaataagcggggaaattcttctcggctgactcagtcatttcat

SEQ ID NO: 169015 - DNA, 75 bp, synthetic construct
  source 1..75: mol_type = other DNA
cttttggggggcagaaaagtattgaaaaaggcgaattaggtgagaatggttacttacctcatatgatgagtgttc

SEQ ID NO: 169016 - DNA, 75 bp, synthetic construct
  source 1..75: mol_type = other DNA
ccgaatatttcgccaccaaagtgcaaaacaccaatggtgtgtatgtggttccggcatttaccgggctgggtgcgc

SEQ ID NO: 169017 - DNA, 75 bp, synthetic construct
  source 1..75: mol_type = other DNA
gatcgcgggtgatcagcaggcggcgctattcggtcagttgtgcgttaaagaagggatggcgaagaatacctatgg

SEQ ID NO: 169018 - DNA, 75 bp, synthetic construct
  source 1..75: mol_type = other DNA
acgagctgcaagagaaagcggtgattgagcgcgagttccgtccaggcatcgaaaccactgagcgtaattaccgtt

SEQ ID NO: 169019 - DNA, 75 bp, synthetic construct
  source 1..75: mol_type = other DNA
atggacggacaaatatcaatcgttcgaccaggctcatgtgacgatcgcgaaatacgagtaattattcgtctggca

SEQ ID NO: 169020 - DNA, 75 bp, synthetic construct
  source 1..75: mol_type = other DNA
atgcaatccgcgccgctggcattcgcatcaaaggagagtgagatgaatggacaaatatcaattgttcgacctgga

SEQ ID NO: 169021 - DNA, 75 bp, synthetic construct
  source 1..75: mol_type = other DNA
atggatcacgatgccaatatcattagcgtgtcgcagcgcgaatttgagcaaatctacccaaaaccaggctgggta

SEQ ID NO: 169022 - DNA, 75 bp, synthetic construct
  source 1..75: mol_type = other DNA
agaaaccggcaagcctatctataacgccattgtctggcagtgccgtcgtaccgcagaaatctgcgaacatttaaa

SEQ ID NO: 169023 - DNA, 75 bp, synthetic construct
  source 1..75: mol_type = other DNA
ttactccagaaaatctcgcattatcattaacaggaaagtcagacctgccagtagagctaaagctgcgaaatgttg

SEQ ID NO: 169024 - DNA, 75 bp, synthetic construct
  source 1..75: mol_type = other DNA
gaccgggagcatgtgacgatcgcgagatacgaatgattattcgtctggcaatggggaaaacaataactgctctca

SEQ ID NO: 169025 - DNA, 75 bp, synthetic construct
  source 1..75: mol_type = other DNA
cacattatacgcgcgacgctggagtctattgcttatcagacgcgtgacgtgctggaagcgatgcaggccgattct

SEQ ID NO: 169026 - DNA, 75 bp, synthetic construct
  source 1..75: mol_type = other DNA
aagggatggcgaagaacacctatggcactggctgctttatgctgatgaacactggcgagaaagcggtgaaatcag

SEQ ID NO: 169027 - DNA, 75 bp, synthetic construct
  source 1..75: mol_type = other DNA
ggtattcgtctgcacgccctgcgcgtggatggcggcgcagtggcgaacaatttcctgatgcagttccagtccgat

SEQ ID NO: 169028 - DNA, 75 bp, synthetic construct
  source 1..75: mol_type = other DNA
cttcgtactaataatgaataccaatcatataaacacgcagtacatcgcatgatgggagctacatttgatagtaag

SEQ ID NO: 169029 - DNA, 75 bp, synthetic construct
  source 1..75: mol_type = other DNA
ggtatacatggaacttctacgcggtaaaacttatcaagaagaactacaaaaagtacctacggcgttagtacagaa

SEQ ID NO: 169030 - DNA, 75 bp, synthetic construct
  source 1..75: mol_type = other DNA
ggtcttgttgtgctggccgtattttatctgttttatctgctgcgtctggacagccagacacaggatattctgcat

SEQ ID NO: 169031 - DNA, 75 bp, synthetic construct
  source 1..75: mol_type = other DNA
cgcccttcttccgcgcactggtcgattatgttaatcagggcaatagtgcttttgactgccctggtcatcaggggg

SEQ ID NO: 169032 - DNA, 75 bp, synthetic construct
  source 1..75: mol_type = other DNA
tttattccgatgatggctgactgttcgccgctgttgctggatcttaatgagaacgatccgggtattctggttacg

SEQ ID NO: 169033 - DNA, 75 bp, synthetic construct
  source 1..75: mol_type = other DNA
cgcggtaaaacctatcaagaagaactacaaaaagtacctacggctttagtatacaaagtacagacacttttcaag

SEQ ID NO: 169034 - DNA, 75 bp, synthetic construct
  source 1..75: mol_type = other DNA
gttctattgccggaattacccacactgccgcctggaaaaaccagcgcattatcaccgttgatcaaaacctgattc

SEQ ID NO: 169035 - DNA, 75 bp, synthetic construct
  source 1..75: mol_type = other DNA
ttcttttttccccactgacgttatgtatttcagccgtggcctctgccgcgaagaccatggtaaaacgaaaaaaat

SEQ ID NO: 169036 - DNA, 75 bp, synthetic construct
  source 1..75: mol_type = other DNA
cagtaacggtgccggcagtggcgcgcagaacgcagtgggtatcggggtaatgggcggaatggtctctgcaacgtt

SEQ ID NO: 169037 - DNA, 75 bp, synthetic construct
  source 1..75: mol_type = other DNA
tgtttacggcattactggctcttagctggacttttagcgtaacggctgccgaacgtatcgtggtcgcaggaggat

SEQ ID NO: 169038 - DNA, 75 bp, synthetic construct
  source 1..75: mol_type = other DNA
ttcttttttccccgttgacgttatgtatttcagcgataaccgtcgccgtgaagaacgcggtaaaacctcagccca

SEQ ID NO: 169039 - DNA, 75 bp, synthetic construct
  source 1..75: mol_type = other DNA
atgtatttcagccgtggcctctgccgcgaagaccatggtaaaacgaaaaaattgtttacggcattactggctttt

SEQ ID NO: 169040 - DNA, 75 bp, synthetic construct
  source 1..75: mol_type = other DNA
catgatgcaattgttactcgccgggatcgccatcaacgccctgtgcggtgcggcgatcggcatactgagctatat

SEQ ID NO: 169041 - DNA, 75 bp, synthetic construct
  source 1..75: mol_type = other DNA
ctttttcgcaaccccatggctgacccaggattgctcggcgtcagtagcggttcagcattaatggttggcgtggca

SEQ ID NO: 169042 - DNA, 75 bp, synthetic construct
  source 1..75: mol_type = other DNA
ggcaacaacgtgtctcgccggaacgctgaatttgctgcaacttggtgatgaagaagcccattacctcggcgtgaa

SEQ ID NO: 169043 - DNA, 75 bp, synthetic construct
  source 1..75: mol_type = other DNA
tgagaacttcttatttttctaatgggaaatataatgtaaatggtcgaatgtcttttaagatagataatgcaaatg

SEQ ID NO: 169044 - DNA, 75 bp, synthetic construct
  source 1..75: mol_type = other DNA
cgctgggcggcacagcattagtgttcttctgctgctctgcgtatgtgcttaccacccgcaaagacatgtctttcc

SEQ ID NO: 169045 - DNA, 75 bp, synthetic construct
  source 1..75: mol_type = other DNA
acgaactatattcgtgccacggttagcctgtatgtttcgctgtacaacatcttcgtcagcctgctgagcattctg

SEQ ID NO: 169046 - DNA, 75 bp, synthetic construct
  source 1..75: mol_type = other DNA
gaacctgtaagccaggcttacaagttgaacgcgctggatggcaactctccggtaactccggatggttgggttatg

SEQ ID NO: 169047 - DNA, 75 bp, synthetic construct
  source 1..75: mol_type = other DNA
ttgggagctggggctttactacatgggtgaagaaggctggctggaaggggttgaatccagcgttaccgttttccg

SEQ ID NO: 169048 - DNA, 75 bp, synthetic construct
  source 1..75: mol_type = other DNA
gacaaggatctcagtcgtgacgactacagctataacgaagacggacgtcgttactttatggcagtggattatcgc

SEQ ID NO: 169049 - DNA, 75 bp, synthetic construct
  source 1..75: mol_type = other DNA
gtaagcggcattatcggctttattggcctggtgatcccgcatctgattcgcatgacgaccggggcaaatcaccgc

SEQ ID NO: 169050 - DNA, 75 bp, synthetic construct
  source 1..75: mol_type = other DNA
gatgctattgaaacagaaggttatcttaaagaagatgcatcaaactttatagatgatcttattgagataacttgc

SEQ ID NO: 169051 - DNA, 75 bp, synthetic construct
  source 1..75: mol_type = other DNA
atgattatttatttcccttggtggattatcttaaggtcagggggttttatggtttgatgctggatacttaccatc

SEQ ID NO: 169052 - DNA, 75 bp, synthetic construct
  source 1..75: mol_type = other DNA
tcttgttaataatgggggagtggttggcggttcagcgccgcaatggacagctttcagatatcctgtttattagcc

SEQ ID NO: 169053 - DNA, 75 bp, synthetic construct
  source 1..75: mol_type = other DNA
tctgcattacatgacgccttttatctctgtgctgatttcctacacttttatttcgctggattgtctggcggaaga

SEQ ID NO: 169054 - DNA, 75 bp, synthetic construct
  source 1..75: mol_type = other DNA
aacgctattgaaattgacctgttacagatgaacgatgaagcagaaattccagcaaaaattcttcccgatcgccat

SEQ ID NO: 169055 - DNA, 75 bp, synthetic construct
  source 1..75: mol_type = other DNA
ttgacgatttcaccatgtcggtaacgccggaactgacgctggcgaatatccgtgcgctgtttaatccggcgaatt

SEQ ID NO: 169056 - DNA, 75 bp, synthetic construct
  source 1..75: mol_type = other DNA
tgctcaccgcattgctggcgggttgtgctcacgattccccttgcgttccggtttatgacgatcagggccgtctgg

SEQ ID NO: 169057 - DNA, 75 bp, synthetic construct
  source 1..75: mol_type = other DNA
attgcctatacgccaattccctttgcctacaccctgattttgccatcaggcgaaaccgcagaaacgataatggcg

SEQ ID NO: 169058 - DNA, 75 bp, synthetic construct
  source 1..75: mol_type = other DNA
cacttgctgactttcgaagatgtagcgtttgaaggcggtacagatggcgatctgtcctcaattgacgctgatgat

SEQ ID NO: 169059 - DNA, 75 bp, synthetic construct
  source 1..75: mol_type = other DNA
cagaggagcaccaggcaaggttttgcaggttacagcagccaactatcagagcgtgttaggttcacctcttcaccc

SEQ ID NO: 169060 - DNA, 75 bp, synthetic construct
  source 1..75: mol_type = other DNA
ttcgaaaactatcaccgtattctggaaagcatggcgcaggtaaaaacgcgtaaaaacttttctgatacggatgac

SEQ ID NO: 169061 - DNA, 75 bp, synthetic construct
  source 1..75: mol_type = other DNA
atgaatcacgccgcaatttcttatgacgatattgtccgcctcaagcatcttcgtaacgtgggggaatttgtcacc

SEQ ID NO: 169062 - DNA, 75 bp, synthetic construct
  source 1..75: mol_type = other DNA
catcaaagatggtgatgcatctcaaaatcgcacgttatcactaactcgcgatgatgaagaaagcgaactctttac

SEQ ID NO: 169063 - DNA, 75 bp, synthetic construct
  source 1..75: mol_type = other DNA
caaaacacttaccgtggaacctgctgaaaccacagtaaatccaggtgacacattgagcgtgggtgttgcttcaac

SEQ ID NO: 169064 - DNA, 75 bp, synthetic construct
  source 1..75: mol_type = other DNA
aaccattctcgctaacttcctgcgtgaaaatggtgtcgttccagaaaaatgcgaccttaactccattttgttcct

SEQ ID NO: 169065 - DNA, 75 bp, synthetic construct
  source 1..75: mol_type = other DNA
aagcatcattgctgactcaaatattaaatactacaaaggcaatttgtacagcgatagattcgaaatttattttca

SEQ ID NO: 169066 - DNA, 75 bp, synthetic construct
  source 1..75: mol_type = other DNA
tgggaatacgaacaggagtggaggcatatagttgagcaaggtaatgcgttgcatccatggcccgcagcattaact

SEQ ID NO: 169067 - DNA, 75 bp, synthetic construct
  source 1..75: mol_type = other DNA
taatgagaacgatccgggtattctggttacgcaatctgtgcataaacaacaggctggtttttctcagacttcaca

SEQ ID NO: 169068 - DNA, 75 bp, synthetic construct
  source 1..75: mol_type = other DNA
acgcagaaaaccaatattttgtcgatccgtgcaagctgctactgactaccccaggcattgatgcacgtaacggcg

SEQ ID NO: 169069 - DNA, 75 bp, synthetic construct
  source 1..75: mol_type = other DNA
ttatgtcaatcagggtaacagcgcctttgattgccccggtcatcagggcggcgagtttttccgtcgccatccggc

SEQ ID NO: 169070 - DNA, 75 bp, synthetic construct
  source 1..75: mol_type = other DNA
cgacaacgcgaagcagtgccgcatctggcgcagccagataaacgggctgctggacgaacgggaaggattacagaa

SEQ ID NO: 169071 - DNA, 75 bp, synthetic construct
  source 1..75: mol_type = other DNA
cgttgctggtaacccgcgtgttgtgaaagccatgctggcgaacatgcgtgacgagttaagcgacgctctgaagcg

SEQ ID NO: 169072 - DNA, 75 bp, synthetic construct
  source 1..75: mol_type = other DNA
tggaaggcgctcaggtggcatcaccggcgctcaccgaattacgggcaaacccaacggcacgcaccgcgttatggc

SEQ ID NO: 169073 - DNA, 75 bp, synthetic construct
  source 1..75: mol_type = other DNA
atttgtgggaggcacccctgccgatgccaccaataacagccgtcggatgcaagcaatcaccctcggcggtaaccc

SEQ ID NO: 169074 - DNA, 75 bp, synthetic construct
  source 1..75: mol_type = other DNA
aattggcagccaccagcacaaggcgatattgacgctggattggatctggcatcgttgctacgtcatcccctggta

SEQ ID NO: 169075 - DNA, 75 bp, synthetic construct
  source 1..75: mol_type = other DNA
tgacaacgcatccgtcgacagcggtcattcagactcagttgccgccactggcacccgctctggcacagcgaccgg

SEQ ID NO: 169076 - DNA, 75 bp, synthetic construct
  source 1..75: mol_type = other DNA
gatttaccaggcaagacgcattcgtctcgcccgtaaattcctgaacggaaaaaaaccggaagaagggctgaacgc

SEQ ID NO: 169077 - DNA, 75 bp, synthetic construct
  source 1..75: mol_type = other DNA
ttgaaaaattaaagcagcgaggctgtgcggttatttatatctctcatcgcatggatgaaattatgcggatttcag

SEQ ID NO: 169078 - DNA, 75 bp, synthetic construct
  source 1..75: mol_type = other DNA
ctcgcggacctgggcataccactagacccactagaaatggtcggcaatatgtcgatggcacataggcaactggta

SEQ ID NO: 169079 - DNA, 75 bp, synthetic construct
  source 1..75: mol_type = other DNA
tcaacatgggatggtatggaaatcaagcaaaaacaacaaaaaaattcttgctgaaacgaattggtataaaaaaat

SEQ ID NO: 169080 - DNA, 75 bp, synthetic construct
  source 1..75: mol_type = other DNA
ttgaacgtgtcgaagcgttaaaactggcgattcgtaacggtgaactaaaaatggacaccggcaaaattgccgatg

SEQ ID NO: 169081 - DNA, 75 bp, synthetic construct
  source 1..75: mol_type = other DNA
atgccgttaccaacttcgaacactacctgcaaccactacctgcaacagcatcctgaactgccgcagaagttgatt

SEQ ID NO: 169082 - DNA, 75 bp, synthetic construct
  source 1..75: mol_type = other DNA
taaagaacacttcccacgcgtttgtatgaatccacaggaagccaactacgcctacttgcgcggtgaggtggaact

SEQ ID NO: 169083 - DNA, 75 bp, synthetic construct
  source 1..75: mol_type = other DNA
gtggaatattttggcgaaatgctcttccgctccgacttgtgtaatgccgacgttgcaatgggcgatctactgatt

SEQ ID NO: 169084 - DNA, 75 bp, synthetic construct
  source 1..75: mol_type = other DNA
tggaagaaggcattaacctgctgccaggttttgcgccggaattacagggggtctacatcgaagaacatgacggtc

SEQ ID NO: 169085 - DNA, 75 bp, synthetic construct
  source 1..75: mol_type = other DNA
gggctaattttcgtgaggagttggtgcgttggtatcggtatcgttcatcgtccagtttgccgcttgatgagttgt

SEQ ID NO: 169086 - DNA, 75 bp, synthetic construct
  source 1..75: mol_type = other DNA
gaaggtagcccactggtggtaaagcgcattacgccggtggttgaacgccagttgatgctggtgcgcaggaagaac

SEQ ID NO: 169087 - DNA, 75 bp, synthetic construct
  source 1..75: mol_type = other DNA
ccgcaggcatcggcatcagtattcttcccgcactggcgctaccattgcctgaaggtagcccactggtggtaaagc

SEQ ID NO: 169088 - DNA, 75 bp, synthetic construct
  source 1..75: mol_type = other DNA
gatccgcgtttttcaccgcgggacaccacgacgctacagccaggcatgttactgaccgtggagccggggatttat

SEQ ID NO: 169089 - DNA, 75 bp, synthetic construct
  source 1..75: mol_type = other DNA
ttgtcgccagcggctggcgtggggcgctgccgcacggtaaagccagcgacaagattgttgcagcgggcgagtttg

SEQ ID NO: 169090 - DNA, 75 bp, synthetic construct
  source 1..75: mol_type = other DNA
tagccgtgaaagtgcgcacattctggtggattcgcgctattacgcggatgtagaagcccgcacgcaaggttacca

SEQ ID NO: 169091 - DNA, 75 bp, synthetic construct
  source 1..75: mol_type = other DNA
catctgtgtgattacattctgtttgattccgcgtgggtcggttatgaacaatttatcccgatgatggcggatagc

SEQ ID NO: 169092 - DNA, 75 bp, synthetic construct
  source 1..75: mol_type = other DNA
tggcacggctttgaaggatatgccgcggatcagtattttgttgatccgtgcaagctgttactcactacaccaggt

SEQ ID NO: 169093 - DNA, 75 bp, synthetic construct
  source 1..75: mol_type = other DNA
ttcgccggagctgcaaggtgtttatagcgaaaccgatgcggatggcatgaaacggttgtacggttatgtgttgaa

SEQ ID NO: 169094 - DNA, 75 bp, synthetic construct
  source 1..75: mol_type = other DNA
agagaaagcaggaacctaacagctatacaagccggggttaagtctctatatggcggcagggctaagatctcatca

SEQ ID NO: 169095 - DNA, 75 bp, synthetic construct
  source 1..75: mol_type = other DNA
atgctggcaaaagataagactaacctaaagattgaagaaatacggatgcataaacatcatgagattcacagggtt

SEQ ID NO: 169096 - DNA, 75 bp, synthetic construct
  source 1..75: mol_type = other DNA
cttctcgttttactgaaaggttccataatcgttttaagataacaccaagagagctaagaaaagcgtccagagagt

SEQ ID NO: 169097 - DNA, 75 bp, synthetic construct
  source 1..75: mol_type = other DNA
ttctactgctaaccaggactccccgctgatgggtgaagctatttctggcgcttccggcttcccgattctgggcct

SEQ ID NO: 169098 - DNA, 75 bp, synthetic construct
  source 1..75: mol_type = other DNA
catcgtgcggtggccacagccacgttgaaggagaacacagtgacggtaaacgcacttgagaaaggaacaacgtcg

SEQ ID NO: 169099 - DNA, 75 bp, synthetic construct
  source 1..75: mol_type = other DNA
cctgaaaaagagcttgagcctcttataaaaatgtgcgcagagaaaggcgaacagagtcgcgctattcttaacgct

SEQ ID NO: 169100 - DNA, 75 bp, synthetic construct
  source 1..75: mol_type = other DNA
attggatttctcggacattatcctgatttatatgaggttgttgggggctataaagatctgaagaaagctatagcg

SEQ ID NO: 169101 - DNA, 75 bp, synthetic construct
  source 1..75: mol_type = other DNA
gctgccgtggtgctggcacacaatcacccgtccggtgaaattacacccagtaaggcagaccggcttatcactgag

SEQ ID NO: 169102 - DNA, 75 bp, synthetic construct
  source 1..75: mol_type = other DNA
ccgttactagttcaacgatggatgaatacatggttgaaattacgcctggaaattacatacctccagattgctggg

SEQ ID NO: 169103 - DNA, 75 bp, synthetic construct
  source 1..75: mol_type = other DNA
gccgtggtactggcacacaatcacccgtccggtgaagtcacacccagtaaggcagaccggcttatcaccgaacgt

SEQ ID NO: 169104 - DNA, 75 bp, synthetic construct
  source 1..75: mol_type = other DNA
tccgggtactgtatctgaataaccagaatcagctgattgccggtgaaaccctcttcaccggcaccatcaaccgca

SEQ ID NO: 169105 - DNA, 75 bp, synthetic construct
  source 1..75: mol_type = other DNA
atgcaacagatttcctttctgccaggagagatgacgcccggcgagcgcagcctcattcaacgggccctgaaaatc

SEQ ID NO: 169106 - DNA, 75 bp, synthetic construct
  source 1..75: mol_type = other DNA
atgcaacagctttcctttctgcctggagagatgacgcccggcgagcgcagcctcattcagcgggccctgaaaacc

SEQ ID NO: 169107 - DNA, 75 bp, synthetic construct
  source 1..75: mol_type = other DNA
gatttccggggcggttcacatagtctaactgttgataataatcagataatattatttccctgtggatatgaattt

SEQ ID NO: 169108 - DNA, 75 bp, synthetic construct
  source 1..75: mol_type = other DNA
atgcttctaccagccctttctatccgctgtttgctgcactggatgttaacgccaaaattcatgaaggggagagtg

SEQ ID NO: 169109 - DNA, 75 bp, synthetic construct
  source 1..75: mol_type = other DNA
ctcttcaccggcaccatcaaccgcacggaagttcatccccgggaagtaattaaacgtgccctgtaccacaatgcc

SEQ ID NO: 169110 - DNA, 75 bp, synthetic construct
  source 1..75: mol_type = other DNA
gaatcagctgattgccggtgaaaccctcttcactggcaccatcaaccgcacagaagtccatccccgggaggtgat

SEQ ID NO: 169111 - DNA, 75 bp, synthetic construct
  source 1..75: mol_type = other DNA
gcgtggccttcacctccacccgtgcagcacgggaatggctgattctgaagggcgtgtttgaccggattgaggaaa

SEQ ID NO: 169112 - DNA, 75 bp, synthetic construct
  source 1..75: mol_type = other DNA
agcgggaaaaaattaaggggaaggttgttgagctcgtgcaccagagtgggcgcgagacgttacgacaactggaag

SEQ ID NO: 169113 - DNA, 75 bp, synthetic construct
  source 1..75: mol_type = other DNA
tccggaccttatctggtcattaccagacggagaaatacgccgctacgacaggcgtcagaacatgatttgccgtga

SEQ ID NO: 169114 - DNA, 75 bp, synthetic construct
  source 1..75: mol_type = other DNA
agctgaagaaaaaaacacctgtggttgatccggaccttatctggtcgttaccagacggagaaatacgtcgttatg

SEQ ID NO: 169115 - DNA, 75 bp, synthetic construct
  source 1..75: mol_type = other DNA
gggaatggctgattctgaacatggcgggactggagcgggaagagttccgggtgctgtatctgaataaccagaatc

SEQ ID NO: 169116 - DNA, 75 bp, synthetic construct
  source 1..75: mol_type = other DNA
gttgccagtggcgatgtatacaattctggctacgggttatttccctctgaacaggctcgtaaggactggcaaaac

SEQ ID NO: 169117 - DNA, 75 bp, synthetic construct
  source 1..75: mol_type = other DNA
gagtgccggaagagtgaggttatgcagcgcgtgttggcgttttatcaggggaaatttcaggaggtgatgctgtga

SEQ ID NO: 169118 - DNA, 75 bp, synthetic construct
  source 1..75: mol_type = other DNA
gacggagaaatacgccgctacgacaggcgtcaaaacataatctgtagcgagtgccggaagagcgaagctatgcag

SEQ ID NO: 169119 - DNA, 75 bp, synthetic construct
  source 1..75: mol_type = other DNA
gttgccagtggggatgtatacaactctggctacgggttattcccgtctgaacaggctcgtaaggactggcaaaac

SEQ ID NO: 169120 - DNA, 75 bp, synthetic construct
  source 1..75: mol_type = other DNA
tcttgaactcgtacgccagagtgggcgcgagacgttacgacaactggaagctaaaactggggcaacaagatatct

SEQ ID NO: 169121 - DNA, 75 bp, synthetic construct
  source 1..75: mol_type = other DNA
gtgccggaatagcgatgttatgcagcgagttttgatgttttacaggggcaataaagggtcagtaaaaacgatatg

SEQ ID NO: 169122 - DNA, 75 bp, synthetic construct
  source 1..75: mol_type = other DNA
ggcgtctaaacataatctgtcgcgagtgccggaagagcgaagttatgcggcgtgtgttgaacttttatcatgcca

SEQ ID NO: 169123 - DNA, 75 bp, synthetic construct
  source 1..75: mol_type = other DNA
ggcgtcaaaacataatctgtcgcgagtgctggaagagtgaagctatgcagcgtgtactggctttctatcagggga

SEQ ID NO: 169124 - DNA, 75 bp, synthetic construct
  source 1..75: mol_type = other DNA
atttaaaatactattattcaatgcaagccaggcaaaatcttaaattagggaaaaataaaaccggattcacaatcg

SEQ ID NO: 169125 - DNA, 75 bp, synthetic construct
  source 1..75: mol_type = other DNA
ctgggcctggtggatatccgggtgccggaccatctgatagtcggtggcaaccaggttttctcctttgccgaacat

SEQ ID NO: 169126 - DNA, 75 bp, synthetic construct
  source 1..75: mol_type = other DNA
tgtttgatcactggtttacctcgctcaacgataccgacagggccagcgtgcttgcagcgctgttggtcctgcggg

SEQ ID NO: 169127 - DNA, 75 bp, synthetic construct
  source 1..75: mol_type = other DNA
gtaaaaacatagatatagcagctacatcagcagcatgtttttcagaagataactctacgattatattttcttcaa

SEQ ID NO: 169128 - DNA, 75 bp, synthetic construct
  source 1..75: mol_type = other DNA
ggaaaaacattgatatagcggcaacatcagcagcgtgtttttcagaagataacgccacaataatttttgcttcaa

SEQ ID NO: 169129 - DNA, 75 bp, synthetic construct
  source 1..75: mol_type = other DNA
ttgttgggagcaactaaaaacatctgtttcccgaggcttctcaactaaaattcaggaacacttagcaatgggcgt

SEQ ID NO: 169130 - DNA, 75 bp, synthetic construct
  source 1..75: mol_type = other DNA
cattataagcgcatcgctacaagcacaagtgattcagatccggttaatgcttctactttccgaatcaaagcgctc

SEQ ID NO: 169131 - DNA, 75 bp, synthetic construct
  source 1..75: mol_type = other DNA
tcggtaaatcttacgttgctcaaacgctgagtcagtatttccttcattataagcgcatcgctacaagtacaagcg

SEQ ID NO: 169132 - DNA, 75 bp, synthetic construct
  source 1..75: mol_type = other DNA
agacccagggctattttcttatcgaaaagaacgattatgagcagagaactgcgcgacgtcccccctggtataaaa

SEQ ID NO: 169133 - DNA, 75 bp, synthetic construct
  source 1..75: mol_type = other DNA
ttggccgtcctgttttcctgcataccatcattatggcggggcaggagctgcctgatacgctgaacgggtttaaat

SEQ ID NO: 169134 - DNA, 75 bp, synthetic construct
  source 1..75: mol_type = other DNA
aaggttttatgaagtaatgatcccaattgcagaccgtgagtttgcggcgcacttggataaattgaagaaggagtg

SEQ ID NO: 169135 - DNA, 75 bp, synthetic construct
  source 1..75: mol_type = other DNA
ttaaatccctttgtgaaatggttaagggtacaaatgttaaagttgtcgcctggattaatgagttaaaaggaactc

SEQ ID NO: 169136 - DNA, 75 bp, synthetic construct
  source 1..75: mol_type = other DNA
acagcagtcacaagcggaagcgcgtgccaaccttgcacttgcagaagcggtaagcgcccagcaaaacgtagaaac

SEQ ID NO: 169137 - DNA, 75 bp, synthetic construct
  source 1..75: mol_type = other DNA
acctaatgagctacagcattttcaccccgagttaaaacttagtatctctggtattgcagcaatatctattgcttc

SEQ ID NO: 169138 - DNA, 75 bp, synthetic construct
  source 1..75: mol_type = other DNA
ttacctcaccgactcagtggagttgctgcccacagcattgatatccggactgaccttttgggccatcatctggaa

SEQ ID NO: 169139 - DNA, 75 bp, synthetic construct
  source 1..75: mol_type = other DNA
aagcagcagaaagagcaactggcactggtggggcagaatacagagctggcgaagctgaaataccagacagcgctg

SEQ ID NO: 169140 - DNA, 75 bp, synthetic construct
  source 1..75: mol_type = other DNA
atgtcaacgcggcagatcgtacagcttgctgattcccttgtcaaaggctgggaaaccagaattccggcaatgaaa

SEQ ID NO: 169141 - DNA, 75 bp, synthetic construct
  source 1..75: mol_type = other DNA
tgataggttttaaatattgtatgtcactgaccaccacgtatgactctagaactatgatttatcatagaataagaa

SEQ ID NO: 169142 - DNA, 75 bp, synthetic construct
  source 1..75: mol_type = other DNA
tatctgccgctgatgtttgccatggcgatccccatggggcttgccaagcgcaacaaagcggtcgctgcctttgcc

SEQ ID NO: 169143 - DNA, 75 bp, synthetic construct
  source 1..75: mol_type = other DNA
aagccgtcgaggcgaacacccgcgcgcgcggaaaatcaaaatacgatcacgagcttatcctacgtgcgctcggag

SEQ ID NO: 169144 - DNA, 75 bp, synthetic construct
  source 1..75: mol_type = other DNA
tatttcactcgttgaaatgatgaaccatatcaactatgaaagctgggaacaatttgattggcagaaaacaacaga

SEQ ID NO: 169145 - DNA, 75 bp, synthetic construct
  source 1..75: mol_type = other DNA
aaaggacctaaatggttccagctgtattttaacgcggatgctggtgttacccgaagtttactggagcgtgcaaaa

SEQ ID NO: 169146 - DNA, 75 bp, synthetic construct
  source 1..75: mol_type = other DNA
gccccgtcaggctagtgaaacagaggctgactacacagaaagaaaggcaaggcagaagctaaatgattttatcaa

SEQ ID NO: 169147 - DNA, 75 bp, synthetic construct
  source 1..75: mol_type = other DNA
ggcgatggtgcgttttaccccagcaggcggcattgaaatggtaaatggccatgaggtcgccggggcgctgaatat

SEQ ID NO: 169148 - DNA, 75 bp, synthetic construct
  source 1..75: mol_type = other DNA
ttactcctgaaaatctcgcattagcgttaacaggaaagtcagacctaccagtagacataaagctgcgaaatgttg

SEQ ID NO: 169149 - DNA, 75 bp, synthetic construct
  source 1..75: mol_type = other DNA
ccagaagtagcaacgtttgtggatgaactttactcctcaattataacagctggaacatacaaagcatcatctatt

SEQ ID NO: 169150 - DNA, 75 bp, synthetic construct
  source 1..75: mol_type = other DNA
aatgcataaaaatgaaatcagggaacttcaagccacaaaaagtgtgatatatgatttaaaatatattcttaataa

SEQ ID NO: 169151 - DNA, 75 bp, synthetic construct
  source 1..75: mol_type = other DNA
attgcctacacgccaattccctttgcctacaccctgattttgcatcgtacctatggcttttttgatggggtccag

SEQ ID NO: 169152 - DNA, 75 bp, synthetic construct
  source 1..75: mol_type = other DNA
ttgaagatggttctggattagtttacaataaggatttttttataggttatagtcctgagcgaatcaatcccggag

SEQ ID NO: 169153 - DNA, 75 bp, synthetic construct
  source 1..75: mol_type = other DNA
ttactcctgaaaatctcgcattagcattaacaggaaagtcagacctgccagtagagctaaagctgcgaaatattg

SEQ ID NO: 169154 - DNA, 75 bp, synthetic construct
  source 1..75: mol_type = other DNA
cctgacccgggcggcggatggctcgctgggtgtgcgcgcggtgggcagtatgaacggcagtgcgggtctggtgta

SEQ ID NO: 169155 - DNA, 75 bp, synthetic construct
  source 1..75: mol_type = other DNA
ctgcagcatggtacacgctgtaccagaatcaggagcaggccagggagtctgcgcgccagtatgcactgacgatag

SEQ ID NO: 169156 - DNA, 75 bp, synthetic construct
  source 1..75: mol_type = other DNA
agcgagccagagaacgcatgcgggagttgcagcagatccgcgacagcttccgccagaaggatgcggaccttcagt

SEQ ID NO: 169157 - DNA, 75 bp, synthetic construct
  source 1..75: mol_type = other DNA
tgttcggtaacgcattccttgagcttcggagcaatatgctcggcgaaccgcttaaattacggcacgccctggcga

SEQ ID NO: 169158 - DNA, 75 bp, synthetic construct
  source 1..75: mol_type = other DNA
agagattaattacccatggttgctggattatattgatcagttaggatatcaggggtggattggttgcgaatatat

SEQ ID NO: 169159 - DNA, 75 bp, synthetic construct
  source 1..75: mol_type = other DNA
gcagaaccaggaagatgtgaacaacctccgcaatgcgatgaaaagtgccaaaggccctggcaacttccgcaacct

SEQ ID NO: 169160 - DNA, 75 bp, synthetic construct
  source 1..75: mol_type = other DNA
gatatccgggtaccggaccatctgatagttggtggcagtcaggttttctcttttgcggaacacggtctgctttaa

SEQ ID NO: 169161 - DNA, 75 bp, synthetic construct
  source 1..75: mol_type = other DNA
taaggctgaccgccttattacggaacgtctggttcaggcgctggccctggtggatatccgggtgccggaccatct

SEQ ID NO: 169162 - DNA, 75 bp, synthetic construct
  source 1..75: mol_type = other DNA
gagaaatgacgcccggcgagcgcagtctcattcagcgggccctgaaaaccctggaccgtcatcttcatgaacccg

SEQ ID NO: 169163 - DNA, 75 bp, synthetic construct
  source 1..75: mol_type = other DNA
atggcgggactggagcgggaagagttccgggtgctgtatctgaacaaccagaatcagctgattgcaggtgaaacc

SEQ ID NO: 169164 - DNA, 75 bp, synthetic construct
  source 1..75: mol_type = other DNA
tggatatccgggtgccggaccatctgatagtcggtggcagccaggtattctcctttgccgaacatggtctgcttt

SEQ ID NO: 169165 - DNA, 75 bp, synthetic construct
  source 1..75: mol_type = other DNA
cgtctggtacaggcactgggcctggtggatatccgggtgccggaccatctgatagtcggtggcaaccaagttttc

SEQ ID NO: 169166 - DNA, 75 bp, synthetic construct
  source 1..75: mol_type = other DNA
taaggcagaccgcttattacggaacgtctggtacaggcactgggcctggtggatatccgggtgccggaccatctg

SEQ ID NO: 169167 - DNA, 75 bp, synthetic construct
  source 1..75: mol_type = other DNA
atggcgggactggagcgtgaagaattccgggtgctgtatctgaacaaccagaatcagctgattgccgttgaaacc

SEQ ID NO: 169168 - DNA, 75 bp, synthetic construct
  source 1..75: mol_type = other DNA
gaaccagttgattgcccacgaaaccctgtttgccggttctattagcagtaccgaggtacatccccgcgaggtggt

SEQ ID NO: 169169 - DNA, 75 bp, synthetic construct
  source 1..75: mol_type = other DNA
acccgtccggcgaagtcacccccagtaaggcagaccggcttattactgaacgtctggttcaggcactgggcctgg

SEQ ID NO: 169170 - DNA, 75 bp, synthetic construct
  source 1..75: mol_type = other DNA
gaatcagttgattgccggtgaaaccctcttcaccggcaccatcaaccgcacggaagtccatccccgggaggtgat

SEQ ID NO: 169171 - DNA, 75 bp, synthetic construct
  source 1..75: mol_type = other DNA
atgaaacagctttcctttttacccggcgaaatgacgccacaggaccggcgtcttatccagcgggcactcagggct

SEQ ID NO: 169172 - DNA, 75 bp, synthetic construct
  source 1..75: mol_type = other DNA
ttcccctttttaggtggtgagcttacccaacttacatttggctttattgcaatggtaggtggcttcgcatttact

SEQ ID NO: 169173 - DNA, 75 bp, synthetic construct
  source 1..75: mol_type = other DNA
atggctggactggagcgtgaagaattccgggtgctgtatctgaacaaccagaataagctgattgccggtgaaacc

SEQ ID NO: 169174 - DNA, 75 bp, synthetic construct
  source 1..75: mol_type = other DNA
gcagccgtggtgctggcacacaatcacccgtccggtgaagtcacacccagcaaggcagaccgccttatcacggaa

SEQ ID NO: 169175 - DNA, 75 bp, synthetic construct
  source 1..75: mol_type = other DNA
aaaaatgaaaaacttaaacaatttgcacaattagcccgtactttacatattggtgcctcttgtcatgctgcagta

SEQ ID NO: 169176 - DNA, 75 bp, synthetic construct
  source 1..75: mol_type = other DNA
ttgaagcaggtgcgaaaggatgcgtatggaaaaccagtcacccggcgaaactaaatcgtgctattgattcgatta

SEQ ID NO: 169177 - DNA, 75 bp, synthetic construct
  source 1..75: mol_type = other DNA
ctttattgctcctgcgttatatatattccatattatcatgtccggtctggccttaatggttatggcaatcctggg

SEQ ID NO: 169178 - DNA, 75 bp, synthetic construct
  source 1..75: mol_type = other DNA
gcaaggccagcagcgcgttaacgccacaacaggtcaaccgttccgctttgaattactgctttcgtcaggcagtaa

SEQ ID NO: 169179 - DNA, 75 bp, synthetic construct
  source 1..75: mol_type = other DNA
ttataatgcctggagccgtacgaacagctattttcagaataccgaatacgccgccagaaattaccccgacgctgc

SEQ ID NO: 169180 - DNA, 75 bp, synthetic construct
  source 1..75: mol_type = other DNA
cccggtacgcgtttaatttcaaccattttgattatgtgaaccccgccgcgccaaaaggtgggcagataacgttgt

SEQ ID NO: 169181 - DNA, 75 bp, synthetic construct
  source 1..75: mol_type = other DNA
gatatccgggtgccggaccatctgatagtcggtggcaaccaggttttctcctttgcggaacacggcctgctttaa

SEQ ID NO: 169182 - DNA, 75 bp, synthetic construct
  source 1..75: mol_type = other DNA
aagtcttcacacaaatctaccagccgccggtatccaaaggcgatggctacgatcgtgacaacctgttaaaagccg

SEQ ID NO: 169183 - DNA, 75 bp, synthetic construct
  source 1..75: mol_type = other DNA
attagaccgcgtattaacgtggaattattacatgttaccaatgtggtatatggcagaagaccggcttgcctggtg

SEQ ID NO: 169184 - DNA, 75 bp, synthetic construct
  source 1..75: mol_type = other DNA
gcgtggtatatggcgcgctataccagcgggaaaatgaaagcttttttttatattgcggtaatgttgccgatgtgg

SEQ ID NO: 169185 - DNA, 75 bp, synthetic construct
  source 1..75: mol_type = other DNA
cgcaccgctggcagacgtgactatgacgaatatcggctggcaggcagacagcgggtcgacggtgaaatccttgga

SEQ ID NO: 169186 - DNA, 75 bp, synthetic construct
  source 1..75: mol_type = other DNA
aagttaaaaaatcccaattacgggaaaaagctgacagtgaaatatcctggcgtcaggatgctgttgatgctgata

SEQ ID NO: 169187 - DNA, 75 bp, synthetic construct
  source 1..75: mol_type = other DNA
tttctgcgaaaaacctctcagcatgagagaagatgagaaagcttcccttgcggtgctaagggcggttaaagagaa

SEQ ID NO: 169188 - DNA, 75 bp, synthetic construct
  source 1..75: mol_type = other DNA
ggtgacaatgttcgtctgggagtggaatttgaaaaatccgcctttggtaaatataacgtggacaattctgtcaac

SEQ ID NO: 169189 - DNA, 75 bp, synthetic construct
  source 1..75: mol_type = other DNA
aatggtatatacaatgataaaaaccgattccctgttttttaccgtattggttcaggaactcagtatataaaaaaa

SEQ ID NO: 169190 - DNA, 75 bp, synthetic construct
  source 1..75: mol_type = other DNA
tgacggagatgaacaacctgaactatcgtatgggagacctgcgcaacactctcggtgaaagcgggacatgggcgc

SEQ ID NO: 169191 - DNA, 75 bp, synthetic construct
  source 1..75: mol_type = other DNA
aaaagtctgaccgagtataatcgggtctatcaatctgcattctcaccgaacttactcgaacgcccacgtctggaa

SEQ ID NO: 169192 - DNA, 75 bp, synthetic construct
  source 1..75: mol_type = other DNA
gccatggtggtgattatggggccaatctcgttctggggtaacgttgtccctcgcgcattcgagcgtattggcggt

SEQ ID NO: 169193 - DNA, 75 bp, synthetic construct
  source 1..75: mol_type = other DNA
attcaagaggtgtttcctaaagggttaagatctctatctttgattacttcgggttatgtaaaatatgatatgggg

SEQ ID NO: 169194 - DNA, 75 bp, synthetic construct
  source 1..75: mol_type = other DNA
acgaggtctttgagctggtgcgcagcggcaagattggtcggccccagatgataaaaatcacctcccgcgatccgg

SEQ ID NO: 169195 - DNA, 75 bp, synthetic construct
  source 1..75: mol_type = other DNA
gtgaatcggcggtgaaggtatataacagtcagaactgtatcatgaaaaatcctttgcctgattttgcgctacgct

SEQ ID NO: 169196 - DNA, 75 bp, synthetic construct
  source 1..75: mol_type = other DNA
gcgaagacgcattattggcccagcgtatcgctattgccgcgcagcaatcattaaaaagcgggctgccggtgaaaa

SEQ ID NO: 169197 - DNA, 75 bp, synthetic construct
  source 1..75: mol_type = other DNA
atgggatatgacctgcgtaaagccgagctaatccgcctctctcagcgctggctcgctaaacgtctggaggtaaac

SEQ ID NO: 169198 - DNA, 75 bp, synthetic construct
  source 1..75: mol_type = other DNA
atgcatctgttctgatactccaacacctgcaaccggcggtgggctgagtatggtcgacaggctgacggccatgag

SEQ ID NO: 169199 - DNA, 75 bp, synthetic construct
  source 1..75: mol_type = other DNA
ccagcagcgcgctttggctgcccccacaaatgccgcataagtttgttgcgacaggcaacgtacttttaaaaaccg

SEQ ID NO: 169200 - DNA, 75 bp, synthetic construct
  source 1..75: mol_type = other DNA
tttgatctccacgaacatggctaaagaactggcgatggtcgaacgcactgaacagggccgcgcaattcgccagta

SEQ ID NO: 169201 - DNA, 75 bp, synthetic construct
  source 1..75: mol_type = other DNA
accacagctttttcatgcgcctgaagatgaaaagcaactgcgtaaaatcatctggcgtttaatgcctggctatgc

SEQ ID NO: 169202 - DNA, 75 bp, synthetic construct
  source 1..75: mol_type = other DNA
gccgaatctccggcagaagacaacagcgcaaaatggacataccagccgaagccgatgcccggtttcctggtaccg

SEQ ID NO: 169203 - DNA, 75 bp, synthetic construct
  source 1..75: mol_type = other DNA
aatgaatactcagggaagcttcaatcagcaaaatgggcacctgtttattcagggccatccggttattcacgcaac

SEQ ID NO: 169204 - DNA, 75 bp, synthetic construct
  source 1..75: mol_type = other DNA
aaaaaacatcaactggaatggggggatatttttaccgggatgacaatgacatatacagacagtcatgccagcagt

SEQ ID NO: 169205 - DNA, 75 bp, synthetic construct
  source 1..75: mol_type = other DNA
ctttatttggttgggatacaactctaaataaatgggttctcgtgggagccctgactgccgggaatggtgctggag

SEQ ID NO: 169206 - DNA, 75 bp, synthetic construct
  source 1..75: mol_type = other DNA
gattgttcgtaaatggtaatgtccatatttcagttgagtgtgaaagcctgcataacacactgaatgacctgatta

SEQ ID NO: 169207 - DNA, 75 bp, synthetic construct
  source 1..75: mol_type = other DNA
cgccaattgcgtcgttaaccgtaatccgcagtacattgcgccaggcagttgccatgcgcagcattacgcttgctg

SEQ ID NO: 169208 - DNA, 75 bp, synthetic construct
  source 1..75: mol_type = other DNA
ttgcgggttttcactatttaacagcaaaattatggcccctaatgcttttggccttcctgcgtccctggccgcaag

SEQ ID NO: 169209 - DNA, 75 bp, synthetic construct
  source 1..75: mol_type = other DNA
gcacgtacatcaagcaggtactggatggtgaagagctgctggagctggactatctggccaacatcttccgagtcg

SEQ ID NO: 169210 - DNA, 75 bp, synthetic construct
  source 1..75: mol_type = other DNA
ttaccgcgacgcgatgctgtctgctgcgaacccgtataagtcgctggcgctgcagtgccgttccagcgtccagcg

SEQ ID NO: 169211 - DNA, 75 bp, synthetic construct
  source 1..75: mol_type = other DNA
ttaccgcgatgcgatgctgtctgccgcgaacccgtacaggtcgctggcactgcagtgtcgttccagcgtccagcg

SEQ ID NO: 169212 - DNA, 75 bp, synthetic construct
  source 1..75: mol_type = other DNA
cccggcgcaggcggtgaaggtgttcgcgccagccatgcgcaaacgggcgtcggtaatatcagcgacagtaattac

SEQ ID NO: 169213 - DNA, 75 bp, synthetic construct
  source 1..75: mol_type = other DNA
atcgtgcaaattgcgcctggcggtccggtcgaccaggccatcgccgccattgagtttggtaatgccggagtatta

SEQ ID NO: 169214 - DNA, 75 bp, synthetic construct
  source 1..75: mol_type = other DNA
atggaagtgattttgaaatcaaaaaatggtgtgcacgttcatctagatgctaatgattcaagaggcttgttaaat

SEQ ID NO: 169215 - DNA, 75 bp, synthetic construct
  source 1..75: mol_type = other DNA
tattcaaaggcgacaactgagcgccatcatcctaacgataaaggtatccctatgagcaatctgagccctgacttt

SEQ ID NO: 169216 - DNA, 75 bp, synthetic construct
  source 1..75: mol_type = other DNA
gtacaggttgatcgttactggcacaccatgcacggtaactggacgctgcaatacggtttcgccaaaccgtccgaa

SEQ ID NO: 169217 - DNA, 75 bp, synthetic construct
  source 1..75: mol_type = other DNA
tggtcatcagttattgagcggtgaagggaaagcgaaaaatgtgattacttgtccatatcacgcctgggcattcaa

SEQ ID NO: 169218 - DNA, 75 bp, synthetic construct
  source 1..75: mol_type = other DNA
ctcccggctggttttgacaagctggaaggcgaaatcaaatggaacagcttttaccgcgatgcgatgctgtctgcc

SEQ ID NO: 169219 - DNA, 75 bp, synthetic construct
  source 1..75: mol_type = other DNA
gagttgcccgccgggttcgacaaactggaaggcgaaatcaagtggaacagcttctatcgtgaggtgatgcgtcat

SEQ ID NO: 169220 - DNA, 75 bp, synthetic construct
  source 1..75: mol_type = other DNA
gaggaagttaaactccccgatgcctccatgattatgcaggaacacaaggcgctggggatggtgggtaaggtggaa

SEQ ID NO: 169221 - DNA, 75 bp, synthetic construct
  source 1..75: mol_type = other DNA
tttcacacggatgtgaacggcgcgccggaagagatgacggacagtgacgggaaaatcgtgtgggagacggggtat

SEQ ID NO: 169222 - DNA, 75 bp, synthetic construct
  source 1..75: mol_type = other DNA
gtacggtaataagagcgttccattcggtgcaattgtcacacacggagagaataaaaatggcagcattgtcgcgga

SEQ ID NO: 169223 - DNA, 75 bp, synthetic construct
  source 1..75: mol_type = other DNA
aatgacgaagtagtggcgctgagtgtcggcgcaaaagcgctggataatgccaaactacgcaaagatgtcctctca

SEQ ID NO: 169224 - DNA, 75 bp, synthetic construct
  source 1..75: mol_type = other DNA
ctaccgtttcacaggtagatattcagacggtacaggaacgcttacagcaaaatggcgtaaagtcttttaacaggg

SEQ ID NO: 169225 - DNA, 75 bp, synthetic construct
  source 1..75: mol_type = other DNA
agcaggccggagggaacagacagcctgtacatctacagggacccggggagttatgaaccgctggcgcgggtggat

SEQ ID NO: 169226 - DNA, 75 bp, synthetic construct
  source 1..75: mol_type = other DNA
atcggttacgccattccggcctttttatttgccatcttgctgattgtcttcttcgcaggcggcagctatttcgac

SEQ ID NO: 169227 - DNA, 75 bp, synthetic construct
  source 1..75: mol_type = other DNA
acgtggtgaccgcgcgtgcgaaaggggtaagtgaaaaaatattctctggaaacatgtgttccgcaacgccatgct

SEQ ID NO: 169228 - DNA, 75 bp, synthetic construct
  source 1..75: mol_type = other DNA
tgtatattttcaccctgattggcctgctgctgaatattgtcagtgatatcagctatacgctggtcgatccgcgta

SEQ ID NO: 169229 - DNA, 75 bp, synthetic construct
  source 1..75: mol_type = other DNA
ctgaatagcgcatttccgcactttatagaacagatggaattgatgctgctttctggtgagcttaacccccgccat

SEQ ID NO: 169230 - DNA, 75 bp, synthetic construct
  source 1..75: mol_type = other DNA
acagggtattatttctgaatacctccttgataaactactggacgaatcgcttattgataaagacaagggcaaaga

SEQ ID NO: 169231 - DNA, 75 bp, synthetic construct
  source 1..75: mol_type = other DNA
tttttttatgtttttaacgacgttaagtctttgttatgtgttggttttctgtccgtaattgcaggtgttttcaat

SEQ ID NO: 169232 - DNA, 75 bp, synthetic construct
  source 1..75: mol_type = other DNA
gccgattactttcacatcgatatcatggacggtcactttgtgccgaatctgacgctctcaccgttcttcgtaagt

SEQ ID NO: 169233 - DNA, 75 bp, synthetic construct
  source 1..75: mol_type = other DNA
cattatcaaagatgggcggattgttgatgcgcagcagctggctaaaacgttgttaccgtggagtcgcgaactgcc

SEQ ID NO: 169234 - DNA, 75 bp, synthetic construct
  source 1..75: mol_type = other DNA
gtttgcatttacaacagcaagaagcggtagcggttgcgatcgtgcggggcgcaaaagaatgctttttgcaacgct

SEQ ID NO: 169235 - DNA, 75 bp, synthetic construct
  source 1..75: mol_type = other DNA
ttagccgccaggccgcaagaaaaagcaccgggtcgttacgaattacagggcgacaatatctttatgaatgtcatg

SEQ ID NO: 169236 - DNA, 75 bp, synthetic construct
  source 1..75: mol_type = other DNA
ggagaaccgcataagcccgggtgtattgttgagtccgttgctgagattaagaaggtggtggtgaaggtgaatcgc

SEQ ID NO: 169237 - DNA, 75 bp, synthetic construct
  source 1..75: mol_type = other DNA
agctaaaagaaaacaaacttcatgcaatcactctggtatggcatgggaaaaatatcgcgctttatgggcgttgcg

SEQ ID NO: 169238 - DNA, 75 bp, synthetic construct
  source 1..75: mol_type = other DNA
caaagtgatgcaggcgtttccaggcgctttccctaatgcggaagtggtgggtaacccggtgcgtaccgatgtgct

SEQ ID NO: 169239 - DNA, 75 bp, synthetic construct
  source 1..75: mol_type = other DNA
tgctgctcaaatgaatcgacttgctcctataatacttaacaacctcgaggattttgaagcaataactttatctga

SEQ ID NO: 169240 - DNA, 75 bp, synthetic construct
  source 1..75: mol_type = other DNA
atggatgcgatcacggtcagaaagatgggaaagacagcctcgattaatgatgtcgatatgactgtgatcccggga

SEQ ID NO: 169241 - DNA, 75 bp, synthetic construct
  source 1..75: mol_type = other DNA
gttaattccttaggcttgtcgttgattttgctgattatcggcgtggccggttttattggcacgctggttgtttcg

SEQ ID NO: 169242 - DNA, 75 bp, synthetic construct
  source 1..75: mol_type = other DNA
gatggccatacccggactgatggccgtcattgccatcggtctgatgcttaccgggcatcacgtctggacggtctc

SEQ ID NO: 169243 - DNA, 75 bp, synthetic construct
  source 1..75: mol_type = other DNA
gaacgggaactgtcgctctatgcctcccacggagtggctgtgctgcaacatggagcactctggcaactgggttaa

SEQ ID NO: 169244 - DNA, 75 bp, synthetic construct
  source 1..75: mol_type = other DNA
ccattaaatgcagtgacattctttgctgcgattgcctgtgtggcatttaacttcggtggcacgattaccgtcttc

SEQ ID NO: 169245 - DNA, 75 bp, synthetic construct
  source 1..75: mol_type = other DNA
ctgctgattctgtcattggcgctttctacgacgattcgtcagccagagcagaaagtattgcgtgaggcgcatatt

SEQ ID NO: 169246 - DNA, 75 bp, synthetic construct
  source 1..75: mol_type = other DNA
ctgctgattctgtcactggcgctctctacgacgattcgtcagccagagcagaaagtgttgcgtgaggcgcatggc

SEQ ID NO: 169247 - DNA, 75 bp, synthetic construct
  source 1..75: mol_type = other DNA
gcctaaataatctggcaaaaaactacggtgtgatttacctcggtttcggtatcggcagcatttgtggttcgatta

SEQ ID NO: 169248 - DNA, 75 bp, synthetic construct
  source 1..75: mol_type = other DNA
atttttcgccctgctgattctgtcactggcgctctctacgacgattcgtcagccagaacagaaaatgttgcgtga

SEQ ID NO: 169249 - DNA, 75 bp, synthetic construct
  source 1..75: mol_type = other DNA
ctgttgattctggctctggcactctcaacgacgattcgccagcctgaacagaaagtattgcgtgaggcacatggc

SEQ ID NO: 169250 - DNA, 75 bp, synthetic construct
  source 1..75: mol_type = other DNA
ggagaaccgcataaaccgggatgcgttgttggcgaacctggtgagattaaaaaggtggtagtgaaggttaaggct

SEQ ID NO: 169251 - DNA, 75 bp, synthetic construct
  source 1..75: mol_type = other DNA
aacggtgaggaacggattctgtttggcacggcaggcactgcgcgtgagtgtgaagagttccaccatgaggatgat

SEQ ID NO: 169252 - DNA, 75 bp, synthetic construct
  source 1..75: mol_type = other DNA
acgtttaacactcaatcgcccgttgagaaaaaagcggagctgcacgagcaatacattgatatccagctgttatta

SEQ ID NO: 169253 - DNA, 75 bp, synthetic construct
  source 1..75: mol_type = other DNA
ctttggcggcactattaccgtctttccgtcactggtcagtgagttcttcggcctcaataacctggcgaaaaacta

SEQ ID NO: 169254 - DNA, 75 bp, synthetic construct
  source 1..75: mol_type = other DNA
cagaagcggcaatgaagaaagtgactgaacttgaaacgctggtggcacaggccaaagaagcggataaaggcggca

SEQ ID NO: 169255 - DNA, 75 bp, synthetic construct
  source 1..75: mol_type = other DNA
atcgtaaatactgataataatgaggcgctcaatagattatgcctggagataactgacgccatgttaaacacaacg

SEQ ID NO: 169256 - DNA, 75 bp, synthetic construct
  source 1..75: mol_type = other DNA
cgatattccggaagaccaggtattactgaagaaagccctggacatcattgcggaaaaaatgaaggagaacgcgcc

SEQ ID NO: 169257 - DNA, 75 bp, synthetic construct
  source 1..75: mol_type = other DNA
tagcggttgtatcgccattgcctgtgcttatgctttcccggaagcggaagtcgacgcggtagacatttctcctga

SEQ ID NO: 169258 - DNA, 75 bp, synthetic construct
  source 1..75: mol_type = other DNA
gcgtgctggtgccgcgctcgccgattggtgaactgatcaacaataaatttgccggacttatcagcaagcaaccgc

SEQ ID NO: 169259 - DNA, 75 bp, synthetic construct
  source 1..75: mol_type = other DNA
gcagatgcaaccattgattggtcgcacaggcattgaatttggcaaaacattcaggggcaaagactgggaaattac

SEQ ID NO: 169260 - DNA, 75 bp, synthetic construct
  source 1..75: mol_type = other DNA
gggggcattgcatcggagttgatccctactatttgactcataaagcgcaagcgataggttatcatccagaagtca

SEQ ID NO: 169261 - DNA, 75 bp, synthetic construct
  source 1..75: mol_type = other DNA
ccgaccaggtcgatggcctctgtgtcagtcagcaggtcacttactcctgtgagcgtaaaaaagaaggtaacggtc

SEQ ID NO: 169262 - DNA, 75 bp, synthetic construct
  source 1..75: mol_type = other DNA
catcaccagggcatcacattatcggactggattcggaacatctgaatggaggcacagttccctggcataaacatc

SEQ ID NO: 169263 - DNA, 75 bp, synthetic construct
  source 1..75: mol_type = other DNA
atgaaactgcgaaaaacgcccgtacaggggcagggctttgttcggcctgaaaaccagaatctgcaaaatttcggc

SEQ ID NO: 169264 - DNA, 75 bp, synthetic construct
  source 1..75: mol_type = other DNA
gaaattatcccggttatttccggcgttattggcgggcgtgaaaccaatattgttagtgccagagcgttgcataag

SEQ ID NO: 169265 - DNA, 75 bp, synthetic construct
  source 1..75: mol_type = other DNA
tatcccggaagatatgcgcaccgcgcgtctgacctccagcgaaaaacaccgtattgttgagcgcgtgatccgccg

SEQ ID NO: 169266 - DNA, 75 bp, synthetic construct
  source 1..75: mol_type = other DNA
cgcactggcggttgctgaacagaacatcgaagaacacggtctgatccacaacgtcatcccgattcgttccgatct

SEQ ID NO: 169267 - DNA, 75 bp, synthetic construct
  source 1..75: mol_type = other DNA
ggacatgttgcgctggtcggttagccgcttcagcgcggcaaatatctggtacggtcacggcaccgataacccgtg

SEQ ID NO: 169268 - DNA, 75 bp, synthetic construct
  source 1..75: mol_type = other DNA
ggttgtccagctgtagcagtgatgaaaaagccctgggtaaggcaaaagagaaaaaactgacggtctatgtcgggg

SEQ ID NO: 169269 - DNA, 75 bp, synthetic construct
  source 1..75: mol_type = other DNA
gaaacttgcttacggcaacgaacactggttcatgagagtgaccacgccatttggtttaatttcaatggatgattc

SEQ ID NO: 169270 - DNA, 75 bp, synthetic construct
  source 1..75: mol_type = other DNA
cgccatccaggggtttaaaccggcagaggtgatccccggttataccgacttgccgccggaaagcgggtattacgg

SEQ ID NO: 169271 - DNA, 75 bp, synthetic construct
  source 1..75: mol_type = other DNA
gaattgatagccaatggtgctgttctatctgaattagataaacaagcacgcgccaagttgacagggaactatccg

SEQ ID NO: 169272 - DNA, 75 bp, synthetic construct
  source 1..75: mol_type = other DNA
gaagtttttgagtatactcagtaatgataaaaaagttaaagactataagccgcatctccaaaaattattttttat

SEQ ID NO: 169273 - DNA, 75 bp, synthetic construct
  source 1..75: mol_type = other DNA
agtagtattcgaagatattcctgctcaaagaaaatatcttgaaagtcatggtataaccactattattttaaccga

SEQ ID NO: 169274 - DNA, 75 bp, synthetic construct
  source 1..75: mol_type = other DNA
aggaacgatgtattccgcccaaagctgggagcttagcggacaaaacacgagcttaaatgttggcgcgggtgggat

SEQ ID NO: 169275 - DNA, 75 bp, synthetic construct
  source 1..75: mol_type = other DNA
gatgcaccggtaaatacaaaacaaggtgaaggggatattcattggtcatatgacgaaaaaacgggacttggttca

SEQ ID NO: 169276 - DNA, 75 bp, synthetic construct
  source 1..75: mol_type = other DNA
atggttcaacactgagctttaatcgtttcgggcaaggggggctgacgtcagatacgctggaggccactaacagtt

SEQ ID NO: 169277 - DNA, 75 bp, synthetic construct
  source 1..75: mol_type = other DNA
gcgggaacggcagctgcaccggaacggtggataacatcatctttaaccagctagtcgggggtagtactcgtttca

SEQ ID NO: 169278 - DNA, 75 bp, synthetic construct
  source 1..75: mol_type = other DNA
gatataaaaagcattttggttgccctcatattctgatgggcgatgtgaaagtaactgtttcagcaatgattgctt

SEQ ID NO: 169279 - DNA, 75 bp, synthetic construct
  source 1..75: mol_type = other DNA
cccggtttcaataaatgcggggttccatagtttcacaccgcaacttgatgtgttggagaccgacgttaataagca

SEQ ID NO: 169280 - DNA, 75 bp, synthetic construct
  source 1..75: mol_type = other DNA
atgaatttacgcccggtactgctgatgcttgagcggctgaaagagtgggtgatgctggatatctacctggtcggc

SEQ ID NO: 169281 - DNA, 75 bp, synthetic construct
  source 1..75: mol_type = other DNA
atcgccagtattctggtaccgtttactaaagtgatcgtcatgttcactttactgttgagtattcattttaaatgc

SEQ ID NO: 169282 - DNA, 75 bp, synthetic construct
  source 1..75: mol_type = other DNA
actcaattgctttcggggataacgataccggcctgaaacagaatggtgatggcctgctggatgtttatgccaata

SEQ ID NO: 169283 - DNA, 75 bp, synthetic construct
  source 1..75: mol_type = other DNA
ggcggcgctgttagcgtcaatcgttttgttgttacctgccaacctgttgcctatttctatcatttatctgaacgg

SEQ ID NO: 169284 - DNA, 75 bp, synthetic construct
  source 1..75: mol_type = other DNA
tgaaagagtgggtaatgctggatatctacctggtcggcattggcgttgcttctataaaggtacaggattatgccc

SEQ ID NO: 169285 - DNA, 75 bp, synthetic construct
  source 1..75: mol_type = other DNA
ctcttttgtagcgctggttattttaacgacggtgacgttgtcacatcttaatgttgaacagttgtgggagcgatt

SEQ ID NO: 169286 - DNA, 75 bp, synthetic construct
  source 1..75: mol_type = other DNA
gaaccgcggcggcgacaccatgacaggtaagctgatcctccttcagacctcaggatttggtgttaatactgacaa

SEQ ID NO: 169287 - DNA, 75 bp, synthetic construct
  source 1..75: mol_type = other DNA
ggcaaaacgtcgcgttccgtcaacaaggaaagtcaacggtaaggaactgtcggaagatattacaatcaccgatat

SEQ ID NO: 169288 - DNA, 75 bp, synthetic construct
  source 1..75: mol_type = other DNA
aggaaaccggaagtaattcggcagataacatcggcggcgtgtattaccgaccgcttcagaaactgattaacggca

SEQ ID NO: 169289 - DNA, 75 bp, synthetic construct
  source 1..75: mol_type = other DNA
tattaatgtgtttgcagagggacacaacgtctttcgttttacaaaaaacggtgtgctggcattagaaaatctctc

SEQ ID NO: 169290 - DNA, 75 bp, synthetic construct
  source 1..75: mol_type = other DNA
aaagtgtggactgggccaatgcacgcccggtgcaggttctgattaatggtgtctggcgaaatgtagcgagtttgt

SEQ ID NO: 169291 - DNA, 75 bp, synthetic construct
  source 1..75: mol_type = other DNA
ttggatagtggcgatatggtgatcccctgtgatgtgcctattcgtaccggtaatcgttttattatgacgtggcag

SEQ ID NO: 169292 - DNA, 75 bp, synthetic construct
  source 1..75: mol_type = other DNA
ccgttatttaaatcattccccaacgatccgtcttcccgtcgcattggtggttatttgatgtggatgatggtcatt

SEQ ID NO: 169293 - DNA, 75 bp, synthetic construct
  source 1..75: mol_type = other DNA
ggttggggttatcttgcttatcattgcgccgtggctttcctacgtgctgtacaaaccggaaatcacacacagtga

SEQ ID NO: 169294 - DNA, 75 bp, synthetic construct
  source 1..75: mol_type = other DNA
gattcaaactggtattaatggttcattgttagaacaacgattcacatatagcataatgaaaggtctaagaaatca

SEQ ID NO: 169295 - DNA, 75 bp, synthetic construct
  source 1..75: mol_type = other DNA
aagaagcggaagcgggcaacaccaaatacgcaaaagtcgacggcaccaaaccggttgctgaagttcgcgcggctc

SEQ ID NO: 169296 - DNA, 75 bp, synthetic construct
  source 1..75: mol_type = other DNA
ccgctgtttaaatcattccccaacgatccgtccgcgcgtcgtattggcggctatttgatgtggatgatggtcatt

SEQ ID NO: 169297 - DNA, 75 bp, synthetic construct
  source 1..75: mol_type = other DNA
atggctaatggcctgacccgttctggctttatcgactggttcgccagcaccatgagtacgcacctggaaggtttc

SEQ ID NO: 169298 - DNA, 75 bp, synthetic construct
  source 1..75: mol_type = other DNA
aatatctatcccgtcacgccaggattgattgatcagctgcgcgccaaaccgattatgtcgcaggctaacccggag

SEQ ID NO: 169299 - DNA, 75 bp, synthetic construct
  source 1..75: mol_type = other DNA
ggcattctggatgtttatgcgaatggacagcatgtatttcgtttccagaatggtgtggcgatagcgttaaaaaat

SEQ ID NO: 169300 - DNA, 75 bp, synthetic construct
  source 1..75: mol_type = other DNA
atgttgtgtggtgagtttggtcgggagcccttttcaggcggcgtggtggacgaaggttttatcagcggggatatt

SEQ ID NO: 169301 - DNA, 75 bp, synthetic construct
  source 1..75: mol_type = other DNA
atgattaaacacacggaaatcagacaaagaataaaaataagcgacgacgcttcagtaataatctgtaatcagaac

SEQ ID NO: 169302 - DNA, 75 bp, synthetic construct
  source 1..75: mol_type = other DNA
cattaacatttaatattcctcaacgctggctaagccagggggattggctcaaaacatcaccgcaatcatgggatg

SEQ ID NO: 169303 - DNA, 75 bp, synthetic construct
  source 1..75: mol_type = other DNA
gaccatcatggatgcgattaatgctgcaggcggtctgacggctgatgcggactggcgcaacgtggtacacacccg

SEQ ID NO: 169304 - DNA, 75 bp, synthetic construct
  source 1..75: mol_type = other DNA
aagatgaaatccagaaaatggtacgcgacgcagaagctaacgccgaagctgaccgtaagtttgaagagctggtac

SEQ ID NO: 169305 - DNA, 75 bp, synthetic construct
  source 1..75: mol_type = other DNA
atgggtaaaataattggtatcgacctgggtactactaactcttgtgtagcgattatggatggcaccactcctcgc

SEQ ID NO: 169306 - DNA, 75 bp, synthetic construct
  source 1..75: mol_type = other DNA
agcgggttaaaactggatgaagacaaaaagcgagtgatggaaataatgcagcaggtctgggaggacgatagctgg

SEQ ID NO: 169307 - DNA, 75 bp, synthetic construct
  source 1..75: mol_type = other DNA
tacccaggatggtgaaactctggttggtaagccggctaaacgtcaggcagtgacgaacccgcaaaacaccctgtt

SEQ ID NO: 169308 - DNA, 75 bp, synthetic construct
  source 1..75: mol_type = other DNA
gaagaagcaggcgacaaactgccggctgacgacaaaactgctatcgagtctgcactgactgcactggaaactgct

SEQ ID NO: 169309 - DNA, 75 bp, synthetic construct
  source 1..75: mol_type = other DNA
tgcaaacaacgcgaaagatgacgatgttgtcgacgctgaatttgaagaagtcaaaagacaaaaaataatcgccct

SEQ ID NO: 169310 - DNA, 75 bp, synthetic construct
  source 1..75: mol_type = other DNA
ggttggatatcactccgctgactgccgatcacatttctttgcgttgccatcaaaacgtcaccgctgaacgctggc

SEQ ID NO: 169311 - DNA, 75 bp, synthetic construct
  source 1..75: mol_type = other DNA
agttgcaggatattgcaacggatttaccgcgatttacccacgcattagacgaactttcccgtcgtctggggctgg

SEQ ID NO: 169312 - DNA, 75 bp, synthetic construct
  source 1..75: mol_type = other DNA
aaaacaacttccagtaaggttagcaaacagtctgtattcaagaccttagcaaataaaattgaaaaagataaggtt

SEQ ID NO: 169313 - DNA, 75 bp, synthetic construct
  source 1..75: mol_type = other DNA
aagagcagaaaattagccagatgcttttagaagcacttgaatccgagctttaccgaaatttgcgccccctctacc

SEQ ID NO: 169314 - DNA, 75 bp, synthetic construct
  source 1..75: mol_type = other DNA
accggactgcaactggatgaagaaagaaaacatgtgatgaaaattatgcagaaggtgtgggaggacgacagctgg

SEQ ID NO: 169315 - DNA, 75 bp, synthetic construct
  source 1..75: mol_type = other DNA
aggtagctctaacggtgtggaactgaccggactgcaactggatgaagaaagaaaacaagtgatgaaaattatgca

SEQ ID NO: 169316 - DNA, 75 bp, synthetic construct
  source 1..75: mol_type = other DNA
gcgtctttcaggctgacgggcagtctgtggcacagacggcggtggaggccggacgtgtgttgcaaggcagtaaca

SEQ ID NO: 169317 - DNA, 75 bp, synthetic construct
  source 1..75: mol_type = other DNA
gtctgaacgccagaagaatcctcacgccatcactgccggcgtcacctggacgccgttcccgctgctgaccgccgg

SEQ ID NO: 169318 - DNA, 75 bp, synthetic construct
  source 1..75: mol_type = other DNA
tgggctggccggattgcagttcttttttcaggttagcccggtatttgccggcgtctttcaggctgacgggcagtc

SEQ ID NO: 169319 - DNA, 75 bp, synthetic construct
  source 1..75: mol_type = other DNA
tgaaaaagggtccgcgttacaccacgattctgctgtcgattgtggcgttgagcgtggtctgctcgctgctgggag

SEQ ID NO: 169320 - DNA, 75 bp, synthetic construct
  source 1..75: mol_type = other DNA
aatatgccgtaaccgcttatgccagccagcgctatcttgagaaacatcccattagccgtcctgacgaactcgaac

SEQ ID NO: 169321 - DNA, 75 bp, synthetic construct
  source 1..75: mol_type = other DNA
ttttccggcgacaatgcagtctaaatttaatcccttacagcaggtagcctatgtcggggtgatgtatggattact

SEQ ID NO: 169322 - DNA, 75 bp, synthetic construct
  source 1..75: mol_type = other DNA
atgttggtgtcatgtatggattgctgccgttgttactattgacggggctgctgtgtctctatccgcaagccgtgg

SEQ ID NO: 169323 - DNA, 75 bp, synthetic construct
  source 1..75: mol_type = other DNA
attttgctctggcatttataagcctcttttttatcttcggtcatctttatctttgcaccacggggcgtacgccac

SEQ ID NO: 169324 - DNA, 75 bp, synthetic construct
  source 1..75: mol_type = other DNA
atgcgaattgagataatgatcgataaagagcaaaagattagccaggtaaccctggacgctctggagtccgagctt

SEQ ID NO: 169325 - DNA, 75 bp, synthetic construct
  source 1..75: mol_type = other DNA
caactggacgaagaaaggaaacaagtgatgaaaattatgcagaaggtgtgggaagacgacagctggctgcattaa

SEQ ID NO: 169326 - DNA, 75 bp, synthetic construct
  source 1..75: mol_type = other DNA
caactggacgaagaaagaaaacaagtgatgaaaattatgcagaaggtgtgggaagacgacagctggctgcattga

SEQ ID NO: 169327 - DNA, 75 bp, synthetic construct
  source 1..75: mol_type = other DNA
cgtcggcaaatccagcctgctgaacgcgttgctggggctgcaaaaagagatcctgaccaacgatgtctctgacaa

SEQ ID NO: 169328 - DNA, 75 bp, synthetic construct
  source 1..75: mol_type = other DNA
tcaccagcgtcgtcttaaaacgtctaaggagaagcccgactacgacgacaatttgtttggcgagcctgatgaagg

SEQ ID NO: 169329 - DNA, 75 bp, synthetic construct
  source 1..75: mol_type = other DNA
tccgcgagttacgcctcaatatatcgaaagcatcattcttgaagagcatttctttactgcttatgacggcattcg

SEQ ID NO: 169330 - DNA, 75 bp, synthetic construct
  source 1..75: mol_type = other DNA
tgaaatccggtctgccgctgcgtaacggtctggcccgtctggtggcggtgatgtacatgctgaaatcctttaccg

SEQ ID NO: 169331 - DNA, 75 bp, synthetic construct
  source 1..75: mol_type = other DNA
atggaagccccgcaaatccccgaactgatgtttgatttgctcgacgggctgggaaaaggcgtggcggtctgtgaa

SEQ ID NO: 169332 - DNA, 75 bp, synthetic construct
  source 1..75: mol_type = other DNA
tggcaggcattctgcgcaatgccgccgacggcatcacgcgtgatttttttatccttgccgaagagatggaagaac

SEQ ID NO: 169333 - DNA, 75 bp, synthetic construct
  source 1..75: mol_type = other DNA
atgaacgaccagcaaatcgaaaaagaaatcgttgagaaaggcaaaacggcaacgcgtgtaacacctgagaaaatt

SEQ ID NO: 169334 - DNA, 75 bp, synthetic construct
  source 1..75: mol_type = other DNA
acatacagcgtaaaaatcccagaccagcctgacgagctggagctgctgacattctgcgttctggtgctgaggaat

SEQ ID NO: 169335 - DNA, 75 bp, synthetic construct
  source 1..75: mol_type = other DNA
taacgcgaagaataaaaaaatggaggaagatttacacattcaactatttgagcgtacaactcgcaaggttacgtt

SEQ ID NO: 169336 - DNA, 75 bp, synthetic construct
  source 1..75: mol_type = other DNA
atgaacgaccagcaaatcgaaaaagaaatcgttgagaaaggcaaaaccgctccgcgaatcaccccgcagcacatc

SEQ ID NO: 169337 - DNA, 75 bp, synthetic construct
  source 1..75: mol_type = other DNA
tcgacaaattgttcgtgatgatgacgttgggcgatgaccgttcgatctaccgcacctacgttgatggtcgtctgg

SEQ ID NO: 169338 - DNA, 75 bp, synthetic construct
  source 1..75: mol_type = other DNA
tttacctggccacgctcggcggtgcgaaatctctgggccttgacgatttgattggcaactttttacctggcaaag

SEQ ID NO: 169339 - DNA, 75 bp, synthetic construct
  source 1..75: mol_type = other DNA
gcccgtccgctgtctgaacaatcagaacgtccttgtcgcggcaaatgccgacgcggtcgaagttcagttggcatg

SEQ ID NO: 169340 - DNA, 75 bp, synthetic construct
  source 1..75: mol_type = other DNA
aggccgcagaattactggtgacgtggcatacggttgacagtcacgcggagcactatggcatccgtctcggagaag

SEQ ID NO: 169341 - DNA, 75 bp, synthetic construct
  source 1..75: mol_type = other DNA
caacctgcgtgaggaagccggactgctcggcgtgaatatcgtgaccgatatcggtgaagcacagccccgcaatga

SEQ ID NO: 169342 - DNA, 75 bp, synthetic construct
  source 1..75: mol_type = other DNA
aacatggaccccaacgccaccagcgtagaagatcagttacccggtctgggcgcgaaagtgctggaagcctgcccg

SEQ ID NO: 169343 - DNA, 75 bp, synthetic construct
  source 1..75: mol_type = other DNA
aactagcggcccgctttaccacccgcacgcctgccaactggaagaacattgtcgataactatctcgagtgctatc

SEQ ID NO: 169344 - DNA, 75 bp, synthetic construct
  source 1..75: mol_type = other DNA
tggtatcgcccatttccataatctgctggcgcaggtgtttaaggactaatgacatcggcggcggtattttccgcc

SEQ ID NO: 169345 - DNA, 75 bp, synthetic construct
  source 1..75: mol_type = other DNA
tgagcttcaggaaacgctgaacgcggacgactttgccctgcaactggcagaggtgtgctttaaggcgcgtgcgct

SEQ ID NO: 169346 - DNA, 75 bp, synthetic construct
  source 1..75: mol_type = other DNA
atccttgccgaagagatggaagaacgcgatttgcattacgcctcggtactgcgcacccgcaagctgacggtggcg

SEQ ID NO: 169347 - DNA, 75 bp, synthetic construct
  source 1..75: mol_type = other DNA
atgtggcgatgaaccgcgagcgcgtcgccctgaaccgggaacaccccgacgaactggcacagatggtggatgatg

SEQ ID NO: 169348 - DNA, 75 bp, synthetic construct
  source 1..75: mol_type = other DNA
aggggcgcacgaaggaccagaacgcttcctccgtgaacgcccgccgccatggcgattttgctgtggcgctctgta

SEQ ID NO: 169349 - DNA, 75 bp, synthetic construct
  source 1..75: mol_type = other DNA
cgttcgacgccaccggtaacggcggctatctggcagaagccgcgctgctggcctttggcccggacatcatcgact

SEQ ID NO: 169350 - DNA, 75 bp, synthetic construct
  source 1..75: mol_type = other DNA
gccgggtgtgccattccgcagtccatgcaactggaaatgaaggaaaccgccagcaggaataacggcggcgcactg

SEQ ID NO: 169351 - DNA, 75 bp, synthetic construct
  source 1..75: mol_type = other DNA
acgtcattccgattcgttccgacttgttccgtgacttgccgaaagtgcagtacgacctgatcgtcactaacccgc

SEQ ID NO: 169352 - DNA, 75 bp, synthetic construct
  source 1..75: mol_type = other DNA
acatcttatggaacaatatccggatgttccgttcacctggctggagtttgataacggcggcgatggtgtgtttat

SEQ ID NO: 169353 - DNA, 75 bp, synthetic construct
  source 1..75: mol_type = other DNA
tcgtatccatggagtgcgtgacacccgtactattgaagagtgggtaaaagatttctcagagataggccaacattt

SEQ ID NO: 169354 - DNA, 75 bp, synthetic construct
  source 1..75: mol_type = other DNA
ccgaactccaacggcgtgcccagatcgggctcaacaaaggcgaagctcatcatgcgctgaagcgggcaatcagct

SEQ ID NO: 169355 - DNA, 75 bp, synthetic construct
  source 1..75: mol_type = other DNA
gcaggcacgatcccgggcgggtcgattgaaaacggcgttctgcatatcgagaaactcgaagccgccgcgccgaca

SEQ ID NO: 169356 - DNA, 75 bp, synthetic construct
  source 1..75: mol_type = other DNA
ttggccgtgccgctcgcgcaggcacgatcccgggcgggtcgattgaaaacggcgttctgcatatcgagaaactcg

SEQ ID NO: 169357 - DNA, 75 bp, synthetic construct
  source 1..75: mol_type = other DNA
tgaacgttaaaattgagcatgagatcatcatcaaagcggacaaagatgttgaagacctgcttaaaacccgtagcg

SEQ ID NO: 169358 - DNA, 75 bp, synthetic construct
  source 1..75: mol_type = other DNA
gagcggcaaaggttcgcaacaatccgttgaacaggcgtatgccgaagcggggcaatcgcagcataaagtgacgga

SEQ ID NO: 169359 - DNA, 75 bp, synthetic construct
  source 1..75: mol_type = other DNA
tgctcaggaagactgccgtaacggtttcctgcttgacggcttcccgcgtaccattccgcaggcagacgcgatgaa

SEQ ID NO: 169360 - DNA, 75 bp, synthetic construct
  source 1..75: mol_type = other DNA
attatggtttcgcatgatatgaaaaatctacgacaacaatgcgatatgggcatcttgttacgtgatggtaaatta

SEQ ID NO: 169361 - DNA, 75 bp, synthetic construct
  source 1..75: mol_type = other DNA
atggttggggtgtcggtctgggatttcatctcgccagcacatcgccgctgcgggccggacagctgtgaattgcca

SEQ ID NO: 169362 - DNA, 75 bp, synthetic construct
  source 1..75: mol_type = other DNA
agagaacattaataaacagttttgccagcagaaaccagtatctgcaactctggcggcatggctggcagcaaacgc

SEQ ID NO: 169363 - DNA, 75 bp, synthetic construct
  source 1..75: mol_type = other DNA
attttcatgaaattgtgattgtcgaacatggcacgggtattcatgtatttaatgggcagccctataccatcaccg

SEQ ID NO: 169364 - DNA, 75 bp, synthetic construct
  source 1..75: mol_type = other DNA
cgctactgccttgttcggctattcgtggtcttcaggttgttcggtcgagaatggtcgtttgacctgaaggacaga

SEQ ID NO: 169365 - DNA, 75 bp, synthetic construct
  source 1..75: mol_type = other DNA
tggtcttcaggttgttcggtcgagaatggtcgtttgacctgaaagacagaagccgtgaagacaaccaccaagacc

SEQ ID NO: 169366 - DNA, 75 bp, synthetic construct
  source 1..75: mol_type = other DNA
aaccattgcgtattacagcaggtgcgacagctggttgcacagatggaacagcaggaaggggaaaatgatttaccc

SEQ ID NO: 169367 - DNA, 75 bp, synthetic construct
  source 1..75: mol_type = other DNA
catagtgtggatttttttccgtctggtaacgcgtccgtggcgatagaaccccggctcccgcaggcggattttcct

SEQ ID NO: 169368 - DNA, 75 bp, synthetic construct
  source 1..75: mol_type = other DNA
cagctggttgcacagatggaacagcaggaaggggaaaatgatttaccctcgaccgccagtcgcgagatcttattt

SEQ ID NO: 169369 - DNA, 75 bp, synthetic construct
  source 1..75: mol_type = other DNA
tgctgtgcccgttcatcgattggtcgctggattaactggttcacgctgtcgggtgttgaaggcctgaagtcattg

SEQ ID NO: 169370 - DNA, 75 bp, synthetic construct
  source 1..75: mol_type = other DNA
tcgtggacaactacattatccacaaaagccgggaaacacagcgctggttgaaggagaacccgaagttcagggtca

SEQ ID NO: 169371 - DNA, 75 bp, synthetic construct
  source 1..75: mol_type = other DNA
catgagggggaaacctttctgcatcccctgaagggctatgtcgatctgaggggtaagctgctgctgccggggttc

SEQ ID NO: 169372 - DNA, 75 bp, synthetic construct
  source 1..75: mol_type = other DNA
atgccgatcatagtaccaataccccgtggcgaacgacgcctgatgcagaaagctattcataaaacgcgtgataaa

SEQ ID NO: 169373 - DNA, 75 bp, synthetic construct
  source 1..75: mol_type = other DNA
gctggcgaaatgcagtgcggaaaaccccgtgttttacgaagatgaagtggatattcatctcaacccgaaaatcgg

SEQ ID NO: 169374 - DNA, 75 bp, synthetic construct
  source 1..75: mol_type = other DNA
atggtaaacctccctcctgagctggggtcacctgatgtatgggctggtggaggtattgggctgattgcaggcctg

SEQ ID NO: 169375 - DNA, 75 bp, synthetic construct
  source 1..75: mol_type = other DNA
gtgccggaagagcgaagttatgcagcgtgtgctggcgttttatcagaatggttttcgagagaggcttggagatca

SEQ ID NO: 169376 - DNA, 75 bp, synthetic construct
  source 1..75: mol_type = other DNA
ggcagcaaagcggaaatgatccaagcgattaagtcggttaaacccgatgccgtattcgccgacgagctgctggac

SEQ ID NO: 169377 - DNA, 75 bp, synthetic construct
  source 1..75: mol_type = other DNA
tgcgggcggcatcgtcacgcccgtctcccgtgggtgtctggcagaccctgctgacctgcctgctggaacatcact

SEQ ID NO: 169378 - DNA, 75 bp, synthetic construct
  source 1..75: mol_type = other DNA
caggcgcgcatcctcgatctgctggaaagcattatgcaaaaacaagcaccgggaatgctgctggtcacccatgat

SEQ ID NO: 169379 - DNA, 75 bp, synthetic construct
  source 1..75: mol_type = other DNA
aaatacgcgctggtacgtaccgaccagctgggattcagcgcctgtacccgctctcagttaataaacagcatcgat

SEQ ID NO: 169380 - DNA, 75 bp, synthetic construct
  source 1..75: mol_type = other DNA
ctcacccgactgctggaccagcactacggcctcacgctaaatgacacatcgttctccgatgaacgtgtgattgag

SEQ ID NO: 169381 - DNA, 75 bp, synthetic construct
  source 1..75: mol_type = other DNA
ctgacccggctgctggaccagcattacggcctcacgttgaatgacacaccattcgccgatgaacgtgtgattgag

SEQ ID NO: 169382 - DNA, 75 bp, synthetic construct
  source 1..75: mol_type = other DNA
ggaaacggacaacaacgggacagaacagccggaagaacggccagcaccgtggccgcagcttcctgacggcgttga

SEQ ID NO: 169383 - DNA, 75 bp, synthetic construct
  source 1..75: mol_type = other DNA
ctgaccgccgccagccagccgcaggtcgcgaacctcggcggaggcatgtactccatcgaaggcctgatgaacgaa

SEQ ID NO: 169384 - DNA, 75 bp, synthetic construct
  source 1..75: mol_type = other DNA
cgtgaccccaccatactggccgtcactcgagatcagacgtgaccgccgcacggcaccagaccctgaactggtacc

SEQ ID NO: 169385 - DNA, 75 bp, synthetic construct
  source 1..75: mol_type = other DNA
tagtcggcggtagcggcagcgggaaatcattaacctgcgccgcgacgctgggcattctgcccgctggcgttcgcc

SEQ ID NO: 169386 - DNA, 75 bp, synthetic construct
  source 1..75: mol_type = other DNA
caagcgcgcatcctcgatctactggaaagcattatgcaaaaacaagcgccggggatgctgctggtcacccatgat

SEQ ID NO: 169387 - DNA, 75 bp, synthetic construct
  source 1..75: mol_type = other DNA
cagcatattgaggcaggtatttcactgtgtgatgcggtgaactttctcgttgaaaaatacgccctggtacgtacc

SEQ ID NO: 169388 - DNA, 75 bp, synthetic construct
  source 1..75: mol_type = other DNA
cctccgggctcgccgggccactggcctgatgatcagcgacaattacagaacggtaaataacattaccctgggtaa

SEQ ID NO: 169389 - DNA, 75 bp, synthetic construct
  source 1..75: mol_type = other DNA
cctccgggctcgctgggcaactggcctgatgaccagcgacaattacagaacggtaaataacattaccctgggtaa

SEQ ID NO: 169390 - DNA, 75 bp, synthetic construct
  source 1..75: mol_type = other DNA
atacgcgctggtgcgtaccgaccagccgggattcagcgcctgtacccggtctcagttaataaacagaatagatat

SEQ ID NO: 169391 - DNA, 75 bp, synthetic construct
  source 1..75: mol_type = other DNA
agtgttcgccgacgagctgctcgatgcttggcgcaacaacccggaagggaaagtgctggttacccaccagcaact

SEQ ID NO: 169392 - DNA, 75 bp, synthetic construct
  source 1..75: mol_type = other DNA
atggaatcacattacgggcaccctggtggtggcctccgaactggcccgctcacggggaaaacgcgccggtgtggc

SEQ ID NO: 169393 - DNA, 75 bp, synthetic construct
  source 1..75: mol_type = other DNA
cctccgggctcgcggggctactggcctgatgaacagcgacaattacagaacggtaaataacattaccctgggtaa

SEQ ID NO: 169394 - DNA, 75 bp, synthetic construct
  source 1..75: mol_type = other DNA
tgagcagcatattgaggcaggcatttcactgtgcgatgcggtgaactttctcgttgaaaaatacgcactggtacg

SEQ ID NO: 169395 - DNA, 75 bp, synthetic construct
  source 1..75: mol_type = other DNA
aacaatcaccttatcttcgggccgttgatattctgcgagctcgacaggcaactggcttgttacgacaaagccgaa

SEQ ID NO: 169396 - DNA, 75 bp, synthetic construct
  source 1..75: mol_type = other DNA
accagcctgatgacccgcgacaattaccgaacagtaaataacattactctgggtaagcatccggaggcgaaacaa

SEQ ID NO: 169397 - DNA, 75 bp, synthetic construct
  source 1..75: mol_type = other DNA
atacgcgctggtgcgtaccgaccagccgggattcagcgcctgtacccgctctcagttaataaacaggatggatat

SEQ ID NO: 169398 - DNA, 75 bp, synthetic construct
  source 1..75: mol_type = other DNA
atacgcgctggtgcgtaccgaccagccgggattcagcgcctgtacccgttctcagttaataaacagtatcgatat

SEQ ID NO: 169399 - DNA, 75 bp, synthetic construct
  source 1..75: mol_type = other DNA
acaggcctgatgacccgcgacaattaccgaacggtaaataacattaccctgggtaagtatcaggaggcgaaacga

SEQ ID NO: 169400 - DNA, 75 bp, synthetic construct
  source 1..75: mol_type = other DNA
ccgcggcgccggagctggcgaacgccactgcgccggaagtaaccaccgaagcgccggaggaaaccgccagcgccc

SEQ ID NO: 169401 - DNA, 75 bp, synthetic construct
  source 1..75: mol_type = other DNA
gctgggcgatgacataactccgcgctttaaggcggagtacgtcgacggctcaaaaggcacaccaaccagctacat

SEQ ID NO: 169402 - DNA, 75 bp, synthetic construct
  source 1..75: mol_type = other DNA
caaagaccggaggaacgaaccggacacggagctgctgccgggcgcaatccttcgcctgacctgtgcggaatggtg

SEQ ID NO: 169403 - DNA, 75 bp, synthetic construct
  source 1..75: mol_type = other DNA
tgccacctacattgaaaaacagggtggcgtacttgttccgcgcaaggactacctgattcgcaccgcctacgacct

SEQ ID NO: 169404 - DNA, 75 bp, synthetic construct
  source 1..75: mol_type = other DNA
tttaaggcggagtatgtcgacggctcaaaaggcacaccaaccagctacatcgccacctacatcggaaagaacctg

SEQ ID NO: 169405 - DNA, 75 bp, synthetic construct
  source 1..75: mol_type = other DNA
ataactgtccccgtgtacaggaaacggacaacaacgggacagaacagccggaagaacggccagcaccgtggccgc

SEQ ID NO: 169406 - DNA, 75 bp, synthetic construct
  source 1..75: mol_type = other DNA
cgtcatacatgtgcgtacagcattgccgctgactgacgtcaccaccaccgtaatcaagtcggcactgagcgcgac

SEQ ID NO: 169407 - DNA, 75 bp, synthetic construct
  source 1..75: mol_type = other DNA
atggacaaggttcgtcaggctaccgccgtgctgctggcctacattcagggcagccgggataaagtgattcgtgag

SEQ ID NO: 169408 - DNA, 75 bp, synthetic construct
  source 1..75: mol_type = other DNA
aagagctgattcagggggaactccccttttctgtatctgttctgatttacgatttgcgttgtccgacggtgttat

SEQ ID NO: 169409 - DNA, 75 bp, synthetic construct
  source 1..75: mol_type = other DNA
acggcggcatcagtgcgcccgctggcggcgttcgcgtgagtgtcgctctgaccgctgagccacacatcaccgcac

SEQ ID NO: 169410 - DNA, 75 bp, synthetic construct
  source 1..75: mol_type = other DNA
agagcacagccaaccgcattacgccaggccattcagagctacatcaacgaggacattcgcattgatgccagactg

SEQ ID NO: 169411 - DNA, 75 bp, synthetic construct
  source 1..75: mol_type = other DNA
tcacgacaatgacccgaaaaccggcaaaccttacgccgataaagaatcgggaaaaaccatggcggaaaccgtgga

SEQ ID NO: 169412 - DNA, 75 bp, synthetic construct
  source 1..75: mol_type = other DNA
cgatattgatgaagaggtaaattgctgcattccaagtctgttgattcagccgctggtagaaaatgccattgtgca

SEQ ID NO: 169413 - DNA, 75 bp, synthetic construct
  source 1..75: mol_type = other DNA
gggaacacaactaccagaatggcgatgatttcattagcccaacgacgcgtcaggcaatgaactacggaaaaatca

SEQ ID NO: 169414 - DNA, 75 bp, synthetic construct
  source 1..75: mol_type = other DNA
gatccaaaggtgattgaacgggtcgaagcgaatgaaatgccaggcaataaaattggcctgcttaatgtccatcac

SEQ ID NO: 169415 - DNA, 75 bp, synthetic construct
  source 1..75: mol_type = other DNA
cgggcgcaccgcgtactggaacgacaacacccgccgcattgagctcaaccctgcacagaaaacggaggggccaca

SEQ ID NO: 169416 - DNA, 75 bp, synthetic construct
  source 1..75: mol_type = other DNA
cgcgaacgactggatgaactcctgatactcccgcaactggagcgcgacgacattcagcgccttgccaccctgacc

SEQ ID NO: 169417 - DNA, 75 bp, synthetic construct
  source 1..75: mol_type = other DNA
ggtcatggaacgctccactgcccgttatcgacccggaaaccttcggcagagcgttaccacagaagccgacggcat

SEQ ID NO: 169418 - DNA, 75 bp, synthetic construct
  source 1..75: mol_type = other DNA
cgctggatattgccaataaaaccctgccgctgtttcgtcacgtgaatagcgaatcgttacgtaaagtctgtgaaa

SEQ ID NO: 169419 - DNA, 75 bp, synthetic construct
  source 1..75: mol_type = other DNA
catggaggtggcactgaaggcgtatcagatgctggcccgcatggcgctacacctgcacgccatgcctccacatta

SEQ ID NO: 169420 - DNA, 75 bp, synthetic construct
  source 1..75: mol_type = other DNA
actgaacgcgcccgccgcaaagcagacctgctgcggggtggcctgaccagtagaaacaaaaaacagacagaaacg

SEQ ID NO: 169421 - DNA, 75 bp, synthetic construct
  source 1..75: mol_type = other DNA
ccgatgatcctcggcagcgtctgtatcggctttattgtgctgctggtgcaaagcgttgagggcgaaaaggaggcc

SEQ ID NO: 169422 - DNA, 75 bp, synthetic construct
  source 1..75: mol_type = other DNA
tgtttggcccgtgggtgggcatcattaccggcgtgattgcgggtattcaccgttatttaattgatatcggcggcg

SEQ ID NO: 169423 - DNA, 75 bp, synthetic construct
  source 1..75: mol_type = other DNA
aaagcgttgagggcgaaaaagaggccagcgccgcgcggcaggccaagctggcgctggatatcgccaacaaaacgc

SEQ ID NO: 169424 - DNA, 75 bp, synthetic construct
  source 1..75: mol_type = other DNA
ctcacccggttactggaccagcattacggcctcacactgaatgacacaccgttcgccgatgaacgtgtgattgag

SEQ ID NO: 169425 - DNA, 75 bp, synthetic construct
  source 1..75: mol_type = other DNA
agttaataaacagtattgatatcctccgggcacgccgggcaaccggcctgatgacacgcgacaactacagaacgg

SEQ ID NO: 169426 - DNA, 75 bp, synthetic construct
  source 1..75: mol_type = other DNA
cgccgggcaaccggcctgatgacccgcagcaactacagaatggtgaacgacatcatccggggtgaacattcggag

SEQ ID NO: 169427 - DNA, 75 bp, synthetic construct
  source 1..75: mol_type = other DNA
acaggcctgatgacccgcgacaattacagaacagtaaataacattactctgggtaagcatccggaggcgaaacga

SEQ ID NO: 169428 - DNA, 75 bp, synthetic construct
  source 1..75: mol_type = other DNA
accggcctgatgacccgcgacaattaccgaacggtaaataacattacccagggtaagcatccggaggcgaaacga

SEQ ID NO: 169429 - DNA, 75 bp, synthetic construct
  source 1..75: mol_type = other DNA
gtgtgattgagcagcatattgaggccggcatttcactgtgcgatgcagtgaactttcttgttgaaaaatacgcac

SEQ ID NO: 169430 - DNA, 75 bp, synthetic construct
  source 1..75: mol_type = other DNA
cagcatattgaggccggcatttcactgtgcgatgcagtaaactttctcgttgaaaaatacgccctggtacgtacc

SEQ ID NO: 169431 - DNA, 75 bp, synthetic construct
  source 1..75: mol_type = other DNA
ccctgtttcggggcacgtctggtgcgggaggcaatcaattacattaccttgccgaccgcgccggtatcagggggc

SEQ ID NO: 169432 - DNA, 75 bp, synthetic construct
  source 1..75: mol_type = other DNA
ccccgtcgcagttaatcaacagcatcgatattctccgggcccgccgggcaacaggcctgatgacacgtaataact

SEQ ID NO: 169433 - DNA, 75 bp, synthetic construct
  source 1..75: mol_type = other DNA
gggcgaccggcctgatgacccggaacaattacagaatggtaaataacattacccagggcaagcatccggaggcaa

SEQ ID NO: 169434 - DNA, 75 bp, synthetic construct
  source 1..75: mol_type = other DNA
ttgagcagcatattgaggcagggatttcactgtgtgacgcggtgaactttctcgttgaaaaatacgcgcaggtac

SEQ ID NO: 169435 - DNA, 75 bp, synthetic construct
  source 1..75: mol_type = other DNA
cgcaaccacctcataaccccgaagctctcacctttagcactaccagttacagagaacttaagatgaaaacattat

SEQ ID NO: 169436 - DNA, 75 bp, synthetic construct
  source 1..75: mol_type = other DNA
gtccgcgaggtgctgccacgcggtacgtttgcttatacacgtgttccgacgatgattattcgtctgcgtgcctga

SEQ ID NO: 169437 - DNA, 75 bp, synthetic construct
  source 1..75: mol_type = other DNA
cgtgctggttgccgtctgtctgaacgggccgcgccagcaggagaagctgttaccgttttctgacgtccgcgaggt

SEQ ID NO: 169438 - DNA, 75 bp, synthetic construct
  source 1..75: mol_type = other DNA
tgccgttttctgacgtccgcgaggagctgccgcgcggcacgtttgcttatacccgtgttccgacgatgattattc

SEQ ID NO: 169439 - DNA, 75 bp, synthetic construct
  source 1..75: mol_type = other DNA
gggccgcgccagcaggagaagctgttaccgttttctgacatccgcgaggagctgccgcgcggcacgtttgcttat

SEQ ID NO: 169440 - DNA, 75 bp, synthetic construct
  source 1..75: mol_type = other DNA
ggaatggcagccggtgcagtattacagccggattatcatgaatccgccgttcagccacgggcaggatatccggca

SEQ ID NO: 169441 - DNA, 75 bp, synthetic construct
  source 1..75: mol_type = other DNA
cacaggaaattccccaacctgaaagtaaggagtctccacgcaaacccttctgcactcacgaagagaacctgcaac

SEQ ID NO: 169442 - DNA, 75 bp, synthetic construct
  source 1..75: mol_type = other DNA
catgaatccgccgttcagccacgggcaggatatccggcatattctgcgggctttttccctgttgcgtccgggtgg

SEQ ID NO: 169443 - DNA, 75 bp, synthetic construct
  source 1..75: mol_type = other DNA
acggatcgcaccggaaaacattcatcgtacgccggcggcccatctggagttcgttaaccagaccatgaccgctga

SEQ ID NO: 169444 - DNA, 75 bp, synthetic construct
  source 1..75: mol_type = other DNA
gcatttcactgtgcgatgcagtgaactttcttgttgaaaaatacgcactggtgcgtaccgaccagccgggattca

SEQ ID NO: 169445 - DNA, 75 bp, synthetic construct
  source 1..75: mol_type = other DNA
gtccgcgaggagctgccgcgcggcacgtttgcttataccgatgtcccgacgatgattattcgtttgcgtgcctga

SEQ ID NO: 169446 - DNA, 75 bp, synthetic construct
  source 1..75: mol_type = other DNA
gaaccctctgccggcaccggggccatactgcgggcgattagggataccgcgccgggggccatgtgtgatgcggtg

SEQ ID NO: 169447 - DNA, 75 bp, synthetic construct
  source 1..75: mol_type = other DNA
tgtgctggttgctgtctgtctgaacggaccacgccagcaggagaagctgttaccgttttctgacatctgcgagga

SEQ ID NO: 169448 - DNA, 75 bp, synthetic construct
  source 1..75: mol_type = other DNA
gcgcccaccgcaaagcagacctgctgcggggtggcctgacccgttgggaacaaaaaacagacagaaacgggattc

SEQ ID NO: 169449 - DNA, 75 bp, synthetic construct
  source 1..75: mol_type = other DNA
atgaaaacattacccgatacacacgtacgggaggcatcgcgcagcccgtctcccgtcaccatctggcagacactg

SEQ ID NO: 169450 - DNA, 75 bp, synthetic construct
  source 1..75: mol_type = other DNA
ggcaaccggcctgatgacccgcgacaattacagaacggtaaatgacattaccctgggcaggcatccggaggaggc

SEQ ID NO: 169451 - DNA, 75 bp, synthetic construct
  source 1..75: mol_type = other DNA
acactgaaggtgcttcccgtttatctgcgtgaacctctgagccgccacctctctttcctgcgcaaaaaacaggaa

SEQ ID NO: 169452 - DNA, 75 bp, synthetic construct
  source 1..75: mol_type = other DNA
tggatgcctaccgggcagagaacgagcgccgccaggaaatggctgatgcggcgttctccgccacaccgctgggca

SEQ ID NO: 169453 - DNA, 75 bp, synthetic construct
  source 1..75: mol_type = other DNA
tgaaggggctggaacttctggccgaagcccgtggcgacagagcggtgtttctgactgtcacctgcccgtcaaaat

SEQ ID NO: 169454 - DNA, 75 bp, synthetic construct
  source 1..75: mol_type = other DNA
gccgtgcgccgttgtatcccggtgatattttgtggaattttgaaaaatttctggtggggagagacgggaaggtca

SEQ ID NO: 169455 - DNA, 75 bp, synthetic construct
  source 1..75: mol_type = other DNA
gaccagccgggattcagcgcaggagcctcgtcgcagttaataaacagcatcgatatcctccgggctcgcagggcg

SEQ ID NO: 169456 - DNA, 75 bp, synthetic construct
  source 1..75: mol_type = other DNA
gaggcatcgcgctgcccgtctcccgtcaccatctggcagacactgctcacccgactgttggaccagcattacggc

SEQ ID NO: 169457 - DNA, 75 bp, synthetic construct
  source 1..75: mol_type = other DNA
tgaaaaatacgccctggtgcgtaccgaccagccgggattcagcccctgtacccgctctcagttaatcaacagtat

SEQ ID NO: 169458 - DNA, 75 bp, synthetic construct
  source 1..75: mol_type = other DNA
gcagtcgcgccggaagaaagcggattctatgcgcgcatggccagtaaggggcgtgcgccactgtatcctgatgat

SEQ ID NO: 169459 - DNA, 75 bp, synthetic construct
  source 1..75: mol_type = other DNA
gatgttcagtaagattgaggtcaatggcgaaggtcgccatccgctgtatcaaaaactgattgccgcagcgccgac

SEQ ID NO: 169460 - DNA, 75 bp, synthetic construct
  source 1..75: mol_type = other DNA
gttctccgatgaacgtgtgattgagcagcatattgaggcaggcatttcactgtgtgatgcggtgaactttctcgt

SEQ ID NO: 169461 - DNA, 75 bp, synthetic construct
  source 1..75: mol_type = other DNA
acggccttacgctgaatgacacaccgttcgctgatgaacgtgtgattgagcagcatattgaggcagggatttcac

SEQ ID NO: 169462 - DNA, 75 bp, synthetic construct
  source 1..75: mol_type = other DNA
acactggcaagagaagccagaaagcaggcacgcggtgcggtggatgaagcaattgccgcactgcgtctgctgccg

SEQ ID NO: 169463 - DNA, 75 bp, synthetic construct
  source 1..75: mol_type = other DNA
gaacatatcgatgccggtatatctttggccgatgccgttaattttctgggggaaaagtacgggctggttcgtatt

SEQ ID NO: 169464 - DNA, 75 bp, synthetic construct
  source 1..75: mol_type = other DNA
atgaaaacattacccgatacacacgtacgggaggcatcgcattgccagtctcccgtcaccatctggcagacactg

SEQ ID NO: 169465 - DNA, 75 bp, synthetic construct
  source 1..75: mol_type = other DNA
ctgtcccgactgctggaccagcactatggcctcacactgaatgacacaccttttgccgatgaacgtgtgattgag

SEQ ID NO: 169466 - DNA, 75 bp, synthetic construct
  source 1..75: mol_type = other DNA
catggagctggaatgaaccacggccagccattgatccggccagatttacggagcacaggcaggaaactgaaaccg

SEQ ID NO: 169467 - DNA, 75 bp, synthetic construct
  source 1..75: mol_type = other DNA
atggcacgcaacccggaaggcccgcaacggctgaaggatgacgcaatggatgcggtactcgctgccgctgatgcc

SEQ ID NO: 169468 - DNA, 75 bp, synthetic construct
  source 1..75: mol_type = other DNA
agctgctgcggggtggactaaccagtggaaacaaaaaacagacaaaaacgggattcacaaatcccgtaaatgagc

SEQ ID NO: 169469 - DNA, 75 bp, synthetic construct
  source 1..75: mol_type = other DNA
tgccggacgcgaacgcctggacgatttgctttacctgccgcagctcaacaaacaccagatacagacgctggccac

SEQ ID NO: 169470 - DNA, 75 bp, synthetic construct
  source 1..75: mol_type = other DNA
acgccaaccagctacatcgccacctacatcggaaagaacctggacagccgcgccgtggatggcatcgacccgaaa

SEQ ID NO: 169471 - DNA, 75 bp, synthetic construct
  source 1..75: mol_type = other DNA
ggattcacaaatcccgtaaatgagcaaaaacgcgccgcgatatatgaagcgcgcacaaaacaggcaaaaacggga

SEQ ID NO: 169472 - DNA, 75 bp, synthetic construct
  source 1..75: mol_type = other DNA
acccaccactaccactacgacagccagcaccgcctggtgttctacacgcggatacagcatggcgagccactggtc

SEQ ID NO: 169473 - DNA, 75 bp, synthetic construct
  source 1..75: mol_type = other DNA
cgaaaagctcatctttatcactgcgaccaccggggactgccgctggcgcttatcagcgaagacggcaatacggcg

SEQ ID NO: 169474 - DNA, 75 bp, synthetic construct
  source 1..75: mol_type = other DNA
tcgagccggtggaggacgggcagacccgtggggcgaatcagttttacagcgtcatggaacggctgaagatgcttg

SEQ ID NO: 169475 - DNA, 75 bp, synthetic construct
  source 1..75: mol_type = other DNA
ggtgggagatggcggtaaaaatcccctgaacaccatcatgaaaggctacgcgcgttattacgccaccaatacggt

SEQ ID NO: 169476 - DNA, 75 bp, synthetic construct
  source 1..75: mol_type = other DNA
ggccaaccagttttattctgtcatggagcgtctcaagatgctcgacacactgcaggccacgcaactgcagtcggc

SEQ ID NO: 169477 - DNA, 75 bp, synthetic construct
  source 1..75: mol_type = other DNA
tgcgtattgaaggtggcctgagcacgtacgagaaggagctggccctgatgggtgatgactatcaggagattttcc

SEQ ID NO: 169478 - DNA, 75 bp, synthetic construct
  source 1..75: mol_type = other DNA
gggatagatgcaggaagaaatgtcgttcatttgtatttggataagttaacaccaagtgaagtggaaagttttttt

SEQ ID NO: 169479 - DNA, 75 bp, synthetic construct
  source 1..75: mol_type = other DNA
gaagggaaacgcacgtttactgaatttatgcgtgaaggtgtgggagttcatgcgtttaacggcgaaatctttgtg

SEQ ID NO: 169480 - DNA, 75 bp, synthetic construct
  source 1..75: mol_type = other DNA
gaagggaaacgcacgtttacagaatttatgcgtgaaggtgtgggtgttcatgcgtttaacggcgaaatctttgtg

SEQ ID NO: 169481 - DNA, 75 bp, synthetic construct
  source 1..75: mol_type = other DNA
acactgggcaactcttcgggttagatggtataaaagcagataatccaataaaagcaaagcaagggagttcagatg

SEQ ID NO: 169482 - DNA, 75 bp, synthetic construct
  source 1..75: mol_type = other DNA
ggagcgtgacctgacggggtggatgtcgctgtcgcgtaaaccggaggtgacgtggtatggctgggacggagacag

SEQ ID NO: 169483 - DNA, 75 bp, synthetic construct
  source 1..75: mol_type = other DNA
attttcggcggcctgacgcctgctatctccaccgcattggtccagttgaccggcgataagagttctccggggtgg

SEQ ID NO: 169484 - DNA, 75 bp, synthetic construct
  source 1..75: mol_type = other DNA
tcttcgggggattatccgtccgccacgggcgcgttttgatttttatcaggcgcgatcagcctggtcacgggcaga

SEQ ID NO: 169485 - DNA, 75 bp, synthetic construct
  source 1..75: mol_type = other DNA
aaggtcagttattcaagtgccagggcctctgccaatgagtcgtggcgctattttatggggcggcgaaaatttatt

SEQ ID NO: 169486 - DNA, 75 bp, synthetic construct
  source 1..75: mol_type = other DNA
cgtctgggcaatgcccgtgcagatgatctggtgcgcaataacggaatagcggccaatgcggtggccctgcataag

SEQ ID NO: 169487 - DNA, 75 bp, synthetic construct
  source 1..75: mol_type = other DNA
acgcctggacacggtatggggaacccttttctgcgggccggtgtggaggtcgatcgatatggccgtgccgtcgcg

SEQ ID NO: 169488 - DNA, 75 bp, synthetic construct
  source 1..75: mol_type = other DNA
gccggactctcacgtccggtgtggatagcgcaggcgtatcagcagcagatagcggagagtcgcaggccggaagag

SEQ ID NO: 169489 - DNA, 75 bp, synthetic construct
  source 1..75: mol_type = other DNA
agaaggtgaagttgattttacctggtgtgatcgctacgagcttcaggacgatgggcgcacctggctgccaaaagc

SEQ ID NO: 169490 - DNA, 75 bp, synthetic construct
  source 1..75: mol_type = other DNA
taatccgctgcacaccatgcacacccacgcgcgtgaaacctgcctggcgctggggaaacccgccgatgacgctac

SEQ ID NO: 169491 - DNA, 75 bp, synthetic construct
  source 1..75: mol_type = other DNA
atatcgcgctacaggccgcgcagccgctggtgcacggcgtatcgttaaccctgcaacgcgggcgtgtgctggcgt

SEQ ID NO: 169492 - DNA, 75 bp, synthetic construct
  source 1..75: mol_type = other DNA
attttttggattgcaacaaatggaaccgactccgttgaatggtgcaataaatattatttttagttatattaattt

SEQ ID NO: 169493 - DNA, 75 bp, synthetic construct
  source 1..75: mol_type = other DNA
gatgaagtacagccaggcgaaagcagtctggagtctggtgaagagtcagataccagccagaaggacgatgtagac

SEQ ID NO: 169494 - DNA, 75 bp, synthetic construct
  source 1..75: mol_type = other DNA
agtcgctataagtttgtagcgtatatatttagatttatttatgaatatggtgaatatatctctctactgattgta

SEQ ID NO: 169495 - DNA, 75 bp, synthetic construct
  source 1..75: mol_type = other DNA
gaaacgctgtttaacgcccccaaacatgcggtaacgcgcagcctggtttccgcgcatctcgccctctacggtatg

SEQ ID NO: 169496 - DNA, 75 bp, synthetic construct
  source 1..75: mol_type = other DNA
cagttgaactacagtgaagagaacctgaaacaggcgcgtgcggcgctggaacgtctctacactgcgctgcgcggc

SEQ ID NO: 169497 - DNA, 75 bp, synthetic construct
  source 1..75: mol_type = other DNA
actcagatatctttgccgatgaaataactcactggatgccgctaccggagccgccgcaggaggttaaccgtggct

SEQ ID NO: 169498 - DNA, 75 bp, synthetic construct
  source 1..75: mol_type = other DNA
gattaagccgggtaatggtattgagcaagcaactcactggatgccgctaccggaaccgccgcaggaggcgaaatg

SEQ ID NO: 169499 - DNA, 75 bp, synthetic construct
  source 1..75: mol_type = other DNA
ctatttcggcaccgtcaccgaggcgttagaacttgatacagccaagaatggttacatcctcctggttcaggacgc

SEQ ID NO: 169500 - DNA, 75 bp, synthetic construct
  source 1..75: mol_type = other DNA
gcaagttgaacgagctgtcgagcaactctccggtaactccggctcgttggataagctgtagtacacgaatccccg

SEQ ID NO: 169501 - DNA, 75 bp, synthetic construct
  source 1..75: mol_type = other DNA
aacaccccggaagcctattccgtgctgtttgatatggcgcgtgaagtaaaccgtctgaaagcagaagatatggca

SEQ ID NO: 169502 - DNA, 75 bp, synthetic construct
  source 1..75: mol_type = other DNA
gacgcagagccaaacttcgatgtaaatggcaactctccgggaactccggatagttggataagctgtagtgatcga

SEQ ID NO: 169503 - DNA, 75 bp, synthetic construct
  source 1..75: mol_type = other DNA
gtgagcgaatgccggataccaaaacagccgttcttgttgccgtggagtttgacaggaaaggtgactggcgaatga

SEQ ID NO: 169504 - DNA, 75 bp, synthetic construct
  source 1..75: mol_type = other DNA
caaagcatgagccatctattttcacaaggatttataagctctgaacttttcataagcgattctgaatttcgatgg

SEQ ID NO: 169505 - DNA, 75 bp, synthetic construct
  source 1..75: mol_type = other DNA
tatggcaggccaggtgcaaggggaatacgtggagttgagcgacggcactttatcgtggttagggaacgccttgtt

SEQ ID NO: 169506 - DNA, 75 bp, synthetic construct
  source 1..75: mol_type = other DNA
tctttatgcgcaatatcgagacggagagtttttcgatattgtccgcaatggtgatgaatttttcgaaacacagag

SEQ ID NO: 169507 - DNA, 75 bp, synthetic construct
  source 1..75: mol_type = other DNA
aagccaaacttacaacttgccagaattaatcgaaggcatggaagtttccattgatgtaagcacttgtgatgctga

SEQ ID NO: 169508 - DNA, 75 bp, synthetic construct
  source 1..75: mol_type = other DNA
gtgcaaataaccgaagcattactttcagagccgggagacatccggcgttttcttcagcaggcggtggaccactgg

SEQ ID NO: 169509 - DNA, 75 bp, synthetic construct
  source 1..75: mol_type = other DNA
cgctatcgataccctacaaagctgggtgatgaaactggttcgccttgtcatgcagttgaccccttacggcgttct

SEQ ID NO: 169510 - DNA, 75 bp, synthetic construct
  source 1..75: mol_type = other DNA
tagaaaatttgtttccaccattgataatgaaattaaacgaattaagctgtatgaggaagccgacaaattcccgat

SEQ ID NO: 169511 - DNA, 75 bp, synthetic construct
  source 1..75: mol_type = other DNA
gaagggaaacgcacgtttacagaatttattcgtgaaggtgtgggagttcatgcgtttaacggcgaaatctttgtg

SEQ ID NO: 169512 - DNA, 75 bp, synthetic construct
  source 1..75: mol_type = other DNA
ttgtctctggggttaccggttgtgaccggtattacccatcgcccggtacagcgctgtacattgattacagctcag

SEQ ID NO: 169513 - DNA, 75 bp, synthetic construct
  source 1..75: mol_type = other DNA
gtgcaaataaccgaagcattagtttcagagccgggagacatccggcgttttgttcagcaggcggtggaccactgg

SEQ ID NO: 169514 - DNA, 75 bp, synthetic construct
  source 1..75: mol_type = other DNA
agcggtctgccggtgtgcctttctggcttgatgcgatggagccggattttgtacccatgcgcagtgatgagtctg

SEQ ID NO: 169515 - DNA, 75 bp, synthetic construct
  source 1..75: mol_type = other DNA
gtaccggggttgaggcgaaagtaaataacaaccttagcctgtgggggaatgtcggtatgcaactaggtgataaag

SEQ ID NO: 169516 - DNA, 75 bp, synthetic construct
  source 1..75: mol_type = other DNA
caagctggatctggtatttgataccgatccggccagtgataaaggaggcagcagtgccgcaacgaaacgacagga

SEQ ID NO: 169517 - DNA, 75 bp, synthetic construct
  source 1..75: mol_type = other DNA
cggggatcaaagagaccgagcgggaagtccatatcaccccgggtattatttatgacgatttgcgcaagggcgagg

SEQ ID NO: 169518 - DNA, 75 bp, synthetic construct
  source 1..75: mol_type = other DNA
gcgcttaaggaatatgaagatgctgagctggtagcggcgcgcattgctgcggcactggggctgtatattcgtaaa

SEQ ID NO: 169519 - DNA, 75 bp, synthetic construct
  source 1..75: mol_type = other DNA
gcttgatgcgatggagccggattttgtacccatgcgcagtgatgagtctgccggactgaatcagggcgtttttct

SEQ ID NO: 169520 - DNA, 75 bp, synthetic construct
  source 1..75: mol_type = other DNA
ccggcctgatacatcagggcaatacgttgccttgaaaacagctgttcagtctctgatgccacggggtattgcaac

SEQ ID NO: 169521 - DNA, 75 bp, synthetic construct
  source 1..75: mol_type = other DNA
ggatttactgcagcagacctggtcggggataaacgctggcggacaatgtcgggtggaaaggtgttttcgggttgc

SEQ ID NO: 169522 - DNA, 75 bp, synthetic construct
  source 1..75: mol_type = other DNA
tttattgcaacagacctggaaggtgataagcgctggcggacaatgccgggtggaaaagcgttttcaggtcgcccg

SEQ ID NO: 169523 - DNA, 75 bp, synthetic construct
  source 1..75: mol_type = other DNA
gggtggaaaagcgttttcaggtcgcccggggtgatacatctggccagtatgttgcgttaaaaacagtcgcattgt

SEQ ID NO: 169524 - DNA, 75 bp, synthetic construct
  source 1..75: mol_type = other DNA
cagagccgggagatatccggcgttttattcagcaggcggtggaccactggccgcgtctgctggcatttcacttca

SEQ ID NO: 169525 - DNA, 75 bp, synthetic construct
  source 1..75: mol_type = other DNA
gggataagtaccggcggacaatgccgggtggaaaggtgttttcaggtggaacgtatggatacagcaggtcagtat

SEQ ID NO: 169526 - DNA, 75 bp, synthetic construct
  source 1..75: mol_type = other DNA
tgatcagctaccgtccgaactggcgctggctggggatgcgggagactgcagcaaaaagttttgtcgatgaggtgg

SEQ ID NO: 169527 - DNA, 75 bp, synthetic construct
  source 1..75: mol_type = other DNA
attccctgcaggcaacacagcttcagtcggccatagtgaaggcgatttatgtctatcatctcaccgtagttgccc

SEQ ID NO: 169528 - DNA, 75 bp, synthetic construct
  source 1..75: mol_type = other DNA
atatcgccgccggtcttggcgtttcctacgaacagttgtcccgtgattactcgaaggtcagttattcaagtgccc

SEQ ID NO: 169529 - DNA, 75 bp, synthetic construct
  source 1..75: mol_type = other DNA
gtgcaaataaccaaagccttactttcagaaccggaggaaatccggcgttttgttcagcaggcggtggaccactgg

SEQ ID NO: 169530 - DNA, 75 bp, synthetic construct
  source 1..75: mol_type = other DNA
accatcagcatgtggaacgtgaagcagtccggcctgcgcgcccgcctgcaccgcgaaatcatcgaccgcgattac

SEQ ID NO: 169531 - DNA, 75 bp, synthetic construct
  source 1..75: mol_type = other DNA
actttcttttatgaacgtattactgagcgtaatcacacggccagtccatcctcaccggtggtgttacgctggttg

SEQ ID NO: 169532 - DNA, 75 bp, synthetic construct
  source 1..75: mol_type = other DNA
ggatttattgcaacagacatggcgggtgataagtgctgatggacaatgccgggtggaaaggtgtttttgggttgt

SEQ ID NO: 169533 - DNA, 75 bp, synthetic construct
  source 1..75: mol_type = other DNA
gttttgcattaccggtgatgtccaccacaatccggtgtggcgtcgccagcgaagatgacgaaacattgcggcgca

SEQ ID NO: 169534 - DNA, 75 bp, synthetic construct
  source 1..75: mol_type = other DNA
ttgatgaagaatgttcgcaagtggtggatttactgcaacagacctggctggtgataagcactggcggacaatgcc

SEQ ID NO: 169535 - DNA, 75 bp, synthetic construct
  source 1..75: mol_type = other DNA
atgacggcattactgacactggaagagatcaaggcacatctgcgtgttgaccatgacgcggatgatgacatgctg

SEQ ID NO: 169536 - DNA, 75 bp, synthetic construct
  source 1..75: mol_type = other DNA
agatcaaggcacatctgcgtgtcgactatgacgcggatgatgacatgctgatggacaaggttcgtcaggctaccg

SEQ ID NO: 169537 - DNA, 75 bp, synthetic construct
  source 1..75: mol_type = other DNA
ttaagccggatgccgtattcgctgacgaactgctggatgcatggcgcgagaacccgggcgacaagattctggtga

SEQ ID NO: 169538 - DNA, 75 bp, synthetic construct
  source 1..75: mol_type = other DNA
gccgccggtcttggcgtttcctacgaacagttgtcccgtgattactcgaaggtcagttattcaagtgcccgcgcc

SEQ ID NO: 169539 - DNA, 75 bp, synthetic construct
  source 1..75: mol_type = other DNA
ggccattgacgggctcaaggaagtccaggaatcagtgatgcgcattgaggccggactgagcacgtatgagaaaga

SEQ ID NO: 169540 - DNA, 75 bp, synthetic construct
  source 1..75: mol_type = other DNA
ctttcggtaccacaacagcaggtacagcttgatgctcccggaatgctggctgaaacggacgagtacatggccgga

SEQ ID NO: 169541 - DNA, 75 bp, synthetic construct
  source 1..75: mol_type = other DNA
gtattacgctggttgcgggaacaacatggaggagcaacaatacgatgcctgttgctgctcagccaggagcttttc

SEQ ID NO: 169542 - DNA, 75 bp, synthetic construct
  source 1..75: mol_type = other DNA
attgtactgaccccaaaaagttggacagttaaacacgaggcatataggtctgattccgatattcaattggagtca

SEQ ID NO: 169543 - DNA, 75 bp, synthetic construct
  source 1..75: mol_type = other DNA
gcggatcccccgtgaacttcccaccgggcgtccggccatgttgcatatctttgaaccggtagaggacgggcagac

SEQ ID NO: 169544 - DNA, 75 bp, synthetic construct
  source 1..75: mol_type = other DNA
aatccggatgatgtcaaacgtcggcgcaaggccgaaattgatgaaaaccgcaagctggatctggtatttgatacc

SEQ ID NO: 169545 - DNA, 75 bp, synthetic construct
  source 1..75: mol_type = other DNA
agactgggtacgtgcaggtggtcgtaatccggatgatgtcaaacgtcggcgcaaggcagaaattgatgaaaaccg

SEQ ID NO: 169546 - DNA, 75 bp, synthetic construct
  source 1..75: mol_type = other DNA
gtccggtgtgctgatccgcctcagtgccctgaaagagtatgaggattctgagctgactgcagcaaggatcgccgc

SEQ ID NO: 169547 - DNA, 75 bp, synthetic construct
  source 1..75: mol_type = other DNA
taaactggcaggaaaaacgctggcagcgattttttaacagcgaagaaccgggaaatatcgaacccgtctacatgc

SEQ ID NO: 169548 - DNA, 75 bp, synthetic construct
  source 1..75: mol_type = other DNA
actcgcgctggtactccgtttcaccagaatgtgggcggctactgattacattgaccgtggcatcctggcgcgtga

SEQ ID NO: 169549 - DNA, 75 bp, synthetic construct
  source 1..75: mol_type = other DNA
tatcacatcgattctgagcaaaagaaaattattcagggactcgagctggatgtggataacagctacgtccagaac

SEQ ID NO: 169550 - DNA, 75 bp, synthetic construct
  source 1..75: mol_type = other DNA
gatcacattgtcgggcatatgtttcttatcagctaccgtccgaactggcgctggctggggatgcgggagaccgca

SEQ ID NO: 169551 - DNA, 75 bp, synthetic construct
  source 1..75: mol_type = other DNA
cgatcgatatggtcgtgccgttgcgtaccatatctgtgaggatgattttccgcgctccgggagtggacgatggga

SEQ ID NO: 169552 - DNA, 75 bp, synthetic construct
  source 1..75: mol_type = other DNA
tgaagagtcacatcccggccagcaggccgatgtaaaccaaaatacggaatctgtcgctcaaaatagcgattctgt

SEQ ID NO: 169553 - DNA, 75 bp, synthetic construct
  source 1..75: mol_type = other DNA
gcggatcccgcgtgaacttcccaccggacgtccggccatgctgcatattttcgagccggtggaggatgggcagag

SEQ ID NO: 169554 - DNA, 75 bp, synthetic construct
  source 1..75: mol_type = other DNA
gtcatggaacggctgaagatgctggattccctgcaggcaacacagcttcagtcggccatagtgaaggcgatgtat

SEQ ID NO: 169555 - DNA, 75 bp, synthetic construct
  source 1..75: mol_type = other DNA
ggccaatgcggtggccctgcataaggatcacattgtcgggcatatgtttcttatcagctaccgcccgaactggcg

SEQ ID NO: 169556 - DNA, 75 bp, synthetic construct
  source 1..75: mol_type = other DNA
taacgaactcggtgaaccggagtggttattttcgcgtgcgctgggtgtcgatatcccactaacatcacttcatat

SEQ ID NO: 169557 - DNA, 75 bp, synthetic construct
  source 1..75: mol_type = other DNA
cgctcgcggtccgctgggacttcatctcaatagtggctttacgctcgacacgttagcgtttcgtttgctggaaga

SEQ ID NO: 169558 - DNA, 75 bp, synthetic construct
  source 1..75: mol_type = other DNA
ggctggtcgctctacggcggggcgctggcagatgaacactatcagtcggcggcgcttggcgtcggtcgcgacctg

SEQ ID NO: 169559 - DNA, 75 bp, synthetic construct
  source 1..75: mol_type = other DNA
cgcaggattcagacaatggattttcggcgcttgaacaggcgctgctgcggtatatcgccgccggtcttggcgttt

SEQ ID NO: 169560 - DNA, 75 bp, synthetic construct
  source 1..75: mol_type = other DNA
agccggactctcacgtccggtgtggatagcgcaggcgtatcagcagcagatagcggagagtcgcaggccggaaga

SEQ ID NO: 169561 - DNA, 75 bp, synthetic construct
  source 1..75: mol_type = other DNA
tgcgtttaacggcgaaatcttgtgcagccggtctgggatacggagagcacgcaactgtttcgtacgcgttttaaa

SEQ ID NO: 169562 - DNA, 75 bp, synthetic construct
  source 1..75: mol_type = other DNA
cgcgccagacatttccggcgtggcacacaccacagcaaaagtgaccgtcagccagatggggcgtgtgatttacga

SEQ ID NO: 169563 - DNA, 75 bp, synthetic construct
  source 1..75: mol_type = other DNA
ggcagcgattttttaacagcgaagaaccggggaatatcgaacccgtctatatgctggaaaaagttgaaaatcaaa

SEQ ID NO: 169564 - DNA, 75 bp, synthetic construct
  source 1..75: mol_type = other DNA
accgggaaatatcgaacccgtctacatgctggaaaaagtagaaaatcaaaaccatgccaaatgggaagtccataa

SEQ ID NO: 169565 - DNA, 75 bp, synthetic construct
  source 1..75: mol_type = other DNA
ttgatgttactcactcgcacaccaaactggataaagacaccgcttatggcaaaggttcgctggacggtaactcct

SEQ ID NO: 169566 - DNA, 75 bp, synthetic construct
  source 1..75: mol_type = other DNA
cggttatcagcgggcaaaaagcgatggcggtattgcgcctgcaagatggcagtcatccgccgtttggcgcggaag

SEQ ID NO: 169567 - DNA, 75 bp, synthetic construct
  source 1..75: mol_type = other DNA
accgttagctataacggtaactatggcagtgggacggacagcagtcaggtcggttatttcagccgtgtcgatgac

SEQ ID NO: 169568 - DNA, 75 bp, synthetic construct
  source 1..75: mol_type = other DNA
gtctgaaaaagaacaaccgtgacttgcatgatctgctcgtggattattacgttgggggaatgacttttatggcgc

SEQ ID NO: 169569 - DNA, 75 bp, synthetic construct
  source 1..75: mol_type = other DNA
ggcttaatacacaggagttactgagcagaaaacatatatctgttacaggtgaactatttaaattttacataaaag

SEQ ID NO: 169570 - DNA, 75 bp, synthetic construct
  source 1..75: mol_type = other DNA
gggcttggccgcagattgaactcatcgacgaccgggctgggaacttgtttaaggccatcgtgacacgaccacagg

SEQ ID NO: 169571 - DNA, 75 bp, synthetic construct
  source 1..75: mol_type = other DNA
ctgaggttatgtgatgatcattatcagttatggaaacgaaataaagagaaccgtcgggtcaggaatatttgtcgt

SEQ ID NO: 169572 - DNA, 75 bp, synthetic construct
  source 1..75: mol_type = other DNA
gggcaaataaatgagttggtgactccgttgccgtatgtttccagcgtaaggaatctaacaacatctaattctggt

SEQ ID NO: 169573 - DNA, 75 bp, synthetic construct
  source 1..75: mol_type = other DNA
gaagttgcatggatcaataataattgccgttcaagtgattcaagctctgatattatcatccttcccaggatgata

SEQ ID NO: 169574 - DNA, 75 bp, synthetic construct
  source 1..75: mol_type = other DNA
ataatcagtaaatatgacaaaagtctggaccgggagatatttgacagagtaatagatgctgcaagaaatcaaacg

SEQ ID NO: 169575 - DNA, 75 bp, synthetic construct
  source 1..75: mol_type = other DNA
cgcatcaattacagaccgggcggatgggaagcgctcaacgtggcatacgcaacagttcacacgagcaaagcgtaa

SEQ ID NO: 169576 - DNA, 75 bp, synthetic construct
  source 1..75: mol_type = other DNA
ccacaaggcggctcatctgtagaccaaatcattgatgagctacgccgtgtcagtgtgtacgccaaggaagccccc

SEQ ID NO: 169577 - DNA, 75 bp, synthetic construct
  source 1..75: mol_type = other DNA
gaaggtgtttcattctctgagacacggagtagcacagcttcttgatcgaaatcaaattccagaagacaggatcgc

SEQ ID NO: 169578 - DNA, 75 bp, synthetic construct
  source 1..75: mol_type = other DNA
tgctgggtgaaattaaacgtaacattcaagtgaatttgaaggtgaatcctgataattttccagagttaatagata

SEQ ID NO: 169579 - DNA, 75 bp, synthetic construct
  source 1..75: mol_type = other DNA
taagacctgaaaggtttcctacatcaatttatccagtcttttcacattcatttattgaacgagagcttccgctac

SEQ ID NO: 169580 - DNA, 75 bp, synthetic construct
  source 1..75: mol_type = other DNA
gatcgatggttgttaccctatcgaaaaagaaaacaaattacaacttatctcgataaagggaaaatgcaattatcc

SEQ ID NO: 169581 - DNA, 75 bp, synthetic construct
  source 1..75: mol_type = other DNA
cctcattcagcgggccctgaaaaccctggaccgccatcttcatgaacccggcgtggccttcacctccacgcatgc

SEQ ID NO: 169582 - DNA, 75 bp, synthetic construct
  source 1..75: mol_type = other DNA
agctcgttgatatccgtgtgcctgaccaccttatcgtcggtggcacaaagatattgtctttcgctgaacacggtc

SEQ ID NO: 169583 - DNA, 75 bp, synthetic construct
  source 1..75: mol_type = other DNA
cagattcgtctgcaagattgcgtatttgatactcaggaaacaatgaccactaccttggtaatgactccaacttat

SEQ ID NO: 169584 - DNA, 75 bp, synthetic construct
  source 1..75: mol_type = other DNA
gagaaatgacgcccggcgagcgcagtctcattctgcgggccctgaaaaccctgggccgccatcttcatgaacccg

SEQ ID NO: 169585 - DNA, 75 bp, synthetic construct
  source 1..75: mol_type = other DNA
aggctggcggattagcagcctcagagagcaaattttacctcgttggtatcatcagtggtttggcgtgccagtgga

SEQ ID NO: 169586 - DNA, 75 bp, synthetic construct
  source 1..75: mol_type = other DNA
aaataaccattcctgtgtggttaaggttgatgacgggacgaatagcattcttctaaccggtgatattgaagtccc

SEQ ID NO: 169587 - DNA, 75 bp, synthetic construct
  source 1..75: mol_type = other DNA
aaaacctttgatgacggcacagttgaggcggaagaggttcgtccgttccctgcgttcgtaagaggcgatgattaa

SEQ ID NO: 169588 - DNA, 75 bp, synthetic construct
  source 1..75: mol_type = other DNA
ggcagcttgcgccggcatcacgtcatgggcattactgagctcttgcgagacaccggccgggctacggccaccgtc

SEQ ID NO: 169589 - DNA, 75 bp, synthetic construct
  source 1..75: mol_type = other DNA
tcaatctgccttgactacatttgagtttaatctgtcaacaaaattatcggggatatatacaatacctgctggcac

SEQ ID NO: 169590 - DNA, 75 bp, synthetic construct
  source 1..75: mol_type = other DNA
cgggacttctacaccgaaagctttccagatccatctgcaagactgtgtgtttgacacccagacaacgatgaccac

SEQ ID NO: 169591 - DNA, 75 bp, synthetic construct
  source 1..75: mol_type = other DNA
aagatgggaacccttgagcgcgaagaatttatcgtgctgtacctcaataaccagaaccagttgcttgcccacgaa

SEQ ID NO: 169592 - DNA, 75 bp, synthetic construct
  source 1..75: mol_type = other DNA
cggcagaccatggcctcgttccttgggattgttgccgggatgctcggcgccggcagcgctgacacctgcagctgg

SEQ ID NO: 169593 - DNA, 75 bp, synthetic construct
  source 1..75: mol_type = other DNA
gacggagcgttggtatgtttctggtttccgtcctaagtatttctatccaccacttcctctattcctgtttcctga

SEQ ID NO: 169594 - DNA, 75 bp, synthetic construct
  source 1..75: mol_type = other DNA
aaggactgacttattcagtcgttgggtctgttcactggtcgaacgcagaggatactggcgcgctgttgtggccat

SEQ ID NO: 169595 - DNA, 75 bp, synthetic construct
  source 1..75: mol_type = other DNA
ggacgatttgctgtacctgccacagctcaacaagcaccagatacagacgctggccgtcatgacggcggcaatgtt

SEQ ID NO: 169596 - DNA, 75 bp, synthetic construct
  source 1..75: mol_type = other DNA
aaaaaaatagttgttgtttcgttgatgcgcaaatttttaaaccagataatataagaaactatttatcagtttatg

SEQ ID NO: 169597 - DNA, 75 bp, synthetic construct
  source 1..75: mol_type = other DNA
gaccatttaaaaataccgaaacaacatttactagagttaatatcgagaggtagaattcaatttgcattaccacaa

SEQ ID NO: 169598 - DNA, 75 bp, synthetic construct
  source 1..75: mol_type = other DNA
gcctgattcatttgcggtaaatgtttatcatttattgcatgcaacacaggtattacatatgtccagtaatcacga

SEQ ID NO: 169599 - DNA, 75 bp, synthetic construct
  source 1..75: mol_type = other DNA
ctttgcacatccggacgagattgaaaccatcgtgtcccacgtctgcgatattgccattcaggaagaccgccacga

SEQ ID NO: 169600 - DNA, 75 bp, synthetic construct
  source 1..75: mol_type = other DNA
tcaggaagaccgccacgagctgggcgatgacataactccgcgttttaaggcggagtacgtcgacggctcaaaagg

SEQ ID NO: 169601 - DNA, 75 bp, synthetic construct
  source 1..75: mol_type = other DNA
gataactggaagctggtaagacgtaaaccggaagcggaagacagcgcccgcgaaaatggttttgaccttcagggc

SEQ ID NO: 169602 - DNA, 75 bp, synthetic construct
  source 1..75: mol_type = other DNA
cggaagaacgcaccgaatacggagctgctgccgggtgccatccttcgcctgacctgtgcggaatggtggaaacac

SEQ ID NO: 169603 - DNA, 75 bp, synthetic construct
  source 1..75: mol_type = other DNA
aacagcagatgcagcacctgttacggggcggcagcctgtacgttgacggcagcatcattgcaccacagggatttg

SEQ ID NO: 169604 - DNA, 75 bp, synthetic construct
  source 1..75: mol_type = other DNA
gcggggtggcttgacccgtgggaacaaaaaacagacagaaacgggatccacgaatcccgtaaatgaccaaaaaac

SEQ ID NO: 169605 - DNA, 75 bp, synthetic construct
  source 1..75: mol_type = other DNA
gcgataatggttcatgcgcttactgaagaagccaaaggtttctatgctcaccatggatttaaggcatcacaaact

SEQ ID NO: 169606 - DNA, 75 bp, synthetic construct
  source 1..75: mol_type = other DNA
cttcggcgtaacatgccagatcctataccggtgattatactcgctcgcctggcggtagatgtctcattgcacgga

SEQ ID NO: 169607 - DNA, 75 bp, synthetic construct
  source 1..75: mol_type = other DNA
tggatatccgggtaccggaccatctgatagttggtggcagtcaggttttctcctttgcggaacacggtctgcttt

SEQ ID NO: 169608 - DNA, 75 bp, synthetic construct
  source 1..75: mol_type = other DNA
ttgattgatgccaaagaaagcgttccggccatcgcggcggtacgcggtctggggtctatgattgcggcagagttt

SEQ ID NO: 169609 - DNA, 75 bp, synthetic construct
  source 1..75: mol_type = other DNA
aaagggcttggtgcggatttactacatgatgcagttcgtcgttgttacagagtggccgaaaatatcggtgtacgt

SEQ ID NO: 169610 - DNA, 75 bp, synthetic construct
  source 1..75: mol_type = other DNA
aaaggttcgcaacaaatagtcggtttttactctctggccaccgggagtgttaatcatacagaggctgcaggcaac

SEQ ID NO: 169611 - DNA, 75 bp, synthetic construct
  source 1..75: mol_type = other DNA
atggcgctaaatgtactgggtaaacaattcgataaactgcttaatgttacgctgtgttatccggacaataaccgt

SEQ ID NO: 169612 - DNA, 75 bp, synthetic construct
  source 1..75: mol_type = other DNA
atgaaaaagttcgaaaacataactgttctccatgttgatgaatttgattatacaaaccaggaatttctcccggag

SEQ ID NO: 169613 - DNA, 75 bp, synthetic construct
  source 1..75: mol_type = other DNA
ttgattgatgccaaagaaagcgttccggccattgctgcggtacgcggcctggggtcgatgattgcggcagagttt

SEQ ID NO: 169614 - DNA, 75 bp, synthetic construct
  source 1..75: mol_type = other DNA
ttactaccagaatcaatagaaatgaaattctcattagaggaatttatatgtatcttgaacgaagcaaaattagag

SEQ ID NO: 169615 - DNA, 75 bp, synthetic construct
  source 1..75: mol_type = other DNA
agatgtcaaataatcagaatgcaaaaacattaggtgatgaaatcctgtcttttgcatgtgaatattcgaaagctg

SEQ ID NO: 169616 - DNA, 75 bp, synthetic construct
  source 1..75: mol_type = other DNA
tgtggatttacagcctattgccgatgagttacatggcgactacatcaatgacaaaagctttaagcgccattttca

SEQ ID NO: 169617 - DNA, 75 bp, synthetic construct
  source 1..75: mol_type = other DNA
ctggttacgggttattcccgtctgaacaggctcgtaaggactggcaaaatgcccgcaaaaaactatctagggcaa

SEQ ID NO: 169618 - DNA, 75 bp, synthetic construct
  source 1..75: mol_type = other DNA
ctggtcgctacgcgagtgggatagcgcaccaccaaaaattgcccgttggcaacgaaaacgtattcagcaccagga

SEQ ID NO: 169619 - DNA, 75 bp, synthetic construct
  source 1..75: mol_type = other DNA
cgcgagacgttacgacaactggaagccaagacaggtgcgacaagatatctgatgagcattctcgccagagagctg

SEQ ID NO: 169620 - DNA, 75 bp, synthetic construct
  source 1..75: mol_type = other DNA
ggcgtcagaacataatctgtagcgagtgccggaagagcgaagttatgcagcgcgtgctggcgttttatcagggga

SEQ ID NO: 169621 - DNA, 75 bp, synthetic construct
  source 1..75: mol_type = other DNA
cgaattcaccgtggtttatctgtaccggcggcgaagttcaggtagcaacatccgcagagaccaccatgcccgcgc

SEQ ID NO: 169622 - DNA, 75 bp, synthetic construct
  source 1..75: mol_type = other DNA
agcttgtggcgcaggtggagcgattgctgacccttcgcccggcgtgggcatcgcagcttgccgtggcgtataccg

SEQ ID NO: 169623 - DNA, 75 bp, synthetic construct
  source 1..75: mol_type = other DNA
ctggaagtcaaaacaggtgcgacaagatatctgatgagcgttcttgccagagagctggttgctagtggcgatgta

SEQ ID NO: 169624 - DNA, 75 bp, synthetic construct
  source 1..75: mol_type = other DNA
gagtgccggaatagtgaagttatgcagcgtgtactggcgttctatcagggtaattttcaggaggtagcgcagtga

SEQ ID NO: 169625 - DNA, 75 bp, synthetic construct
  source 1..75: mol_type = other DNA
gagtgccggaagagtgaagttatgcagcgcatactagcattctatcagggaaatgctcgatatttattgaagtga

SEQ ID NO: 169626 - DNA, 75 bp, synthetic construct
  source 1..75: mol_type = other DNA
ttttagatactatgttgtacaagtttgatgataatgaaattataacttccgctattgataagctgaagcgttcat

SEQ ID NO: 169627 - DNA, 75 bp, synthetic construct
  source 1..75: mol_type = other DNA
gcccgcaaaaaactatcgagggcaaaggtgaagaaaccggttgtagttgatccggaccttatctggtcattacca

SEQ ID NO: 169628 - DNA, 75 bp, synthetic construct
  source 1..75: mol_type = other DNA
gtggcaaaagtttttacacaagaagagcgggaaaaaattaaagggcaggttgttgatctagtacgccggagtggg

SEQ ID NO: 169629 - DNA, 75 bp, synthetic construct
  source 1..75: mol_type = other DNA
aacgggaagaagtaaaggcgcgtattgtggaactggtacgcagatatggtaggaaaacgcgtaaacaactggaaa

SEQ ID NO: 169630 - DNA, 75 bp, synthetic construct
  source 1..75: mol_type = other DNA
gcccgcaaaaaaatgtcgagagcggcagtgaaaaagaagagcgaccctgacctgatttattcattgctagatggc

SEQ ID NO: 169631 - DNA, 75 bp, synthetic construct
  source 1..75: mol_type = other DNA
gtcgtctaaacataatctgtcgcgagtgccggaagagcgaagttatgcagcgcatactggcattttatcagggaa

SEQ ID NO: 169632 - DNA, 75 bp, synthetic construct
  source 1..75: mol_type = other DNA
tgaacataatctgtcgcgagtgccggaagagtgaggttatgcagcgagtgctggcgttttatcaggggaaatttc

SEQ ID NO: 169633 - DNA, 75 bp, synthetic construct
  source 1..75: mol_type = other DNA
cctgatttattcattgccagatggcgaaatacgtcgctacaacagacgacagaacataatttgtcgcgagtgccg

SEQ ID NO: 169634 - DNA, 75 bp, synthetic construct
  source 1..75: mol_type = other DNA
agaacataatctgtctcgagtgccagaaaagcaaggttatgcagcgtgtgctggcattttatcagggtaattttc

SEQ ID NO: 169635 - DNA, 75 bp, synthetic construct
  source 1..75: mol_type = other DNA
gtgccgtaacagcgaaacgatgcagcgtgtgctggcattctggcgagggagtgcagagggattgatgttctcccc

SEQ ID NO: 169636 - DNA, 75 bp, synthetic construct
  source 1..75: mol_type = other DNA
tgacggagaaatacgtcgctacgacagtcgcctaaacataatctgtcgcgagtgccggaagagcgaagttatgca

SEQ ID NO: 169637 - DNA, 75 bp, synthetic construct
  source 1..75: mol_type = other DNA
cgcgtaaggactggcaaaacgcccgcaaaaaactctcgagggcaaaggtgaagaaaacagctgtggttgatccgg

SEQ ID NO: 169638 - DNA, 75 bp, synthetic construct
  source 1..75: mol_type = other DNA
agttaaaaaaaaatactgtttatgatgatatcattgaagctgcgggtgaattaggtgataaaacgctacttcctg

SEQ ID NO: 169639 - DNA, 75 bp, synthetic construct
  source 1..75: mol_type = other DNA
acggagaaatacgtcgctacgacagtcacctaaacataatctgtcgcgagtaccggaggagtgaagttattcagt

SEQ ID NO: 169640 - DNA, 75 bp, synthetic construct
  source 1..75: mol_type = other DNA
gctgagcgttcttgccagagagctggttgccagtggtgatgtatacaattcaggctacggattattcccgtctga

SEQ ID NO: 169641 - DNA, 75 bp, synthetic construct
  source 1..75: mol_type = other DNA
gttactacaaagattacgctgacggtacggatctgggcgtttacggtgcgcacgacaacgtctacttcggtcgcc

SEQ ID NO: 169642 - DNA, 75 bp, synthetic construct
  source 1..75: mol_type = other DNA
gaagcgttaaccgaactggaaaccggacgcgccgacgcggtggtggtgctggaaaacgatctgcatcgtcacgct

SEQ ID NO: 169643 - DNA, 75 bp, synthetic construct
  source 1..75: mol_type = other DNA
ggaaaacgatctgcatcgtcacgcttctgctacccgcgtgaatgctgcgctggcgaaagcgccgctggtgatggt

SEQ ID NO: 169644 - DNA, 75 bp, synthetic construct
  source 1..75: mol_type = other DNA
caatttgccacgctaagtgcccgttttgacaggcacctttttcagacccgtgcgacaacactacaggcttgtctc

SEQ ID NO: 169645 - DNA, 75 bp, synthetic construct
  source 1..75: mol_type = other DNA
cgcgggtgaccgatctcgtggaacagcaaacgctgcatcgtgaagtggaagcctatgaagcgcgcctggcacgct

SEQ ID NO: 169646 - DNA, 75 bp, synthetic construct
  source 1..75: mol_type = other DNA
tttgcgctgcgtgagctggtgggcgaagaaaacttctacaccggtatcgctcacggtgagcaggaacgtctgcaa

SEQ ID NO: 169647 - DNA, 75 bp, synthetic construct
  source 1..75: mol_type = other DNA
cgagtggttaatgaccaaccacccgcacgactgtccggtatgtgaagaaggcggtaactgccatcttcaggatat

SEQ ID NO: 169648 - DNA, 75 bp, synthetic construct
  source 1..75: mol_type = other DNA
acagcttgaggcggatagtatccctgtacagcgatggttaaaattaggttcgatttttatgtttttcaccattgc

SEQ ID NO: 169649 - DNA, 75 bp, synthetic construct
  source 1..75: mol_type = other DNA
caccggccgggccacggccaccgtcaacacctacctgtcggccctcaagggggtggcgaaggaagcctggatgct

SEQ ID NO: 169650 - DNA, 75 bp, synthetic construct
  source 1..75: mol_type = other DNA
gtatgccacagccgtacatcaaacttaacccggcggatgccgcgaagttgggtgtgaacgcgggcactcgcgtct

SEQ ID NO: 169651 - DNA, 75 bp, synthetic construct
  source 1..75: mol_type = other DNA
agcgtcgtggcgatgatttcattaccctcaacgccgaacaggcaatgcagggcgcagcagatattctgcgtcagt

SEQ ID NO: 169652 - DNA, 75 bp, synthetic construct
  source 1..75: mol_type = other DNA
aaagatcgtccgcgtcagccagtacagcgtcgtggcgatgatttcattaccctcaacgccgaacaggcaatgcag

SEQ ID NO: 169653 - DNA, 75 bp, synthetic construct
  source 1..75: mol_type = other DNA
taatcagattgttattttactgtgtggtggtgataaaagcacacaacagttggatattaagaaggcaaaaatttt

SEQ ID NO: 169654 - DNA, 75 bp, synthetic construct
  source 1..75: mol_type = other DNA
gagtaatgaattagacagcctttcagaagtagttaaaggactcacaaagatagagctgcctggcggcggtggcgg

SEQ ID NO: 169655 - DNA, 75 bp, synthetic construct
  source 1..75: mol_type = other DNA
taaatatcttgggaaaaatataaaattcagagcgttatacaaagaaagcaactctgcatccgcagagagagaaaa

SEQ ID NO: 169656 - DNA, 75 bp, synthetic construct
  source 1..75: mol_type = other DNA
gtaaaagtggcgggtttgctgattcccgcaaccttaaccgccatgctggtgggaattaccgaaccgctggaattt

SEQ ID NO: 169657 - DNA, 75 bp, synthetic construct
  source 1..75: mol_type = other DNA
ccagacggagaaatacgtcgttatgacaggcgtcagaacataatctgtagcgagtgccgggaaagcgaagttatg

SEQ ID NO: 169658 - DNA, 75 bp, synthetic construct
  source 1..75: mol_type = other DNA
gttgccagcggcgatgtatacaactctggttacgggttattcccgtctgaacaggctcgtaaagactggcaaaac

SEQ ID NO: 169659 - DNA, 75 bp, synthetic construct
  source 1..75: mol_type = other DNA
tgaaaaggccgcgcaatccatcggctaaactgcgggatttaccggactgctacaaaattaagctgcgcacactgg

SEQ ID NO: 169660 - DNA, 75 bp, synthetic construct
  source 1..75: mol_type = other DNA
atgacggggataaccatattttatggcgataacatcattcgttatgtggttaatacaaaaaaggggctgagacca

SEQ ID NO: 169661 - DNA, 75 bp, synthetic construct
  source 1..75: mol_type = other DNA
cacgcaaaacagtgcaggataatagaccaaatgaagtcttatcccgtgaaaagatgcgtctggagccagccccga

SEQ ID NO: 169662 - DNA, 75 bp, synthetic construct
  source 1..75: mol_type = other DNA
aaattatcgccggtcgggacatgccggacgaggtccgcgccaaactctgcaaggcgtgcgccttttcccgccgtg

SEQ ID NO: 169663 - DNA, 75 bp, synthetic construct
  source 1..75: mol_type = other DNA
atgctgacaccggcacaacgataccttcagcgcgtgatggcgcatcatcgggctgatccattcagtcgcgaagag

SEQ ID NO: 169664 - DNA, 75 bp, synthetic construct
  source 1..75: mol_type = other DNA
cggaagtccatccccgggaagtgattaaatgcgccctgtatcacaatgccgcagccgtggtgctggcacacaatc

SEQ ID NO: 169665 - DNA, 75 bp, synthetic construct
  source 1..75: mol_type = other DNA
cacaccagcatcgagttagtctataaaatctgtgctttcctgccactattggggatgttgaccatattcctgcct

SEQ ID NO: 169666 - DNA, 75 bp, synthetic construct
  source 1..75: mol_type = other DNA
ttagtttataaaatatgtgctttcctgccacttcttgggatgttgaccatattcttacctgataaccgacataaa

SEQ ID NO: 169667 - DNA, 75 bp, synthetic construct
  source 1..75: mol_type = other DNA
ggtactggcggtcagcattctgttaatcctcattttctcgaaatatttctatatggcgagcatcagcagctatta

SEQ ID NO: 169668 - DNA, 75 bp, synthetic construct
  source 1..75: mol_type = other DNA
ttaagtggtctggtgctgctggcgctggcgggcagttttggcgcagttctgctggcggcggcgctggtcggtacc

SEQ ID NO: 169669 - DNA, 75 bp, synthetic construct
  source 1..75: mol_type = other DNA
ttctggactctttttcggttttgcttttggtatgggaggtctgggagcggcagttctggggcttatcgccgatca

SEQ ID NO: 169670 - DNA, 75 bp, synthetic construct
  source 1..75: mol_type = other DNA
gttctggcggtcagcattctgttaatcttcattttctcgaaatatttctatatggcgagcatcagcagctattac

SEQ ID NO: 169671 - DNA, 75 bp, synthetic construct
  source 1..75: mol_type = other DNA
tgcgccgcgctgcgggagctgaacaagtaccgggatattgtccgacagattgtagattcctccagtcttattgtg

SEQ ID NO: 169672 - DNA, 75 bp, synthetic construct
  source 1..75: mol_type = other DNA
ggagaggtcgaacaaaaagttaccgcagacatgatgattgagtttatcggtcaggatggggctaaaacgtgtgag

SEQ ID NO: 169673 - DNA, 75 bp, synthetic construct
  source 1..75: mol_type = other DNA
agaaatcgtggaagacattgtgaggttacagccatcgatcaccgaaatgaaagcagatgacctgattctaccatc

SEQ ID NO: 169674 - DNA, 75 bp, synthetic construct
  source 1..75: mol_type = other DNA
cagcaataagcaatccactgccgcgtaataaggtcgtactggctgtttgcgtgctgctggtactgattttctcga

SEQ ID NO: 169675 - DNA, 75 bp, synthetic construct
  source 1..75: mol_type = other DNA
ctcagccagcaggtgctgcgttaccagtacaggaagccgcaacacaggaagaaattaaaacagaaactgtggcgg

SEQ ID NO: 169676 - DNA, 75 bp, synthetic construct
  source 1..75: mol_type = other DNA
tcacagccgtcgttcaccagaaaacatccggatggtctgattttaccatcgctgtatgtgactaaccgtgagctg

SEQ ID NO: 169677 - DNA, 75 bp, synthetic construct
  source 1..75: mol_type = other DNA
ctgtgggggacattgtgcagttactaccatcgttcactgaaacgcgagccaatgacctgattttaccatcgctgc

SEQ ID NO: 169678 - DNA, 75 bp, synthetic construct
  source 1..75: mol_type = other DNA
tgagcgataagtaccagactcacgtcactaaagagcagcagctggctgccagcgaaatgtcactggacgaaagca

SEQ ID NO: 169679 - DNA, 75 bp, synthetic construct
  source 1..75: mol_type = other DNA
gctgcgcagggcgaaaagtgatgttcagaagtgggagcgagtctgcgccgcgctgcgggagctgaacaagcaccg

SEQ ID NO: 169680 - DNA, 75 bp, synthetic construct
  source 1..75: mol_type = other DNA
gcggaaaccgatggtaaagcctttcctcagccagcaggtgttgcgttaccagtacaggaaatgatggcacaggaa

SEQ ID NO: 169681 - DNA, 75 bp, synthetic construct
  source 1..75: mol_type = other DNA
aagtggcttcaacgctggcaatggcaatcagcaaagggcgtctgattcgcgtgaatcagggcggtaaatttcgtt

SEQ ID NO: 169682 - DNA, 75 bp, synthetic construct
  source 1..75: mol_type = other DNA
aagcgatgggaaaagccacgtcggtagaactggctacgcgacttgatatcagtcgagaagaagtgctgaacgagc

SEQ ID NO: 169683 - DNA, 75 bp, synthetic construct
  source 1..75: mol_type = other DNA
atgggagcgagtctgtgccgcgctgcgggagctgaataaatatcgcgatattgtcgcccagctttgccaggagga

SEQ ID NO: 169684 - DNA, 75 bp, synthetic construct
  source 1..75: mol_type = other DNA
gtcgggcgaaaagtgatatccggaaatgggagcgagtctgtgccgcgctgcgggagctgaataaatatcgcgata

SEQ ID NO: 169685 - DNA, 75 bp, synthetic construct
  source 1..75: mol_type = other DNA
gtgctgcttgcgctggcgggcagttttggcgcagttctgctggcggcggcgctggtcggtaccggttcatcggtc

SEQ ID NO: 169686 - DNA, 75 bp, synthetic construct
  source 1..75: mol_type = other DNA
aaacagaaactgtggcggacattgtgcagccgttgccatcgtttaccgaaacgcaagcagatgagctgatttttc

SEQ ID NO: 169687 - DNA, 75 bp, synthetic construct
  source 1..75: mol_type = other DNA
ctggcacgcgttaatcagaacggtaaatttcgttactgcatgccaggcgagaatttaccagcagaactgaaagcc

SEQ ID NO: 169688 - DNA, 75 bp, synthetic construct
  source 1..75: mol_type = other DNA
gcataccgggcgataatttaccagcagagccgaaagcagcatcggtagcggaaactgatggtaaggcctttcctc

SEQ ID NO: 169689 - DNA, 75 bp, synthetic construct
  source 1..75: mol_type = other DNA
tatgaatccgccgttcatccacgggcaggatatccggcatatcctgcgggctttttccctgttgcgtccgggggg

SEQ ID NO: 169690 - DNA, 75 bp, synthetic construct
  source 1..75: mol_type = other DNA
ctcagttcatttctgacgagtacgcctatcacatcgacactgagcagaagaatgaaattcaacagctcgagatgg

SEQ ID NO: 169691 - DNA, 75 bp, synthetic construct
  source 1..75: mol_type = other DNA
ttggtaaaaaattacagaaagcggagggcgtggttgaagggatgttaatgttacttggtgtcagactgaaaatgg

SEQ ID NO: 169692 - DNA, 75 bp, synthetic construct
  source 1..75: mol_type = other DNA
taccgttttctgacgtccgcgaggagctgccacgcggcacgtttgcttatacccgtgttccgacgatgattattc

SEQ ID NO: 169693 - DNA, 75 bp, synthetic construct
  source 1..75: mol_type = other DNA
ccttttccctgttgcgtccggggggcgtgctggtcgccgtctgtctcaacgggccgccagcaggagaagctgtta

SEQ ID NO: 169694 - DNA, 75 bp, synthetic construct
  source 1..75: mol_type = other DNA
atgtgtgatgcggtggagattaacagcgggctggtccggtatctgcgggataattttaacggtgtcagggtacag

SEQ ID NO: 169695 - DNA, 75 bp, synthetic construct
  source 1..75: mol_type = other DNA
tccattgccgccggttttaagggattaattccttcaaaagtaagatctcgtccgcaatgctgtgacgatgacgtg

SEQ ID NO: 169696 - DNA, 75 bp, synthetic construct
  source 1..75: mol_type = other DNA
atgcgtgatattcagatggttcttgagcgttggggggcatgggcggcttataatcatgaagatgtgacctggtcg

SEQ ID NO: 169697 - DNA, 75 bp, synthetic construct
  source 1..75: mol_type = other DNA
aagtgtccggtaccaaagcggatctgattcagaccgtgaagtctgtgaaaccagacgccgtctttgccgacgaac

SEQ ID NO: 169698 - DNA, 75 bp, synthetic construct
  source 1..75: mol_type = other DNA
atgcgtgatattcagatggttcttgagcgttggggggcatgggcggctaataaccacgaggatgtaacttggtca

SEQ ID NO: 169699 - DNA, 75 bp, synthetic construct
  source 1..75: mol_type = other DNA
gcggagaccaccagcgatgtgcagatggaaacgactcagccagagaaagtcgaaaatactgatccggtacaacca

SEQ ID NO: 169700 - DNA, 75 bp, synthetic construct
  source 1..75: mol_type = other DNA
gctcaacccaggtgaaagatgcccgcgtcagcctgatgtacttcaacgcacgccatgtggctaaaaccatcccgc

SEQ ID NO: 169701 - DNA, 75 bp, synthetic construct
  source 1..75: mol_type = other DNA
gccatgataatttgtggctgtatggcacgattaaacaagaataatcagtatttgcacgatttgttggtcgattat

SEQ ID NO: 169702 - DNA, 75 bp, synthetic construct
  source 1..75: mol_type = other DNA
gttacaaaaggctgagggcataattgaagggatgttaatggcattagatatccggttagagatggatatcgttgt

SEQ ID NO: 169703 - DNA, 75 bp, synthetic construct
  source 1..75: mol_type = other DNA
aatacactggcgataaagaaggaaaaagacacgctattgtcaacggtgttcttatggttcatcgcggatggggta

SEQ ID NO: 169704 - DNA, 75 bp, synthetic construct
  source 1..75: mol_type = other DNA
agtcgtgaagaggctgtcaacgagctgtgggaactcaaaagaaaaggcgtcgttgataaaactggtcacacctgg

SEQ ID NO: 169705 - DNA, 75 bp, synthetic construct
  source 1..75: mol_type = other DNA
tttgcacgatttgttggtggattattacgtaggtggaatgacatttatggctcttgcacgtaagcatagatgttc

SEQ ID NO: 169706 - DNA, 75 bp, synthetic construct
  source 1..75: mol_type = other DNA
aggaacaacagtgatctgcatgacttgctggttgattattacgtgttgggggagacgttcatggcgctggcacgg

SEQ ID NO: 169707 - DNA, 75 bp, synthetic construct
  source 1..75: mol_type = other DNA
acatgggaaacctggtacatgcgctggcgttgcagccagaacagctcgatgaagaatttagcgttgaacccgtaa

SEQ ID NO: 169708 - DNA, 75 bp, synthetic construct
  source 1..75: mol_type = other DNA
gatgatgctgggagtgaggcttgagatggatcggtatgttgagcgtgaattgccgggagggagaacctctgtatt

SEQ ID NO: 169709 - DNA, 75 bp, synthetic construct
  source 1..75: mol_type = other DNA
aacgttggggggcatgggcggctaataatcatgaggatgtgacctggtcgtccattgctgccggttttaagggat

SEQ ID NO: 169710 - DNA, 75 bp, synthetic construct
  source 1..75: mol_type = other DNA
gtctggcacggaaacttggatgttcggatacctgtgttggtaagcgcctgcagaaggcggaaggggttatcgatg

SEQ ID NO: 169711 - DNA, 75 bp, synthetic construct
  source 1..75: mol_type = other DNA
gttacagaaggctgagggcataattgaagggatgttaatggcattagatatccggttagatatggatatcgttgc

SEQ ID NO: 169712 - DNA, 75 bp, synthetic construct
  source 1..75: mol_type = other DNA
gtaggtggtatgacgtttatggcgcttgcccgtaaacatgggcgttctgattgctgggttgggcgcttattgcaa

SEQ ID NO: 169713 - DNA, 75 bp, synthetic construct
  source 1..75: mol_type = other DNA
caccgtgccggacagcaacgtctggccgccgtacagcgggccatgcagcagggggccgcgaatgattactggttt

SEQ ID NO: 169714 - DNA, 75 bp, synthetic construct
  source 1..75: mol_type = other DNA
caccgtgccggacagcaacgactggccgccgttcagcgggccatgcagcagggggccgcgaatgattactggttt

SEQ ID NO: 169715 - DNA, 75 bp, synthetic construct
  source 1..75: mol_type = other DNA
ttcttcatttcattccgacggctgaaggacaaggcgaaaacggtgatatcggcccattaaggccattcgctataa

SEQ ID NO: 169716 - DNA, 75 bp, synthetic construct
  source 1..75: mol_type = other DNA
cagtccggacgccggtatatcggtatcgagctgcttgaacagtatcaccgtgccggacagcaacgactggctgcc

SEQ ID NO: 169717 - DNA, 75 bp, synthetic construct
  source 1..75: mol_type = other DNA
caccgtgccggacagcaacggctggccgccgttcaacgggccatgcagcagggggccgcgaatgattactggttt

SEQ ID NO: 169718 - DNA, 75 bp, synthetic construct
  source 1..75: mol_type = other DNA
caccgtgccggacagcaacgtctggccgccgtgcaacgggccatgcagcagggggccgcgaatgattactggttt

SEQ ID NO: 169719 - DNA, 75 bp, synthetic construct
  source 1..75: mol_type = other DNA
cggaagacttctatctaaaaacattatgctatcccgtagggctagggttcattttggcgacctttttcccttact

SEQ ID NO: 169720 - DNA, 75 bp, synthetic construct
  source 1..75: mol_type = other DNA
gaaaaatatcattgaaggcgatggaattgaacgttatgaactggactggaatataaaaccacaaaatattatcac

SEQ ID NO: 169721 - DNA, 75 bp, synthetic construct
  source 1..75: mol_type = other DNA
ctggtagtgagcctttattgtggggcaatcaatcagttactggttatcttccatcatgaccagttgcaaagcatg

SEQ ID NO: 169722 - DNA, 75 bp, synthetic construct
  source 1..75: mol_type = other DNA
tatacaaggggggggggtactattgctctatatattatctttgggtattgcgttaggtatccagaacttaacgat

SEQ ID NO: 169723 - DNA, 75 bp, synthetic construct
  source 1..75: mol_type = other DNA
cccgcacctcttcgctatcttcttctgaccgttcccgccctctctcagcctcagcgttccccgacacactgcccg

SEQ ID NO: 169724 - DNA, 75 bp, synthetic construct
  source 1..75: mol_type = other DNA
agacaaaaagtgaaagctgaaagtcttgaagattatgaaaggcaaaggggaagattagagcttgaaaagcaaaag

SEQ ID NO: 169725 - DNA, 75 bp, synthetic construct
  source 1..75: mol_type = other DNA
aaccgtatattggattgcataatcaatctggtgactacgtatcagctaaatatggtcaaacgaatggttggaatg

SEQ ID NO: 169726 - DNA, 75 bp, synthetic construct
  source 1..75: mol_type = other DNA
tgaaaccgatgcgccggatctcggccagttcgaaaccctgaccacattccagattacctatctctgctgtggggt

SEQ ID NO: 169727 - DNA, 75 bp, synthetic construct
  source 1..75: mol_type = other DNA
tgaccagaaggaaactctgccagtacaggttaggctgtgcattgatgatctattgacacatgtcactaatattga

SEQ ID NO: 169728 - DNA, 75 bp, synthetic construct
  source 1..75: mol_type = other DNA
aaaaagaaccagcaggctgaacgctacgcgcgcgggaccctgcgcaaaatattcgaacgtctggaccgcaccgac

SEQ ID NO: 169729 - DNA, 75 bp, synthetic construct
  source 1..75: mol_type = other DNA
gtatggcatccgcacggtggagcctcaccatgacggcaccgtgcactggcatatgatggtctttgcacatccgga

SEQ ID NO: 169730 - DNA, 75 bp, synthetic construct
  source 1..75: mol_type = other DNA
aaacgaatggttggaatggttatgttgttggctggacagcagtattaccatttacgttatttgacgaaaaatttg

SEQ ID NO: 169731 - DNA, 75 bp, synthetic construct
  source 1..75: mol_type = other DNA
atcatcgcagccagcagttaatggaactgaaaggtgttgggcccaccacagcgagtgcgctggtcgccagtattg

SEQ ID NO: 169732 - DNA, 75 bp, synthetic construct
  source 1..75: mol_type = other DNA
cgggcttgctactgcggcagacaggtttccgtattttacggggaatgatgttgccagtctggcaaccctgacaaa

SEQ ID NO: 169733 - DNA, 75 bp, synthetic construct
  source 1..75: mol_type = other DNA
catccgtgcgaaaaaccggcagaaatgctgcagcagataatcagcgcaagcagtcgtccgggtgacctggttgca

SEQ ID NO: 169734 - DNA, 75 bp, synthetic construct
  source 1..75: mol_type = other DNA
ttggtacaggttctttaaccggtggcaagactaccacacctaaagatttccagattcgtttacaggattgtaatt

SEQ ID NO: 169735 - DNA, 75 bp, synthetic construct
  source 1..75: mol_type = other DNA
tggataccgccaccacgaaaggtaaaccaaaccagacgctgaactttaaagcgtggctggtgggtgaaagtgaaa

SEQ ID NO: 169736 - DNA, 75 bp, synthetic construct
  source 1..75: mol_type = other DNA
gccaatcgtgatggatgcttcaaccagcaaaggtaaagacaagcaaacgctgaactttaaagcctggctggtggg

SEQ ID NO: 169737 - DNA, 75 bp, synthetic construct
  source 1..75: mol_type = other DNA
gagcgagtttgcgccgcgctgcgggagctgaacaagcaccgggatattgtccgacagattgtcgattcctccagt

SEQ ID NO: 169738 - DNA, 75 bp, synthetic construct
  source 1..75: mol_type = other DNA
cgttgataaaacaggtcatacctggtttctggctggtgaaggtgaatccggggtaaccgaagagcagccagtaca

SEQ ID NO: 169739 - DNA, 75 bp, synthetic construct
  source 1..75: mol_type = other DNA
gcatcggtagcggaaactgatggtaaagcctttcctcagcctgcatgtgttgcgttaccagtacaggaggctgca

SEQ ID NO: 169740 - DNA, 75 bp, synthetic construct
  source 1..75: mol_type = other DNA
tgcgccgcgctgcgggagctgaacaagcaccgggatattgtacggcagatgaattgttccggagaggatgtgaaa

SEQ ID NO: 169741 - DNA, 75 bp, synthetic construct
  source 1..75: mol_type = other DNA
aggattggaaaaacgcccgcaaaaaactatccagggcaaaggtgaaaaaaacggttgtggttgatcctgacctta

SEQ ID NO: 169742 - DNA, 75 bp, synthetic construct
  source 1..75: mol_type = other DNA
gaacgtgtctgcgccgcgctgcaggagctgaacaagcaccgggatattatacggcagatgaattgttccggagag

SEQ ID NO: 169743 - DNA, 75 bp, synthetic construct
  source 1..75: mol_type = other DNA
aagttgtatcggtagcgaaaacatctggtaaagcctttcctcagccagccggtgttgcgttaccagtacaggaag

SEQ ID NO: 169744 - DNA, 75 bp, synthetic construct
  source 1..75: mol_type = other DNA
acattgtgcagtcgttgccaccgttcaccgaaacgcaagcggatgacctggttttaccatcgctgcatatggcaa

SEQ ID NO: 169745 - DNA, 75 bp, synthetic construct
  source 1..75: mol_type = other DNA
acgcctgattcgcgtaaaccagaacggtaaatttcgttactgcatgccgggcgataatttaccagcagagccgaa

SEQ ID NO: 169746 - DNA, 75 bp, synthetic construct
  source 1..75: mol_type = other DNA
aagcctttcctcagccagcaagtgttgcgttaccagtacaggaagctgcaacacaggaagatattaaaacagaaa

SEQ ID NO: 169747 - DNA, 75 bp, synthetic construct
  source 1..75: mol_type = other DNA
agggaggtcgaacgaaaagttaccgctgacatgatgattgagtttatcggtcaggagggagctaaaacgtgtgag

SEQ ID NO: 169748 - DNA, 75 bp, synthetic construct
  source 1..75: mol_type = other DNA
atggagaccgtttttgacgcactgaaagcgatgggaaaagccacgtcggtagaactggctgcgcgacttgatatc

SEQ ID NO: 169749 - DNA, 75 bp, synthetic construct
  source 1..75: mol_type = other DNA
tgccgtgtctggtatggcagccgccacagtctgtgtccccggccagctcactggtgttctaccgtctcgtcagtg

SEQ ID NO: 169750 - DNA, 75 bp, synthetic construct
  source 1..75: mol_type = other DNA
ctattaccgggcgcaagcgggtgacgctgattgccgaggggcagcgctgtgagcggctggctccctgccggttac

SEQ ID NO: 169751 - DNA, 75 bp, synthetic construct
  source 1..75: mol_type = other DNA
ccgccgctgactcggtggccggtatggtggaaagcgtccgggaaagcctgccggtggctgaacagcaacgcattc

SEQ ID NO: 169752 - DNA, 75 bp, synthetic construct
  source 1..75: mol_type = other DNA
gggcgatccccggtgctatggcgagccagtttgccgcgctggtgggcgcttgtgtcgttggcttaatcgtctttg

SEQ ID NO: 169753 - DNA, 75 bp, synthetic construct
  source 1..75: mol_type = other DNA
gcactgccactggctgatattcgggtcgtcacgcttcatcccgacagttttacccccgacgccacggtgcgcgac

SEQ ID NO: 169754 - DNA, 75 bp, synthetic construct
  source 1..75: mol_type = other DNA
ctggtgttctaccgtctcgtcagtgccattaccgcctgccagcgggtactgctgctggccgagggagagcgctgt

SEQ ID NO: 169755 - DNA, 75 bp, synthetic construct
  source 1..75: mol_type = other DNA
tgcgttaccagtacaggaggttgcaacacaggaagatattaaaacagaaactgtggcggacattgtgcagtcgct

SEQ ID NO: 169756 - DNA, 75 bp, synthetic construct
  source 1..75: mol_type = other DNA
gccggaagaaactaccacggcaacagtagcgaaaatctcagagtgcgatttaaccgcgacgattgaacaacgcgg

SEQ ID NO: 169757 - DNA, 75 bp, synthetic construct
  source 1..75: mol_type = other DNA
agcagagccgaaagccgtgctggtaacggaaagtgatggtaaggcctttcctcagccagcaggtgctgcgttacc

SEQ ID NO: 169758 - DNA, 75 bp, synthetic construct
  source 1..75: mol_type = other DNA
gccggctgctgagtgagcaatatcccgcagaaacccacctgaatatcattgtctggtctcctgcggatattgaag

SEQ ID NO: 169759 - DNA, 75 bp, synthetic construct
  source 1..75: mol_type = other DNA
ttccggcggtgatggtgccggcggacctgcttgaaaccctgctgaccactgccgaacaggcgttatggcacagag

SEQ ID NO: 169760 - DNA, 75 bp, synthetic construct
  source 1..75: mol_type = other DNA
cctgcttgaaaccctgctgacgactgcggaacaggcgttatggcacagggaatgggccgcccgggatgataacaa

SEQ ID NO: 169761 - DNA, 75 bp, synthetic construct
  source 1..75: mol_type = other DNA
gcatgccgatgaacagcaggcagtgagtgatttcattcgtctgtttaatgtgaaaacgccgtcgatggaacaggc

SEQ ID NO: 169762 - DNA, 75 bp, synthetic construct
  source 1..75: mol_type = other DNA
atcaactgattaaccagttcaaagccgatggcttgagcatcattctggtgtcatcggagatgccagaagtattag

SEQ ID NO: 169763 - DNA, 75 bp, synthetic construct
  source 1..75: mol_type = other DNA
tgaaaacgccgtcgatggaacaggcaattggtttgctctccggtggcaatcagcaaaaagtggcgattgcccgtg

SEQ ID NO: 169764 - DNA, 75 bp, synthetic construct
  source 1..75: mol_type = other DNA
cgttaacgatgtctcttttaccctacgtaaaggtgaaattctcggcgtctctggtttgatgggcgccggccgcac

SEQ ID NO: 169765 - DNA, 75 bp, synthetic construct
  source 1..75: mol_type = other DNA
ggaagaacaatatccacacctggaaaaagcgccgggagatatccgtctgaaagttgataatctctgcggacctgg

SEQ ID NO: 169766 - DNA, 75 bp, synthetic construct
  source 1..75: mol_type = other DNA
gaaatcgcgaaggtattaagctttgagtcgaaagttatcattatggatgaaccgaccgatgcgctgaccgatacc

SEQ ID NO: 169767 - DNA, 75 bp, synthetic construct
  source 1..75: mol_type = other DNA
tcaaagaattggaagataagtatgattgcagataaattcaatatatctgaagtatcagtaagaaagcgcctgagt

SEQ ID NO: 169768 - DNA, 75 bp, synthetic construct
  source 1..75: mol_type = other DNA
aactaacaacaaactttataagaataaaaagaataactctaaatgcttttacaataatgcacactgataattgtt

SEQ ID NO: 169769 - DNA, 75 bp, synthetic construct
  source 1..75: mol_type = other DNA
tggtggaccaacaacgaaagacccaggatgaaatcgacaatgaaatcattctggccgtcaaagaggtgttggcta

SEQ ID NO: 169770 - DNA, 75 bp, synthetic construct
  source 1..75: mol_type = other DNA
tcaatatcctggcggtgtgcgtacgcggtggggcgatgatgtattacgtcacatggattttgggtacgccggaag

SEQ ID NO: 169771 - DNA, 75 bp, synthetic construct
  source 1..75: mol_type = other DNA
tctacttaccttactttataccatcgtcaatatcccttactgcgcattgggtggtgtaatcaccaatgacccgac

SEQ ID NO: 169772 - DNA, 75 bp, synthetic construct
  source 1..75: mol_type = other DNA
atgcgatttccgatccttgcatggggttgttggccgatcgaacgcgctctcgctggggtaaatttcgtccgtggg

SEQ ID NO: 169773 - DNA, 75 bp, synthetic construct
  source 1..75: mol_type = other DNA
tcaacagcagtaaaccgccgcttagtcaggtgaacctggagaaatttaataatattaagaaagcgctaagtgaag

SEQ ID NO: 169774 - DNA, 75 bp, synthetic construct
  source 1..75: mol_type = other DNA
ggaaactcagtggcctctaccagaagcgtcattagcgccgctggtgacggcttttcagacacagagtgaagagac

SEQ ID NO: 169775 - DNA, 75 bp, synthetic construct
  source 1..75: mol_type = other DNA
ggtggaggacatacgcggcgttctggccgtatttgctgaacgtcgtcaggaccgcaatggtccctatgtcattct

SEQ ID NO: 169776 - DNA, 75 bp, synthetic construct
  source 1..75: mol_type = other DNA
tcgtacggtcgatgtccacattcgtcgcctgcgtaaagcactggagcccggcgggcatgaccgcatggtgcagac

SEQ ID NO: 169777 - DNA, 75 bp, synthetic construct
  source 1..75: mol_type = other DNA
acctatctgcaatggcggttgtcctaagcatcgtattactaaagtaaacaatgagactgtttcttatttttgcga

SEQ ID NO: 169778 - DNA, 75 bp, synthetic construct
  source 1..75: mol_type = other DNA
gtttatcgacaacagccagccaccgcttagcgaggtaaatcaggcgaagtttaacaatatcaagaaagcactaag

SEQ ID NO: 169779 - DNA, 75 bp, synthetic construct
  source 1..75: mol_type = other DNA
atgacgttaccgtttttctttcgtgacggacaatttattgctgagcgcgaagtggcatcactgaccgaagattct

SEQ ID NO: 169780 - DNA, 75 bp, synthetic construct
  source 1..75: mol_type = other DNA
gctgggcatgtcagtaaaagagaacatgtcgctaactgccctgcgttacttcagccgtgctgatggcagtctgaa

SEQ ID NO: 169781 - DNA, 75 bp, synthetic construct
  source 1..75: mol_type = other DNA
atatctcccaccgcatgaaagaaatcttcgagatttgcgatgacgttaccgtttttcgtgacgggcaatttattg

SEQ ID NO: 169782 - DNA, 75 bp, synthetic construct
  source 1..75: mol_type = other DNA
atgaagattattagcaaacgcaaggcgatgatgatttaccgccagcatcctcagtttcggttgtttcgcttctgt

SEQ ID NO: 169783 - DNA, 75 bp, synthetic construct
  source 1..75: mol_type = other DNA
gcgtctgtcattacaccggtaaggtagttcctgacattcccggcgtgctggcggtatacgccgaacgccgccagg

SEQ ID NO: 169784 - DNA, 75 bp, synthetic construct
  source 1..75: mol_type = other DNA
cgttccggatatcacaggagtcctggcggtatacgccgaacgtcgccaggaccgcaacgggccttatgcctgcct

SEQ ID NO: 169785 - DNA, 75 bp, synthetic construct
  source 1..75: mol_type = other DNA
cgatactattttaaaatcgtggtctacaaatgttgaaagtgtgaagcaggctttcgaagacactgtaagcagaaa

SEQ ID NO: 169786 - DNA, 75 bp, synthetic construct
  source 1..75: mol_type = other DNA
aaccggtaaccagcacaagtaccagacccgtgtggtatcgaacgccaataaggttaacctgaagttcgaagaagc

SEQ ID NO: 169787 - DNA, 75 bp, synthetic construct
  source 1..75: mol_type = other DNA
cgaccggtgaaaccggaaaaaccatcacagagtcattcatgaacaagccgaaagacattctttcaccggatgcac

SEQ ID NO: 169788 - DNA, 75 bp, synthetic construct
  source 1..75: mol_type = other DNA
gtgacagatattgagctgactggtaaatcaatcacactgacggataagtatggcagcagcgttcacctgaacacg

SEQ ID NO: 169789 - DNA, 75 bp, synthetic construct
  source 1..75: mol_type = other DNA
gtaatcatgggcgtctacacaccagacgaattacaggaaacggcaccgcgcgttgagcgagacattactccgcaa

SEQ ID NO: 169790 - DNA, 75 bp, synthetic construct
  source 1..75: mol_type = other DNA
aggatggagaagtaaagctgcagcggtgaatgttctcattgaacctttgtggctatttatagaggagtcaaaatt

SEQ ID NO: 169791 - DNA, 75 bp, synthetic construct
  source 1..75: mol_type = other DNA
gcgtcgccccttctgtcgcttttggccttggtacagcgaatcgtttgtatcttaattatctgcatgtcacccagc

SEQ ID NO: 169792 - DNA, 75 bp, synthetic construct
  source 1..75: mol_type = other DNA
cggcgcggtgggaacgccagcatttaccgaaggttattgggtcgccgacgctaaactggggtatcgggttaatcg

SEQ ID NO: 169793 - DNA, 75 bp, synthetic construct
  source 1..75: mol_type = other DNA
gtgatatggggatgtcgacagaagtcattaagcaggcacttcagctttctgatgagcagattcgggaagctcttc

SEQ ID NO: 169794 - DNA, 75 bp, synthetic construct
  source 1..75: mol_type = other DNA
cccttcaaccggataccctatgcatggaggctttgactcagcgggaaatacttttgggactcgttggcaggatta

SEQ ID NO: 169795 - DNA, 75 bp, synthetic construct
  source 1..75: mol_type = other DNA
cagcccaccagcaatgtggatagctggacgtggtcacgcacggcgaatactaaagatgtgagtaataaaatcctc

SEQ ID NO: 169796 - DNA, 75 bp, synthetic construct
  source 1..75: mol_type = other DNA
gaccaacctgacctcgacgttctataccggttctatcggtcatgatgtcagtaccggcgtggaatttacccgtga

SEQ ID NO: 169797 - DNA, 75 bp, synthetic construct
  source 1..75: mol_type = other DNA
ccaaacaccatggtgccgccaaaaggtgaagtatcggtggatatcacgcatgctgcaaccggggatatcagtttt

SEQ ID NO: 169798 - DNA, 75 bp, synthetic construct
  source 1..75: mol_type = other DNA
atacattacagctggcaattattagccgcataaaaatgttttatcgccccacgaacctggcaatggcacctgaag

SEQ ID NO: 169799 - DNA, 75 bp, synthetic construct
  source 1..75: mol_type = other DNA
ttgggccgttggtggagatataagtggatcacttttcatccgtcattgacaaaagtgtcagatatgcagaaaaat

SEQ ID NO: 169800 - DNA, 75 bp, synthetic construct
  source 1..75: mol_type = other DNA
aatagctgcagaaataaaacatactggagtttatacagcatcagctgcttcgcagatgttatctagggattttaa

SEQ ID NO: 169801 - DNA, 75 bp, synthetic construct
  source 1..75: mol_type = other DNA
gccgctggttaatttaattggtggtgataataaaccactcggtttccagggcggtatcgcggtcctttccgtggt

SEQ ID NO: 169802 - DNA, 75 bp, synthetic construct
  source 1..75: mol_type = other DNA
atgaagagtgaagtgttgtccgttaaagagaaaattggttatggcatgggagacgccgccagccacattattttc

SEQ ID NO: 169803 - DNA, 75 bp, synthetic construct
  source 1..75: mol_type = other DNA
cagatggtacaagaccagtataaagatgttcctgatgcacaaaggccttggttttttcagcagcactggttcgaa

SEQ ID NO: 169804 - DNA, 75 bp, synthetic construct
  source 1..75: mol_type = other DNA
atggttttgttaaagccgttggtggcgctggaaacgcattgggcattcttgctgccatggctcttcttagcggca

SEQ ID NO: 169805 - DNA, 75 bp, synthetic construct
  source 1..75: mol_type = other DNA
gtgttgggggaagtcttacggctggactgagtgcgataccttcgaagggtattacgattgttcgagaaacaaatg

SEQ ID NO: 169806 - DNA, 75 bp, synthetic construct
  source 1..75: mol_type = other DNA
ccaaaatttggctggttgccggtatcaccgatatgagaaatggcttcaacggcctggctgcgaaagtacaaacgg

SEQ ID NO: 169807 - DNA, 75 bp, synthetic construct
  source 1..75: mol_type = other DNA
ggcgaaaaggcttccctaattatcctcccgaatttaaacagctgctcgttgctgcctcctgtgaacccgggatat

SEQ ID NO: 169808 - DNA, 75 bp, synthetic construct
  source 1..75: mol_type = other DNA
ttctatttccctaatgtgctgaagtatgaccctgatcagtttaagcagcagttagaaagcgatgctgatggaatg

SEQ ID NO: 169809 - DNA, 75 bp, synthetic construct
  source 1..75: mol_type = other DNA
actacacccgcacggcgcaggtgctcatggacacaatggcagaagcacatatgtgggcggtggacaaaccgctga

SEQ ID NO: 169810 - DNA, 75 bp, synthetic construct
  source 1..75: mol_type = other DNA
accaatgtgcagagcgcaattgcaaaggccggtaaaaaaggtacgctggcggcgtcgttgcaggccatcgctgac

SEQ ID NO: 169811 - DNA, 75 bp, synthetic construct
  source 1..75: mol_type = other DNA
aacgccaaattccgcgagctgaaatctaacggctacatcgtggacggtgaatgctggttcgacgaggaatcgaac

SEQ ID NO: 169812 - DNA, 75 bp, synthetic construct
  source 1..75: mol_type = other DNA
ggcgttaagccgcgcattctcggcgtgccgggtctcgataccaaagaggtcgcagtcgcacttgcttcggtctgt

SEQ ID NO: 169813 - DNA, 75 bp, synthetic construct
  source 1..75: mol_type = other DNA
tcggtgtgccgggtcacgatactcaggaagtggcgacctcgcttgtctccgtggctcagaaactgcgcgctttcg

SEQ ID NO: 169814 - DNA, 75 bp, synthetic construct
  source 1..75: mol_type = other DNA
aaagccctgatgggcgctgagtcggttaccggcgttaaaccgcgtattctcggcgtaccgggactggacaccaaa

SEQ ID NO: 169815 - DNA, 75 bp, synthetic construct
  source 1..75: mol_type = other DNA
actgaaagccctgatgggggctgagtcggttaccggcgttaaaccgcgaattctcggcgtaccgggactggacac

SEQ ID NO: 169816 - DNA, 75 bp, synthetic construct
  source 1..75: mol_type = other DNA
aggccggtaaaaaaggcacgctggcggcgtcgttgcaggccatcgctgaccagtcaaaaccgatcaccgttgtcg

SEQ ID NO: 169817 - DNA, 75 bp, synthetic construct
  source 1..75: mol_type = other DNA
gctggcggcaatgttggggcaaatcggcacacccggcggcggttttggtctttcttaccattttgccaatggtgg

SEQ ID NO: 169818 - DNA, 75 bp, synthetic construct
  source 1..75: mol_type = other DNA
tcggcctgcgcgcctacatcgaccagaccgtcggctggcataaaaccctgtctaacgtcggcgtgcagggtgtca

SEQ ID NO: 169819 - DNA, 75 bp, synthetic construct
  source 1..75: mol_type = other DNA
ggcgttaagccgcgcattctcggcgtgccggggctcgataccaaagaggtcgcagtcgcacttgcgtcggtctgt

SEQ ID NO: 169820 - DNA, 75 bp, synthetic construct
  source 1..75: mol_type = other DNA
cgacgaggaaacgaaactcgcgcagaccgtttccaatatcatcggcaccactgacgaaaacggtcagtacaccgg

SEQ ID NO: 169821 - DNA, 75 bp, synthetic construct
  source 1..75: mol_type = other DNA
accaatgtgcagagcgcaattgcaaaggctggtaaaaaaggcacgctggcggcgtcgttgcaggccatcgctgac

SEQ ID NO: 169822 - DNA, 75 bp, synthetic construct
  source 1..75: mol_type = other DNA
gaagggtgtggagattaatacgcgccaattacagatgaagtctgaagtccgcgcactgcaaacgctggaggaaat

SEQ ID NO: 169823 - DNA, 75 bp, synthetic construct
  source 1..75: mol_type = other DNA
gaaaggtgtggagattaatacacgtcagcttcagatgaaagcagaggttgaggcgctgacagagctgaaggcgat

SEQ ID NO: 169824 - DNA, 75 bp, synthetic construct
  source 1..75: mol_type = other DNA
tctaacgtcggcgtgcagggtgtcaccggcatcagtgcgtcagtcttttgggatttgcaggcatccggtaccgat

SEQ ID NO: 169825 - DNA, 75 bp, synthetic construct
  source 1..75: mol_type = other DNA
ccgcgtatgccaccgcccgtgcgctgggtctgcgcgctaaaatcgaccaggagcagggctggcataaaacgctgt

SEQ ID NO: 169826 - DNA, 75 bp, synthetic construct
  source 1..75: mol_type = other DNA
atgagtgattttcaccacggcacgcaggtcatcgaaatcaatgacggtacgcgtgttatttctacggtcgcgact

SEQ ID NO: 169827 - DNA, 75 bp, synthetic construct
  source 1..75: mol_type = other DNA
tatgccaccgcccgtgcgctcggtctgcgcgccaaaattgatgagcagaccggatggcacaaaagcctgtccaac

SEQ ID NO: 169828 - DNA, 75 bp, synthetic construct
  source 1..75: mol_type = other DNA
gccatcatcggcatggtctgcacggccagcgatgctgacgaaaagacatttcccctcaatgagccggtgctcatt

SEQ ID NO: 169829 - DNA, 75 bp, synthetic construct
  source 1..75: mol_type = other DNA
ccgcgtcatttccaccgtatccaccgccattgtcggcatggtctgcacggccagcgatgcggatgcggaaacctt

SEQ ID NO: 169830 - DNA, 75 bp, synthetic construct
  source 1..75: mol_type = other DNA
atcactgatgtgctgaccgccagcggtaaagcgggtgagtctggcacgctggcccgttcgctggatgccatcgct

SEQ ID NO: 169831 - DNA, 75 bp, synthetic construct
  source 1..75: mol_type = other DNA
aaaacgctgtccaacgtcggggtaaacggtgttaccggcatcagcgcctctgtattctgggatttgcaggagtcc

SEQ ID NO: 169832 - DNA, 75 bp, synthetic construct
  source 1..75: mol_type = other DNA
cgcttatccgcaaagacggtttccacttctggggttcccgctgtctgagcgatgatccgctctttgccttcgaaa

SEQ ID NO: 169833 - DNA, 75 bp, synthetic construct
  source 1..75: mol_type = other DNA
accggtgcctcctctcgaaaacctgaccctgcgccagcgtattaccgataaatacctggcaaatctggtcacctc

SEQ ID NO: 169834 - DNA, 75 bp, synthetic construct
  source 1..75: mol_type = other DNA
ataaaaatatcaggtgttacagtaggagggttaatacttcagtttaaatatatcgacaacattgtttatggttct

SEQ ID NO: 169835 - DNA, 75 bp, synthetic construct
  source 1..75: mol_type = other DNA
cctcgcatgggatacggtcgccagtaccaccgccaccgcgtatgccaccgcccgtgcgctgggtctgcgcgctaa

SEQ ID NO: 169836 - DNA, 75 bp, synthetic construct
  source 1..75: mol_type = other DNA
aaccgtacctgctccgatgacccgctgttcctctttgaaaactacacccgcaccgcgcaggtgctggccgacacg

SEQ ID NO: 169837 - DNA, 75 bp, synthetic construct
  source 1..75: mol_type = other DNA
aaaagccacggaagctctctgacgcaaacagaactattcgcagtgaagcgccagatatctgagcttcgcatgaag

SEQ ID NO: 169838 - DNA, 75 bp, synthetic construct
  source 1..75: mol_type = other DNA
agataagcaaagaatttgaaaagattgcatggaatgaattttttgtaaaacgaaatagagggatatctctccaat

SEQ ID NO: 169839 - DNA, 75 bp, synthetic construct
  source 1..75: mol_type = other DNA
cgtgaagtgcagaatataacctgtgattttgtcctgaaatcatatgatgaaacagtccttgctgttatccagttt

SEQ ID NO: 169840 - DNA, 75 bp, synthetic construct
  source 1..75: mol_type = other DNA
caatgacgatataccgccagcatcctgagtcccgaatctttcgctactgcaccggcaaatacctgtggcatggca

SEQ ID NO: 169841 - DNA, 75 bp, synthetic construct
  source 1..75: mol_type = other DNA
cgatgcatatttatcgtcagcatcccgaatccaagttatctgccttcggtacaggtcactaccagtggcatcgca

SEQ ID NO: 169842 - DNA, 75 bp, synthetic construct
  source 1..75: mol_type = other DNA
gcaggacccggcaaccgatgcaggtctgcttaaccagaacgacgtcaccacccttatccgcaaggacggtttccg

SEQ ID NO: 169843 - DNA, 75 bp, synthetic construct
  source 1..75: mol_type = other DNA
agtgttgcgccaagtgatgctggtgtagtttcctacatcagggcgtcaggtagcagcgatgttaaaattgagtca

SEQ ID NO: 169844 - DNA, 75 bp, synthetic construct
  source 1..75: mol_type = other DNA
aagaacaatgcaggatagacaatcatggtcaaaatgttaacattttatccatgattgtccaaaaaacgatgtttt

SEQ ID NO: 169845 - DNA, 75 bp, synthetic construct
  source 1..75: mol_type = other DNA
gcttattcaccatcaacataaacgcattcgtgaggcttatggtccggcatcgatttttgcgggttcctacggctg

SEQ ID NO: 169846 - DNA, 75 bp, synthetic construct
  source 1..75: mol_type = other DNA
acgactacacgccagtgccgccacttgaaaatctgatgctgcgtcagcgcatcaccgatcagtacctggtgaatt

SEQ ID NO: 169847 - DNA, 75 bp, synthetic construct
  source 1..75: mol_type = other DNA
gacggacacaatggcagaagcgcacatgtgggcggtggacaaaccgctgaacccgtcgctggcccgcgacattat

SEQ ID NO: 169848 - DNA, 75 bp, synthetic construct
  source 1..75: mol_type = other DNA
atcactgatgtgctgactgccggcggtaaagcgggtgagtccggtactctggcccgttcgctggatgccatcgct

SEQ ID NO: 169849 - DNA, 75 bp, synthetic construct
  source 1..75: mol_type = other DNA
cactcgatccattaccacggtgagcaccgccatcgtgggcatggtctgcacgggcgatgatgccgatgcaaaaat

SEQ ID NO: 169850 - DNA, 75 bp, synthetic construct
  source 1..75: mol_type = other DNA
tctgctgcgcccggaagacttacgtgttgaagagattaacgacgacaaccacgccgaagggctgattggttacgt

SEQ ID NO: 169851 - DNA, 75 bp, synthetic construct
  source 1..75: mol_type = other DNA
tcacgacgctggtgcgcaaagatggtttccgcttttggggtaaccgcacctgctctgatgacccgcttttcctgt

SEQ ID NO: 169852 - DNA, 75 bp, synthetic construct
  source 1..75: mol_type = other DNA
aaccgtacctgctctgatgacccgctgttcctctttgaaaactacacccgcaccgcgcaggtgctggccgatacg

SEQ ID NO: 169853 - DNA, 75 bp, synthetic construct
  source 1..75: mol_type = other DNA
acggtgttaccggcatcagcgcatccgtcttctgggatttgcaggagtccggcaccgatgctgacctgcttaacg

SEQ ID NO: 169854 - DNA, 75 bp, synthetic construct
  source 1..75: mol_type = other DNA
atggtcgaaagtaatacttttaataaaattgttgtaagtaagcattcccgtaatggaagcattaacgaagcgaag

SEQ ID NO: 169855 - DNA, 75 bp, synthetic construct
  source 1..75: mol_type = other DNA
taatggaagcattaacgaagcgaagctctcacacaaccagcttcgttctcattgcgtcagtgtcagattaaatga

SEQ ID NO: 169856 - DNA, 75 bp, synthetic construct
  source 1..75: mol_type = other DNA
cgggtggcacaaaagcctgtccaacgtgggcgtgaacggtgtcaccggaatttctgcagatgtgttctgggatct

SEQ ID NO: 169857 - DNA, 75 bp, synthetic construct
  source 1..75: mol_type = other DNA
ctggtctgacgctgtcctgtcagatctgcggctgttgcttaaacgtctcccgggccttgaagggctggcatggaa

SEQ ID NO: 169858 - DNA, 75 bp, synthetic construct
  source 1..75: mol_type = other DNA
cctgaactggtatttgaggtaaaagcccgccgcctgaaactgttgcgtatgaagtccgcaaaaactgaaagtgac

SEQ ID NO: 169859 - DNA, 75 bp, synthetic construct
  source 1..75: mol_type = other DNA
gaaggccggtggtgttgatgcagtggtgcctcaggaggctgccgcgccggcaccgacggtaacatccggcagcgt

SEQ ID NO: 169860 - DNA, 75 bp, synthetic construct
  source 1..75: mol_type = other DNA
gctgtttggcacagaggatgatgatattctgctgcccggtattgaaatggcgaaggcccgcgggatttcaattac

SEQ ID NO: 169861 - DNA, 75 bp, synthetic construct
  source 1..75: mol_type = other DNA
gacgagcagtttataagattgatgagctgtattttttgtggtcgccatttttctataatatcaacaaataaagtg

SEQ ID NO: 169862 - DNA, 75 bp, synthetic construct
  source 1..75: mol_type = other DNA
ataaatttcttgaaactggcttcatcaccctaatgggtaatgttaatgtaattatgggccgtgatttgtttacac

SEQ ID NO: 169863 - DNA, 75 bp, synthetic construct
  source 1..75: mol_type = other DNA
ttccgccattgctgcaaatcttcttctggtactttgccgtgttgcgcaatttgcccggaccacgacaggcagtga

SEQ ID NO: 169864 - DNA, 75 bp, synthetic construct
  source 1..75: mol_type = other DNA
tgtccagcatttgatcgattaccagcagggtgatacctacggacgcgttttcattgttggcttactcaatacgct

SEQ ID NO: 169865 - DNA, 75 bp, synthetic construct
  source 1..75: mol_type = other DNA
ccatcgagacgatagccatgaccatgtcggtctatctgattatcagcctgactatctcgctgctgatgaatatct

SEQ ID NO: 169866 - DNA, 75 bp, synthetic construct
  source 1..75: mol_type = other DNA
ttcccgccgctcgtgtaaatatcaagcttgatctgcatacaggcaatgcaaaaaagaaagttgaactccccctca

SEQ ID NO: 169867 - DNA, 75 bp, synthetic construct
  source 1..75: mol_type = other DNA
cggctgcacgctgccagaaaaagaggggcataccgtctctggcgcgcgggatattgccgacaaactgctggcgtc

SEQ ID NO: 169868 - DNA, 75 bp, synthetic construct
  source 1..75: mol_type = other DNA
cgttcagcatttgattgattatcagcaaggcgacacttacggacgcgtttttattgtcggcctactcaatacgct

SEQ ID NO: 169869 - DNA, 75 bp, synthetic construct
  source 1..75: mol_type = other DNA
gcgctcagcagtgacgccgggaagaaactctatgacccgatactggatggtcttcgaagtgcggtacgttatgac

SEQ ID NO: 169870 - DNA, 75 bp, synthetic construct
  source 1..75: mol_type = other DNA
gaaagggcgattgttctcttttctacggtctattcaaaacatgaagatggtcagtttattgacagcaatagcagt

SEQ ID NO: 169871 - DNA, 75 bp, synthetic construct
  source 1..75: mol_type = other DNA
ccgtcactgatatgggcaatatgcttgaggagaatattatttctggtggcactcaggaagagttaataaatacat

SEQ ID NO: 169872 - DNA, 75 bp, synthetic construct
  source 1..75: mol_type = other DNA
tggatatttacaccaaaaccctggtatccgggatcactgatatttccaatccgggacagggaagtgatttcacct

SEQ ID NO: 169873 - DNA, 75 bp, synthetic construct
  source 1..75: mol_type = other DNA
tacattcgctatgcggggaaggtgatccgtgagcgtctgcccggactggagcagattatcgcgaataaccagagt

SEQ ID NO: 169874 - DNA, 75 bp, synthetic construct
  source 1..75: mol_type = other DNA
attcggcggctttccgggagtttgcctggcgctttgtcaatatcatcgcccgcgccctggtggccctcggtgagc

SEQ ID NO: 169875 - DNA, 75 bp, synthetic construct
  source 1..75: mol_type = other DNA
aataagatgggtatcgctacgaaattggttaatcgtgtccacagcaaaattgtgattgaggatgaagaactgctg

SEQ ID NO: 169876 - DNA, 75 bp, synthetic construct
  source 1..75: mol_type = other DNA
gtactgaccccaaaaagttggacagttaaacacgaggcatataggtctgattccgatattcaattggagtcagac

SEQ ID NO: 169877 - DNA, 75 bp, synthetic construct
  source 1..75: mol_type = other DNA
atcgcacaatcattttctatcgtgtcggtatgagggcatttttcgtatatgcatatgcaaaaaatgaacgtgaaa

SEQ ID NO: 169878 - DNA, 75 bp, synthetic construct
  source 1..75: mol_type = other DNA
gctggtgattggcgatacggagcaaatagctccaatctggaattgtctacccgtcactgatatgggcaatatgct

SEQ ID NO: 169879 - DNA, 75 bp, synthetic construct
  source 1..75: mol_type = other DNA
aaaaagaaaaaggaattaccgggataactatcgccgaggctcgttggctaagaagaatgaaacttactccttgtg

SEQ ID NO: 169880 - DNA, 75 bp, synthetic construct
  source 1..75: mol_type = other DNA
gctggatacggttatattgttaaagctagccagcatgtaggggccagtgttcatatcctgcctttgtatgaccat

SEQ ID NO: 169881 - DNA, 75 bp, synthetic construct
  source 1..75: mol_type = other DNA
tggcgatcaggtgaaacccggcgacattgtgaaagtaaacggtcagttgattgagcctcgggaagccgaagattt

SEQ ID NO: 169882 - DNA, 75 bp, synthetic construct
  source 1..75: mol_type = other DNA
ccattgttatatctgaaaggttttcatgccttgcaggcctatcgtatcggtcactggctgtggaatcagggccgt

SEQ ID NO: 169883 - DNA, 75 bp, synthetic construct
  source 1..75: mol_type = other DNA
ggcggtgattgaaaacgacgtatcgattctgcaatctgtgacgcttggcggtacgggtaaatctggtggcgaccg

SEQ ID NO: 169884 - DNA, 75 bp, synthetic construct
  source 1..75: mol_type = other DNA
caaagtcaaaaaagaagcgccgtttgtcttccgcattaccctggtgcaggggctgaaccgtcagatccgtcgcat

SEQ ID NO: 169885 - DNA, 75 bp, synthetic construct
  source 1..75: mol_type = other DNA
tcctcgggacagtgaccaaaaagtgcaaagttaaaaaagaagcgccgtttgtctttcgtattaccctggtgcaag

SEQ ID NO: 169886 - DNA, 75 bp, synthetic construct
  source 1..75: mol_type = other DNA
ggaaaaggcggtcgcccggcgtccaacggtaagcgttttacctcgccggggcgtaaaaagaaggggcgttaatca

SEQ ID NO: 169887 - DNA, 75 bp, synthetic construct
  source 1..75: mol_type = other DNA
cagaacgctggcggactgtgagccaatgctggccagtttttaccacgcgacgctactcaagcacgaaaaccttgg

SEQ ID NO: 169888 - DNA, 75 bp, synthetic construct
  source 1..75: mol_type = other DNA
ggctttttattggcgctgtttattggtctgcgcagcagaaaagaagcacaacatcagtcagtacaggaaaacgtt

SEQ ID NO: 169889 - DNA, 75 bp, synthetic construct
  source 1..75: mol_type = other DNA
tttgtgtatttattactgctccactcattcgtaataccgttcgcccaacaacattactgatgctgtacaccttta

SEQ ID NO: 169890 - DNA, 75 bp, synthetic construct
  source 1..75: mol_type = other DNA
attctgcaatctgtgacgcttggcggtacgggtaaatctggtggtgaccgtcacccgaaaattcgtgaaggtgtg

SEQ ID NO: 169891 - DNA, 75 bp, synthetic construct
  source 1..75: mol_type = other DNA
ccacgggcatcgttgtgggtgaaacggcggtgattgaaaacgacgtgtcgattctgcaatctgtgacgcttggcg

SEQ ID NO: 169892 - DNA, 75 bp, synthetic construct
  source 1..75: mol_type = other DNA
accaggtctctgtaacgttccaggttgatattcacccggcagcaaaaattggtcgcggtatcatgctcgaccacg

SEQ ID NO: 169893 - DNA, 75 bp, synthetic construct
  source 1..75: mol_type = other DNA
tcggcgtaaatattgccgacgaaccggctcccgcagccccaactcctccggttgtaacccctccgccagttgaga

SEQ ID NO: 169894 - DNA, 75 bp, synthetic construct
  source 1..75: mol_type = other DNA
ggcagcgtggcgtggcagaaagggagtgatgattttgcccagacggcagtgtttttgtcgatgacggtgaaatgg

SEQ ID NO: 169895 - DNA, 75 bp, synthetic construct
  source 1..75: mol_type = other DNA
tttttacgaagcatgttatccgcggtttttttaattaatgcctttttgtttatttctaaaaaaaagtatgtgtat

SEQ ID NO: 169896 - DNA, 75 bp, synthetic construct
  source 1..75: mol_type = other DNA
caccgtaacgaatctcagtaatcgcggcattacttcaggttttgccttcctggatcgcggcgctggcttcggtat

SEQ ID NO: 169897 - DNA, 75 bp, synthetic construct
  source 1..75: mol_type = other DNA
cgcagcagaacgtggttacctggcggatgttgaactgtcgaaaattggcagcttcgaagccgctctgctggctta

SEQ ID NO: 169898 - DNA, 75 bp, synthetic construct
  source 1..75: mol_type = other DNA
gcgtgctgcacgtgttaacgccgaatacgttgaagccttcaccaaaggtgaagtgaaagggaaaaccggttctct

SEQ ID NO: 169899 - DNA, 75 bp, synthetic construct
  source 1..75: mol_type = other DNA
tatcagcttggctggaccgcctgggcagggaaagccctgcacgacaacccggtgacgggcatgattttcgaacct

SEQ ID NO: 169900 - DNA, 75 bp, synthetic construct
  source 1..75: mol_type = other DNA
atgggaaatcggacaaaagatgatgaactgtaccgcgagatgtgcagggtggtcggtaaagttgtgctggaaatg

SEQ ID NO: 169901 - DNA, 75 bp, synthetic construct
  source 1..75: mol_type = other DNA
gttgtaaaagtaaacggtcagttgattgagccacgagaagccgaagatttggtgcttatcgccctgaacaagcct

SEQ ID NO: 169902 - DNA, 75 bp, synthetic construct
  source 1..75: mol_type = other DNA
gctcgcagatggctataagtcagttgttcaggcactcggtaatgcttttggtaactatcactctgagccatatgt

SEQ ID NO: 169903 - DNA, 75 bp, synthetic construct
  source 1..75: mol_type = other DNA
acaccgccacccgtgcagaaagcacaacgggtaaaggttgatcctctgcgttcgttgaatatggaagcgttatgc

SEQ ID NO: 169904 - DNA, 75 bp, synthetic construct
  source 1..75: mol_type = other DNA
gctggtggcgcgcatgggcggcgaagaatttgctgttgcagtgccgtcggtgaatcctgtcgatggtctgctaat

SEQ ID NO: 169905 - DNA, 75 bp, synthetic construct
  source 1..75: mol_type = other DNA
atgacgaatttgatactcaccttgttattttttccgcacttaatacacctaaaggaaaattcactctttacaaaa

SEQ ID NO: 169906 - DNA, 75 bp, synthetic construct
  source 1..75: mol_type = other DNA
ttacgctggtgtgcgctgcttggcgcgattggccatggttcacgaatgatcttaatgaccagcgggctgaatatt

SEQ ID NO: 169907 - DNA, 75 bp, synthetic construct
  source 1..75: mol_type = other DNA
actgacgatttggggctacgcggatgggtgtgatcgagtttctgtttgcattggcgcaggatatgatcctcgccg

SEQ ID NO: 169908 - DNA, 75 bp, synthetic construct
  source 1..75: mol_type = other DNA
tttcatatgtgcatttaaagattattatggtgtcacaccatctcattattttgagaaaataataggtgtcattga

SEQ ID NO: 169909 - DNA, 75 bp, synthetic construct
  source 1..75: mol_type = other DNA
taaatacatttacctgtaaaattactggaataatcagttttaatattgaaaggcaatggcatttaaaagatattg

SEQ ID NO: 169910 - DNA, 75 bp, synthetic construct
  source 1..75: mol_type = other DNA
ggactacaaaacctctgagctatacttaaaaaaggcatattctataaaacctgataacctgaggtataaaaatga

SEQ ID NO: 169911 - DNA, 75 bp, synthetic construct
  source 1..75: mol_type = other DNA
ccaacgctcgttttgtgggagttgccgggccgcggatgcaggctgagggctgcgaagcctggtacgaaatggaag

SEQ ID NO: 169912 - DNA, 75 bp, synthetic construct
  source 1..75: mol_type = other DNA
gccgataagatggatctgcgggagtctcagggatggctgaaccgtggttatgaaggcgcagctgttggtgcagcg

SEQ ID NO: 169913 - DNA, 75 bp, synthetic construct
  source 1..75: mol_type = other DNA
caacaaggttaacctgaaatttgaagaagcgaagcctgtactggaagaccagctggctaaatccatcgcgaacat

SEQ ID NO: 169914 - DNA, 75 bp, synthetic construct
  source 1..75: mol_type = other DNA
cggtgtgggccttgctgccggtctggtgggtatggctgcagatgcgatggtggaagatgtgaactataccatgat

SEQ ID NO: 169915 - DNA, 75 bp, synthetic construct
  source 1..75: mol_type = other DNA
tgagggcgcagcagttggtgcagcgttaggtgccggtatcaccggatataattccagttctgccggtgccacact

SEQ ID NO: 169916 - DNA, 75 bp, synthetic construct
  source 1..75: mol_type = other DNA
gcgtaatcaggggaagttctttgcagaagtgcatgaggatgcttttgataagctaacgatgctgatccagcatgt

SEQ ID NO: 169917 - DNA, 75 bp, synthetic construct
  source 1..75: mol_type = other DNA
ataccgcatcaagccttgcgctgatccacacgctggttactgaccagattaaatttgattcggagtttaatttat

SEQ ID NO: 169918 - DNA, 75 bp, synthetic construct
  source 1..75: mol_type = other DNA
atttgcataaggtatttaacatcgtctatttacttaaaggtaataaggtgatgataagacctgatgacgatccac

SEQ ID NO: 169919 - DNA, 75 bp, synthetic construct
  source 1..75: mol_type = other DNA
cagaatccagaaaaaccatactgggaatcaagcgagatggatcggtggcatatgcaaatgttgcttgataatggc

SEQ ID NO: 169920 - DNA, 75 bp, synthetic construct
  source 1..75: mol_type = other DNA
ctgcaacccattgagcagcatcttgcccgcttcctggctcccttccagcgcggagaccgcccgctgcagatggaa

SEQ ID NO: 169921 - DNA, 75 bp, synthetic construct
  source 1..75: mol_type = other DNA
ggatgcaaagcagaacgggccggagcggcaggccgaaccccatccgtggccgcaactgccgctggtgcagacctt

SEQ ID NO: 169922 - DNA, 75 bp, synthetic construct
  source 1..75: mol_type = other DNA
atgagcacatcagacattattcctgtcaccctgcccggaagacgtcccggacgtcccggccgtcgcatcgccgtc

SEQ ID NO: 169923 - DNA, 75 bp, synthetic construct
  source 1..75: mol_type = other DNA
tatccgggaaagccttccatcgggaaaaaaaatggtcaagtatcataccggtttcctgggggagctgggtgagga

SEQ ID NO: 169924 - DNA, 75 bp, synthetic construct
  source 1..75: mol_type = other DNA
ggatctgccgccggtactggctgaaccgcacgcaggttgggtaaatgcgctggaacaagaatggctacaccgtta

SEQ ID NO: 169925 - DNA, 75 bp, synthetic construct
  source 1..75: mol_type = other DNA
tactattcccactatgtaggggatatcttcggtgcgccgctggcaatcgaaggtctgatggccttcttcctcgaa

SEQ ID NO: 169926 - DNA, 75 bp, synthetic construct
  source 1..75: mol_type = other DNA
tgaaggccgggatgcctgcagaagagtatgaacttatgcttgccagtcaggaagtggcagatatgacagagaagc

SEQ ID NO: 169927 - DNA, 75 bp, synthetic construct
  source 1..75: mol_type = other DNA
tgagagatactaggatgaggtatgcaaaaaaactcataacttcaaactcttattctatcaatgtcgtggtaatga

SEQ ID NO: 169928 - DNA, 75 bp, synthetic construct
  source 1..75: mol_type = other DNA
ttcccccacatgaccgtgttcgaaaatgtggcctttgggttacgcatgcaaaaaacccccgctgctgaaattacg

SEQ ID NO: 169929 - DNA, 75 bp, synthetic construct
  source 1..75: mol_type = other DNA
atgagcacagcaatcaagaaacgtaatcttgaagtgaaaacccagatgagtgaaaccatctggcttgaaccgtcc

SEQ ID NO: 169930 - DNA, 75 bp, synthetic construct
  source 1..75: mol_type = other DNA
accagcagtgaaacaggtaaccagcataaatatcagacgcgtattgtgtccagtgccaacaaagttaacctgaaa

SEQ ID NO: 169931 - DNA, 75 bp, synthetic construct
  source 1..75: mol_type = other DNA
ccgggatatccatctcaaaacttgctcttgaaaatggcattaacgccaatctgttgttcaaatggcgacaacaat

SEQ ID NO: 169932 - DNA, 75 bp, synthetic construct
  source 1..75: mol_type = other DNA
gaacaaggttaatctgaagtttgatgaggcgaagcctgttctggaagaccagctggccaaatccattgccaatat

SEQ ID NO: 169933 - DNA, 75 bp, synthetic construct
  source 1..75: mol_type = other DNA
aggttaacctgaaatttgaagaggcgaagcctgttctcgaagaccagctggccaaatcaatcgcaaatattctct

SEQ ID NO: 169934 - DNA, 75 bp, synthetic construct
  source 1..75: mol_type = other DNA
ccttgctgccggtctggtgggtatggctgcagatgcgatggtggaagatgtgaactataccatgatcacggatgt

SEQ ID NO: 169935 - DNA, 75 bp, synthetic construct
  source 1..75: mol_type = other DNA
cgcccgtatggtggaaccgcccggagacagttgtgacggcgaaaaatgaccctattttatggctgaacgacagcg

SEQ ID NO: 169936 - DNA, 75 bp, synthetic construct
  source 1..75: mol_type = other DNA
aaattaccgatcagcctgcattgcgatgagtttaatgaactgatgggggatgagtttattccgttactgaacaag

SEQ ID NO: 169937 - DNA, 75 bp, synthetic construct
  source 1..75: mol_type = other DNA
ctttatcggatgcggaagtggcggcagcggtggggaattccatgtttgcggatttggtctcggtggccgggcata

SEQ ID NO: 169938 - DNA, 75 bp, synthetic construct
  source 1..75: mol_type = other DNA
cattgttttcgacccgaaaggtgatgccgatctgctgaagcgaatgtatgcggagtcacaccgcgcaggccgtgc

SEQ ID NO: 169939 - DNA, 75 bp, synthetic construct
  source 1..75: mol_type = other DNA
acgatccagtgctcgatggcctgcgttcgtcggtacgttatgaccagaagtattacgataaaattgtggcatcgc

SEQ ID NO: 169940 - DNA, 75 bp, synthetic construct
  source 1..75: mol_type = other DNA
acatcatcacccgcgccctggtggcgctgggccagcgccctgactatgcccgtatcgcccgtcacgttatcaaca

SEQ ID NO: 169941 - DNA, 75 bp, synthetic construct
  source 1..75: mol_type = other DNA
ggataaatattcgccgattgaagaacggattttccactgttcatccgttacgctttgatgagcgtgaagcggtag

SEQ ID NO: 169942 - DNA, 75 bp, synthetic construct
  source 1..75: mol_type = other DNA
cgttttgatgagcgtgaagccgtggaacgctggacccaggaacgtgctaactggaaaggcgctgaccggaccgac

SEQ ID NO: 169943 - DNA, 75 bp, synthetic construct
  source 1..75: mol_type = other DNA
cctttcagggtgtggtgcgatgagcacagcaatcaagaagcgtaatcttgaagtcaaaactcagatgagtgaaac

SEQ ID NO: 169944 - DNA, 75 bp, synthetic construct
  source 1..75: mol_type = other DNA
cgcacggtatttctgcagatcaaaaacacgtctgataaagacatgagtgggctgcagggcaaaattgctgatgcc

SEQ ID NO: 169945 - DNA, 75 bp, synthetic construct
  source 1..75: mol_type = other DNA
acacgtctgataaagacatgagtgggctgcagggcaaaattgctgatgccgtgaaagcaaaaggatatcaggtgg

SEQ ID NO: 169946 - DNA, 75 bp, synthetic construct
  source 1..75: mol_type = other DNA
aggcaaaaatcagtgatgccgttaaagccaaaggctaccaggttgtgacctcacctgacaaggcatactactgga

SEQ ID NO: 169947 - DNA, 75 bp, synthetic construct
  source 1..75: mol_type = other DNA
tgaaaccatctggcttgaaccgtcctcgcagaaaaccgtatatcttcagataaagaatacctccgacaaagacat

SEQ ID NO: 169948 - DNA, 75 bp, synthetic construct
  source 1..75: mol_type = other DNA
actcaaattcagcaggggctacattaggagtagggctggcagctggactggttggaatggcggcagacgcgatgg

SEQ ID NO: 169949 - DNA, 75 bp, synthetic construct
  source 1..75: mol_type = other DNA
actccagttctgcgggagcgaccctgggggtagggcttgcagccggtctggtggggatggcggctgacgcgatgg

SEQ ID NO: 169950 - DNA, 75 bp, synthetic construct
  source 1..75: mol_type = other DNA
gccgcaaaaaaacgcggcatcactcgctaggtaatgactctaacttattgatagtgttttatgttcagataatgc

SEQ ID NO: 169951 - DNA, 75 bp, synthetic construct
  source 1..75: mol_type = other DNA
ccgtgacatccgcgccagaaagcgcatattactggatacaggccaatgttctcaaagcagataaaatggatcttc

SEQ ID NO: 169952 - DNA, 75 bp, synthetic construct
  source 1..75: mol_type = other DNA
atgaaacaaaacattaagttaatggcaatgactgccgtgttatcttccactctggtgttgtctggttgtggcgcg

SEQ ID NO: 169953 - DNA, 75 bp, synthetic construct
  source 1..75: mol_type = other DNA
cgactacgactataccccggtgcctcctcttgaaaacctgaccctgcgccagcgtattaccgataaatacctggc

SEQ ID NO: 169954 - DNA, 75 bp, synthetic construct
  source 1..75: mol_type = other DNA
gccatgctgcggcaacggtctttggattaagcctggttgctgccggactgtcctcaacggtggtggggacactgg

SEQ ID NO: 169955 - DNA, 75 bp, synthetic construct
  source 1..75: mol_type = other DNA
aaagagctgaaggccgcgaaaaaaacgcgaactgctgccgttctggttgccgtgggtgaacggcgtgctggagca

SEQ ID NO: 169956 - DNA, 75 bp, synthetic construct
  source 1..75: mol_type = other DNA
ttcacctggcacccggtatcgcgcgcggtgggtaatgttaaaaaccagggcgcggagttaattcaacctgtttga

SEQ ID NO: 169957 - DNA, 75 bp, synthetic construct
  source 1..75: mol_type = other DNA
aacgcgtaaaacaggctggctgggtgattgtggtattggtagtggcgctgaatatctggctgttggtgggaacgg

SEQ ID NO: 169958 - DNA, 75 bp, synthetic construct
  source 1..75: mol_type = other DNA
tttaatgctgcaacgtcgcgggcaaaaaccgctggagaaagtgattggcgggttactgttgtttgttgccgcggc

SEQ ID NO: 169959 - DNA, 75 bp, synthetic construct
  source 1..75: mol_type = other DNA
tcttcaacggtggtgggtacgctggcggggcaggtggtgatgcagggctttattcgtttccatatcccgctgtgg

SEQ ID NO: 169960 - DNA, 75 bp, synthetic construct
  source 1..75: mol_type = other DNA
ctggcccggtaccaccatcaccctgcgggaaatccgtcctgacagcgtgacgctgagcgacggaacccgcctcac

SEQ ID NO: 169961 - DNA, 75 bp, synthetic construct
  source 1..75: mol_type = other DNA
caccaccatcaccctgctggaaattcgtcctgacagcgtgacgctgagcgacggcacccgcctcagcccgggaga

SEQ ID NO: 169962 - DNA, 75 bp, synthetic construct
  source 1..75: mol_type = other DNA
ggacaaagtaaggtagctgacatgtgttccgttaaggtgaaaatcgtggagcctcgcctagggtcagctcctaat

SEQ ID NO: 169963 - DNA, 75 bp, synthetic construct
  source 1..75: mol_type = other DNA
agaccagggtctggtagatattcatgaccgccgcccgctggtactgtcgccagaagctgcgcgggaatggatgcg

SEQ ID NO: 169964 - DNA, 75 bp, synthetic construct
  source 1..75: mol_type = other DNA
ttgtgtgccagcaaagcagttctcctggcatccggtattgcgcgcggtgggtaatgtcaaaaaccagggcgcagc

SEQ ID NO: 169965 - DNA, 75 bp, synthetic construct
  source 1..75: mol_type = other DNA
gacgctcaccggcctatgcctgttcctcgatatagccgatgaaacatggcgaagatttcgcgctgacgaagattt

SEQ ID NO: 169966 - DNA, 75 bp, synthetic construct
  source 1..75: mol_type = other DNA
gaattatcgtgcctggcatgtccgatatttatccggctgaagatttgtggttagcgaataacagtatgggcagcc

SEQ ID NO: 169967 - DNA, 75 bp, synthetic construct
  source 1..75: mol_type = other DNA
ggcaatgagtggcgaagcggcgttttatggcctgcaaccggtagatagcgatctgcacgcgtttgcggcgcatca

SEQ ID NO: 169968 - DNA, 75 bp, synthetic construct
  source 1..75: mol_type = other DNA
atctgcacgcatttgctgcacatcaatcgttgctgaaggcctacgaaaagctgcagcgcgccaaagcggcattct

SEQ ID NO: 169969 - DNA, 75 bp, synthetic construct
  source 1..75: mol_type = other DNA
cctgctggctgggggtgatgggctttgtggtttatgtcggcgtttatagcctgtacatgaaacgccactcggtct

SEQ ID NO: 169970 - DNA, 75 bp, synthetic construct
  source 1..75: mol_type = other DNA
ctctatcatcgccatcactgccctctcggtaatgatgtcagttgattttatggtgccagactcgcatacgctgct

SEQ ID NO: 169971 - DNA, 75 bp, synthetic construct
  source 1..75: mol_type = other DNA
gaaggcgtttttggcggcagtactcgatgactacaaactgggagctatttcacaacagcaagctgttggcgggat

SEQ ID NO: 169972 - DNA, 75 bp, synthetic construct
  source 1..75: mol_type = other DNA
gtggaggcatccggtgccagcctggagaaggggcggcatgatcagctgcttaccgcgcttcgtgcgctgctgtta

SEQ ID NO: 169973 - DNA, 75 bp, synthetic construct
  source 1..75: mol_type = other DNA
atgagaattacattcagcatccctttccccaaaaaagcggactgcgccatgcttactcattctggtgatggcggt

SEQ ID NO: 169974 - DNA, 75 bp, synthetic construct
  source 1..75: mol_type = other DNA
tgccgcacgtgatttatttgcactcttcgctgactcagcatttacatggtggttcgcgtcaacaacgttattctg

SEQ ID NO: 169975 - DNA, 75 bp, synthetic construct
  source 1..75: mol_type = other DNA
atctgcacgcgtttgctgcacatcagtcgctgttgaaggcctacgaaaagctgcagcgcgccaaagcagcattct

SEQ ID NO: 169976 - DNA, 75 bp, synthetic construct
  source 1..75: mol_type = other DNA
gcgtggtactgttcaatccagctaacggtacctgctttgcatccttcggtgcacatcctgattttggcgttgcac

SEQ ID NO: 169977 - DNA, 75 bp, synthetic construct
  source 1..75: mol_type = other DNA
gttgttcagtaataaccgccctggtagcgcaaaacacccgaggcgtgcaatcggtgtatcgcatagatcctgatt

SEQ ID NO: 169978 - DNA, 75 bp, synthetic construct
  source 1..75: mol_type = other DNA
tggccgtgtccgcactgcggggaatattttcagccggtgatggataacatgaccggttaccggaataaccctgat

SEQ ID NO: 169979 - DNA, 75 bp, synthetic construct
  source 1..75: mol_type = other DNA
ggtggcgcacatgaggcaccgccaacaacggggatcctgtcactgtataaccggggagaccgccgccggtggtac

SEQ ID NO: 169980 - DNA, 75 bp, synthetic construct
  source 1..75: mol_type = other DNA
cttccacgcaggcgatgcagcgaaaattaggcaaacgctggcaacagttgcataacttcgtctatctggtcgcga

SEQ ID NO: 169981 - DNA, 75 bp, synthetic construct
  source 1..75: mol_type = other DNA
atgaaacgaattaacgctctgacgattgccggtactgatccgagtggtggtgcagggattcaggccgatcttaaa

SEQ ID NO: 169982 - DNA, 75 bp, synthetic construct
  source 1..75: mol_type = other DNA
accaaaatcggcatgttggcagaaaccgatatcgttgaagcggtggcggaacggctgcaacgttatcagatccaa

SEQ ID NO: 169983 - DNA, 75 bp, synthetic construct
  source 1..75: mol_type = other DNA
gcgcaggcggtaatggtggcttacgcgatgggcggcgatctggaccagctcgctgccaactacaacgtgaaacgc

SEQ ID NO: 169984 - DNA, 75 bp, synthetic construct
  source 1..75: mol_type = other DNA
tgttcaacgtgtggaactggcttccccgcaggcggacgtggtcctgaacaaaacgcaggcggcatcatgtacgca

SEQ ID NO: 169985 - DNA, 75 bp, synthetic construct
  source 1..75: mol_type = other DNA
gcgcaggcggtgatggtagcttatgccatgggaggcgatctggatcagctcgccgccaactataacgtgaaacgc

SEQ ID NO: 169986 - DNA, 75 bp, synthetic construct
  source 1..75: mol_type = other DNA
acggattatgaccgttttcctgagaacgtcgacggtgaaggggatgccttcaccctggcctcaaagcgtaccacc

SEQ ID NO: 169987 - DNA, 75 bp, synthetic construct
  source 1..75: mol_type = other DNA
tctgaacccgtcaccaaattgctgcaggagaacgcttatcgtgagctgcttctgcgccagcgcattaacgaagcc

SEQ ID NO: 169988 - DNA, 75 bp, synthetic construct
  source 1..75: mol_type = other DNA
cgctgccaactacaacgtgaaacgcctgacggtgacacctgctgattatgacgctgtgccgcccgttgcggctgt

SEQ ID NO: 169989 - DNA, 75 bp, synthetic construct
  source 1..75: mol_type = other DNA
tgaccaggctaaagactttgccggtacgatggttgtgcagcctggcggggccgccgtatggaataacttcaacga

SEQ ID NO: 169990 - DNA, 75 bp, synthetic construct
  source 1..75: mol_type = other DNA
tcgtcgacgctggcagcaaagccatcaacgtatttggagaggccaagcaacgggcaaatgtggcacttacccaag

SEQ ID NO: 169991 - DNA, 75 bp, synthetic construct
  source 1..75: mol_type = other DNA
atgggccgccgttatgccgcttcaggcagcgcctgccgagcgcctgcagatggaaaaaaccttccagcaatacca

SEQ ID NO: 169992 - DNA, 75 bp, synthetic construct
  source 1..75: mol_type = other DNA
cgcgttgtccgtgtagacgatcgtaagaaaggcgagattccacaggcgcactttgaactgtcattgataaatgac

SEQ ID NO: 169993 - DNA, 75 bp, synthetic construct
  source 1..75: mol_type = other DNA
gggggcggacgcaaaattttttgccgggttcatggctaaaaattttgtggccggtgcatctcaccctggacagat

SEQ ID NO: 169994 - DNA, 75 bp, synthetic construct
  source 1..75: mol_type = other DNA
tttctcagatcgataacaataaagaatcaagcgtaaccgccattcagtcggtggcgcagtcgttcggaaaatact

SEQ ID NO: 169995 - DNA, 75 bp, synthetic construct
  source 1..75: mol_type = other DNA
gtcagtgaagattatttcaccgcagccactcatctacgctgggctggcggtactgcttttagccttacggtataa

SEQ ID NO: 169996 - DNA, 75 bp, synthetic construct
  source 1..75: mol_type = other DNA
ccactcatctacgctgggctggcggtactgcttttagccttacggtataagaagttgctttcccttttcaaccag

SEQ ID NO: 169997 - DNA, 75 bp, synthetic construct
  source 1..75: mol_type = other DNA
cggtatctgtgaactctggcaccttctggcgctgagaggcgtcagggacgtttccggattccggagaatcaatgc

SEQ ID NO: 169998 - DNA, 75 bp, synthetic construct
  source 1..75: mol_type = other DNA
cgtgccaatattgccttggttcaggaggcatcccttaaactcagtcagacaggcagcgatctgctgaataaccct

SEQ ID NO: 169999 - DNA, 75 bp, synthetic construct
  source 1..75: mol_type = other DNA
atgcgtctgacagcaaaacaggtgacatggctgaaagtttgcctgcatcttgccggattgttgccgtttctctgg

SEQ ID NO: 170000 - DNA, 75 bp, synthetic construct
  source 1..75: mol_type = other DNA
ccgtgagcatggcaccacgttgattatggtgacccatgacctgcaactggcggcacgctgtgaccgctgcttacg

SEQ ID NO: 170001 - DNA, 75 bp, synthetic construct
  source 1..75: mol_type = other DNA
catgtaaataatccaaaattgcatcttcactatggtgatttaactgatacgtctaatttaacacgtattttatca

SEQ ID NO: 170002 - DNA, 75 bp, synthetic construct
  source 1..75: mol_type = other DNA
agggaatcgaaaaatgtctctatcttggcaatatggactcactgcgtgactggggacatgcgaaagattacgtgc

SEQ ID NO: 170003 - DNA, 75 bp, synthetic construct
  source 1..75: mol_type = other DNA
gatcatcgtcgggcagaactggttatgaataaactctatgataaagttccttctggtgtctggaagtatgttcac

SEQ ID NO: 170004 - DNA, 75 bp, synthetic construct
  source 1..75: mol_type = other DNA
tgcactacggtgacttaactgactcatcaaacttggtacgtctcattaaagaaatccaaccagacgaagtttata

SEQ ID NO: 170005 - DNA, 75 bp, synthetic construct
  source 1..75: mol_type = other DNA
agctgtttccttcgaatccccagaatatacagctgatgttgatgctataggtactttacgattattggaagctat

SEQ ID NO: 170006 - DNA, 75 bp, synthetic construct
  source 1..75: mol_type = other DNA
aattgtatgggttggtccaggatgttccacaaaaagagacaacgcctttctatcctcgctctccttatgcagtag

SEQ ID NO: 170007 - DNA, 75 bp, synthetic construct
  source 1..75: mol_type = other DNA
gcaactgcatctctggtcgttggctcaacccaacaactcagcggcgcggttcaaccaaccgatgcgactaacaag

SEQ ID NO: 170008 - DNA, 75 bp, synthetic construct
  source 1..75: mol_type = other DNA
ggttacggatggtggccgtaacctgttgtcctttaactggcccagctaccgtgcacatgccagaggtgtggcagc

SEQ ID NO: 170009 - DNA, 75 bp, synthetic construct
  source 1..75: mol_type = other DNA
tgaagacgttgaaattgcctcacagcgggcagggctgtatgagatggtgtgcaatctgccgcagggattccggac

SEQ ID NO: 170010 - DNA, 75 bp, synthetic construct
  source 1..75: mol_type = other DNA
gcaactgcatctctggtagttgggtcaacccagcaactgagcggcgctgttcagccaaccgatgcgactaataag

SEQ ID NO: 170011 - DNA, 75 bp, synthetic construct
  source 1..75: mol_type = other DNA
tcgggaggcgcagagacttgttatcttggctgattcagatgatgaaagaattaatactagtgtactggaacaggc

SEQ ID NO: 170012 - DNA, 75 bp, synthetic construct
  source 1..75: mol_type = other DNA
tgtaagggggaaagctgtcaaacgggtgtccggttgcctgtcctgcctcagtgaggagctggactgcgtgtatga

SEQ ID NO: 170013 - DNA, 75 bp, synthetic construct
  source 1..75: mol_type = other DNA
aaccgaaatggttgcttctgaccttgaggcagccaaaaaacattcactccttaagaagcatggcttcaatgtaaa

SEQ ID NO: 170014 - DNA, 75 bp, synthetic construct
  source 1..75: mol_type = other DNA
tgctcactcacagggtgaaatacagcgagcgttagccgatgtgaccctctcgctggatgcggccgactggttcga

SEQ ID NO: 170015 - DNA, 75 bp, synthetic construct
  source 1..75: mol_type = other DNA
cgccgctacgcgttgcagcaagcacatggccggatgaagcgctgaaatgggagcatctgcgcaatatcgaggtac

SEQ ID NO: 170016 - DNA, 75 bp, synthetic construct
  source 1..75: mol_type = other DNA
ccacattcatcaaatccaaaatttcatttacattatggtgatttatcagacacatctaacctgactcgtttaatc

SEQ ID NO: 170017 - DNA, 75 bp, synthetic construct
  source 1..75: mol_type = other DNA
ggttgtcgaaatggttagaaaggatctggaggctgctaaaaaacattctctactcaaatcacatggttacgaggt

SEQ ID NO: 170018 - DNA, 75 bp, synthetic construct
  source 1..75: mol_type = other DNA
cgctgtatctttcgaatcaccagaatatacagcagatgttgatgcaataggcactcttcgtctattagaggcaat

SEQ ID NO: 170019 - DNA, 75 bp, synthetic construct
  source 1..75: mol_type = other DNA
cccagggctggagtcgtgcctgtacctcggcaatatggattccctgcgtgactggggccatgccaaagactacgt

SEQ ID NO: 170020 - DNA, 75 bp, synthetic construct
  source 1..75: mol_type = other DNA
ccgcttcctcggtctggaaaagaaaacccgtttttatcaggcttccacttctgaactgtatggtctggtgcagga

SEQ ID NO: 170021 - DNA, 75 bp, synthetic construct
  source 1..75: mol_type = other DNA
ggtgtctgaaatggtggctaatgacctcgaagcggcgaaaaaacactctctgctgaaatctcacggctacgacgt

SEQ ID NO: 170022 - DNA, 75 bp, synthetic construct
  source 1..75: mol_type = other DNA
tcaggccggacacaaccgcccggtgttcattcaccacattatcgccgccgacactatggacgaaatggtgatgga

SEQ ID NO: 170023 - DNA, 75 bp, synthetic construct
  source 1..75: mol_type = other DNA
aatggcgaaggcatcgaagcaccgaacgccgcggcaaagacactgaagtgtctgcaaatcgccagcggcgcagta

SEQ ID NO: 170024 - DNA, 75 bp, synthetic construct
  source 1..75: mol_type = other DNA
gaacagcaacgcgagcgtgttcaccatcaactacgataaccttgtctggctggttgaggaattgggagaacgatg

SEQ ID NO: 170025 - DNA, 75 bp, synthetic construct
  source 1..75: mol_type = other DNA
aacaggcgttgcgcgatgcgcgtctgaagccgagtcaaatcgacagtctggtgctggttggcggcgcgtcacaaa

SEQ ID NO: 170026 - DNA, 75 bp, synthetic construct
  source 1..75: mol_type = other DNA
tgtggtgatctctgttccggcttatttcagcgatgaacaacgcaagcatacccgtttagcagcggagttagccgg

SEQ ID NO: 170027 - DNA, 75 bp, synthetic construct
  source 1..75: mol_type = other DNA
tcaaaaatgtggctataaccaatgcaaggagcctgtttcgtgctgcattggcagaaccgcaagaaaacattccag

SEQ ID NO: 170028 - DNA, 75 bp, synthetic construct
  source 1..75: mol_type = other DNA
tttgcccctactccttaggtgttgaagttaaccgccagggcgtttccggcattttctcaccgattattgaacgaa

SEQ ID NO: 170029 - DNA, 75 bp, synthetic construct
  source 1..75: mol_type = other DNA
tcaatcgcttgcgagtgccgattgaacaggcgttgcgcgatgcacgtctgaagccgagtcaaatcgacagtctgg

SEQ ID NO: 170030 - DNA, 75 bp, synthetic construct
  source 1..75: mol_type = other DNA
tcctcactgatatttgcccttactcgttgggcgttgaagttaaccgccagggcgtttccggcattttctcgccga

SEQ ID NO: 170031 - DNA, 75 bp, synthetic construct
  source 1..75: mol_type = other DNA
gactcgcattgcgatcctggatatgcaaaacgtcctcggtgacagaacgacacctgcaggtaagctcaagtccgg

SEQ ID NO: 170032 - DNA, 75 bp, synthetic construct
  source 1..75: mol_type = other DNA
tacatcgtgctgtatacctcgaaggggatgattgcgaaggatgaacttaaaaacgagcaggcaaaagctgccggc

SEQ ID NO: 170033 - DNA, 75 bp, synthetic construct
  source 1..75: mol_type = other DNA
atgccgctgttctgttagtgggagcttcgcaggtcgccgctggagaaatgactgccggggtactggcggctttct

SEQ ID NO: 170034 - DNA, 75 bp, synthetic construct
  source 1..75: mol_type = other DNA
gtgtggctatagccaatgccaggaacctatgtcgtgctacattggcagaaccgcaagaaaacattccagaagaaa

SEQ ID NO: 170035 - DNA, 75 bp, synthetic construct
  source 1..75: mol_type = other DNA
gctcgtacccctggtatgaccatgatggacctcatgcagattgcgccgctgtttgagtgtgaacctttggatgta

SEQ ID NO: 170036 - DNA, 75 bp, synthetic construct
  source 1..75: mol_type = other DNA
gacctgaccgccgtcattgccccggacggcagcagaaacgggacacagtacgatgcgtggggaaaggccgtccgt

SEQ ID NO: 170037 - DNA, 75 bp, synthetic construct
  source 1..75: mol_type = other DNA
ctaatatttcctttgtgacggcctatgtcctcgatgccctttcacctgaactacaggctaaaacgagtgagtctt

SEQ ID NO: 170038 - DNA, 75 bp, synthetic construct
  source 1..75: mol_type = other DNA
gtaaatggtgtgataaccgttaaatctcactggtgtgcctacaaagacatccgagctggcgaagtgatctccaca

SEQ ID NO: 170039 - DNA, 75 bp, synthetic construct
  source 1..75: mol_type = other DNA
gtgcgctacggacgttggtcgtcgcggtgtctcgtcagaacaagcatgggatgcttatcaggaactccgacacaa

SEQ ID NO: 170040 - DNA, 75 bp, synthetic construct
  source 1..75: mol_type = other DNA
agagatattgcaattgcctccggataagtaaggggagattgcactatgcaaatgcagcatctgatggttggctat

SEQ ID NO: 170041 - DNA, 75 bp, synthetic construct
  source 1..75: mol_type = other DNA
atgaaatatatcagtaaaaatctggctcacttttacacagccctgtgtttattctttgttctttctgcaacagca

SEQ ID NO: 170042 - DNA, 75 bp, synthetic construct
  source 1..75: mol_type = other DNA
gaacaccgaatattaaaaaaattacgataaacggcaaagagcaactggcaacgctggataatccgccaccgtcta

SEQ ID NO: 170043 - DNA, 75 bp, synthetic construct
  source 1..75: mol_type = other DNA
cagtcaaacgatatggcccgcgtggatgaagttcggcggcgagcgagcgattatttagccattgagatcccataa

SEQ ID NO: 170044 - DNA, 75 bp, synthetic construct
  source 1..75: mol_type = other DNA
tcgcattgggcgcagcaatccaggccgcctgccgcttacgtagtgaagatattgaagaagtgatcctcaccgata

SEQ ID NO: 170045 - DNA, 75 bp, synthetic construct
  source 1..75: mol_type = other DNA
gggaatgcgaattttacgagaacgaactggaagatttgtggttaccgttgctcaaccgcctgcgtgtccccattg

SEQ ID NO: 170046 - DNA, 75 bp, synthetic construct
  source 1..75: mol_type = other DNA
tcaaattaatgaagcctatgagcgaatgctgcgtggtgatgtgaaatatcgttttgttatcgataatcgcacact

SEQ ID NO: 170047 - DNA, 75 bp, synthetic construct
  source 1..75: mol_type = other DNA
tcgctgttaaaaaattccgtactactgctcctcacgaagttacacattacgcaatcgacaaatatcgccgttggc

SEQ ID NO: 170048 - DNA, 75 bp, synthetic construct
  source 1..75: mol_type = other DNA
atgtggtggtcttactctggcgctctctttttccttcaagatataaatgcaatggataatgcagaactcgccatt

SEQ ID NO: 170049 - DNA, 75 bp, synthetic construct
  source 1..75: mol_type = other DNA
aaagaagacggcctgcatttaatcgaaatcgcccctggcgtcgatttacaaaaagatattctcgacaaaatggac

SEQ ID NO: 170050 - DNA, 75 bp, synthetic construct
  source 1..75: mol_type = other DNA
caaagagggatattactctcttcccaccgcgccgggtgccggcactaccttacgcccggaagctcttgagcactt

SEQ ID NO: 170051 - DNA, 75 bp, synthetic construct
  source 1..75: mol_type = other DNA
gttaattagttgggctaatcactgcactgaatacattgaagttttagatgagtctattgcatttacatgcctatc

SEQ ID NO: 170052 - DNA, 75 bp, synthetic construct
  source 1..75: mol_type = other DNA
ggggccagatgtgccaggtcagaatccctggctactgcaatcacaatcccgaaacttcagtgcttacgcattaca

SEQ ID NO: 170053 - DNA, 75 bp, synthetic construct
  source 1..75: mol_type = other DNA
acgttgaagcgtcgtttgagctgaacgatgccagcaaaaccattaaagtgttgagcgagtccgatttccaggtca

SEQ ID NO: 170054 - DNA, 75 bp, synthetic construct
  source 1..75: mol_type = other DNA
gaaacctctgtgctggcgcattacaggctggcggggacgtgcggaacagcgacaaaaccacacgatatgcaggcg

SEQ ID NO: 170055 - DNA, 75 bp, synthetic construct
  source 1..75: mol_type = other DNA
tacctgataacgccttaccacacaaaagagtcagagcttctgacaaatctccgcctgatagaacgctctcaagct

SEQ ID NO: 170056 - DNA, 75 bp, synthetic construct
  source 1..75: mol_type = other DNA
ccatgtctagctctaaaatacaaaacgcccgaggacgttcatcaggcgttttacagacagaaaagtgtcaacgta

SEQ ID NO: 170057 - DNA, 75 bp, synthetic construct
  source 1..75: mol_type = other DNA
gttatgactgctaccagaacgcactggctgagcgaataaacggtatcctgaaaaatgagtttttactctcgcgtc

SEQ ID NO: 170058 - DNA, 75 bp, synthetic construct
  source 1..75: mol_type = other DNA
cggagaatcgctgccggctatcgacacccgctatgatttccgctcgtatttgctgcaccaaccaaccactgagag

SEQ ID NO: 170059 - DNA, 75 bp, synthetic construct
  source 1..75: mol_type = other DNA
gaagtccgtaatacccgacgccgcatgattgttccggcaacacgctggcacgcctttagcaaccgggccggcgag

SEQ ID NO: 170060 - DNA, 75 bp, synthetic construct
  source 1..75: mol_type = other DNA
ttgattaaaaataaaataaaaaatgcaacatttaaatttagcaatgaagtaaaaataatcggtgatgctgccaac

SEQ ID NO: 170061 - DNA, 75 bp, synthetic construct
  source 1..75: mol_type = other DNA
tcgtaacagtctttacctggcagccaatggttatgatgttgacgcatgggataaaaatgccatgagtatcgccaa

SEQ ID NO: 170062 - DNA, 75 bp, synthetic construct
  source 1..75: mol_type = other DNA
tgcgaatatgcagcgctgcacaaaacccggcggttacaacctgattgtggcggcaatggataccgctgatttccc

SEQ ID NO: 170063 - DNA, 75 bp, synthetic construct
  source 1..75: mol_type = other DNA
ctatcgaaatcccatggtcagcaagccacaccttcgaaacgtccggggttttaagatcgggaggcaggaatttca

SEQ ID NO: 170064 - DNA, 75 bp, synthetic construct
  source 1..75: mol_type = other DNA
atacaatgaaaacgtcggtgagttgcaccgcaccgatgccaacggtaatcggattaaactgcgtttcgccacgat

SEQ ID NO: 170065 - DNA, 75 bp, synthetic construct
  source 1..75: mol_type = other DNA
cgctggatctgggctgtggcaatggtcgtaatagcctttaccttgcagctaatggttttgatgttgacgcatggg

SEQ ID NO: 170066 - DNA, 75 bp, synthetic construct
  source 1..75: mol_type = other DNA
aggcgaaaaccatcccagggctgattggcaatatgcaacgttgcactaaacctggcggttacaacctgattgtgg

SEQ ID NO: 170067 - DNA, 75 bp, synthetic construct
  source 1..75: mol_type = other DNA
gtgaagctgcaacttgtcgccgtgggaacgaaaatgccggactgggtacaaaccggttttaccgagtacctgcgt

SEQ ID NO: 170068 - DNA, 75 bp, synthetic construct
  source 1..75: mol_type = other DNA
catagctggggcaaatcccaatagctatatgggattcgttaacacccttgatgctcccgcaagtgatgttctccg

SEQ ID NO: 170069 - DNA, 75 bp, synthetic construct
  source 1..75: mol_type = other DNA
gcgcaatgcgcaggggcaattcagtctgtggccgcaacaatgcgtcttaccggcaggctgggacattgtgtgtca

SEQ ID NO: 170070 - DNA, 75 bp, synthetic construct
  source 1..75: mol_type = other DNA
gtccttatgcttataattatgttttatggtgtaacaactatgttgaaactagtgatactcccgggcgatgctctg

SEQ ID NO: 170071 - DNA, 75 bp, synthetic construct
  source 1..75: mol_type = other DNA
tccctcatgggcgcgcaaatgccctgctaatggcacacgttgtggcatggaatgctgactaccacggtcaatgcg

SEQ ID NO: 170072 - DNA, 75 bp, synthetic construct
  source 1..75: mol_type = other DNA
ccatccgctggttcgcgtgctggtcgcagagagtctgtaccgggcgtggagcatcaccaccaaccatccttatca

SEQ ID NO: 170073 - DNA, 75 bp, synthetic construct
  source 1..75: mol_type = other DNA
cgatagcgacaagcgaaaactgttccagctttcctcaaaagcggcggacctgtttgaccagtatctggtctatcg

SEQ ID NO: 170074 - DNA, 75 bp, synthetic construct
  source 1..75: mol_type = other DNA
attaaagatcctgcttatctggcgaaactgctgactcgccagcgccgacacagttttgaagatcgcgaattaccg

SEQ ID NO: 170075 - DNA, 75 bp, synthetic construct
  source 1..75: mol_type = other DNA
ctatttcgcgatagcgaaaatgccggacagctctttaacagcgatggtgaacaggatgtcggcaacccgctgctg

SEQ ID NO: 170076 - DNA, 75 bp, synthetic construct
  source 1..75: mol_type = other DNA
gacgctgaacacgatgtcatgctggatgacgagtccactgtgcaaaaagcccgtacgaaattccttcaggcttac

SEQ ID NO: 170077 - DNA, 75 bp, synthetic construct
  source 1..75: mol_type = other DNA
gcgctccatcccgttcaaagtagtttgcctgctgggaatgaacgatggtgtttacccgcgccagctcgcgccgct

SEQ ID NO: 170078 - DNA, 75 bp, synthetic construct
  source 1..75: mol_type = other DNA
cagcttgccgacagagtcattgcctgtcgccagccggggcaaagtatggaaattgatctcgcctgcaacggtgtg

SEQ ID NO: 170079 - DNA, 75 bp, synthetic construct
  source 1..75: mol_type = other DNA
aggccggtaaaaaaggcacgctggcggcgtcgttacaggccatcgctgaccagtcaaaaccggtcaccgttgtcg

SEQ ID NO: 170080 - DNA, 75 bp, synthetic construct
  source 1..75: mol_type = other DNA
tcaccacgctcattcgtaaagacggtttccgcttctggggcaaccgctgctgctccgatgacccgctgttcctgt

SEQ ID NO: 170081 - DNA, 75 bp, synthetic construct
  source 1..75: mol_type = other DNA
cagaagctgcgcgcctttggctatatcagcgcatgggattgtaagaacatttccgaggcgatgctctatcgcgag

SEQ ID NO: 170082 - DNA, 75 bp, synthetic construct
  source 1..75: mol_type = other DNA
cggcgcatggctaaaaacctgttatgacgcggcaaacgatgccatgctggatgacgattccacgttgcaaaaagc

SEQ ID NO: 170083 - DNA, 75 bp, synthetic construct
  source 1..75: mol_type = other DNA
gcgatgacgaccgctatctgttcctggaagcgttaatttccgcgcagcaaaaactctatatcagctatattgggc

SEQ ID NO: 170084 - DNA, 75 bp, synthetic construct
  source 1..75: mol_type = other DNA
cgcacgctcggtgagctggctcgtttaacgctgacacaatggcagtcacagttgctgattcctgtcgcggtaaaa

SEQ ID NO: 170085 - DNA, 75 bp, synthetic construct
  source 1..75: mol_type = other DNA
agatggagattgccagacacatcgagatgatcacccgcggcgttgaaggttttgtcatcgaccgcacgccagccg

SEQ ID NO: 170086 - DNA, 75 bp, synthetic construct
  source 1..75: mol_type = other DNA
ttctgacaaaagcggggtatgacgtttcagcagtaagagccgagctaaaagcacttcgccatttaattgctgagc

SEQ ID NO: 170087 - DNA, 75 bp, synthetic construct
  source 1..75: mol_type = other DNA
ggtgttggcgcagcgaaaatccgcgaactggcggctcttttccatcaaaataccaccatgctgatggctggctgg

SEQ ID NO: 170088 - DNA, 75 bp, synthetic construct
  source 1..75: mol_type = other DNA
ttactgacaaatatgaattaacccgcacacactcagaagttctggaagcggtaaaagtcattaaaccgggtaaaa

SEQ ID NO: 170089 - DNA, 75 bp, synthetic construct
  source 1..75: mol_type = other DNA
atacaatgaagacgtcggcgagctgcaccgcaccgacgccaacggtaatcgtattaaactgcgtttcgccacgat

SEQ ID NO: 170090 - DNA, 75 bp, synthetic construct
  source 1..75: mol_type = other DNA
cggtgttcgagtaggtgagtctatgcctctatatgagcggcttcagattcaaatggaaatagcaaagcatataga

SEQ ID NO: 170091 - DNA, 75 bp, synthetic construct
  source 1..75: mol_type = other DNA
tgatccacaagataacagcgtcaccttccacgtatgccacagcccgcagcgcgaagtggaagttttgcacgatcg

SEQ ID NO: 170092 - DNA, 75 bp, synthetic construct
  source 1..75: mol_type = other DNA
ttcgttgatgttacgccagacagcctgttgcataacatccagtccgatattctggaactggaaaaccgtgcggtc

SEQ ID NO: 170093 - DNA, 75 bp, synthetic construct
  source 1..75: mol_type = other DNA
gttgtggaaggcgttggtggaatataccgacgaactcgggcaaccgcgctggcaccgcgccaatctctatcagcg

SEQ ID NO: 170094 - DNA, 75 bp, synthetic construct
  source 1..75: mol_type = other DNA
atagtcaacagggtaaggttgaaatattattttggggtatgatgatgaccccagagagttgcttgaaatacctga

SEQ ID NO: 170095 - DNA, 75 bp, synthetic construct
  source 1..75: mol_type = other DNA
gtctcttgttgctcgggttccgcttgaaggggagtatctccctgctggatctgcatcagagaatgatgaagtggc

SEQ ID NO: 170096 - DNA, 75 bp, synthetic construct
  source 1..75: mol_type = other DNA
gatgttgatattaatgagccagatggaccaacgaatctttccgcatgggtaaggcttaagagcaaagagttgccg

SEQ ID NO: 170097 - DNA, 75 bp, synthetic construct
  source 1..75: mol_type = other DNA
ctcaggagcgcggtttaaaccagctgcggcaccagtggaaacagcatcgcacgtacctgatgtatgcacccactg

SEQ ID NO: 170098 - DNA, 75 bp, synthetic construct
  source 1..75: mol_type = other DNA
acggccatagcccagcatgtgtaaattggtctggttcaattacagcccctgacggaggaattgacatccatgttc

SEQ ID NO: 170099 - DNA, 75 bp, synthetic construct
  source 1..75: mol_type = other DNA
ggcggctgaatgcaaaactgtacttttaccccggcccggaatccgaacctattctggctgcggctgaatcgtcgt

SEQ ID NO: 170100 - DNA, 75 bp, synthetic construct
  source 1..75: mol_type = other DNA
gtggctgaccgtctgacggttcgcagcgcagaaatcatcacgtaccgtgtggaagccaccatttttctttatccg

SEQ ID NO: 170101 - DNA, 75 bp, synthetic construct
  source 1..75: mol_type = other DNA
ggcttcatctgcatacatacataaaaataataaattgctctacaatttattaaatacgagagacatgatattgaa

SEQ ID NO: 170102 - DNA, 75 bp, synthetic construct
  source 1..75: mol_type = other DNA
ccactggctgacatcgtgctcaacagtacgcaggcgtctttctgtaccgaataccgcgtcgtgaccggaggctcg

SEQ ID NO: 170103 - DNA, 75 bp, synthetic construct
  source 1..75: mol_type = other DNA
tgcgccgattgctctggaagccgctcatatcagatggaagcagcaccatggcccttgcgaagtacctaatggcct

SEQ ID NO: 170104 - DNA, 75 bp, synthetic construct
  source 1..75: mol_type = other DNA
gccgcaggtgctgccaccggcgaggtggtggggatgatagccacagagatgtgcggaatatcccctggtactgtt

SEQ ID NO: 170105 - DNA, 75 bp, synthetic construct
  source 1..75: mol_type = other DNA
accatgatcacccgcttcaataaagagcggctgcccaatatcgtggtaaccgtcgacctgctgacgaccggcgtc

SEQ ID NO: 170106 - DNA, 75 bp, synthetic construct
  source 1..75: mol_type = other DNA
ggtcccgaaagcgaacccatccgcgctgccgccgtgaaaaaactggaagcgtacatcacggcacagcaccggctg

SEQ ID NO: 170107 - DNA, 75 bp, synthetic construct
  source 1..75: mol_type = other DNA
atccgccatgtgtcctgggacagctatatcgaggttggtggtaatcgttacagcgttcccgaagcgctgtgtggt

SEQ ID NO: 170108 - DNA, 75 bp, synthetic construct
  source 1..75: mol_type = other DNA
ggcattgtgtgcaatccaccataaagcgtttgatcgcggttcgattggcctggatgaaaatatgcgtgtggtggt

SEQ ID NO: 170109 - DNA, 75 bp, synthetic construct
  source 1..75: mol_type = other DNA
gactgccgtaagcggtttggtgccgggctggcagagcctaataccgcgacccttgattttgggggctatccagcc

SEQ ID NO: 170110 - DNA, 75 bp, synthetic construct
  source 1..75: mol_type = other DNA
ctgtcaccagtccgtctccggcctgcgtcaccatctctgtgctgtcacgtgagaataacggtgtcgcatccgaag

SEQ ID NO: 170111 - DNA, 75 bp, synthetic construct
  source 1..75: mol_type = other DNA
cggtcgccagcccgtcgccagcctgcgtgacgattaccgtgctatcgcgtgagggggacggcactgccagccctg

SEQ ID NO: 170112 - DNA, 75 bp, synthetic construct
  source 1..75: mol_type = other DNA
ggaaccaggtttcagatcctgcccttgatgtatgtggtggatgcttcagtgactgccgtaaacgatttggcgccg

SEQ ID NO: 170113 - DNA, 75 bp, synthetic construct
  source 1..75: mol_type = other DNA
actggcaatgctcctcgataaactggactggcgtcagccaaaaacatcccgccttaacgcactgacaatgttgta

SEQ ID NO: 170114 - DNA, 75 bp, synthetic construct
  source 1..75: mol_type = other DNA
agtgatccgcacgctgaaactggaatctgaacccgtcaccaaattgctgcaggagaacgcttaccgtgagttgct

SEQ ID NO: 170115 - DNA, 75 bp, synthetic construct
  source 1..75: mol_type = other DNA
gtgcaaccagtccggcgcctgcagaggtagtgctgacggtcctgagtcgtgaaggcgacggaacagcagaaaaag

SEQ ID NO: 170116 - DNA, 75 bp, synthetic construct
  source 1..75: mol_type = other DNA
aggagccatgacactggaagattatgtcaccgcccagattgaaaaaattaagcgcgatgtacgccatgtgcaaat

SEQ ID NO: 170117 - DNA, 75 bp, synthetic construct
  source 1..75: mol_type = other DNA
tacccgttcccgatgtggttgaggaactggactatgaaaccatccttgcggaacgcaaagcgatactgatttcgc

SEQ ID NO: 170118 - DNA, 75 bp, synthetic construct
  source 1..75: mol_type = other DNA
gatggaaagcgatgaagcgttacgcctgcgtgtgcctgcggcttttgaagggctttcggttgcggggccaactgc

SEQ ID NO: 170119 - DNA, 75 bp, synthetic construct
  source 1..75: mol_type = other DNA
agtgcagcgtgtggagctggcttcaccactggcggatgtggtcctgaacaaaacacaggccgcatcatgtacgca

SEQ ID NO: 170120 - DNA, 75 bp, synthetic construct
  source 1..75: mol_type = other DNA
gacgagcaactgcatcttgatccggttttctggggttacgcgcccgggtggtgggataaaccaccactgattaac

SEQ ID NO: 170121 - DNA, 75 bp, synthetic construct
  source 1..75: mol_type = other DNA
tgacgcgtgaagattatcttgccctgctcgctgatgaatcagaacgcgacatcccatacgatccagaacccatcg

SEQ ID NO: 170122 - DNA, 75 bp, synthetic construct
  source 1..75: mol_type = other DNA
agcttaatcagaagcaagaaagtgcgattaagaagatcgataacactataaaaaatgctctgaaagatcatgata

SEQ ID NO: 170123 - DNA, 75 bp, synthetic construct
  source 1..75: mol_type = other DNA
accctcgaacactatccgggaatgacagaaaaggcactggctgaaatcgtggatgaggcgcgtaaccgttggccg

SEQ ID NO: 170124 - DNA, 75 bp, synthetic construct
  source 1..75: mol_type = other DNA
tctggataaagcattgttgagtagctatacaagtgttgatccttacttgactgcaaagatatttcataacttagc

SEQ ID NO: 170125 - DNA, 75 bp, synthetic construct
  source 1..75: mol_type = other DNA
acatggtcgcgcaatttgctttgctgatggatggtttgagtggaagaaggaaggtgacaagaaacaaccctattt

SEQ ID NO: 170126 - DNA, 75 bp, synthetic construct
  source 1..75: mol_type = other DNA
ttgcgcgctttccgtacgactaaagtgattttcatgacgcaaacatttatccccggcaaagatgccgctctggaa

SEQ ID NO: 170127 - DNA, 75 bp, synthetic construct
  source 1..75: mol_type = other DNA
ggtataccctgcgtatcggtgaattaaaagcaatgctggcactggctggcggcgatctggaccaagctctggtct

SEQ ID NO: 170128 - DNA, 75 bp, synthetic construct
  source 1..75: mol_type = other DNA
atgtgcaataacacccgtccggacgcagccgccgaggctatcagaacgctgatggacgcgctgattgatatttct

SEQ ID NO: 170129 - DNA, 75 bp, synthetic construct
  source 1..75: mol_type = other DNA
cgctggcaacgctgtcagcgggtatggccggcggcattgccagtggcgatgtggctggcgcggctgctggagctg

SEQ ID NO: 170130 - DNA, 75 bp, synthetic construct
  source 1..75: mol_type = other DNA
gcgaaacacttcctgctaatgcaacagagaaacaacgtcaggaatatcttgcgaaactgcgtgacacgcaggctt

SEQ ID NO: 170131 - DNA, 75 bp, synthetic construct
  source 1..75: mol_type = other DNA
tcatcgctgaaagcatcagcctgccagagatcccggctgatgtgctggcacgttatccggcggtggttgaagcca

SEQ ID NO: 170132 - DNA, 75 bp, synthetic construct
  source 1..75: mol_type = other DNA
gtcaggaaactataaatatggtgatgtcattgagcctgtacttgatgcccgatttcccgatggttcccggttgat

SEQ ID NO: 170133 - DNA, 75 bp, synthetic construct
  source 1..75: mol_type = other DNA
cgcgtcccctgcaatattttggatgtggcggtggccattgcggaggcagacggcgaaattgagccggaagagcgc

SEQ ID NO: 170134 - DNA, 75 bp, synthetic construct
  source 1..75: mol_type = other DNA
tcggcgagctggtatctgtacacgttatcccgcgtccgcacggcgacctggaagaagtcttcccgatcggcctga

SEQ ID NO: 170135 - DNA, 75 bp, synthetic construct
  source 1..75: mol_type = other DNA
agtcgctgcgccaggtgtgcaaactgtcggcgcgtaaacaaaagcaggtgcaggcgtttattggagtgattgccg

SEQ ID NO: 170136 - DNA, 75 bp, synthetic construct
  source 1..75: mol_type = other DNA
tatcgacgttcccggcaagctcaatgagtcgtatcgctacagtaaatgtttcgataatggcttcctgcgggaaac

SEQ ID NO: 170137 - DNA, 75 bp, synthetic construct
  source 1..75: mol_type = other DNA
attacagccgtattcccgccatcaccctgaaaggtcagtggctggaagtcgccggttttgccaccggcacggtgg

SEQ ID NO: 170138 - DNA, 75 bp, synthetic construct
  source 1..75: mol_type = other DNA
taatttacaacaagccggacatactctttatttttcagcgcattttgaacctgcaccgcaagagcttattggtga

SEQ ID NO: 170139 - DNA, 75 bp, synthetic construct
  source 1..75: mol_type = other DNA
cgttattaaatacctcaacgatacaagacacgcggcaaaagcgaacgttcaaaacttaaatggtcagcagcttta

SEQ ID NO: 170140 - DNA, 75 bp, synthetic construct
  source 1..75: mol_type = other DNA
ggtgcggtagtcacctttaccggtaaggtgcgcaaccataacctgggcgacagcgtcaaagcattaaccctcgaa

SEQ ID NO: 170141 - DNA, 75 bp, synthetic construct
  source 1..75: mol_type = other DNA
ggcttctgacgcgatggtgaaagctgcgcgcgtcaagctggttggtgttaagcagattggcggcggcctgtgtac

SEQ ID NO: 170142 - DNA, 75 bp, synthetic construct
  source 1..75: mol_type = other DNA
cagtaaatcaggtgccgatcccgcccgcgtacgtgaagcgctgatgggagggtttgcctcctctcgcgtgctgga

SEQ ID NO: 170143 - DNA, 75 bp, synthetic construct
  source 1..75: mol_type = other DNA
ctggaattgatgggtaaaaatatcactctggtcggtaacgtcggtgatggtcaaacgtgcaaagtcgctaaccaa

SEQ ID NO: 170144 - DNA, 75 bp, synthetic construct
  source 1..75: mol_type = other DNA
atgaaaaatccctatctccctaccgcactgggactgtatttcaattacctggtgcatggtatgggcgtcattttg

SEQ ID NO: 170145 - DNA, 75 bp, synthetic construct
  source 1..75: mol_type = other DNA
ttgaagagagtgaaatcaattacctgctgaaagtgtataacgcgcactttaaaaaacagcttagccgtgacgata

SEQ ID NO: 170146 - DNA, 75 bp, synthetic construct
  source 1..75: mol_type = other DNA
gtttcttctcaggctatcagagatgccgagaaagcagggcgactaccgcacccggatatggaaattcgaggacgg

SEQ ID NO: 170147 - DNA, 75 bp, synthetic construct
  source 1..75: mol_type = other DNA
acggttaaccaaaacatcacttccactcaggggaaactgaacatcaccctgcagggtgcaggcagtaacacagga

SEQ ID NO: 170148 - DNA, 75 bp, synthetic construct
  source 1..75: mol_type = other DNA
gtaaactggcggaacatgcgctggaaaaactgacgccgtattatcagggtattggtccggcatggacgaaagaga

SEQ ID NO: 170149 - DNA, 75 bp, synthetic construct
  source 1..75: mol_type = other DNA
aaattaagcgcggattcgaatattccgactgttgggtagacgacgcccgtctggtactcgccaacgcccagatgg

SEQ ID NO: 170150 - DNA, 75 bp, synthetic construct
  source 1..75: mol_type = other DNA
ggcctggtgaacgccaccggcccgtgggtgaaacagttcttcgacgacgggatgcatctgccttcgccttatggc

SEQ ID NO: 170151 - DNA, 75 bp, synthetic construct
  source 1..75: mol_type = other DNA
gaaattatgccgaaggtgcgggcggtttttttaaaggaatcgatgcgttaccgcttaccgggcaatacactcact

SEQ ID NO: 170152 - DNA, 75 bp, synthetic construct
  source 1..75: mol_type = other DNA
tgagtgacgcagcgtcgctggaggcagtaacagaggcaaatcaggataaaccgctacttgggctgttttctgacg

SEQ ID NO: 170153 - DNA, 75 bp, synthetic construct
  source 1..75: mol_type = other DNA
cagaccgccgctctgcgtgattctcttagcgataaacctgcaaaaaatattattttgctgattggcgatgggatg

SEQ ID NO: 170154 - DNA, 75 bp, synthetic construct
  source 1..75: mol_type = other DNA
accgacgttatgccagctaacccggataacagcccagtcagtagcgagctgcaagaagtgttttacctgccttaa

SEQ ID NO: 170155 - DNA, 75 bp, synthetic construct
  source 1..75: mol_type = other DNA
ctctcgataattatagcgcggcgatttttttgataccgatttgcatttcatttgataccgctgaaaaacgccgat

SEQ ID NO: 170156 - DNA, 75 bp, synthetic construct
  source 1..75: mol_type = other DNA
tcgcttgatatctagtatgacgggcactgttgcaaagttagcgatgaggcagccttttgtcttattcaaaggcct

SEQ ID NO: 170157 - DNA, 75 bp, synthetic construct
  source 1..75: mol_type = other DNA
tgcgggcatgaaatgtatccgagcaaaacagaatgggcgatgctgtgcagccactgccgtgagcgttactacccg

SEQ ID NO: 170158 - DNA, 75 bp, synthetic construct
  source 1..75: mol_type = other DNA
atgaccgcgtttatggcggaatatgacagcggcgagatcgtgatcgacccgaaagaattgctcgaggcgaactgg

SEQ ID NO: 170159 - DNA, 75 bp, synthetic construct
  source 1..75: mol_type = other DNA
taattatactggtccaaatatgtttgaccgtgttgatgcgagtaatttggaaggggtatatggttctgaatatat

SEQ ID NO: 170160 - DNA, 75 bp, synthetic construct
  source 1..75: mol_type = other DNA
catcgacctgctgaaaaaagcgggctgcagcagcatcaaagttctggtgctggtagctgcgccagaaggtatcgc

SEQ ID NO: 170161 - DNA, 75 bp, synthetic construct
  source 1..75: mol_type = other DNA
tggtcgctgcgccagaaggtatcgctgcgctggaaaaagcgcacccggacgtcgaactgtataccgcatcgattg

SEQ ID NO: 170162 - DNA, 75 bp, synthetic construct
  source 1..75: mol_type = other DNA
cactcgtcaaacacaagctgggactgatgcgtgagcaagatatcagcaccaagcgctttcgcgaactcgcttccg

SEQ ID NO: 170163 - DNA, 75 bp, synthetic construct
  source 1..75: mol_type = other DNA
cggcaaagcaccgctgctgtcggtattcggcggtaagctgaccacctaccgaaaactggcggaacatgcgctgga

SEQ ID NO: 170164 - DNA, 75 bp, synthetic construct
  source 1..75: mol_type = other DNA
tggaagcggaagatatcgataccggcaaaaaataccgctggcaggcgcgcggcctggttaacgccaccggcccgt

SEQ ID NO: 170165 - DNA, 75 bp, synthetic construct
  source 1..75: mol_type = other DNA
tgactgaatcgctggcacgtcactacgcgcgcacttacggcagcaacagcgagctgctgctcggcaatgcggggg

SEQ ID NO: 170166 - DNA, 75 bp, synthetic construct
  source 1..75: mol_type = other DNA
ctgtggctgcatctgctgtagtatccggttccgctatggcgtggcaggatggtaattttgataattcagtagaca

SEQ ID NO: 170167 - DNA, 75 bp, synthetic construct
  source 1..75: mol_type = other DNA
taccggcatatcttctggtatggctcctgtaattacttatagtggcgatggttttaagattaaattcccagcaga

SEQ ID NO: 170168 - DNA, 75 bp, synthetic construct
  source 1..75: mol_type = other DNA
taaagataagcttgacgccagaggagtatgagattcttaaggaattatcagctcttgagggtaagactatggctg

SEQ ID NO: 170169 - DNA, 75 bp, synthetic construct
  source 1..75: mol_type = other DNA
ccggcaaagtgaaatcgatcggctttaccagtagcagcactggccgcgccagcgtcggcgtgatggtggaaggcg

SEQ ID NO: 170170 - DNA, 75 bp, synthetic construct
  source 1..75: mol_type = other DNA
acgaacatccgtttgaccggatcgtgttcccggatgacccggagcggttcattcatgtgccgaccacgactgaga

SEQ ID NO: 170171 - DNA, 75 bp, synthetic construct
  source 1..75: mol_type = other DNA
gtgttcctgaatacgaccgcagtagatgagcatttccggcgcttcaacggccatacgcaggtcaatgcaactgac

SEQ ID NO: 170172 - DNA, 75 bp, synthetic construct
  source 1..75: mol_type = other DNA
atgatatcaagagaaaataataaaaataacctattccgtgtaaagtctaaaaatggtgtccttcgttgccttaag

SEQ ID NO: 170173 - DNA, 75 bp, synthetic construct
  source 1..75: mol_type = other DNA
ggcaatcgatgctgtcttccctggaattctgtggcaacgctgccagtttcatctgcagcagaatgcccactccta

SEQ ID NO: 170174 - DNA, 75 bp, synthetic construct
  source 1..75: mol_type = other DNA
aatataccttcagcactgccgaacctgaagagatgacagtaattagtggcgcgctgaatgtgttgctgcctgacg

SEQ ID NO: 170175 - DNA, 75 bp, synthetic construct
  source 1..75: mol_type = other DNA
aacggcatgattggctttaccagcctcgataaacgtgaagaacgcaccttgttgaaatatctgcaaatgaatgcg

SEQ ID NO: 170176 - DNA, 75 bp, synthetic construct
  source 1..75: mol_type = other DNA
gtcggccaagtgcgcgttggtcggtgttaacgctggtactgatggggattgtgattggtattgccttgattgtgt

SEQ ID NO: 170177 - DNA, 75 bp, synthetic construct
  source 1..75: mol_type = other DNA
aagaacgcaccttgttgaaatatctgcaaatgaatgcgtctgacaccgcaggtaaggctcacggcgataagaagg

SEQ ID NO: 170178 - DNA, 75 bp, synthetic construct
  source 1..75: mol_type = other DNA
gtgttcctgaacactaccgcagtggataagtacttccgtcgcttcaacgggcatacacaggtcaatgcaaccgac

SEQ ID NO: 170179 - DNA, 75 bp, synthetic construct
  source 1..75: mol_type = other DNA
cggcccggacgacggaaaccacatatcgcttcacgcagctggcgctgggaaattacaggctgacagtccgggcgg

SEQ ID NO: 170180 - DNA, 75 bp, synthetic construct
  source 1..75: mol_type = other DNA
tggataaacgtgaagagcgcaccatgctgaaatatctgcaaatgcatgcgtcggatacagcagggaagtctcaca

SEQ ID NO: 170181 - DNA, 75 bp, synthetic construct
  source 1..75: mol_type = other DNA
atgggggaggtcaagaaggatataaaaataacagtgattgcttttgttatcaattatctgttcttttatattccg

SEQ ID NO: 170182 - DNA, 75 bp, synthetic construct
  source 1..75: mol_type = other DNA
gcgaagtgacgaatgaaaccggcaccacgtgtttcggcctcattttggagatcgaccgtggtgtaccgacgctgc

SEQ ID NO: 170183 - DNA, 75 bp, synthetic construct
  source 1..75: mol_type = other DNA
atctgaggcaacgagaacgcttgactgaataccgggctgcgcatattcagcatatgcagaaagcgctgatgcaga

SEQ ID NO: 170184 - DNA, 75 bp, synthetic construct
  source 1..75: mol_type = other DNA
attgataagcccgctgtaacctgtacgccgaatccgcaacgtaatgatagcgtgccgacgctggcgcagatgacc

SEQ ID NO: 170185 - DNA, 75 bp, synthetic construct
  source 1..75: mol_type = other DNA
gaacgaagcggaaagccaggcgcgcgccattgtcgatcaggcgcgtaacggcgctgatttcggtaagctggcgat

SEQ ID NO: 170186 - DNA, 75 bp, synthetic construct
  source 1..75: mol_type = other DNA
taatggcgttgctacccgatttgagttctggtcgtttatcatcggtagcgcaataatttgcctgctaccgctttt

SEQ ID NO: 170187 - DNA, 75 bp, synthetic construct
  source 1..75: mol_type = other DNA
ccggggtgatcggctgcgaatatgcgtcgatcttccgtggaatggatgtgaaagtcgatctgatcaacacccgtg

SEQ ID NO: 170188 - DNA, 75 bp, synthetic construct
  source 1..75: mol_type = other DNA
tatcatccggcggacgttgattttacccatccgcgcatttacgacagcgactcaattcttagcatgcatcacgaa

SEQ ID NO: 170189 - DNA, 75 bp, synthetic construct
  source 1..75: mol_type = other DNA
aatgttgaaacagtggaacttcttgtcagcaatggtattaatgttaaccaccggaataagtcaggcacccttgcg

SEQ ID NO: 170190 - DNA, 75 bp, synthetic construct
  source 1..75: mol_type = other DNA
cgcaaaaaatgttcccggtcgcaagactgatgtcaacgacgcacagtggttgcagaaactgcattcatttggtct

SEQ ID NO: 170191 - DNA, 75 bp, synthetic construct
  source 1..75: mol_type = other DNA
atcgatcttccgtggaatggatgtgaaagtggatctgatcaacacccgcgatcgtttgttggcgtttcttgatca

SEQ ID NO: 170192 - DNA, 75 bp, synthetic construct
  source 1..75: mol_type = other DNA
ggagatgtcagattctctctcctatcacttctggaacagtggcgtggtgatccgtcacaacgaagagtacgagaa

SEQ ID NO: 170193 - DNA, 75 bp, synthetic construct
  source 1..75: mol_type = other DNA
catttcgcgagtcaccaaagaagatctttattaccgctactttagcgagatcaacgaatttacccatgaagattt

SEQ ID NO: 170194 - DNA, 75 bp, synthetic construct
  source 1..75: mol_type = other DNA
tcaaaagtaaaaagattcgtgcgcgcagtgcgctacgcccattggatgttgcaggcttgagccagcttctggtgc

SEQ ID NO: 170195 - DNA, 75 bp, synthetic construct
  source 1..75: mol_type = other DNA
ggtcacgcaatggcaagctggctacgctcagtgaagaaacctgccagaaattgcgcgatgcactgccagaacatg

SEQ ID NO: 170196 - DNA, 75 bp, synthetic construct
  source 1..75: mol_type = other DNA
acaacagcgtgagatgggcttttcctactttattgcgctcggcgacagcctggatatcgacgttgatgaattgct

SEQ ID NO: 170197 - DNA, 75 bp, synthetic construct
  source 1..75: mol_type = other DNA
tggaaggcggtacagggcgtgctggcatggccagacatcaccagtttgccttttactcctgacctcgcagtgcta

SEQ ID NO: 170198 - DNA, 75 bp, synthetic construct
  source 1..75: mol_type = other DNA
aacagttaagcgacgcgcgacgctttgtttcggcggcccgtagtgcctcgcgcaataaaccgattctggtgatta

SEQ ID NO: 170199 - DNA, 75 bp, synthetic construct
  source 1..75: mol_type = other DNA
cagtgtgctgaccgataccatagctgatatgtctcaggacaccagcatccacgaattcatcaagcagaacgcgcg

SEQ ID NO: 170200 - DNA, 75 bp, synthetic construct
  source 1..75: mol_type = other DNA
ctctggttgcaggtaaacaggtgatagtctcttattcacataaagaccgctacgggcgcgttatcgggcgcgtat

SEQ ID NO: 170201 - DNA, 75 bp, synthetic construct
  source 1..75: mol_type = other DNA
atgaggatttttttaagcgtaattttattcctgtttactgcttttcagtctgcaaatgcaggtggaataccttat

SEQ ID NO: 170202 - DNA, 75 bp, synthetic construct
  source 1..75: mol_type = other DNA
tgtttcagcggctcgtagtgcctcacgcaataaaccgattctggtaattaaaagcgggcgtagcccggcagcgca

SEQ ID NO: 170203 - DNA, 75 bp, synthetic construct
  source 1..75: mol_type = other DNA
acaaaaagcctgtcaggattcgcctggcaaacatcgatgcaccggagaaaaaacaggctttcgggcgctggtcag

SEQ ID NO: 170204 - DNA, 75 bp, synthetic construct
  source 1..75: mol_type = other DNA
tcgatgctcctgaaaagaaacaggctttcgggcactggtcagcaaatcagcttaaagctctgctcgcaggccaat

SEQ ID NO: 170205 - DNA, 75 bp, synthetic construct
  source 1..75: mol_type = other DNA
aatggcaaaacaggtcggaaagcttgatgccttgatgttctctggtactgcactaaacggcgaatatggcgaatg

SEQ ID NO: 170206 - DNA, 75 bp, synthetic construct
  source 1..75: mol_type = other DNA
gccgcaccgttagcaacgaatcccaatgttatgcaagcgacggatgcttttgcccgctcgttgaaagaaatcgcc

SEQ ID NO: 170207 - DNA, 75 bp, synthetic construct
  source 1..75: mol_type = other DNA
tactccgtcatacgccagagagctggaaatttgtcgtcaccgcagtgatggaaaccatgcgtcgccgcagcgaaa

SEQ ID NO: 170208 - DNA, 75 bp, synthetic construct
  source 1..75: mol_type = other DNA
gccgttcaattcagacaatcagagactgcaccagtgtggtggcatcaatcccattgcgaaacagcatagacgaac

SEQ ID NO: 170209 - DNA, 75 bp, synthetic construct
  source 1..75: mol_type = other DNA
cttatttttctttaaaaaaagataaagaagaagataaaggtttaacattattagaaattgccggcgcaatgatta

SEQ ID NO: 170210 - DNA, 75 bp, synthetic construct
  source 1..75: mol_type = other DNA
atgtttaaatcagacgtaatcaatttttatggctcgaaagccaaagtagcgaaagctgctggtgttgatccatcg

SEQ ID NO: 170211 - DNA, 75 bp, synthetic construct
  source 1..75: mol_type = other DNA
gatggcgagcttccggttatcccggaaaaattcgctgcgcaccgctcgcgcaacaatcagatcctgctggcggcg

SEQ ID NO: 170212 - DNA, 75 bp, synthetic construct
  source 1..75: mol_type = other DNA
accggtaacggcaccatcaccggtaatgcaaccggtaacggcaccatcaccggtaatgcaaccggtaacggcacc

SEQ ID NO: 170213 - DNA, 75 bp, synthetic construct
  source 1..75: mol_type = other DNA
cgcttctggaagcactcggcgaaaaaggctgtaaaacctgcattattctttctgccccgacatcgcaacacgaag

SEQ ID NO: 170214 - DNA, 75 bp, synthetic construct
  source 1..75: mol_type = other DNA
caatgtcgcaggagttaggctggcaagcgttgctgcatggggggaactggttcctgaaggtcgcgcgatgcgcct

SEQ ID NO: 170215 - DNA, 75 bp, synthetic construct
  source 1..75: mol_type = other DNA
ccacgggcagccgagcaccacgtggcactatgcacaacaagagctcggcgatccgtcgcgttttctcagccactg

SEQ ID NO: 170216 - DNA, 75 bp, synthetic construct
  source 1..75: mol_type = other DNA
tcgcccaccttatgtcagccgttcggtcgtgaccgtgcgggcatcaccattggcgaaggcgcggggctaatgctg

SEQ ID NO: 170217 - DNA, 75 bp, synthetic construct
  source 1..75: mol_type = other DNA
catctcacctggtacttcggcgaagagctgaagaaaatgggcatgaacatcattaatgacgacatcaccgggcga

SEQ ID NO: 170218 - DNA, 75 bp, synthetic construct
  source 1..75: mol_type = other DNA
caccgtcaggatggtaacattgtgctggacggtggtgacagcggcgtggtgcacctgagcgctaccctgcatgcg

SEQ ID NO: 170219 - DNA, 75 bp, synthetic construct
  source 1..75: mol_type = other DNA
tgttaagagatgagatacctgtgcgtctggtgtctattatattcccaacattattggcgctattcttgctggcgt

SEQ ID NO: 170220 - DNA, 75 bp, synthetic construct
  source 1..75: mol_type = other DNA
ttaactatttaaaaatggtgagtataatgtttattgctttttttgttactatgattattacatgtatcattgtct

SEQ ID NO: 170221 - DNA, 75 bp, synthetic construct
  source 1..75: mol_type = other DNA
aactgggggaggcccgcgttcgactttcccgcagaaaacggagaaagaaaggacagcgtgcggccctgaaagggg

SEQ ID NO: 170222 - DNA, 75 bp, synthetic construct
  source 1..75: mol_type = other DNA
tcaataccggcaacctgcccgccatcaaactgggggaggcccgcgttcgactttcccgcagaaaacggagaaaga

SEQ ID NO: 170223 - DNA, 75 bp, synthetic construct
  source 1..75: mol_type = other DNA
aaggttcacatattgatgtttcggcgacacagcagggtgacggcggaacggcggtattgtggtcagagagtttta

SEQ ID NO: 170224 - DNA, 75 bp, synthetic construct
  source 1..75: mol_type = other DNA
agcgaccgctgacctcgaaactgaaaaagtaaccatcgaaggctggaacggcccggtggaaatcgaccagattaa

SEQ ID NO: 170225 - DNA, 75 bp, synthetic construct
  source 1..75: mol_type = other DNA
agccggtaccttacttccagaagctggtgtcgaacattgatgagcgtatggcgctgatcgtcgacccaatgctgg

SEQ ID NO: 170226 - DNA, 75 bp, synthetic construct
  source 1..75: mol_type = other DNA
gcgagcgcactggctgcagccgcccagaaagcaggctttgatctgatcctctgtggcgatggttcttccgacctt

SEQ ID NO: 170227 - DNA, 75 bp, synthetic construct
  source 1..75: mol_type = other DNA
ccttaagtgtgggcggtaaagccctgaccaacgccaaagggcgtaaagatgtgctatcgcgcggcccggatgaac

SEQ ID NO: 170228 - DNA, 75 bp, synthetic construct
  source 1..75: mol_type = other DNA
agctgtagtgagcgaacatcaggcaaacaggttatcgaattgacaatgctggtgaagcaattagtcagccaactg

SEQ ID NO: 170229 - DNA, 75 bp, synthetic construct
  source 1..75: mol_type = other DNA
ccgttcccaacgatccgactaacctcggtcgttcgctgctgttgctgcaaaaagtggggttaatcaaactgaaag

SEQ ID NO: 170230 - DNA, 75 bp, synthetic construct
  source 1..75: mol_type = other DNA
ccgtgccaaacgacccaactaaccttggtcgttcactgctgctgctgcaaaaagtgggcttgatcaaactgaaag

SEQ ID NO: 170231 - DNA, 75 bp, synthetic construct
  source 1..75: mol_type = other DNA
tgggcgacgtgattggttatccgagcctggcgtcggcggcctatgaccaggggcgcattgccgcgcaggcgctgg

SEQ ID NO: 170232 - DNA, 75 bp, synthetic construct
  source 1..75: mol_type = other DNA
tattcctgtttactgtttttcagtctgcaaatgcaggcggaataccttatacattaaaccaggaaattcttcagg

SEQ ID NO: 170233 - DNA, 75 bp, synthetic construct
  source 1..75: mol_type = other DNA
tgcaaatgcaggtggaataccttatacatttaaccagaaaattcttcaggggaaagttattcgcgttctcgatgg

SEQ ID NO: 170234 - DNA, 75 bp, synthetic construct
  source 1..75: mol_type = other DNA
ttgcagaagtcgcgcagaaagttgcgaaagacaaatatggcctggacgttgagctggtaaccttcaacgactatg

SEQ ID NO: 170235 - DNA, 75 bp, synthetic construct
  source 1..75: mol_type = other DNA
ctaacgcagccgctccggcgaccgttccttccatggaggcgccagcagcagcggaaatcagtggtcacatcgtac

SEQ ID NO: 170236 - DNA, 75 bp, synthetic construct
  source 1..75: mol_type = other DNA
gcgtctgcctttacttagccagaaaccctattacagcaagctgacttacggctacgctcgtgggcatgaagccta

SEQ ID NO: 170237 - DNA, 75 bp, synthetic construct
  source 1..75: mol_type = other DNA
gaatatcagccagctgtttgacgacctcgataatggtaacgccgacctgctggcggcaggactggtctataacag

SEQ ID NO: 170238 - DNA, 75 bp, synthetic construct
  source 1..75: mol_type = other DNA
gcgattatggaacagaaaggtggcggcaacactattgagtacttcgtcaacaccagctttaactacccgacgatg

SEQ ID NO: 170239 - DNA, 75 bp, synthetic construct
  source 1..75: mol_type = other DNA
cacgtgcacaaatcgtcggcatgaacgtgggcacgctgaaaattttgttccatcgggaaacaaaagagattctgg

SEQ ID NO: 170240 - DNA, 75 bp, synthetic construct
  source 1..75: mol_type = other DNA
ccgaaacgctgaccgctgaaaaatttgttattgcctgcggttcacgtccttatcatccaacggatgtcgatttca

SEQ ID NO: 170241 - DNA, 75 bp, synthetic construct
  source 1..75: mol_type = other DNA
ggggtgtgacgcaggaagctatcgccattggcgctaaaaccgtatggatgcagttaggggtgattaatgagcaag

SEQ ID NO: 170242 - DNA, 75 bp, synthetic construct
  source 1..75: mol_type = other DNA
cggcggtactggcgcgcgacgccggtttacaggtcgttatggatcgctgcccggcaattgagatccctcgcctgg

SEQ ID NO: 170243 - DNA, 75 bp, synthetic construct
  source 1..75: mol_type = other DNA
tggttttgatgcctttgcgtcaccaaatcttcctccattgctggaagccggtattcacatccgtcgtttaaatac

SEQ ID NO: 170244 - DNA, 75 bp, synthetic construct
  source 1..75: mol_type = other DNA
tgggtatggcgatgatatttaccatgcaatatacaataagcgtgtcgtagattttccatcatggactttcagaca

SEQ ID NO: 170245 - DNA, 75 bp, synthetic construct
  source 1..75: mol_type = other DNA
aaagttgtactatactcattagttaccgggcttgggttacgttgtcttgttgaaattatttcttatattcaggat

SEQ ID NO: 170246 - DNA, 75 bp, synthetic construct
  source 1..75: mol_type = other DNA
ggcttttatattattcgtggtaacttcgaagaagttgatctcaaacccattggcttgattgttggattgctgtta

SEQ ID NO: 170247 - DNA, 75 bp, synthetic construct
  source 1..75: mol_type = other DNA
gcaaagcgtgcaggaaacgaagcaatacaccgatcagcgaatggttgagatggataacaaactgtctaaaactga

SEQ ID NO: 170248 - DNA, 75 bp, synthetic construct
  source 1..75: mol_type = other DNA
cgtggtgtggggaataaggatcgcatggttgcgtacaccaacgataaaaaatacgtccgctacccgctggttccg

SEQ ID NO: 170249 - DNA, 75 bp, synthetic construct
  source 1..75: mol_type = other DNA
gtcacttactacggcaagctgggtgcagtcgagccagtgtataaagaaaccctgtcctatgtggacggtatctga

SEQ ID NO: 170250 - DNA, 75 bp, synthetic construct
  source 1..75: mol_type = other DNA
cagggactggataccgaaaccattcgcaaggccatgagccaaaacctgcgcggcgaactgacgccggatgattaa

SEQ ID NO: 170251 - DNA, 75 bp, synthetic construct
  source 1..75: mol_type = other DNA
tgtctggcgctttctggaactttgtaatgcaggactgtcagttgaggatatcaagcgccaggtgatggaaaacag

SEQ ID NO: 170252 - DNA, 75 bp, synthetic construct
  source 1..75: mol_type = other DNA
gaaagtcactgatgagcgcgtaacgcaaaatacccagagcattactaacctgaacaatcaggtcactaatctgga

SEQ ID NO: 170253 - DNA, 75 bp, synthetic construct
  source 1..75: mol_type = other DNA
tctgaaatctttaaatgcttttggactggatttagcaaggttactaagcatcaagattcacaagttagcggataa

SEQ ID NO: 170254 - DNA, 75 bp, synthetic construct
  source 1..75: mol_type = other DNA
ggtctgccacactcagcagtgatgaagcttgcaattaaccgtgatattaacgaacaggatttgcttaatagtcgc

SEQ ID NO: 170255 - DNA, 75 bp, synthetic construct
  source 1..75: mol_type = other DNA
atggaaaccaaagatctgattgttataggtggcggcatcaatggtgctggtatcgcggcagacgccgctggacgc

SEQ ID NO: 170256 - DNA, 75 bp, synthetic construct
  source 1..75: mol_type = other DNA
aagaacttaataatctttttgacactattagaaaaaaatcaagtattcgaccaccaattgagattgaaaaaaacc

SEQ ID NO: 170257 - DNA, 75 bp, synthetic construct
  source 1..75: mol_type = other DNA
actgatgtgagcctgcaggacaggtgcctgcatataaagagaatgaaaaacggattcagtactatacatccgata

SEQ ID NO: 170258 - DNA, 75 bp, synthetic construct
  source 1..75: mol_type = other DNA
agtgatatatacagcgagtaatgttgaaagattccgcaatgtatggtcaaaaaagaagctgcggttagacaaata

SEQ ID NO: 170259 - DNA, 75 bp, synthetic construct
  source 1..75: mol_type = other DNA
actatgaattcgaaacgtcggcgggctggcacgataaatggcctttcccgacgcgcaaggaattaagcgatcgaa

SEQ ID NO: 170260 - DNA, 75 bp, synthetic construct
  source 1..75: mol_type = other DNA
aataccggggccaacgccgccgctggcgccgcgtccagccccgccaacagcgatattccgccgcagaccgagccg

SEQ ID NO: 170261 - DNA, 75 bp, synthetic construct
  source 1..75: mol_type = other DNA
ggaaacttcgaggaagttgatcttaaaccaattggcttgattgttggtttactgttagcaatgcggaataaataa

SEQ ID NO: 170262 - DNA, 75 bp, synthetic construct
  source 1..75: mol_type = other DNA
tgaccgaatcgctggcacgtcactacgcgcgcacttacggcagcaacagcgaactgttgctcggcaatgcagggg

SEQ ID NO: 170263 - DNA, 75 bp, synthetic construct
  source 1..75: mol_type = other DNA
tcgccgcaggccattacccgtgattacacccttgatatccatgatgaaaacggcaaagccccgctgctgtcggta

SEQ ID NO: 170264 - DNA, 75 bp, synthetic construct
  source 1..75: mol_type = other DNA
cacgacctggcggcaccgatcctggcggggattattaccgcagcgattgtcagctggtggcgtaaccggaagtaa

SEQ ID NO: 170265 - DNA, 75 bp, synthetic construct
  source 1..75: mol_type = other DNA
ccgttcaaggccttaaaggaatgaaggttaacgagcgcgaaatgggatacctgagtaagtctgaatgtgttcagt

SEQ ID NO: 170266 - DNA, 75 bp, synthetic construct
  source 1..75: mol_type = other DNA
accgcacgccgcatccggcgctgacggaagcaaaataccagcagcagtttttccagttccgtttatccgggcaaa

SEQ ID NO: 170267 - DNA, 75 bp, synthetic construct
  source 1..75: mol_type = other DNA
tctggcggaaaacctcagcgtgacactcccctccgcgtcccacgccatccctcaactgaccaccagcggaacgga

SEQ ID NO: 170268 - DNA, 75 bp, synthetic construct
  source 1..75: mol_type = other DNA
aatcttccttgagcgcaatatgcagttgcagatccctggctgggatttccagggcgcgtgcctggggctggatat

SEQ ID NO: 170269 - DNA, 75 bp, synthetic construct
  source 1..75: mol_type = other DNA
ccggaagtatgacatattttacaggaagtgcagcgaataaagtattccatacactgacggttgataagctgacga

SEQ ID NO: 170270 - DNA, 75 bp, synthetic construct
  source 1..75: mol_type = other DNA
atcagtgttgaagggaaatctgctgccgcaggaacatcctcctatacagggcatatcactctggagcaaaaatca

SEQ ID NO: 170271 - DNA, 75 bp, synthetic construct
  source 1..75: mol_type = other DNA
cgcagatcatccagcaggcaggtaactcggtgctgtccaaagctaaccaggttccgcagcaggttctgtctctgc

SEQ ID NO: 170272 - DNA, 75 bp, synthetic construct
  source 1..75: mol_type = other DNA
tgcggtgcaaaaccgtctggattccgcagtaaccaacctgaacaacaccaccaccaacctgtctgaagcgcagtc

SEQ ID NO: 170273 - DNA, 75 bp, synthetic construct
  source 1..75: mol_type = other DNA
tcaccaacctgaacaacaccaccaccaacctgtctgaagcgcagtcccgcattcaggacgccgactatgcgaccg

SEQ ID NO: 170274 - DNA, 75 bp, synthetic construct
  source 1..75: mol_type = other DNA
gtcatgtatctgagcaaatcagaaggtggtagcccgattctggtaaacgaagatgcagcaaaatcgttgcaatct

SEQ ID NO: 170275 - DNA, 75 bp, synthetic construct
  source 1..75: mol_type = other DNA
gacaggtactgataattatcaaattaacggtactgataactatactgttaatgtagatagtggcgtagtacagga

SEQ ID NO: 170276 - DNA, 75 bp, synthetic construct
  source 1..75: mol_type = other DNA
catgtttattcatgcttgctagtgatactgcattcatagagtctgtcaactatggagattttttcgtctcatgca

SEQ ID NO: 170277 - DNA, 75 bp, synthetic construct
  source 1..75: mol_type = other DNA
caacggagaatgatttgcctccattaatgacatcccctaccggaccagattccgagagagccaatcggttgatgc

SEQ ID NO: 170278 - DNA, 75 bp, synthetic construct
  source 1..75: mol_type = other DNA
cgttcccctatacccgtcacggctacctgcatggcgttgtcagaacggttagcagtgaggctgtcgaggacaacc

SEQ ID NO: 170279 - DNA, 75 bp, synthetic construct
  source 1..75: mol_type = other DNA
aaaccggtatcacctcttcctcggattgtagcgcgcacaattatgatctttctggtcttggcgatattaatttcc

SEQ ID NO: 170280 - DNA, 75 bp, synthetic construct
  source 1..75: mol_type = other DNA
tgctggtaccagtttcgagaagacgtacgatctatatctttttgacaaaaaactgcgtcttttgatgattgatgc

SEQ ID NO: 170281 - DNA, 75 bp, synthetic construct
  source 1..75: mol_type = other DNA
actggagcagcagaagcatattgctgaggtaaagctcagcgatattcgcgctctttataaaaagcaggctatatc

SEQ ID NO: 170282 - DNA, 75 bp, synthetic construct
  source 1..75: mol_type = other DNA
agaaattattacaggctatcgccgagtgatcgatttcattcttagcccaataagagaaacaatcgatgagagctt

SEQ ID NO: 170283 - DNA, 75 bp, synthetic construct
  source 1..75: mol_type = other DNA
gcttcacgccgggccgccgatgcgctggcaggagatgaccggccccatgaaaggggcgtgtgtaggggcatgtct

SEQ ID NO: 170284 - DNA, 75 bp, synthetic construct
  source 1..75: mol_type = other DNA
gcgcggtatcgatctcaccgcgatgatggcgcagggcattaccatgggcgatgagttccatcaacgcaatattgc

SEQ ID NO: 170285 - DNA, 75 bp, synthetic construct
  source 1..75: mol_type = other DNA
aaggggcgtgcgtgggcgcatgtctgttcgaaggctgggcgaaagatgaagcgcaggcgctggcaatgctggagc

SEQ ID NO: 170286 - DNA, 75 bp, synthetic construct
  source 1..75: mol_type = other DNA
agtaacgcgggttacgggaaagaagacgatagcgcagttatcaagattttctctggcatcactctaccgggagcg

SEQ ID NO: 170287 - DNA, 75 bp, synthetic construct
  source 1..75: mol_type = other DNA
atgaaaaataactttccggcgctgcttttgggcaccgccctgatgatcacttcgcctgtgacagtatatgcacag

SEQ ID NO: 170288 - DNA, 75 bp, synthetic construct
  source 1..75: mol_type = other DNA
tgaagcgcaggcgctggcaatactggagcagggggaagtgaacttcattccttgtcaccatgtgaatgccgtcgg

SEQ ID NO: 170289 - DNA, 75 bp, synthetic construct
  source 1..75: mol_type = other DNA
gaacacacgcaagcggtttgaaccgcagcccggaaaccgtactgatacggcggcacagaccacggtccggacgct

SEQ ID NO: 170290 - DNA, 75 bp, synthetic construct
  source 1..75: mol_type = other DNA
aactgctggctgcgatgatcatccacgaatgggataaattctggccgcagagtggcccggcgcggactgagatgc

SEQ ID NO: 170291 - DNA, 75 bp, synthetic construct
  source 1..75: mol_type = other DNA
ccttccactgaaataaaaatccggcagcgcaggctaccggatttctccctgcgtcaccgtattcggagaaatcag

SEQ ID NO: 170292 - DNA, 75 bp, synthetic construct
  source 1..75: mol_type = other DNA
ctgtacatgatcgcctccggcgaacagagcggcgaactggaaaccatgcttgagcaggccgcagtcaaccaggaa

SEQ ID NO: 170293 - DNA, 75 bp, synthetic construct
  source 1..75: mol_type = other DNA
gtgacggggcgtgttgcgcgcgggctgaatacggcgcgtttttcccgcaccttaagcatcctcaccgccagcagt

SEQ ID NO: 170294 - DNA, 75 bp, synthetic construct
  source 1..75: mol_type = other DNA
cctacccgacctgccggaaatgcgggtgggggtgcgcggtgtggcagataacgccgacaaagcaaaacagggcga

SEQ ID NO: 170295 - DNA, 75 bp, synthetic construct
  source 1..75: mol_type = other DNA
gtaggatatgtgttttcgaaaatactgaagatatcctttctgcgttttattcagtctgaggggggatgggatatt

SEQ ID NO: 170296 - DNA, 75 bp, synthetic construct
  source 1..75: mol_type = other DNA
gttgtgggtgcagctggccgagacatgatggaccgcccggaagaggaagccggttccgtgctgtctactgcaaaa

SEQ ID NO: 170297 - DNA, 75 bp, synthetic construct
  source 1..75: mol_type = other DNA
gacttaatgaccactggcagaaaacgtctcaggcgttgctggtcggggttatcctccatgtcctgtataagcata

SEQ ID NO: 170298 - DNA, 75 bp, synthetic construct
  source 1..75: mol_type = other DNA
gtcacctccgatattaatatgccacgcattccttcgatgaaagccattctcggcgcgggtaaaaaaccgataaat

SEQ ID NO: 170299 - DNA, 75 bp, synthetic construct
  source 1..75: mol_type = other DNA
ctcaatatgacgttatcaccagttagcacatcactgttaaaaaatgctgttcagggagaacctctcacatctatt

SEQ ID NO: 170300 - DNA, 75 bp, synthetic construct
  source 1..75: mol_type = other DNA
atcaggagttgcaggtgtcgctgttctattaaaacaaaatccttacaatacaatagagcagcagcttgaagttag

SEQ ID NO: 170301 - DNA, 75 bp, synthetic construct
  source 1..75: mol_type = other DNA
ggcgataatatgtccgatcaacctaaaccgctgggcggtggcggtgaacgctatgcctgtggtgtgattaagtaa

SEQ ID NO: 170302 - DNA, 75 bp, synthetic construct
  source 1..75: mol_type = other DNA
catgaagggccagaaggtgccgggcatttaggcgatctgcctgcactggtagtcaataatgacggcaaagctacc

SEQ ID NO: 170303 - DNA, 75 bp, synthetic construct
  source 1..75: mol_type = other DNA
tttatggtcatttccagcgacgataaagcgcaccggataattaaagcccgccgttcagccaatgacttcttaggt

SEQ ID NO: 170304 - DNA, 75 bp, synthetic construct
  source 1..75: mol_type = other DNA
gatgtgcagcagcaggtaaaaacgctggagaaaaccaccgttgccgacaccaataccgagtggagcaagttgcag

SEQ ID NO: 170305 - DNA, 75 bp, synthetic construct
  source 1..75: mol_type = other DNA
gcacgctcaacggcatgattggctttaccagtctcgataaacgtgaagaacgcaccttgttgaaatatctgcaaa

SEQ ID NO: 170306 - DNA, 75 bp, synthetic construct
  source 1..75: mol_type = other DNA
ggttaacaatgacggtaaagcaaccgatgccgtcattgcgcctcgtctgaaatcacttgatgaaatcaaagacaa

SEQ ID NO: 170307 - DNA, 75 bp, synthetic construct
  source 1..75: mol_type = other DNA
gccgaagggctggctcttcataacggaaaactgtatctgctcgatatggatttctggtgtcagacagcagatgtg

SEQ ID NO: 170308 - DNA, 75 bp, synthetic construct
  source 1..75: mol_type = other DNA
ataacggtggcattgtcggtagacggaagcctgttgattgttcagtcaagtaatgaagccgtccatcttcattac

SEQ ID NO: 170309 - DNA, 75 bp, synthetic construct
  source 1..75: mol_type = other DNA
aaactggtgcatgaggtctggcgtcacgccctgaataaagtcagcgtggataacaagaataaaaactatatcgtg

SEQ ID NO: 170310 - DNA, 75 bp, synthetic construct
  source 1..75: mol_type = other DNA
gcgtgcaaaaagtcctggtcggcgtcagttcattagtggcagcctgttatttcccttttgctcaggcctacggcg

SEQ ID NO: 170311 - DNA, 75 bp, synthetic construct
  source 1..75: mol_type = other DNA
atgaagcagcaaaaagcgatattaatcgctctgatcgtcatctgtttaaccgtcattgtgacggcactggtaacg

SEQ ID NO: 170312 - DNA, 75 bp, synthetic construct
  source 1..75: mol_type = other DNA
cagaaaatccttgaacatctccacggtgttattcattacgagcccgtgattggcattatgggtaaatccggcacc

SEQ ID NO: 170313 - DNA, 75 bp, synthetic construct
  source 1..75: mol_type = other DNA
atatgccgcagaaatttggtctgtatgaagatctgacggtgatggagaacctcaatctgtacgcggatttgcgca

SEQ ID NO: 170314 - DNA, 75 bp, synthetic construct
  source 1..75: mol_type = other DNA
aaggcgtcacggtgatggtcaccacccactttatggatgaagcagaatattgcgaccgcatcggcctggtgtacc

SEQ ID NO: 170315 - DNA, 75 bp, synthetic construct
  source 1..75: mol_type = other DNA
tcaaagcaggcgaacccgatatcctgacgccactgaaacactatccacttgtgatccgctcgctcgatggcgaga

SEQ ID NO: 170316 - DNA, 75 bp, synthetic construct
  source 1..75: mol_type = other DNA
ctgcatatcaacagcatggtagagaaaggcgtcacggtgatggtcaccacccactttatggatgaagcggaatat

SEQ ID NO: 170317 - DNA, 75 bp, synthetic construct
  source 1..75: mol_type = other DNA
tttgaagatgcgtttattgatttgctgggcggtgccggaacctcagaatcgccgctgggtgcaatattgcatacg

SEQ ID NO: 170318 - DNA, 75 bp, synthetic construct
  source 1..75: mol_type = other DNA
tgattcaggggaaatcggtacgtctgatcctcaaaaaagaggccacaccagacgatattcgccgcgccgacggga

SEQ ID NO: 170319 - DNA, 75 bp, synthetic construct
  source 1..75: mol_type = other DNA
gagctggaagcgcgcaccgccgacaacttaacgcccattgccattcacagcgccaccctcgaaatcgaagcggtg

SEQ ID NO: 170320 - DNA, 75 bp, synthetic construct
  source 1..75: mol_type = other DNA
ctgttctcaagcgtcgtggccccggacacggtgtttgtcgcgctctcggcgatttctggctttgcggtggtggcg

SEQ ID NO: 170321 - DNA, 75 bp, synthetic construct
  source 1..75: mol_type = other DNA
gttgcgttgtgctatggtgcttatttccttactcaaccccgaaacgcaaaacaggagccagaacatgtcgcagaa

SEQ ID NO: 170322 - DNA, 75 bp, synthetic construct
  source 1..75: mol_type = other DNA
aatcagcaaaataccgcatttcttttgcggttctaagcgttatttttatttttctgatattaggaactttatcca

SEQ ID NO: 170323 - DNA, 75 bp, synthetic construct
  source 1..75: mol_type = other DNA
aaaccgggaagagacttccggcacgcgcgcctggatacggctgaagaaagatcaatacgtggcaaaccaaatata

SEQ ID NO: 170324 - DNA, 75 bp, synthetic construct
  source 1..75: mol_type = other DNA
gaaaacgcccatcgttacagcccgcaaggcagcaacattatgattaagctgcaagaagatggcggagcggtcatg

SEQ ID NO: 170325 - DNA, 75 bp, synthetic construct
  source 1..75: mol_type = other DNA
actcagggaagaactggaacttgcacgtaagtcagagtggttaaacgaagttcgttaccggcatggtgcagtacg

SEQ ID NO: 170326 - DNA, 75 bp, synthetic construct
  source 1..75: mol_type = other DNA
tcggtatcgttggtttagggtcaatggggatgggagcggcgctgtcgtgtgtccgcgcgggtctttctacctggg

SEQ ID NO: 170327 - DNA, 75 bp, synthetic construct
  source 1..75: mol_type = other DNA
aagcggccttaccgcctgccttgacgcattcgagaaaaagttaatcgaagatatgctacggcaaacagaaggcta

SEQ ID NO: 170328 - DNA, 75 bp, synthetic construct
  source 1..75: mol_type = other DNA
cgacctgaaaggcgagctgtgggctatgaccgctggctggcgcaaacagtttgcaaaaaatatctgtcttaaatt

SEQ ID NO: 170329 - DNA, 75 bp, synthetic construct
  source 1..75: mol_type = other DNA
tgccggtggtctggttctcacagcgctaaccagcatgatgaaagccaactcatccaaggccaatgaatacttaca

SEQ ID NO: 170330 - DNA, 75 bp, synthetic construct
  source 1..75: mol_type = other DNA
atcccatcagttgggtccagagtgatatggacggaaatacagccccgtttgactggaaagaatttaacgatcctc

SEQ ID NO: 170331 - DNA, 75 bp, synthetic construct
  source 1..75: mol_type = other DNA
gctgttaaacgcggggaaatttttggtttgctcgggccaaacggcgcggggaaatcgaccacgtttaagatgatg

SEQ ID NO: 170332 - DNA, 75 bp, synthetic construct
  source 1..75: mol_type = other DNA
ctcaatctgtacgcggatttgcgcagcgtcaccggtgaggagcggaagcagacatttgctcgcctgctggaattt

SEQ ID NO: 170333 - DNA, 75 bp, synthetic construct
  source 1..75: mol_type = other DNA
catggacaagcccgccgtcgcgccgctcgactgtaccattcacgccggttatgtgacggggttggtggggccgga

SEQ ID NO: 170334 - DNA, 75 bp, synthetic construct
  source 1..75: mol_type = other DNA
ttactggcctggttgcagtcacaaagttggcctggcaatgtacgtgaacttaaacacaatgcagagcgttttgtt

SEQ ID NO: 170335 - DNA, 75 bp, synthetic construct
  source 1..75: mol_type = other DNA
aattactggcgaatctgcaacaggaaaatggcccggtgctgattggtcgtagtccgcagatgcagcaactgcgta

SEQ ID NO: 170336 - DNA, 75 bp, synthetic construct
  source 1..75: mol_type = other DNA
tcagctcttgaatgcgatcctaaatggctacttcttgggggcgatgttgttacagatttcaactacggagcccga

SEQ ID NO: 170337 - DNA, 75 bp, synthetic construct
  source 1..75: mol_type = other DNA
aaaaagatgcaataaaaatacttcccagggttttacataggctcgatagtaaatacttgtacgctggtttattta

SEQ ID NO: 170338 - DNA, 75 bp, synthetic construct
  source 1..75: mol_type = other DNA
gacgatgatctggatgacctctgtcaggtgcagacacatatccggaccatcacccaccgggtgacggacaccacc

SEQ ID NO: 170339 - DNA, 75 bp, synthetic construct
  source 1..75: mol_type = other DNA
gggtgacggacaccaccctgaaggtggtggcagccgatccgaatacggtgtccggtatcaagtccgtggggacac

SEQ ID NO: 170340 - DNA, 75 bp, synthetic construct
  source 1..75: mol_type = other DNA
ccgatttatccggaccaggctgcacatgcactggcgatttttaaacaactgcgaattgtggatgcaccgggtagc

SEQ ID NO: 170341 - DNA, 75 bp, synthetic construct
  source 1..75: mol_type = other DNA
tgttccgcgatctgaaacgcgtggcgcaaacgctggatagcattaacggcggcgaagcgtaccagaaagtgtgtg

SEQ ID NO: 170342 - DNA, 75 bp, synthetic construct
  source 1..75: mol_type = other DNA
attaccttcaacgatctttacgagtacgtagcgggccttaaacaggcaatcaaaatgaaccgccccggaaatcct

SEQ ID NO: 170343 - DNA, 75 bp, synthetic construct
  source 1..75: mol_type = other DNA
agtgcttccagtcaaatgaaaattacgttggtgatgtgggttatagcctaacgcgaggcgctgttgtggtcggta

SEQ ID NO: 170344 - DNA, 75 bp, synthetic construct
  source 1..75: mol_type = other DNA
cttaactctaaagtcaggatggagtacgccgttggtactactaaaagtatgtcaatgctccataatctttgcgag

SEQ ID NO: 170345 - DNA, 75 bp, synthetic construct
  source 1..75: mol_type = other DNA
aggtatctggaaacttgggtactatgatggtgtttattatcacggtaaggcaagaaaggaggaaattgaaaatgc

SEQ ID NO: 170346 - DNA, 75 bp, synthetic construct
  source 1..75: mol_type = other DNA
atgggtaaattaactctggtagagcaggctttacggcttcacaaagaatattacggtgaagataattttggaact

SEQ ID NO: 170347 - DNA, 75 bp, synthetic construct
  source 1..75: mol_type = other DNA
actgtatacccagacaaacccgccaaatcagataatacctgttaaagaatcatcgctctgggccaggtatctgga

SEQ ID NO: 170348 - DNA, 75 bp, synthetic construct
  source 1..75: mol_type = other DNA
tggatgcaaatggattgcctattcctgttcctccaagcgttggcgctgcgggaagagttccgagagtattacaaa

SEQ ID NO: 170349 - DNA, 75 bp, synthetic construct
  source 1..75: mol_type = other DNA
cctgcacagatatataacggagaaagcagggaacgtcattgctgacaattatgccaatgcgcttcttgattatct

SEQ ID NO: 170350 - DNA, 75 bp, synthetic construct
  source 1..75: mol_type = other DNA
tgttcccgattagcctcggtctggcctcgtcttttaacctcgatgcagtgaaaacggtcggacgtgtctctgctt

SEQ ID NO: 170351 - DNA, 75 bp, synthetic construct
  source 1..75: mol_type = other DNA
acccattttcgatagtggtcgtcttaacgccaacctcgatatcgcaaaagccgaaagcaacttgtctatcgccag

SEQ ID NO: 170352 - DNA, 75 bp, synthetic construct
  source 1..75: mol_type = other DNA
ggcattggcggctccatcagcggttttaatttgcacagcttcctggtggcggtggtgggcgctatcctggtgctg

SEQ ID NO: 170353 - DNA, 75 bp, synthetic construct
  source 1..75: mol_type = other DNA
ccggtgaaacaactgaaaggctttgagaaaatcaccctgaaaccgggtgaaacccaaaccgtcagcttcccgatc

SEQ ID NO: 170354 - DNA, 75 bp, synthetic construct
  source 1..75: mol_type = other DNA
cctccagccgtaccgatatcactattccgcaaagccagcgtgatttgattgccgccctgaaagccaccggcaaac

SEQ ID NO: 170355 - DNA, 75 bp, synthetic construct
  source 1..75: mol_type = other DNA
tctgcctgggttgatcaaatccggcaaagtgacgatggaagagctggacgatgctgcccgccatgtactgaacgt

SEQ ID NO: 170356 - DNA, 75 bp, synthetic construct
  source 1..75: mol_type = other DNA
atggagtttggttcgtggaccacacgagaaatcctgatcgcttctttcgctggggtgcgcggggcgatcactctg

SEQ ID NO: 170357 - DNA, 75 bp, synthetic construct
  source 1..75: mol_type = other DNA
atctctgcggacctggcgttaacgatgtctcttttactttacgcaaaggcgaaattcttggcgtctctggtttga

SEQ ID NO: 170358 - DNA, 75 bp, synthetic construct
  source 1..75: mol_type = other DNA
tgaactttttaggtgatgtaatggaatatcaactggatttacaagagaatgctattgatagttttaatgaagctt

SEQ ID NO: 170359 - DNA, 75 bp, synthetic construct
  source 1..75: mol_type = other DNA
agcacattcgcgtgttgccggtgattattcgcgcgatcggtttcctgctctccaaagtcaatggcatgggcaaac

SEQ ID NO: 170360 - DNA, 75 bp, synthetic construct
  source 1..75: mol_type = other DNA
tgggtgttccttccagtgaagcactgcaagtgggcagtatcatggcgaccaaactggtttccaacgagttcgttg

SEQ ID NO: 170361 - DNA, 75 bp, synthetic construct
  source 1..75: mol_type = other DNA
acggcgcgagcagcgtgcagaagtgttgaaggcgcgtatggaacagcatcagcgccatcaggaaggcgtactggc

SEQ ID NO: 170362 - DNA, 75 bp, synthetic construct
  source 1..75: mol_type = other DNA
agtcgatgatgaccgccaccatcgtggacgacatgaccgacacgccgagcgataaaaaccgcgagtgcaaggcgc

SEQ ID NO: 170363 - DNA, 75 bp, synthetic construct
  source 1..75: mol_type = other DNA
actggctgggtaacgtccgtggtgacgtccttgccggtattgtggtcgcgctcgcgcttattcccgaagcgatcg

SEQ ID NO: 170364 - DNA, 75 bp, synthetic construct
  source 1..75: mol_type = other DNA
catggccgatcagggaccggtgcgccggcgcattgagttgtggtttcgacgcaacaaaatcagcaacccgatgat

SEQ ID NO: 170365 - DNA, 75 bp, synthetic construct
  source 1..75: mol_type = other DNA
gtcaccgcgctctttcaggcaggctgcagaggcagattttcagtcactgcacatactggcgctgacactgctgct

SEQ ID NO: 170366 - DNA, 75 bp, synthetic construct
  source 1..75: mol_type = other DNA
atcatggcttacagtatttactggccgcctccatactgaccggggtattccagctgatagccggatatctgaagc

SEQ ID NO: 170367 - DNA, 75 bp, synthetic construct
  source 1..75: mol_type = other DNA
tataccgtagccggccaggtattctttgcctcatccgatcgctttatgagccacttcgacttccgtgaagcggtg

SEQ ID NO: 170368 - DNA, 75 bp, synthetic construct
  source 1..75: mol_type = other DNA
ggcgtttgtgcgcagaaaaagcggctgcatgagccgctgattgaggcgttctggaagattttgccgaaccattaa

SEQ ID NO: 170369 - DNA, 75 bp, synthetic construct
  source 1..75: mol_type = other DNA
gtggatttacgcgacctgaaaatgtttctgcatctggcggaaagccgccattttggccgtagcgcgcgggcaatg

SEQ ID NO: 170370 - DNA, 75 bp, synthetic construct
  source 1..75: mol_type = other DNA
cgctcggctgtggcgtggcattgttgccggaagtggtgctggaaaacagcccagaaccggtgcgtaaccgcgtga

SEQ ID NO: 170371 - DNA, 75 bp, synthetic construct
  source 1..75: mol_type = other DNA
gaaaacagcccggaacccgtgcgcaaccgcgtgatgattctggagcgtagcgatgagaaaacgccgtttgagctg

SEQ ID NO: 170372 - DNA, 75 bp, synthetic construct
  source 1..75: mol_type = other DNA
aagcgggcgaagagctgcgtgttttcgcccaacaaacgttgttgcagtaccagcagttgcgccacaccatcgacc

SEQ ID NO: 170373 - DNA, 75 bp, synthetic construct
  source 1..75: mol_type = other DNA
tcctgcatctggcggaaagccgccattttgggcgcagcgcgcgggcaatgcacgttagcccgtctacgctttcgc

SEQ ID NO: 170374 - DNA, 75 bp, synthetic construct
  source 1..75: mol_type = other DNA
tcagcggcctgggcaccttcggcgcgattcaaagcaccttaaacgttacgctgtggtcatttatcggggtggaaa

SEQ ID NO: 170375 - DNA, 75 bp, synthetic construct
  source 1..75: mol_type = other DNA
tatcgccttcctttattgcatctgggcggtggttggttctggtgcacaagaagtcatgtggtcatttgtcactct

SEQ ID NO: 170376 - DNA, 75 bp, synthetic construct
  source 1..75: mol_type = other DNA
cttcccgattctgaaagatccattggtattaaccatcacctgcgtcgtggtgctgtggatcttcgtcctgctgaa

SEQ ID NO: 170377 - DNA, 75 bp, synthetic construct
  source 1..75: mol_type = other DNA
cttgatatagaaccagtcgcatcaggtgtggtacatactggcagcgcaccggtaattgtgaaatcaggccgaacc

SEQ ID NO: 170378 - DNA, 75 bp, synthetic construct
  source 1..75: mol_type = other DNA
aatagccaaagctcttggggcaaagtatcaggataagtatgtatttgtatatgctgataactattttagagaagt

SEQ ID NO: 170379 - DNA, 75 bp, synthetic construct
  source 1..75: mol_type = other DNA
tcagcggtctgggcaccttcggcgcgattcaaagcacccttaacgttaccctgtggtcatttattggggtagaaa

SEQ ID NO: 170380 - DNA, 75 bp, synthetic construct
  source 1..75: mol_type = other DNA
tgatatgcctgcgcaaaccgcgccgccgacaaccgcgaatcttaatgcatggctgaataatttctataacgccga

SEQ ID NO: 170381 - DNA, 75 bp, synthetic construct
  source 1..75: mol_type = other DNA
cttaccctggcgggaccaagtttctccttgtggccagccggacaaccgacgaccactgtaacaacgacgggtggt

SEQ ID NO: 170382 - DNA, 75 bp, synthetic construct
  source 1..75: mol_type = other DNA
cggccagttcggcggttttttgaaagaagttcgcgaaaatggcggcatgcagagcgaattgatggatcaaacaaa

SEQ ID NO: 170383 - DNA, 75 bp, synthetic construct
  source 1..75: mol_type = other DNA
tcagcggcctgggcaccttcggtgcaattcaaagtacccttaacgttacgctgtggtcgttcatcggtgtggaaa

SEQ ID NO: 170384 - DNA, 75 bp, synthetic construct
  source 1..75: mol_type = other DNA
tgacacatggctgcccggcccggaaagcataatgagtcagggatcgcaggtagcgggtttcagcaccgattattt

SEQ ID NO: 170385 - DNA, 75 bp, synthetic construct
  source 1..75: mol_type = other DNA
cgacgggtggtaacgcagcggcaaccgttgcggcgacgggtggcgcaccggtagtgggtgatatgcccgcacaaa

SEQ ID NO: 170386 - DNA, 75 bp, synthetic construct
  source 1..75: mol_type = other DNA
tctggatgtgcagatggtgccagtatcggtgatgttcggtcgcgcgcctgggcgggaaaaaggtgaagtgaaccc

SEQ ID NO: 170387 - DNA, 75 bp, synthetic construct
  source 1..75: mol_type = other DNA
atatcaacccggcgcattctcgcacgctacagctgctggccgcaggcgcgcgcgaaacgctgcaacgttatgcca

SEQ ID NO: 170388 - DNA, 75 bp, synthetic construct
  source 1..75: mol_type = other DNA
cgttctttattcgccgtacttttaaaggcaataaactttattccaccgttttccgtgagtatctcggcgaactgt

SEQ ID NO: 170389 - DNA, 75 bp, synthetic construct
  source 1..75: mol_type = other DNA
gccaaagccctggtatgtaaagtaaaaggtaatggcgtgaatcaacatgttctggcgattctcgctgccgatcag

SEQ ID NO: 170390 - DNA, 75 bp, synthetic construct
  source 1..75: mol_type = other DNA
ctactttttgagcgattcgatgagatcgccttcaatgcgggtatgctggataaatccgttatcctgaacaccgca

SEQ ID NO: 170391 - DNA, 75 bp, synthetic construct
  source 1..75: mol_type = other DNA
atgagttgcatatcaatccagcgcattcccgcacgcttcagttgctggctgccggcgcgcgcgaaacgttacaac

SEQ ID NO: 170392 - DNA, 75 bp, synthetic construct
  source 1..75: mol_type = other DNA
gtatatcagcgatagcggcgacgccgaaccggcagaaacgatgaaggtttatcagttgctggcggagttgattac

SEQ ID NO: 170393 - DNA, 75 bp, synthetic construct
  source 1..75: mol_type = other DNA
ggcacgctactgccgcgctatgtgttcattcacggcgggccgcgtgtgttcacctattacacgccgaaagaagag

SEQ ID NO: 170394 - DNA, 75 bp, synthetic construct
  source 1..75: mol_type = other DNA
ctcttggcgactgcctgaactacggcgttgctcatgcttcaggacattacattgccaagatggatgatgatgatt

SEQ ID NO: 170395 - DNA, 75 bp, synthetic construct
  source 1..75: mol_type = other DNA
atggcggatgaacacggcacggataaaactatcgctcagaaactggcgcgcgtggcgcgtatgcactttgcccgt

SEQ ID NO: 170396 - DNA, 75 bp, synthetic construct
  source 1..75: mol_type = other DNA
gtacgttttaccgtacaactcaaaagcggatttgctgacgttgcgcgcccagtgcctggcgcatgacctgcctga

SEQ ID NO: 170397 - DNA, 75 bp, synthetic construct
  source 1..75: mol_type = other DNA
cgaatatctcggtgaactgttcagccgtggttattccgttgagtactttgtggagggtgggcgttcgcgaacggg

SEQ ID NO: 170398 - DNA, 75 bp, synthetic construct
  source 1..75: mol_type = other DNA
acgcgagcaattatttataaattgtatacttgctgaaaaagtcatagtttcaagcgaaattaccattctcaattt

SEQ ID NO: 170399 - DNA, 75 bp, synthetic construct
  source 1..75: mol_type = other DNA
gatgatgaaaggtctatgttcaacatagggcatgaacatcgtgcaatttttgacagccgagtaaaagagatcaac

SEQ ID NO: 170400 - DNA, 75 bp, synthetic construct
  source 1..75: mol_type = other DNA
acgaatttctgaatatggtttcgttgaaaatcaagactttatgattatttcccaagttcgggaaaaaataggcag

SEQ ID NO: 170401 - DNA, 75 bp, synthetic construct
  source 1..75: mol_type = other DNA
gtacacctttatctcatttattgctctgtttaccgtctgcctgcatcccacattttatgtggtgataatatttgc

SEQ ID NO: 170402 - DNA, 75 bp, synthetic construct
  source 1..75: mol_type = other DNA
tgtcataaagaaaaccaccagctctacggaacatcgctgttcaattatcgatttagccagttataccttatatgg

SEQ ID NO: 170403 - DNA, 75 bp, synthetic construct
  source 1..75: mol_type = other DNA
cttttcttacatcatgtgaaagatcagcgtggtattgcagcgttcgttgccttgatgtgcgcagtgggcgctgtt

SEQ ID NO: 170404 - DNA, 75 bp, synthetic construct
  source 1..75: mol_type = other DNA
tcagggagccgtgtttatcgctgctacgaagctgagaacacgcaaggaacctttcattgatattccgctgattga

SEQ ID NO: 170405 - DNA, 75 bp, synthetic construct
  source 1..75: mol_type = other DNA
gtaaaacgtgcgactggtctcagtgatgacgttgatccgttcaacaccatgcagacagaaccggctaagacggaa

SEQ ID NO: 170406 - DNA, 75 bp, synthetic construct
  source 1..75: mol_type = other DNA
tatggaggaagcagctctgcttcctcaggttccggtgggagttcttcatcggccagcaatacaaggaacgaggag

SEQ ID NO: 170407 - DNA, 75 bp, synthetic construct
  source 1..75: mol_type = other DNA
atttaacagtagaagatacgctaaacggaaacggtaatgaacaaaatttcgcgcttgaatttaaaagcctgaagg

SEQ ID NO: 170408 - DNA, 75 bp, synthetic construct
  source 1..75: mol_type = other DNA
gtggtggcactgcccactttgaatatgtcgctggtggtgcaagcaacggcctggcgcatgttgcccaggacagcg

SEQ ID NO: 170409 - DNA, 75 bp, synthetic construct
  source 1..75: mol_type = other DNA
cagcttatcttatgtataagtctggtacattccggcatggtcagggagccgtatttatcatggcgacaaagctca

SEQ ID NO: 170410 - DNA, 75 bp, synthetic construct
  source 1..75: mol_type = other DNA
atgaaagagtttttatttttatttcactccacagtcggcgtcatacaaacccgcaaagcgttgcaggcagcgggc

SEQ ID NO: 170411 - DNA, 75 bp, synthetic construct
  source 1..75: mol_type = other DNA
cagtcgttaagatggaaaaaacggcggaaaaaggcggtcgcccggcgtccaacggtaagcgttttacctcgccgg

SEQ ID NO: 170412 - DNA, 75 bp, synthetic construct
  source 1..75: mol_type = other DNA
tttcgttaaccacagcaaacgcgtgttcccgattggccgcctggataaagattcccaggggctgattttcctcac

SEQ ID NO: 170413 - DNA, 75 bp, synthetic construct
  source 1..75: mol_type = other DNA
taaaacccactcttcgggtaaggtgctgtataacgcgcgcatcatcccttaccgtggttcctggctggacttcga

SEQ ID NO: 170414 - DNA, 75 bp, synthetic construct
  source 1..75: mol_type = other DNA
gccggaacgcctgcgtggtgaaaccgcatcttttgacatcgaagctaacggtaaagtgtacgtagaaaaaggccg

SEQ ID NO: 170415 - DNA, 75 bp, synthetic construct
  source 1..75: mol_type = other DNA
tgcgttagctatcgcgattacccattgtcacgtcagtcagaatgcgatgcagatgagcgaatcgcggctgaacct

SEQ ID NO: 170416 - DNA, 75 bp, synthetic construct
  source 1..75: mol_type = other DNA
atcagcagatgaaatatgacgccgagccaggcaagttcaacgtcttcatcggcaccgattccgcgcgcgttaaga

SEQ ID NO: 170417 - DNA, 75 bp, synthetic construct
  source 1..75: mol_type = other DNA
gatccgcgagatgatcaaaaacgggcaggttggggcgatttttaataccgtgactcgtcaggatatccgtgccat

SEQ ID NO: 170418 - DNA, 75 bp, synthetic construct
  source 1..75: mol_type = other DNA
atgaaatggctatgttcagtaggtatcgcggtgagtctggccctacaaccagcactggcggatgatttattcggc

SEQ ID NO: 170419 - DNA, 75 bp, synthetic construct
  source 1..75: mol_type = other DNA
gtgatgggcagctggtccgcagccggtgttgccgatcaatccgtgaccgtactgaccgggattaaaaatgccgtc

SEQ ID NO: 170420 - DNA, 75 bp, synthetic construct
  source 1..75: mol_type = other DNA
tgggtaagaccatggtggaagcgatgcagggtaaaagcccggcagatcgctactcggtgatgaccagcgtcaaac

SEQ ID NO: 170421 - DNA, 75 bp, synthetic construct
  source 1..75: mol_type = other DNA
ggcgaaaacggtaaagtgctgtacgccaaaggggcgaatgttaccaatgataaaggtatcgttgatttcctgaat

SEQ ID NO: 170422 - DNA, 75 bp, synthetic construct
  source 1..75: mol_type = other DNA
aaagaaatatgtatttgagaagattaagtttcaaagttgtaatcgcggtgaagatactaactttcttaaagaatg

SEQ ID NO: 170423 - DNA, 75 bp, synthetic construct
  source 1..75: mol_type = other DNA
caatactatccgtttttatctttcaggggactttcaaatatagagtcaccaaccgaatggttattacctgccgac

SEQ ID NO: 170424 - DNA, 75 bp, synthetic construct
  source 1..75: mol_type = other DNA
taagtgacggtgttatccgcattcatggcctggccgattgtatgcagggtgaaatgatctccctgccgggtaacc

SEQ ID NO: 170425 - DNA, 75 bp, synthetic construct
  source 1..75: mol_type = other DNA
tcatttcaggaggaagtttagtaattagaaaagaggtttttgaaaaaattaagtttgaatgcataaaccgtggtg

SEQ ID NO: 170426 - DNA, 75 bp, synthetic construct
  source 1..75: mol_type = other DNA
aatacaagttattcctgaatatcaacactgttcaggattcaccaactatgttctcccgtcgggttttcgaaattt

SEQ ID NO: 170427 - DNA, 75 bp, synthetic construct
  source 1..75: mol_type = other DNA
tttcgctatgaggcaaactttattccgttaaccaagcaaaattggaaatcagagatcgacgaatcacacccagta

SEQ ID NO: 170428 - DNA, 75 bp, synthetic construct
  source 1..75: mol_type = other DNA
attgatgttatgaaaaagctcatcgatatccgtaacggtaaaggtgaagtcgatgatatcgaccacctcggcaac

SEQ ID NO: 170429 - DNA, 75 bp, synthetic construct
  source 1..75: mol_type = other DNA
acatgcaacgtcaggccgttccgactctgcgcgctgataagccgctggttggtacgggtatggaacgtgctgttg

SEQ ID NO: 170430 - DNA, 75 bp, synthetic construct
  source 1..75: mol_type = other DNA
atccggtatcgtttacattggtgcggaagtgaccggtggcgacattctggttggtaaggttacgccgaaaggtga

SEQ ID NO: 170431 - DNA, 75 bp, synthetic construct
  source 1..75: mol_type = other DNA
cagacggtccgtccaccgatctcggtgaactggcgcttggtcagaacatgcgcgtagcgttcatgccgtggaatg

SEQ ID NO: 170432 - DNA, 75 bp, synthetic construct
  source 1..75: mol_type = other DNA
tcgaagaaggcaactacgttattgcccaggcgaactccaacctggatgaagaaggccgcttcgttgaagacctgg

SEQ ID NO: 170433 - DNA, 75 bp, synthetic construct
  source 1..75: mol_type = other DNA
cgcaggtaaagtggttgctaaagactacattgatgagtctaccggcgagctgatctgtgctgcgaacatggagct

SEQ ID NO: 170434 - DNA, 75 bp, synthetic construct
  source 1..75: mol_type = other DNA
agccgtcacgtttacggacacctgtgacgctaaaaaaataatcggccgggctgtgggaatgaaagtaaccggctc

SEQ ID NO: 170435 - DNA, 75 bp, synthetic construct
  source 1..75: mol_type = other DNA
agagacagaagatgctcgttgcaaccaaccatcgaaaactgtcacaccggacagcaatttgaaggacgcctgcat

SEQ ID NO: 170436 - DNA, 75 bp, synthetic construct
  source 1..75: mol_type = other DNA
cgcgatcatcatgccgctggcgacaatagttatcttgttctggctggactggcggatggcaatcgcgacgctggg

SEQ ID NO: 170437 - DNA, 75 bp, synthetic construct
  source 1..75: mol_type = other DNA
tcctgttgaatttttttcgggctgaggctgaaaagaatgtcgcggggacgcccagaaatgtgatttatgccatag

SEQ ID NO: 170438 - DNA, 75 bp, synthetic construct
  source 1..75: mol_type = other DNA
atgaactgtttcagcctaagagaaggggacggccgttttgaaatagcctgtgaatttgatgacctgcccgatttt

SEQ ID NO: 170439 - DNA, 75 bp, synthetic construct
  source 1..75: mol_type = other DNA
aaatagtgccagtcctcataggagggtgtggtagcgtcaaacactgggttacattgaatctggccaaagatctgg

SEQ ID NO: 170440 - DNA, 75 bp, synthetic construct
  source 1..75: mol_type = other DNA
ctgacaagacaacttaacggaggtaacacttttctgcaggcatacagcttatatctggagcagaggcaagctgcc

SEQ ID NO: 170441 - DNA, 75 bp, synthetic construct
  source 1..75: mol_type = other DNA
gaatatgatgaatggggcaaccagcttaatgaggagaacccgcatcatgtgtatcagccgtaccgtctgccaggg

SEQ ID NO: 170442 - DNA, 75 bp, synthetic construct
  source 1..75: mol_type = other DNA
gactttgggaccatcttggggcaagagaggctcatcatctcgcagacagcctgacaagacaacttaacggaggta

SEQ ID NO: 170443 - DNA, 75 bp, synthetic construct
  source 1..75: mol_type = other DNA
aatcgcgacgctggggggactggcgtttggatcggttattctcgtgctcgcccgccagcgttcggaaaatatggc

SEQ ID NO: 170444 - DNA, 75 bp, synthetic construct
  source 1..75: mol_type = other DNA
aagatatggctcagcgttatcataaggcacgcgagcaggttagcgcggcggtgattgagttcgtgcaggccatgc

SEQ ID NO: 170445 - DNA, 75 bp, synthetic construct
  source 1..75: mol_type = other DNA
agaaggttacaacactcgagtcggggaacgtgggctatttctctccggtggccagcggcagcgcattactatcgc

SEQ ID NO: 170446 - DNA, 75 bp, synthetic construct
  source 1..75: mol_type = other DNA
tgtcgtgccggaactggatatgtacgatcgcaactggccgattcgcacctacaatgaatcattgccgccagcgaa

SEQ ID NO: 170447 - DNA, 75 bp, synthetic construct
  source 1..75: mol_type = other DNA
ggtgaagccgtcagtcggctggatggtacgcagccatttacgcgctgcgcttggtatgaatcagcctcattgggg

SEQ ID NO: 170448 - DNA, 75 bp, synthetic construct
  source 1..75: mol_type = other DNA
aaacgcgggaacgggcattgtgggtaagcctgacggcaggcagtaagatcccggcgctgggccggctggtgattg

SEQ ID NO: 170449 - DNA, 75 bp, synthetic construct
  source 1..75: mol_type = other DNA
ttgcgcagccattcccccacgaaagaaaagaattttgttcatgttaaaaggaattcgagatggaattcttaaaag

SEQ ID NO: 170450 - DNA, 75 bp, synthetic construct
  source 1..75: mol_type = other DNA
cgttgaaaaacccgccaacccgccagctatgccaggtgacccgaccaaatctcttgccagtatggggatctacgt

SEQ ID NO: 170451 - DNA, 75 bp, synthetic construct
  source 1..75: mol_type = other DNA
ggaaagcaaaccttgatttggcttctgtcgtgccggaactggatatgtacgatcgcaactggccaattcgtacct

SEQ ID NO: 170452 - DNA, 75 bp, synthetic construct
  source 1..75: mol_type = other DNA
tccggcagactccgttgagcgccagacggcacaacagttgattaacgcttgtccggctggtcttttttcgctcac

SEQ ID NO: 170453 - DNA, 75 bp, synthetic construct
  source 1..75: mol_type = other DNA
ggtaaatctgaaaaaagagatggggcgtgtcactgaacggattgttgatgctattaacctggcgttcattcttaa

SEQ ID NO: 170454 - DNA, 75 bp, synthetic construct
  source 1..75: mol_type = other DNA
cagcgttaaatgccaggcgtgcggctatttaccagatgcgtgcacggcaagaagtcagtgatgaaacactggcaa

SEQ ID NO: 170455 - DNA, 75 bp, synthetic construct
  source 1..75: mol_type = other DNA
gatcaccggcgatctgccggtgatcaaacgcgggaacgggcattgtgggtaagcctgacggcaggcagtaagatc

SEQ ID NO: 170456 - DNA, 75 bp, synthetic construct
  source 1..75: mol_type = other DNA
cctgccgtttactgtgtgatgaaaaaaccctacaacagtggcgctatccgccttccggattcggcatcacctacc

SEQ ID NO: 170457 - DNA, 75 bp, synthetic construct
  source 1..75: mol_type = other DNA
gtgctgctgatgcgccacacattgttccggttgaccccgttgagcgccagacagcagaacggttgattaatgcct

SEQ ID NO: 170458 - DNA, 75 bp, synthetic construct
  source 1..75: mol_type = other DNA
gaccaaagaggcgttgcgctatcgcactgccctgaatgatggttttacccatctcgaggcctggccgctttgcac

SEQ ID NO: 170459 - DNA, 75 bp, synthetic construct
  source 1..75: mol_type = other DNA
gtgtactggaggagatgagcgtgggccgggaaaaactgtatctcaataccagactgctgcgggaattaaatcagt

SEQ ID NO: 170460 - DNA, 75 bp, synthetic construct
  source 1..75: mol_type = other DNA
ctgtggagagtacgtcccgatggactactgataagatatcgattgtgcgggcattaatggctgaaaccacagagt

SEQ ID NO: 170461 - DNA, 75 bp, synthetic construct
  source 1..75: mol_type = other DNA
cacgcgcaaaatttcactggcaatttctggagcaattcccggcagctcaggactgcgcttataaatttattgtct

SEQ ID NO: 170462 - DNA, 75 bp, synthetic construct
  source 1..75: mol_type = other DNA
atatacagtaccggataattgggtggggtacggaacatgggttgctaatactgattgtacggaaatcgtcggaat

SEQ ID NO: 170463 - DNA, 75 bp, synthetic construct
  source 1..75: mol_type = other DNA
atcgcaattatttttatcaaaaatgttttacaaatgatggtaaaaaattgattttcgctgctgagtttgatcgta

SEQ ID NO: 170464 - DNA, 75 bp, synthetic construct
  source 1..75: mol_type = other DNA
tattcggaaagagatgctcgatattccagaaatgcgcgacgccctccactttgttcttgagttaacggatatcta

SEQ ID NO: 170465 - DNA, 75 bp, synthetic construct
  source 1..75: mol_type = other DNA
aacgcggacggcgtaccacacaggaaaagatcgctattgttcagcagaactttgaaccgggaataactgtctccc

SEQ ID NO: 170466 - DNA, 75 bp, synthetic construct
  source 1..75: mol_type = other DNA
agccagctatttctctggcgcaagcaataccaggagggaagtcttactgatgtggccgcaggagagcaggtcgtt

SEQ ID NO: 170467 - DNA, 75 bp, synthetic construct
  source 1..75: mol_type = other DNA
ctttttgcacaaccatattgtcggatcgataaccttgtcgaacgtgggggggccaagcgccagacggcatcgaca

SEQ ID NO: 170468 - DNA, 75 bp, synthetic construct
  source 1..75: mol_type = other DNA
gtggcgttatttctttcgaccctaatattcggaaagagatgctcgatattccagaaatgcgtgacgccctccact

SEQ ID NO: 170469 - DNA, 75 bp, synthetic construct
  source 1..75: mol_type = other DNA
cggcccgatggaagggacttcccggttggcggagatcgaagcgtttatccagtgccatagcatgactattcggga

SEQ ID NO: 170470 - DNA, 75 bp, synthetic construct
  source 1..75: mol_type = other DNA
aatatcaatcaggaaagcggattactgattgagggtttcgatacaccgccatgcgcgatgatgccgcacggtaaa

SEQ ID NO: 170471 - DNA, 75 bp, synthetic construct
  source 1..75: mol_type = other DNA
aagagcttgcgatggttgaacgtaacgaaaaaggccgccagatacgccgctacttcatcgagtgcgaaaagaaac

SEQ ID NO: 170472 - DNA, 75 bp, synthetic construct
  source 1..75: mol_type = other DNA
gactatctacatggtgacgaagaacaaggaagcactactgcgggaggcggcacagcttgaccagtcaagtttcgt

SEQ ID NO: 170473 - DNA, 75 bp, synthetic construct
  source 1..75: mol_type = other DNA
gacttcgggaccgtcttggagcaagagggactcaccatctcgcagacagcctggcaagacaacttaacggaggta

SEQ ID NO: 170474 - DNA, 75 bp, synthetic construct
  source 1..75: mol_type = other DNA
acgcgtgccgttgattgttggtcgtaaccccaataacgaacattatctcgataccaaagccgagaaaatggggca

SEQ ID NO: 170475 - DNA, 75 bp, synthetic construct
  source 1..75: mol_type = other DNA
ctgagatagactctgcaccctgcgcgtttgttgtcggcttaccgaacatcaacgaggcgattgctgatctgaatg

SEQ ID NO: 170476 - DNA, 75 bp, synthetic construct
  source 1..75: mol_type = other DNA
cgctaacatcacgaacggcaccatcaccggtaatgcaaccggtaacggccccggcgtgaacatcagtggcaacag

SEQ ID NO: 170477 - DNA, 75 bp, synthetic construct
  source 1..75: mol_type = other DNA
aaaatgtacctccgcgcttacgaggcagattagccatctggttgttggaggtacgtgcaggggtatatgtaggtg

SEQ ID NO: 170478 - DNA, 75 bp, synthetic construct
  source 1..75: mol_type = other DNA
ctttgacgccgactatctgtatgaactgctggaagaagacgatcgcgatgagaactccagccacgactttggcaa

SEQ ID NO: 170479 - DNA, 75 bp, synthetic construct
  source 1..75: mol_type = other DNA
gaaaatcaagatgttgtgattgcttgccaaaattggcaagcaaaaggtagaggcggtcacaaccgcaaggactac

SEQ ID NO: 170480 - DNA, 75 bp, synthetic construct
  source 1..75: mol_type = other DNA
atcctcctttgctacatgcagctctggatggaaaaagcacaacaactcagtaaacagctataccccgtcatgaga

SEQ ID NO: 170481 - DNA, 75 bp, synthetic construct
  source 1..75: mol_type = other DNA
aatatccggcagtgtttctgcctttcctgtcatggccggttgattctgcagacagatgctcaggggcgtggtttg

SEQ ID NO: 170482 - DNA, 75 bp, synthetic construct
  source 1..75: mol_type = other DNA
cagcccgcgcattctcaaactgatgaagcgtccgggttctgtagatcgccaactggcgcgcatcaaacagtggcg

SEQ ID NO: 170483 - DNA, 75 bp, synthetic construct
  source 1..75: mol_type = other DNA
cagcatggtcagcctgtgcgaacagctatcaaaactggggatctggacgcgcctgcactacgtttacccttaccc

SEQ ID NO: 170484 - DNA, 75 bp, synthetic construct
  source 1..75: mol_type = other DNA
gggtaaaccggattatccaaaggcgatttcgctgttagaaaagcctcggaagatctggagaacgactctgccgtc

SEQ ID NO: 170485 - DNA, 75 bp, synthetic construct
  source 1..75: mol_type = other DNA
aagaaaattcggcataacaagcgttgaagaaattgatgaagaatgtaattctgaagaagaaattaatggagacgc

SEQ ID NO: 170486 - DNA, 75 bp, synthetic construct
  source 1..75: mol_type = other DNA
atggctaagattggatttatatcattaggctgtccaaaaaaccttgttgattcagagcgtattctcaccgaactc

SEQ ID NO: 170487 - DNA, 75 bp, synthetic construct
  source 1..75: mol_type = other DNA
cgttaagccgggtgatattgtgcgtgtgaaagtcgaacacgccgatgagtacgatttgtgggggagtcgggttta

SEQ ID NO: 170488 - DNA, 75 bp, synthetic construct
  source 1..75: mol_type = other DNA
ttaagtttgacttcgaaattaccctgctaaccgtcagcgcggtggatggcgtccatttctgtgcaccggtaggtc

SEQ ID NO: 170489 - DNA, 75 bp, synthetic construct
  source 1..75: mol_type = other DNA
gcgactgcagagagtgttgatgaggcgattgaacgcgcgaagcacgccgccggtcaggtgaaagtgcaaggttaa

SEQ ID NO: 170490 - DNA, 75 bp, synthetic construct
  source 1..75: mol_type = other DNA
ctcaggtatctgcgtggatcgccagcgacgatgtacaagtggtgttgattacgggtggtactggcctgacggaag

SEQ ID NO: 170491 - DNA, 75 bp, synthetic construct
  source 1..75: mol_type = other DNA
atttcactgttagaaaacgcctcggaagatttggagaacgactccgccgttgatgcccaaatgctgcttggctta

SEQ ID NO: 170492 - DNA, 75 bp, synthetic construct
  source 1..75: mol_type = other DNA
gtgaatattaccggccctgcagaatggcggcgtcaggccgctgcggcagcccgggagcagcgacgtgccctggca

SEQ ID NO: 170493 - DNA, 75 bp, synthetic construct
  source 1..75: mol_type = other DNA
gcccgtaaagtggtgctggcactgggcggttatgggctgtttggtgtcgagctgtttgtctgtggtgatgaggtg

SEQ ID NO: 170494 - DNA, 75 bp, synthetic construct
  source 1..75: mol_type = other DNA
agctgggcatccagccaacgggcaaacgcctgggcgcgatggacgtcgccgacgaaggccgggacaaaaacgcct

SEQ ID NO: 170495 - DNA, 75 bp, synthetic construct
  source 1..75: mol_type = other DNA
caggctgccgtcgacgcgcatatcaaactgggtattcagcccagcggccagcgcctcggcgcaatggatatagca

SEQ ID NO: 170496 - DNA, 75 bp, synthetic construct
  source 1..75: mol_type = other DNA
tattgcccgtattgaagcagttttaccgaaccaatccggctcagttcatcatcgactggggcatgacaacggacc

SEQ ID NO: 170497 - DNA, 75 bp, synthetic construct
  source 1..75: mol_type = other DNA
tccgacgcaacaaaatcagcaacccaatgatttacgccacggttggcgggcatgaagcgatggtatcgatggtgg

SEQ ID NO: 170498 - DNA, 75 bp, synthetic construct
  source 1..75: mol_type = other DNA
aacccgtgcagaaacccgggaactggctatatctcatgccagcgtattgttgctgcgcacactggcacaggcggc

SEQ ID NO: 170499 - DNA, 75 bp, synthetic construct
  source 1..75: mol_type = other DNA
tggcgaacccgttcgctcagaagcgccacggcggaaaaataccagtattcacgttccactggcgagatgacccgc

SEQ ID NO: 170500 - DNA, 75 bp, synthetic construct
  source 1..75: mol_type = other DNA
ttactgctgacgctactggacattccgtttgccgtatcgccggtggttgccggtctggtgtatctgctgttctac

SEQ ID NO: 170501 - DNA, 75 bp, synthetic construct
  source 1..75: mol_type = other DNA
aaactttaggaaaagatcttggagtttgtagtttaaacacaagggaaataaatagagctcccacatctggtgatg

SEQ ID NO: 170502 - DNA, 75 bp, synthetic construct
  source 1..75: mol_type = other DNA
tcgaatatagagaaagtgctcttggaaaaatatatccatttataatttcaggtgatgagataattattaaagaaa

SEQ ID NO: 170503 - DNA, 75 bp, synthetic construct
  source 1..75: mol_type = other DNA
tttgccggtcccgtgggctgggtgctcagttctctctggctactgatagatttagccggtcccgcataccgggtg

SEQ ID NO: 170504 - DNA, 75 bp, synthetic construct
  source 1..75: mol_type = other DNA
tttaaaaagtatgttgcagtggcgcctggagaatcaggaaaaacgcgcacagcaggagaaatgtaatgaacacat

SEQ ID NO: 170505 - DNA, 75 bp, synthetic construct
  source 1..75: mol_type = other DNA
tttaaagagtatgttgcagtggcgcctggagaatcaggaaaaacgcgcgcagcaggaggaacatcatgagcattg

SEQ ID NO: 170506 - DNA, 75 bp, synthetic construct
  source 1..75: mol_type = other DNA
ccagatgtgtggcattcacgccatgctgtccgacagcgccctgtttgaagaacctcttcagaaagccacctcacg

SEQ ID NO: 170507 - DNA, 75 bp, synthetic construct
  source 1..75: mol_type = other DNA
atagtctgttctacactaaagggggcactgatgttaaatcgacttccaccacatgatatctattcaggaaccgtt

SEQ ID NO: 170508 - DNA, 75 bp, synthetic construct
  source 1..75: mol_type = other DNA
ttggcaacaacggctggctcatttcgacccacgcgccgcagtacatgccgacatttgaactgaataaagccattg

SEQ ID NO: 170509 - DNA, 75 bp, synthetic construct
  source 1..75: mol_type = other DNA
gctaggttagtcactgaatctccagctatcaaaatattaaatgcttatgtaaataaatttggcgatgatgataag

SEQ ID NO: 170510 - DNA, 75 bp, synthetic construct
  source 1..75: mol_type = other DNA
ttactaaagagtttgggagtgatactgttttagagctaatttcagataggatggtaattaaaacaggtgaaaaat

SEQ ID NO: 170511 - DNA, 75 bp, synthetic construct
  source 1..75: mol_type = other DNA
tggtgccgttcgctataaataaaaatagtaaaattccaagtgtcagtcgcataagtgatattataaaggagcaag

SEQ ID NO: 170512 - DNA, 75 bp, synthetic construct
  source 1..75: mol_type = other DNA
gtctgagatcatccatgagttgaaagatgccgcagctcagttaatgtcgaagcattcagctttgcctttctatat

SEQ ID NO: 170513 - DNA, 75 bp, synthetic construct
  source 1..75: mol_type = other DNA
attggctttaataaagcagagtggtttattgattctattgatatagagtggtgctatcgtgcaagatatcttggc

SEQ ID NO: 170514 - DNA, 75 bp, synthetic construct
  source 1..75: mol_type = other DNA
atgaaaggaacaacgcaagatatgaaaaatacttcaaaaatagcacacaattaaatgaatcagtatatagtgtaa

SEQ ID NO: 170515 - DNA, 75 bp, synthetic construct
  source 1..75: mol_type = other DNA
agtcgcaagcgtgcctggtgccgaaggcgtgctgttgaccttcgatgattttctgtcgggaatcgaaaccttcgg

SEQ ID NO: 170516 - DNA, 75 bp, synthetic construct
  source 1..75: mol_type = other DNA
agaaagccgccgacagcggtgatgccgatgcctgcgcgctgttggcgcagatcaaaatcaccaatccggtcagtc

SEQ ID NO: 170517 - DNA, 75 bp, synthetic construct
  source 1..75: mol_type = other DNA
atgaaaatcgaagaattacgtgaaatttttagtgaagatggcctctatgctgtgcgcgttgagaatggagaagtt

SEQ ID NO: 170518 - DNA, 75 bp, synthetic construct
  source 1..75: mol_type = other DNA
tgcttactatgatggctggtttagctgaccttgaaaaagaccttatcagtgaacgtagaaaggctggtattgaac

SEQ ID NO: 170519 - DNA, 75 bp, synthetic construct
  source 1..75: mol_type = other DNA
tgagtacagatgaccagtctatcgctaaccaacaaatgcaaattgaagaggcagggtacaacattgctaaatggt

SEQ ID NO: 170520 - DNA, 75 bp, synthetic construct
  source 1..75: mol_type = other DNA
gacttatcaagcgctatgggtgaagcaatgttaggcattatgtcaacgttggcacagcttgaaagaagcttgata

SEQ ID NO: 170521 - DNA, 75 bp, synthetic construct
  source 1..75: mol_type = other DNA
gtgccgcaccgcctgggaaaatatcatcgccccgcagctggatgcccgtacgcgtccgtgcaatttccatccaca

SEQ ID NO: 170522 - DNA, 75 bp, synthetic construct
  source 1..75: mol_type = other DNA
ggttttggtgaagtgttccggatgttgtcgtttgaagagattggcacctcaacgttgcaatctcgtgcggtagcg

SEQ ID NO: 170523 - DNA, 75 bp, synthetic construct
  source 1..75: mol_type = other DNA
tgggaaaatatcatcgcgccgcagctggatgcccgtacgcgtccgtgtaatttccatccacatttgaagaaataa

SEQ ID NO: 170524 - DNA, 75 bp, synthetic construct
  source 1..75: mol_type = other DNA
ctaaggatttgcaggtactggtagaaatcgtccattgcggcagttttagtgccgccgctgctgcgcttgggcaga

SEQ ID NO: 170525 - DNA, 75 bp, synthetic construct
  source 1..75: mol_type = other DNA
atcttaaggtctatgattgatactggtattggcggaacaggcaaagcgtttgctgaagcgtaccgtaatctgctg

SEQ ID NO: 170526 - DNA, 75 bp, synthetic construct
  source 1..75: mol_type = other DNA
gacaagtcgctgaattcaccgaaacaacctgttgatatcgcaaccgatcttaacgcccggttctcggcttatatg

SEQ ID NO: 170527 - DNA, 75 bp, synthetic construct
  source 1..75: mol_type = other DNA
tgaccttgaaaaagaccttatcagtgaacgtagaaaggctggtattgaacgtgctaaagctgaaggggttcacat

SEQ ID NO: 170528 - DNA, 75 bp, synthetic construct
  source 1..75: mol_type = other DNA
taaccaacaaatgcaaattgaagaggcagggtacaacattgctaaatggttcactgatgaggctgtcagtggttc

SEQ ID NO: 170529 - DNA, 75 bp, synthetic construct
  source 1..75: mol_type = other DNA
atggagacaatcggttattgcagggtgagtacagatgaccagtctatcgctaaccaacaaatgcaaattgaagag

SEQ ID NO: 170530 - DNA, 75 bp, synthetic construct
  source 1..75: mol_type = other DNA
tttgtacctacatctgcggcacgtctgactaaacaggggaacataccccagcttaaaagtaatgttgaaaagggt

SEQ ID NO: 170531 - DNA, 75 bp, synthetic construct
  source 1..75: mol_type = other DNA
tcatcattacctgctggattatcctcaacgccatttgcgtcgcctgcggtctgcaaaaaggggtacgtatcgcca

SEQ ID NO: 170532 - DNA, 75 bp, synthetic construct
  source 1..75: mol_type = other DNA
ttatcattacctgctggatcatcctcaacgctatctgcgtggcctgtggtctgcaaaaaggggtaaaaatcgcca

SEQ ID NO: 170533 - DNA, 75 bp, synthetic construct
  source 1..75: mol_type = other DNA
cagacggcattggctttacgcttaccccggcaggaacattcccctactcattttttacgtttctccctggttgtt

SEQ ID NO: 170534 - DNA, 75 bp, synthetic construct
  source 1..75: mol_type = other DNA
cgagtcacggtgcaatggctgtaatatttgcgcccgcgcatgccgtaaaactaaccacgtccccgctcagggaag

SEQ ID NO: 170535 - DNA, 75 bp, synthetic construct
  source 1..75: mol_type = other DNA
cagtatcacttttttcgccagtcatgtcagcactgcgaagatgctccgtgcatcgacgtatgcccgacaggggcg

SEQ ID NO: 170536 - DNA, 75 bp, synthetic construct
  source 1..75: mol_type = other DNA
taacactctgctgttgatagataaaaacatcatcaacattccaaatctgatcgaacagtacggtgtggcgcgcgc

SEQ ID NO: 170537 - DNA, 75 bp, synthetic construct
  source 1..75: mol_type = other DNA
gttactctacagcgtacaactctcagtgacggttcaggctcgtgactatgcgctgattatcagtacaggtgtgct

SEQ ID NO: 170538 - DNA, 75 bp, synthetic construct
  source 1..75: mol_type = other DNA
aatcatagcgacgcgttactctacaacgtacaactctcagtgacggttcaggctcgtgactatgcgctgattatc

SEQ ID NO: 170539 - DNA, 75 bp, synthetic construct
  source 1..75: mol_type = other DNA
atgtttcgccgcctgcttatcgcaatggtcgtaggcattctggcggcctttgccgttgcagggtttcgtcatgcg

SEQ ID NO: 170540 - DNA, 75 bp, synthetic construct
  source 1..75: mol_type = other DNA
aactggcattgggaggtttgatcgtgggactgctttccctgctcacaccggctgtgtggggcaacggctatagta

SEQ ID NO: 170541 - DNA, 75 bp, synthetic construct
  source 1..75: mol_type = other DNA
ggcagtctggtcaatgcagcaacgaacctttctccgtggcgtcggctgctaacgccggcgctcggcggactggcg

SEQ ID NO: 170542 - DNA, 75 bp, synthetic construct
  source 1..75: mol_type = other DNA
gattcttttagctgcccttgccgcctcctgttttgcccaacgttttacgccacgccaggagtggaaattatggat

SEQ ID NO: 170543 - DNA, 75 bp, synthetic construct
  source 1..75: mol_type = other DNA
ggaggggggggatattattaaaggttgatgacaacaatgtttctcaaagtgagaaattggttgagaaacacttcc

SEQ ID NO: 170544 - DNA, 75 bp, synthetic construct
  source 1..75: mol_type = other DNA
tgatgacaacaacatttctcaaagtgagaaactggttgagaagcactttcaataccagtttaatcaaatcctgga

SEQ ID NO: 170545 - DNA, 75 bp, synthetic construct
  source 1..75: mol_type = other DNA
acgctggcgatggagatcatggattacccgttgatgaactccatcagcaaggcgctgggttacgcgcactatctt

SEQ ID NO: 170546 - DNA, 75 bp, synthetic construct
  source 1..75: mol_type = other DNA
tgagtacgctaaaggactagttgaggggctgttagatggtaatgttgagatccttcatcttgaggatgagttatc

SEQ ID NO: 170547 - DNA, 75 bp, synthetic construct
  source 1..75: mol_type = other DNA
agactatgagcacttaaatagctctgaatgtgttcatgagttaatggctattgaaatatcaaggttattacgacc

SEQ ID NO: 170548 - DNA, 75 bp, synthetic construct
  source 1..75: mol_type = other DNA
gttcagggcggaaaagaacagccttctatttatacagttaattctgttaataaactccggcaaatgccgttacgt

SEQ ID NO: 170549 - DNA, 75 bp, synthetic construct
  source 1..75: mol_type = other DNA
gatgtggaccgaaaaagccaaagagccggtgctggagattattcaggcgcggcgttggattgaagcgcgtatgca

SEQ ID NO: 170550 - DNA, 75 bp, synthetic construct
  source 1..75: mol_type = other DNA
atgaccagatggtcgacatggcgtttatcactcaactgaccggcttaaccgataagtggttttacaggctcatca

SEQ ID NO: 170551 - DNA, 75 bp, synthetic construct
  source 1..75: mol_type = other DNA
caggtggagtcatcgacggcggtgttgtacttgtttagcgagcgatttatgacctatggcaaggcgtatggctta

SEQ ID NO: 170552 - DNA, 75 bp, synthetic construct
  source 1..75: mol_type = other DNA
acgctggcgatggagatcatggattacccgttgatgaactccatcagtaaggcgctgggctatgcgcactatctc

SEQ ID NO: 170553 - DNA, 75 bp, synthetic construct
  source 1..75: mol_type = other DNA
gcgatggcggtagaaaaactgtctgaaggcattcgtctgttcgccgttgatcaacgcaaactggaagatcttctt

SEQ ID NO: 170554 - DNA, 75 bp, synthetic construct
  source 1..75: mol_type = other DNA
cagtccggcaataatcaccgtctggattatatcgccgatggttatcccgagcatgtcgccgaaaagaatatgatc

SEQ ID NO: 170555 - DNA, 75 bp, synthetic construct
  source 1..75: mol_type = other DNA
taaacacccataaaggcagtattttttctttagggctgatgtgtgcggcaattggtcgcttgcttcagctcaacc

SEQ ID NO: 170556 - DNA, 75 bp, synthetic construct
  source 1..75: mol_type = other DNA
ccgtccgggagctgtaccagttgtaggggaagcgattcttgggattgacggaatgatcgatatgctagagatcca

SEQ ID NO: 170557 - DNA, 75 bp, synthetic construct
  source 1..75: mol_type = other DNA
ttctcggtccattgggctacccccacgcccgtagataaattgtgtcttcacgacgaggcctattcgaaggcctca

SEQ ID NO: 170558 - DNA, 75 bp, synthetic construct
  source 1..75: mol_type = other DNA
gagcagggaaattctattgcgcagtttcgtctgggatatatattggagcaaggtttagcgggagcgaaagagccg

SEQ ID NO: 170559 - DNA, 75 bp, synthetic construct
  source 1..75: mol_type = other DNA
cgacgagttggggcagcttcatttagccgatatgtactatttcggtatcggtgttactcaggattacactcagtc

SEQ ID NO: 170560 - DNA, 75 bp, synthetic construct
  source 1..75: mol_type = other DNA
ggtctgaccgatcgcgaactgcgcaccaataatccacaactaacggcaggccaacggttatatcagcaacttggt

SEQ ID NO: 170561 - DNA, 75 bp, synthetic construct
  source 1..75: mol_type = other DNA
cctatatggctaatccagaattgacaacgtatggttccggaaaatacacaggattaatgatgaaacatgccggtg

SEQ ID NO: 170562 - DNA, 75 bp, synthetic construct
  source 1..75: mol_type = other DNA
aggcgatttaacccatgttgatgccgaaaaattggtggctttgcatccgcaagtcgtttttgtcaccaattatgc

SEQ ID NO: 170563 - DNA, 75 bp, synthetic construct
  source 1..75: mol_type = other DNA
taagcttggtacaatatatgctcctgatggaatttcaatgcatgtggatcgtcgtaatgatagtgtaaatattga

SEQ ID NO: 170564 - DNA, 75 bp, synthetic construct
  source 1..75: mol_type = other DNA
ctcttcctgttgaagaagttgataaaatgcattttgtttcagctattgtgaaacacactaggtacgtagaccagg

SEQ ID NO: 170565 - DNA, 75 bp, synthetic construct
  source 1..75: mol_type = other DNA
gtcttcgtgtgaaaggagacagcatgtggcccagaataaaatcaggagaatatgtactcattgagcctaacacca

SEQ ID NO: 170566 - DNA, 75 bp, synthetic construct
  source 1..75: mol_type = other DNA
aacataggggataaactagcaagaaaatttgaagccgcgcttgggttacctaatgggtggcttgatttggtacat

SEQ ID NO: 170567 - DNA, 75 bp, synthetic construct
  source 1..75: mol_type = other DNA
actttgaatggggggtgctcaatgggaagctttctgccctgcgatgggtcttgggtgatgagtgggacatgctcg

SEQ ID NO: 170568 - DNA, 75 bp, synthetic construct
  source 1..75: mol_type = other DNA
aaccaattaagctgggccgcagctcccgctggaagaaaagtgaagtcgaattatggttacagcaacggattgccg

SEQ ID NO: 170569 - DNA, 75 bp, synthetic construct
  source 1..75: mol_type = other DNA
ggtatcgggacgctgctatatctcttcatctgtaaagggaaaatccctgcttatctcggttccagctttgccttt

SEQ ID NO: 170570 - DNA, 75 bp, synthetic construct
  source 1..75: mol_type = other DNA
caagctggggcgaagctcccgatggcggaagagcgaggtggagttctggcttcaggaacgtgtcgaccagtcccg

SEQ ID NO: 170571 - DNA, 75 bp, synthetic construct
  source 1..75: mol_type = other DNA
ccctggccggataacctgattgttttccggccaaactgggtgttactcatcttgttgtattggatcctggccttg

SEQ ID NO: 170572 - DNA, 75 bp, synthetic construct
  source 1..75: mol_type = other DNA
agctgaccggcctgaccgataagtggttttacaagctcatcaaggatggggcctttccggctcccatcaaacttg

SEQ ID NO: 170573 - DNA, 75 bp, synthetic construct
  source 1..75: mol_type = other DNA
agtgaaattaaaacgcctatcaaacctccaaaacttggaatgtatgaagagaaatatagagactacagagataaa

SEQ ID NO: 170574 - DNA, 75 bp, synthetic construct
  source 1..75: mol_type = other DNA
caaactcggccggagctcccgctggctgaaaagtgaagtggaagcctggctacaggcgcgtattgcacagtcccg

SEQ ID NO: 170575 - DNA, 75 bp, synthetic construct
  source 1..75: mol_type = other DNA
gcaagattatgctcaggcggttatctggtacaaaaaagcggcactgaaggggcttccgcaagcgcagcagaatct

SEQ ID NO: 170576 - DNA, 75 bp, synthetic construct
  source 1..75: mol_type = other DNA
ggcgcaatcgttgccgtcatcggtctggagctggcgggcgtagctgctggtatggcgggtttactcccggctgaa

SEQ ID NO: 170577 - DNA, 75 bp, synthetic construct
  source 1..75: mol_type = other DNA
cattgggatatgaagtcgcgctgggcggctttattatgtgcggcgtgctgttctgcctggtctctttcatcgtga

SEQ ID NO: 170578 - DNA, 75 bp, synthetic construct
  source 1..75: mol_type = other DNA
tagggatgattggctatgtaccgaatgttgaacagtctacgcaagccctattaggtatgcagtttattatgattg

SEQ ID NO: 170579 - DNA, 75 bp, synthetic construct
  source 1..75: mol_type = other DNA
ccggcctgtattacaaccgccaccgctattatgacccgctgcaggggaggtatatcactcaggatccgattggac

SEQ ID NO: 170580 - DNA, 75 bp, synthetic construct
  source 1..75: mol_type = other DNA
gatggatgaacgatgaaaacactctgcgcacctacggtaaaaaacagatgcctataccgtattcagcaaaatgtt

SEQ ID NO: 170581 - DNA, 75 bp, synthetic construct
  source 1..75: mol_type = other DNA
aaaggtgaaatgttatctgatatttgtatttatgctacagcatgcggacatgcaggaattggtggtgggataaat

SEQ ID NO: 170582 - DNA, 75 bp, synthetic construct
  source 1..75: mol_type = other DNA
atttataccccgaaagtgatcttatccattctgtagctgatgagattaatatcccaggcgttttcacaatcgggg

SEQ ID NO: 170583 - DNA, 75 bp, synthetic construct
  source 1..75: mol_type = other DNA
ttatgacccgctgcaggggcggtatatcactcaggatccgattgggctgaaggggggatggaatttttatcagta

SEQ ID NO: 170584 - DNA, 75 bp, synthetic construct
  source 1..75: mol_type = other DNA
cgggactggtgtttcctgatggggagacattacaagttatacttacaaaatcaaatacaatacaacctgaaatct

SEQ ID NO: 170585 - DNA, 75 bp, synthetic construct
  source 1..75: mol_type = other DNA
cgatatgaaaaatcgtggatttatgctgtggccgctgtttgagattgcgccggaattaattttccctgatggaga

SEQ ID NO: 170586 - DNA, 75 bp, synthetic construct
  source 1..75: mol_type = other DNA
gcagcaatctggcctctccgctggagcaggtcaatgctgccctgaaagcattaggcgatatccctgaaagccgca

SEQ ID NO: 170587 - DNA, 75 bp, synthetic construct
  source 1..75: mol_type = other DNA
gggctggcgaaagatctcgacgaggcggctgaactggcggcttccggtgagatcactttctcgccgtgccacgag

SEQ ID NO: 170588 - DNA, 75 bp, synthetic construct
  source 1..75: mol_type = other DNA
acaccgccattgcccataaagatgcgggcgtcggcatgattggcgcgggcattgtgcatccacccttcgcctgct

SEQ ID NO: 170589 - DNA, 75 bp, synthetic construct
  source 1..75: mol_type = other DNA
cggagctgacgtttcctgatggggagacgttggcgacaagactcaccaatttaaacgccttatgcccacaacgct

SEQ ID NO: 170590 - DNA, 75 bp, synthetic construct
  source 1..75: mol_type = other DNA
tttcctgcgccggcagaaaataccagcctgacggtactcagcgcagcggataaggtcaaagctgcgctggcgaat

SEQ ID NO: 170591 - DNA, 75 bp, synthetic construct
  source 1..75: mol_type = other DNA
catggattgcctctctttattcagttgcccaggccagtggatttagtgcatatacaagtccaacagtgagtcgta

SEQ ID NO: 170592 - DNA, 75 bp, synthetic construct
  source 1..75: mol_type = other DNA
gccgaaggcgtgttcctgctgcccaaacagtctgctgacgatattcaggccggtgcggtggtttatctgaaggac

SEQ ID NO: 170593 - DNA, 75 bp, synthetic construct
  source 1..75: mol_type = other DNA
gccgctgcgagcgcgtactgccgatgccatcctccgtttgatgggcgggaaacgtcaggccaatgttcagcacga

SEQ ID NO: 170594 - DNA, 75 bp, synthetic construct
  source 1..75: mol_type = other DNA
caggcgcttgatgttgagcaccttgccgatgacgatgatatcgcgacggtcgcaggtctggtgatttctgcaaat

SEQ ID NO: 170595 - DNA, 75 bp, synthetic construct
  source 1..75: mol_type = other DNA
atgactgaagaacagaaattccagttagagatttacaaactggtcatgaaccagaacgcagccgcagaggaagca

SEQ ID NO: 170596 - DNA, 75 bp, synthetic construct
  source 1..75: mol_type = other DNA
tggacctatttattgggctgttattcaggatgtagtgcataaagataaagtaggtagcgtaggcggtgcgatgca

SEQ ID NO: 170597 - DNA, 75 bp, synthetic construct
  source 1..75: mol_type = other DNA
cgggctggcaaatatttccggcattattggtccattggtaaccggttttattgttcagttcagcggtaaatatga

SEQ ID NO: 170598 - DNA, 75 bp, synthetic construct
  source 1..75: mol_type = other DNA
ctgctggccgttgtgacttcgttgaaaccgataatagttgtgtggagaactgtttaaaagggaagtttaaagagg

SEQ ID NO: 170599 - DNA, 75 bp, synthetic construct
  source 1..75: mol_type = other DNA
gtaccaccattgaactggtgaatgccggagatcagaccattctgagcggtgccgcggtggtggtcggcagtatgg

SEQ ID NO: 170600 - DNA, 75 bp, synthetic construct
  source 1..75: mol_type = other DNA
ctgcacgatattgtggtgaaggtgaataccagtagccgacaaccgattgattctacgtgtcgttttcagtatgta

SEQ ID NO: 170601 - DNA, 75 bp, synthetic construct
  source 1..75: mol_type = other DNA
tggcatcacaatggtatttatcgcatcttctccctctgttcaggacaaaccggccagcactgacaataccaacgt

SEQ ID NO: 170602 - DNA, 75 bp, synthetic construct
  source 1..75: mol_type = other DNA
cccatcgccattgccgcctgtaccagccttgggcttaacccgaccgctgccgcgattgcggtggtgatttctggc

SEQ ID NO: 170603 - DNA, 75 bp, synthetic construct
  source 1..75: mol_type = other DNA
cgttattccgggtcttgcgggtgcgtttgttctgatgatcgatgtactggacttcaaagaagttcgcgatcatat

SEQ ID NO: 170604 - DNA, 75 bp, synthetic construct
  source 1..75: mol_type = other DNA
tcaccgaaacctacggtattggtggatttgctatggcgaccgcgcctgcaatcgtcgcgctggtgggcggcacgg

SEQ ID NO: 170605 - DNA, 75 bp, synthetic construct
  source 1..75: mol_type = other DNA
ctaaaggataagcacaccttcactttcaaagatggactttactggaaagaaggcgatgaaacagcctactgtccc

SEQ ID NO: 170606 - DNA, 75 bp, synthetic construct
  source 1..75: mol_type = other DNA
agctgtaggtattgcaaagaagctcgctgatgatggcggcgaacttgataaagcaacgcttaaacttgagcttgc

SEQ ID NO: 170607 - DNA, 75 bp, synthetic construct
  source 1..75: mol_type = other DNA
tatagtcaccgagtattcagtatgcccaaaacgcacacactaaaattaaaaaatacatcctcgttagaaactctc

SEQ ID NO: 170608 - DNA, 75 bp, synthetic construct
  source 1..75: mol_type = other DNA
ttagctacacgccttgagcattttaaccctaataaattcgtcaccatgtatttagttgatgcaatggacggtttc

SEQ ID NO: 170609 - DNA, 75 bp, synthetic construct
  source 1..75: mol_type = other DNA
tctatttgggaaaaagaaagaacaaactcagcttaatcaattacttgaaaatgttctcgaaaaatactccagttt

SEQ ID NO: 170610 - DNA, 75 bp, synthetic construct
  source 1..75: mol_type = other DNA
gcaataaaatagagttctcatcagtagagttcaatgaaaaagcggaggctacgcctggtgttcctttagtttcat

SEQ ID NO: 170611 - DNA, 75 bp, synthetic construct
  source 1..75: mol_type = other DNA
gggctggatattggcgacagcgccatcaccgaaacctacggtattggtggatttgctatggcgaccgcgcctgca

SEQ ID NO: 170612 - DNA, 75 bp, synthetic construct
  source 1..75: mol_type = other DNA
ctttctgctcatcgtcgtttcccgctgggtagcgaagatgacgcagtgcgggcgcaggggctggagattatgcgc

SEQ ID NO: 170613 - DNA, 75 bp, synthetic construct
  source 1..75: mol_type = other DNA
caactcgatggcgcagccacgctggtgctgacgttctccatccctctcgacccggatcaggatttctcacgcgtt

SEQ ID NO: 170614 - DNA, 75 bp, synthetic construct
  source 1..75: mol_type = other DNA
atgacagtggcgtatattgccataggcagcaatctggcctctccgctggagcaggtcaatgctgccctgaaagca

SEQ ID NO: 170615 - DNA, 75 bp, synthetic construct
  source 1..75: mol_type = other DNA
acattctgggcgctgctggcatttctgctactgagcgtgagttcgcgctggtcagtgagcaggtcgtgaagatca

SEQ ID NO: 170616 - DNA, 75 bp, synthetic construct
  source 1..75: mol_type = other DNA
aaaagctcttttgatttaacaaaagatgtttgtaattcttcagaatggggattggctgaactgaaaatgagacat

SEQ ID NO: 170617 - DNA, 75 bp, synthetic construct
  source 1..75: mol_type = other DNA
caccccaccgctggggccgcaagatcaacccgattacttaaacgcagccgtggcgctggaaacaacacttgcgcc

SEQ ID NO: 170618 - DNA, 75 bp, synthetic construct
  source 1..75: mol_type = other DNA
cggagttggtgtttcctgatggggagatgttgcaaaatagacttactatcctgaatacttcacaacctgtaatct

SEQ ID NO: 170619 - DNA, 75 bp, synthetic construct
  source 1..75: mol_type = other DNA
ttaggcgatatccctgaaagccacattcttgccgtttcttcgttttaccgcaccccaccgctggggccgcaagat

SEQ ID NO: 170620 - DNA, 75 bp, synthetic construct
  source 1..75: mol_type = other DNA
taaattagttggtttctcgcgagtagaacaacgaaactggtattgcagggtttgtgacaccacttatgagatagc

SEQ ID NO: 170621 - DNA, 75 bp, synthetic construct
  source 1..75: mol_type = other DNA
gtaaagatggaagttgtcacaactcaggttttacttttcgaagccgaacagaagaataaacagctcgaagaacag

SEQ ID NO: 170622 - DNA, 75 bp, synthetic construct
  source 1..75: mol_type = other DNA
aaacacacatggttttttcgcgtgccgttggtcaatactccgcgagttggtattgcattaattgcagaaacagca

SEQ ID NO: 170623 - DNA, 75 bp, synthetic construct
  source 1..75: mol_type = other DNA
gtaactgggtgactgccgttgaacgaaaacaagaagcgccaacctggacgccaactcccaacactcgccgcgaat

SEQ ID NO: 170624 - DNA, 75 bp, synthetic construct
  source 1..75: mol_type = other DNA
cgacactatacgtaaagggatagtcgttaatgttgctgagatgcgtctttattactatccgccagacagtaatac

SEQ ID NO: 170625 - DNA, 75 bp, synthetic construct
  source 1..75: mol_type = other DNA
atgatgcgtcgtgtaaatattttttgctcatttgctctgctttttgccagccataatagcctggcggtaacttat

SEQ ID NO: 170626 - DNA, 75 bp, synthetic construct
  source 1..75: mol_type = other DNA
accagaaggctgctgtgctgaagaataacaacgggaaagtcgtgttcaactccggattcctgttgctggccgccc

SEQ ID NO: 170627 - DNA, 75 bp, synthetic construct
  source 1..75: mol_type = other DNA
tccggattcctgttgctggccgcccactataacttcctgccacaggcatgccgtccacgcagggccagaacaaaa

SEQ ID NO: 170628 - DNA, 75 bp, synthetic construct
  source 1..75: mol_type = other DNA
taacaacgggaaagtcgtgttcaactccggattcctgttgctggccgaccactataacttcctgccacgggcatg

SEQ ID NO: 170629 - DNA, 75 bp, synthetic construct
  source 1..75: mol_type = other DNA
taatctcagaccatgacaagccgcagcctccaggctgcctactcggcttcgaaactcagcctggataccagctcc

SEQ ID NO: 170630 - DNA, 75 bp, synthetic construct
  source 1..75: mol_type = other DNA
ggttcgcgccttccgctacttcggtggttgtgtgaaaacggtgctggttaataaccagaaggctgcggtgctgaa

SEQ ID NO: 170631 - DNA, 75 bp, synthetic construct
  source 1..75: mol_type = other DNA
gagcaggaacatctgcagccgttaccggatacggactttgataccagttacttcgacatccgccatgtgtcctgg

SEQ ID NO: 170632 - DNA, 75 bp, synthetic construct
  source 1..75: mol_type = other DNA
aatacctcagggagaacttcttcgtccggtaccgcaggttcgacagcttcactcatgttaatcaacaactggagc

SEQ ID NO: 170633 - DNA, 75 bp, synthetic construct
  source 1..75: mol_type = other DNA
tggatgacgagttgcggatctacagtaatgagaaactggtggcctcacatcgcctctgttcagcatcgtctggct

SEQ ID NO: 170634 - DNA, 75 bp, synthetic construct
  source 1..75: mol_type = other DNA
ctggagcaggaacatctgcagccgttaccgtatacggacttcgataccagttacttcgacatccgccatgtgtcc

SEQ ID NO: 170635 - DNA, 75 bp, synthetic construct
  source 1..75: mol_type = other DNA
gtcttcgccgcaccaaaacaggatgctgagcatacctacgaatcactggttcgcgccttccgctacttcggtggt

SEQ ID NO: 170636 - DNA, 75 bp, synthetic construct
  source 1..75: mol_type = other DNA
gctggggttttcccgccgcttccatgtttttgccgcaccaaaacaggatgctgagcataccaatgaatcactggt

SEQ ID NO: 170637 - DNA, 75 bp, synthetic construct
  source 1..75: mol_type = other DNA
gggcttacattgtcgatattgccacccaaatcggctgttccgagcgcaccgtcagacggtatctgcgttatccgt

SEQ ID NO: 170638 - DNA, 75 bp, synthetic construct
  source 1..75: mol_type = other DNA
ataagggaagcagaagacacaaaaaacagcctgatgcaggtagccagtgagcatatttcgccacttcaggatgcg

SEQ ID NO: 170639 - DNA, 75 bp, synthetic construct
  source 1..75: mol_type = other DNA
atgggaccgcaggtgatccgcgctgatggcctgttggtgagcgacttgctccaggcgattatcccgttatttgag

SEQ ID NO: 170640 - DNA, 75 bp, synthetic construct
  source 1..75: mol_type = other DNA
gcatattgcaccacttcaggatgctatagatttagatattgcgacggaggaagagacatcgttactggctgcatg

SEQ ID NO: 170641 - DNA, 75 bp, synthetic construct
  source 1..75: mol_type = other DNA
atcgttactggctgcatggaagacatatcgggtattgttgaatcgtgttgatacaacagtagcagcggatgttga

SEQ ID NO: 170642 - DNA, 75 bp, synthetic construct
  source 1..75: mol_type = other DNA
aaaaaataattcaggatgtaaaagaaaagacacaactctggcaaacgtggctggctcttgggattattagtgatg

SEQ ID NO: 170643 - DNA, 75 bp, synthetic construct
  source 1..75: mol_type = other DNA
gcagtgttacggcacaacaccagtacgcaacttaatggcgaaaacagtacgctgcggattaatagcctggcgatg

SEQ ID NO: 170644 - DNA, 75 bp, synthetic construct
  source 1..75: mol_type = other DNA
cgcctttgctgccgaactgacggaagcactgcgtgatgaggggcttaaacagcaggtgctggcccgaatcggtca

SEQ ID NO: 170645 - DNA, 75 bp, synthetic construct
  source 1..75: mol_type = other DNA
gaaaacggtgctggttgataaccagaaggctgcggtgctgaagaataacaacgggaaagtcgtgttcaactccgg

SEQ ID NO: 170646 - DNA, 75 bp, synthetic construct
  source 1..75: mol_type = other DNA
atgcagccacggcgcgacggtggggcgtattgatgatgaacagatgttctatctgcgctcgcgcgggatcaatca

SEQ ID NO: 170647 - DNA, 75 bp, synthetic construct
  source 1..75: mol_type = other DNA
actgacggccagatgaccaataataatctgctgatgggcaagctggcggaagtggataccaaaccgcaactggaa

SEQ ID NO: 170648 - DNA, 75 bp, synthetic construct
  source 1..75: mol_type = other DNA
tgctggcagacgatgccaccgcatttagccacagtttcctgcttggcggcgccgtgttacggcacaacaccagta

SEQ ID NO: 170649 - DNA, 75 bp, synthetic construct
  source 1..75: mol_type = other DNA
ctacagtaatgagaaactggtggcctcacatcgcctctgttcggcatcgtctagctggcagacagtaccggagca

SEQ ID NO: 170650 - DNA, 75 bp, synthetic construct
  source 1..75: mol_type = other DNA
tagtgaagaaatcctggcaatgaagggagaaaacccgattcgttgtgaaaaggcattctactatctccatgagta

SEQ ID NO: 170651 - DNA, 75 bp, synthetic construct
  source 1..75: mol_type = other DNA
atatggaaaatatagttttcttgcgcgtaagggggatacgcttccgcgtatttcctggacggggtcgggtccggc

SEQ ID NO: 170652 - DNA, 75 bp, synthetic construct
  source 1..75: mol_type = other DNA
gtacttcacgatattgtggtgaatgtgaataccagtagtgggcaaccgattgattcgacgtgtcgttttcagtat

SEQ ID NO: 170653 - DNA, 75 bp, synthetic construct
  source 1..75: mol_type = other DNA
accggtcaaaagagaaacgtaaagcaggagtactgaccaaaaacacaacgccaatcagtgatgatgaaatggtgg

SEQ ID NO: 170654 - DNA, 75 bp, synthetic construct
  source 1..75: mol_type = other DNA
cgagcctgatgctgctcgtcctgaatgttgtcggcgcacccaagagctatgctggagataaacttttaagtgcga

SEQ ID NO: 170655 - DNA, 75 bp, synthetic construct
  source 1..75: mol_type = other DNA
tgataaagcaaatgcgccagcagggcgcgtacattgtcgatatcgcggctcagattggttgctctgaacggacgg

SEQ ID NO: 170656 - DNA, 75 bp, synthetic construct
  source 1..75: mol_type = other DNA
aaaacatttcgggcgggatcgagtatacacaactaaagcatgcgaattacggtgtggggaattagcgatggggtt

SEQ ID NO: 170657 - DNA, 75 bp, synthetic construct
  source 1..75: mol_type = other DNA
ctggagcgaagaccgcaggtaatgttggttcgttgaaatcggcaccgtccagccattacactctgcagctgagca

SEQ ID NO: 170658 - DNA, 75 bp, synthetic construct
  source 1..75: mol_type = other DNA
acgcagcaccaacaactgtaagtgctttataccagtaatcaattttcatatttttaagcggatttattggtggtt

SEQ ID NO: 170659 - DNA, 75 bp, synthetic construct
  source 1..75: mol_type = other DNA
atgtcctccgggttcagttgcgattttatttacgggaacgccggcaataccaacctgctggctctggatgatccc

SEQ ID NO: 170660 - DNA, 75 bp, synthetic construct
  source 1..75: mol_type = other DNA
acagtgatggggcgtcttggcatctcgttgaagatcatcgtggtaaaacggtttatgacgtggcttccggcgacg

SEQ ID NO: 170661 - DNA, 75 bp, synthetic construct
  source 1..75: mol_type = other DNA
gaaaaagtatcgggtattgctgaaccgtgttgatacatcaagtgcaccggatattgagtggcctgcttccccagt

SEQ ID NO: 170662 - DNA, 75 bp, synthetic construct
  source 1..75: mol_type = other DNA
atggtaaatcccttcatacttcaagctgcagatgcggtgaccgcactcgttcaccccggtcacatagttatctat

SEQ ID NO: 170663 - DNA, 75 bp, synthetic construct
  source 1..75: mol_type = other DNA
cacaaactatccgcgtatttaatttacttgatggaaccaatgaatttattggggaaagtgacgcatatatcccac

SEQ ID NO: 170664 - DNA, 75 bp, synthetic construct
  source 1..75: mol_type = other DNA
cgttatttatttctgaacttggtccattaccggaaaatgtcacctggttatccccggaaggggagtttcagaagt

SEQ ID NO: 170665 - DNA, 75 bp, synthetic construct
  source 1..75: mol_type = other DNA
gtatcgggtgttgctgaaccgtgttgatacatcaactgcacctgatattgagtggcctgtaatacctgaagttta

SEQ ID NO: 170666 - DNA, 75 bp, synthetic construct
  source 1..75: mol_type = other DNA
gatgactgaacagcaaatccggctggtctgccgtcagtgcatggaccgctgccgggcgggtgaaacgtggccccc

SEQ ID NO: 170667 - DNA, 75 bp, synthetic construct
  source 1..75: mol_type = other DNA
gccaatccattcggtctgacggtggatgctgtgatggaggagtaccgccgctggcgcaatgagtcctggcgatac

SEQ ID NO: 170668 - DNA, 75 bp, synthetic construct
  source 1..75: mol_type = other DNA
cgttgaagatcatcggggaaaaaccgtctatgacgtggcttccgccgacgcgttatttatttctgaacttggctc

SEQ ID NO: 170669 - DNA, 75 bp, synthetic construct
  source 1..75: mol_type = other DNA
cgtgttgatacatcaactgcaccggatattgaatggccagccctaccgtatggtaagatatataaattctataat

SEQ ID NO: 170670 - DNA, 75 bp, synthetic construct
  source 1..75: mol_type = other DNA
atgaatctaggaaatgagttccctaaaaagcagaatgtttataaaggcatgtggtatttaatcactaacaccaaa

SEQ ID NO: 170671 - DNA, 75 bp, synthetic construct
  source 1..75: mol_type = other DNA
ccgtttatcgatagcacacattccagtcaccgataacgacaatggaacgcagtatcacttttttcgccagtcatg

SEQ ID NO: 170672 - DNA, 75 bp, synthetic construct
  source 1..75: mol_type = other DNA
aggatgtctcgatgctatcttcctggaaaaaataccgggtattagtgagtcggattgatataaatacagccccgg

SEQ ID NO: 170673 - DNA, 75 bp, synthetic construct
  source 1..75: mol_type = other DNA
taattgatgagccggaagcttttttacatccatccttatgctcaaagttaggaaaggaaatatctaggattagtg

SEQ ID NO: 170674 - DNA, 75 bp, synthetic construct
  source 1..75: mol_type = other DNA
cctctccttgttatcgggttcagataaaaccgcctgctctgagttttttaaatccctttcagattatggggtttt

SEQ ID NO: 170675 - DNA, 75 bp, synthetic construct
  source 1..75: mol_type = other DNA
tgttgttttatctaggctaaacctccgtggtgaaggaatatctaggattctagtgtatttggatggaatgttaag

SEQ ID NO: 170676 - DNA, 75 bp, synthetic construct
  source 1..75: mol_type = other DNA
aatttgagaatgtttcgcatgacgaaaagctggcaggcaatgactgtgttgaagtgcatgaaaagattggtgtgg

SEQ ID NO: 170677 - DNA, 75 bp, synthetic construct
  source 1..75: mol_type = other DNA
gcacgcgaacagtgggaacgtgaaaacggatttatcagcaacggaaacggcctggaagctgtgggagcttatggg

SEQ ID NO: 170678 - DNA, 75 bp, synthetic construct
  source 1..75: mol_type = other DNA
atgactgaacagcaaatccggcaggtctgtcgtcagtgcatggaccgctgccgggcgggtgaaacgtggcccccg

SEQ ID NO: 170679 - DNA, 75 bp, synthetic construct
  source 1..75: mol_type = other DNA
gaaaaagtatcgggtgttgctgaaccgtgttgatacaacagtagcagcggatattgagtggccagtcgccccaca

SEQ ID NO: 170680 - DNA, 75 bp, synthetic construct
  source 1..75: mol_type = other DNA
ggtaagcgcttaataaaaaggtccgatgcccatcggacctttttattaaggtcaaattaccgcccatacgcacca

SEQ ID NO: 170681 - DNA, 75 bp, synthetic construct
  source 1..75: mol_type = other DNA
atggtattcagaatgagtgaacaatcacggaccataaaaatttataatctactggctggaaccaatgagtttatt

SEQ ID NO: 170682 - DNA, 75 bp, synthetic construct
  source 1..75: mol_type = other DNA
tctggagatcgcaacggaggaagaaacctcattgctggaagcctggaaaaaatatcgggtgttgctgaaccgtgt

SEQ ID NO: 170683 - DNA, 75 bp, synthetic construct
  source 1..75: mol_type = other DNA
aagtatcgggtgttgctgaaccgtgttgatacatcaactgcacctgatattgagtggccggaagaaccaagatca

SEQ ID NO: 170684 - DNA, 75 bp, synthetic construct
  source 1..75: mol_type = other DNA
gtctatgacgtggcttcagggaaggcgttatttatttctgaacccggtccgttaccggaaaatgttacctggttg

SEQ ID NO: 170685 - DNA, 75 bp, synthetic construct
  source 1..75: mol_type = other DNA
atacgggaagcggaagagaaaaaggcaaggttgatccaggaggcaacagataacatcgcaattctgcaggatgca

SEQ ID NO: 170686 - DNA, 75 bp, synthetic construct
  source 1..75: mol_type = other DNA
cacgtactgtaaaaatttataacctgctggccggaactaatgagtttattggtgaaggtgacgcatatattccac

SEQ ID NO: 170687 - DNA, 75 bp, synthetic construct
  source 1..75: mol_type = other DNA
agcctgatgcagatagccagtgagcatatagcgccgcttcaggatgctgtggatctggagatcgcaacggaggaa

SEQ ID NO: 170688 - DNA, 75 bp, synthetic construct
  source 1..75: mol_type = other DNA
tacatgacatcaaccatatcagcaaaagtgatacgggcattatttttgccgcgatttccctgttctctctgttat

SEQ ID NO: 170689 - DNA, 75 bp, synthetic construct
  source 1..75: mol_type = other DNA
gtatgttattggcgtttcctgcacctacgatgtttttgaccaacagtttgctaatttctttacttcgttctttgc

SEQ ID NO: 170690 - DNA, 75 bp, synthetic construct
  source 1..75: mol_type = other DNA
ccgtttttcccgatttggctacatgacatcaaccatatcagcaaaagtgatacgggtattatttttgccgctatt

SEQ ID NO: 170691 - DNA, 75 bp, synthetic construct
  source 1..75: mol_type = other DNA
tggaaaaagtatcgggtattgctgaaccgtgttgatacgtcaactgcacaggatattgaatggccagcactgccg

SEQ ID NO: 170692 - DNA, 75 bp, synthetic construct
  source 1..75: mol_type = other DNA
tcaggaaattacgaataaagttaaatcgcattcaaccggaaaacgcgccagatattgactggtcagactttgaat

SEQ ID NO: 170693 - DNA, 75 bp, synthetic construct
  source 1..75: mol_type = other DNA
ctgctatggattattaccggcatgttagtgatgtttgcgccattctttatttttatctttggcccgctgttacaa

SEQ ID NO: 170694 - DNA, 75 bp, synthetic construct
  source 1..75: mol_type = other DNA
cgtgctaaagaactgctggtggcgctggaagagggcgttgatgtggcggcgattgcttcggcgtctccggcgatt

SEQ ID NO: 170695 - DNA, 75 bp, synthetic construct
  source 1..75: mol_type = other DNA
ggtatctcacaagaccatgcagaagacatctggcgaagcctggagagaaatatctttcccggcttgggtaatgtt

SEQ ID NO: 170696 - DNA, 75 bp, synthetic construct
  source 1..75: mol_type = other DNA
agtccataacaacgataaagctaatgcattaaagaatgccacagaacacacattacaagccgtggcgagaaaatg

SEQ ID NO: 170697 - DNA, 75 bp, synthetic construct
  source 1..75: mol_type = other DNA
ccgacactgaaatcaaaagcaccaagccagcagacaaagaaatcaacttgtttgacggggatggtttgatcctac

SEQ ID NO: 170698 - DNA, 75 bp, synthetic construct
  source 1..75: mol_type = other DNA
agaattaccgaagctgatgcgttctttagtcatgtcaaatctgtctgttccgactcgctgtctaatcgaatggca

SEQ ID NO: 170699 - DNA, 75 bp, synthetic construct
  source 1..75: mol_type = other DNA
cagcattagcgcatagcgataaaaatgaagtccgtaaagcatataatcgttcgacttacctttatcaacgaattg

SEQ ID NO: 170700 - DNA, 75 bp, synthetic construct
  source 1..75: mol_type = other DNA
agctttgagagtcctggactcaatgaaagccataagtgggcatcgtgaatgggtgtttccaagcataaaggctcc

SEQ ID NO: 170701 - DNA, 75 bp, synthetic construct
  source 1..75: mol_type = other DNA
aaatagccgccatccgggcgagctggcatcatggcttgcggagaatcttcagtcatgaattcactacgtccggaa

SEQ ID NO: 170702 - DNA, 75 bp, synthetic construct
  source 1..75: mol_type = other DNA
caggcattggtcaatgtcggtgcacaaatagctgccatgacgccgggtgaactggcttcctggctggcggagaat

SEQ ID NO: 170703 - DNA, 75 bp, synthetic construct
  source 1..75: mol_type = other DNA
aggtatacgcaggcgtttagccgtacgttaccagtctgaaagccttgagccttttgatctattggctgagctggg

SEQ ID NO: 170704 - DNA, 75 bp, synthetic construct
  source 1..75: mol_type = other DNA
ctcacaaagttccactaagcaaagaagctttgcgagtcttggattcaatgaaagccatcagtgggcacagagagt

SEQ ID NO: 170705 - DNA, 75 bp, synthetic construct
  source 1..75: mol_type = other DNA
gctgattgaatggcaattgctgacctgggttcgtccaggggaagccgttcgtgcgagatgggccgatatagatac

SEQ ID NO: 170706 - DNA, 75 bp, synthetic construct
  source 1..75: mol_type = other DNA
cagagagcgattgagtcaattaagcaggctgattcggctgttaagttggcacacgagaagttttcagcgctggcg

SEQ ID NO: 170707 - DNA, 75 bp, synthetic construct
  source 1..75: mol_type = other DNA
ccgccgcatatcgtcgaaaaattatgtacggtggcccagcgcccggacacgcatggttactccacttcacgcggc

SEQ ID NO: 170708 - DNA, 75 bp, synthetic construct
  source 1..75: mol_type = other DNA
gacgctggatcatggtgacactgtactggtgcctaatccaagctacccgattcatatttacggcgcggtgattgc

SEQ ID NO: 170709 - DNA, 75 bp, synthetic construct
  source 1..75: mol_type = other DNA
tatgggtaaccctgacggcgcaactccgccgcatattgttgaaaagttatgcactgtagcacagcgcccggatac

SEQ ID NO: 170710 - DNA, 75 bp, synthetic construct
  source 1..75: mol_type = other DNA
gtcaggccatcagggggattaaagcgatgttccgcgccgatggcttactgccagccagcagcaaacatattcacg

SEQ ID NO: 170711 - DNA, 75 bp, synthetic construct
  source 1..75: mol_type = other DNA
cttaacgaagcgaaggtttgtgtctcgccggggattggctttggtgactatggtgatacgcatgttcgctttgca

SEQ ID NO: 170712 - DNA, 75 bp, synthetic construct
  source 1..75: mol_type = other DNA
tcccggaaccttacgctgccatgggctcgctggaatttgccaagaaattacttaacgaagcgaaggtttgtgtct

SEQ ID NO: 170713 - DNA, 75 bp, synthetic construct
  source 1..75: mol_type = other DNA
tctggcgctttgcgcaatacaccataaagcctttgataaaggatcgattggcctggatgaaaatatgcgggtact

SEQ ID NO: 170714 - DNA, 75 bp, synthetic construct
  source 1..75: mol_type = other DNA
tctggcaattacacaatgccgggctttgctcaacagcagggagcagccgacaaccaccagtgaaaggaactgact

SEQ ID NO: 170715 - DNA, 75 bp, synthetic construct
  source 1..75: mol_type = other DNA
ttctggcgattacaaggcgacggtttctggcaattacacaatgccgggctttgctcaacagcagggagcagccga

SEQ ID NO: 170716 - DNA, 75 bp, synthetic construct
  source 1..75: mol_type = other DNA
cgttgaaatcgacccggaatcagaagccatcgtcaccattggttcgaaagaagggctggcacacctgatgctggc

SEQ ID NO: 170717 - DNA, 75 bp, synthetic construct
  source 1..75: mol_type = other DNA
acatggctattccacttcacgtggcattccccggttgcgtcgcgccatttcccactggtatcaggatcgctacga

SEQ ID NO: 170718 - DNA, 75 bp, synthetic construct
  source 1..75: mol_type = other DNA
cctggcgctttgcgcaattcaccataaagcctttgataaaggatcgattggcctggtggatttgcccctatattt

SEQ ID NO: 170719 - DNA, 75 bp, synthetic construct
  source 1..75: mol_type = other DNA
ttaccgggttaatgccatcggtattaatccggtaacgggatatggcagcggactgatgcaggtagattcccagca

SEQ ID NO: 170720 - DNA, 75 bp, synthetic construct
  source 1..75: mol_type = other DNA
taccgggataaaaagcagtaaaggtatccggattccggtcacgaagaaatcactttcccaaattaacagtgtgca

SEQ ID NO: 170721 - DNA, 75 bp, synthetic construct
  source 1..75: mol_type = other DNA
catgactgcgtgggttcgatggcgggcgtcacctctgcctcgatgtttatgcacatcgtgaaaaacaaaacctac

SEQ ID NO: 170722 - DNA, 75 bp, synthetic construct
  source 1..75: mol_type = other DNA
gccggtgacctgtctggaaggtacgcgtaatcaacgcatcgccgcgactattcgtcataatcgcgctcgtggacg

SEQ ID NO: 170723 - DNA, 75 bp, synthetic construct
  source 1..75: mol_type = other DNA
tggtattaatccggtaacgggatatggcagcggattgatgcaggtagactcccagcattttaacgaactggcccg

SEQ ID NO: 170724 - DNA, 75 bp, synthetic construct
  source 1..75: mol_type = other DNA
tttaccggatttataccgggataaaaagcagtaaaggtatccggattccggtcacgaagaaatcactttcccaaa

SEQ ID NO: 170725 - DNA, 75 bp, synthetic construct
  source 1..75: mol_type = other DNA
gaatatcgagctaaagtcattgaatttgcgaatatgccgcaattccgagagctggacacaaaattcttcccgtac

SEQ ID NO: 170726 - DNA, 75 bp, synthetic construct
  source 1..75: mol_type = other DNA
agaaccaccaacctgttgagcctttttgtggagtgggttaaattatttacggataaagtcaccagaggtggaaaa

SEQ ID NO: 170727 - DNA, 75 bp, synthetic construct
  source 1..75: mol_type = other DNA
taccgggataaaaagcagtaaaggtgtccagcttccggccacgaagaaacctctgacgaaaattaacagcgtgca

SEQ ID NO: 170728 - DNA, 75 bp, synthetic construct
  source 1..75: mol_type = other DNA
ccggcccgacgtggatggcgatgtgtaaagcggcgatggatgcggcgcacggcattgaatacagcaccgtggtga

SEQ ID NO: 170729 - DNA, 75 bp, synthetic construct
  source 1..75: mol_type = other DNA
actacttctccggcccgacgtggatggcgatgtgtaaagcggcgatggatgcggcgcatggcatcgaatacagca

SEQ ID NO: 170730 - DNA, 75 bp, synthetic construct
  source 1..75: mol_type = other DNA
tacctggataaagagtagtaaaggcatccgggttccgaccacgaagaaatcactttcccaaattaacagtgtgca

SEQ ID NO: 170731 - DNA, 75 bp, synthetic construct
  source 1..75: mol_type = other DNA
gaatattcgtggctaccacagttactggctatttcggccccctcagttatcgaatcttactcaacaccaccggca

SEQ ID NO: 170732 - DNA, 75 bp, synthetic construct
  source 1..75: mol_type = other DNA
ggcatgggcgactggagattctttattagtgagccgggaattatttcaattgaggatttaccacctggctgggga

SEQ ID NO: 170733 - DNA, 75 bp, synthetic construct
  source 1..75: mol_type = other DNA
gcgttttcgtaaaaatccatctcttggcatgggcgactggcgattctttattagtgagccgggaattatttcaat

SEQ ID NO: 170734 - DNA, 75 bp, synthetic construct
  source 1..75: mol_type = other DNA
tttatattccgtgaagtatcacccgcttactgaatcagaaattgcggcaactttgcgtaataccacggagacatt

SEQ ID NO: 170735 - DNA, 75 bp, synthetic construct
  source 1..75: mol_type = other DNA
ggacgcgatctgttgcaactggcggtcgaaggtgacgggtatgatggggctgatctgcggcagggaacatttgcc

SEQ ID NO: 170736 - DNA, 75 bp, synthetic construct
  source 1..75: mol_type = other DNA
tgacggtagagttatcgtggctgacacatttcttgtctcttactgcgccgccggtgattgagtcctactccgtgc

SEQ ID NO: 170737 - DNA, 75 bp, synthetic construct
  source 1..75: mol_type = other DNA
cgagaaaaaactgttacaaaaatccattgagatagatggttttacccaacctattgtggtcacgcacacagataa

SEQ ID NO: 170738 - DNA, 75 bp, synthetic construct
  source 1..75: mol_type = other DNA
cgcctgaaacaaattaacggcctgcaagagttgtttgccgaccgtcaatattcccgtgcctggactgtcaaataa

SEQ ID NO: 170739 - DNA, 75 bp, synthetic construct
  source 1..75: mol_type = other DNA
cgcctgaagcaaattaacggcctgcaagagttgtttgccgaccgtcaattttcccgcgcctggacggttaaataa

SEQ ID NO: 170740 - DNA, 75 bp, synthetic construct
  source 1..75: mol_type = other DNA
atctgcattaaggcggatggagttgagagggcaccttaatgaaatatatgacggtgtaattgttaataagaaaga

SEQ ID NO: 170741 - DNA, 75 bp, synthetic construct
  source 1..75: mol_type = other DNA
ggaatgggcgactggcgattctttattagtgagccgggaattatttcagttgaggatttacctcccggctgggga

SEQ ID NO: 170742 - DNA, 75 bp, synthetic construct
  source 1..75: mol_type = other DNA
gctctaacacgttaaaaatgcgattaaaaggatatttaccggtcacctgtctggaaggaacacgtaacgaacgca

SEQ ID NO: 170743 - DNA, 75 bp, synthetic construct
  source 1..75: mol_type = other DNA
ttgtgatataaaagacactattaatatcactgaatacctgaatattcaaacaatcagaaaaattaaatctggttt

SEQ ID NO: 170744 - DNA, 75 bp, synthetic construct
  source 1..75: mol_type = other DNA
aacactttagagatgattatgagcgtgaaataaagacttacgttgttgaaagtcagaaaaatgccggtaaaagca

SEQ ID NO: 170745 - DNA, 75 bp, synthetic construct
  source 1..75: mol_type = other DNA
aaataaatagcgaaaatgaattcttatccattttcaagtcattcatgctcgaagaaacagaaagatttactaaat

SEQ ID NO: 170746 - DNA, 75 bp, synthetic construct
  source 1..75: mol_type = other DNA
aacacttccgggatgattacaagcgtgagctgagaacttacgttgttgaaagtcagaaaaacgctggcaaaaata

SEQ ID NO: 170747 - DNA, 75 bp, synthetic construct
  source 1..75: mol_type = other DNA
gatgtaggcttgcttgataatcagtttgacaccccattttctgccctcagtgcgataaaaccattcattatcatt

SEQ ID NO: 170748 - DNA, 75 bp, synthetic construct
  source 1..75: mol_type = other DNA
aacttttcaatgatgaaatcattgatgacaatgataatttcaaagattcagatgcctacagccgcttaaaatcca

SEQ ID NO: 170749 - DNA, 75 bp, synthetic construct
  source 1..75: mol_type = other DNA
agttctggtagtactgtgaaaaccgaagctattagtccatcagacgctacaactaactgcactaattctagtggc

SEQ ID NO: 170750 - DNA, 75 bp, synthetic construct
  source 1..75: mol_type = other DNA
ttccggataattataaagatacaaaaaacaataaaataaccaacccatttgggggggaattggaagtaggtccag

SEQ ID NO: 170751 - DNA, 75 bp, synthetic construct
  source 1..75: mol_type = other DNA
cggtgggagcagctaatgccgctaatacgagttttgggtattatcttaagcttgataagcttccaaaatcagcct

SEQ ID NO: 170752 - DNA, 75 bp, synthetic construct
  source 1..75: mol_type = other DNA
ttcgagcggtagcaccacatctaaacttcaagaggtagggcgtggtttacgtcttccagtgaatgaatacatgtg

SEQ ID NO: 170753 - DNA, 75 bp, synthetic construct
  source 1..75: mol_type = other DNA
aaaagaaactattaatatcactgaatacctgaacattcaaacaatcagaaagattaaatctggttttagcaagta

SEQ ID NO: 170754 - DNA, 75 bp, synthetic construct
  source 1..75: mol_type = other DNA
aacgaaatccttcatgacaaagagcttttattgtctttagaaaatcctcgccgtttcattttctctaaatggacg

SEQ ID NO: 170755 - DNA, 75 bp, synthetic construct
  source 1..75: mol_type = other DNA
cgacgattttcagcaaactactcaggagcacgtctggccgcggctgaataaagctgatctaatcgccaccgcgcg

SEQ ID NO: 170756 - DNA, 75 bp, synthetic construct
  source 1..75: mol_type = other DNA
tttgacgcctacaaagaagcctcaaatcatatccgcgaaattttctcgcgctatacctcgcgcattgaaccgtta

SEQ ID NO: 170757 - DNA, 75 bp, synthetic construct
  source 1..75: mol_type = other DNA
gtggtggttatgccagccggcatcacggcaatctgatcgccatgccgctgccgctgcccgagaagctctacgccc

SEQ ID NO: 170758 - DNA, 75 bp, synthetic construct
  source 1..75: mol_type = other DNA
atggaacgcagtaatttcttagtggctattatcatgctaattcttagatccctagcgattattcctgcctggttc

SEQ ID NO: 170759 - DNA, 75 bp, synthetic construct
  source 1..75: mol_type = other DNA
cttacctgagcatttgagaaaaaagcttccgcgatatcccactattccggctattcgtatgggacgactggcagt

SEQ ID NO: 170760 - DNA, 75 bp, synthetic construct
  source 1..75: mol_type = other DNA
cgatggcggaagatattcatcactggtctgaatgtgaagcgatcatcgagcggctttaccctgaactggagcgtc

SEQ ID NO: 170761 - DNA, 75 bp, synthetic construct
  source 1..75: mol_type = other DNA
caattgctggcagaaaaaagtccgacgctgcgcgccgatatcatcatgcagatgatactgctgcttgaagacgat

SEQ ID NO: 170762 - DNA, 75 bp, synthetic construct
  source 1..75: mol_type = other DNA
gaaagagtttctggtagtgtgacaagagagatggctgaacagttggtggcaatgagcaataaaacaaaaagaaaa

SEQ ID NO: 170763 - DNA, 75 bp, synthetic construct
  source 1..75: mol_type = other DNA
ttcaataaaaaatatatacacgttcttgttattaactcaggaatgatcaactctaagtctttaacggatacttac

SEQ ID NO: 170764 - DNA, 75 bp, synthetic construct
  source 1..75: mol_type = other DNA
gggcgcggtgtgcgactggtggggctgcatgtgacgttgcttgaccctcaaatggaaagacaactggtgctggga

SEQ ID NO: 170765 - DNA, 75 bp, synthetic construct
  source 1..75: mol_type = other DNA
ggaagcgatggggctgcggacctgcggtgatgtacaaaagtgtgatctggtgatgctgcttaaacgctttggcaa

SEQ ID NO: 170766 - DNA, 75 bp, synthetic construct
  source 1..75: mol_type = other DNA
gggcgcggtgtgcgtctggtggggctgcatgtgacgttgcttgacccgcaaatggaaagacaactggtgctggga

SEQ ID NO: 170767 - DNA, 75 bp, synthetic construct
  source 1..75: mol_type = other DNA
aggataacggacccgtacgttcagccgattttgctcatccccgcaaaggggcaagcggttggtgggagtggaagc

SEQ ID NO: 170768 - DNA, 75 bp, synthetic construct
  source 1..75: mol_type = other DNA
atgtctctgccgcacctctcccttgctgatgcgcgtaatcttcatctcgctgcacaaggcctgttaaacaaaccc

SEQ ID NO: 170769 - DNA, 75 bp, synthetic construct
  source 1..75: mol_type = other DNA
tgatggcggtttcactgaccactataccctgctgcagatgggggctgaccgtaagcacgaactgggaagtatgga

SEQ ID NO: 170770 - DNA, 75 bp, synthetic construct
  source 1..75: mol_type = other DNA
aacatcaccacctggcgaaccatatacagcctcaattgttgcttcgattaactcttttgatggtgccgttccttc

SEQ ID NO: 170771 - DNA, 75 bp, synthetic construct
  source 1..75: mol_type = other DNA
cgacgcgagtgacattagggcgctgcccacccgatctttttaccgattgccgcactggctgggaaatagccccct

SEQ ID NO: 170772 - DNA, 75 bp, synthetic construct
  source 1..75: mol_type = other DNA
attatccccataaatgtggagagattaggacaactctggctgcatgctgacttgttgcctcttctcgaaacagct

SEQ ID NO: 170773 - DNA, 75 bp, synthetic construct
  source 1..75: mol_type = other DNA
cgcgcttataactaccagtgcgcgatatgtggctttaatatgcgccacgatgacaccaccgtcgcgctggaagca

SEQ ID NO: 170774 - DNA, 75 bp, synthetic construct
  source 1..75: mol_type = other DNA
attttgacgggaaaactattgcgttgccgcaggtgcgtaaaaattacccttatgaggggtttgtggagtggcatc

SEQ ID NO: 170775 - DNA, 75 bp, synthetic construct
  source 1..75: mol_type = other DNA
aggcaattgccaacataaaaatctggcacaagggtgaacagcgcgcgccgcataaaccattgttactgctatacg

SEQ ID NO: 170776 - DNA, 75 bp, synthetic construct
  source 1..75: mol_type = other DNA
gagtcccgtctgttaggtatggccatgaattacctggcagaactgccactgaaagaccgtcctgtatttatcggc

SEQ ID NO: 170777 - DNA, 75 bp, synthetic construct
  source 1..75: mol_type = other DNA
aatgaaaaacgatatacgacgcttcctggctgaataccaccatgttccatcgaaatataacggctggcgacttgt

SEQ ID NO: 170778 - DNA, 75 bp, synthetic construct
  source 1..75: mol_type = other DNA
tcctgcctggcagcgcattgccgccgcagatgataacggcagagtggcatggatgtatacgcacaaaaaagcagg

SEQ ID NO: 170779 - DNA, 75 bp, synthetic construct
  source 1..75: mol_type = other DNA
ctataagatcacaaccttaagccgaaaggcagggataaataaaaagaaacttttgatactgattcttgatcagtt

SEQ ID NO: 170780 - DNA, 75 bp, synthetic construct
  source 1..75: mol_type = other DNA
atatatccataaaatccgccctcaagcctcccatagttttctgttcacttccacccaaagactacatccgccact

SEQ ID NO: 170781 - DNA, 75 bp, synthetic construct
  source 1..75: mol_type = other DNA
atcgtgataaacttcaaaaaattaaggccaactcacacttggcagccatagacttttctatcgttggattgatgg

SEQ ID NO: 170782 - DNA, 75 bp, synthetic construct
  source 1..75: mol_type = other DNA
taaaaagaaaaaaaccgctattactccatcagaagccgcaggtagtgatggctgtgctgatggcaatgaaaacaa

SEQ ID NO: 170783 - DNA, 75 bp, synthetic construct
  source 1..75: mol_type = other DNA
ttagccttgcaactttaaatttaggtacatcagctgccggatatggtattggccttgacaacgttggtaatacaa

SEQ ID NO: 170784 - DNA, 75 bp, synthetic construct
  source 1..75: mol_type = other DNA
cacgaactatggataccggcctgtacgagcttcctgaacgggattgaaacatcactcatggttacgttggcactg

SEQ ID NO: 170785 - DNA, 75 bp, synthetic construct
  source 1..75: mol_type = other DNA
atcgttcggattttcgacccagcaagcaaaagcattcaaacaaacattttaatagccttacagcagacatggtca

SEQ ID NO: 170786 - DNA, 75 bp, synthetic construct
  source 1..75: mol_type = other DNA
tgtacatgcagtctgccgttttatcaactatctgatcaatacttacgtttctcctcgttatatggatggtacccc

SEQ ID NO: 170787 - DNA, 75 bp, synthetic construct
  source 1..75: mol_type = other DNA
gactggtccggcagttatgaaaccgcgcactatatgctgggcaccgcagctggcccgcatccttatccgaccatt

SEQ ID NO: 170788 - DNA, 75 bp, synthetic construct
  source 1..75: mol_type = other DNA
tgttggaactcgataagcaggattatatttttttaagcatttatataggaaagcttcggcccaaaactgataaac

SEQ ID NO: 170789 - DNA, 75 bp, synthetic construct
  source 1..75: mol_type = other DNA
ccaatatccagagtacaaatcaccaatgtactctgactcgttgcaacgattgactccgcatacaacccgacatac

SEQ ID NO: 170790 - DNA, 75 bp, synthetic construct
  source 1..75: mol_type = other DNA
gcaaaagcattcaaacaaacattttaatagccttacagcagacatggtcaggaaattttatgagattattagacc

SEQ ID NO: 170791 - DNA, 75 bp, synthetic construct
  source 1..75: mol_type = other DNA
tcaggcaggttgccccgccaacgtcatgattatgggcgctgaggtatggcgaacgttacgcagctttaaaaaatt

SEQ ID NO: 170792 - DNA, 75 bp, synthetic construct
  source 1..75: mol_type = other DNA
aacctggatattgaagaagtcactatgtcggcgttttgttcgcctatggttggtagccaggttcagcgcgataaa

SEQ ID NO: 170793 - DNA, 75 bp, synthetic construct
  source 1..75: mol_type = other DNA
atgacaggcaaagcaacagcacttaccactaatcagcttttcacgtacctgaatcgcggggatattgcggaattt

SEQ ID NO: 170794 - DNA, 75 bp, synthetic construct
  source 1..75: mol_type = other DNA
atgcagaagggttatacgctgaatggtcgtacgattcgtgcggcgatggtaactgtagcgaaagcaaaagcgtaa

SEQ ID NO: 170795 - DNA, 75 bp, synthetic construct
  source 1..75: mol_type = other DNA
ttcacctctctgcaggctgatctggaaaacggcgtaaacctggaacagactatccgtctgcgcgaagaaatcgct

SEQ ID NO: 170796 - DNA, 75 bp, synthetic construct
  source 1..75: mol_type = other DNA
aagatgtactgagtgaacagcttatcggcctggcgaaggcgcatcctgaactgacgctgcaccaggacccggtct

SEQ ID NO: 170797 - DNA, 75 bp, synthetic construct
  source 1..75: mol_type = other DNA
gacagccgcagcacttcaccagttgcccaaatatatgtcagtcacaccaggttcagtgactgacggaaagtatgg

SEQ ID NO: 170798 - DNA, 75 bp, synthetic construct
  source 1..75: mol_type = other DNA
ggcaccagtggccgtcgggcaattccccgcgcctaccccaaaaaagaagtgggctggaccgaagataacggtgcc

SEQ ID NO: 170799 - DNA, 75 bp, synthetic construct
  source 1..75: mol_type = other DNA
attgagggcgaaggcatagaacgctatgaaatcgactggaagataccggaaaaaaacatcatagagcaggccgac

SEQ ID NO: 170800 - DNA, 75 bp, synthetic construct
  source 1..75: mol_type = other DNA
acgaaatcgactggaaaatcccgactaaaaacatcattacgcagggatcgggcaaaaagtggtctgaggcagata

SEQ ID NO: 170801 - DNA, 75 bp, synthetic construct
  source 1..75: mol_type = other DNA
ggcgttataccgacgaggacggaactgaaaaacatttccttgatcctgatttgatggtgcttggtgtagtggtca

SEQ ID NO: 170802 - DNA, 75 bp, synthetic construct
  source 1..75: mol_type = other DNA
gaaaaatatcattgagggcgatggtattgaacgttatgagctggactggaatataaaaccacaaaatatcatcac

SEQ ID NO: 170803 - DNA, 75 bp, synthetic construct
  source 1..75: mol_type = other DNA
gaacggctccagcgtggtgaacgctccggtggattaggttgctcaaatctcaccacccctgagtggatcaacagt

SEQ ID NO: 170804 - DNA, 75 bp, synthetic construct
  source 1..75: mol_type = other DNA
tcgatggttgactcggtgatccactctgcggtgatggcggcctgtttatggcagttacccggcattcgtacccat

SEQ ID NO: 170805 - DNA, 75 bp, synthetic construct
  source 1..75: mol_type = other DNA
ggggacggggcacctgcctggctggagcgcggaggtgtgtatatcgtggccaatattcgtgggggcggtgaatat

SEQ ID NO: 170806 - DNA, 75 bp, synthetic construct
  source 1..75: mol_type = other DNA
tcggcccgcaacatgcgtatctcaacagcactggacgcgctgattacgtgtctattaccgacgatgaagccctgg

SEQ ID NO: 170807 - DNA, 75 bp, synthetic construct
  source 1..75: mol_type = other DNA
ataatggtgctgaatttatatatcaacaaatatccagtatactttatcaattaaatgctggggatgaaataatta

SEQ ID NO: 170808 - DNA, 75 bp, synthetic construct
  source 1..75: mol_type = other DNA
tccggtagagttattaatgaaagtacaactgggcggcgggaccaatatcgccagtgccgtggaatatggtcggca

SEQ ID NO: 170809 - DNA, 75 bp, synthetic construct
  source 1..75: mol_type = other DNA
tcgtaggtgcagcggcggagcgtggcgactcactggacgcctgtgcggaactggggcgtaagttgaataatcaag

SEQ ID NO: 170810 - DNA, 75 bp, synthetic construct
  source 1..75: mol_type = other DNA
accacacgttgccagcaagcaggcttgactatcgagcgcaatttgatcggcgcatattgtagttcactggacatg

SEQ ID NO: 170811 - DNA, 75 bp, synthetic construct
  source 1..75: mol_type = other DNA
aggtaacgtactgggcattatgcagaaaggttatacgctgaacggtcgtacgattcgtgcggcgatggttactgt

SEQ ID NO: 170812 - DNA, 75 bp, synthetic construct
  source 1..75: mol_type = other DNA
atcagaacattttctccgtaccataatattaaagcggaagtaaactatccaccggtgttgttttatacagccacc

SEQ ID NO: 170813 - DNA, 75 bp, synthetic construct
  source 1..75: mol_type = other DNA
gcaccgttcttttgaggattttgctgccgtggcaaaagatctgattgcacgaaaggtaacttcttcgcatcatct

SEQ ID NO: 170814 - DNA, 75 bp, synthetic construct
  source 1..75: mol_type = other DNA
aatcagtgggttaaccagttaaaggaacggcgcggatttaataaaacgaccgtggcggtcgctaacaaaaatgcg

SEQ ID NO: 170815 - DNA, 75 bp, synthetic construct
  source 1..75: mol_type = other DNA
attattcattttaaaaatatcaatgaagatgcagtactttctattttgaaagggaatgtcagtgactcaggtgaa

SEQ ID NO: 170816 - DNA, 75 bp, synthetic construct
  source 1..75: mol_type = other DNA
agaggtaacgcagaggcagatcagcgtcgtagagaaatgcgccaacgacaagggacgcaggcggcaaccatggcg

SEQ ID NO: 170817 - DNA, 75 bp, synthetic construct
  source 1..75: mol_type = other DNA
agcgtgaggcatatgggtatcaggttcagggaatgaatgctcaggcacagggggctgctgctcagtcggctgcta

SEQ ID NO: 170818 - DNA, 75 bp, synthetic construct
  source 1..75: mol_type = other DNA
ctgggccactggtcagcccctaacccgctcgccggtctgccaacattcaaaatcgcagagggtgaactggcattc

SEQ ID NO: 170819 - DNA, 75 bp, synthetic construct
  source 1..75: mol_type = other DNA
atgaaattcaaacgattgctgcatactggcatcgccagtttgagtctggttgcctgcggggtaagcgcggcgacg

SEQ ID NO: 170820 - DNA, 75 bp, synthetic construct
  source 1..75: mol_type = other DNA
aatatacggtggcaatcttatctggcaggcatgaccgccttagaagcgaagacgtatggtatttctgatgatgtt

SEQ ID NO: 170821 - DNA, 75 bp, synthetic construct
  source 1..75: mol_type = other DNA
cgggtgagtgaggaaagccgccgctggctggcatcgtgcggcctgacggtggagcagatgcaaaaccagatggac

SEQ ID NO: 170822 - DNA, 75 bp, synthetic construct
  source 1..75: mol_type = other DNA
aggacctgacacgctatggacgtggtgggggcgaggaactaatggtaagttaaaaaatggatacagtgctaacag

SEQ ID NO: 170823 - DNA, 75 bp, synthetic construct
  source 1..75: mol_type = other DNA
tcaggcggcgctaattcggatatcacgatccgcacattcgaagcggtgcgtaaatctaaggaagcgttagacctg

SEQ ID NO: 170824 - DNA, 75 bp, synthetic construct
  source 1..75: mol_type = other DNA
atatcattagtaaatttgaatagcattaatgcaaatgcaaaatcaattgatcttattgatgagacaaaaagactt

SEQ ID NO: 170825 - DNA, 75 bp, synthetic construct
  source 1..75: mol_type = other DNA
ataacgagcggcgtataaaattatcgctgggtgccgtcagccccaaaatgtaccgccaacaatgcgggctggaat

SEQ ID NO: 170826 - DNA, 75 bp, synthetic construct
  source 1..75: mol_type = other DNA
ggctatcaccggtggtggactgcttcgatggaaaagttgtgagctggtctctcagtacacgccccgatgctgaac

SEQ ID NO: 170827 - DNA, 75 bp, synthetic construct
  source 1..75: mol_type = other DNA
tacccgtgatttctttgagctggaaggcattgccattccgcacggcacatcggcgtatatggggccgattgcggt

SEQ ID NO: 170828 - DNA, 75 bp, synthetic construct
  source 1..75: mol_type = other DNA
cttaccggtattttcatgacctggcgtagagcgcgtggctttattaaacaagagaaagccgttctcgcagaataa

SEQ ID NO: 170829 - DNA, 75 bp, synthetic construct
  source 1..75: mol_type = other DNA
gtggaaatctgttccgcaccttaatctcgggtgtcatcattatgagcatcaccctgtggatcgcgacgcaaacta

SEQ ID NO: 170830 - DNA, 75 bp, synthetic construct
  source 1..75: mol_type = other DNA
acgtaacgttatcgtcacaggtcaaaaatcatattctcaatctgatttccgaacagaagctaacgccgggaatgc

SEQ ID NO: 170831 - DNA, 75 bp, synthetic construct
  source 1..75: mol_type = other DNA
gcgtaacgttatcgtcacaggtcaaaaatcatattcttaatctgatcgccgaacaaaaattgacaccggggatgc

SEQ ID NO: 170832 - DNA, 75 bp, synthetic construct
  source 1..75: mol_type = other DNA
ttcgtatttatccaaatggaacattgggtactcaacgagaaacaatggagctgattcgttctggcgctattcccc

SEQ ID NO: 170833 - DNA, 75 bp, synthetic construct
  source 1..75: mol_type = other DNA
gcagtagttttactctttatgaacgcgtaccagcattaacgccaaaaatttttgctgatagtgttaatgcatgta

SEQ ID NO: 170834 - DNA, 75 bp, synthetic construct
  source 1..75: mol_type = other DNA
cctgggtgatcctgttgcctcagagttaaccgctggcgactttacgaaataccgcgaagcacggctaaaaggtga

SEQ ID NO: 170835 - DNA, 75 bp, synthetic construct
  source 1..75: mol_type = other DNA
cgcaaacaatttgcgacgaaaggtgaggccgtagcattcgaaaacttcaccatggatgaagtgaacaaaaaacca

SEQ ID NO: 170836 - DNA, 75 bp, synthetic construct
  source 1..75: mol_type = other DNA
gtgcatttgatatgcaccactgccaaagtggatcgtagttttggcgatattccgttagttcacggcatgcctttt

SEQ ID NO: 170837 - DNA, 75 bp, synthetic construct
  source 1..75: mol_type = other DNA
gctggctggcatcgtgcggcctgaccgtggagcagatgcaaaaccagatggacccggtgtacacgccggcgcgaa

SEQ ID NO: 170838 - DNA, 75 bp, synthetic construct
  source 1..75: mol_type = other DNA
acagagaaaaccgacctcatcccggaagggggtatccgtacggatgatgagcgcacccaccggtaccattacgac

SEQ ID NO: 170839 - DNA, 75 bp, synthetic construct
  source 1..75: mol_type = other DNA
tgcgccagaatgcgcagggaattattgaattgcagggcgacagcgatgccgccattgtgaaagggcttattgcgg

SEQ ID NO: 170840 - DNA, 75 bp, synthetic construct
  source 1..75: mol_type = other DNA
ctctactaacgaactaatttctttaagtacatgtagttcatctgattattgtatgggaccacaaaaaggtactta

SEQ ID NO: 170841 - DNA, 75 bp, synthetic construct
  source 1..75: mol_type = other DNA
ttacacatctggggggcaggaaagtcagtttttttgcattggaataaagcgtgataatttgaatcttcctgttca

SEQ ID NO: 170842 - DNA, 75 bp, synthetic construct
  source 1..75: mol_type = other DNA
aatattccgctatcggtatggcgttagtgggcaccgagggacaatggctgcaaaccaacaaagcgctctgccagt

SEQ ID NO: 170843 - DNA, 75 bp, synthetic construct
  source 1..75: mol_type = other DNA
gccggattcaggaagaccgaacgccagaaccagagacgtcttgcctacgcatcagaggtttaccggatttatacc

SEQ ID NO: 170844 - DNA, 75 bp, synthetic construct
  source 1..75: mol_type = other DNA
ctgaagaagcggcaactgaagctgatcaggaagcagataaagcactggagtacctaaaatccgtcccggtgcagt

SEQ ID NO: 170845 - DNA, 75 bp, synthetic construct
  source 1..75: mol_type = other DNA
tcatggtgctggcgaaccggtacgactggcagttattcattgaggtaacaggtccagggggaagtggtaaaagcg

SEQ ID NO: 170846 - DNA, 75 bp, synthetic construct
  source 1..75: mol_type = other DNA
ctcatacccagatcctttacagtgacgaagataaaattaatgcccgcggtgagcgttttgagcctcatttcaaga

SEQ ID NO: 170847 - DNA, 75 bp, synthetic construct
  source 1..75: mol_type = other DNA
ataaacgtcggacgcgcctggcgtctgctgagccgtaaccggggagagacctgggaactgctcagtcatgagcgt

SEQ ID NO: 170848 - DNA, 75 bp, synthetic construct
  source 1..75: mol_type = other DNA
atatgagcagcagaaatctgaagaagcactggcgataaagcgagagggggattcgctggtggacttctgcggcta

SEQ ID NO: 170849 - DNA, 75 bp, synthetic construct
  source 1..75: mol_type = other DNA
ttaatgccatcgggcaaaagctggcggcggcaggtgtacgggatgcgagatattaccctgagggaatgcacggtc

SEQ ID NO: 170850 - DNA, 75 bp, synthetic construct
  source 1..75: mol_type = other DNA
actaaagaaggtgtgcgatcaaacgtgatactgacggatgagtctgaggactggctgccgtcatgtgcaccagtg

SEQ ID NO: 170851 - DNA, 75 bp, synthetic construct
  source 1..75: mol_type = other DNA
ttatctggcaatagcctttaaaaaatggggcgtcgcctgggaggccgttggtgcatacaatgcgggattcaggaa

SEQ ID NO: 170852 - DNA, 75 bp, synthetic construct
  source 1..75: mol_type = other DNA
ttatctggcaatagcctttaaaaaatggggcgtcccctgggaggccgttggtgcatacaatgccggattcaggaa

SEQ ID NO: 170853 - DNA, 75 bp, synthetic construct
  source 1..75: mol_type = other DNA
ttatctggcaatagcctttaaaaaatggggcgtctcctgggaggccgttggtgcatacaatgctggattcaggaa

SEQ ID NO: 170854 - DNA, 75 bp, synthetic construct
  source 1..75: mol_type = other DNA
cagttgaagaattatactctctatgcgaccgaagaaaacctaaaggaataaatgatttatttctagattctttta

SEQ ID NO: 170855 - DNA, 75 bp, synthetic construct
  source 1..75: mol_type = other DNA
gttttcgcaacacacaggaacaggaacggcgcagaaaaatttatgcttcaaaaatacagaacatttatcgcaata

SEQ ID NO: 170856 - DNA, 75 bp, synthetic construct
  source 1..75: mol_type = other DNA
ttatctggcaatagcgtttaaaaaatggggcgtcgcctgggaggccgttggtgcatacaatgccggattcaggaa

SEQ ID NO: 170857 - DNA, 75 bp, synthetic construct
  source 1..75: mol_type = other DNA
attaattgtgctgatgatttttttgatattaataattttactacatgtaataatttgttattagatgaaaaaaaa

SEQ ID NO: 170858 - DNA, 75 bp, synthetic construct
  source 1..75: mol_type = other DNA
aatacgggtttgggcttgagagagatatcaaaggaaggccattaatttatcctatcgaaaattatgatgagtgta

SEQ ID NO: 170859 - DNA, 75 bp, synthetic construct
  source 1..75: mol_type = other DNA
gcctgatgtttataaatgagatctgtctggccactgattgctttgatcttgcaggcagggattacaaaatagatc

SEQ ID NO: 170860 - DNA, 75 bp, synthetic construct
  source 1..75: mol_type = other DNA
ttatctggcaatagcctttaaaaaatggggcgtcacctgggaggccgttggtgcatacaatgcaggattcaggaa

SEQ ID NO: 170861 - DNA, 75 bp, synthetic construct
  source 1..75: mol_type = other DNA
ttatctggcaatagcttttaaaaaatggggcgtctcctgggaggccgttggtgcatacaatgccggattcaggaa

SEQ ID NO: 170862 - DNA, 75 bp, synthetic construct
  source 1..75: mol_type = other DNA
ttatctggcaatagcatttaaaaaatggggcgtcacctgggaggccgttggtgcatacaatgccggattcaggaa

SEQ ID NO: 170863 - DNA, 75 bp, synthetic construct
  source 1..75: mol_type = other DNA
tttgccagcaaatccgcaatggctctacggcgattgccggaattatggcggaaagtttcctgcgtgaaggtacac

SEQ ID NO: 170864 - DNA, 75 bp, synthetic construct
  source 1..75: mol_type = other DNA
cagtcgctgcgcaaccagtaccagtcacggctggaaatcgtaatgcgcacctattttgaaaaaccacgaactgtt

SEQ ID NO: 170865 - DNA, 75 bp, synthetic construct
  source 1..75: mol_type = other DNA
gcggcgcgcgccagccatatgttcctctcgccagacaagaacggccagatgaccatctaccagaccagtggcaac

SEQ ID NO: 170866 - DNA, 75 bp, synthetic construct
  source 1..75: mol_type = other DNA
gcatgattgcaaataagctgtgtgaggctggcgttaccaatgctgagtttatcaacgaaaaaggcgagaaagagg

SEQ ID NO: 170867 - DNA, 75 bp, synthetic construct
  source 1..75: mol_type = other DNA
aatccgcaatggctctacggcgattgctggaattatggcggaaagtttcctgcgcgaaggaacgcaaaaaatcgt

SEQ ID NO: 170868 - DNA, 75 bp, synthetic construct
  source 1..75: mol_type = other DNA
aagcgactgttggtcattattggcccctgctcgatccacgatctcaccgctgcaatggagtacgccacccgtctg

SEQ ID NO: 170869 - DNA, 75 bp, synthetic construct
  source 1..75: mol_type = other DNA
acttatacagcaatttacgcatcatcatcatgcaacaacaatcaggccggctggctcctacacgggcaagccatg

SEQ ID NO: 170870 - DNA, 75 bp, synthetic construct
  source 1..75: mol_type = other DNA
accttgctatgaccacgatacggcccaggcgctggttaatgtcggcgcacaaatagccgcaatgacaccgggcga

SEQ ID NO: 170871 - DNA, 75 bp, synthetic construct
  source 1..75: mol_type = other DNA
acgacgctttgtgggctggatgacaacgcccggcagatagaccacgcgctggagtggctgtatgggcgcgatcct

SEQ ID NO: 170872 - DNA, 75 bp, synthetic construct
  source 1..75: mol_type = other DNA
gtacacgaccaggaacagcctttaccgcgtctatctggcgtttatggcatacgcaggcaggagcaaaccgctaaa

SEQ ID NO: 170873 - DNA, 75 bp, synthetic construct
  source 1..75: mol_type = other DNA
atccctgtcattatccgccgattgctggcgaactttaccgaccctgagaaggcacgggctttactactggaacag

SEQ ID NO: 170874 - DNA, 75 bp, synthetic construct
  source 1..75: mol_type = other DNA
tattcctcaaatactaggatacgaaacaccaagtacatgtctgtcatttttacctcaagtttttgaatctgtaga

SEQ ID NO: 170875 - DNA, 75 bp, synthetic construct
  source 1..75: mol_type = other DNA
gcggggttattgcgtccggggcttgttaataccatcgggcagaaactggcagcggcaggggtcagggatgctgat

SEQ ID NO: 170876 - DNA, 75 bp, synthetic construct
  source 1..75: mol_type = other DNA
atgaatttgaaaccgtgactctgccctacaaaaaagcagtaacggcgagccgccttttttatctcgattctccgc

SEQ ID NO: 170877 - DNA, 75 bp, synthetic construct
  source 1..75: mol_type = other DNA
gcggcgcggaagattcaccagagaaaattgcccgttttgctcaagaagtgaatttcatgaagtgcaagtggggca

SEQ ID NO: 170878 - DNA, 75 bp, synthetic construct
  source 1..75: mol_type = other DNA
cccgtaacctgattggattcagtaacggtgtttttgatacccggacaggcgattttcgggagcacgacaaaaacg

SEQ ID NO: 170879 - DNA, 75 bp, synthetic construct
  source 1..75: mol_type = other DNA
ctgacgcgcttcggtaaagatatgccgggggcaatggcggaatatggcagggagtatataaaacggaaaacgaag

SEQ ID NO: 170880 - DNA, 75 bp, synthetic construct
  source 1..75: mol_type = other DNA
gaagccagacgccttttatatgagcagcagaaatcagaagaagcactcgcgataaagcgtgaaggtgattcgctg

SEQ ID NO: 170881 - DNA, 75 bp, synthetic construct
  source 1..75: mol_type = other DNA
gcggatcgcgtactggctgcattattcatggtgctggcgaaccggtacgactggcagttattcattgaggtaaca

SEQ ID NO: 170882 - DNA, 75 bp, synthetic construct
  source 1..75: mol_type = other DNA
gaaggcgaactggcggtagtgattcgccatttgcttacacgatttgccgaccaggacgaagcgaaaagactactt

SEQ ID NO: 170883 - DNA, 75 bp, synthetic construct
  source 1..75: mol_type = other DNA
gataaagagctgcagcgagaaatggcgcagatttttattgattccgaagtcgcctattcgcagaacgcgattaaa

SEQ ID NO: 170884 - DNA, 75 bp, synthetic construct
  source 1..75: mol_type = other DNA
tcatatttcggcagcgtctaatagcgccctggaaattgccaagggcgattttgtggctttactggatcacgatga

SEQ ID NO: 170885 - DNA, 75 bp, synthetic construct
  source 1..75: mol_type = other DNA
ggaaagggcgctggtggttggctattcgctgattatcatgccggatatgacccggtacgctggcgacggcgcagg

SEQ ID NO: 170886 - DNA, 75 bp, synthetic construct
  source 1..75: mol_type = other DNA
taccagaagcgcaaaacaaaacatggcataagatcaaacgtcacacttcacgacgattcagaagactggatgcct

SEQ ID NO: 170887 - DNA, 75 bp, synthetic construct
  source 1..75: mol_type = other DNA
ggataagaaaatatccgatgtagaagcggtgcaaacgctgtctcgcctaaaccgcacctatccaggcaaagacac

SEQ ID NO: 170888 - DNA, 75 bp, synthetic construct
  source 1..75: mol_type = other DNA
aaagtttgaaaaacgcgatctggcacaggcagtgattaacgctgcatacctggtggcttatgccgatggtgaatg

SEQ ID NO: 170889 - DNA, 75 bp, synthetic construct
  source 1..75: mol_type = other DNA
tgacgccattgcaggagcgtttcaaagagattaacgactggcttcaagaagatgtaatacaatttgaaaaatatt

SEQ ID NO: 170890 - DNA, 75 bp, synthetic construct
  source 1..75: mol_type = other DNA
gattcaaaggggctcgggaattttaaaaacctgtttttctacgcacccaacgggaaaccggatggcatcaagatt

SEQ ID NO: 170891 - DNA, 75 bp, synthetic construct
  source 1..75: mol_type = other DNA
taacccagtgactgacgacgtggaaaacttaagccgcgtattggataccatctatggtgtgatcgacaaattcaa

SEQ ID NO: 170892 - DNA, 75 bp, synthetic construct
  source 1..75: mol_type = other DNA
gcgcacgtcaccacccagatcgaagcgatccgtcgtggcgcaccgggcgggctgattttccagagtatctgtggc

SEQ ID NO: 170893 - DNA, 75 bp, synthetic construct
  source 1..75: mol_type = other DNA
ccacgctgacgctgaccagaacctcaacgaaaacctgatgatcctgctcgccaccgcaggctgcaactacatcat

SEQ ID NO: 170894 - DNA, 75 bp, synthetic construct
  source 1..75: mol_type = other DNA
gaaactggttatattaactggctttcctggagccaggaaaaactcagccgtgcatgtcgtgaacttgaacttaag

SEQ ID NO: 170895 - DNA, 75 bp, synthetic construct
  source 1..75: mol_type = other DNA
agaatccgaaaaagaacagcttgcgcacctaatcaaaattggacggagatatggagtttctgtagctatcgttcc

SEQ ID NO: 170896 - DNA, 75 bp, synthetic construct
  source 1..75: mol_type = other DNA
aaacgctcccggtacataattctgatgccgaacccttttttccgaaaaaccttggtccatttatcgagcaggtat

SEQ ID NO: 170897 - DNA, 75 bp, synthetic construct
  source 1..75: mol_type = other DNA
gcacggttcactatcaatgtcgcagcgaacgcccacttgcagcatatcaagctggcgtttgaaaacccgctcagt

SEQ ID NO: 170898 - DNA, 75 bp, synthetic construct
  source 1..75: mol_type = other DNA
cataaaactatcgtcagcgacaaaggccgcgcggtatttaacggtttgatcaacgtcgcgcagcacgccatcaaa

SEQ ID NO: 170899 - DNA, 75 bp, synthetic construct
  source 1..75: mol_type = other DNA
accagtgccattccggcccgtctggatgacggcctgacggtgaccggcgtgcgcgtggaggtgctgaacgtcctc

SEQ ID NO: 170900 - DNA, 75 bp, synthetic construct
  source 1..75: mol_type = other DNA
gtggcgagtaagtttcagaatcggttagttggcacaatagtgctggtggcgctgggagtgattgtgctgccaggg

SEQ ID NO: 170901 - DNA, 75 bp, synthetic construct
  source 1..75: mol_type = other DNA
ctcgaaagataagctgaaaggttcgcttggcgaactgaagcagatctctggtttgagcggcgtggtgatgggcta

SEQ ID NO: 170902 - DNA, 75 bp, synthetic construct
  source 1..75: mol_type = other DNA
gtggcaagtaagtttcagaatcggttagtgggcacgatcgtgctggtggcgctgggggtgattgtacttccaggg

SEQ ID NO: 170903 - DNA, 75 bp, synthetic construct
  source 1..75: mol_type = other DNA
caatgcacgatcatttattctgaaaaattatgggttatttaaaagaaataataaggtcagacagctatatgacaa

SEQ ID NO: 170904 - DNA, 75 bp, synthetic construct
  source 1..75: mol_type = other DNA
agaaagccgctgtaagcgcccagaacgagcgaagagccaaggagctaagggaaaccctagcccagcagcaaaaac

SEQ ID NO: 170905 - DNA, 75 bp, synthetic construct
  source 1..75: mol_type = other DNA
ctacccaggcattgccgacacagccgccggaaggggctgcagaagaggtgcgtgcgggcgatgctgcggcacctt

SEQ ID NO: 170906 - DNA, 75 bp, synthetic construct
  source 1..75: mol_type = other DNA
ttctggcattgttaggaagtatatctataagtcgtggcagttatgtgagacttatcgtgggaggtggagcccttt

SEQ ID NO: 170907 - DNA, 75 bp, synthetic construct
  source 1..75: mol_type = other DNA
cgacgacgtgcaaagtatcgccgcacaaatctacgaagggctttctttcggggtgggcgatgcggtgatcggcgt

SEQ ID NO: 170908 - DNA, 75 bp, synthetic construct
  source 1..75: mol_type = other DNA
aactgatgggtttgactgaaagtggattcaatactcatcttcaggaacgtattggttcggatggaaaaaaacaac

SEQ ID NO: 170909 - DNA, 75 bp, synthetic construct
  source 1..75: mol_type = other DNA
catgcgcgccgccgttcatcacagctcaccgatttacgtgaagcgtaatattctggtgtcgacctacatcccgca

SEQ ID NO: 170910 - DNA, 75 bp, synthetic construct
  source 1..75: mol_type = other DNA
ccgccgcgcagaaaacacgcgcaccacagcaactgaaagccagcgcaccgcaaaaaatggaagcgttcaccttcg

SEQ ID NO: 170911 - DNA, 75 bp, synthetic construct
  source 1..75: mol_type = other DNA
gatgccttaccccgcccggtccgcgaacgtccacagctttctgaaccgctggcggcgcttatcagacaggcgtgg

SEQ ID NO: 170912 - DNA, 75 bp, synthetic construct
  source 1..75: mol_type = other DNA
acagcaggccgcgcaccgtaaaccagcccaactacggcttggctgggatgaggaggacgggattgtactggagtt

SEQ ID NO: 170913 - DNA, 75 bp, synthetic construct
  source 1..75: mol_type = other DNA
ccctgcagtcctgtctgtcacgaatcaaaaaaatcagcataaacctcccccagttccccagccttgacgacattc

SEQ ID NO: 170914 - DNA, 75 bp, synthetic construct
  source 1..75: mol_type = other DNA
gggcgagctgcgcaccatcgcggcgaccacgtggagcgaatacaaacagtattttgagcgcgacgccgcgctgga

SEQ ID NO: 170915 - DNA, 75 bp, synthetic construct
  source 1..75: mol_type = other DNA
atttaccgcccgctgggacaggaggcgatgcgcgccattgtggaaatgaaactggcgcaggtggcccgccgtctt

SEQ ID NO: 170916 - DNA, 75 bp, synthetic construct
  source 1..75: mol_type = other DNA
gcgaccacatcatgcagctgctggaggaaaaaccggacgccacggacgcagacctgcatgaactgctgtatcccc

SEQ ID NO: 170917 - DNA, 75 bp, synthetic construct
  source 1..75: mol_type = other DNA
tggtcaataagaatcgtaccgatttcatcattgaactggcttaccaggaagctaaaaacatcattctggatcaac

SEQ ID NO: 170918 - DNA, 75 bp, synthetic construct
  source 1..75: mol_type = other DNA
cctctataccgccccgccgatgcctttagtttcggctgacctgcttaacatggcttcatctgctattgaagactt

SEQ ID NO: 170919 - DNA, 75 bp, synthetic construct
  source 1..75: mol_type = other DNA
aggaatggaatgggagcctgaacgagggatccgttgtaccatgtgttttgacatgcgttttgagcggactgcgct

SEQ ID NO: 170920 - DNA, 75 bp, synthetic construct
  source 1..75: mol_type = other DNA
atgaacatgaaaaaaacgctgctggtcatactgaccggcatcaccctggcatcaccggtggcaggtgccgccacc

SEQ ID NO: 170921 - DNA, 75 bp, synthetic construct
  source 1..75: mol_type = other DNA
ctcttttagttcctatttaaaaagcatggaaataaatactaatctcacgaaagcttcttctttgaattggatata

SEQ ID NO: 170922 - DNA, 75 bp, synthetic construct
  source 1..75: mol_type = other DNA
tatatagaaagaagctcttcaagggtaatgtccataggttcaattgttattcgtgatatcatacaaaacttctct

SEQ ID NO: 170923 - DNA, 75 bp, synthetic construct
  source 1..75: mol_type = other DNA
actgaaatcccttgaactctcaaaacatcagtacgtggctgccgttcatacggacacggataatctgcatgtgca

SEQ ID NO: 170924 - DNA, 75 bp, synthetic construct
  source 1..75: mol_type = other DNA
cgtggagccaggaaaaactcagtcgtgcatgccgtgaacttgaacttaagcacggattcgcgccggataatggtt

SEQ ID NO: 170925 - DNA, 75 bp, synthetic construct
  source 1..75: mol_type = other DNA
aggaaagtctgtgggggtacacgactgttcagtgtgagtcgttgattgaagatatgatcgcgggcgggaatttca

SEQ ID NO: 170926 - DNA, 75 bp, synthetic construct
  source 1..75: mol_type = other DNA
ttatacctaagctttcaggagcacagaggttttctttaaacatattgagcaagttggatgattatgacaaattta

SEQ ID NO: 170927 - DNA, 75 bp, synthetic construct
  source 1..75: mol_type = other DNA
gccgagatggaaaagcgcaaaaaagcgttgctgacgctggactggtcggtggagccgccccgcaatgcctcgaag

SEQ ID NO: 170928 - DNA, 75 bp, synthetic construct
  source 1..75: mol_type = other DNA
gcctgttccgcgtactggtctggccgtatctgtttaaaaactttgcgctgcgtgatatggcggaatttctggaga

SEQ ID NO: 170929 - DNA, 75 bp, synthetic construct
  source 1..75: mol_type = other DNA
tattccgacctcatggatacacaaaaaggtcgggattccggtaccaaaagataacgaagctgtgctgacgccgcc

SEQ ID NO: 170930 - DNA, 75 bp, synthetic construct
  source 1..75: mol_type = other DNA
cccgtcaaaatcaaactgcgtccgcatcgctggttctgtaccacgccggaagccggggacgaggtgcgtcttaac

SEQ ID NO: 170931 - DNA, 75 bp, synthetic construct
  source 1..75: mol_type = other DNA
tgcccgtcttcctcgtttgcttgaagcggctgagcgcggcgatctggcggctcaggctgacctcttcgaagatat

SEQ ID NO: 170932 - DNA, 75 bp, synthetic construct
  source 1..75: mol_type = other DNA
ggcccgtgatggtctgtatatcacgatgcaggagggagaactggtggtgaaggatggctgggacagatcgcggga

SEQ ID NO: 170933 - DNA, 75 bp, synthetic construct
  source 1..75: mol_type = other DNA
cgtggagccaggaaaggctcagccgtgcatgccgtgaacttgaacttaagcacggattttcaccggataacggtt

SEQ ID NO: 170934 - DNA, 75 bp, synthetic construct
  source 1..75: mol_type = other DNA
tttccaaagatgatacagaccctgtttttcactacattctttcctggcctgcgcatgaaagcccgcgtcctgagc

SEQ ID NO: 170935 - DNA, 75 bp, synthetic construct
  source 1..75: mol_type = other DNA
gatgaagtccattgcgtaacgttcgattacggtcagcggcatcgcgcagagatcgacgtggcacgcgagctggcc

SEQ ID NO: 170936 - DNA, 75 bp, synthetic construct
  source 1..75: mol_type = other DNA
cgagctggcggtcagcagcctgacgcgtgacagcattccggtgcctgattatgaacctgaagccgatggcatccc

SEQ ID NO: 170937 - DNA, 75 bp, synthetic construct
  source 1..75: mol_type = other DNA
tctggtgcaggcattacaacaatatgatgaagtccattgcgtgacgttcgattacggtcagcgccatcgcgcaga

SEQ ID NO: 170938 - DNA, 75 bp, synthetic construct
  source 1..75: mol_type = other DNA
atgggtttgaaaatgggagctgggagttctaccgcaggggcgggggaactccaagtgatatccatcatcgcatcc

SEQ ID NO: 170939 - DNA, 75 bp, synthetic construct
  source 1..75: mol_type = other DNA
ggcgaaattttgattcatcgtgatgaccggtttatccccgctggcgcggggaacaccctgaacggtggggaaaaa

SEQ ID NO: 170940 - DNA, 75 bp, synthetic construct
  source 1..75: mol_type = other DNA
ttcagaccgtgtttttacccggtttatccccgctggcgcggggaacaccctgaacggtggggaaaaaccccataa

SEQ ID NO: 170941 - DNA, 75 bp, synthetic construct
  source 1..75: mol_type = other DNA
cccgtaagggcaatttcgacccgcttcacctgatcaccgaaaaatacagtacgctgcgtaaatacgccccgcgta

SEQ ID NO: 170942 - DNA, 75 bp, synthetic construct
  source 1..75: mol_type = other DNA
tcgcgcacctcaaaaataataacgtcagaccaaaagacggaagactgttgctgaccaccattctggccgacggca

SEQ ID NO: 170943 - DNA, 75 bp, synthetic construct
  source 1..75: mol_type = other DNA
atgccacggcgacagatactgagcagcgaagagcaggaacgcttactggttataccagatgatgaaattattctg

SEQ ID NO: 170944 - DNA, 75 bp, synthetic construct
  source 1..75: mol_type = other DNA
agccgtaattaccggcgtctgcgaaacggatttctccggctacccggattgccgcgatgagtttgtgaaagcact

SEQ ID NO: 170945 - DNA, 75 bp, synthetic construct
  source 1..75: mol_type = other DNA
aagatattgctctcattaataagcaccggcgtccagctaatcgcctgggctttgctgtattactctgttacctac

SEQ ID NO: 170946 - DNA, 75 bp, synthetic construct
  source 1..75: mol_type = other DNA
taaatgagcaactggtatctcatctttctcccctgggctgggaacatatcaatctgagtggagattacgtctggc

SEQ ID NO: 170947 - DNA, 75 bp, synthetic construct
  source 1..75: mol_type = other DNA
gctgtcagcattgctggcgcgtaatacggtttatccccgctggcgcggggaacaccgttcctcgcattatttccc

SEQ ID NO: 170948 - DNA, 75 bp, synthetic construct
  source 1..75: mol_type = other DNA
cgcccggtttatccccgctggcgcggggaacaccagattatcttctttttcaatccagccaccgacggtttatcc

SEQ ID NO: 170949 - DNA, 75 bp, synthetic construct
  source 1..75: mol_type = other DNA
cttttccgggatgtgcacctgtgcgccgggcaacggtttatccccgctggcgcggggaacactctaaacataacc

SEQ ID NO: 170950 - DNA, 75 bp, synthetic construct
  source 1..75: mol_type = other DNA
agccagcacgctatccatgcgaaggtaatcacaacgacccaacgtaagcagttttctaaattcattatccggaca

SEQ ID NO: 170951 - DNA, 75 bp, synthetic construct
  source 1..75: mol_type = other DNA
ttattaactttacagtatacggtgagggaaaccgtattatcggtgttgctgacgcaaagctgccatcaattgaga

SEQ ID NO: 170952 - DNA, 75 bp, synthetic construct
  source 1..75: mol_type = other DNA
tggcgcggggaacactcgatcgcaaatatgctccgattgatgaaaagcggtttatccccgctggcgcggggaaca

SEQ ID NO: 170953 - DNA, 75 bp, synthetic construct
  source 1..75: mol_type = other DNA
tcaaccggtttatccccgcaggcgcggggaactcgagagacgaagcatgaaaaaattaataatatccggtttatc

SEQ ID NO: 170954 - DNA, 75 bp, synthetic construct
  source 1..75: mol_type = other DNA
gccgtggcgcgggtccccgctggcgtcaaccggtttatccccgcaggcgcggggaactcgagagacgaagcatga

SEQ ID NO: 170955 - DNA, 75 bp, synthetic construct
  source 1..75: mol_type = other DNA
agtgcgcccggtttatccccgctgacgcggggaacaccagattatcttctttttcaatccagccaccgacggttt

SEQ ID NO: 170956 - DNA, 75 bp, synthetic construct
  source 1..75: mol_type = other DNA
gtttatccccgctggcgcggggaacacattacgcctttttgcgattgcccggtttttgccggtttatccccgctg

SEQ ID NO: 170957 - DNA, 75 bp, synthetic construct
  source 1..75: mol_type = other DNA
cgctggcgcggggaacacactgtcatctctctcccactgggagatagaaacggtttatccccgctggcgcgggga

SEQ ID NO: 170958 - DNA, 75 bp, synthetic construct
  source 1..75: mol_type = other DNA
ggaacaccctcccctccttagtcgatgaaaagagtataacggtttatccccgctggcgcggggaacacactaagc

SEQ ID NO: 170959 - DNA, 75 bp, synthetic construct
  source 1..75: mol_type = other DNA
caatcttggcctgaccaaaatggcggaagcctgccccggaagcaccaaatcatcactggaagatatccaggcatg

SEQ ID NO: 170960 - DNA, 75 bp, synthetic construct
  source 1..75: mol_type = other DNA
ttacacctgcataatcagtcgggtcagagattcaacacatgtgcttgatggattgttgtaccacgaaagcgacct

SEQ ID NO: 170961 - DNA, 75 bp, synthetic construct
  source 1..75: mol_type = other DNA
cgtatagaacgaacactgtttatgctggactggttccgtgatccggcattgcggcgacgtgtccaggccgggctg

SEQ ID NO: 170962 - DNA, 75 bp, synthetic construct
  source 1..75: mol_type = other DNA
aaattaatggtaaaaatgtcctgcaacatatcgaccggttaaatgcgattgagtcgctggcactccctgacggca

SEQ ID NO: 170963 - DNA, 75 bp, synthetic construct
  source 1..75: mol_type = other DNA
acccgaatggcctatttcagtgagcatgatctggcgcttatcagtgctcaccgtaaacccgccagccgttttggt

SEQ ID NO: 170964 - DNA, 75 bp, synthetic construct
  source 1..75: mol_type = other DNA
ggccacttcaataaagcagggaaccgtgacggcatccctgatgttgaaaaagcttgccagctaccccaaacaaaa

SEQ ID NO: 170965 - DNA, 75 bp, synthetic construct
  source 1..75: mol_type = other DNA
tgccgcttaatgatgcccttgaaactattcgtgatatgtaccgtaaacagctacgaaaggttcctgcatcggcac

SEQ ID NO: 170966 - DNA, 75 bp, synthetic construct
  source 1..75: mol_type = other DNA
tgcaggcgaagatcctctgtctgctattgaacgagtgttaccgtgggacgattttgtcgccagtctggaggaaac

SEQ ID NO: 170967 - DNA, 75 bp, synthetic construct
  source 1..75: mol_type = other DNA
aggatctggcaattatcaatgctcaccgtaaacctgccagccggtttggttttgccgttcttctctgttatctga

SEQ ID NO: 170968 - DNA, 75 bp, synthetic construct
  source 1..75: mol_type = other DNA
gctacatattaatgagcaattgttgtcacatttgtctccgctgggctgggagcacattaatctgacaggggacta

SEQ ID NO: 170969 - DNA, 75 bp, synthetic construct
  source 1..75: mol_type = other DNA
ataagggatcgtggtattgaaaaccagagttaccgcgccagtgggcttacgctgctcactgccgcgatcactttg

SEQ ID NO: 170970 - DNA, 75 bp, synthetic construct
  source 1..75: mol_type = other DNA
ggcattgaccgacaatactatgaaatttgcgcaatgaatgagctaaagggggcgctgcgggcgggtgatatctgg

SEQ ID NO: 170971 - DNA, 75 bp, synthetic construct
  source 1..75: mol_type = other DNA
tgatgctgaaaaagctggccagttatccgaaacagaatggcctcgctaaggcactgagagaaatcggccgcattg

SEQ ID NO: 170972 - DNA, 75 bp, synthetic construct
  source 1..75: mol_type = other DNA
ttacagaaatacttgataaagtcgagcgatggactgctttttcgcgacattttactcatcttaagaatccgctaa

SEQ ID NO: 170973 - DNA, 75 bp, synthetic construct
  source 1..75: mol_type = other DNA
ggctgttctatacccatatctccgaccagtacgcgccgttcagcacccgcgtggtgaatgtcggcgtccgcgatt

SEQ ID NO: 170974 - DNA, 75 bp, synthetic construct
  source 1..75: mol_type = other DNA
atgtttttgcgctaatgcatctacttgggtttgcatttgcaccaaggatccgggatctccatgacaaacggctat

SEQ ID NO: 170975 - DNA, 75 bp, synthetic construct
  source 1..75: mol_type = other DNA
gtacgcaacgagggaggaaacccgttgggagcatcttgccgaactctatcgctacttgggattagtgcctttcaa

SEQ ID NO: 170976 - DNA, 75 bp, synthetic construct
  source 1..75: mol_type = other DNA
atgaagtcgatcgatggactgccttctcgcgacattttactcatcttaagaatccgctaacccgccctcaggata

SEQ ID NO: 170977 - DNA, 75 bp, synthetic construct
  source 1..75: mol_type = other DNA
atgcatctgctcggattcgcttttgcgccaaggatccgggatcttcatgacaaacggctgtttattcatggaaaa

SEQ ID NO: 170978 - DNA, 75 bp, synthetic construct
  source 1..75: mol_type = other DNA
agtccggggaagatccctgggccgcaatagaagacgtccttccctggcaggaattcatcaacagcgtggaagaga

SEQ ID NO: 170979 - DNA, 75 bp, synthetic construct
  source 1..75: mol_type = other DNA
ttgcactttccgttcaccagaaccgactcctgaaactcgcacgcgaaggcaggaaaatgagtagccgggatctgg

SEQ ID NO: 170980 - DNA, 75 bp, synthetic construct
  source 1..75: mol_type = other DNA
cagcgaggccgagctgctggcccggccggaaggcttcgaccacctgcacctggtcggcgagaacttcgccaccct

SEQ ID NO: 170981 - DNA, 75 bp, synthetic construct
  source 1..75: mol_type = other DNA
tgatgcacctgctgggattcgcttttgcgccgaggatccgggatcttcatgacaagcggctgtttattcatggaa

SEQ ID NO: 170982 - DNA, 75 bp, synthetic construct
  source 1..75: mol_type = other DNA
atgataagtttatcaccaccgactatttgcaacagtgccctcgacagcctgctcatatcagagggtgaacaacct

SEQ ID NO: 170983 - DNA, 75 bp, synthetic construct
  source 1..75: mol_type = other DNA
ggtgacaccgttaaaattctttgggctgatgctgatggtctgtgcctgttcactaaacgcctggaggaaggccag

SEQ ID NO: 170984 - DNA, 75 bp, synthetic construct
  source 1..75: mol_type = other DNA
gctggcaatgctcctcgataagctggactggcgtcagccaaaaacatcccgccttaacgcactgacaatgttgta

SEQ ID NO: 170985 - DNA, 75 bp, synthetic construct
  source 1..75: mol_type = other DNA
tggatgagacccccttctcaggtcacctgtttatctttcgtggccgacggggtgacactgttaaaatactctggg

SEQ ID NO: 170986 - DNA, 75 bp, synthetic construct
  source 1..75: mol_type = other DNA
ctgaatgtttgccagaaactggagattaatgttccggtttatgcggggatgccgcagcccattatgcgtaaacaa

SEQ ID NO: 170987 - DNA, 75 bp, synthetic construct
  source 1..75: mol_type = other DNA
ttaatgttccggtttatgcggggatgccgcaacccattatgcgtcaacaaatcgttgccgataatattcacggtg

SEQ ID NO: 170988 - DNA, 75 bp, synthetic construct
  source 1..75: mol_type = other DNA
cctgttcatcttccgtggccgacggggtgacacgattaaaatcctgtgggctgatgctgatggcctgtgcctgtt

SEQ ID NO: 170989 - DNA, 75 bp, synthetic construct
  source 1..75: mol_type = other DNA
atgagcgatctgcataacgagtccatctttattaccggcggcggatcgggattaggcctggcgctggtcgagcga

SEQ ID NO: 170990 - DNA, 75 bp, synthetic construct
  source 1..75: mol_type = other DNA
tggtctatttcccgcgcacgccgtcggtgtcgacgacggggataattgaggtgattcggagtaaatcagccacct

SEQ ID NO: 170991 - DNA, 75 bp, synthetic construct
  source 1..75: mol_type = other DNA
tattttccccgtacgccgtcggtatcgacgacggggattattgaggtgattaggggtaaatcagccacctactga

SEQ ID NO: 170992 - DNA, 75 bp, synthetic construct
  source 1..75: mol_type = other DNA
cgtatctggctcgttgccggcgttaccgatatgcgtaaatccttcaacggactgggagaacaggtacaacatgtg

SEQ ID NO: 170993 - DNA, 75 bp, synthetic construct
  source 1..75: mol_type = other DNA
cgttactgatatgcgtaaatccttcaacggtctgggggagcagatacagcatgtgctggatgataaccccttctc

SEQ ID NO: 170994 - DNA, 75 bp, synthetic construct
  source 1..75: mol_type = other DNA
gcgcggcccacaggcgctcgggcaaagtgaaacctcgataatgcagtctctgacgccggagaaaattgccgccat

SEQ ID NO: 170995 - DNA, 75 bp, synthetic construct
  source 1..75: mol_type = other DNA
cacaactggtgacgctgtttgccctgtcgaacctatggatggcccgccgacatttgctggcaagcgcaggagagg

SEQ ID NO: 170996 - DNA, 75 bp, synthetic construct
  source 1..75: mol_type = other DNA
tcggtggtgcgattgtcggtactaacggcggcgagctgctgggtgaaatcggcctggcaatcgaaatgggttgtg

SEQ ID NO: 170997 - DNA, 75 bp, synthetic construct
  source 1..75: mol_type = other DNA
tcggtggtgcaattgtcggtactaacggcggtgagctgctgggtgaaatcggtctggcaatcgaaatgggttgtg

SEQ ID NO: 170998 - DNA, 75 bp, synthetic construct
  source 1..75: mol_type = other DNA
acttcttccataaaagggcgctcagtggtcacggtaaactactatatgacaaccatagctggaatgtttcaattt

SEQ ID NO: 170999 - DNA, 75 bp, synthetic construct
  source 1..75: mol_type = other DNA
aaagaaaaattactggaggttcgtaaagagctactgactggataccagatccccaaaagtaactatattgttaca

SEQ ID NO: 171000 - DNA, 75 bp, synthetic construct
  source 1..75: mol_type = other DNA
tgaatgcgcagcttgcccgggtgggcggccttgccacttccagtctccgtacagcgcagatggcgcaggataacc

SEQ ID NO: 171001 - DNA, 75 bp, synthetic construct
  source 1..75: mol_type = other DNA
tcaacgcgcggtcgatcagatcctgactcgttccggcaagctggattgttttatcggcaatgcgggcatctggga

SEQ ID NO: 171002 - DNA, 75 bp, synthetic construct
  source 1..75: mol_type = other DNA
tggtgatgatgggcctcgatctcactaaccagaccgtgtgtaccccggatgtgattgcgcggatggaaagggcgg

SEQ ID NO: 171003 - DNA, 75 bp, synthetic construct
  source 1..75: mol_type = other DNA
cctcaataaaacattaattaatggtctgaatgtttgccagaaactggagattaatgttccggtttatgcggggat

SEQ ID NO: 171004 - DNA, 75 bp, synthetic construct
  source 1..75: mol_type = other DNA
tcgggacgaatatgaaaaatattttgactcgttaagtaatggcgaggagtatttgagttttaaagaatatatcgg

SEQ ID NO: 171005 - DNA, 75 bp, synthetic construct
  source 1..75: mol_type = other DNA
ccggctgcgtctcactgtacccgtgcggttgttgcctgagccccgcctgggcaaaggcaggcctgttcacctggg

SEQ ID NO: 171006 - DNA, 75 bp, synthetic construct
  source 1..75: mol_type = other DNA
agagccagcagaacgcgccgctgggcagtaccgacaaccccgccaccgatgcggttcgctttcgtccccatcccg

SEQ ID NO: 171007 - DNA, 75 bp, synthetic construct
  source 1..75: mol_type = other DNA
tggagcaggcatttcgacgcgaacatgtcaaaaccggcataaagcttcaggactggtgccgtcagaacaatatca

SEQ ID NO: 171008 - DNA, 75 bp, synthetic construct
  source 1..75: mol_type = other DNA
tcagtaactaaggcacttaaagggatgttcgccgacctggaagaggcaactgacgtggaaacccgcgttgctctt

SEQ ID NO: 171009 - DNA, 75 bp, synthetic construct
  source 1..75: mol_type = other DNA
aaagaccatataatcaatggccataaaaacaacaacccagattacggggataatatcgttttctctggggaggaa

SEQ ID NO: 171010 - DNA, 75 bp, synthetic construct
  source 1..75: mol_type = other DNA
tgattactaacctttccgggatgggcgtttccgttccgaatggttttgccacaaccgccgatgcattcaaccagt

SEQ ID NO: 171011 - DNA, 75 bp, synthetic construct
  source 1..75: mol_type = other DNA
tgcggcgaatcgcccggctatcgtgcgccgcaccatggggtcgaaaaaaatccgcatggtttacgcgccgaccca

SEQ ID NO: 171012 - DNA, 75 bp, synthetic construct
  source 1..75: mol_type = other DNA
acgtacctgtcacgcggcgatcatcgcccgtgaactgggtattccggcggtggtagggtgtggcgatgcgactga

SEQ ID NO: 171013 - DNA, 75 bp, synthetic construct
  source 1..75: mol_type = other DNA
atggctggacttgccggaaacagaacagcaagaaatggatcatgtggattatgacgagcaggtaagcacgcgatt

SEQ ID NO: 171014 - DNA, 75 bp, synthetic construct
  source 1..75: mol_type = other DNA
ggtgagttttggaatagcatttggaaagagtttgttaggacgaaagataaagttaggatcaacaaatttagatgg

SEQ ID NO: 171015 - DNA, 75 bp, synthetic construct
  source 1..75: mol_type = other DNA
gtaaagaacgattaattgataccgcaaagaaagataccaagaagaaaaccaaacgtgtaattggcttacgtgaga

SEQ ID NO: 171016 - DNA, 75 bp, synthetic construct
  source 1..75: mol_type = other DNA
atgaacgccatctttcaggggggacacgggacagccggagatttgtataaaacaactttttacggtccgacacag

SEQ ID NO: 171017 - DNA, 75 bp, synthetic construct
  source 1..75: mol_type = other DNA
atgagattgtgaactggaaagaacttagtgagcgtggtctggtattcagaattaatcatgaaattatgcatcagc

SEQ ID NO: 171018 - DNA, 75 bp, synthetic construct
  source 1..75: mol_type = other DNA
gcagtggttgctgcggatgggatgtggagctattcagatgaacaggtggagtgtgcaaagcaaaaagggtggttt

SEQ ID NO: 171019 - DNA, 75 bp, synthetic construct
  source 1..75: mol_type = other DNA
attaaaatcctctgggctgatgctgatggtctgtgcctgttcaccaaacgcctggaggaaggcctgtttatctgg

SEQ ID NO: 171020 - DNA, 75 bp, synthetic construct
  source 1..75: mol_type = other DNA
aggcactgagggcacattctcaccaacagcccggcgatgatggacatctgcaaagacaccgccaaaattgccctt

SEQ ID NO: 171021 - DNA, 75 bp, synthetic construct
  source 1..75: mol_type = other DNA
ccagagaccaggcatctgttgttggtgatattatttctgataaacaggccacaatcagcttcggaactgaatcag

SEQ ID NO: 171022 - DNA, 75 bp, synthetic construct
  source 1..75: mol_type = other DNA
tggcgaaaccttcgttacccgcaaaatcacccgcgcaatcgccaatatcgcccaggggctggagtcgtgcctgta

SEQ ID NO: 171023 - DNA, 75 bp, synthetic construct
  source 1..75: mol_type = other DNA
attgctaccggcgttcagtactccgtgcgtcagttcgtagaaatggcggcggcacagttgggtatcaaactgcgc

SEQ ID NO: 171024 - DNA, 75 bp, synthetic construct
  source 1..75: mol_type = other DNA
gaatctcgctggttgccggcgttactgatatgcgtaaatccttcaacggtctgggtgaacaggtacaacatgtgc

SEQ ID NO: 171025 - DNA, 75 bp, synthetic construct
  source 1..75: mol_type = other DNA
tcttctcgctgaccaacgaagaagtgcaggaactggcaaaacaggccgtacaaattgagaaacactacggtcgcc

SEQ ID NO: 171026 - DNA, 75 bp, synthetic construct
  source 1..75: mol_type = other DNA
cccggaccgagctttcgacttcgcctgtctgccgaacgaaggcgtgggccttgcgcgtctggaatttatcatcaa

SEQ ID NO: 171027 - DNA, 75 bp, synthetic construct
  source 1..75: mol_type = other DNA
ccatggggtcgaaaaaaatccgtatggtatatgcgccgacccaggaacatggcaagcaggttaaaatcgaagacg

SEQ ID NO: 171028 - DNA, 75 bp, synthetic construct
  source 1..75: mol_type = other DNA
gctgttgattatggggctgcaattattaacagcagcacagacaagtcattattgactttaaatctgtcaccattg

SEQ ID NO: 171029 - DNA, 75 bp, synthetic construct
  source 1..75: mol_type = other DNA
ttgtctaattcgtcagattctgaccagacggttcaggatgtacgcttacaaattgatcataaaaccgatcatgaa

SEQ ID NO: 171030 - DNA, 75 bp, synthetic construct
  source 1..75: mol_type = other DNA
actggtgttcacccgtgcccgcgcactttcagtaacaggaacactgaaaaaaatgttcgccgacctgaaagaggc

SEQ ID NO: 171031 - DNA, 75 bp, synthetic construct
  source 1..75: mol_type = other DNA
ccgcgttacttccgtccggctgaagttgaaacgctgctcggcgacccgaccaaagcgcacgaaaaactgggctgg

SEQ ID NO: 171032 - DNA, 75 bp, synthetic construct
  source 1..75: mol_type = other DNA
taaaaatgcagtggatgatgctgcaacaggaacaaccggaagatttcgttattgctaccggcgttcagtactccg

SEQ ID NO: 171033 - DNA, 75 bp, synthetic construct
  source 1..75: mol_type = other DNA
cgtgaagtgcagccggacgaagtatacaacctgggtgcgatgagccacgttgcggtttcttttgaatcccctgaa

SEQ ID NO: 171034 - DNA, 75 bp, synthetic construct
  source 1..75: mol_type = other DNA
tgaagttggcatagttttatcagccatagcattatctttccatctatggccagggtttcacaatcctgtagtgct

SEQ ID NO: 171035 - DNA, 75 bp, synthetic construct
  source 1..75: mol_type = other DNA
ttccggggcttcccttgaacgtcctcagctatctctattgcttgatgaggctaataccggggatatgttgctggt

SEQ ID NO: 171036 - DNA, 75 bp, synthetic construct
  source 1..75: mol_type = other DNA
cgggccgcgcaatgatgtccctggcgtggccattatttcgcgttacggaacaggcagcgttggctgcctggccgc

SEQ ID NO: 171037 - DNA, 75 bp, synthetic construct
  source 1..75: mol_type = other DNA
ggttacgaggtgcatggtattaagcgtcgtgcatcgtcattcaacaccgagcgcgtggatcacatttatcaggat

SEQ ID NO: 171038 - DNA, 75 bp, synthetic construct
  source 1..75: mol_type = other DNA
tggtttatcgtcaaggtggtcgtcgcttagagcgtgtctttaaggacactctttacgcgaatgtgaagcgtgtcg

SEQ ID NO: 171039 - DNA, 75 bp, synthetic construct
  source 1..75: mol_type = other DNA
ataaagctgctcccgtttgatttatcccggcagactgcgggacattatagcggaacactgtcagttacgtttaca

SEQ ID NO: 171040 - DNA, 75 bp, synthetic construct
  source 1..75: mol_type = other DNA
ccgcttcctcggtctggaaaagaaaacccgtttctatcaggcttccacttctgaactgtacggtctggtgcagga

SEQ ID NO: 171041 - DNA, 75 bp, synthetic construct
  source 1..75: mol_type = other DNA
gcgtaaccgggcaggatggatcttatctgaccgaacttttgttggaaaaaggttatgaagtgcatggtatcaaac

SEQ ID NO: 171042 - DNA, 75 bp, synthetic construct
  source 1..75: mol_type = other DNA
gcgtaacggggcaggacggttcttatctggcagaactgctgctggaaaaaggctatgaagttcacgggattaaac

SEQ ID NO: 171043 - DNA, 75 bp, synthetic construct
  source 1..75: mol_type = other DNA
ctgtttccgggaatggaaaggagcgtgacgctgctggaaggcggtgagatatgtcttgaaagcacagaccgtttt

SEQ ID NO: 171044 - DNA, 75 bp, synthetic construct
  source 1..75: mol_type = other DNA
atggaatactttgatatgcgtaaaatgtcggtgaatctgtggcgaaatgctgccggtgaaacgcgcgaaatttgc

SEQ ID NO: 171045 - DNA, 75 bp, synthetic construct
  source 1..75: mol_type = other DNA
actgattttcggccttttacaaggtgcgtccaacgccggttactggctgctttcggtgactgataagcatctcta

SEQ ID NO: 171046 - DNA, 75 bp, synthetic construct
  source 1..75: mol_type = other DNA
ccgtttatcgatgctgattacgacaccgacaactggtttgaacgtgccaaaggaatggaatgggagcctgagagg

SEQ ID NO: 171047 - DNA, 75 bp, synthetic construct
  source 1..75: mol_type = other DNA
tatcagcaggaatattgtggctgtgtgtattctctgcgcgataccaatctacaccgcaaatctcagggacgccct

SEQ ID NO: 171048 - DNA, 75 bp, synthetic construct
  source 1..75: mol_type = other DNA
tccgttgtaccatgtgttttgacatgcgttttgagcggacagcgttgtacgctgctgaaaatggtttcagtgtga

SEQ ID NO: 171049 - DNA, 75 bp, synthetic construct
  source 1..75: mol_type = other DNA
tccgcgttcagccagcatctcctgcagctcacggtaactgatgccgtatttgcagtaccagcgtacggcccacag

SEQ ID NO: 171050 - DNA, 75 bp, synthetic construct
  source 1..75: mol_type = other DNA
agctcacggcggcagtttcttgacgacgcaccaacggaaattatcagtcggtcatggaaacggctggtgattaac

SEQ ID NO: 171051 - DNA, 75 bp, synthetic construct
  source 1..75: mol_type = other DNA
gatcctgacgcagcttaatcgaggagaaggccgccacgctgtggctcgtgcgatttgttacggacaacgcggaga

SEQ ID NO: 171052 - DNA, 75 bp, synthetic construct
  source 1..75: mol_type = other DNA
tttagtcgctctgggtggtgtcatacttggtggtttattggactatctggcactacgaaaaacgcatttgacgta

SEQ ID NO: 171053 - DNA, 75 bp, synthetic construct
  source 1..75: mol_type = other DNA
cagcatgggcgcggccgtctttttcgaaaacctgtgtggtgggatgggtacatcggcgtttgtagcgctgttaat

SEQ ID NO: 171054 - DNA, 75 bp, synthetic construct
  source 1..75: mol_type = other DNA
atgcaacatcgtattattctccccggagccactacgctgacccggttgatttcagaggtaagggaaaaggcgacg

SEQ ID NO: 171055 - DNA, 75 bp, synthetic construct
  source 1..75: mol_type = other DNA
tggattatctggacgcactggagctggtcgataccgccagtgcgccagatattgaatggcctacgcctccggcag

SEQ ID NO: 171056 - DNA, 75 bp, synthetic construct
  source 1..75: mol_type = other DNA
acagtaaacaatggcctggtaaagcggctattggtcgtctgaaaggtgaggaactgtctcaatataatttgtggc

SEQ ID NO: 171057 - DNA, 75 bp, synthetic construct
  source 1..75: mol_type = other DNA
tggattatctggacgcgctggaagtggtcgatacctccagtgcgcccgatattgaatggcctacgcctccggctg

SEQ ID NO: 171058 - DNA, 75 bp, synthetic construct
  source 1..75: mol_type = other DNA
aatgttcttcattatacagctcttgtgaaaaaagcgaatggcggtactgtttctgaaggtgctttttctgcagtt

SEQ ID NO: 171059 - DNA, 75 bp, synthetic construct
  source 1..75: mol_type = other DNA
atcgtgtagggaatatatcgaacaagccaattgtcgtagtaatactctgataagaaacactcgtgaacgccgctt

SEQ ID NO: 171060 - DNA, 75 bp, synthetic construct
  source 1..75: mol_type = other DNA
ttcggccagatttctaaggcgcatttagaggctaatggtacttcggttaggaaagatttggatattaaacttgtt

SEQ ID NO: 171061 - DNA, 75 bp, synthetic construct
  source 1..75: mol_type = other DNA
tctgctctccgcaggcggtgtacacagccacgaagatcacatcatggcaatggtagagctggcagctgaacgtgg

SEQ ID NO: 171062 - DNA, 75 bp, synthetic construct
  source 1..75: mol_type = other DNA
cttcttcaacggtggcgtagaagagtctttcaaaggcgaagatcgtattctgatcgattcaccgaaagtcgctac

SEQ ID NO: 171063 - DNA, 75 bp, synthetic construct
  source 1..75: mol_type = other DNA
tcatgaacttccgtgctgaccgcgcgcgtgaaatcactcgtgcattcgtgaacgctgatttcgatggcttcgcgc

SEQ ID NO: 171064 - DNA, 75 bp, synthetic construct
  source 1..75: mol_type = other DNA
ttcgttttattgaagcttgccgtcatcaacaaacaaaaaacctgtggattctcgctgtatacacgggtattcgtc

SEQ ID NO: 171065 - DNA, 75 bp, synthetic construct
  source 1..75: mol_type = other DNA
gatgttgccggtactgatgatgcagttaatgtgctgtgcctgtgtctggatatcgctgaccaggacggtatcggt

SEQ ID NO: 171066 - DNA, 75 bp, synthetic construct
  source 1..75: mol_type = other DNA
ctgggtaaaggccgcgtagcgtccatcattggtcgttactacgcgatggaccgcgataaccgttgggatcgcgtt

SEQ ID NO: 171067 - DNA, 75 bp, synthetic construct
  source 1..75: mol_type = other DNA
atgatgactgacaatgtaaatttgatgaacggggatgaacaaactgcgtccagtttaagtgaagagacttcaaaa

SEQ ID NO: 171068 - DNA, 75 bp, synthetic construct
  source 1..75: mol_type = other DNA
atgaaactggtcgcggccagagtttttctggcagttctaatggcaggctatatcgtaaataacgtgttatatgca

SEQ ID NO: 171069 - DNA, 75 bp, synthetic construct
  source 1..75: mol_type = other DNA
aaagacacaagtggcaatgatgtagctgaaggtgccttctcagcagttgcgaatttcaacctgatttatcagtaa

SEQ ID NO: 171070 - DNA, 75 bp, synthetic construct
  source 1..75: mol_type = other DNA
gctcaccagattgtgctggaaagctgtgttacaagcgcaacggaaaacttcatgagcgagcatggtgatgcactc

SEQ ID NO: 171071 - DNA, 75 bp, synthetic construct
  source 1..75: mol_type = other DNA
atacaagatttaatatatcatctggacagggatgatttttactcaagaaaatattggcataaaaaattcagtgat

SEQ ID NO: 171072 - DNA, 75 bp, synthetic construct
  source 1..75: mol_type = other DNA
gggctcaggagatgctggcggcctacaagcaatacgtggacgaggtgcccgaggaagcacgcgcgattgaaatcc

SEQ ID NO: 171073 - DNA, 75 bp, synthetic construct
  source 1..75: mol_type = other DNA
tatggattgccaccagcactcacgaaggtgaagagagcgtggtcattgccgcacatcaggcattgttacagcaat

SEQ ID NO: 171074 - DNA, 75 bp, synthetic construct
  source 1..75: mol_type = other DNA
tcgatatctctgtaacaccgcaactggctgctaaagcggtgacgctgcgccgccagtgggcaccacatcgtccgg

SEQ ID NO: 171075 - DNA, 75 bp, synthetic construct
  source 1..75: mol_type = other DNA
tcggttattgccggtgcggtagctatggcagtggtgtcttttggtgtaaatgctgctctaactactccacagggg

SEQ ID NO: 171076 - DNA, 75 bp, synthetic construct
  source 1..75: mol_type = other DNA
ataagaccatagctacacaaagtgcccttttatacaaccgaaagggggggcagccggcagagcaaaagatgctca

SEQ ID NO: 171077 - DNA, 75 bp, synthetic construct
  source 1..75: mol_type = other DNA
tatacagctattgtgaaaaaagcgaatggcggtactgtttctgaaggtgctttttctgcagttgcaacctttaat

SEQ ID NO: 171078 - DNA, 75 bp, synthetic construct
  source 1..75: mol_type = other DNA
caaatttgttcgtcgcttgttgcgtcgtattacactaatcgccgcgcaaaacgaagaagatggcgcgcgttttgt

SEQ ID NO: 171079 - DNA, 75 bp, synthetic construct
  source 1..75: mol_type = other DNA
gagacccttgaactgaccgccacggctgacatgcctgatgaagtgcgcgcaaagctgcacaaaatcaccggtctg

SEQ ID NO: 171080 - DNA, 75 bp, synthetic construct
  source 1..75: mol_type = other DNA
gatgaattgcctaagaaatattttgcaaagatagcatttattttttcacttcaaagtggtgatttttattttcag

SEQ ID NO: 171081 - DNA, 75 bp, synthetic construct
  source 1..75: mol_type = other DNA
aacagaaatacaacatgacgagcatctgcgcccggaaacgacgctggaacagttacgtggactaaaagcaccatt

SEQ ID NO: 171082 - DNA, 75 bp, synthetic construct
  source 1..75: mol_type = other DNA
taattcacgggattatcgaagagcaggaggaacgcgagttaacccttatgattgccgagcagatagagcgccagc

SEQ ID NO: 171083 - DNA, 75 bp, synthetic construct
  source 1..75: mol_type = other DNA
ctgtatggtatcgaacagagattttacactactagatttggtaatgaaaagagattagccaactcaatattaaga

SEQ ID NO: 171084 - DNA, 75 bp, synthetic construct
  source 1..75: mol_type = other DNA
gtcaaaaccaaatcgaaagagaatcgcattagctatggacacacttgcagcgatgccagtcgaagaccgaggtga

SEQ ID NO: 171085 - DNA, 75 bp, synthetic construct
  source 1..75: mol_type = other DNA
aaatggatgaaattgacagagggaatatgttaacttatataaatgattattgttctggaaaattaaaatttgatg

SEQ ID NO: 171086 - DNA, 75 bp, synthetic construct
  source 1..75: mol_type = other DNA
aaacattgatgttttgtcacagtatttagagaatgagataaaaaatgaattaagtaataatggaaggtttgagtc

SEQ ID NO: 171087 - DNA, 75 bp, synthetic construct
  source 1..75: mol_type = other DNA
tctcatggtattgaatatatggaggatggtcttcccgatccggtgaaagctatggggcagatcctggtggaaaac

SEQ ID NO: 171088 - DNA, 75 bp, synthetic construct
  source 1..75: mol_type = other DNA
tttggtccagaggtggctcgtatggcaaatctgcttctgcagcgtgaaggtgaaacacgagaggtgaaaggctgt

SEQ ID NO: 171089 - DNA, 75 bp, synthetic construct
  source 1..75: mol_type = other DNA
tcagaatttcaaggctcgtcgttttcttcttcgtaccttttttcctggtgttcagacctttaatacaaagaaagt

SEQ ID NO: 171090 - DNA, 75 bp, synthetic construct
  source 1..75: mol_type = other DNA
gccgttgtttaatttaattaactgtacaccaaagttgaaagatatttcaattagggttaataaatgtctttcttc

SEQ ID NO: 171091 - DNA, 75 bp, synthetic construct
  source 1..75: mol_type = other DNA
tgggtgaagataatgttgctgcttttgaagcattggaaaaggaaaattcagaattaagaagtttaaggggggagc

SEQ ID NO: 171092 - DNA, 75 bp, synthetic construct
  source 1..75: mol_type = other DNA
tcgaagcaatgattgatgcgaatatgcgaccttgtgggatcaatcccaccattatttatcgtccctacagtttta

SEQ ID NO: 171093 - DNA, 75 bp, synthetic construct
  source 1..75: mol_type = other DNA
aaagttttgaacgtgaatttatcgaacagactggcgtaaaactggtagtcggcaaaggcggaatggggccactga

SEQ ID NO: 171094 - DNA, 75 bp, synthetic construct
  source 1..75: mol_type = other DNA
gtggaaatgagcgtatcactcaaatccgcaaggagcttgattggattgataacgctgtcggtggaaaaactgttt

SEQ ID NO: 171095 - DNA, 75 bp, synthetic construct
  source 1..75: mol_type = other DNA
tatcagcaattatttttcactcgcaaaaaaataggattgtgatattttctggtatagtactgtccattctttcaa

SEQ ID NO: 171096 - DNA, 75 bp, synthetic construct
  source 1..75: mol_type = other DNA
ggtatttcaaaactcgcagcagattatttgcagcaggtatttgatctatatgaaccgccccgggtttcctggaga

SEQ ID NO: 171097 - DNA, 75 bp, synthetic construct
  source 1..75: mol_type = other DNA
cccgagcagcaggacgcagcagaattatgggctaagaaaattcaagagtgttcggaaatcaatcctttatctttg

SEQ ID NO: 171098 - DNA, 75 bp, synthetic construct
  source 1..75: mol_type = other DNA
agctcaaaataaaaagctggcacgattaaagcagcaattgggcgtacttcaagcagaaaaaattgctcaggacgt

SEQ ID NO: 171099 - DNA, 75 bp, synthetic construct
  source 1..75: mol_type = other DNA
ctgattgtggggggaacctggggacccgttacgctgatggggtatgcgttcttgcgtgcatggcaatactggctg

SEQ ID NO: 171100 - DNA, 75 bp, synthetic construct
  source 1..75: mol_type = other DNA
catgcttgattatatcgacggttactgcggtgaacagaagctgaaattcgataaagaaaatcagaagtttgaaat

SEQ ID NO: 171101 - DNA, 75 bp, synthetic construct
  source 1..75: mol_type = other DNA
aattaacccaggatcagaaatcgcttctcttacaccgggaagaaataaccgcgttgatggagaaaaatgttgcga

SEQ ID NO: 171102 - DNA, 75 bp, synthetic construct
  source 1..75: mol_type = other DNA
aggaattgaactcagacagagagcagatgccttttcaaaacaatatcagacccgggagcagcagagagctagtga

SEQ ID NO: 171103 - DNA, 75 bp, synthetic construct
  source 1..75: mol_type = other DNA
tcaggcagagcgagaagcagcaaaagcgcatgatgaacaggttgctgctttgcaacgtctgattgctcaacttga

SEQ ID NO: 171104 - DNA, 75 bp, synthetic construct
  source 1..75: mol_type = other DNA
ccaactttaatcgtgtggcggatgcgcagcagtatggcggctcaatgcagaaagaatatgccgcccgtgccgcga

SEQ ID NO: 171105 - DNA, 75 bp, synthetic construct
  source 1..75: mol_type = other DNA
agccagacgagtatttgccatccgcgagtcggcgtcatggctgatgaagaatgtgcgcaactggtggatttactg

SEQ ID NO: 171106 - DNA, 75 bp, synthetic construct
  source 1..75: mol_type = other DNA
cttcgaacgtctgatggaaggcgctaagctgctgaaatgtagcgagtttggtgacgcaatcatcgaaaacatgta

SEQ ID NO: 171107 - DNA, 75 bp, synthetic construct
  source 1..75: mol_type = other DNA
ccaatacagagagaagtcatcagagcggtgccgcgtaacggttactggttcggtgaagccacggtacattgttga

SEQ ID NO: 171108 - DNA, 75 bp, synthetic construct
  source 1..75: mol_type = other DNA
attctgccaccaaatcgcagaaaaaagcgcttcgcatgttgcgcattgacccgaaaaaactggcggcggatatgc

SEQ ID NO: 171109 - DNA, 75 bp, synthetic construct
  source 1..75: mol_type = other DNA
ggtcgggccggttgtgaaaaaagtctggcaggaggttgatcaggttgtcagggcaatggggggatgggaacaggc

SEQ ID NO: 171110 - DNA, 75 bp, synthetic construct
  source 1..75: mol_type = other DNA
cacaaggcaagaagatcaccctgcaaaacggcaaactcaacgttcctgaaaatccggttatcccttacattgaag

SEQ ID NO: 171111 - DNA, 75 bp, synthetic construct
  source 1..75: mol_type = other DNA
aacctatgacttcgaacgtctgatggagggcgctaagctgctgaaatgttcagagtttggtgatgcgatcatcga

SEQ ID NO: 171112 - DNA, 75 bp, synthetic construct
  source 1..75: mol_type = other DNA
aacctatgacttcgaacgtctgatggacggcgctaatctgctgaaatgttcagagtttggtgacgcgatcatcga

SEQ ID NO: 171113 - DNA, 75 bp, synthetic construct
  source 1..75: mol_type = other DNA
attgttaaaggtatggaaggcgcaatcaacgcgaaaaccgtaacttatgactttgaacgtctgatggaaggcgct

SEQ ID NO: 171114 - DNA, 75 bp, synthetic construct
  source 1..75: mol_type = other DNA
cttcgaacgtctgatggaaggcgctaagcttctgaaatgttcagagtttggtgaagcgatcatcgaaaacatgta

SEQ ID NO: 171115 - DNA, 75 bp, synthetic construct
  source 1..75: mol_type = other DNA
tcaacgcgaaaaccgtaacttatgactttgaacgtctgatggaaggcgctaaattgctgaaatgtagcgagtttg

SEQ ID NO: 171116 - DNA, 75 bp, synthetic construct
  source 1..75: mol_type = other DNA
gatcaagcgcattggctatgaaggcaggcttactggtcatgggttcagacatatgatatcgacgatattacatga

SEQ ID NO: 171117 - DNA, 75 bp, synthetic construct
  source 1..75: mol_type = other DNA
gaaaagatagccaaagagtggcatcagatgaagtccgccaaatggtcggtaggatatgcgtcagatatcatggaa

SEQ ID NO: 171118 - DNA, 75 bp, synthetic construct
  source 1..75: mol_type = other DNA
tatcaagcgtattggttatggtggaaaacttactggtcatggatttcgacattccttatctactatcctccacga

SEQ ID NO: 171119 - DNA, 75 bp, synthetic construct
  source 1..75: mol_type = other DNA
cagtcattatacgagcaggcagttccggcagttactgtggcgataccggatcaggcagagtatgagtcggcgtgg

SEQ ID NO: 171120 - DNA, 75 bp, synthetic construct
  source 1..75: mol_type = other DNA
atgtgtgaatcgaacgacaagaatctgacgatttattacgttcttcccgatgagcaatatcgcccggatttgctg

SEQ ID NO: 171121 - DNA, 75 bp, synthetic construct
  source 1..75: mol_type = other DNA
ggcggagtacaatcctgcggctgatctctccagcgctctcgaagtacaccaatccaatcatttcccattcctaaa

SEQ ID NO: 171122 - DNA, 75 bp, synthetic construct
  source 1..75: mol_type = other DNA
acctcattattgataattgggaaaccgtaggtcctgtcataaaaaaagtctggcacgtggtggatgaaacggcgc

SEQ ID NO: 171123 - DNA, 75 bp, synthetic construct
  source 1..75: mol_type = other DNA
tcatctcgacaccatgaagtccctcatgggggaatacttccatgccgactactgcggtgtgatggtaacgagata

SEQ ID NO: 171124 - DNA, 75 bp, synthetic construct
  source 1..75: mol_type = other DNA
tgtctgggaagatgtttgtgctgagaaagcaaacagcaaggcataccagctttattacccgcaggtgcaacacca

SEQ ID NO: 171125 - DNA, 75 bp, synthetic construct
  source 1..75: mol_type = other DNA
tttcctggtattgagaaaattaaaaatagtaaattagtttcaatacaatatggtttagcaaaggagcgccataat

SEQ ID NO: 171126 - DNA, 75 bp, synthetic construct
  source 1..75: mol_type = other DNA
gtgatgtatgcgctttatttctcctgcgaggaaatgatcgcaccgctgactgatatcagctcgctggatgatttc

SEQ ID NO: 171127 - DNA, 75 bp, synthetic construct
  source 1..75: mol_type = other DNA
taattgatgtaccgggcaaagccgatcccctgatgaaaatcacgcacgatgtggggtattctccattcagacgat

SEQ ID NO: 171128 - DNA, 75 bp, synthetic construct
  source 1..75: mol_type = other DNA
tgctggtgcggcgaatgcgcttgctggagatgggcgatgataccgcctgcgcgctgggcgtcagcgtcgaacgtt

SEQ ID NO: 171129 - DNA, 75 bp, synthetic construct
  source 1..75: mol_type = other DNA
atgacgatggtggtcaccgaatggcgtttaccacgcgtgctgatggcgctgttgattggcgcggcactgggcgtc

SEQ ID NO: 171130 - DNA, 75 bp, synthetic construct
  source 1..75: mol_type = other DNA
gccctggcggggccgatttcctttattgctttagtcgcgccacacattgcccgccgcatcagtggcaccgctcgc

SEQ ID NO: 171131 - DNA, 75 bp, synthetic construct
  source 1..75: mol_type = other DNA
gtttcaggcacggctggttttattctggtctccccatctgcaaatattgagccgggaataggggagatggccgtt

SEQ ID NO: 171132 - DNA, 75 bp, synthetic construct
  source 1..75: mol_type = other DNA
ctcacggtggcggactatatccgcgattaccagccggtcacggcggtggtgtatgtgatgtcgccggtggccaga

SEQ ID NO: 171133 - DNA, 75 bp, synthetic construct
  source 1..75: mol_type = other DNA
gcgagctccggcaggagaatcgccagtttatgcaggcagagcttgaaagtgttggcgcgttgttacggtttggca

SEQ ID NO: 171134 - DNA, 75 bp, synthetic construct
  source 1..75: mol_type = other DNA
gcggcagaagatgcctgcgagcgtgaaagaccgcgatgcctgggcgaaagatctcgccaccacctttgaaagtta

SEQ ID NO: 171135 - DNA, 75 bp, synthetic construct
  source 1..75: mol_type = other DNA
ggcgaaaaagcgatagatgtagcgagcgtcgtgcggcagaagatgcctgcgagcgtgaaagaccgcgatgcctag

SEQ ID NO: 171136 - DNA, 75 bp, synthetic construct
  source 1..75: mol_type = other DNA
acatttttgaaaggtgcaaccgcaaaaaatgtgagagagtgcaacctgatgaaaaatagtatcgctgagcactaa

SEQ ID NO: 171137 - DNA, 75 bp, synthetic construct
  source 1..75: mol_type = other DNA
ataaatattataaccaaaactcctgattacgatcaattacacggaagtttgaacagctacttaaatattcctcag

SEQ ID NO: 171138 - DNA, 75 bp, synthetic construct
  source 1..75: mol_type = other DNA
gatggaggggggagcgagatacaagaggggatacagcctggtttccacccgaattaatagaaagaatagatgttc

SEQ ID NO: 171139 - DNA, 75 bp, synthetic construct
  source 1..75: mol_type = other DNA
cctgcagggtggttggcaggtatcacatattttcggaatgatatacataataaaattgaagctggtacgaggaaa

SEQ ID NO: 171140 - DNA, 75 bp, synthetic construct
  source 1..75: mol_type = other DNA
cgtgagtttttgcgtgaactgcaaaatgccctgctgtggattaactttcgtttttaccttgcgccactgttctgg

SEQ ID NO: 171141 - DNA, 75 bp, synthetic construct
  source 1..75: mol_type = other DNA
caggaaaagttcgtctccattatcacgcttatctgaccgcagcttctcgtaacgacagccatgcccgttccacga

SEQ ID NO: 171142 - DNA, 75 bp, synthetic construct
  source 1..75: mol_type = other DNA
cgtgagttcttgcgtgagctgcaaaatgcattgctgtggatcaatttccgtttttacctggcgccgctgttctgg

SEQ ID NO: 171143 - DNA, 75 bp, synthetic construct
  source 1..75: mol_type = other DNA
accgagcagagcatgaacccagatgtccacgggcaggatttgcgctttgcctttgaccgcccggaataccgagtg

SEQ ID NO: 171144 - DNA, 75 bp, synthetic construct
  source 1..75: mol_type = other DNA
actttgatgctgtttggtcgcccgacagatccaagccaaccgatctcggatgataacccgccgcaagccttccac

SEQ ID NO: 171145 - DNA, 75 bp, synthetic construct
  source 1..75: mol_type = other DNA
cccctacgcgatggaagccatcatcactgacaaggccctgaaagggaaaaacttcgctgtgatcattgatgaggc

SEQ ID NO: 171146 - DNA, 66 bp, synthetic construct
  source 1..66: mol_type = other DNA
atggtatttaaacattacgatgtggtcagggcggcatcgccgtcagaccttgctgatgcacttgcg

SEQ ID NO: 171147 - DNA, 75 bp, synthetic construct
  source 1..75: mol_type = other DNA
tcgttacggaggcttttgcctccgttgctgaactgccaccaaagcatgcaccgcttatgcgcgaagttgccacca

SEQ ID NO: 171148 - DNA, 75 bp, synthetic construct
  source 1..75: mol_type = other DNA
tgaatgaagtacaggaaattacggagaaatggttatcagaatataactatgaacgcccgcatgaatcactgaaca

SEQ ID NO: 171149 - DNA, 75 bp, synthetic construct
  source 1..75: mol_type = other DNA
atgcgttgttgtggaccaactttcgtttttaccttgcaccgctattctggttgattgtggggggaacctggggac

SEQ ID NO: 171150 - DNA, 75 bp, synthetic construct
  source 1..75: mol_type = other DNA
tgttaattttcgagcgcctgtttaagctgggcgagcactggcagcttgatcatcgtcttgaggcgttcttccggc

SEQ ID NO: 171151 - DNA, 75 bp, synthetic construct
  source 1..75: mol_type = other DNA
gattatttatttatcttcctcgaacctatatatttttaaattcccttaaatataagctgtcaaaacgtggtgcat

SEQ ID NO: 171152 - DNA, 75 bp, synthetic construct
  source 1..75: mol_type = other DNA
gtctgatcgcggttcatatgctgttggttttttctcaatatattcaaccgttgaacgatctatacactcgattat

SEQ ID NO: 171153 - DNA, 75 bp, synthetic construct
  source 1..75: mol_type = other DNA
caatagctacccgaccacgtatggcaacgtattgcacatgaaaggtgcgagtgctgctggtgagggcgagttgct

SEQ ID NO: 171154 - DNA, 75 bp, synthetic construct
  source 1..75: mol_type = other DNA
cagccgaacaaagtgcatcgtctgcaaacagttcgaaatctgcggcagaagcatcagcgagcgcagcctcagcaa

SEQ ID NO: 171155 - DNA, 75 bp, synthetic construct
  source 1..75: mol_type = other DNA
gcaaatgcgtaatcagttgatagaaaaagcgaatcaaagtccggagttacattctgttcgtgccaatgatttgcc

SEQ ID NO: 171156 - DNA, 75 bp, synthetic construct
  source 1..75: mol_type = other DNA
ggcggaatactatcgccaacgtgccagtgccggcttgattattagcgaagccactcaagtttccgctcaggcaaa

SEQ ID NO: 171157 - DNA, 75 bp, synthetic construct
  source 1..75: mol_type = other DNA
gctgacgatctggctgctatccctttgcgggaactgctggtgcgaaacccgcgtctcgatgcggaatgtatcgat

SEQ ID NO: 171158 - DNA, 75 bp, synthetic construct
  source 1..75: mol_type = other DNA
attccaggcgcttccgcactgcctcttaacacttcattcaccatccccgtacctgtaccacaggagcctccaact

SEQ ID NO: 171159 - DNA, 75 bp, synthetic construct
  source 1..75: mol_type = other DNA
ccaaatacgatacagttccgcaatgtagacgttggtacttgtatgacaagcttcccggggtttaaaggaggtgtg

SEQ ID NO: 171160 - DNA, 75 bp, synthetic construct
  source 1..75: mol_type = other DNA
gcgaactgctgtgcgatccgcaaacttctggcggtttgctgctggcggtcatgccggaagcagaaaatgaggtca

SEQ ID NO: 171161 - DNA, 75 bp, synthetic construct
  source 1..75: mol_type = other DNA
gccccagctagggcagacgaaggatctacgatggtcataggtacagggggtggtacagtgaccattgaccattcc

SEQ ID NO: 171162 - DNA, 75 bp, synthetic construct
  source 1..75: mol_type = other DNA
gtttgcaatacccttcactacaggaactggagttttattttcccccggcggccctggctgctaattgccatcaac

SEQ ID NO: 171163 - DNA, 75 bp, synthetic construct
  source 1..75: mol_type = other DNA
gtaatgcaaaaatgtccatccgaaggggagattgctgaagagtttatgtggtcaataggggctccgttgagtcct

SEQ ID NO: 171164 - DNA, 75 bp, synthetic construct
  source 1..75: mol_type = other DNA
tgacggcaaaacaggctggatattacatgggtaaattgtcggtaatatttaccccatccttgccaactatcaatt

SEQ ID NO: 171165 - DNA, 75 bp, synthetic construct
  source 1..75: mol_type = other DNA
gtctggaacagcattaacctgaaacgtgtgcgtccggtcgtattgccagggatccgctatgccgtaatgtgtgtg

SEQ ID NO: 171166 - DNA, 75 bp, synthetic construct
  source 1..75: mol_type = other DNA
ctggcctgtcaagttaattggctacatcaatgcagaagtctggcaagatgggccatgtaaaggatggagcaagca

SEQ ID NO: 171167 - DNA, 75 bp, synthetic construct
  source 1..75: mol_type = other DNA
aaaaaataactcagactttttctctgcggcagttaacatttttgaaaggtgcaaccgcaaaaaatgtgagagagt

SEQ ID NO: 171168 - DNA, 75 bp, synthetic construct
  source 1..75: mol_type = other DNA
gcagttaacatttttgaaaggtgcaaccacgaaaaatgtgatggagtgcaacctgatgaaaaatagtatcgctgg

SEQ ID NO: 171169 - DNA, 75 bp, synthetic construct
  source 1..75: mol_type = other DNA
tgttaaatgtgacctgcgtagcaagcttaaaaatgaatgaaatgttaataaaagaaatcgatatgacagggatta

SEQ ID NO: 171170 - DNA, 75 bp, synthetic construct
  source 1..75: mol_type = other DNA
ctgaatacggcgacgttggtcaaggataagatcgcagaattccagcgaaatatgccacagggatatgacatcgca

SEQ ID NO: 171171 - DNA, 75 bp, synthetic construct
  source 1..75: mol_type = other DNA
tggtcgcattaacgctgactcctgcgctttgtggttctgtcctccagcatgtcccaccgcataaaaaaggcttct

SEQ ID NO: 171172 - DNA, 75 bp, synthetic construct
  source 1..75: mol_type = other DNA
acaaatgccgcaattgcaggtagatattgatagtaataaagcggtgtcattagggttgagtttgaatgatgtcac

SEQ ID NO: 171173 - DNA, 75 bp, synthetic construct
  source 1..75: mol_type = other DNA
ggaacttatgtgaatgactttattgatcgtggtcgtgtcaagaaagtctaccttcagggcgacagtgaatttcgt

SEQ ID NO: 171174 - DNA, 75 bp, synthetic construct
  source 1..75: mol_type = other DNA
atgccattgtggtggtggagaacgtcgaacgcattatgcgtgacgaagggttgcccgcgcgtgaagccacggaaa

SEQ ID NO: 171175 - DNA, 75 bp, synthetic construct
  source 1..75: mol_type = other DNA
tccagttcggatatcgccgactggctggtcagtaacgttcaggaccccctggcgcgtgttgaaggtgtggggagt

SEQ ID NO: 171176 - DNA, 75 bp, synthetic construct
  source 1..75: mol_type = other DNA
gatatatactaaaaaagacagcatccctggtgtgaatacaactggtaatcagaacactactggcaatgctgcaac

SEQ ID NO: 171177 - DNA, 75 bp, synthetic construct
  source 1..75: mol_type = other DNA
acaaccgcaacttatgtagacgatgcttcaaaagagtttatacggggtgcatatagtatttgccatcgatatatt

SEQ ID NO: 171178 - DNA, 75 bp, synthetic construct
  source 1..75: mol_type = other DNA
gaacggcggtatcttttatcgttcagcgcgtgatggttatggctttgaagctgactggtcagagttttacaccac

SEQ ID NO: 171179 - DNA, 75 bp, synthetic construct
  source 1..75: mol_type = other DNA
aaaatgtggtgatcctcatgcccgaacccgtagccgaacccgcgctaaacggattgcgcctgaatttgcgcattg

SEQ ID NO: 171180 - DNA, 75 bp, synthetic construct
  source 1..75: mol_type = other DNA
gtcagtaaccgggaacggatgtgcgaatggttcagtcaggtctggcttccgctgcatctggctgcccttgaaggc

SEQ ID NO: 171181 - DNA, 75 bp, synthetic construct
  source 1..75: mol_type = other DNA
ccatgccacaggccagttccgtggtttacataagcctgattggtggcgcagggtataacgttggctccccgcatc

SEQ ID NO: 171182 - DNA, 75 bp, synthetic construct
  source 1..75: mol_type = other DNA
atgaatacggggagctgccctgctgtacagttccgcgtgaattacaggaacggtggtattttttatcgttcagcg

SEQ ID NO: 171183 - DNA, 75 bp, synthetic construct
  source 1..75: mol_type = other DNA
aaatcggcgaatggtcttcgtattgcctatggcaactatggattctttatccgaaacgatggttcaagcacatac

SEQ ID NO: 171184 - DNA, 75 bp, synthetic construct
  source 1..75: mol_type = other DNA
tggtggcgcgggatttaacgtggggtcacctcaacaggcaggtatatctgaacttgttttgcgtgcaggtaacgg

SEQ ID NO: 171185 - DNA, 75 bp, synthetic construct
  source 1..75: mol_type = other DNA
aaagcgcctttagcaagtcctgcattaacgggaatacctactgcgcctaccgctgcacagggtacgaataacacg

SEQ ID NO: 171186 - DNA, 75 bp, synthetic construct
  source 1..75: mol_type = other DNA
gagcaatcctcactatcgtatgatagggaaaaactgtgcagatattgtcggtagaatactgactgaaggagcttc

SEQ ID NO: 171187 - DNA, 75 bp, synthetic construct
  source 1..75: mol_type = other DNA
gccattcgctataaatctgagaacaggtgctatatctgtcagccacggggccaaaattgaaggaggtctagctat

SEQ ID NO: 171188 - DNA, 75 bp, synthetic construct
  source 1..75: mol_type = other DNA
gcaacgcagtgcgcagctgctgcagcaactgaggggacttttccccgacaatccccgtgttcaggaaatggtgga

SEQ ID NO: 171189 - DNA, 75 bp, synthetic construct
  source 1..75: mol_type = other DNA
agcccgcaaccagaatggcagtgaacagcagcaaaaacaggctgaaatggcgctgaatcagttgattaaccgtta

SEQ ID NO: 171190 - DNA, 75 bp, synthetic construct
  source 1..75: mol_type = other DNA
taactggcagaagagtgtaaggagtcgtgcgctcccggaagaggcgatgacgggctggaacgaaggcatgacccg

SEQ ID NO: 171191 - DNA, 75 bp, synthetic construct
  source 1..75: mol_type = other DNA
ccgtaaccagaatggcagtgaacagcagcaaaaacaggctgaaatggcactgaatcagctgattaatcgttatca

SEQ ID NO: 171192 - DNA, 75 bp, synthetic construct
  source 1..75: mol_type = other DNA
gcccggctggaaattattaccggtctgttcaaccgtctgcaaaaaacgcttcgggccatgcctccggacgaccgt

SEQ ID NO: 171193 - DNA, 75 bp, synthetic construct
  source 1..75: mol_type = other DNA
tgatgctccggacgtacaggaacatcagaccctgccgcactcccgtctggtgtatgttgtttctgaaacaaaagc

SEQ ID NO: 171194 - DNA, 75 bp, synthetic construct
  source 1..75: mol_type = other DNA
aaagtctccaaaacggcgatggactctgcgattcgtctggcagccgacagcgcaactaaaaaggctgcggaaaac

SEQ ID NO: 171195 - DNA, 75 bp, synthetic construct
  source 1..75: mol_type = other DNA
gtgcagggcgaagcgtcgtctccggtaacccttccggctcaggcactccggtctgatgctcgggacgtacaggaa

SEQ ID NO: 171196 - DNA, 75 bp, synthetic construct
  source 1..75: mol_type = other DNA
cagcccctgccgcactcccgtctggtgtatgttgtttctgaaacaaaaacagagcccacaccctcccttcagaaa

SEQ ID NO: 171197 - DNA, 75 bp, synthetic construct
  source 1..75: mol_type = other DNA
aattacccccggcatacaacctgcaacgcagtgcgcagttgctgcaacaactgatggttcttttccccgataatc

SEQ ID NO: 171198 - DNA, 75 bp, synthetic construct
  source 1..75: mol_type = other DNA
tgtatgttgtttctgaaacaaaagcagagcccacaccctcccttcagaaatccccgcccacgtttctgaaaccgt

SEQ ID NO: 171199 - DNA, 75 bp, synthetic construct
  source 1..75: mol_type = other DNA
agcttccggcagactgtgccggtggaagaacagattcggcagctgaagctgctccctgaagactctccgcaacgt

SEQ ID NO: 171200 - DNA, 75 bp, synthetic construct
  source 1..75: mol_type = other DNA
tgactctgccgacgctgagaaagtgattaaattcctgcgtgaagagatgggtgtgaagaaaattcgcttcccgga

SEQ ID NO: 171201 - DNA, 75 bp, synthetic construct
  source 1..75: mol_type = other DNA
acgggaaagtttggtttcccaaaaacggatactacatggtccataagcgcgattcgcagaccctgggggagcttc

SEQ ID NO: 171202 - DNA, 75 bp, synthetic construct
  source 1..75: mol_type = other DNA
gctgttcgctatgatttacatctcaagagctatacagatgacaatcaggttatttcggacttctgccagcaatta

SEQ ID NO: 171203 - DNA, 75 bp, synthetic construct
  source 1..75: mol_type = other DNA
attgttaaaggaatggaaggcgcaatcaacgcgaagaccgtaacctatgacttcgaacgactgatggaaggcgct

SEQ ID NO: 171204 - DNA, 75 bp, synthetic construct
  source 1..75: mol_type = other DNA
cttcgaacgtctgatggaaggcgctaaattgctgaaatgtagcgagtttggcgacgcgatcatcaagaacatgta

SEQ ID NO: 171205 - DNA, 75 bp, synthetic construct
  source 1..75: mol_type = other DNA
cttcgaacgtctgatggaaggcgctaaattgctgaaatgtagcgagtttggtgatgcgatcatcaagaacatgta

SEQ ID NO: 171206 - DNA, 75 bp, synthetic construct
  source 1..75: mol_type = other DNA
tgccctgaagtacggtctgaccatgccgggtaaacaccgccgcaccccgccgtacatgttcaccgaggaggtggc

SEQ ID NO: 171207 - DNA, 75 bp, synthetic construct
  source 1..75: mol_type = other DNA
gccacccgtaccacgcgtaagacccggagtgcgacaccggcaaaacgtggacgcccgaaaaagaaagccagttaa

SEQ ID NO: 171208 - DNA, 75 bp, synthetic construct
  source 1..75: mol_type = other DNA
tccggctgaatatgatgttatcgcctgtatgaacctgaacggtgactacatttctgacgctctggctgcacaggt

SEQ ID NO: 171209 - DNA, 75 bp, synthetic construct
  source 1..75: mol_type = other DNA
ccctttttgatacggtgaatcaaacctatctgcggacttcgcgttttctggctgttcgctatgatttacatctca

SEQ ID NO: 171210 - DNA, 75 bp, synthetic construct
  source 1..75: mol_type = other DNA
ctttaaatttatcgtgattccagctctgggtgctgagtccaaccgcctggcaaaaaacttgtactgcgcgaaaga

SEQ ID NO: 171211 - DNA, 75 bp, synthetic construct
  source 1..75: mol_type = other DNA
ggagccgcaacccaaagcggccacccgtgccacgcgtaagacccggagtgcgacaccggcaaaacgtggacgccc

SEQ ID NO: 171212 - DNA, 75 bp, synthetic construct
  source 1..75: mol_type = other DNA
acaggttatcgaccatgtagctgttcaggcctgggcggacagcctcggtactgacaatccgttaccggtgccacg

SEQ ID NO: 171213 - DNA, 75 bp, synthetic construct
  source 1..75: mol_type = other DNA
cgctggaagccctggacgatgtgacatccggacaggttatcgaccatcaggctgtacaggcctgggcggacagcc

SEQ ID NO: 171214 - DNA, 75 bp, synthetic construct
  source 1..75: mol_type = other DNA
tggacacgggcgtgcgcccaatcaatgccctgcttaccgttgggcgcgggcagcgtatggggctatttgctggtt

SEQ ID NO: 171215 - DNA, 75 bp, synthetic construct
  source 1..75: mol_type = other DNA
attcaattcccggcgtcaatgccaaaggggatcaggatacctccggcaatgctgctacggcgaccagattgcaga

SEQ ID NO: 171216 - DNA, 75 bp, synthetic construct
  source 1..75: mol_type = other DNA
tcacttccgattcaatatctcatgaaaggttttccattgaaaccaaacggtcacattggttactatcatagcctt

SEQ ID NO: 171217 - DNA, 75 bp, synthetic construct
  source 1..75: mol_type = other DNA
gcagcagcgagcagcagctatagtaggacgagctgctagagtgcaaactatgcaaaaagcaaaggaaaaggttta

SEQ ID NO: 171218 - DNA, 75 bp, synthetic construct
  source 1..75: mol_type = other DNA
cgaagtggttggctttaatggtcaacgactgtttttaatgccactggaggaagtggaaggtgtcctgcccggcgc

SEQ ID NO: 171219 - DNA, 75 bp, synthetic construct
  source 1..75: mol_type = other DNA
atgaaaaacaatagtgcacaagcaacaaaagtaattaccgtgcatgtgccattacctatggctgataaagtcgac

SEQ ID NO: 171220 - DNA, 75 bp, synthetic construct
  source 1..75: mol_type = other DNA
cttcgaacgactgatggaaggcgctaaactgctgaaatgttcagagtttggtgacgcgatcatcgaaaacatgta

SEQ ID NO: 171221 - DNA, 75 bp, synthetic construct
  source 1..75: mol_type = other DNA
gccaccaaaggttatccaccgtcggtgtttgccaaattaccggcactggtcgagcgtgccggaaatggcattagc

SEQ ID NO: 171222 - DNA, 75 bp, synthetic construct
  source 1..75: mol_type = other DNA
tccgctcctgcgaatgcaaggtgccgcctatgccacgcgcattgccgaagattttcgcgatcgtggtcagcatgt

SEQ ID NO: 171223 - DNA, 75 bp, synthetic construct
  source 1..75: mol_type = other DNA
ttggtgaacgtgggcgcgaagtaaaagatttcattgagaatatcctcggtgctgaagggcgtgcacgctcagtgg

SEQ ID NO: 171224 - DNA, 75 bp, synthetic construct
  source 1..75: mol_type = other DNA
cttgcttaagggtgctgtatcaactaatggtagtttaactgttgatggaataactactttgaaaaacagtttaac

SEQ ID NO: 171225 - DNA, 75 bp, synthetic construct
  source 1..75: mol_type = other DNA
ggccaatgtttaatgcctcctttcgccaggcactgttagatatcagtggtgaaaacgcaaattacacagcaggtt

SEQ ID NO: 171226 - DNA, 75 bp, synthetic construct
  source 1..75: mol_type = other DNA
ggcgttgtccccctggaggaagcggtagtgggggcggtctccgggtatctctgtctgtgggggctgtactggctt

SEQ ID NO: 171227 - DNA, 75 bp, synthetic construct
  source 1..75: mol_type = other DNA
gtgataacagttggtatgcaggatgtgatacaactaaaaatattacagctactataactgtttatgctatatgcc

SEQ ID NO: 171228 - DNA, 75 bp, synthetic construct
  source 1..75: mol_type = other DNA
tttctagtggtagtaattatggagatatttgtcaatccaacattaatagtaatggaatggcagcacaaggttggg

SEQ ID NO: 171229 - DNA, 75 bp, synthetic construct
  source 1..75: mol_type = other DNA
tggctatataaatatccgttatgataaattatcaaccttatccaatgctgccggaacaggaaccgatccgggtcc

SEQ ID NO: 171230 - DNA, 75 bp, synthetic construct
  source 1..75: mol_type = other DNA
gtaaaggaaatagaagagaattcaaataagttaaacttcgatttaacagaagatcagcttactttaattttattg

SEQ ID NO: 171231 - DNA, 75 bp, synthetic construct
  source 1..75: mol_type = other DNA
gtttagctgaaattgataatgatatttttcttcagcgtatcaatgcttctattactcgcgttaggtttgctctcc

SEQ ID NO: 171232 - DNA, 75 bp, synthetic construct
  source 1..75: mol_type = other DNA
ggcagcctgagttcacagataaaacactctccaggaaacccggggcggttcaggcctggtatatgatccctgttg

SEQ ID NO: 171233 - DNA, 75 bp, synthetic construct
  source 1..75: mol_type = other DNA
taggatcatggatatttctatcaatgctcttggtgttggcaattattgattatcgcacgtacctattgccggata

SEQ ID NO: 171234 - DNA, 75 bp, synthetic construct
  source 1..75: mol_type = other DNA
ccgtcacagcagaatcaaaagcgttatttgcgaaattacatcaacagggagtattgtttgcactggatgattttg

SEQ ID NO: 171235 - DNA, 75 bp, synthetic construct
  source 1..75: mol_type = other DNA
gtacggtcattaccgccacggattattattttattcaggacatcatctctgtggttcatgcagttcctgcaatac

SEQ ID NO: 171236 - DNA, 75 bp, synthetic construct
  source 1..75: mol_type = other DNA
ccgctgagatgatgctgcgccaaatgggttggacggaagcggctgaccttattgttaaaggtatggaaggcgcaa

SEQ ID NO: 171237 - DNA, 75 bp, synthetic construct
  source 1..75: mol_type = other DNA
ggcagcctgagttcacagataaaacactctccaggaaacccggggcggttcactatatcagtattcgctatgaca

SEQ ID NO: 171238 - DNA, 75 bp, synthetic construct
  source 1..75: mol_type = other DNA
acagcaatatcacggggggtgggttactggcttaccgcgtggggtataactcttcaatgtattctgtttatctgc

SEQ ID NO: 171239 - DNA, 75 bp, synthetic construct
  source 1..75: mol_type = other DNA
aacctatgacttcgaacgtctgatggatggcgctaagctgctgaaatgttcagagtttggtgaggcgatcatcga

SEQ ID NO: 171240 - DNA, 75 bp, synthetic construct
  source 1..75: mol_type = other DNA
ccgctgagatgatgctgcgccagatgggttggacggaagcggctgacttgattgttaaaggtatggaaggcgcaa

SEQ ID NO: 171241 - DNA, 75 bp, synthetic construct
  source 1..75: mol_type = other DNA
ccgctgagatgatgctgcgccatatgggttggacggaagcggctgacatgattgttaaaggtatggaaggcgcaa

SEQ ID NO: 171242 - DNA, 75 bp, synthetic construct
  source 1..75: mol_type = other DNA
tgcaaaccgctggtatagatagcggtatgactaaaacaacatctattgcttctgggcatagtggtcaatggtcag

SEQ ID NO: 171243 - DNA, 75 bp, synthetic construct
  source 1..75: mol_type = other DNA
agccaaaccagaatcaagaaattatgtggacaacagatacttataataatggattttcatttgcttttagtgcgt

SEQ ID NO: 171244 - DNA, 75 bp, synthetic construct
  source 1..75: mol_type = other DNA
cctttataaatttcagaataatacttatgaatccgatttcattagaattaaccctacatttattgccaatggaat

SEQ ID NO: 171245 - DNA, 75 bp, synthetic construct
  source 1..75: mol_type = other DNA
tctgttgcatcagatctgactgtgggtggaacctctacccttaatggtccagtaaatatcaacaacaacctgaag

SEQ ID NO: 171246 - DNA, 75 bp, synthetic construct
  source 1..75: mol_type = other DNA
agcagcttatttttgatttacaagcagttcttagttttattgaacaaaaaaatgtaatcatttcaggagaacttg

SEQ ID NO: 171247 - DNA, 75 bp, synthetic construct
  source 1..75: mol_type = other DNA
aactcgaataactacgccactcaacagcagcttatttttgatttacaagcagttcttagttttattgaacaaaaa

SEQ ID NO: 171248 - DNA, 75 bp, synthetic construct
  source 1..75: mol_type = other DNA
gatggtccgagtgccggtattgccatgtgcaccgcgctggtttcttgcctgaccggtaacccggttcgtgccgat

SEQ ID NO: 171249 - DNA, 75 bp, synthetic construct
  source 1..75: mol_type = other DNA
tgtcggcagaagcgaccgtagtgcgtggttatatcgactggatggtacaggtgccgtggaatgcgcgtagcaagg

SEQ ID NO: 171250 - DNA, 75 bp, synthetic construct
  source 1..75: mol_type = other DNA
aaaccgtgtcggtcaggtaaccggtctggcgtggacggaagtgggtggtgacttgctgaccattgaaaccgcatg

SEQ ID NO: 171251 - DNA, 75 bp, synthetic construct
  source 1..75: mol_type = other DNA
ctattcaggcggcgttaacggtggttcgtgcgcgtgcggaaaaactggggatcaaccctgatttttacgaaaaac

SEQ ID NO: 171252 - DNA, 75 bp, synthetic construct
  source 1..75: mol_type = other DNA
taccattgctgcgcatatgccgctgaaactggctgacaaacagtccgtgcttgagatgtccgacgtcaacgaacg

SEQ ID NO: 171253 - DNA, 75 bp, synthetic construct
  source 1..75: mol_type = other DNA
tcgacgacccggcgcgtctggcggataccattgccgcgcatatgccgctgaaactggctgacaagcagtccgttc

SEQ ID NO: 171254 - DNA, 75 bp, synthetic construct
  source 1..75: mol_type = other DNA
ccggtcagcagataacgcgactgacagaattaccgccggcatacaacctgcaacgcagtgcacaactgctgcagc

SEQ ID NO: 171255 - DNA, 75 bp, synthetic construct
  source 1..75: mol_type = other DNA
cgatgacttctgacgtgaaactgaaaacaggtggtgacccccggtcagtgcctgattatgccgccctgcgcgatg

SEQ ID NO: 171256 - DNA, 75 bp, synthetic construct
  source 1..75: mol_type = other DNA
cgggctggaacgaaggcatgacccgcttacagcagctggctgagcgcctgaaccgtctggatgaacagcggggaa

SEQ ID NO: 171257 - DNA, 75 bp, synthetic construct
  source 1..75: mol_type = other DNA
tggaaagaatacagaccgtccacaactaaaggctatgctcgattatgttcgtgaaggtgacactatccatgtaca

SEQ ID NO: 171258 - DNA, 75 bp, synthetic construct
  source 1..75: mol_type = other DNA
ggataccactgttccgggtcaggtttcctgccgggtttcacaggacgtttactcagctgatggactcgttaggct

SEQ ID NO: 171259 - DNA, 75 bp, synthetic construct
  source 1..75: mol_type = other DNA
agacaggtctggagtactggaaacccaagggctacgggtacaccaagagccgcgaggaggcgggggttttcaccc

SEQ ID NO: 171260 - DNA, 75 bp, synthetic construct
  source 1..75: mol_type = other DNA
gaaaccgttctcaatttaccggatatccccggtggtaaaaaactcatttacaacggcgttaccatgccgctcacc

SEQ ID NO: 171261 - DNA, 75 bp, synthetic construct
  source 1..75: mol_type = other DNA
tgcaaccgtcgtttatggtgacgcatatcggtggcctggatgcagtgccagaaaccgttctcaatttaccggata

SEQ ID NO: 171262 - DNA, 75 bp, synthetic construct
  source 1..75: mol_type = other DNA
gagcgatccagtccagacgctgcggacgctgacaggagatgccgggttcgatgacgtgtttgtctatgcggcggt

SEQ ID NO: 171263 - DNA, 75 bp, synthetic construct
  source 1..75: mol_type = other DNA
gccttcagtcgtcgagatggctgatgaattactggcggaagatggctgcctgaacttctttgccgggccgacgga

SEQ ID NO: 171264 - DNA, 75 bp, synthetic construct
  source 1..75: mol_type = other DNA
ggcgcggctggttgaggaaacgcacggcatctggaatgagcaggccgagaaatatctgctggcgcaatttggcgt

SEQ ID NO: 171265 - DNA, 75 bp, synthetic construct
  source 1..75: mol_type = other DNA
aaacctggcggcaatattgcactgctggcgtgtgcgggtccgatgggcattggcgctatcgattacgccattaac

SEQ ID NO: 171266 - DNA, 75 bp, synthetic construct
  source 1..75: mol_type = other DNA
atggctggatggataaatcaaagaatgtctaatgctattagtatttgggctaatggtggatattttgatatccca

SEQ ID NO: 171267 - DNA, 75 bp, synthetic construct
  source 1..75: mol_type = other DNA
atggctggatggataaatcaaagaatgtcaaacgctattagtatttgggctaatggtggatattttgatatcccc

SEQ ID NO: 171268 - DNA, 75 bp, synthetic construct
  source 1..75: mol_type = other DNA
ctggcgtggacggaagtcggcggcgacttgctgaccattgaaaccgcgtgcgtcccgggcaaaggtaaactgacc

SEQ ID NO: 171269 - DNA, 75 bp, synthetic construct
  source 1..75: mol_type = other DNA
atcacggctcttattttgctgcggcctcgctggcggaaccgatgtgctgcattattggcgcttatcatgccaatt

SEQ ID NO: 171270 - DNA, 75 bp, synthetic construct
  source 1..75: mol_type = other DNA
atgatgtttttgtctatgcggcggtgccttcggtcgttgagatggctgatgaattgctggcggaagatggttgtc

SEQ ID NO: 171271 - DNA, 75 bp, synthetic construct
  source 1..75: mol_type = other DNA
acgatgagcttctgtcaacattatcatatgactcagaaacaggaatatttaaatggctaaaaacaaattcagtag

SEQ ID NO: 171272 - DNA, 75 bp, synthetic construct
  source 1..75: mol_type = other DNA
acgattgcattcagggacattatgtctgggaatggtgcgaccacgggatccaggcgcaggatgacaacggcaatg

SEQ ID NO: 171273 - DNA, 75 bp, synthetic construct
  source 1..75: mol_type = other DNA
agcaatggtcggcagagtctccttatctttaccatctggtcatgacgctgaaagacgccgacggcaacattctgg

SEQ ID NO: 171274 - DNA, 75 bp, synthetic construct
  source 1..75: mol_type = other DNA
acagtgaccaaggattcccacacccgctacagcgacgccgggcaccctatcgccacttatcagttcccgctgaag

SEQ ID NO: 171275 - DNA, 75 bp, synthetic construct
  source 1..75: mol_type = other DNA
agatgacgatgtcgatatgctggtgattttaaccgcctgttattttcacgatattgtgagcctggcgaaaaatca

SEQ ID NO: 171276 - DNA, 75 bp, synthetic construct
  source 1..75: mol_type = other DNA
gtcgatgccatgttcgagaactatcccttcccgcagaacaacggcaaccgtcagcatgtccgctggacggcactg

SEQ ID NO: 171277 - DNA, 75 bp, synthetic construct
  source 1..75: mol_type = other DNA
ttctgtcttgatggtttgatctattccgatcagacgccgggaccaggcctgaaagagtacaaacaggttatcgcg

SEQ ID NO: 171278 - DNA, 75 bp, synthetic construct
  source 1..75: mol_type = other DNA
cagccggtgctggcgcgcgcacgtgagaaagtcgaaaccgattttaatcagcaggtgattaaccggcagcttgcc

SEQ ID NO: 171279 - DNA, 75 bp, synthetic construct
  source 1..75: mol_type = other DNA
atctcagtggcccgcctgacggagaaaaaaggtctgcatgtagcgattgaagcctgccgtcagttgaaagagcgc

SEQ ID NO: 171280 - DNA, 75 bp, synthetic construct
  source 1..75: mol_type = other DNA
tgtgggcgaaacgattgcagggaatgggctgcccggcggcgaaaattgccgtttcgcgaatgggcgtcaacatgg

SEQ ID NO: 171281 - DNA, 75 bp, synthetic construct
  source 1..75: mol_type = other DNA
cgcgtttttacgaactgtgtgatatctacggcctgtttgtgatggcggaaaccgacgtcgaatcgcacggctttg

SEQ ID NO: 171282 - DNA, 75 bp, synthetic construct
  source 1..75: mol_type = other DNA
actgcgactcactgctgtggtagccaatgaactggagatcatggacggtaaatttaccggcaatgtgatcggtga

SEQ ID NO: 171283 - DNA, 75 bp, synthetic construct
  source 1..75: mol_type = other DNA
gacctgccgatgatcaaagcagcagggctggggattgcctaccatgccaagccaaaagtgaatgaaaagacggaa

SEQ ID NO: 171284 - DNA, 75 bp, synthetic construct
  source 1..75: mol_type = other DNA
tttcctagagtcaatggggcacattgtccgctctaacggttatgtcattttaaacaaaggagccattgccaactt

SEQ ID NO: 171285 - DNA, 75 bp, synthetic construct
  source 1..75: mol_type = other DNA
cacggtattgatatctccagtcgggaagtgctcaaccactacactcccgaatatcagcaactgtttcgccgtggc

SEQ ID NO: 171286 - DNA, 75 bp, synthetic construct
  source 1..75: mol_type = other DNA
caggtggagtttatggctaaactcagcgctgaactggcgggcgagaatgaaggtgtggatcatgacgtgattcgt

SEQ ID NO: 171287 - DNA, 75 bp, synthetic construct
  source 1..75: mol_type = other DNA
gcgcgttggaacataatatccgtcgacaaaaatatgcccgattcacgccgcggtcccaaccgcttccgtcggaaa

SEQ ID NO: 171288 - DNA, 75 bp, synthetic construct
  source 1..75: mol_type = other DNA
gcgcgctggaacgcaatatccgtcggcaaaaatatgcccgcttcacgccgacgccccaaccgcgtccgtcggcaa

SEQ ID NO: 171289 - DNA, 75 bp, synthetic construct
  source 1..75: mol_type = other DNA
gtgcggacggtgatatggaaggtattccggtggcactaatggaagcgatggcggtcggcattccagtagtttcca

SEQ ID NO: 171290 - DNA, 75 bp, synthetic construct
  source 1..75: mol_type = other DNA
ctggttgagtttatggccaggttaagcgcggagttgtcaggtgaatatgagaagatagaccacgacgtgattcgt

SEQ ID NO: 171291 - DNA, 75 bp, synthetic construct
  source 1..75: mol_type = other DNA
tccgccagagaaaatagatgccgtttgccatgctattgctgcgcacagtttcagcgcacaaatcgcgcctttaac

SEQ ID NO: 171292 - DNA, 75 bp, synthetic construct
  source 1..75: mol_type = other DNA
tccggcggagaaaatcgaggccgtttgtcatgccattgccgctcacagtttcagcgcgcaaatcgcccccttaac

SEQ ID NO: 171293 - DNA, 75 bp, synthetic construct
  source 1..75: mol_type = other DNA
actaagctgctgaaactaccgcaaactatgcaaacgacaaaaggtaaacaactggcgcaacacaacgcccgtttt

SEQ ID NO: 171294 - DNA, 75 bp, synthetic construct
  source 1..75: mol_type = other DNA
agatgaagacgtcgatatgctggtcattttaaccgcctgttattttcatgatgtcgtgagtctggcgaaaaatca

SEQ ID NO: 171295 - DNA, 75 bp, synthetic construct
  source 1..75: mol_type = other DNA
ttagtcgagtttatggcgaagctcagtgccgagctggcgggggagaatgaaggtatcgatcacaaggtgattgat

SEQ ID NO: 171296 - DNA, 75 bp, synthetic construct
  source 1..75: mol_type = other DNA
attcctgccggtacacgctggcagcgtgctgatggtgtggtttacagcctggctgatgccattgtgattgaccgt

SEQ ID NO: 171297 - DNA, 75 bp, synthetic construct
  source 1..75: mol_type = other DNA
gaatattgaacagcgcctgccgggtagctggcctcaggcccgtgaaaaaacgctgagtgccattgcttatgctca

SEQ ID NO: 171298 - DNA, 75 bp, synthetic construct
  source 1..75: mol_type = other DNA
attttgaagtgcgcagtccgctgacgtcagttcaggcgggagacagtgagctgctgacggtgggagaaatcacat

SEQ ID NO: 171299 - DNA, 75 bp, synthetic construct
  source 1..75: mol_type = other DNA
gccgatgaacgtctgcaatttacccgtggtttgtgtgctgatgatgagccggaagcgtggctgcgtaacgatcat

SEQ ID NO: 171300 - DNA, 75 bp, synthetic construct
  source 1..75: mol_type = other DNA
tggccgatctcgaccgcaaccagtttctcgatgcctctctgacgctggcgcgccacccttcagaaacccaggagc

SEQ ID NO: 171301 - DNA, 75 bp, synthetic construct
  source 1..75: mol_type = other DNA
acgctgcaggcaacgattcaggatggcgtgatctggttatcggacgataagaataatctggaagttaacttaacc

SEQ ID NO: 171302 - DNA, 75 bp, synthetic construct
  source 1..75: mol_type = other DNA
ccgttcacgacagcccgccccgccagggggacgcccggaaaaggcataagcaggagaacaacaaaacagacagta

SEQ ID NO: 171303 - DNA, 75 bp, synthetic construct
  source 1..75: mol_type = other DNA
ttgttccctccggtattcaccatcacccgtttgagaaccttcgccgcaaggggcatcactgccacggccggaaac

SEQ ID NO: 171304 - DNA, 75 bp, synthetic construct
  source 1..75: mol_type = other DNA
ccctggacagtcagtgcggcaggttgtggctgtatcagcccccggcgacagggactcatacgggtgtgtggcacc

SEQ ID NO: 171305 - DNA, 75 bp, synthetic construct
  source 1..75: mol_type = other DNA
tatatccgcagtcatgatgatccggcgaccggccagcctgtcggacagcctctggggccgacggtgaccgtgttt

SEQ ID NO: 171306 - DNA, 75 bp, synthetic construct
  source 1..75: mol_type = other DNA
gggcatcactgccacggcctgacgcacctgtccggggcagaacgcaaaattttttaccgggttttgggtaaaaaa

SEQ ID NO: 171307 - DNA, 75 bp, synthetic construct
  source 1..75: mol_type = other DNA
tcatgaacaacgaaaccttcgaacaactgtctgctgatgcaaaagcaattggcgacaacgcgaaatggctgctgg

SEQ ID NO: 171308 - DNA, 75 bp, synthetic construct
  source 1..75: mol_type = other DNA
caatatgacctggcagcgaaaacacgctggttacaggatgaaccagtgagtacgggcgcaaagtttcgtcatcgc

SEQ ID NO: 171309 - DNA, 75 bp, synthetic construct
  source 1..75: mol_type = other DNA
gcgcccttatccgaccacttcgcagccggacatggttcgccaggtggggagtggcaagaacttcccgggcgacgc

SEQ ID NO: 171310 - DNA, 75 bp, synthetic construct
  source 1..75: mol_type = other DNA
cagacaaggtgaaggggatctatgtgcgcccttatccgaccacttcgcagccggacatggttcgccaggtgggga

SEQ ID NO: 171311 - DNA, 75 bp, synthetic construct
  source 1..75: mol_type = other DNA
tgacgggaagatcgccacgatcttccacggcattgatatctccagccgtgaagtgctgaaccactacacgccgga

SEQ ID NO: 171312 - DNA, 75 bp, synthetic construct
  source 1..75: mol_type = other DNA
aagtgctcaagcgttatacgactgaatatcaacagcttttccgccgtggcgatttaatgctcccgataagcaatc

SEQ ID NO: 171313 - DNA, 75 bp, synthetic construct
  source 1..75: mol_type = other DNA
aatttccgttgtcgtcggaaacgtttgtccttaatcagatcaccgccttcatcgatatgggatttgaagtagaga

SEQ ID NO: 171314 - DNA, 75 bp, synthetic construct
  source 1..75: mol_type = other DNA
gaatatctcccgctatggcgcggagtcgcgcaatttgatcctgtcggccatctgtgggcaaacggcgcagccgta

SEQ ID NO: 171315 - DNA, 75 bp, synthetic construct
  source 1..75: mol_type = other DNA
gtgccaatcgctgcgagcgatacagcgtcggtgctggtgggcatttacgttcgtccgtatccgaccgccagccag

SEQ ID NO: 171316 - DNA, 75 bp, synthetic construct
  source 1..75: mol_type = other DNA
gatggtgtgatctggttatcggatgataagaataatctggaagtgaacttaaccgcctggcaacaaccttcatga

SEQ ID NO: 171317 - DNA, 75 bp, synthetic construct
  source 1..75: mol_type = other DNA
catgaaacgtggctacatgaccgttaaccttggatctggcttcgatgccagcaccatcaaaaaaggtgatcctgt

SEQ ID NO: 171318 - DNA, 75 bp, synthetic construct
  source 1..75: mol_type = other DNA
cgcaatgaagcgtggctacgtgaccgttaatctcggttctgattttgataccagcaccatcaaaaaaggcgatcc

SEQ ID NO: 171319 - DNA, 75 bp, synthetic construct
  source 1..75: mol_type = other DNA
gcgttaacccgacattgggcacaaactcaaaaatggaattcaggactaatactgacaaatgatatccagttagta

SEQ ID NO: 171320 - DNA, 75 bp, synthetic construct
  source 1..75: mol_type = other DNA
cgaccccggtcccagaggtgagcgtggagaaaccgggccgatggggccgccgggggcatcaggagatgacgggaa

SEQ ID NO: 171321 - DNA, 75 bp, synthetic construct
  source 1..75: mol_type = other DNA
atgacgaaacatgccaggtttttcctcctgccctcctttatcatcatctccgcagcattaattgcgggttgtaac

SEQ ID NO: 171322 - DNA, 75 bp, synthetic construct
  source 1..75: mol_type = other DNA
ttgtcagcggtctgcaaaaagcgcgtccgggagaacaggttaaaaccacgaccgatacccccgcagatactgcgt

SEQ ID NO: 171323 - DNA, 75 bp, synthetic construct
  source 1..75: mol_type = other DNA
atggacaaagcggacggatgcctggagaaagcgaaaaacggtgacgatatcccggataaggtgaagtttctgaac

SEQ ID NO: 171324 - DNA, 75 bp, synthetic construct
  source 1..75: mol_type = other DNA
agtgatactggcagtaatgacgaaacaaaggcagccacgccgaaggccgtgaaggcggcaatggatgtggcaaat

SEQ ID NO: 171325 - DNA, 75 bp, synthetic construct
  source 1..75: mol_type = other DNA
agtttgttgcctggctgaaagaaaaaggggcatttgaccagccttactggatgatgaaggcatcactgcctgcgg

SEQ ID NO: 171326 - DNA, 75 bp, synthetic construct
  source 1..75: mol_type = other DNA
tccgcgcgggtgaaatcaacctggctgatatgtttactgacaaaggcgaatggatatccctggaacgtcttaagc

SEQ ID NO: 171327 - DNA, 75 bp, synthetic construct
  source 1..75: mol_type = other DNA
gccagtcagaccttacgcggcattcatcgtaaaaatacctggcaggcgctcaacctcaaacgctatggtgccgag

SEQ ID NO: 171328 - DNA, 75 bp, synthetic construct
  source 1..75: mol_type = other DNA
caaagtggcgaaactgcgccaccgtgccagccagaccttacgcggcattcatcgtaaaaatacctggcaggcgct

SEQ ID NO: 171329 - DNA, 75 bp, synthetic construct
  source 1..75: mol_type = other DNA
ggcctgcaaaaagcgcgtccgggagagcaggttaaagccactaccgatacccccgcagatactgcatcgaagtaa

SEQ ID NO: 171330 - DNA, 75 bp, synthetic construct
  source 1..75: mol_type = other DNA
atcctatctacgtcgacgttactcaatccagcaacgatttcatgaggctgaagcaatccgtagagcaagggaatt

SEQ ID NO: 171331 - DNA, 75 bp, synthetic construct
  source 1..75: mol_type = other DNA
tgaaaattgtgacgcgacaatcctctccacaccaaagctgggtgctgatgaatcccctaatgatttttatcaaaa

SEQ ID NO: 171332 - DNA, 75 bp, synthetic construct
  source 1..75: mol_type = other DNA
aaagttgcgcagtttttatcgcgtgaagggattcgcaatttccttgcccgtctcgacattgacgaatcagcataa

SEQ ID NO: 171333 - DNA, 75 bp, synthetic construct
  source 1..75: mol_type = other DNA
agggagacacggggccacagggtattcccgggccaaaaggcgataccggcgagcgggggccaaagggtgagcgtg

SEQ ID NO: 171334 - DNA, 75 bp, synthetic construct
  source 1..75: mol_type = other DNA
aacatataacgctgcgattgtccgtgtgaccatcggggaatacgccgcaacggggtttctcaacggaacggtctg

SEQ ID NO: 171335 - DNA, 75 bp, synthetic construct
  source 1..75: mol_type = other DNA
ggcatcactgcttgcggaatttaataaggtcatcacggatgtcggaccgggaaaactcaatctgggaggctgcgc

SEQ ID NO: 171336 - DNA, 75 bp, synthetic construct
  source 1..75: mol_type = other DNA
caggccgcttcaggtgacatttgatggttctcagtggcgtacagtcagcgtgggtgagtatgtgtcgtcaggagc

SEQ ID NO: 171337 - DNA, 75 bp, synthetic construct
  source 1..75: mol_type = other DNA
aacaaaggcagaagaggctgctgcaggaggtggtgttcccggtccgaaaggagataaaggggacacggggccagc

SEQ ID NO: 171338 - DNA, 75 bp, synthetic construct
  source 1..75: mol_type = other DNA
tgaattttacaccgataaaggtgaatggttgacgctgggacaactccgtgagcgtgatgctcaggcattcagaaa

SEQ ID NO: 171339 - DNA, 75 bp, synthetic construct
  source 1..75: mol_type = other DNA
gtcttatgccaggcaaaaacaaatagtgggaggaacacgggcaaaactgattcgtgatggaggtatgtcaccaga

SEQ ID NO: 171340 - DNA, 75 bp, synthetic construct
  source 1..75: mol_type = other DNA
agctaatgcgggcagtattgcaaaaacagcggttgggcatcttgctgctactgcccgtgagagtttcgccatggc

SEQ ID NO: 171341 - DNA, 75 bp, synthetic construct
  source 1..75: mol_type = other DNA
tccgcgttgctggatcagagtatccgttatgcgaagtatattctcataagtagacacggctttacctgttatgta

SEQ ID NO: 171342 - DNA, 75 bp, synthetic construct
  source 1..75: mol_type = other DNA
aaggtgagcgcggtgaaccgggaccgatggggcctccggggaaagatggcgcaacttcgctggttggtgggctgc

SEQ ID NO: 171343 - DNA, 75 bp, synthetic construct
  source 1..75: mol_type = other DNA
aatttggggccggggagtttcaccgttacgcgtctggaatcacttctggtgagtgtgagggaagttaaccgcact

SEQ ID NO: 171344 - DNA, 75 bp, synthetic construct
  source 1..75: mol_type = other DNA
tcgcggaacctgattttgtctgccatttgtggtcaggtcgcaacaccgtttcatgctgatgtgtttatcgcacat

SEQ ID NO: 171345 - DNA, 75 bp, synthetic construct
  source 1..75: mol_type = other DNA
cgcgaaaaagtcgaacacgattttaaccagcaggtgatcaatcgagaactcgccagcttgctgcaagctttatag

SEQ ID NO: 171346 - DNA, 75 bp, synthetic construct
  source 1..75: mol_type = other DNA
aaactacatccgcatcctgacgggcgacaaagtgactgttgaactgaccccgtacgacctgagcaaaggccgcat

SEQ ID NO: 171347 - DNA, 75 bp, synthetic construct
  source 1..75: mol_type = other DNA
gagccgggatataacccggcgctagccacaagaaaagtcgttgtccgggtaagtcgttcgcgactgaaccttgag

SEQ ID NO: 171348 - DNA, 75 bp, synthetic construct
  source 1..75: mol_type = other DNA
ctggggcataaatctccccagcaaacagccagataccatgatgatagaggcaaggattggataaaaattattaat

SEQ ID NO: 171349 - DNA, 75 bp, synthetic construct
  source 1..75: mol_type = other DNA
atgtatcagtacctaacctttatccactctatagtcggaaggtcaataaagtttattggaggtacaaacaccctg

SEQ ID NO: 171350 - DNA, 75 bp, synthetic construct
  source 1..75: mol_type = other DNA
atggcccaggtcgtaaggtctgtattgatcgatgtgtttaaggaagcacagcattacggcgaagttccaccaggg

SEQ ID NO: 171351 - DNA, 75 bp, synthetic construct
  source 1..75: mol_type = other DNA
gttaaatccaatacattgaccatgaatttcagtaaagcaagggatttggcaggaatcgactggggggatggatcg

SEQ ID NO: 171352 - DNA, 75 bp, synthetic construct
  source 1..75: mol_type = other DNA
tggctgagcaaagaacccggcaggttctagctatcagtgataggatcgcaaccagcaaaggaaaaactataacaa

SEQ ID NO: 171353 - DNA, 75 bp, synthetic construct
  source 1..75: mol_type = other DNA
atgtctgaccgtgccactaccacagcttccttaacgttcgagtcgctttatggcacccatcacggctggttgaaa

SEQ ID NO: 171354 - DNA, 75 bp, synthetic construct
  source 1..75: mol_type = other DNA
gagtttacgcgatgtagtagtccgctgccgtgattatgcagtcagtccatacttagtgcattttttccgttcaac

SEQ ID NO: 171355 - DNA, 75 bp, synthetic construct
  source 1..75: mol_type = other DNA
ttcacaggctgaacgtggcgcgcaggttaaatccaatacattgacgacgaattttagtagagcgagagatttggc

SEQ ID NO: 171356 - DNA, 75 bp, synthetic construct
  source 1..75: mol_type = other DNA
cacggcattgatatttccagtcgggaagtgctcaaccattacactcccgaatatcagcaactgttccgccgtggc

SEQ ID NO: 171357 - DNA, 75 bp, synthetic construct
  source 1..75: mol_type = other DNA
tttgtggtcaggtcgcaacaccgtttcgcgccgatgtgttcatcgctcattttggcccggcgggggtaaccgcag

SEQ ID NO: 171358 - DNA, 75 bp, synthetic construct
  source 1..75: mol_type = other DNA
agcgcccgcaacgccgctggaaatcatctccgtcgcacgcttaaccgagaaaaaaggcctgcatgtggcgattga

SEQ ID NO: 171359 - DNA, 75 bp, synthetic construct
  source 1..75: mol_type = other DNA
gtgctgggcgttacccgcgccatgatacttcgggacggcaaaatcaccgtgccggagatgttcaacgatgccggg

SEQ ID NO: 171360 - DNA, 75 bp, synthetic construct
  source 1..75: mol_type = other DNA
gaaatcctgattaccaaatcgtgggaggagttgcagatagcctctggcgagctgagcactgccacacgcgccgct

SEQ ID NO: 171361 - DNA, 75 bp, synthetic construct
  source 1..75: mol_type = other DNA
aagtgctcaaccactacactcccgaatatcaacaactgtttcgccgtggcgacctgatgctaccgataagcgatc

SEQ ID NO: 171362 - DNA, 75 bp, synthetic construct
  source 1..75: mol_type = other DNA
taagaaatctcagtttgacaatctactaactatacatcatacacatcaggagtgctggattttaaactcacgtcc

SEQ ID NO: 171363 - DNA, 75 bp, synthetic construct
  source 1..75: mol_type = other DNA
taattaatatgcatgcagagtgtaataaactcatggcactggcttcttcggggacagggaattggataattgata

SEQ ID NO: 171364 - DNA, 75 bp, synthetic construct
  source 1..75: mol_type = other DNA
aagagtcctctggaagaactgaaagccaacaaacctgacgaatacaacaagatgattggcaacatcgtctggaag

SEQ ID NO: 171365 - DNA, 75 bp, synthetic construct
  source 1..75: mol_type = other DNA
tgtgggccggaaggctgcaaaaaatgggctgcccgagggaaaaaattgccgtatcgcgtatgggtgtggacatga

SEQ ID NO: 171366 - DNA, 75 bp, synthetic construct
  source 1..75: mol_type = other DNA
tatgttgaccggtatttccacccctgtacgtctcaccacctatatggtcgtggaaagccttggtggtgagttcat

SEQ ID NO: 171367 - DNA, 75 bp, synthetic construct
  source 1..75: mol_type = other DNA
gttcaaagaggcatacatcaatgcctttaaccagatggagaagagtttatcaggtgccgatgcgtctgatatgtc

SEQ ID NO: 171368 - DNA, 75 bp, synthetic construct
  source 1..75: mol_type = other DNA
atcacacatccgcactttggcgataaaccggtaacggtgttcgctcttagggtaaataacagcactgaatgtcaa

SEQ ID NO: 171369 - DNA, 75 bp, synthetic construct
  source 1..75: mol_type = other DNA
atcacacatccgcactttggcgataaaccggtaacggtgttcgctcttaaggtaaatagcagcactgaatgtcaa

SEQ ID NO: 171370 - DNA, 75 bp, synthetic construct
  source 1..75: mol_type = other DNA
atcacacatccgcactttggcgataaaccggtaatggtgttcgctcttacggtaaatatcagcactgaatgtcaa

SEQ ID NO: 171371 - DNA, 75 bp, synthetic construct
  source 1..75: mol_type = other DNA
tgaaatcaagacaatcacacatccgcacttcggtgataaaccggtaaaggtatacgcgataaaggtaaatattga

SEQ ID NO: 171372 - DNA, 75 bp, synthetic construct
  source 1..75: mol_type = other DNA
atcacacatccgcactttggcgataaaccggtaagggtgttcgctcttacggtaaataacagcactgaatgtcaa

SEQ ID NO: 171373 - DNA, 75 bp, synthetic construct
  source 1..75: mol_type = other DNA
atcacacatccgcactttggcgataaaccggtaagggtgttcgctcttaaggtaaataccagcactgaatgtcaa

SEQ ID NO: 171374 - DNA, 75 bp, synthetic construct
  source 1..75: mol_type = other DNA
tgggctatgagacggtggataccgggaaaaatggcctgtgggagattaaaggtgttccggtcgatattttctcaa

SEQ ID NO: 171375 - DNA, 75 bp, synthetic construct
  source 1..75: mol_type = other DNA
caggaggcagaaaaagccgtcagggaaaccctgcagcaggatgaaacgcggaacatcctgccggcagagagtgag

SEQ ID NO: 171376 - DNA, 75 bp, synthetic construct
  source 1..75: mol_type = other DNA
caggctatctccctgctgagcgaccgcagggcacagtttacctactccgacgttctgagcagggtgctggcactg

SEQ ID NO: 171377 - DNA, 75 bp, synthetic construct
  source 1..75: mol_type = other DNA
atcacacatccgcactttggcgataaaccggtaaaggtgttcgctcttagggtaaataccagcactgaatgtcaa

SEQ ID NO: 171378 - DNA, 75 bp, synthetic construct
  source 1..75: mol_type = other DNA
atcacacatccgcactttggcgataaaccggtaaaggtgttcgctcttacggtaaatagcagcactgaatgtcaa

SEQ ID NO: 171379 - DNA, 75 bp, synthetic construct
  source 1..75: mol_type = other DNA
actggtctgacgtcaggccagcaggcagccagccggctgattcttgaaagcacggaccgttttgtggccattcag

SEQ ID NO: 171380 - DNA, 75 bp, synthetic construct
  source 1..75: mol_type = other DNA
ggagtccatctacggcgaagaaagctggagtgctaatccctgggtttgggtaatcgagtttgagcgtattcagta

SEQ ID NO: 171381 - DNA, 75 bp, synthetic construct
  source 1..75: mol_type = other DNA
tggtcgatacccgatgatgccgactggaaacctcacactgtgaatgaaaagtttgatggtgggtggcgtccatca

SEQ ID NO: 171382 - DNA, 75 bp, synthetic construct
  source 1..75: mol_type = other DNA
cagactcgccgacctgtaaaaaatgtcagggctgataactgcctggttatccgtaaaccgacaaagaaacgcaat

SEQ ID NO: 171383 - DNA, 75 bp, synthetic construct
  source 1..75: mol_type = other DNA
cccacaatgggctgcggatcagattttttatcagatcttccctgatcgtttcgcccgtaatcttcctcgtgaagc

SEQ ID NO: 171384 - DNA, 75 bp, synthetic construct
  source 1..75: mol_type = other DNA
cgataacgaagaaatgtcagtaccgatgcataagcagcgcagtcagccgcagcctggcgtcaccgcatggcgggc

SEQ ID NO: 171385 - DNA, 75 bp, synthetic construct
  source 1..75: mol_type = other DNA
gctgcgtgatatgagcgaggcagatgctaacgcagaaggcgcatctccggcgatgtacaaaattacgccgccgga

SEQ ID NO: 171386 - DNA, 75 bp, synthetic construct
  source 1..75: mol_type = other DNA
tccgtatgacggatatgaagtgaagacaatcacacatccgcacttcggtgataaaccggtaaaggtatacgcgat

SEQ ID NO: 171387 - DNA, 75 bp, synthetic construct
  source 1..75: mol_type = other DNA
cgcctgtgtaatgactactggaataagcgaattatgttccgggagtatgaccgcctgattatcacaaagggatat

SEQ ID NO: 171388 - DNA, 75 bp, synthetic construct
  source 1..75: mol_type = other DNA
cagacccttaacactggctcaggaagctcgtcaggctctggttcaggcggcggcactgccactcccccaccagca

SEQ ID NO: 171389 - DNA, 75 bp, synthetic construct
  source 1..75: mol_type = other DNA
tgaaatcaagacaatcacacatccgcacttcggtgataaaccggtaaaggtattcgcgataaaggtgaatatcgg

SEQ ID NO: 171390 - DNA, 75 bp, synthetic construct
  source 1..75: mol_type = other DNA
aggagcgtggacaaaatcagatacattgtggaatgcaaaaactggggtagttctataccacagacggtggtccat

SEQ ID NO: 171391 - DNA, 75 bp, synthetic construct
  source 1..75: mol_type = other DNA
tgaaatcaagacaatcacacatccgcacttcggcgataaaccggtaaaggtgttcgctataaaggtgaatatcga

SEQ ID NO: 171392 - DNA, 75 bp, synthetic construct
  source 1..75: mol_type = other DNA
atgccagccgtatcgaagatatctggcaattcttttataaaggcgcttactggcgacgtggccccgtcacgatgt

SEQ ID NO: 171393 - DNA, 75 bp, synthetic construct
  source 1..75: mol_type = other DNA
cggacgattgatgaagtccttgaagactatgcaaagcaccagcagatgggctttaaggcgattcgtgtgcagtgt

SEQ ID NO: 171394 - DNA, 75 bp, synthetic construct
  source 1..75: mol_type = other DNA
catgacatgcaccatcgcttaacgcctattgaagcggcgagctttggtaagagcattgaagattatcgcatgttc

SEQ ID NO: 171395 - DNA, 75 bp, synthetic construct
  source 1..75: mol_type = other DNA
gcaggtgaatgctggtttgaatcatcttttcggggtgcctattaatgaaacggtgcaggtgattctaatcgttgt

SEQ ID NO: 171396 - DNA, 75 bp, synthetic construct
  source 1..75: mol_type = other DNA
ccgccgtattcccggatgtcgccgacaaaaattttaaactacttcagcaacaaatcttcacgaatgccagctggt

SEQ ID NO: 171397 - DNA, 75 bp, synthetic construct
  source 1..75: mol_type = other DNA
ccatcgcggtgggtgaagtcttcaacagcatctgggactgcaagcaactgattgaagagcaacttatcgattata

SEQ ID NO: 171398 - DNA, 75 bp, synthetic construct
  source 1..75: mol_type = other DNA
cacagtattgatgaagctctggatgattatgcccgtcatcaggagctgggattcaaagccatccgcgtgcagtgc

SEQ ID NO: 171399 - DNA, 75 bp, synthetic construct
  source 1..75: mol_type = other DNA
aaacagatgcagatggaatatcgctatgatgatcagggttatccgctgggtaaaaccacgaaaagtaacgacaaa

SEQ ID NO: 171400 - DNA, 75 bp, synthetic construct
  source 1..75: mol_type = other DNA
tgccgaatttcggcattcaggagtatatgggctattcagaacaaatgcttgaagtcttcccgcacaactggagct

SEQ ID NO: 171401 - DNA, 75 bp, synthetic construct
  source 1..75: mol_type = other DNA
gccggtatcattaaaccgggtatttacccgctttacttatctaaagggccggataaggcgaatgcttataacggg

SEQ ID NO: 171402 - DNA, 75 bp, synthetic construct
  source 1..75: mol_type = other DNA
gggtgagttgggaaaccgatgataatggcttcgtgattaaagccagcagcaaacaaatgcagatggaatatcgct

SEQ ID NO: 171403 - DNA, 75 bp, synthetic construct
  source 1..75: mol_type = other DNA
gtgaaatacaaattactgccatgcttactcgcgatattactcacaggatgtgaccgcacagaggtaactctttca

SEQ ID NO: 171404 - DNA, 75 bp, synthetic construct
  source 1..75: mol_type = other DNA
ttgatgcgctttatgacaacaaaattgcgctggggcagatttatcgtcatgcactccgccatcaggttgaggcga

SEQ ID NO: 171405 - DNA, 75 bp, synthetic construct
  source 1..75: mol_type = other DNA
tgaaatcaagacaatcacacatccccacttcggcgataaaccggtaaaggtatacgcgataaaggtgaatatcgg

SEQ ID NO: 171406 - DNA, 75 bp, synthetic construct
  source 1..75: mol_type = other DNA
tctggggtatcttcgagtctccaagctcggtggaatccgttggtggttggaaagagtggcagagctatttcagct

SEQ ID NO: 171407 - DNA, 75 bp, synthetic construct
  source 1..75: mol_type = other DNA
tgatgaaagacattgtgcgtcagtcaccggaactgcgaccggcggtgtatgcgctgctggaagggcgtaccggcg

SEQ ID NO: 171408 - DNA, 75 bp, synthetic construct
  source 1..75: mol_type = other DNA
gctgttgtggcgatggcagaaggtcagggacggcaggtgcaggtgatggcaccggacaggaagatgaccgctttt

SEQ ID NO: 171409 - DNA, 75 bp, synthetic construct
  source 1..75: mol_type = other DNA
gcagggcgcagtttacctactccgatgttctgagcaggacgctggcactggtggaggctgaaccgggcagtattg

SEQ ID NO: 171410 - DNA, 75 bp, synthetic construct
  source 1..75: mol_type = other DNA
ccttgcgggagggctgagcgcgctgcaaacggtgacaatagcaagtgcattacccttctccgtgatcttgctgat

SEQ ID NO: 171411 - DNA, 75 bp, synthetic construct
  source 1..75: mol_type = other DNA
ttcaatttcctggagcatttcccgttctcctccgtgctgtcatttattgcaatggctatggtcatcgtcttcttt

SEQ ID NO: 171412 - DNA, 75 bp, synthetic construct
  source 1..75: mol_type = other DNA
gtggatgacggtgtttggaaacagcgccatctatctcatcatgaaccagggcgccactgacctcgccaataccgt

SEQ ID NO: 171413 - DNA, 75 bp, synthetic construct
  source 1..75: mol_type = other DNA
tcgaggaaggttatatgcacccaggcgatgaaccggggctgggtactgatgaatcccctaatgattttggtaaaa

SEQ ID NO: 171414 - DNA, 75 bp, synthetic construct
  source 1..75: mol_type = other DNA
cgatgaaccggggctgggtatttctttcgatgagaaactggcggcgaaatatccgtatgacccggcgtatctccc

SEQ ID NO: 171415 - DNA, 75 bp, synthetic construct
  source 1..75: mol_type = other DNA
atttctttcgatgagaaactggcggcgaaatatccgtatgacccggcgtatctccccgtcgcacgactggaagat

SEQ ID NO: 171416 - DNA, 75 bp, synthetic construct
  source 1..75: mol_type = other DNA
gtttccggcaaactggtcctgcttgagccccgggaggaaaataatccaccacagaatacgggccccatcgaaacc

SEQ ID NO: 171417 - DNA, 75 bp, synthetic construct
  source 1..75: mol_type = other DNA
ctgtggccagaagagcagttgtggtcttcagaaaagtatctcgattttacgccgaagttatttgaagcggtgcgt

SEQ ID NO: 171418 - DNA, 75 bp, synthetic construct
  source 1..75: mol_type = other DNA
cgaacaaatgctcgaagtcttcccgcacaactggactttcgataacggctatatgcatccgggagacaaaccggg

SEQ ID NO: 171419 - DNA, 75 bp, synthetic construct
  source 1..75: mol_type = other DNA
aagatgcgcactatgtctaccgctacgatgaatacggcaggctggcggagaagacggaccgtatcccggaagggg

SEQ ID NO: 171420 - DNA, 75 bp, synthetic construct
  source 1..75: mol_type = other DNA
aggtgcgtacgcgatgcataaggctggcggtaacggaggtggtggcggcgctaaaacgccaggcaccggcgctaa

SEQ ID NO: 171421 - DNA, 75 bp, synthetic construct
  source 1..75: mol_type = other DNA
ctcccggcaaaactggctgggaacggatgccaatggcggcgatgtgctgtctatggcacgcggatctcagttctg

SEQ ID NO: 171422 - DNA, 75 bp, synthetic construct
  source 1..75: mol_type = other DNA
tacggcgccgtttcgcaccttccagtatataagcgggcattctccatcaaattacccgtatgggtattaccggag

SEQ ID NO: 171423 - DNA, 75 bp, synthetic construct
  source 1..75: mol_type = other DNA
ccgcatttaagctacgctatcctgaattctcatccgtcgacgacgcacttcttcagcagtatttcacgcaagcaa

SEQ ID NO: 171424 - DNA, 75 bp, synthetic construct
  source 1..75: mol_type = other DNA
aacggaaatggtttgttccacaggggaaaaatctaatttattttattcagtgggtaaaagaattaaacgaacatg

SEQ ID NO: 171425 - DNA, 75 bp, synthetic construct
  source 1..75: mol_type = other DNA
cacagtattgatgaagctctggatgattatgcccgtcatcagggctgggattcaaagccatccgcgtgcagtgcg

SEQ ID NO: 171426 - DNA, 75 bp, synthetic construct
  source 1..75: mol_type = other DNA
tggcgtcgcggtccggttacgatgtcggccatttcagcggttgatatggcgctgtgggatattaaagccaaagct

SEQ ID NO: 171427 - DNA, 75 bp, synthetic construct
  source 1..75: mol_type = other DNA
cttaatgcgtacttcacggaggcaacgatttatctgaataacacggacagcagcccggtaaaagatatctctatc

SEQ ID NO: 171428 - DNA, 75 bp, synthetic construct
  source 1..75: mol_type = other DNA
cagtaacaggcaaatgacaggtctgaaaagacagaagcccccatcagaacgtccgcgtaatggaaggggcggcgc

SEQ ID NO: 171429 - DNA, 75 bp, synthetic construct
  source 1..75: mol_type = other DNA
cctcacatcccggcggccttttgccgggatgccgggagcgcaggtcacggcgcgacagaggcggcgcgaccggaa

SEQ ID NO: 171430 - DNA, 75 bp, synthetic construct
  source 1..75: mol_type = other DNA
tgtatggcaccggacacaacaacgggcagggacccgccgcaacgacgaagagcgcgtgcgcgaaacggcgttgcc

SEQ ID NO: 171431 - DNA, 75 bp, synthetic construct
  source 1..75: mol_type = other DNA
gatgccaataaccatacggtcaccatgctggtgcaaattaatgggcgtttcctcaccgacgatactcgccacggc

SEQ ID NO: 171432 - DNA, 75 bp, synthetic construct
  source 1..75: mol_type = other DNA
tgattgttgacagtaatggcaagaaactggacatgcgctttggcggtaatttaacggcagcagaagagaagaaaa

SEQ ID NO: 171433 - DNA, 75 bp, synthetic construct
  source 1..75: mol_type = other DNA
atgacgatggataataaagaaacgactcatgtcacaggcagcaaactggatatttcggtcaactggcaaggggcg

SEQ ID NO: 171434 - DNA, 75 bp, synthetic construct
  source 1..75: mol_type = other DNA
cgtgagggagacttaaagcagggtgatattgtcattgtagaaaatcagcgtttcaaagttcaatacgttaagcgc

SEQ ID NO: 171435 - DNA, 75 bp, synthetic construct
  source 1..75: mol_type = other DNA
tcaattcgtgcttaccatgaaattactactaccgacgaacaaggggtaattacagaatcagaatttctattttgt

SEQ ID NO: 171436 - DNA, 75 bp, synthetic construct
  source 1..75: mol_type = other DNA
acagcaggggcgagcctctcttgttggcgctggtctgggtgcggtaggtgcatatgcgatgcataaggctggtgg

SEQ ID NO: 171437 - DNA, 75 bp, synthetic construct
  source 1..75: mol_type = other DNA
tgaaagcccaaaggataatctgtcactacataccgtcagagagaagatcaggactggatacgcaacagtgtgtcg

SEQ ID NO: 171438 - DNA, 75 bp, synthetic construct
  source 1..75: mol_type = other DNA
cgagcaaggcaagcgcgatagtattgtcgtcgtcgcgcagctctctcccgaattcaccgcccggctggtggaccg

SEQ ID NO: 171439 - DNA, 75 bp, synthetic construct
  source 1..75: mol_type = other DNA
aaatcctccgcccggctgaagataacttcatggaaaaggtcgatgatctgaacagtgagcagcagtacgacaata

SEQ ID NO: 171440 - DNA, 75 bp, synthetic construct
  source 1..75: mol_type = other DNA
ggcgccattaaaccgtgaaaccgccgaggcgctcagcgcctgggctagtgagaaatcggggcgctggtttacagc

SEQ ID NO: 171441 - DNA, 75 bp, synthetic construct
  source 1..75: mol_type = other DNA
ggatctggaaaataatacagtagtcgctctggtgctggatgctaattattaccgggatgcgcaaacgctggagaa

SEQ ID NO: 171442 - DNA, 75 bp, synthetic construct
  source 1..75: mol_type = other DNA
atgattgagaatcatctctactgtctggtgattgatgtgaattacaaattactgccatgtttgcttgcgataata

SEQ ID NO: 171443 - DNA, 75 bp, synthetic construct
  source 1..75: mol_type = other DNA
ttgttatggaaatttgatagtaaagataaatttgctcgaaaacgagtaaagggacgtacgttctcatatgaattc

SEQ ID NO: 171444 - DNA, 75 bp, synthetic construct
  source 1..75: mol_type = other DNA
tgatgtaatggttaccgaagagcatttatcagctgatgaagctcgccaactggctaaagatatccagacagctaa

SEQ ID NO: 171445 - DNA, 75 bp, synthetic construct
  source 1..75: mol_type = other DNA
gttgaaagtatgaccttcgtaaaccaggagaacaatggacgagatcaacttgctctaaccagggagtctctgaaa

SEQ ID NO: 171446 - DNA, 75 bp, synthetic construct
  source 1..75: mol_type = other DNA
ccgtttgatgccggcatatcgcgggatgatcaataagatgagtgcggatttgctcatcgtgccgtttatcgataa

SEQ ID NO: 171447 - DNA, 75 bp, synthetic construct
  source 1..75: mol_type = other DNA
ccgtttgatgccggcatatcgcgggatgatcaataagttgagtgcggatctcttgatcgtgccatttatcgacaa

SEQ ID NO: 171448 - DNA, 75 bp, synthetic construct
  source 1..75: mol_type = other DNA
ctcgccagacataacgatgcccacctgacgttaattcatatcgatgatggcttaagcgagttgtatccgggtatc

SEQ ID NO: 171449 - DNA, 75 bp, synthetic construct
  source 1..75: mol_type = other DNA
atttaatagggggagtatcaaatatcataaatgcactaatattggctatattatctccagtcattctactatcaa

SEQ ID NO: 171450 - DNA, 75 bp, synthetic construct
  source 1..75: mol_type = other DNA
gaatatcaaccttgtcatgggccagactgccacctgaatgaaggggtgtctggccattcacatcatcaccattaa

SEQ ID NO: 171451 - DNA, 75 bp, synthetic construct
  source 1..75: mol_type = other DNA
cacgccaaaaaacatggcgttacaacattggagtggttgaaatcgcacaccattccactcttcactgcagatcac

SEQ ID NO: 171452 - DNA, 75 bp, synthetic construct
  source 1..75: mol_type = other DNA
gctatgaacggtggcgatgaagaagttgtaaccaaagagtttaccttcgcggtggacggaaagccgatcaaacag

SEQ ID NO: 171453 - DNA, 75 bp, synthetic construct
  source 1..75: mol_type = other DNA
gcaagaagacgtaaacaataaagaccttgatgctgaaacctatctggaaattccagaatgtgcggctttcccgga

SEQ ID NO: 171454 - DNA, 75 bp, synthetic construct
  source 1..75: mol_type = other DNA
ctggtggcctcgttggtctgtttctgcaagaagatgtagctaacgttgatcttgacgctgaaacttatctggaaa

SEQ ID NO: 171455 - DNA, 75 bp, synthetic construct
  source 1..75: mol_type = other DNA
ccgcatgcagtggatgaacttgatcggcgtatagaggagaaaaaagatgtactggttaatttgggcctctccttc

SEQ ID NO: 171456 - DNA, 75 bp, synthetic construct
  source 1..75: mol_type = other DNA
ctggtagtcagattggcattttctatcattctgataccaaaaataccaatcttgcacacgaaggatacgaagaaa

SEQ ID NO: 171457 - DNA, 75 bp, synthetic construct
  source 1..75: mol_type = other DNA
accgttaactacatcccaggtgatgcggtacatgaaaaactgatcaaagctgccgaggatggtacgcgtattcaa

SEQ ID NO: 171458 - DNA, 75 bp, synthetic construct
  source 1..75: mol_type = other DNA
gcttcgcaatctgctgaaaaaatgcctccttctgctactgattcggtgcaggaggcaatgaatgatgtgcgtctt

SEQ ID NO: 171459 - DNA, 75 bp, synthetic construct
  source 1..75: mol_type = other DNA
ggcgcggcggcaagattgccaacatctaccagttggatatgtccgatgccacttcgctggtgatggcgacggaat

SEQ ID NO: 171460 - DNA, 75 bp, synthetic construct
  source 1..75: mol_type = other DNA
ttgggcgaacccttaatccttcaatattaagcggatttgatagttcttcagcctctggcgatcgagtcgagcagg

SEQ ID NO: 171461 - DNA, 75 bp, synthetic construct
  source 1..75: mol_type = other DNA
aaaattgcttactacatcgacgctacgaaaaaatctggtgtacatatcgcttataacggcttcctgtctaaaact

SEQ ID NO: 171462 - DNA, 75 bp, synthetic construct
  source 1..75: mol_type = other DNA
atgaccaactatatggcacttggcgagtatacggcctactcagagcaggcccgggatgctgccggacgtcgcttt

SEQ ID NO: 171463 - DNA, 75 bp, synthetic construct
  source 1..75: mol_type = other DNA
atgttgcaacattattcagcgtcatggaaaaaaggactggctgcactctgcttactggctgttgctgggcttagc

SEQ ID NO: 171464 - DNA, 75 bp, synthetic construct
  source 1..75: mol_type = other DNA
atgaccaccgaagaactggctgaatgcctcggtgtgactaaacaaactgttaaccgttggatcagagaaaaaggc

SEQ ID NO: 171465 - DNA, 75 bp, synthetic construct
  source 1..75: mol_type = other DNA
tcatttatcctggcgaatggggatatcgcactttcgggcagagagttaagcaatcagagctggcagacggggaca

SEQ ID NO: 171466 - DNA, 75 bp, synthetic construct
  source 1..75: mol_type = other DNA
gttgtaaggaccgggcatcttctgaaccagcgggagggattttctgccacaacaacaacccggactaacccctca

SEQ ID NO: 171467 - DNA, 75 bp, synthetic construct
  source 1..75: mol_type = other DNA
tgcctcccgtgaagcaggctccctgctgtcggggaaccgcgtgaccgttaacgccggtgataacctgacggtaga

SEQ ID NO: 171468 - DNA, 75 bp, synthetic construct
  source 1..75: mol_type = other DNA
gcgggcagtgacagccgatatggtggtgtgcatctcagcggtacggacaccggtccggttgcgaccattaaaggc

SEQ ID NO: 171469 - DNA, 75 bp, synthetic construct
  source 1..75: mol_type = other DNA
accggcgaagacagtctgacacagacagcgctgcagcagtatgagccggtggtggttggctctccgcaatggcac

SEQ ID NO: 171470 - DNA, 75 bp, synthetic construct
  source 1..75: mol_type = other DNA
gagaaaggtaacggtactgagtggactgaaaccacaatagatagcggtaaaaccgtcaccatcaacagtggtcgg

SEQ ID NO: 171471 - DNA, 75 bp, synthetic construct
  source 1..75: mol_type = other DNA
atatcagcgtgaatgccggtcgtgatgttgccctgaccacggcgacagaaagtgactatcactatctggaaacga

SEQ ID NO: 171472 - DNA, 75 bp, synthetic construct
  source 1..75: mol_type = other DNA
gcatgaagacggttcatgattcggtccggcagcagggaacagacatgaccagtggcggtgacatcacggttactg

SEQ ID NO: 171473 - DNA, 75 bp, synthetic construct
  source 1..75: mol_type = other DNA
gccggtcgtgatattgccagtcaggctgccggtatggctgcggaaaataacgtggtcatccggggcggacgtgat

SEQ ID NO: 171474 - DNA, 75 bp, synthetic construct
  source 1..75: mol_type = other DNA
gtgaatgccggtcgtgatgttgccctgaccacggcgacagaaagtgactatcactatctggaaacgaagaaaaaa

SEQ ID NO: 171475 - DNA, 75 bp, synthetic construct
  source 1..75: mol_type = other DNA
tgcacaggagacgaaggagagcagtgacagccgtctgaaagccctgcaggccacaaagacagcgctgtctggtgt

SEQ ID NO: 171476 - DNA, 75 bp, synthetic construct
  source 1..75: mol_type = other DNA
agtgtggtggttgacccggggcatgaccgtcgtactgtggacgaaaaatttgagcagaagaaaagcgggctgacg

SEQ ID NO: 171477 - DNA, 75 bp, synthetic construct
  source 1..75: mol_type = other DNA
atacggtgacagtcagtgccaccggccatgctgccaggatatccggcggcgctgatatgcatatccgtgcaggac

SEQ ID NO: 171478 - DNA, 75 bp, synthetic construct
  source 1..75: mol_type = other DNA
gttacagggacaggcttcttgcagtgtgcgaagcagcgatgttctgattgtgctccctcgggataatagcaatgt

SEQ ID NO: 171479 - DNA, 75 bp, synthetic construct
  source 1..75: mol_type = other DNA
acggcaggacaactcacaaacggcgggcatctgcagggcgaaacgctgacgctgacagcctccggtggcgtgaac

SEQ ID NO: 171480 - DNA, 75 bp, synthetic construct
  source 1..75: mol_type = other DNA
accggcagccaatacttactggcatggtcagacaaactggtcgaattaaaaaccatctgcttttgtggccgtaag

SEQ ID NO: 171481 - DNA, 75 bp, synthetic construct
  source 1..75: mol_type = other DNA
acgaccggatgccgccaggcagccgggagccgaaggtgcgcccggcagacaggacaacactgcagtagtcagaat

SEQ ID NO: 171482 - DNA, 75 bp, synthetic construct
  source 1..75: mol_type = other DNA
atctgtaacgcgcctgttcgagctgtttcgcgatatcagcctcgagtttgatcacctggcgaacattacccctat

SEQ ID NO: 171483 - DNA, 75 bp, synthetic construct
  source 1..75: mol_type = other DNA
acggcctgaaagtcaccgccactgacctgaccagcaccggcagtattaaaagtggcagcacactcgatatcagtg

SEQ ID NO: 171484 - DNA, 75 bp, synthetic construct
  source 1..75: mol_type = other DNA
cggtgattgcctccactgccacaccggataaaaaccacctggataccggaacgctggggttcagtgaccttcaca

SEQ ID NO: 171485 - DNA, 75 bp, synthetic construct
  source 1..75: mol_type = other DNA
ggtttgccgctcgctgcggaaaagtcacagccagccgccttgctgacgtcatggccagaaccaagtctggctatg

SEQ ID NO: 171486 - DNA, 75 bp, synthetic construct
  source 1..75: mol_type = other DNA
tccgtccacggacccggacagtccgtatctgattacggtgaacccgaaactggatggtctcggacaggtggacag

SEQ ID NO: 171487 - DNA, 75 bp, synthetic construct
  source 1..75: mol_type = other DNA
acccggaatcgcctgtgcgaaatacggctgaaggacggatacagggaggttacggcaagcatggcttacgaatcc

SEQ ID NO: 171488 - DNA, 75 bp, synthetic construct
  source 1..75: mol_type = other DNA
gcagtttttatgccacgggcgataatttacagggcgctcgtcaactgggtgttcgtacggaagcatcggtgcggt

SEQ ID NO: 171489 - DNA, 75 bp, synthetic construct
  source 1..75: mol_type = other DNA
atcatcgctgacacgctgagcgtcagggcgaccatgctggatggtgacggcctgttgcagggcgccggtgcactg

SEQ ID NO: 171490 - DNA, 75 bp, synthetic construct
  source 1..75: mol_type = other DNA
atgacgagccgctttgactccgttgctgaacaaaccggaatgtttgccggagatggcggcttcgatatcacggtc

SEQ ID NO: 171491 - DNA, 75 bp, synthetic construct
  source 1..75: mol_type = other DNA
gccggtggtaacacaagcctggatgccgcgaatgatattctgttgagtggcgccgcaaacacacaaaaaacaacg

SEQ ID NO: 171492 - DNA, 75 bp, synthetic construct
  source 1..75: mol_type = other DNA
gcgggaacaacgtgcaacttgcgggcggcaatatcaccaacagcggcggcagcatcaacgcacagaacgacctct

SEQ ID NO: 171493 - DNA, 75 bp, synthetic construct
  source 1..75: mol_type = other DNA
tttccatctgtagcagctaacgttgcagattctgcagtttctggtttttccaattatgctacgaatggtaaaaat

SEQ ID NO: 171494 - DNA, 75 bp, synthetic construct
  source 1..75: mol_type = other DNA
gctgacgacggacgacctctccctccggggcaaaacactgcataccgcagggaccacgcagggacagaatatcac

SEQ ID NO: 171495 - DNA, 75 bp, synthetic construct
  source 1..75: mol_type = other DNA
ctgctgattgacgcggacaaactggataatacgggaagtcatcttcttgccagcgagtttgtcagcctgtcgggt

SEQ ID NO: 171496 - DNA, 75 bp, synthetic construct
  source 1..75: mol_type = other DNA
gcggtgatatgcttgctgatatggtctcgctcagcggcgcgggccagctggttgcactcggtaacctgacgctga

SEQ ID NO: 171497 - DNA, 75 bp, synthetic construct
  source 1..75: mol_type = other DNA
atgaatcagcctaaaaacccatcttatcagcctgtcaggaacctaccagctactattagtaatagagagtattct

SEQ ID NO: 171498 - DNA, 75 bp, synthetic construct
  source 1..75: mol_type = other DNA
gacgggagtcagcctgtcgctcaccacccagaaatcggaatcacaacaacattctgaaagtgacacagtatccgg

SEQ ID NO: 171499 - DNA, 75 bp, synthetic construct
  source 1..75: mol_type = other DNA
cagtgaagagcagaagcagacgataagtacgctggcaaccgtttcagcagggctgaccggcggtctaaccggaaa

SEQ ID NO: 171500 - DNA, 75 bp, synthetic construct
  source 1..75: mol_type = other DNA
cggtctgaagtttggtgtggcactgacagcagaccaggtggcggctctcgaccaaagtattctgtggtataaagc

SEQ ID NO: 171501 - DNA, 75 bp, synthetic construct
  source 1..75: mol_type = other DNA
ctgctcagtgcaggtgtgctgacgctgaaggcagacagtgtcaaaaacgacgggcaattacagggaaatgccacc

SEQ ID NO: 171502 - DNA, 75 bp, synthetic construct
  source 1..75: mol_type = other DNA
ggcgctcgttggactatagatattcgtaataaccaaaagcttactgaactggggaataaatattcacgtgtggag

SEQ ID NO: 171503 - DNA, 75 bp, synthetic construct
  source 1..75: mol_type = other DNA
gtgatgttgccagtcaggctgccggtgtggctgcggaaaataacgtggtcatccggggcggacgtgatgtgaacc

SEQ ID NO: 171504 - DNA, 75 bp, synthetic construct
  source 1..75: mol_type = other DNA
caggtaacgacctgagtctgaatgcagtcagggaaagcaaaaacagtcgcaacggcaggtcagaaagtcatgaaa

SEQ ID NO: 171505 - DNA, 75 bp, synthetic construct
  source 1..75: mol_type = other DNA
cgctgaaagaggtaaaatcgggaatctacacgtctaaactatcagatggttcggtaataacacttagaaacatat

SEQ ID NO: 171506 - DNA, 75 bp, synthetic construct
  source 1..75: mol_type = other DNA
atgccggtcatgacatcgtactgggtactgccacggaaagtgattatcactacagtgaatcaggggaaacccgta

SEQ ID NO: 171507 - DNA, 75 bp, synthetic construct
  source 1..75: mol_type = other DNA
gcgtcagggcgtaatctttctgctgaggctgaacgactggaaaaccgggcgtcatttatcctggcgaatggggat

SEQ ID NO: 171508 - DNA, 75 bp, synthetic construct
  source 1..75: mol_type = other DNA
aggacttcagtggtcagggtcaggtggtggccaccggtgatgtcacactgaaactgattgctgccctcacgaatt

SEQ ID NO: 171509 - DNA, 75 bp, synthetic construct
  source 1..75: mol_type = other DNA
gcaggcaacctgctgcttgacgctcaggacttcagtggtcagggtcaggtggtggccaccggtgatgtcacactg

SEQ ID NO: 171510 - DNA, 75 bp, synthetic construct
  source 1..75: mol_type = other DNA
ggttacaaaagagcctgtatgtggatactgccgtggagacattgccgctatggctgacaaagcaggtttaaaatc

SEQ ID NO: 171511 - DNA, 75 bp, synthetic construct
  source 1..75: mol_type = other DNA
taacgcggtgctgagccggacgggttcacgttatctcaacggactgggttcagacacggaacagatgcggtatct

SEQ ID NO: 171512 - DNA, 75 bp, synthetic construct
  source 1..75: mol_type = other DNA
ggatgatgcaggtaaagcagagctggcccgttttcttaatgagtacggaacacaattacagctttacagaggaat

SEQ ID NO: 171513 - DNA, 75 bp, synthetic construct
  source 1..75: mol_type = other DNA
atagttggacggaacttaactcagatatccttgcccatgaaatgactcactggatgccgctaccagagcctccac

SEQ ID NO: 171514 - DNA, 75 bp, synthetic construct
  source 1..75: mol_type = other DNA
tcactacgcttctgttcagatcaggtagccgctgaaatggctgaacaacccagtcctgcagagattgcagaggtt

SEQ ID NO: 171515 - DNA, 75 bp, synthetic construct
  source 1..75: mol_type = other DNA
aataaccgccgttctaataatatgtttaaaaacattctttgaaaaaaacactaaaaactatctgttttgcatagg

SEQ ID NO: 171516 - DNA, 75 bp, synthetic construct
  source 1..75: mol_type = other DNA
tgatccagcgttatatcgatgcggaaatggcagtgctggacggaaaatccgtcacctttaatggtcagcagatga

SEQ ID NO: 171517 - DNA, 75 bp, synthetic construct
  source 1..75: mol_type = other DNA
tgataaccacaaactgtgcggtgcttggcgtagcattgttgaatattaatctcggacataatttcttgcagtcgg

SEQ ID NO: 171518 - DNA, 75 bp, synthetic construct
  source 1..75: mol_type = other DNA
tcgcaaagcctctgaagaggtagcagcggaaatggcggcgcaaccctgcccaggtgaagtggcgaaaagcctgat

SEQ ID NO: 171519 - DNA, 75 bp, synthetic construct
  source 1..75: mol_type = other DNA
cagggcttggagatcattgcggcttcggtaacgcctcttatagggcaagctgcatcaaataaattaagctacctt

SEQ ID NO: 171520 - DNA, 75 bp, synthetic construct
  source 1..75: mol_type = other DNA
tgcgagtagttcagcgtgtgccagcgcaagactgaaagttattgcgtcgaaagaagggtacgaagatggccctta

SEQ ID NO: 171521 - DNA, 75 bp, synthetic construct
  source 1..75: mol_type = other DNA
cggtctttgatacccggtatgtcagtaacgcggtgctgagccggacgggttcacgttatctcaacggactgggtt

SEQ ID NO: 171522 - DNA, 75 bp, synthetic construct
  source 1..75: mol_type = other DNA
cttgattggttattttataacaatctatttaatggagagggtttttcattagccattgagcctggatattatttt

SEQ ID NO: 171523 - DNA, 75 bp, synthetic construct
  source 1..75: mol_type = other DNA
atatcagcattaccggtgacagtgtggtggttgacccggggcatgaccgtcgtactgtggacgaaaaatttgagc

SEQ ID NO: 171524 - DNA, 75 bp, synthetic construct
  source 1..75: mol_type = other DNA
ccgccgcgaggccgggacaacgcagagtcagagtgccagtaccatcggctccactgccggtaatgtcagtattac

SEQ ID NO: 171525 - DNA, 75 bp, synthetic construct
  source 1..75: mol_type = other DNA
gaagggacttaacggctttaaaattgatatcgcccgactattgagtattaagattcacaaactgtctctggaggt

SEQ ID NO: 171526 - DNA, 75 bp, synthetic construct
  source 1..75: mol_type = other DNA
gaaggcgcttaacggctttaagattgatattgcccgtctattgagtcttaaaattcacaagctgtctctggaggt

SEQ ID NO: 171527 - DNA, 75 bp, synthetic construct
  source 1..75: mol_type = other DNA
cgccagtccgcacatgacggataagtatggcaaaacaccgctggaactggcgcgggagcgcggttttgaagagat

SEQ ID NO: 171528 - DNA, 75 bp, synthetic construct
  source 1..75: mol_type = other DNA
aaaggtaaagggttatttcaattcttttacatgaatggtgttgagggggtatgtgagccgtcacactggatgccg

SEQ ID NO: 171529 - DNA, 75 bp, synthetic construct
  source 1..75: mol_type = other DNA
attacccccagcgaagcatctatcatcgcatgtgatatcgccacaaaatcaggcgctgtagagatcggttttctt

SEQ ID NO: 171530 - DNA, 75 bp, synthetic construct
  source 1..75: mol_type = other DNA
atatgcacttaatcaggttacccgcacgctgggtgaaatgatgcactttaccgcctgccccattacacggacctg

SEQ ID NO: 171531 - DNA, 75 bp, synthetic construct
  source 1..75: mol_type = other DNA
gttcttcaatttatggcggtaacctgccctctacaccgtataccaccgatgccaacggtcgtgggccggcatggg

SEQ ID NO: 171532 - DNA, 75 bp, synthetic construct
  source 1..75: mol_type = other DNA
atcgcagctgattacaccgctgtttgaatattcaggtgcttgctccggttgtggcgagacgccgtatattaaatt

SEQ ID NO: 171533 - DNA, 75 bp, synthetic construct
  source 1..75: mol_type = other DNA
tttcatttcagcaaagcctttaagcataaatttggttatgcgccgtcagctgtgctgaagaatacggacaggtaa

SEQ ID NO: 171534 - DNA, 75 bp, synthetic construct
  source 1..75: mol_type = other DNA
atacctgtttaaatccttttttaattagctgtctgaacgatgatttaacgctactacgaattattttaccggcta

SEQ ID NO: 171535 - DNA, 75 bp, synthetic construct
  source 1..75: mol_type = other DNA
tgacgcctgcctgtgaaaaaggccatttaagtattgtaaaagagcttttggcgcatacggagattaacgttaacc

SEQ ID NO: 171536 - DNA, 75 bp, synthetic construct
  source 1..75: mol_type = other DNA
gatttttgtggggacaagccgatccgtcgctggagtgaagaacaaaaagctgcagctcgccgacgcaatctggcg

SEQ ID NO: 171537 - DNA, 75 bp, synthetic construct
  source 1..75: mol_type = other DNA
gtaatttagcgggtgctctggccggaacttcggctccggaactggcgcacctgctgaaatcaacagaaaaagacc

SEQ ID NO: 171538 - DNA, 75 bp, synthetic construct
  source 1..75: mol_type = other DNA
cagggctggccggcggtcttaccggaaacagcaccgcatcagcagcagtgggagcacagagcgggaagaatgctg

SEQ ID NO: 171539 - DNA, 75 bp, synthetic construct
  source 1..75: mol_type = other DNA
gatgccgcgaatgatattctgttgagtggcgccgcaaacacacaaaaaacaacgggcaggaacagcagcagtggc

SEQ ID NO: 171540 - DNA, 75 bp, synthetic construct
  source 1..75: mol_type = other DNA
ttgccaccggcagtgccgacgttaaaggaaccacgctgaataataccggtacgcttcagggtgcggacctgctgg

SEQ ID NO: 171541 - DNA, 75 bp, synthetic construct
  source 1..75: mol_type = other DNA
ggaaattcactggataaccgcggcactgtccagggtgaccatgtcacgattcgccagaacagtgtcaccaacagt

SEQ ID NO: 171542 - DNA, 75 bp, synthetic construct
  source 1..75: mol_type = other DNA
cagggtaaaggccctagaaaagcggtgaagcaagtcataccttttgaaggcaatgaaaagtcttttgaaacaata

SEQ ID NO: 171543 - DNA, 75 bp, synthetic construct
  source 1..75: mol_type = other DNA
tcggaggttgtcgatcaactcgatatacccgtactttgttatggcttacgtactgatttccgcggtgaattattt

SEQ ID NO: 171544 - DNA, 75 bp, synthetic construct
  source 1..75: mol_type = other DNA
ggtcagacaaactggtcgaattaaaaactatctgcttttgtggtcgtaaagcaagcatggtgctacgtcttgatc

SEQ ID NO: 171545 - DNA, 75 bp, synthetic construct
  source 1..75: mol_type = other DNA
cgagcaggtagttattggtggtaatgagcgttatgtctcggtttgccgtaaacactataaagaagcgttagaagt

SEQ ID NO: 171546 - DNA, 75 bp, synthetic construct
  source 1..75: mol_type = other DNA
taagttattggactcagctcagggggctacatctgcaaatagaaaaacatctgttgttgtatcagggcctaacgg

SEQ ID NO: 171547 - DNA, 75 bp, synthetic construct
  source 1..75: mol_type = other DNA
ctgcatccactgctccacttcgcttctgtacccgcggctgctacgacccggttttatgggttcaggaaaatggcc

SEQ ID NO: 171548 - DNA, 75 bp, synthetic construct
  source 1..75: mol_type = other DNA
cttttagcatgcaacggataccttaaacacatcgatttgacactcctgagtgacgggaaggaaatccgggctatc

SEQ ID NO: 171549 - DNA, 75 bp, synthetic construct
  source 1..75: mol_type = other DNA
tttggctccatgaccggctcaggttacatcgctgcctcccgggataagatgaagagccgctttgactccgttgct

SEQ ID NO: 171550 - DNA, 75 bp, synthetic construct
  source 1..75: mol_type = other DNA
gctcaggacttcagtggtcagggccaggtggtggccaccggtgatgtcacactgaaactgattgctgccctcacg

SEQ ID NO: 171551 - DNA, 75 bp, synthetic construct
  source 1..75: mol_type = other DNA
tactacggtggtcgtaccgataacctgagtgaacaggaacgtcagcaaatcagcatgttggccaccattgcctca

SEQ ID NO: 171552 - DNA, 75 bp, synthetic construct
  source 1..75: mol_type = other DNA
gtgacataggcagtcaggtggcggatattgcgcgtacacagggagaactgaatgcgttgaaggccgcgaaggaag

SEQ ID NO: 171553 - DNA, 75 bp, synthetic construct
  source 1..75: mol_type = other DNA
ggttaaggtcaacattcagccatcgtatattggggatagtgtcagacctgctaaatttaaagtagtatattcgat

SEQ ID NO: 171554 - DNA, 75 bp, synthetic construct
  source 1..75: mol_type = other DNA
ctgtggatagtattgtaaaagcaggttctaacccgacggaaaccctggaggcaatgaaagcgctgtttaacagcg

SEQ ID NO: 171555 - DNA, 75 bp, synthetic construct
  source 1..75: mol_type = other DNA
aaaaacgtcaacaatcctgaagctcaggctgcgtatggcagagcaacagatgctattaataaaatagaatcagcc

SEQ ID NO: 171556 - DNA, 75 bp, synthetic construct
  source 1..75: mol_type = other DNA
aactggagcatctgattaccctgcaaatgatgggtaatgatgagatcactactaagtatctcagttcgttgcatg

SEQ ID NO: 171557 - DNA, 75 bp, synthetic construct
  source 1..75: mol_type = other DNA
aaacagcgaaatcattaaccgttccggtaatattgaaaccacacgtggcgatatcaccatgaatacggcgcatct

SEQ ID NO: 171558 - DNA, 75 bp, synthetic construct
  source 1..75: mol_type = other DNA
tcggtgataagttcgattatctcagtttcatgatgtcaggcttgactggtgtaggtacagccgggaaaggatatt

SEQ ID NO: 171559 - DNA, 75 bp, synthetic construct
  source 1..75: mol_type = other DNA
tgtgcaggccggacaggctgtggcaatggcctccgcaaccggtgacccgaatgcgacgggagtcagcctgtcgct

SEQ ID NO: 171560 - DNA, 75 bp, synthetic construct
  source 1..75: mol_type = other DNA
tgcgcaggcgctgagttccggtaaaaaatcggtcacccacagcgatgctgcgatgacgctgaatgtgacaacagt

SEQ ID NO: 171561 - DNA, 75 bp, synthetic construct
  source 1..75: mol_type = other DNA
gaaaccaccgcagaacatccgtttgccgtgaccgaactgatgatgccggtgctgcccgtcgtgcgtgtcgccaac

SEQ ID NO: 171562 - DNA, 75 bp, synthetic construct
  source 1..75: mol_type = other DNA
tggtgaaagcggtactgctgaaaatgcaaagccgtgactcgccgtccgccgccattcatgaaatgggcgtttttg

SEQ ID NO: 171563 - DNA, 75 bp, synthetic construct
  source 1..75: mol_type = other DNA
aaggcgcttctttcgataacaacatcatttgtgccgacgaaaaggtactgattgttgttgatagcgtagccgatg

SEQ ID NO: 171564 - DNA, 75 bp, synthetic construct
  source 1..75: mol_type = other DNA
cggccacctcaccacacgcctcttacgagtgcttcgaagaacttgtttatcgctcatcgtcgctgcgtggcgcac

SEQ ID NO: 171565 - DNA, 75 bp, synthetic construct
  source 1..75: mol_type = other DNA
ggttctgatggtttgaataagattgttatatctgaattgatgatgaagaaattcgaagatcttaatttatcaccg

SEQ ID NO: 171566 - DNA, 75 bp, synthetic construct
  source 1..75: mol_type = other DNA
acaccaggcgttgagtgcctctctccgcaggtgctgaccggcgacaacggcctgactttaattgaaaacgcgccc

SEQ ID NO: 171567 - DNA, 75 bp, synthetic construct
  source 1..75: mol_type = other DNA
gtacaggtcgcaatgcgaaaatgacaggcgtgactggggcttctacggattgattgccgaggaagttggagaaat

SEQ ID NO: 171568 - DNA, 75 bp, synthetic construct
  source 1..75: mol_type = other DNA
gtacaggtcgcaatgcgaaaatgacaggcgtgactggggtttctagggattgattgccgaggaagtaggagaaat

SEQ ID NO: 171569 - DNA, 75 bp, synthetic construct
  source 1..75: mol_type = other DNA
gtacaggtcgcaatgcgaaaatgacaggcgtgactggggtttctaaggattgattgccgaggaagtgggagaaat

SEQ ID NO: 171570 - DNA, 75 bp, synthetic construct
  source 1..75: mol_type = other DNA
atggctacatcgacagtaattccgggagatatcaccacgctgaagggagatgtcagtaaagctaaggaagatatt

SEQ ID NO: 171571 - DNA, 75 bp, synthetic construct
  source 1..75: mol_type = other DNA
tcgtctatccgctataaacattcagtagagacgatagattcagagcacgccgatctcattttcaggatgcgccct

SEQ ID NO: 171572 - DNA, 75 bp, synthetic construct
  source 1..75: mol_type = other DNA
gtacaggtcgcaatgcgaaaatgacaggcgtgactgggggttctagggattgattgccgaggaagttggagaaat

SEQ ID NO: 171573 - DNA, 75 bp, synthetic construct
  source 1..75: mol_type = other DNA
agcggtcagggacaaatattctgaatttgatcgtgaattcatctacaggaaatatgcagatggatattgattata

SEQ ID NO: 171574 - DNA, 75 bp, synthetic construct
  source 1..75: mol_type = other DNA
tgagcaggtggttattggtggtaatgaacgctacgtttctgtatgccgtaaacactataaagaagcgttagaagt

SEQ ID NO: 171575 - DNA, 75 bp, synthetic construct
  source 1..75: mol_type = other DNA
gataagcagattgtcgataaagatcagctgattgccgatctgaaagaagcgctgctcaagctgcaagagcagaaa

SEQ ID NO: 171576 - DNA, 75 bp, synthetic construct
  source 1..75: mol_type = other DNA
aacgcggtaaaaacccggtgtgcatcgtttttgattattcccgcacactctcgcagaaggagttccccgtcgggc

SEQ ID NO: 171577 - DNA, 75 bp, synthetic construct
  source 1..75: mol_type = other DNA
atgtccattttaattgataaaaacaccaaggttatctgccagggctttaccggtagccaggggactttccactct

SEQ ID NO: 171578 - DNA, 75 bp, synthetic construct
  source 1..75: mol_type = other DNA
tacctttaaaagttggtaatgacagaacgtatgtttctcagattggaacagtaatgggacaaacatcaacgactt

SEQ ID NO: 171579 - DNA, 75 bp, synthetic construct
  source 1..75: mol_type = other DNA
gttcacccaggcgcactctgagctttccgaaagcgtgattagcgacaccgatgatctgcaacccattatcgacgg

SEQ ID NO: 171580 - DNA, 75 bp, synthetic construct
  source 1..75: mol_type = other DNA
atcccggcgcggtccgggatacctccccccctcgtcagcagcctgatattaaacctgatcttatcgcagagtcgg

SEQ ID NO: 171581 - DNA, 75 bp, synthetic construct
  source 1..75: mol_type = other DNA
atgaagccaactaccccatttaaaaatcccggcgcggtccgggatacctcctcccctcgtcagcagcctgatatt

SEQ ID NO: 171582 - DNA, 75 bp, synthetic construct
  source 1..75: mol_type = other DNA
gacagcctgcaagcgcagattgctgccgcccagactggcggtaatggggcgaaagatgccaaagaatcaaagcct

SEQ ID NO: 171583 - DNA, 75 bp, synthetic construct
  source 1..75: mol_type = other DNA
gagtttggccggggacggcataacgtaccggaagaggtcgcgtcgcactggttcaccctggcgcactccgagctt

SEQ ID NO: 171584 - DNA, 75 bp, synthetic construct
  source 1..75: mol_type = other DNA
gagtttggccggggacgacataacgtaccggaagaggtcgcgtcgcactggttcacccaggcgcactctgagatt

SEQ ID NO: 171585 - DNA, 75 bp, synthetic construct
  source 1..75: mol_type = other DNA
tatcaaagaccccatagagttcgatggccagaagcattatgtcgatacagtggacggtaaagctggttcaagaaa

SEQ ID NO: 171586 - DNA, 75 bp, synthetic construct
  source 1..75: mol_type = other DNA
tcaaaaaagcaaatgaaacagcaaaagaaacggcaaaagaaaatgttgctgattcaaatgcgaataagcaggaag

SEQ ID NO: 171587 - DNA, 75 bp, synthetic construct
  source 1..75: mol_type = other DNA
tcaaaaaacgcaaggtgtttccgactgacgactcggtacgcaaggttatttatctggcgatcaaggatgcgtcga

SEQ ID NO: 171588 - DNA, 75 bp, synthetic construct
  source 1..75: mol_type = other DNA
gaaaacctcaatcaggcgagtgtccagattgccgcttttcagtcccgtgttcaggttcagcaggacgccttgctt

SEQ ID NO: 171589 - DNA, 75 bp, synthetic construct
  source 1..75: mol_type = other DNA
aagcctttgaggaaaaatttccgctgaaagaattaaataatccagagcatgacagttacgcaattagtgaaaaga

SEQ ID NO: 171590 - DNA, 75 bp, synthetic construct
  source 1..75: mol_type = other DNA
aaactggaaaacgtatatgacactttcagcaatcaataaaaattctgaaagtggaattgttttgcacggatacgg

SEQ ID NO: 171591 - DNA, 75 bp, synthetic construct
  source 1..75: mol_type = other DNA
aggcggtcgtgccagacttattctggtcgatacgcaagtttgcgagtttattcagaacacgccagccttccataa

SEQ ID NO: 171592 - DNA, 75 bp, synthetic construct
  source 1..75: mol_type = other DNA
cgagctgcacccgagcgattacccgttgctgcgttctgaatttcagaaagacagccgtgcgcgcgtcgaaaaagc

SEQ ID NO: 171593 - DNA, 75 bp, synthetic construct
  source 1..75: mol_type = other DNA
atcgagtcgctgaaagagaaagataaaccgtttctctatctcgacacccacgcaggggccgggcgttatcagtta

SEQ ID NO: 171594 - DNA, 75 bp, synthetic construct
  source 1..75: mol_type = other DNA
gtaataggtgataccgcggccgtgaccggagaggacggcaggatgatcccgggcattgctccggccgcaaaacag

SEQ ID NO: 171595 - DNA, 75 bp, synthetic construct
  source 1..75: mol_type = other DNA
gatgttgagcaggcgatgaaaacgctgcaaacctttcctggaatcgggcgctggacggcgaattatttcgccttg

SEQ ID NO: 171596 - DNA, 75 bp, synthetic construct
  source 1..75: mol_type = other DNA
agcggctggcagcagccgacccgcaggcattaaaagcgttaggtatgccgttgaaacgggcagaggcgctgattc

SEQ ID NO: 171597 - DNA, 75 bp, synthetic construct
  source 1..75: mol_type = other DNA
aactatacggtgacttacccggtaacattcccaaatcgttcacttgcgctgttggctgtgccacatacaacgtcg

SEQ ID NO: 171598 - DNA, 75 bp, synthetic construct
  source 1..75: mol_type = other DNA
gactatgagttttcaaccgacgagctggctaacgaggttaacatctcgcgtgtttcctgccgaaaatacctcatc

SEQ ID NO: 171599 - DNA, 75 bp, synthetic construct
  source 1..75: mol_type = other DNA
ggtggcagacacaccggtgaccatcagtcgggataatgcactgaagtctcagattactaaacttctggccagcat

SEQ ID NO: 171600 - DNA, 75 bp, synthetic construct
  source 1..75: mol_type = other DNA
gtacaggtcgcaatgcgaaaatgacaggcgtgactggggattctaaggattgattgccgaggaagttggagaaat

SEQ ID NO: 171601 - DNA, 75 bp, synthetic construct
  source 1..75: mol_type = other DNA
tgccgaaggtgtaatgtacgaacgtctggttgttccactgattcaccatatccagaaactgactgaaagagttga

SEQ ID NO: 171602 - DNA, 75 bp, synthetic construct
  source 1..75: mol_type = other DNA
gacctgatattgctagatatctatatgcaaaaagagaacgggctcgatttactgcctgtcctgcataacgcgcgt

SEQ ID NO: 171603 - DNA, 75 bp, synthetic construct
  source 1..75: mol_type = other DNA
ctgactgggcggcttcccgccagggctgtacggtcggagggcagtcagcctctgttcgtgataaagccggggaaa

SEQ ID NO: 171604 - DNA, 75 bp, synthetic construct
  source 1..75: mol_type = other DNA
atacactttctaccagtacatcatctgtaatcgttcgaacttctgcgcagaatatgaagcgcgttagtgagtata

SEQ ID NO: 171605 - DNA, 75 bp, synthetic construct
  source 1..75: mol_type = other DNA
aaacttcccggaagaacagatgaagatgttacgggaaaacttctctgaagcctcccgtcagctggaaggactgca

SEQ ID NO: 171606 - DNA, 75 bp, synthetic construct
  source 1..75: mol_type = other DNA
cacacccgcagcgtcagcggatgtgaacagcgacatgaatcagttctttaataagctgggatttgcatccaatgt

SEQ ID NO: 171607 - DNA, 75 bp, synthetic construct
  source 1..75: mol_type = other DNA
tcagaacaaggcgctcagtgattctccgctggctgagaacgaaaaaaccttcattcagagcaccaccattcctgt

SEQ ID NO: 171608 - DNA, 75 bp, synthetic construct
  source 1..75: mol_type = other DNA
tcagaataaagccgtgagtgacactccgctggatgacagggaaaaaggcttcatttccagcaccaccgtccccgt

SEQ ID NO: 171609 - DNA, 75 bp, synthetic construct
  source 1..75: mol_type = other DNA
acgacctctcgctcgacagttccggctatatcgacaacctgaatgcggggctgataagcgcgggcggtagcctgg

SEQ ID NO: 171610 - DNA, 75 bp, synthetic construct
  source 1..75: mol_type = other DNA
aaaacactgcataccgcagggaccacgcagggacagaatctcaccgtgcaggcggacagatgggcgaacagtggt

SEQ ID NO: 171611 - DNA, 75 bp, synthetic construct
  source 1..75: mol_type = other DNA
catcaacagtggtcgggatacggtactgaacggtgctcaggtcaacggcaacaggattatcgccgatgtgggcca

SEQ ID NO: 171612 - DNA, 75 bp, synthetic construct
  source 1..75: mol_type = other DNA
accgtcaacgcaggacgggatatcaccgctgttgcgtcatccgttaccgcaaccggcaatatcagcgtgaatgcc

SEQ ID NO: 171613 - DNA, 75 bp, synthetic construct
  source 1..75: mol_type = other DNA
gacgtgatgtgaacctggtggcagagtctgccggcgcaggcgacagctatacgtcgaagaaaaagaaagagatta

SEQ ID NO: 171614 - DNA, 75 bp, synthetic construct
  source 1..75: mol_type = other DNA
aataacggaggttcattgctgaccagcggcgatctgacaatcaccgcaggcagtctggcaaacagcggggcgatc

SEQ ID NO: 171615 - DNA, 75 bp, synthetic construct
  source 1..75: mol_type = other DNA
ggctcatcgtacattcttgaccgtcttggcctgaaaccggaaaaagattaccgctttctgggggatgcggctttt

SEQ ID NO: 171616 - DNA, 75 bp, synthetic construct
  source 1..75: mol_type = other DNA
gcgacagaagccagtggcacctctccggtaggtcagtaccgtgcggttatcagcgctgccggtgatgtgtctgcc

SEQ ID NO: 171617 - DNA, 75 bp, synthetic construct
  source 1..75: mol_type = other DNA
atcccctgccttccggtaacaatggttattttgtcccgtcagcagaccctgacagtccatatctgattacggtga

SEQ ID NO: 171618 - DNA, 75 bp, synthetic construct
  source 1..75: mol_type = other DNA
gccagcttaaggccggtggtaacacaagcctggatgccgcgaatgatattctgttgagtggcgccgcaaacacac

SEQ ID NO: 171619 - DNA, 75 bp, synthetic construct
  source 1..75: mol_type = other DNA
taaacgtatccggatgcatgaacaaatgagcaggataatccggaagactggcacagacgaaatactcaacaaagc

SEQ ID NO: 171620 - DNA, 75 bp, synthetic construct
  source 1..75: mol_type = other DNA
gcacatctgctgaaatcaacagaaaaagacccggcagtaaacgccattgctcacgccattctgggcggcgcagtg

SEQ ID NO: 171621 - DNA, 75 bp, synthetic construct
  source 1..75: mol_type = other DNA
tatggcaccggcagtgaaattcagcggggtatccaggccgcgacagccgcgcttcagggactggcgggggataat

SEQ ID NO: 171622 - DNA, 75 bp, synthetic construct
  source 1..75: mol_type = other DNA
atgtgttgaaggccgctaaggaagcaatcggcgaagtacttcctgctaatgcgacagagaaacaacgtcaggaat

SEQ ID NO: 171623 - DNA, 75 bp, synthetic construct
  source 1..75: mol_type = other DNA
ttaacaatttatgaagaggctacaggatcagtcctctactggcagcctggcatgaaatctctcaaggttagggat

SEQ ID NO: 171624 - DNA, 75 bp, synthetic construct
  source 1..75: mol_type = other DNA
atggcctgaaagtcaccgccactgacctgaccagcaccggcagtattaaaagtggcagcacactcgatatcagcg

SEQ ID NO: 171625 - DNA, 75 bp, synthetic construct
  source 1..75: mol_type = other DNA
tcaccacccagaaatcggaatcacaacaacattctgaaagtgacacagtatccggcagtacgctgaatgccggga

SEQ ID NO: 171626 - DNA, 75 bp, synthetic construct
  source 1..75: mol_type = other DNA
cagccagagcaattgccggaatgttgtatcctggcgtgaagcagtcagacctcagtgaagagcagaagcagacga

SEQ ID NO: 171627 - DNA, 75 bp, synthetic construct
  source 1..75: mol_type = other DNA
cactgctgcaaaatgctacagggcggctgtacagtgcaggcaacctgctgcttgacgctcaggacttcagtggtc

SEQ ID NO: 171628 - DNA, 75 bp, synthetic construct
  source 1..75: mol_type = other DNA
aacctgaccatttcgagccttcaggacagtgaccgttacgacagcagacagaacagcgtggctgcaggtggcagc

SEQ ID NO: 171629 - DNA, 75 bp, synthetic construct
  source 1..75: mol_type = other DNA
acggcacgacctggaccgaaaccacgctggatgcgggtaaaaatgtctccctcacaagcggacgtgataccaccc

SEQ ID NO: 171630 - DNA, 75 bp, synthetic construct
  source 1..75: mol_type = other DNA
tgaaagtgttatcaaagaaggaactcctcaaaatagtgtcgttaatggcgtaactagaacgacttattggagtgg

SEQ ID NO: 171631 - DNA, 75 bp, synthetic construct
  source 1..75: mol_type = other DNA
tgctggctggcggcgctggcgttgtgaaaggtggtgcggtactgacggagaaggttgttgctaaggttgtgggta

SEQ ID NO: 171632 - DNA, 75 bp, synthetic construct
  source 1..75: mol_type = other DNA
ggctcactccccaaagcgtggtttactgagccatggtataaggtctatcgccaggtctcgccggatgcgacagaa

SEQ ID NO: 171633 - DNA, 75 bp, synthetic construct
  source 1..75: mol_type = other DNA
gagctatgcagcatgttatagtgagttatctgttcagcacaatttggttgttcaggggattttgcacttagtcaa

SEQ ID NO: 171634 - DNA, 75 bp, synthetic construct
  source 1..75: mol_type = other DNA
gtgacccattattcatgtgtcgattatattaaattttttaatcatgaaaagatgaaagatttagttgaaagtatt

SEQ ID NO: 171635 - DNA, 75 bp, synthetic construct
  source 1..75: mol_type = other DNA
acaatccaccataaggaagacatgataaggaaattaaaaaacaaatataaaaaatacatatccgaattaaatgaa

SEQ ID NO: 171636 - DNA, 75 bp, synthetic construct
  source 1..75: mol_type = other DNA
gttgctaaaatcgacttctgtattaaacgtatccggatgcgtgaacaaatgagcaggataatccggaatactggc

SEQ ID NO: 171637 - DNA, 75 bp, synthetic construct
  source 1..75: mol_type = other DNA
atcaacttgctcagcagaatctggttgcctggatgattgacgtcatccgtcacgcaataagcggcacgcaggaga

SEQ ID NO: 171638 - DNA, 75 bp, synthetic construct
  source 1..75: mol_type = other DNA
atatgtccgcgtccctaaagggaatgtggggccgtttaaagtaccgcctttgctttcagatgataaagccctttt

SEQ ID NO: 171639 - DNA, 75 bp, synthetic construct
  source 1..75: mol_type = other DNA
gttgatcgcaaggttatcagccttgatgcttccgtgctcttcgatatgccaagcccaactatgcgcatcctcaat

SEQ ID NO: 171640 - DNA, 75 bp, synthetic construct
  source 1..75: mol_type = other DNA
cgtttttgattattcccgcacactcgcgcagaaggaattccccgtcgggctacggtcatggttaatgcgggaata

SEQ ID NO: 171641 - DNA, 75 bp, synthetic construct
  source 1..75: mol_type = other DNA
ttccccgtcgggctacggtctctgttaatacgggaacacggcgacgatacagcgcatgatgtgtcaggcttgaat

SEQ ID NO: 171642 - DNA, 75 bp, synthetic construct
  source 1..75: mol_type = other DNA
ccgtaaaagctggaatgaaaaagtcagccaaagctacttatttaatggatttcagttccggtggaaaaataaaca

SEQ ID NO: 171643 - DNA, 75 bp, synthetic construct
  source 1..75: mol_type = other DNA
tttcccccaaaactcgctccctcatcctctggacagaacgaggcgcagcccgtcacgccaaaatgctcgaaaccg

SEQ ID NO: 171644 - DNA, 75 bp, synthetic construct
  source 1..75: mol_type = other DNA
caaccatctttaagaggtttgcaaatttcccccaaaactcgctccctcatcctctggacagaacgaggcgcagcc

SEQ ID NO: 171645 - DNA, 75 bp, synthetic construct
  source 1..75: mol_type = other DNA
taatgctttcccgatttatccgtggcgcaggtatggggttaggtgcgtcgggtattgtatttacagtctggttct

SEQ ID NO: 171646 - DNA, 75 bp, synthetic construct
  source 1..75: mol_type = other DNA
ccgggatcgcctacgtgccgctgatgtgggtgatcaacgagatcaatcgcggggaactggagatcctgctgccac

SEQ ID NO: 171647 - DNA, 75 bp, synthetic construct
  source 1..75: mol_type = other DNA
cagatgagcgtttcgtccatcagtcagacggtgtcaaaactggaagatgagttgcaggtaaagctgttaaaccgt

SEQ ID NO: 171648 - DNA, 75 bp, synthetic construct
  source 1..75: mol_type = other DNA
tccgactgaaaagggtgccacacggaaatttctgactggcacaacacgcgtcgatgttgttgcaacaggagggac

SEQ ID NO: 171649 - DNA, 75 bp, synthetic construct
  source 1..75: mol_type = other DNA
tgcagataattatgggtgggcatcttatattttccctaaccataataaagtggggtttggagctattgagaaaga

SEQ ID NO: 171650 - DNA, 75 bp, synthetic construct
  source 1..75: mol_type = other DNA
tttgctggttatcgcagcgtattgcgcaatggagtttcgtggtttcttcccacgtagcgatcggccactcatcaa

SEQ ID NO: 171651 - DNA, 75 bp, synthetic construct
  source 1..75: mol_type = other DNA
gtcttttgttaaggctgaaatacccaaccccgccgattatacctaagccaaaaccgatgatgacgggactggcgc

SEQ ID NO: 171652 - DNA, 75 bp, synthetic construct
  source 1..75: mol_type = other DNA
aaatcggtattcactggctggtctttttactggttatcgcagcttactgtgcgatggagtttcgtggatttttcc

SEQ ID NO: 171653 - DNA, 75 bp, synthetic construct
  source 1..75: mol_type = other DNA
cctgccgtaaatacctcatctggctggtcaactgccacatcttgttcaccagtatccattatggcgtcacggggc

SEQ ID NO: 171654 - DNA, 75 bp, synthetic construct
  source 1..75: mol_type = other DNA
cgtagcacacgcagcattggcctgaccgaagccggtagaatttactaccagggctgccgtcggatgctccatgaa

SEQ ID NO: 171655 - DNA, 75 bp, synthetic construct
  source 1..75: mol_type = other DNA
tcattcgccatcttggggaatccgaatacataaggattaaaatctgggaggtggctccagccgttcttggtagcc

SEQ ID NO: 171656 - DNA, 75 bp, synthetic construct
  source 1..75: mol_type = other DNA
aattattcaaaattgctctggcatcgctggaagcagagccagttggtgatttttatgaatacaaaccggatgact

SEQ ID NO: 171657 - DNA, 75 bp, synthetic construct
  source 1..75: mol_type = other DNA
caattgcagtgggtgaagtcttcaacagcatctgggactgcaaacagctgattgaagaacaacttatcgactata

SEQ ID NO: 171658 - DNA, 75 bp, synthetic construct
  source 1..75: mol_type = other DNA
taccgcagaatccgcggcaacgcgcgccgagacagcagcaaaacgggcagaggatattgcatccgccgtggcgct

SEQ ID NO: 171659 - DNA, 75 bp, synthetic construct
  source 1..75: mol_type = other DNA
gtctgcttcaaaagatgaggcgaccagacaagcgtcagcagcgaatggcagggccacgaccgcatcgacgaaggc

SEQ ID NO: 171660 - DNA, 75 bp, synthetic construct
  source 1..75: mol_type = other DNA
gtctgcttcaaaagatgaggcgaccagacaagcgtcagcagcgaatggcagggccacgactgcaccgacgaaggc

SEQ ID NO: 171661 - DNA, 75 bp, synthetic construct
  source 1..75: mol_type = other DNA
tccggccgaatccgcggcaacgcgcgccgagacagcagcaaaacgggcagaggatattgcatccgccgtggcgct

SEQ ID NO: 171662 - DNA, 75 bp, synthetic construct
  source 1..75: mol_type = other DNA
ttctgcggaatccgcggcaacgcgcgccgagacagcagcaaaacgggcagaggatattgcatccgccgtggcgct

SEQ ID NO: 171663 - DNA, 75 bp, synthetic construct
  source 1..75: mol_type = other DNA
ttcagctgaatccgcggcaacgcgcgccgagacagcagcaaaacgggcagaggatattgcatccgccgtggcgct

SEQ ID NO: 171664 - DNA, 75 bp, synthetic construct
  source 1..75: mol_type = other DNA
cgaagccactgaacaggccactgcagcagcgaggtctgcttccgctgcgaggacatccgagacgaacgcgaaagc

SEQ ID NO: 171665 - DNA, 75 bp, synthetic construct
  source 1..75: mol_type = other DNA
ccagcacatcagcccgtgaggcggcaacccatgcggctgatgctgcggactcagcacgcgcagccagcacgtcag

SEQ ID NO: 171666 - DNA, 75 bp, synthetic construct
  source 1..75: mol_type = other DNA
cgaagccgctgtacaggccagcgcagcagcgaggtctgcttccgcagcgaagacatccgaaacgaatgcgaaagc

SEQ ID NO: 171667 - DNA, 75 bp, synthetic construct
  source 1..75: mol_type = other DNA
gtctgcttcaaaagatgaggcgaccagacaagcgtcagcagcgaatggcagcgccacgacggcatcgacgaaggc

SEQ ID NO: 171668 - DNA, 75 bp, synthetic construct
  source 1..75: mol_type = other DNA
gtctgcttcaaaagatgaggcgaccagacaagcgtcagcagcgaatggcagcgccacgactgcagcgacgaaggc

SEQ ID NO: 171669 - DNA, 75 bp, synthetic construct
  source 1..75: mol_type = other DNA
gtctgcttcaaaagatgaggcgaccagacaagcgtcagcagcgaatggcagtgccacgacagcaacgacgaaggc

SEQ ID NO: 171670 - DNA, 75 bp, synthetic construct
  source 1..75: mol_type = other DNA
ataccttatggctcactggcaactgccatgacccaacaaccacaatcccgcgcccgtctgggcgcggctcgcggg

SEQ ID NO: 171671 - DNA, 75 bp, synthetic construct
  source 1..75: mol_type = other DNA
cagcgtaaatacccggtggggcaaattccgccccttcttgctgttcggcactgcaccgttaatgatcttcagcgt

SEQ ID NO: 171672 - DNA, 75 bp, synthetic construct
  source 1..75: mol_type = other DNA
gccgcgaagaagtcagccagtgatgccagcacatctgcccgtgaggcggcaacccatgcgactgatgctgcaggc

SEQ ID NO: 171673 - DNA, 75 bp, synthetic construct
  source 1..75: mol_type = other DNA
aggctcatgacccacctttcagcgcagggaatgcaggccaaccagcagatattttttctgtccgacggcgcggat

SEQ ID NO: 171674 - DNA, 75 bp, synthetic construct
  source 1..75: mol_type = other DNA
accggacgctgtttggcgttattccggtatccgggcttcgggtgtaccggtgccgttgtgaagagagtgatacaa

SEQ ID NO: 171675 - DNA, 75 bp, synthetic construct
  source 1..75: mol_type = other DNA
ggtatcagacgattattgctgaaattaaggggtgccataatgtaaatatacaacatccacttgcttcatatttca

SEQ ID NO: 171676 - DNA, 75 bp, synthetic construct
  source 1..75: mol_type = other DNA
aaagcgagagcgcggcagccggttctgcgacttcagcagctggatcagcaactgctgcggctaacagccagaaag

SEQ ID NO: 171677 - DNA, 75 bp, synthetic construct
  source 1..75: mol_type = other DNA
accacgaaggcgtcagaagcagccacctcagcccgggatgcggcggcctcaaaagaggcagcgaaatcatcagaa

SEQ ID NO: 171678 - DNA, 75 bp, synthetic construct
  source 1..75: mol_type = other DNA
ggccatcagataccgttccgtctggctatgccctgatgcaggggcagacttttgacaaatctgcatatccgaaac

SEQ ID NO: 171679 - DNA, 75 bp, synthetic construct
  source 1..75: mol_type = other DNA
agcagccacttctgcatccactgcgacgacgaaagcgtcagaagccgccacttcagcccgggatgcggcggcctc

SEQ ID NO: 171680 - DNA, 75 bp, synthetic construct
  source 1..75: mol_type = other DNA
acgcgaaaaatagcgagacagccgcaaagacgagcgaaaccaacgcaaagtccagccagacggcagcgaaaacaa

SEQ ID NO: 171681 - DNA, 75 bp, synthetic construct
  source 1..75: mol_type = other DNA
cagaacataatattcgtcaccttcagaacgatgataaaggcatgaccctgctggaagttctcggtgttctggtcg

SEQ ID NO: 171682 - DNA, 75 bp, synthetic construct
  source 1..75: mol_type = other DNA
agaggaggataaaggtttaacattactggaaattgccggcgcactgattatcatcggtattgtggttgctctcgc

SEQ ID NO: 171683 - DNA, 75 bp, synthetic construct
  source 1..75: mol_type = other DNA
cgctgtacggcattgtgtcgtgcatcattccgtttttcctgatctataaagtttcacaactggaaaaattgcgtg

SEQ ID NO: 171684 - DNA, 75 bp, synthetic construct
  source 1..75: mol_type = other DNA
aggcagagtatgccaaagttgataatttagtatatgccagttatgtacatactgaatcaagaaagcacgaccccc

SEQ ID NO: 171685 - DNA, 75 bp, synthetic construct
  source 1..75: mol_type = other DNA
tggctacaggtatatctgtagttttcatctactgtttgctggttccgtcgctgatctcggctaaaagcgatattg

SEQ ID NO: 171686 - DNA, 75 bp, synthetic construct
  source 1..75: mol_type = other DNA
cactgattttgattgatgttggcttgcctaaatctatccggcgtcattatgggcatggatgcccgcgcctcgatg

SEQ ID NO: 171687 - DNA, 75 bp, synthetic construct
  source 1..75: mol_type = other DNA
agaggtgcgtaaacgtaaaacacctcaggaaaaaatcgcaattattcaacagactatggagcctggcatgacggt

SEQ ID NO: 171688 - DNA, 75 bp, synthetic construct
  source 1..75: mol_type = other DNA
tcgggcggcttaccggttccgatcgcgtcccactggtggtttatgatggcttgccgcaggacagcatcatcgaaa

SEQ ID NO: 171689 - DNA, 75 bp, synthetic construct
  source 1..75: mol_type = other DNA
ggactggcaaaaataagaaaacttgtcgattacaatatcattccaatgatggacctattgatttggtcaaaattc

SEQ ID NO: 171690 - DNA, 75 bp, synthetic construct
  source 1..75: mol_type = other DNA
acgatcagaaattgccgtttacacgctacgacttcggctgggttttattatgcataggcatggcgattggtgccg

SEQ ID NO: 171691 - DNA, 75 bp, synthetic construct
  source 1..75: mol_type = other DNA
attatcaatctgttaagccgaattattgatacccagaaaattaactcacgcatgctgacactggcaatttgcgct

SEQ ID NO: 171692 - DNA, 75 bp, synthetic construct
  source 1..75: mol_type = other DNA
ttcacaactgaaaaaactacgcgggctaaaaacatggcttatcctgttttatggtattttgctgtgcttttcgcc

SEQ ID NO: 171693 - DNA, 75 bp, synthetic construct
  source 1..75: mol_type = other DNA
cataccaggtacaagggacggttggtctgggcattggcacgatggcgaatacgaactctgctggcgcgcataccc

SEQ ID NO: 171694 - DNA, 75 bp, synthetic construct
  source 1..75: mol_type = other DNA
tgttttatggcaaattaatccgtttcctgattatccattttttgcgttaaatcagagtgtaagtaatacaaatac

SEQ ID NO: 171695 - DNA, 75 bp, synthetic construct
  source 1..75: mol_type = other DNA
gatggattgtaaatgctacgcgatcgcgatggggtaagttcaaaccctggatcctgatcggtacgttggcaaact

SEQ ID NO: 171696 - DNA, 75 bp, synthetic construct
  source 1..75: mol_type = other DNA
atcaagggcaaacccgccagtggccgggccgtattgtctcaggaacaggacggcattaaatcgcacacccacagc

SEQ ID NO: 171697 - DNA, 75 bp, synthetic construct
  source 1..75: mol_type = other DNA
aggtttattacaggtattcgcctgggcggtctgtcatctgttcagacatggaatggtcccggctggtctgacagg

SEQ ID NO: 171698 - DNA, 75 bp, synthetic construct
  source 1..75: mol_type = other DNA
gtatcttttatcgttcagcgcgtgatggttatggctttgaagctaactggtcagagttttacaccacaacccgca

SEQ ID NO: 171699 - DNA, 75 bp, synthetic construct
  source 1..75: mol_type = other DNA
agcagtcaggatctggtttcggcaattcagggttacgccggtacaggtaaaacaaccctccttcagtgcttgatt

SEQ ID NO: 171700 - DNA, 75 bp, synthetic construct
  source 1..75: mol_type = other DNA
cgatgaacacggatttttatcgcaacgcaaaccttgacccgtttgaaaaaaaatcggcggtaaactatacggttg

SEQ ID NO: 171701 - DNA, 75 bp, synthetic construct
  source 1..75: mol_type = other DNA
ccagacgctaaaaagcggtaaggaactctgggtcgttgaaaacgtgtcgcagatgggggcagagaatgttatacg

SEQ ID NO: 171702 - DNA, 75 bp, synthetic construct
  source 1..75: mol_type = other DNA
aaattctgtttgcggtgtctgccgcgacaacgcttgccgtagaggtcgccgagcgatgtaacctgacgctggtag

SEQ ID NO: 171703 - DNA, 75 bp, synthetic construct
  source 1..75: mol_type = other DNA
atattaccttccggtgagctggcgggcggacatgaagacgtgggccgccatgtggcgctggataaattactaggc

SEQ ID NO: 171704 - DNA, 75 bp, synthetic construct
  source 1..75: mol_type = other DNA
agtcggtgttcgccgttaacggcttcggctttgcgggacgtggtcagaataccggtattgcgttcgtttccttga

SEQ ID NO: 171705 - DNA, 75 bp, synthetic construct
  source 1..75: mol_type = other DNA
tcgattatcttcaagtgctttttcggtttctcctgaggatatatcctgtataccggaggcattgcagtgtccgat

SEQ ID NO: 171706 - DNA, 75 bp, synthetic construct
  source 1..75: mol_type = other DNA
acatgccattgagttgattcgatcagggtggattgctggatatgaaagtccaaatgtcagcggagtatatttgtt

SEQ ID NO: 171707 - DNA, 75 bp, synthetic construct
  source 1..75: mol_type = other DNA
cgttctgtgatatcggccttcttatgcttaaacctgttctcaaccagacgccccgcagctcgttccaggtgctga

SEQ ID NO: 171708 - DNA, 75 bp, synthetic construct
  source 1..75: mol_type = other DNA
tttaagcaatttgcaggtaagaataaacataatgcgaaaggcttaatgcaaatgcaacgaaatgcagtgaggcag

SEQ ID NO: 171709 - DNA, 75 bp, synthetic construct
  source 1..75: mol_type = other DNA
ttatgttacagatggacaggctggttcagctgatacaggactccctgaatgaagaactggcacaggtactgtttc

SEQ ID NO: 171710 - DNA, 75 bp, synthetic construct
  source 1..75: mol_type = other DNA
taccggaggcattgcagtgtccgattacattggcaattccagagcgtggtgtttttcttagaaactccgaggaat

SEQ ID NO: 171711 - DNA, 75 bp, synthetic construct
  source 1..75: mol_type = other DNA
cagtatgaccgggtaatggaagagctttacccgcgtctgaaatcactcaccctgctggcgcgtcagtacgatatt

SEQ ID NO: 171712 - DNA, 75 bp, synthetic construct
  source 1..75: mol_type = other DNA
ccattgcccaggtcactggctcggcgcatgtcggtaatttgtatgttaatcgcaatatggttggtgcggtggttg

SEQ ID NO: 171713 - DNA, 75 bp, synthetic construct
  source 1..75: mol_type = other DNA
ccgcatccgaaaattcccctgccgcgcgatctttacggtcaggggcgcgataactcggcaggattagatcttgcc

SEQ ID NO: 171714 - DNA, 75 bp, synthetic construct
  source 1..75: mol_type = other DNA
cgtaatatggttggcgcagtagttggtgtgcagccgttcggcggcgaagggttgtccggtacaggcccgaaagcg

SEQ ID NO: 171715 - DNA, 75 bp, synthetic construct
  source 1..75: mol_type = other DNA
agggtgaaaccgtgggcgcacaactgacgggtgatgatcgcgtgcgcggggtgatgtttaccggttcaaccgaag

SEQ ID NO: 171716 - DNA, 75 bp, synthetic construct
  source 1..75: mol_type = other DNA
cccgacaaagccacccgtgatgcgttaattcgcgacaaaatcagcaacggtaactggcaatcacacattggtcgt

SEQ ID NO: 171717 - DNA, 75 bp, synthetic construct
  source 1..75: mol_type = other DNA
gttggtgccattacccatctgttggcaattttcgttccgatggtaacccccgcgttaatcgtgggtgcggcctta

SEQ ID NO: 171718 - DNA, 75 bp, synthetic construct
  source 1..75: mol_type = other DNA
ttacagctgtgtcagcaggcgggcaaagtcggttaacgtcagtttcaaaatgcccatccggggtgaaatcgcaca

SEQ ID NO: 171719 - DNA, 75 bp, synthetic construct
  source 1..75: mol_type = other DNA
cgccatcgacgtgttcacccgctgcgtgctcggcatggtcgtcacgctggaagcgccgtctgccccgatttattg

SEQ ID NO: 171720 - DNA, 75 bp, synthetic construct
  source 1..75: mol_type = other DNA
tcctggtggtcggcacgatttatctacttagcgtgctggaggcagtaggcgatatcaccgccacggcaatggttt

SEQ ID NO: 171721 - DNA, 75 bp, synthetic construct
  source 1..75: mol_type = other DNA
taaaaaacgcccgttgctgcacgttgaaacaccgccgcgtgaagttctggaagcgttggccaatgaacgcaatcc

SEQ ID NO: 171722 - DNA, 75 bp, synthetic construct
  source 1..75: mol_type = other DNA
attagaggagctttttggcacattaaaaattagccgctggatattagctacaccatataataaatcggcgaaatt

SEQ ID NO: 171723 - DNA, 75 bp, synthetic construct
  source 1..75: mol_type = other DNA
tcaagaattgaaattgagagatgcctgaatagcaaaaaagcgcctttagggcgcttttttacattggtgggtcgt

SEQ ID NO: 171724 - DNA, 75 bp, synthetic construct
  source 1..75: mol_type = other DNA
gggaacagcaaccggctaatgcggagccagaagaacaggttgatccgcgcaaagctgccgtcgaagcggctattg

SEQ ID NO: 171725 - DNA, 75 bp, synthetic construct
  source 1..75: mol_type = other DNA
gcgcaagctggaacagcaacaggctaatgcggagccagaacaacaggtcgatccgcgcaaagccgccgtcgaagc

SEQ ID NO: 171726 - DNA, 75 bp, synthetic construct
  source 1..75: mol_type = other DNA
cagtctgactctcgcaatatcttatgaggtttcagttcatgtcctgcggagctctctgagcgaagcgggtttatc

SEQ ID NO: 171727 - DNA, 75 bp, synthetic construct
  source 1..75: mol_type = other DNA
tgcgccgctggtattgctggatgaacctacagaaggcttagatgccacaaccgaaagtcagatccttgaattgct

SEQ ID NO: 171728 - DNA, 75 bp, synthetic construct
  source 1..75: mol_type = other DNA
ggcaagctgagctgaccatttttggtgccagcgatcgttatcgcacgcagttagagaataccgaaattcagtggc

SEQ ID NO: 171729 - DNA, 75 bp, synthetic construct
  source 1..75: mol_type = other DNA
aagcggctctacgacagaccatcagcgttgttcctcagcgagtgcatctgtttagcgccacgctgcgtgataatc

SEQ ID NO: 171730 - DNA, 75 bp, synthetic construct
  source 1..75: mol_type = other DNA
ccgaaagccagatccttgaattgcttgctgaaatgatgcacggaaaaacggtattaatggtgacccatcggcttc

SEQ ID NO: 171731 - DNA, 75 bp, synthetic construct
  source 1..75: mol_type = other DNA
tttagcgccacgctgcgtgataatctgttactcgcctcgcctggcagtagtgatgaggctctgtcggagatcttg

SEQ ID NO: 171732 - DNA, 75 bp, synthetic construct
  source 1..75: mol_type = other DNA
cctctccgcctcagcggttgcgggcgttgcaggactgtacagcttcaactatatgctccccgccgcaggggtgcg

SEQ ID NO: 171733 - DNA, 75 bp, synthetic construct
  source 1..75: mol_type = other DNA
ggaaaatgccctttcagcaaactgtcagtgccggatgctcacccgtgtccgacgcacgcactccacctcacccgt

SEQ ID NO: 171734 - DNA, 75 bp, synthetic construct
  source 1..75: mol_type = other DNA
atgaaactgacatttcagatagttataaccgatgaatcaggttccagtcgaacggaagaactgatgagtctgcag

SEQ ID NO: 171735 - DNA, 75 bp, synthetic construct
  source 1..75: mol_type = other DNA
tgccgctgtgaagaaagtgcaacaaaaacagtcagtctgctcagtgactgggctggagatcacactcaccctgca

SEQ ID NO: 171736 - DNA, 75 bp, synthetic construct
  source 1..75: mol_type = other DNA
actccggcaactctaccaatttctccttgtcgccatcaatcgcatcagatgcatgtgaaaaagctgggaaggcta

SEQ ID NO: 171737 - DNA, 75 bp, synthetic construct
  source 1..75: mol_type = other DNA
cagatgcgtgtaaacaggcttatgatgagaataaaggtagaaacaacataaaggtaagatacacattaagttatt

SEQ ID NO: 171738 - DNA, 75 bp, synthetic construct
  source 1..75: mol_type = other DNA
atcggcaatggtcctggctatcagtgcggtcattgtttctggtgttttgtactattataatcatgcccaggaaaa

SEQ ID NO: 171739 - DNA, 75 bp, synthetic construct
  source 1..75: mol_type = other DNA
cgtaatatggtgggcgcagtggttggggtgcaaccgttcggcggcgaagggttgtccggtaccgggccgaaagca

SEQ ID NO: 171740 - DNA, 75 bp, synthetic construct
  source 1..75: mol_type = other DNA
tgggcgagcagttcgtcactggcgaaaccatcgcggaagcgttagccaatgcccgcaagctggaagagaaaggtt

SEQ ID NO: 171741 - DNA, 75 bp, synthetic construct
  source 1..75: mol_type = other DNA
aacttattgtcgctgtaagtgaaaaggatgccatcaaattaaaagacaattttgatattattgggatgttgtcat

SEQ ID NO: 171742 - DNA, 75 bp, synthetic construct
  source 1..75: mol_type = other DNA
tcgtggcatctatgaaggtccgggcatttcaatcaagctgtcggcgctgcatccgcgctacagccgcgcccagta

SEQ ID NO: 171743 - DNA, 75 bp, synthetic construct
  source 1..75: mol_type = other DNA
aacgcgcggcgattttgcatcgcgctgccgtgctaatggaaagccagatgcagcaactgattggtattctggtgc

SEQ ID NO: 171744 - DNA, 75 bp, synthetic construct
  source 1..75: mol_type = other DNA
tcgtggcatctatgaaggtccgggcatttcaatcaagctgtcggcgctgcatccgcgttatagccgcgcccagta

SEQ ID NO: 171745 - DNA, 75 bp, synthetic construct
  source 1..75: mol_type = other DNA
cggtaatggtaatgcgggtagttcagcgtgtgccagcgcaagactgaaagttattgcgtcgaaagaagggtacga

SEQ ID NO: 171746 - DNA, 75 bp, synthetic construct
  source 1..75: mol_type = other DNA
ataaagcggggctaaaatctttaacaatttatgaagaggctacaggatcagtcctctactggcagcctggcatga

SEQ ID NO: 171747 - DNA, 75 bp, synthetic construct
  source 1..75: mol_type = other DNA
tgatgagactcttgctgaaattctccgtcgcgtcggtctggagaaactactcgaagacacagggctcaacagttg

SEQ ID NO: 171748 - DNA, 75 bp, synthetic construct
  source 1..75: mol_type = other DNA
gtgaaatggtgctcttcatggggttcgctaaatccggtaaatcgaccgcaatgggtgagttttccataaacgcaa

SEQ ID NO: 171749 - DNA, 75 bp, synthetic construct
  source 1..75: mol_type = other DNA
aaaaaataaaactcacagtattgaattcaaaattaatattgataataaattgtttgaaattcaatcaacatttgt

SEQ ID NO: 171750 - DNA, 75 bp, synthetic construct
  source 1..75: mol_type = other DNA
cagcagggctggccggcggtctaaccggaaacagcaccgcatcagcagcagtgggagcacagagcgggaagaatg

SEQ ID NO: 171751 - DNA, 75 bp, synthetic construct
  source 1..75: mol_type = other DNA
ttaggtgttatggcctgattggagttacttacgcatattgtttgaattattttatttatttggttttttctgttg

SEQ ID NO: 171752 - DNA, 75 bp, synthetic construct
  source 1..75: mol_type = other DNA
accgacctgtaccaaggggtaatggcggcctacaaaaccaacctgcaaaacacaacttatacaccgacatcaagc

SEQ ID NO: 171753 - DNA, 75 bp, synthetic construct
  source 1..75: mol_type = other DNA
caggatgtcagcggtatttatactgcccagaaaaacgcgctcagcacgatgattaacacgatggactcggcagca

SEQ ID NO: 171754 - DNA, 75 bp, synthetic construct
  source 1..75: mol_type = other DNA
aattgctggatggggttgaggttgagtgggtacctgtatcagaactatttcaaattaaaaatgggtatacacctt

SEQ ID NO: 171755 - DNA, 75 bp, synthetic construct
  source 1..75: mol_type = other DNA
gcttaccgctgagcttaacatgcgtaaaaaacagtacaattactatcgcgaccagttgttgagttttaaagaggg

SEQ ID NO: 171756 - DNA, 75 bp, synthetic construct
  source 1..75: mol_type = other DNA
caggatattgtgtctgccgcaaccaatcctgacgatctgtcccgtcaggcgctggtcacgatattcggtgatgtg

SEQ ID NO: 171757 - DNA, 75 bp, synthetic construct
  source 1..75: mol_type = other DNA
tttattcggtgctgcactgaccaatgtacaaataagttcatttacaggtatatttagcctcgcaggtttcttact

SEQ ID NO: 171758 - DNA, 75 bp, synthetic construct
  source 1..75: mol_type = other DNA
gggctggccctgttctggttcggcttcattggtatccgcaaggtcatcagcgcggctcaggccggacgttttcag

SEQ ID NO: 171759 - DNA, 75 bp, synthetic construct
  source 1..75: mol_type = other DNA
ttaataacgatgaaaaagattggtgactatacactaagcgcagttgaaacaacttatggcacatatattgctgca

SEQ ID NO: 171760 - DNA, 75 bp, synthetic construct
  source 1..75: mol_type = other DNA
agatgaaaaacatcggcgattatacattgggtacaacagaaattctctggacaggatatacaactgtcagagttc

SEQ ID NO: 171761 - DNA, 75 bp, synthetic construct
  source 1..75: mol_type = other DNA
ctcaagatgaaagtaatgcagctaatagcacagacccacaaagtgtggtcatgaaaagtatagcgccaaccatat

SEQ ID NO: 171762 - DNA, 75 bp, synthetic construct
  source 1..75: mol_type = other DNA
tcagtcttgctggtttcttgctgatatacgccagaatttgtacaaccactgtagctgccatatttgcccttcagg

SEQ ID NO: 171763 - DNA, 75 bp, synthetic construct
  source 1..75: mol_type = other DNA
tcaagattacaaacatttcctttaagctatgtttttaaaggttcgctgaattcaatggcaaagcaaatcggcaat

SEQ ID NO: 171764 - DNA, 75 bp, synthetic construct
  source 1..75: mol_type = other DNA
tgagtcatcaggttgaaaatatacctgtaccaatcccctgcccggataatccggaaaaatcccttgccatccagt

SEQ ID NO: 171765 - DNA, 75 bp, synthetic construct
  source 1..75: mol_type = other DNA
cattaccacgccagcagctactccagcagaacggggaaaacctccatcaccaaaattggtagatgtaagcaaaga

SEQ ID NO: 171766 - DNA, 75 bp, synthetic construct
  source 1..75: mol_type = other DNA
aatggctgaattgactaagcggcttgccgattacctgacaaaagaaaaagccccgaagaacggcgaattcttcga

SEQ ID NO: 171767 - DNA, 75 bp, synthetic construct
  source 1..75: mol_type = other DNA
gccgttacatcgaaaaggcagaagaatgcttaactcggttacaggctactgcaatgcagtttatctctgatcgta

SEQ ID NO: 171768 - DNA, 75 bp, synthetic construct
  source 1..75: mol_type = other DNA
gcgtgccgatgacgacgaactggtctggcagcaggttctggagtacgccaagagaaaacctataggtgctccaat

SEQ ID NO: 171769 - DNA, 75 bp, synthetic construct
  source 1..75: mol_type = other DNA
cacccatctgggaacaagccaggaccggggaagccgggccgcttacggttacatctacctgatagacagcatgat

SEQ ID NO: 171770 - DNA, 75 bp, synthetic construct
  source 1..75: mol_type = other DNA
tttcctctgccggcagcaactccatttttggtcgactggtcaatgccgttagtggattatctgacgccgcaaaag

SEQ ID NO: 171771 - DNA, 75 bp, synthetic construct
  source 1..75: mol_type = other DNA
ttaaaactcctagggaatgacctgacgttatttaccaatcaaattgcaaccatacattcaggaactggaaccacc

SEQ ID NO: 171772 - DNA, 75 bp, synthetic construct
  source 1..75: mol_type = other DNA
cagcaatagaaacataagacacgcacctaatataagagaggagcaaattaaaaggatgaataacgacaacaataa

SEQ ID NO: 171773 - DNA, 75 bp, synthetic construct
  source 1..75: mol_type = other DNA
gtgaaattgagttgcgccagaaacaatacgaatactaccgtgatttactgttcaatttcccgaaacctgaaactg

SEQ ID NO: 171774 - DNA, 75 bp, synthetic construct
  source 1..75: mol_type = other DNA
tcgtcttgtcaataccgttactggcttacctgacgccgcaaaagcttttatggaagcagccgctccaccgctcta

SEQ ID NO: 171775 - DNA, 75 bp, synthetic construct
  source 1..75: mol_type = other DNA
actcgctgctgcgaaggatggaaagctggggacgaggcctaaagcgtggcgcgatcttgtagtggatggtgaaag

SEQ ID NO: 171776 - DNA, 75 bp, synthetic construct
  source 1..75: mol_type = other DNA
ttagccgaaaatgtgttaattgcaccaggctctggcaaaccggatgcggcattctggtcggcattaatcaaagaa

SEQ ID NO: 171777 - DNA, 75 bp, synthetic construct
  source 1..75: mol_type = other DNA
gttaaaagctgggatgaaagcaagaaacccatctatatcgccaaaacgcaaaacaaaaatctcggatcttggact

SEQ ID NO: 171778 - DNA, 75 bp, synthetic construct
  source 1..75: mol_type = other DNA
gtgatgattgggcttattttggcctccgtagtcacctgggcaatcttcttcagtaagagcgtagagttcttcaat

SEQ ID NO: 171779 - DNA, 75 bp, synthetic construct
  source 1..75: mol_type = other DNA
atgactgtatttctcatggccgttttctttggcctcttaaaaactggctctctcattgccctacttgttgatgcc

SEQ ID NO: 171780 - DNA, 75 bp, synthetic construct
  source 1..75: mol_type = other DNA
gcgctggacgccatgatgcaggttacagaaaacctttcatcgtgtactgccccctcgctgaccgttgtctggaac

SEQ ID NO: 171781 - DNA, 75 bp, synthetic construct
  source 1..75: mol_type = other DNA
tttatcaccgctagcgtgctgctactctgtttttttgtcaccctattttgtatcaaagaaaaattccaaccggtc

SEQ ID NO: 171782 - DNA, 75 bp, synthetic construct
  source 1..75: mol_type = other DNA
ggtgcactactccccgccgtacagacactgttggtttacaactcgagcaaccagatcgccgggcgtatcttcagc

SEQ ID NO: 171783 - DNA, 75 bp, synthetic construct
  source 1..75: mol_type = other DNA
cgacaggctcaattgcccccattctgacgctgtatgtccgcgaactggcgggtaacgtcagtaacgtcgccttta

SEQ ID NO: 171784 - DNA, 75 bp, synthetic construct
  source 1..75: mol_type = other DNA
gaatcggaccagaaaagatcctgattaccgcgttgatcttttctgtactactgttgataccaatgtcttacgtcc

SEQ ID NO: 171785 - DNA, 75 bp, synthetic construct
  source 1..75: mol_type = other DNA
ccagtgttgttctgtttaacgcaatctattcgtggaacagtttacgccgtcgccgattacctcaagtatcgaact

SEQ ID NO: 171786 - DNA, 75 bp, synthetic construct
  source 1..75: mol_type = other DNA
gtccggtattctttattaccgccagtgtgctcatactctgctttttcgtcaccctgttttgcatcagagaaaaat

SEQ ID NO: 171787 - DNA, 75 bp, synthetic construct
  source 1..75: mol_type = other DNA
tatatatacctcattgacggcatgatacgccctgcattaatggtcctgggttttattttcgcctccgttgcaatt

SEQ ID NO: 171788 - DNA, 75 bp, synthetic construct
  source 1..75: mol_type = other DNA
tcaggcgctggtcaccatattcggagatgtggtcgtcaacccgttcagtttcacgaacgccagtgtcatcggcaa

SEQ ID NO: 171789 - DNA, 75 bp, synthetic construct
  source 1..75: mol_type = other DNA
agatgctgatcaacgcctacgcctttggcctgtatcaatcgttagggatttttattccgctgattgtcactaact

SEQ ID NO: 171790 - DNA, 75 bp, synthetic construct
  source 1..75: mol_type = other DNA
ttcatcaatcggagagtccggcccaaccgatttatatcaggcagtactggctgcataccggacaaacttgcaaaa

SEQ ID NO: 171791 - DNA, 75 bp, synthetic construct
  source 1..75: mol_type = other DNA
aacgccgggataacaacaccggaacctttgaagacgtggaaagtatcattcagtcggctgcatccagctatgaaa

SEQ ID NO: 171792 - DNA, 75 bp, synthetic construct
  source 1..75: mol_type = other DNA
aatggtaaccaatatatttgcgcttcaggcatatatgccagattatattatagctttcctcggaggcagagaagc

SEQ ID NO: 171793 - DNA, 75 bp, synthetic construct
  source 1..75: mol_type = other DNA
taattttctgggcggacgtgacggtgttaatatgctggggaatatggtttcttcagtcaaagatattattgccgg

SEQ ID NO: 171794 - DNA, 75 bp, synthetic construct
  source 1..75: mol_type = other DNA
gtgatgatcgggctgattttggcctccgtcgtcacctgggcaatcttcttcagtaagagcgttgagttcttcaac

SEQ ID NO: 171795 - DNA, 75 bp, synthetic construct
  source 1..75: mol_type = other DNA
gcacgccgatattgttgttaagtgtgtgatgatcgggctgattttggcctccgtcgtcacctgggcaatcttctt

SEQ ID NO: 171796 - DNA, 75 bp, synthetic construct
  source 1..75: mol_type = other DNA
ttgcagacaaaattgcgacatccttatctggaacaggaacatcctcggaccaactaaatccactgataaaaatga

SEQ ID NO: 171797 - DNA, 75 bp, synthetic construct
  source 1..75: mol_type = other DNA
tactcaagatcctcaatcagcaatcttaaaactgataggatttaacctaacaagaatgactaactggacagctac

SEQ ID NO: 171798 - DNA, 75 bp, synthetic construct
  source 1..75: mol_type = other DNA
gatgattgtgcccaccgcttccggctggagtctggcacaactggtcatgctgtggggcgcatccatcatgggcat

SEQ ID NO: 171799 - DNA, 75 bp, synthetic construct
  source 1..75: mol_type = other DNA
gagatcagctttgctatcgcggaagaaattaaaggttattcagtgacggtcgcggatgttatggctctggtgaag

SEQ ID NO: 171800 - DNA, 75 bp, synthetic construct
  source 1..75: mol_type = other DNA
agggtgagttactcatcggctggagtggtacaagcggtgctcatgctccggcatttattcgttcacgacgggata

SEQ ID NO: 171801 - DNA, 75 bp, synthetic construct
  source 1..75: mol_type = other DNA
gcgggaagagatatttacgcatgggtacagggaggattgggtaatgactccaacttattgatagtgttttatgtt

SEQ ID NO: 171802 - DNA, 75 bp, synthetic construct
  source 1..75: mol_type = other DNA
ggttctatggtgaatgataaaaccttagtggaaggtgtttctttaacatataaggaaggcaccaaagtgtatacc

SEQ ID NO: 171803 - DNA, 75 bp, synthetic construct
  source 1..75: mol_type = other DNA
cctctacccaggtgggtaaagagtgccagtttacgacaggtttagccgttgttattgatcctacccacgtaatat

SEQ ID NO: 171804 - DNA, 75 bp, synthetic construct
  source 1..75: mol_type = other DNA
cggatttggggacgaaaaccacatcgtcgtttgattacggcactaaatccacgaataacaccggggcgcatacgc

SEQ ID NO: 171805 - DNA, 75 bp, synthetic construct
  source 1..75: mol_type = other DNA
ttattcttactatatttcggcatatggtttaaatcaaataatctttcggaagttaatttagatgttgagggcagc

SEQ ID NO: 171806 - DNA, 75 bp, synthetic construct
  source 1..75: mol_type = other DNA
ccccgcctgcgcagacgccaatgattgtcgccaacgcctgcccgaaagtgagcctttgcccgatgccgggcagtg

SEQ ID NO: 171807 - DNA, 75 bp, synthetic construct
  source 1..75: mol_type = other DNA
atgattgtgctggttgtgttgttatcactggcggtggcggggctgtttctggcgaagcatgaaaacgccagcctg

SEQ ID NO: 171808 - DNA, 75 bp, synthetic construct
  source 1..75: mol_type = other DNA
tttacctgatgttgatggcaacgcgcaaggcgggttagctttgttaccagcgcatttattaccggcagatttttt

SEQ ID NO: 171809 - DNA, 75 bp, synthetic construct
  source 1..75: mol_type = other DNA
ttaccacgcgttaaacaagcgcacccaggctgcccgattcaccaatggctaaatagcattggcgcacaagtgatc

SEQ ID NO: 171810 - DNA, 75 bp, synthetic construct
  source 1..75: mol_type = other DNA
gactctgttcatagttatcgtcggcgccggatacagcatctaccctgctcagggcagacgctatggcttgtattt

SEQ ID NO: 171811 - DNA, 75 bp, synthetic construct
  source 1..75: mol_type = other DNA
caacatcagatggtgcaaaccagggggggaaaattccactgacatctgggcgtctggcaactcaatatacatcag

SEQ ID NO: 171812 - DNA, 75 bp, synthetic construct
  source 1..75: mol_type = other DNA
cgcatccagtacggatttgggtacgaaaaccacatcgtcgtttgattacgggacgaaaacaacctcactatttga

SEQ ID NO: 171813 - DNA, 75 bp, synthetic construct
  source 1..75: mol_type = other DNA
atacgtcaccagcatattctgctaataagccggaagggttaacggacggtacagtttattcactctatacgccat

SEQ ID NO: 171814 - DNA, 75 bp, synthetic construct
  source 1..75: mol_type = other DNA
gtctgttctaccgttcctcaagagatggctatggttttgaggaagactgggcagaagtttatacctcgaaaaatc

SEQ ID NO: 171815 - DNA, 75 bp, synthetic construct
  source 1..75: mol_type = other DNA
gattaagggcatgctggaggcgactcaggtcagaggtgacttcgttaaagctgtatccaaatcatttccgaaaca

SEQ ID NO: 171816 - DNA, 75 bp, synthetic construct
  source 1..75: mol_type = other DNA
cggcagatgctctgcgcgaaggtgccgatacgctgattactgccggggcgatccagtctaaccatgtgcgccaga

SEQ ID NO: 171817 - DNA, 75 bp, synthetic construct
  source 1..75: mol_type = other DNA
cgaaacttgcagccgcttatccgtcaggcgtgatccctgatatgcgtggctggacgattaagggcaaacctgcca

SEQ ID NO: 171818 - DNA, 75 bp, synthetic construct
  source 1..75: mol_type = other DNA
ggatgataatctgccaaaactggtggtttgccagtctttatctgttatgcagggcgtaacctatgaacagtttgc

SEQ ID NO: 171819 - DNA, 75 bp, synthetic construct
  source 1..75: mol_type = other DNA
taccagtacagatggtaatcatagccattcactgtccggcacagcagcatctgcaggtgcacacgcgcatactgt

SEQ ID NO: 171820 - DNA, 75 bp, synthetic construct
  source 1..75: mol_type = other DNA
actcatagtgtcagcggcacagctgcatctgcaggtgctcacgcacatactgtcggtattggtgctcatacgcac

SEQ ID NO: 171821 - DNA, 75 bp, synthetic construct
  source 1..75: mol_type = other DNA
atcgggcagtgccggaactcacgccggactggctgttgggctggaacacctgatgcctgaaagcgaactgattgg

SEQ ID NO: 171822 - DNA, 75 bp, synthetic construct
  source 1..75: mol_type = other DNA
cagagtggcgcccgaccgtaagtccggcagccgtgaatggtggcagttatttcgactggtgtcacagtggcactg

SEQ ID NO: 171823 - DNA, 75 bp, synthetic construct
  source 1..75: mol_type = other DNA
ggcaggctggtattccgttgctcagttgtccaaccccggaaacgggaaaaagcaagttttccccgctcccggcgt

SEQ ID NO: 171824 - DNA, 75 bp, synthetic construct
  source 1..75: mol_type = other DNA
cgtgatgatttacaacacccacggttagatgaggtggcggaagaagttcccgttgcgctggtctacaacggcatt

SEQ ID NO: 171825 - DNA, 75 bp, synthetic construct
  source 1..75: mol_type = other DNA
gtagattctctggtggcggacgggaagactactgcaacactgacggttactctgatgtcgggtgtcaaccccgta

SEQ ID NO: 171826 - DNA, 75 bp, synthetic construct
  source 1..75: mol_type = other DNA
aggagtggctcgggaaatatggtacagcgcgcgtcaaactgaatgtcgataaagatttctcgctgaaggactctt

SEQ ID NO: 171827 - DNA, 75 bp, synthetic construct
  source 1..75: mol_type = other DNA
tttacgaccggaacgcagacgccgggatattcttctggaagaggttatgaggcaggctggtataccgttgctcag

SEQ ID NO: 171828 - DNA, 75 bp, synthetic construct
  source 1..75: mol_type = other DNA
aaaactcattatttttactgactataaattaaataattttgaatataacgatatccctatcgtctatcctaaata

SEQ ID NO: 171829 - DNA, 75 bp, synthetic construct
  source 1..75: mol_type = other DNA
taaaaaccttaaacgcaacatcaggtgcattttcaattgttacgaacagagaagctaccggtgttcgaagcatta

SEQ ID NO: 171830 - DNA, 75 bp, synthetic construct
  source 1..75: mol_type = other DNA
atcccgctgttgcgtggcgataatgaacagcaactgacggcgcgtgtcagggcgcacctttgcgcacagcgtccg

SEQ ID NO: 171831 - DNA, 75 bp, synthetic construct
  source 1..75: mol_type = other DNA
tgttcgtcaaattgagttatggcggcgtgatgatttacaacacccacggttagatgaggtggcggaagaagttcc

SEQ ID NO: 171832 - DNA, 75 bp, synthetic construct
  source 1..75: mol_type = other DNA
atggtgaaactgattatttttattctcattgttctgattattgcagcgttacttatccggattatcctcagaagt

SEQ ID NO: 171833 - DNA, 75 bp, synthetic construct
  source 1..75: mol_type = other DNA
agaaagagccagagaagtttatggctgttgaatgggataaagagacggcgcaggaattcatcaccgaaatcaagg

SEQ ID NO: 171834 - DNA, 75 bp, synthetic construct
  source 1..75: mol_type = other DNA
atgctgtgcgccggttgcaccagcgtccggcctgcactgacgccagtgattgtcgccaacgcctgcccgaaagtg

SEQ ID NO: 171835 - DNA, 75 bp, synthetic construct
  source 1..75: mol_type = other DNA
atgctgtgcgccggttgcaccagcgccccgcctgcaccgacgccagtgattgtccacaacgcctgcccgaaagtg

SEQ ID NO: 171836 - DNA, 75 bp, synthetic construct
  source 1..75: mol_type = other DNA
atgtcaaggctgatgattgtgctggttgtgttgttatcactggcggtggctggtctgtttatggtgaaacacaaa

SEQ ID NO: 171837 - DNA, 75 bp, synthetic construct
  source 1..75: mol_type = other DNA
actgaatgaaaacgaagattttcgccgctggtacggcgctggcctgcctgatgctgtgcgccggttgcaccagcg

SEQ ID NO: 171838 - DNA, 75 bp, synthetic construct
  source 1..75: mol_type = other DNA
ccccgcctgcactgacgccagtgattgtcgccaacgcctgcccgaaagtgagtctttgcccgatgccgggcagtg

SEQ ID NO: 171839 - DNA, 75 bp, synthetic construct
  source 1..75: mol_type = other DNA
atgtcaaagctgatgactgtgctggtcgtgttgttatcgctggcggtggccggtctgtttctggtgaaacataaa

SEQ ID NO: 171840 - DNA, 75 bp, synthetic construct
  source 1..75: mol_type = other DNA
actcagggggcaatacatcgtaccgacgatcgtactcagtcaaatattggttttggctggcgtcatttttcagaa

SEQ ID NO: 171841 - DNA, 75 bp, synthetic construct
  source 1..75: mol_type = other DNA
cgattgcctacgataacaaaggcaatgcctcgaaacgtgtgcagacagaagtagttattagcggagctggtatga

SEQ ID NO: 171842 - DNA, 75 bp, synthetic construct
  source 1..75: mol_type = other DNA
ccgcgggtcagttgtctgtgatgccgcgagtgaacggccaaaatgccgttgctcagccactggtgctgaatgttg

SEQ ID NO: 171843 - DNA, 75 bp, synthetic construct
  source 1..75: mol_type = other DNA
tgtgtgcgtggttattttcaactgattttgtactatattttttgcaaggataaaatagcttgcaggctaattaac

SEQ ID NO: 171844 - DNA, 75 bp, synthetic construct
  source 1..75: mol_type = other DNA
gaaagctaaggaaacaatgtcctacatccgcaggcgaggatggtgaagagtatgctcttaaatggttagaaaact

SEQ ID NO: 171845 - DNA, 75 bp, synthetic construct
  source 1..75: mol_type = other DNA
cgctggtggcgaaagatgcgcatggcaacgctatcagtggtctttcgttgtcggcaagtttgacggggaccgcct

SEQ ID NO: 171846 - DNA, 75 bp, synthetic construct
  source 1..75: mol_type = other DNA
cgctgacagacaatacgcagggggcagcaggtcttgagttatacgaggtgtataacaacggatatccaacagcgt

SEQ ID NO: 171847 - DNA, 75 bp, synthetic construct
  source 1..75: mol_type = other DNA
ctattaagcctctggcctcctgtctggcattttacgccttaatatccaccgctgtggctagcccccagtatcaac

SEQ ID NO: 171848 - DNA, 75 bp, synthetic construct
  source 1..75: mol_type = other DNA
actatcgccgcccggcggtattaagtgacttgttaaccattaccagccagttacagcaattaaatggtaaaagcg

SEQ ID NO: 171849 - DNA, 75 bp, synthetic construct
  source 1..75: mol_type = other DNA
tgaaccggaggggcaggtggtggcagacgcgcttatcacctttgtctgtatcgatctcaaaacgcagaaagcttt

SEQ ID NO: 171850 - DNA, 75 bp, synthetic construct
  source 1..75: mol_type = other DNA
gagaaaatctccgggcgcaaaccgttctatgttggtaagcccagcccgtggatcatccgcgcggcattaaacaaa

SEQ ID NO: 171851 - DNA, 75 bp, synthetic construct
  source 1..75: mol_type = other DNA
atgatgcataaagcggcctatttcgtcgccaacggcgcacgctttatcgccactaatccggatactcacggacgc

SEQ ID NO: 171852 - DNA, 75 bp, synthetic construct
  source 1..75: mol_type = other DNA
aaggcctgccgctggtgttgctgaccaactatccttcgcagaccgggcaagatctggcgaaccgctttgccactg

SEQ ID NO: 171853 - DNA, 75 bp, synthetic construct
  source 1..75: mol_type = other DNA
gagtcgcgccgtgcttggtgaacacagcctagaagatggcatagatggcttcctgggattgacctggaatcagga

SEQ ID NO: 171854 - DNA, 75 bp, synthetic construct
  source 1..75: mol_type = other DNA
gtaaccttttcagaagagttagaggggcaactctttgcttcgatcatgcttgatatggaaaagctgattagcgcg

SEQ ID NO: 171855 - DNA, 75 bp, synthetic construct
  source 1..75: mol_type = other DNA
aacgtaccgaccgcgtgatgaacagccgtctcgagttcaacaatgacaaccgtaaactgcgcattaccgaagcgg

SEQ ID NO: 171856 - DNA, 75 bp, synthetic construct
  source 1..75: mol_type = other DNA
tttctcgaagaagcccgctgggatgggttggaaaatagcgacagttttcactggatgacggcccataacatcgct

SEQ ID NO: 171857 - DNA, 75 bp, synthetic construct
  source 1..75: mol_type = other DNA
ccgcaaccatctggaacaacggcagatgaacagggagaggctgaaacaatggaaccggacgcaactgaacatcat

SEQ ID NO: 171858 - DNA, 75 bp, synthetic construct
  source 1..75: mol_type = other DNA
acgcaactaaacatcatcaggacacgcagccgctggatgctcagtcacaggtaaattctgttgatgcgaaatatc

SEQ ID NO: 171859 - DNA, 75 bp, synthetic construct
  source 1..75: mol_type = other DNA
tacagggggagggacgccatcgtttcaaagcagacttatcacaaaatggggaaagtgatatagccagcaatgtac

SEQ ID NO: 171860 - DNA, 75 bp, synthetic construct
  source 1..75: mol_type = other DNA
atcagtggctggcacctgagcgcgatttaagcaatgcctccaatgccgcttatgccgattccaccggtgagttcc

SEQ ID NO: 171861 - DNA, 75 bp, synthetic construct
  source 1..75: mol_type = other DNA
ttgcttaccgttctggcggtcggtgcctggttgtttactatctcgctgctgttgtcgctggtatcgattgtggtg

SEQ ID NO: 171862 - DNA, 75 bp, synthetic construct
  source 1..75: mol_type = other DNA
cgttaactgatgagacgtatcatctatttggcgcagaacaattcggcaaaatgaaatcctccgccattttcatta

SEQ ID NO: 171863 - DNA, 75 bp, synthetic construct
  source 1..75: mol_type = other DNA
tcagaaataattattcgactgcttctcaatggagtcgattatataaggcacgacgggtatgttcaggggtatgga

SEQ ID NO: 171864 - DNA, 75 bp, synthetic construct
  source 1..75: mol_type = other DNA
gaaagtgatatagccagcaatgtactaaatcactggctacatcgtatacataaaacagatatcattgttctgtct

SEQ ID NO: 171865 - DNA, 75 bp, synthetic construct
  source 1..75: mol_type = other DNA
tctggagtacctggcgcagctgccgcaaagcgaagccgtggaaggtttgaaagatatcgcgccgattctggcatt

SEQ ID NO: 171866 - DNA, 75 bp, synthetic construct
  source 1..75: mol_type = other DNA
accagtatttactgaattatcagtctcagtacagctggcaggagtttattgcattaaaccaggccgcctgcctta

SEQ ID NO: 171867 - DNA, 75 bp, synthetic construct
  source 1..75: mol_type = other DNA
gattctggtgctttctggtgtttcgtcgctcgacgatatcgacagtatgccgttccgcccaagctggatttaccc

SEQ ID NO: 171868 - DNA, 75 bp, synthetic construct
  source 1..75: mol_type = other DNA
ataaacggatctggagcatcttctgggtgctggcgctgtggggtatcgtccagtggctggcgctgagcgcactga

SEQ ID NO: 171869 - DNA, 75 bp, synthetic construct
  source 1..75: mol_type = other DNA
atttccctctaaaaacaaacgaaccggttacgcaagaggatgtactgttactttatcgtttctttaaaatggatg

SEQ ID NO: 171870 - DNA, 75 bp, synthetic construct
  source 1..75: mol_type = other DNA
cgctatcgacagcgataaagtggcggaaaaaattgctgacgaagcacgcgatgacacaccgcaggcgctggatgc

SEQ ID NO: 171871 - DNA, 75 bp, synthetic construct
  source 1..75: mol_type = other DNA
tagcctatacatccttttttatcactgttataacgttcttaatggtaataaaaagatttagcacaattttagata

SEQ ID NO: 171872 - DNA, 75 bp, synthetic construct
  source 1..75: mol_type = other DNA
atgcaaaaaatcgtgatcgttgccaatggcgcgccctacgggagcgaatccttatttaacagcctgcggctggcc

SEQ ID NO: 171873 - DNA, 75 bp, synthetic construct
  source 1..75: mol_type = other DNA
ccttgaacgcgcccgcaaagccggtattgcaacgcatacgctcatcgccagcgcgtttgacagtcgtgaagccta

SEQ ID NO: 171874 - DNA, 75 bp, synthetic construct
  source 1..75: mol_type = other DNA
tggcgaaaatgtatgcgcttggagtgctaagttcttattcccggccaagagtcagcaatgataacccttactcag

SEQ ID NO: 171875 - DNA, 75 bp, synthetic construct
  source 1..75: mol_type = other DNA
gcacgggactttcgccgcgatccagacgatccggctaaatttgaacgctatcaggcagaggcgctaatctggcaa

SEQ ID NO: 171876 - DNA, 75 bp, synthetic construct
  source 1..75: mol_type = other DNA
aatccagcagtggggtttaccttctgccgggctcgaaaacagccgcacgtctggaaagccagctcggcaccttac

SEQ ID NO: 171877 - DNA, 75 bp, synthetic construct
  source 1..75: mol_type = other DNA
actcagcaaaacaggctgaatgcacaatccagcagtggggtttaccttctgccgggagcaaagacaccagcgcgt

SEQ ID NO: 171878 - DNA, 75 bp, synthetic construct
  source 1..75: mol_type = other DNA
ctgctttgccatcgcgatagcgctttggccgtggaagattatgtaccctggcaggcattacagggagcgaaattg

SEQ ID NO: 171879 - DNA, 75 bp, synthetic construct
  source 1..75: mol_type = other DNA
ggcgcgggattagcacacttcctctgattgatggggtggaaatcggtactcttgtggaactggcgcaatggacgc

SEQ ID NO: 171880 - DNA, 75 bp, synthetic construct
  source 1..75: mol_type = other DNA
acgacgaaaacagcgtcagtcactccaccgccagtggttccgaaatcttcatggccacccgtcggacaacgctgc

SEQ ID NO: 171881 - DNA, 75 bp, synthetic construct
  source 1..75: mol_type = other DNA
cggcaattgatccgctacgttacttgccgcctcaggcagcaagccaaaatgctgatggcgaattaatcagcagtc

SEQ ID NO: 171882 - DNA, 75 bp, synthetic construct
  source 1..75: mol_type = other DNA
ataaatctatcccgaatcagtatcgctatttcgccatgtttaccaatatagcaatcgttattgatcaactaaccg

SEQ ID NO: 171883 - DNA, 75 bp, synthetic construct
  source 1..75: mol_type = other DNA
cttaatgatcgaccttgagacgatggggaaaaataaggatgcaccgatcgtttccattggcgcggtgttcttcac

SEQ ID NO: 171884 - DNA, 75 bp, synthetic construct
  source 1..75: mol_type = other DNA
gccgatcgtttctattggcgcggtgttcttcaccccagaaaccggagacatcggacaagaattctatgcggttgt

SEQ ID NO: 171885 - DNA, 75 bp, synthetic construct
  source 1..75: mol_type = other DNA
cacgtgcggtgcgtaaatacttcccggatgcaaccatcctggcgctgaccaccaacgaaaaaactgcacatcagc

SEQ ID NO: 171886 - DNA, 75 bp, synthetic construct
  source 1..75: mol_type = other DNA
gtaccgaccgcgtgatgaacagccgtctcgagttcaacaatgacaaccgtaaactgcgcattaccgaagcggtat

SEQ ID NO: 171887 - DNA, 75 bp, synthetic construct
  source 1..75: mol_type = other DNA
gtcagttggcaacaccgtactggttgacgatggtctgatcggtatggaagttaccgctattgaaggtaacaaagt

SEQ ID NO: 171888 - DNA, 75 bp, synthetic construct
  source 1..75: mol_type = other DNA
cccggcgctttccatcggcaatctacaaaaaaccctgaccgcgcccgtcaccgctatcgttgcctgggacagtga

SEQ ID NO: 171889 - DNA, 75 bp, synthetic construct
  source 1..75: mol_type = other DNA
gccgatcgtctcagttggtgctgtcttttttaaccctcaaacaggtgaactaggccaagaattctatacagccgt

SEQ ID NO: 171890 - DNA, 75 bp, synthetic construct
  source 1..75: mol_type = other DNA
tttcgaaccatagatgaagccagaagttggttaagcaggttcacgcgatggtacaacctggaacacaagccagcg

SEQ ID NO: 171891 - DNA, 75 bp, synthetic construct
  source 1..75: mol_type = other DNA
aatgggcccattccgcgcgagggtaaacgctaccggctgggatcacctgagatatgggtggctgagtccatccgc

SEQ ID NO: 171892 - DNA, 75 bp, synthetic construct
  source 1..75: mol_type = other DNA
aacggtcccatccccagaggtgggaaacgttaccggctggaaaagcctgaaatctgggtggctcaggcgcatcaa

SEQ ID NO: 171893 - DNA, 75 bp, synthetic construct
  source 1..75: mol_type = other DNA
gatgatgaaaatgaagtggcatggctggaaatcagtctgccgctggttgatcccatcaccctggttgaggtcgaa

SEQ ID NO: 171894 - DNA, 75 bp, synthetic construct
  source 1..75: mol_type = other DNA
gaatcttaggataattccggttggtggtgcaaaagaggttaaaaggatttatgagcaattggctgcttgtcataa

SEQ ID NO: 171895 - DNA, 75 bp, synthetic construct
  source 1..75: mol_type = other DNA
cggcgaaaaacgctatcctgatcgtcgagtttgctaacgagatgaaccaaaaaggccacgacctgtttgaagcga

SEQ ID NO: 171896 - DNA, 75 bp, synthetic construct
  source 1..75: mol_type = other DNA
cgggcaaaacgtggcgcgaatgtttatccgcctgaaagactggagcgaacgcgacagtaagaccggcacctcgtt

SEQ ID NO: 171897 - DNA, 75 bp, synthetic construct
  source 1..75: mol_type = other DNA
gcaaaagttcgatttattcaacaaagccactttgggctgacaggcacctctgcttttgatcccgcgaagaatgat

SEQ ID NO: 171898 - DNA, 75 bp, synthetic construct
  source 1..75: mol_type = other DNA
tttcaggattacgccgactggatattgataaacgctgggattttttacactttgggctgacgggcacctctgcgt

SEQ ID NO: 171899 - DNA, 75 bp, synthetic construct
  source 1..75: mol_type = other DNA
caatgaaatggagatttatccgggagtgaccttttcagaagagttagaggggcaactctttgcttcgatcatgct

SEQ ID NO: 171900 - DNA, 75 bp, synthetic construct
  source 1..75: mol_type = other DNA
atccatatccggctggtcactggttttattctttacgggacttactcgacaattatttgtttatggtttgtttct

SEQ ID NO: 171901 - DNA, 75 bp, synthetic construct
  source 1..75: mol_type = other DNA
ttcaccaaagaggactatcccaagcaggtattgctcgcttgattgggttaccgcaacaggttgtatctcgatggg

SEQ ID NO: 171902 - DNA, 75 bp, synthetic construct
  source 1..75: mol_type = other DNA
gaccagacatttaccctaacccaaccgacggtttacccgttgggtgtaaggctaacacatcaaaggcaccggagt

SEQ ID NO: 171903 - DNA, 75 bp, synthetic construct
  source 1..75: mol_type = other DNA
tttggtctggagtggacggcgatgtcgtatcaggagcggctttccggcgcgcaggctccggcgctgtacgccatt

SEQ ID NO: 171904 - DNA, 75 bp, synthetic construct
  source 1..75: mol_type = other DNA
aatacggatgtttgaagaagtggagatggtgccgataataggagtcgaacctacgaccttcgcattacgaattat

SEQ ID NO: 171905 - DNA, 75 bp, synthetic construct
  source 1..75: mol_type = other DNA
atgcattcttcttttggtttgccatatcctgctggtcactggttttattctttacaggacttactcgacaatcct

SEQ ID NO: 171906 - DNA, 75 bp, synthetic construct
  source 1..75: mol_type = other DNA
tcctggcgatattctctacgtgccgcgtaatgatgatctgaaagtgtttgtgatgggtgaagttaaaaaacagag

SEQ ID NO: 171907 - DNA, 75 bp, synthetic construct
  source 1..75: mol_type = other DNA
tgccattattggtgtcagtaaccttgataagcggttgcacagtacttccgggcagcaatatgtcgacgatgggca

SEQ ID NO: 171908 - DNA, 75 bp, synthetic construct
  source 1..75: mol_type = other DNA
tatttcattttcactaatgctggttgttctttttctttccataacctggatggcgttgacttcggcagggctggt

SEQ ID NO: 171909 - DNA, 75 bp, synthetic construct
  source 1..75: mol_type = other DNA
attacgctcgccatcaagaactgggattcaaagctatccgcgtgcagtgcggtattcccggtatgaaaacgactt

SEQ ID NO: 171910 - DNA, 75 bp, synthetic construct
  source 1..75: mol_type = other DNA
acgctgggatgcctggtttgccgatccgattgaccttgccgatgcccgtgaactggtgaccgatacgcggcaatt

SEQ ID NO: 171911 - DNA, 75 bp, synthetic construct
  source 1..75: mol_type = other DNA
gccagtatatgccgttgtggacgatggcttgaaccaacgtattttggccttgttcggtgccgatggatctgacgg

SEQ ID NO: 171912 - DNA, 75 bp, synthetic construct
  source 1..75: mol_type = other DNA
accggttgctcgctggaaccgtctgatcaaccaactgttgccgaccatcagtggcgttcgctacatgaccgattc

SEQ ID NO: 171913 - DNA, 75 bp, synthetic construct
  source 1..75: mol_type = other DNA
tgatatggagaagttgattagcgcgtacagacgtatgctgcgacaggggaatcatgcgctgacggttattgttgg

SEQ ID NO: 171914 - DNA, 75 bp, synthetic construct
  source 1..75: mol_type = other DNA
gacctggaatcaggagttagccgcgacaatcgaccgactggaatcactggatcgaagtgagctgcgtaaacagtt

SEQ ID NO: 171915 - DNA, 75 bp, synthetic construct
  source 1..75: mol_type = other DNA
aaccgtgtgatttctctgctggtaccgacgatttccggggtgcatgacctgacagagacttcacggtggattcaa

SEQ ID NO: 171916 - DNA, 75 bp, synthetic construct
  source 1..75: mol_type = other DNA
cactaccgcgccgctggctcgttggaaccgtgtgatttctctgctggtaccgacgatttccggggtgcatgacct

SEQ ID NO: 171917 - DNA, 75 bp, synthetic construct
  source 1..75: mol_type = other DNA
ctgagcgaactggccgactggcgcaacgtggtactgactcacgatggcaaagaacagcgcatttcagtgcaggcg

SEQ ID NO: 171918 - DNA, 75 bp, synthetic construct
  source 1..75: mol_type = other DNA
tgctggccctgttacagcaggattgcaccctctctttgcaggcgttggcagaagccgttaatctgacaacgaccc

SEQ ID NO: 171919 - DNA, 75 bp, synthetic construct
  source 1..75: mol_type = other DNA
tgcctggctggaagagtatcccgaccaacttggcattgcattaaccgactgcatcactatggatgctttcctgcg

SEQ ID NO: 171920 - DNA, 75 bp, synthetic construct
  source 1..75: mol_type = other DNA
cgctatcagggcttgcgtcatgactccggcgacccggttgaatggggtgaaaaagccattgcacattatgagaag

SEQ ID NO: 171921 - DNA, 75 bp, synthetic construct
  source 1..75: mol_type = other DNA
ctacgcgctatcttcccgaacccggatcacactctgctgccgggtatgttcgtgcgcgcacgtctggaagaaggg

SEQ ID NO: 171922 - DNA, 75 bp, synthetic construct
  source 1..75: mol_type = other DNA
tgtttatgccgcacacctggccggtctggggcaataagcatatcaatgattatattggtaaatatcgcgatacta

SEQ ID NO: 171923 - DNA, 75 bp, synthetic construct
  source 1..75: mol_type = other DNA
aaagtcgctttgctggacccggaaaaaattggtctgggtctgacggcttttgtgctgattaaaacgcagcatcac

SEQ ID NO: 171924 - DNA, 75 bp, synthetic construct
  source 1..75: mol_type = other DNA
tgtttatgccgcacacctggccggtctggggcaataagcatatcaatgattatattggtaaataccgcgatacca

SEQ ID NO: 171925 - DNA, 75 bp, synthetic construct
  source 1..75: mol_type = other DNA
tcagatttcgtttgcctgatcctgccgctaactgaagaaactcatcacctgtttggcgcagaacaattcgccaaa

SEQ ID NO: 171926 - DNA, 75 bp, synthetic construct
  source 1..75: mol_type = other DNA
aagcagaagaacgcttcaacgcccgctactgcgatttggatactctgttacaagagtcagatttcgtttgcctga

SEQ ID NO: 171927 - DNA, 75 bp, synthetic construct
  source 1..75: mol_type = other DNA
gccgatgctattcgtgaacaggttcaggcgatgcagcacctgcgcctgcaggatgatgaatatcaatggctctct

SEQ ID NO: 171928 - DNA, 75 bp, synthetic construct
  source 1..75: mol_type = other DNA
accagcaactacgatctggcgcgtcggctttccctcacgccgatgggacacaggcacacgaatggttccaggcgc

SEQ ID NO: 171929 - DNA, 75 bp, synthetic construct
  source 1..75: mol_type = other DNA
gcattactatggacgcattcttgcgtgatttcggcgtggaatttgccagccgctatcaggggctgcgtcatgact

SEQ ID NO: 171930 - DNA, 75 bp, synthetic construct
  source 1..75: mol_type = other DNA
gcaagttgggcttatctcggaaaatcgcctgcgaatttaagctattccgaggcggcaatgctggcggttttgccg

SEQ ID NO: 171931 - DNA, 75 bp, synthetic construct
  source 1..75: mol_type = other DNA
tgctgattgtcctcaggctcgacaagaaatgattaatgtctggccgttaccgctggaaccctggctacctgctgc

SEQ ID NO: 171932 - DNA, 75 bp, synthetic construct
  source 1..75: mol_type = other DNA
aacaaacgccgccaaaccgcattctgattggcattgcgctctccctcaccatgctggtgatgcgccccatctggc

SEQ ID NO: 171933 - DNA, 75 bp, synthetic construct
  source 1..75: mol_type = other DNA
caacagactgtttggcaatggtttagctttggcgttcccccaaagcaggtaattccgttatgtcagctaatgaag

SEQ ID NO: 171934 - DNA, 75 bp, synthetic construct
  source 1..75: mol_type = other DNA
ctgtgcgcttaccaccggcctcgacaatttgcccgccatacggtcacgatgcacaactcccactgcagctgacag

SEQ ID NO: 171935 - DNA, 75 bp, synthetic construct
  source 1..75: mol_type = other DNA
tggtggtttcttaatggtgaaccgttagctgaacgcgggcgtaacgtgactctgcatttgacagagaaaggcgat

SEQ ID NO: 171936 - DNA, 75 bp, synthetic construct
  source 1..75: mol_type = other DNA
tggcttacgctggctatcgttatcaggtggatatcacgggggaaggcgataaatgtcggctgaaactgcgccacg

SEQ ID NO: 171937 - DNA, 75 bp, synthetic construct
  source 1..75: mol_type = other DNA
gtgtgctggccgtgtttgctgaacgccataaggcagttttggcccgtatgtccggctgatgagcgtcaccctgaa

SEQ ID NO: 171938 - DNA, 75 bp, synthetic construct
  source 1..75: mol_type = other DNA
cgcattggtacagaacggtcaggcgactgcgctggcaaccgtgcagcaacttgatccgatctacgttgatgtgac

SEQ ID NO: 171939 - DNA, 75 bp, synthetic construct
  source 1..75: mol_type = other DNA
cccacggcaacactcaggagtacagcgtcaaaatccaggtgctgattctgatgaccctcgtcggtttgctgccga

SEQ ID NO: 171940 - DNA, 75 bp, synthetic construct
  source 1..75: mol_type = other DNA
ctgctgcgccaggcgctggggctgcaacaaacgccgccaaaccgcattctgattggcattgcgctctccctcacc

SEQ ID NO: 171941 - DNA, 75 bp, synthetic construct
  source 1..75: mol_type = other DNA
ggacagttttggcccgtatgtccggctgatgagcgtcactctgaactaatgttccgtcacccggaaaacgagtac

SEQ ID NO: 171942 - DNA, 75 bp, synthetic construct
  source 1..75: mol_type = other DNA
gatgtggacaaatgatggctttacagcagatacgctgacgctgacagatatcacgggggcaaaagcgacgtatcc

SEQ ID NO: 171943 - DNA, 75 bp, synthetic construct
  source 1..75: mol_type = other DNA
cctcccgccacggccggttcagacagcaccaccacggaaagcccgcagccctccacacctgcacctcagccgggc

SEQ ID NO: 171944 - DNA, 75 bp, synthetic construct
  source 1..75: mol_type = other DNA
ctacttgatgtttcacatagcaaagatttagctgaatcggcagcggcagttaaagatttagtaagttatttcaac

SEQ ID NO: 171945 - DNA, 75 bp, synthetic construct
  source 1..75: mol_type = other DNA
tggaagcagcgtcatgcggaagggtatgcatcagtatacggagggtataagggtaaggagtcgcagaacattttc

SEQ ID NO: 171946 - DNA, 75 bp, synthetic construct
  source 1..75: mol_type = other DNA
taaaagtgagggtggcgtagaatatcgttttgttagcgcaccttatcatccagaatttttccttcgctatacgga

SEQ ID NO: 171947 - DNA, 75 bp, synthetic construct
  source 1..75: mol_type = other DNA
tggtgaagggcttccgctgccggagacatatgaccgtccggacccgcgtattaaacagctggcgcgtcgcagtac

SEQ ID NO: 171948 - DNA, 75 bp, synthetic construct
  source 1..75: mol_type = other DNA
aacatcgagaaaaacatgacagagataacctcggattcactcaagtgtatccactaggatggaagcggctgatgg

SEQ ID NO: 171949 - DNA, 75 bp, synthetic construct
  source 1..75: mol_type = other DNA
tgcaaccgatgcattgaaaaatgaacaagccgaaactgttattactgcgggtaacaaggcggtggcggcgaatgc

SEQ ID NO: 171950 - DNA, 75 bp, synthetic construct
  source 1..75: mol_type = other DNA
gaaaaatatattgaaataacggaaaaagaaaaaatacaagaattaagaaacaagatggttaacgatggttggacc

SEQ ID NO: 171951 - DNA, 75 bp, synthetic construct
  source 1..75: mol_type = other DNA
tgcaactgaagcattgaagaatgaacaagctgaaactgttattactgcgggtaacaaggcggttgcggcgaatgc

SEQ ID NO: 171952 - DNA, 75 bp, synthetic construct
  source 1..75: mol_type = other DNA
gcgcacaggtcattagtgggttaaaggcgtctgaggggctggcaaaattacttattgccagcggaataatgttat

SEQ ID NO: 171953 - DNA, 75 bp, synthetic construct
  source 1..75: mol_type = other DNA
gcagaacaaccggcagtcagaccggggccggtcacgctcatgagtctgctggcatcatctcctgaactggaaagc

SEQ ID NO: 171954 - DNA, 75 bp, synthetic construct
  source 1..75: mol_type = other DNA
ggatgttgcggatattgggtattacggagccggtggtcgaacggacgccaaaacctggacgacggctgaccgtaa

SEQ ID NO: 171955 - DNA, 75 bp, synthetic construct
  source 1..75: mol_type = other DNA
agccattctggtgcatgcgggacgcacggcaggttttattaccggcgaagtctcttctccgggcactgcatcagg

SEQ ID NO: 171956 - DNA, 75 bp, synthetic construct
  source 1..75: mol_type = other DNA
ggattatttccgaccgtctggcaacggcgattctgattcatgcgggacgaaccacagtaaaagtcgatgctccat

SEQ ID NO: 171957 - DNA, 75 bp, synthetic construct
  source 1..75: mol_type = other DNA
aagagctgaaactgatcgactccatcatcccggaaccgctgggtggtgctcaccgtaacccggaagcgatggcgg

SEQ ID NO: 171958 - DNA, 75 bp, synthetic construct
  source 1..75: mol_type = other DNA
tggcgaccacgccagcctccacgggggatgcacagtctggctctgcgggtccgacgcaacagcagggtgcaggta

SEQ ID NO: 171959 - DNA, 75 bp, synthetic construct
  source 1..75: mol_type = other DNA
cgtgagtaatctgaatcacccgaaagcagacctcaataaagggcagtatggctgtgtggggcatgccctgcatgt

SEQ ID NO: 171960 - DNA, 75 bp, synthetic construct
  source 1..75: mol_type = other DNA
ttccttagcgggcagtctgcaccgctggcgaccacgccagcctccacgggggatgcacagtctggctctgcgggt

SEQ ID NO: 171961 - DNA, 75 bp, synthetic construct
  source 1..75: mol_type = other DNA
tgaaatcggtacgctggcttaccacaatgtggagaaattatttattgcctgtagccataataatattgtgatcgt

SEQ ID NO: 171962 - DNA, 75 bp, synthetic construct
  source 1..75: mol_type = other DNA
agaaagtcgggactgcgtattttcatgaaaggagatcactcaataacttccatcgagatcgggtaataacatttg

SEQ ID NO: 171963 - DNA, 75 bp, synthetic construct
  source 1..75: mol_type = other DNA
cgcgcaatcccgtagtaatggtaattgggtatcgtcaaatcgtccgacacatttcagttcatgggcgcgcagggg

SEQ ID NO: 171964 - DNA, 75 bp, synthetic construct
  source 1..75: mol_type = other DNA
gcggtggaggaggcaaaaaatcttctcagtaagggaggtgaaattgccgtgcggtttaagatacccggagggtgt

SEQ ID NO: 171965 - DNA, 75 bp, synthetic construct
  source 1..75: mol_type = other DNA
accattgtctgcatgatgtgcaggacgtgagtaatctgaatcacccgaaagcagacctcaataaagggcagtatg

SEQ ID NO: 171966 - DNA, 75 bp, synthetic construct
  source 1..75: mol_type = other DNA
ctcgccgttgacagtaaaacacatgaaatcatctgcgctgacctgtcgctgaacaaggggtctgacgctcagtgg

SEQ ID NO: 171967 - DNA, 75 bp, synthetic construct
  source 1..75: mol_type = other DNA
accacatcgtcgtttgattacggcactaaatccacgaataacactggtgcgcatacccatagtttaagtggcagc

SEQ ID NO: 171968 - DNA, 75 bp, synthetic construct
  source 1..75: mol_type = other DNA
gcagttaaccgcgctccaccccctgttaagaaatgatgaacaaattcagaaacagaaaagggcggatgcagaaca

SEQ ID NO: 171969 - DNA, 75 bp, synthetic construct
  source 1..75: mol_type = other DNA
ccctgatgaacgttccgctacgctgcccggattacagctgtgtcagcaggcgggcaaagtcggttaatgtcagtt

SEQ ID NO: 171970 - DNA, 75 bp, synthetic construct
  source 1..75: mol_type = other DNA
aaagtaaaaagtagctttgcgcgggaatggatccaaaaaatgcgccagtccctgcgttacgataaattgcagcag

SEQ ID NO: 171971 - DNA, 75 bp, synthetic construct
  source 1..75: mol_type = other DNA
ttgacgcttacggttaatgtcagtttcaaaacgttcacccggggtgaaatcgcgcatctggtgattgattccacc

SEQ ID NO: 171972 - DNA, 75 bp, synthetic construct
  source 1..75: mol_type = other DNA
aaaacggcagccgcatcgtccgccagttcggcggcgtcatcggcatcatctgcgtctgcttcaaaagatgaggcg

SEQ ID NO: 171973 - DNA, 75 bp, synthetic construct
  source 1..75: mol_type = other DNA
atctgcaggtgcacacgcgcatactgtcggtattggtgctcatacgcactccgttgcgattggttgcgattggct

SEQ ID NO: 171974 - DNA, 75 bp, synthetic construct
  source 1..75: mol_type = other DNA
gtattcgttggccaggaggcgtcggttctgcgttagcattttatgatggcggtgggttcacttatgtccaggatt

SEQ ID NO: 171975 - DNA, 75 bp, synthetic construct
  source 1..75: mol_type = other DNA
cgtcagaagctgccacctcagcccgggatgcggcggcctcaaaagaggcagcgaaatcatcagaaacgaacgcat

SEQ ID NO: 171976 - DNA, 75 bp, synthetic construct
  source 1..75: mol_type = other DNA
aaagcctctcaggcatctcaaagtgcatccgctgcggtatcttcacaaagtgcggcgagtgagagtgcagctgct

SEQ ID NO: 171977 - DNA, 75 bp, synthetic construct
  source 1..75: mol_type = other DNA
agcataacgaaaacgttgagtggtataaaaataacaccgatgcgattgaggccgctggagacaaagctcgggagg

SEQ ID NO: 171978 - DNA, 75 bp, synthetic construct
  source 1..75: mol_type = other DNA
gagaagattataagcgatgaaatttatttctctattaacaacatatcagaaattttagaacaaaagttaaagatt

SEQ ID NO: 171979 - DNA, 75 bp, synthetic construct
  source 1..75: mol_type = other DNA
ttacatcctaatatcgatgatatccctcttcacgttttaagaagagataatgatgacatacataatttttttgtt

SEQ ID NO: 171980 - DNA, 75 bp, synthetic construct
  source 1..75: mol_type = other DNA
aaaggaatatcaaaatcctttagaaaaggtgcaattatgcaattaacagatacggttggaaatgtgaagaaggct

SEQ ID NO: 171981 - DNA, 75 bp, synthetic construct
  source 1..75: mol_type = other DNA
gacaaatatattaacataacaaaaagagaaagaatagaagaattaaaaaacaagatggttaacgatggttggacc

SEQ ID NO: 171982 - DNA, 75 bp, synthetic construct
  source 1..75: mol_type = other DNA
aacaattttaaaatcaaattctccagatctatctacatggttaattgccacgaataactatattagactctcaaa

SEQ ID NO: 171983 - DNA, 75 bp, synthetic construct
  source 1..75: mol_type = other DNA
acgagctacctcatctaaaaaaactagatgagtttttaaattcatacctggatgaaattaaaatttcttttcgtc

SEQ ID NO: 171984 - DNA, 75 bp, synthetic construct
  source 1..75: mol_type = other DNA
catctgtgcagacctgtcgctgaacaatgtgacggactcagaagccttcccgggtcttatccggcagactcacag

SEQ ID NO: 171985 - DNA, 75 bp, synthetic construct
  source 1..75: mol_type = other DNA
tacaaccgtcgctcgatagcggaaacggcgatgtaccgggtaaaacagctgttcggggggttcactgacgctgcg

SEQ ID NO: 171986 - DNA, 75 bp, synthetic construct
  source 1..75: mol_type = other DNA
tggtcattaaacgcgtgttcaggttgaccctgcgggctgcacagggttttattgattccatttttacactgatga

SEQ ID NO: 171987 - DNA, 75 bp, synthetic construct
  source 1..75: mol_type = other DNA
tgagggaactaaagcagatatatatggaaaacattcggtcaatggatttactgttggagttggttatcgttttta

SEQ ID NO: 171988 - DNA, 75 bp, synthetic construct
  source 1..75: mol_type = other DNA
cgtctaatattgctgataaggtttgggaggttgccgaaggtgcgcttactgacgaagacaccgaaatcatttggg

SEQ ID NO: 171989 - DNA, 75 bp, synthetic construct
  source 1..75: mol_type = other DNA
tgcaaagcagtagtcactgccaacactgaaaatcagttgcgcaccaaaacttggccagaagtgattaagtgggca

SEQ ID NO: 171990 - DNA, 75 bp, synthetic construct
  source 1..75: mol_type = other DNA
tgtttttgcgacagatgaagagattgcagctcatgaagcccgtctcgatctggtgcagaagaaaggcggaagttg

SEQ ID NO: 171991 - DNA, 75 bp, synthetic construct
  source 1..75: mol_type = other DNA
acacaacgtgagcaccgcatcattggcattgacaaccattaccgggtaaacccggtacaacacggagatatctat

SEQ ID NO: 171992 - DNA, 75 bp, synthetic construct
  source 1..75: mol_type = other DNA
gctctcagcctgactcgccacgaagaggcgtggtggataatcaatcagtccgatgaatattgttgcacggtaaat

SEQ ID NO: 171993 - DNA, 75 bp, synthetic construct
  source 1..75: mol_type = other DNA
gaagaccagtaccaggctgacgcagtgttcatcgacttcggttacggaactggtctgaagtcaatcggtgacggc

SEQ ID NO: 171994 - DNA, 75 bp, synthetic construct
  source 1..75: mol_type = other DNA
gagttaatcacccgttacatagaagccagtgccgcccaggaagccgtcgatgtgttgctctcgctggaaaatgaa

SEQ ID NO: 171995 - DNA, 75 bp, synthetic construct
  source 1..75: mol_type = other DNA
caaaccaataaaaataggccctcgtgcggttgcatgggttgaagaagaaattatcgactggatagaagaaagaaa

SEQ ID NO: 171996 - DNA, 75 bp, synthetic construct
  source 1..75: mol_type = other DNA
tcgatgaagatcaggctcgccacgcacggattacccgcctgcccggtgagcataatgagcattcgagggagaaaa

SEQ ID NO: 171997 - DNA, 75 bp, synthetic construct
  source 1..75: mol_type = other DNA
ccctgacgtttgcattcccggtagtcaaaaacaaaccaactaagccattaccggctccaattcgtccaatttcca

SEQ ID NO: 171998 - DNA, 75 bp, synthetic construct
  source 1..75: mol_type = other DNA
ctggggcatgtccacctgcgaggactgcaaggtggtggtgaccgccaacaccgacaatcagttgcgtaccaagac

SEQ ID NO: 171999 - DNA, 75 bp, synthetic construct
  source 1..75: mol_type = other DNA
ggttacaaaaaaacagtttaactatgggcagcagcaaagccagcagggtaaggcactcacagagtacgatcccta

SEQ ID NO: 172000 - DNA, 75 bp, synthetic construct
  source 1..75: mol_type = other DNA
ttaatatcaggtttaaagaagcaggtcttggatatcaatttgagtcaggagagttggttaaagttgactcacaat

SEQ ID NO: 172001 - DNA, 75 bp, synthetic construct
  source 1..75: mol_type = other DNA
tagcgagttatacccttcatttaaccgctactaatctgctgtttttggctaaatgcgaagagagttatacgaaaa

SEQ ID NO: 172002 - DNA, 75 bp, synthetic construct
  source 1..75: mol_type = other DNA
ggattacgcaacggtaaatccttacaccttcgcagaacccacttcgccgcacatcatcagcgcgcaagagggcag

SEQ ID NO: 172003 - DNA, 75 bp, synthetic construct
  source 1..75: mol_type = other DNA
accgcaatgactgaagatgttatacagcgaattactacatttttcacaccagcccagatgtcaagaacagagaaa

SEQ ID NO: 172004 - DNA, 75 bp, synthetic construct
  source 1..75: mol_type = other DNA
tcgatctgattgagattttattttatctgaagaaaaaggttcgtgttatcctttttattatagctatctgtatgg

SEQ ID NO: 172005 - DNA, 75 bp, synthetic construct
  source 1..75: mol_type = other DNA
gggttagtgaccgattgaagaattgggggcatgtgagctttagagatgtttttgacgcctatgagtgcgaagaat

SEQ ID NO: 172006 - DNA, 75 bp, synthetic construct
  source 1..75: mol_type = other DNA
gtcgaagcgtctgcgaattcctgggcagcagaaccagcaaggcaaggccatcacagattatgacccgtatgctta

SEQ ID NO: 172007 - DNA, 75 bp, synthetic construct
  source 1..75: mol_type = other DNA
cgcaaatataaacaccgctggaaaactgcgcagattgacagccggacggtggaaggcactaacaaacagcagttg

SEQ ID NO: 172008 - DNA, 75 bp, synthetic construct
  source 1..75: mol_type = other DNA
tgcatgaacaagccattaaaattgctttgcgcatgctggaacagggctttgatcgtgaccaggtgctcgcggcca

SEQ ID NO: 172009 - DNA, 75 bp, synthetic construct
  source 1..75: mol_type = other DNA
acggtaaaatcgttatcgaaccgaaggaagatatcaaagagcggcttgggcgttcgcctggtaaaggcgatgcgc

SEQ ID NO: 172010 - DNA, 75 bp, synthetic construct
  source 1..75: mol_type = other DNA
ccaggaaacagcagacgacctgtcggcggcagagtacaaagttcgtgtggacggtaaaatcgttatcgaaccgaa

SEQ ID NO: 172011 - DNA, 75 bp, synthetic construct
  source 1..75: mol_type = other DNA
tgctgctgacgtttgcttttccggtcacaaaaaaacttaatgatccgcgccagctgcagggtaaggctataatag

SEQ ID NO: 172012 - DNA, 75 bp, synthetic construct
  source 1..75: mol_type = other DNA
atgatgtcaaagattgtgacgtcattacccgcagatgatattactgaatcacctgtcagttcattacctctcgat

SEQ ID NO: 172013 - DNA, 75 bp, synthetic construct
  source 1..75: mol_type = other DNA
atgagtgggattctcagcatggtgagcttgaggggtatcgtgccagtgatggtcagcatcttggctcatttgacc

SEQ ID NO: 172014 - DNA, 75 bp, synthetic construct
  source 1..75: mol_type = other DNA
tccagctccgaaaactgagaatattaaagggcttggtgatcttaagcctgggataccaaaaacaccaaagcagaa

SEQ ID NO: 172015 - DNA, 75 bp, synthetic construct
  source 1..75: mol_type = other DNA
gccgccagtgttttacattttatctctgtttttgtgttagccattcttggtgcgtttaaatgggctgtgttctgg

SEQ ID NO: 172016 - DNA, 75 bp, synthetic construct
  source 1..75: mol_type = other DNA
atggctaaaatctatgagtttccgcagggagctgaacgaggtaagctgaaaaaagagatcatccgggaacgtaaa

SEQ ID NO: 172017 - DNA, 75 bp, synthetic construct
  source 1..75: mol_type = other DNA
cgaaagatcctgagttaagtaagcaatttaatccaggtaataaaaaacgcttgagccaaggattagctccacggg

SEQ ID NO: 172018 - DNA, 75 bp, synthetic construct
  source 1..75: mol_type = other DNA
ccaggactggcgcattatgcggaaatcattgatgtgctgggtaaaaaacttccggcaccgctcattggtgaactg

SEQ ID NO: 172019 - DNA, 75 bp, synthetic construct
  source 1..75: mol_type = other DNA
tacttgaaatcgacggtgatggcgcaattgataagtggattgaaaaaaagaatggaacatcgttaaagcggattc

SEQ ID NO: 172020 - DNA, 75 bp, synthetic construct
  source 1..75: mol_type = other DNA
acctgcgtgaaatgtctcgcctgagcgtaccgactatttgtaccgttattggtgaaggtggttctggtggcgcgc

SEQ ID NO: 172021 - DNA, 75 bp, synthetic construct
  source 1..75: mol_type = other DNA
acttcatcatgacaatcctattagtcagggaggtgaggtctatgatatggataatatcagagtgacaacgcctaa

SEQ ID NO: 172022 - DNA, 75 bp, synthetic construct
  source 1..75: mol_type = other DNA
caaatggcagggcttaaggcccagcgggcacagacggatgtaaataataagaaggctgcatttgatgctgctgca

SEQ ID NO: 172023 - DNA, 75 bp, synthetic construct
  source 1..75: mol_type = other DNA
ttcttcctgctgaaatagcaaaagatgacccgaacatgatgtcaaaaatcgtgacgtcattaccggcagaaacgg

SEQ ID NO: 172024 - DNA, 75 bp, synthetic construct
  source 1..75: mol_type = other DNA
cgatcgataatggctttttagcagtgcattatcctaaagcaatagaaaaattaaaaaacacaaatttatttaaac

SEQ ID NO: 172025 - DNA, 75 bp, synthetic construct
  source 1..75: mol_type = other DNA
gctataaaaaaagttgaaatagtaccagaggatgttatcgatatacaaaatttaaaaaaatattatcaagataac

SEQ ID NO: 172026 - DNA, 75 bp, synthetic construct
  source 1..75: mol_type = other DNA
gattccgttctggaaaaaagagaaataaaacagaatttaataaagaataatgtgacagtgattaatataccagac

SEQ ID NO: 172027 - DNA, 75 bp, synthetic construct
  source 1..75: mol_type = other DNA
gcaatgatggcgcaccttagctttgttcacaccaccatgaaacgattcgatgaagatcaggctcgccatgcacgc

SEQ ID NO: 172028 - DNA, 75 bp, synthetic construct
  source 1..75: mol_type = other DNA
tcttttaactctaaaatcgcaagtatatatgaaggagttctgtaaagattacatttcgttatttaaagataaatg

SEQ ID NO: 172029 - DNA, 75 bp, synthetic construct
  source 1..75: mol_type = other DNA
gtatttatgccatcgttttatgagctcctattatcagatgccttaacatccacttgctacggctatgagaaatca

SEQ ID NO: 172030 - DNA, 75 bp, synthetic construct
  source 1..75: mol_type = other DNA
gccggataacggggaagcccgcatcaccctgaagacagcactgatggttgacggaaataaagtggcactcagcgc

SEQ ID NO: 172031 - DNA, 75 bp, synthetic construct
  source 1..75: mol_type = other DNA
ccgacagacccggtgttataccggagtggagacatgacacctcttcccggcagcctgctcatccgcaacgcagag

SEQ ID NO: 172032 - DNA, 75 bp, synthetic construct
  source 1..75: mol_type = other DNA
ggagctgctcaacaaaactatgccctggcacaagttacttgttcccgaacctgcggacgaaagcaccgagaacag

SEQ ID NO: 172033 - DNA, 75 bp, synthetic construct
  source 1..75: mol_type = other DNA
ctaatgaatatggtctgattagcaatgtcacacactggatgccgctaccagaacctccgcaggagtcgaagagtg

SEQ ID NO: 172034 - DNA, 75 bp, synthetic construct
  source 1..75: mol_type = other DNA
tttgattacagcgattgtcatttccccggtaattatctggtcgtgggatacggtaaaagaaaccactgcaggtga

SEQ ID NO: 172035 - DNA, 75 bp, synthetic construct
  source 1..75: mol_type = other DNA
tcagggggttcatgcaaatgaatacagtgagaaaacgcaatatctgggggtggtgaatggtcaggtggtggggaa

SEQ ID NO: 172036 - DNA, 75 bp, synthetic construct
  source 1..75: mol_type = other DNA
ccgtcaatgaagccctgcgcaggatgaaaaaagcgggaatagagaaacctgagctggaagcgtttttgcgagaga

SEQ ID NO: 172037 - DNA, 75 bp, synthetic construct
  source 1..75: mol_type = other DNA
gctacgagataatgtacctaaaaacgttaaataggattttcaacacagatcactcgttactgtgcagtacttatg

SEQ ID NO: 172038 - DNA, 75 bp, synthetic construct
  source 1..75: mol_type = other DNA
ttatctctcatcggggagatatcagcgtcagcgggtcatttattttatacgccactcgttataccatctgatgtg

SEQ ID NO: 172039 - DNA, 75 bp, synthetic construct
  source 1..75: mol_type = other DNA
cacccggcatttgcgcaaatcctctttcgtattgccgactcatccgtattgcctttagcgccggtatctcctttt

SEQ ID NO: 172040 - DNA, 75 bp, synthetic construct
  source 1..75: mol_type = other DNA
tggcaatgacggcaagaaggccccgaaaaaactgaccaaaaagtctgtcgagaaaggtccccgcctgggcaaaaa

SEQ ID NO: 172041 - DNA, 75 bp, synthetic construct
  source 1..75: mol_type = other DNA
cctctggaactgaaacggatgattcaggaaggctctgtggctgccacctacgctcaggagctctacaacgagcac

SEQ ID NO: 172042 - DNA, 75 bp, synthetic construct
  source 1..75: mol_type = other DNA
gttacatggaactctgaaccgcctgaatcggctccagaacataccgatcgccgaacaacgttatcgctgggatat

SEQ ID NO: 172043 - DNA, 75 bp, synthetic construct
  source 1..75: mol_type = other DNA
gaatatggttcgcgttcctgccagttcaatcgcagcgcctgcaacatcgtctgcatcagcacaaaactatgccat

SEQ ID NO: 172044 - DNA, 75 bp, synthetic construct
  source 1..75: mol_type = other DNA
agcattgcagcagcgaggacaggatattcagatgcgtggtcaggatatctctgctgctaccgctcgccgtggaca

SEQ ID NO: 172045 - DNA, 75 bp, synthetic construct
  source 1..75: mol_type = other DNA
attaacaccgttgcagaagcgaagatgtattttcaggggatgccgcaggttgactattcaagcccggaggctatg

SEQ ID NO: 172046 - DNA, 75 bp, synthetic construct
  source 1..75: mol_type = other DNA
aattacgcaatgaagaaagatcttgatgcaatttctggtgcatcaattgacgatcttggcttcatgactggcatt

SEQ ID NO: 172047 - DNA, 75 bp, synthetic construct
  source 1..75: mol_type = other DNA
aggatgtcgctcagatgtaccaacagaacccgcagcagttcggcgaatttgtcgatcacctagggatggccagcc

SEQ ID NO: 172048 - DNA, 75 bp, synthetic construct
  source 1..75: mol_type = other DNA
gcgcacagaatgctgctctttcccgcgaaatacaaagagcagaattacaagaaaaggctctggacagacagatag

SEQ ID NO: 172049 - DNA, 75 bp, synthetic construct
  source 1..75: mol_type = other DNA
ggttacagccagttcttcggtctgaaacaccagatggcctttgacaacggtatgaactggaataacgccctgcgt

SEQ ID NO: 172050 - DNA, 75 bp, synthetic construct
  source 1..75: mol_type = other DNA
attatttttacgaaccgtctattggtgtgaacgttagcggaaacagtaacactgtatcgctagacggcaagttaa

SEQ ID NO: 172051 - DNA, 75 bp, synthetic construct
  source 1..75: mol_type = other DNA
acgcaaagccagcggtgagtcgcttatgccttgccttagccgggtgcaactggaagaaatgggcgtgcgcgttga

SEQ ID NO: 172052 - DNA, 75 bp, synthetic construct
  source 1..75: mol_type = other DNA
cgaatctgagctatgtgaaaagtcagcgaactgcgagcgtttcgggcgcgggaagccagcgtttcaacattgatg

SEQ ID NO: 172053 - DNA, 75 bp, synthetic construct
  source 1..75: mol_type = other DNA
aatcttacggatgctgataccattacatcgacctctgtcgtgtggagcgcacaaggtaacaccgatgctaatggc

SEQ ID NO: 172054 - DNA, 75 bp, synthetic construct
  source 1..75: mol_type = other DNA
cagatcgacggcgacaaggcggtcgtgaacaacgacggtgacaatgccatcagcaacggcggcaccggcacgcag

SEQ ID NO: 172055 - DNA, 75 bp, synthetic construct
  source 1..75: mol_type = other DNA
tgaatacaccattccaaaattcagtgatgatgacagggcaaatctatttgaatttctttctgaagaggggataac

SEQ ID NO: 172056 - DNA, 75 bp, synthetic construct
  source 1..75: mol_type = other DNA
tacaccattccaaaattcagtgatgatgacagggcaaatctatttgaatttctttctgaagaggggataacaata

SEQ ID NO: 172057 - DNA, 75 bp, synthetic construct
  source 1..75: mol_type = other DNA
ctactgatttcgccatatttcagaatcatggttaccaggggctgtatggtggattagatcagaaagctattcatc

SEQ ID NO: 172058 - DNA, 75 bp, synthetic construct
  source 1..75: mol_type = other DNA
aagtccacaccagaatggtgaaagaggttctgaaagccgtcgccagagccaataatcacccttatcaggggttcc

SEQ ID NO: 172059 - DNA, 75 bp, synthetic construct
  source 1..75: mol_type = other DNA
gctatcatgctcgctaataatgaaaaaaatagatgtcgaaatggaagattactcaacatactgcttctctgcatt

SEQ ID NO: 172060 - DNA, 75 bp, synthetic construct
  source 1..75: mol_type = other DNA
tgaccaccagcaatggtgacagggtcagggcaaaaatttacaagcgcggctctattcaattccaaggaaaatacc

SEQ ID NO: 172061 - DNA, 75 bp, synthetic construct
  source 1..75: mol_type = other DNA
agcaattgcagtcagagcgggattcgttactcgagagtttacattcagtgtattcaggctctcctagtacaacat

SEQ ID NO: 172062 - DNA, 75 bp, synthetic construct
  source 1..75: mol_type = other DNA
acgcgctgtatattcttggcgatctgtttgaagcgtggattggcgacgacgatcccaacccactccatcgccaga

SEQ ID NO: 172063 - DNA, 75 bp, synthetic construct
  source 1..75: mol_type = other DNA
tcatcaaaatatgtaaccatgaaaaaacacaaaagcatatacatgaaatacatcaaaaattgaaagataacggaa

SEQ ID NO: 172064 - DNA, 75 bp, synthetic construct
  source 1..75: mol_type = other DNA
ttgggcttgtggcagcatctgcactgggcgctgtttcacttgtctgccagaatctgattgatgtctgcagactga

SEQ ID NO: 172065 - DNA, 75 bp, synthetic construct
  source 1..75: mol_type = other DNA
tcatggggcaatacggcgtccaggtgaacggcgcggggcagataaccggaaagttcaacgcaacgatggccaaca

SEQ ID NO: 172066 - DNA, 75 bp, synthetic construct
  source 1..75: mol_type = other DNA
tttactgctttagttggttataataacgcaggaaaatcaaatatcatcttagcaattaagtggctgttagatggc

SEQ ID NO: 172067 - DNA, 75 bp, synthetic construct
  source 1..75: mol_type = other DNA
aagtgttacgcgacggaaccccacgccgcgacgaagagattacgattaaggaccgactattactgatcaacaccg

SEQ ID NO: 172068 - DNA, 75 bp, synthetic construct
  source 1..75: mol_type = other DNA
gcagcagcaacagcaggagcgtaaagcggcattccagaaaggctatgcggatgcttatgcgtccggcgacagaga

SEQ ID NO: 172069 - DNA, 75 bp, synthetic construct
  source 1..75: mol_type = other DNA
agtaaaccaattttttcctgacgtaagtgtaaagttacactttcccacaccgacattagatgagatatttaaatc

SEQ ID NO: 172070 - DNA, 75 bp, synthetic construct
  source 1..75: mol_type = other DNA
cctgagttatatttacacccttcagctattaattctgtcagagaatcacttgtcacattaagtgaatcagggtat

SEQ ID NO: 172071 - DNA, 75 bp, synthetic construct
  source 1..75: mol_type = other DNA
cgggaagatgaaccagtaatgagagatatcagccgatttggtcacggaacacaacgttccattcaaatggcatta

SEQ ID NO: 172072 - DNA, 75 bp, synthetic construct
  source 1..75: mol_type = other DNA
cggcttcgttgtattgggaacgtctacaagccggatgagtaaatcggaattcagtgaactaatcgaattaattta

SEQ ID NO: 172073 - DNA, 75 bp, synthetic construct
  source 1..75: mol_type = other DNA
agagtatcctgatgattatttgcttatacagaattacttccacccctatcctgatgaactggctctaagactctt

SEQ ID NO: 172074 - DNA, 75 bp, synthetic construct
  source 1..75: mol_type = other DNA
tcagaaaacctgcatcacgtaaaaatcacacgaatgtgctgatgcatatacaggggtattttagtaactacttaa

SEQ ID NO: 172075 - DNA, 75 bp, synthetic construct
  source 1..75: mol_type = other DNA
gggaagaaatcatcaatgcaacagccgcctactcagcaatcagcaggaggtagctacacgtcaaaatcaggcatt

SEQ ID NO: 172076 - DNA, 75 bp, synthetic construct
  source 1..75: mol_type = other DNA
gtattgcgggggtgtttcagcaggaaaagcaggctcagcggcagaaagaatttcagcaggcgtacgctaatgctt

SEQ ID NO: 172077 - DNA, 75 bp, synthetic construct
  source 1..75: mol_type = other DNA
tttctcagggaccggaagcctacagcaaattcattactgacaacaaggacaggttaaatcgcgttggtgctaatg

SEQ ID NO: 172078 - DNA, 75 bp, synthetic construct
  source 1..75: mol_type = other DNA
gactggctcattgaggagtgccgcggagaatgcccaccccgtgtcaggaaaaattatattctccagtgtggcccg

SEQ ID NO: 172079 - DNA, 75 bp, synthetic construct
  source 1..75: mol_type = other DNA
ggttcagaaacaggaaaaaactgaacgcattgctgaacattcttgaatctcagttcaggctttctgtcgtgccgg

SEQ ID NO: 172080 - DNA, 75 bp, synthetic construct
  source 1..75: mol_type = other DNA
aaggacgccgaggagctgttcgactggctcattgaggagtgccgcggagaatgcccaccccgtgtcaggaaaaat

SEQ ID NO: 172081 - DNA, 75 bp, synthetic construct
  source 1..75: mol_type = other DNA
agagctgactttttaatggacaaattagtggaatgggtaacattcagaccagtatgtccggaaatggctataggg

SEQ ID NO: 172082 - DNA, 75 bp, synthetic construct
  source 1..75: mol_type = other DNA
tggagcaggatttatccccttccggacccttaagcccgtttcggggacatgtttcaaaaaaaacagaaaacattg

SEQ ID NO: 172083 - DNA, 75 bp, synthetic construct
  source 1..75: mol_type = other DNA
ttattaacaaaatgtgggatggctctgtattgtctgtggacagaaagaatgaacccgaacagatgattgaaaatg

SEQ ID NO: 172084 - DNA, 75 bp, synthetic construct
  source 1..75: mol_type = other DNA
gggtgttatcaatatcaatgttggtactggtcaggcgttttataacgatggcacaggaacaattgttaactatgg

SEQ ID NO: 172085 - DNA, 75 bp, synthetic construct
  source 1..75: mol_type = other DNA
gatgacgaataacgtcgatgttagcggtggaatcctcaataatgccggagaaatgactgcgcaaattaccatgaa

SEQ ID NO: 172086 - DNA, 75 bp, synthetic construct
  source 1..75: mol_type = other DNA
ggcgccagcaatacagttattaaccaggggacgattaacctcgaaaaaaatggtaattatgacgatagtctggca

SEQ ID NO: 172087 - DNA, 75 bp, synthetic construct
  source 1..75: mol_type = other DNA
actacctgaaacccgcaatggaacgccttgaggttgcgcggtcagcgcatcttgccagtgccagtcgtatggatg

SEQ ID NO: 172088 - DNA, 75 bp, synthetic construct
  source 1..75: mol_type = other DNA
tgcggccacgcccggccagcgaaaagtctggcaggaaaaaatgcgggaacgtgaagccgacctgaaagcacgggg

SEQ ID NO: 172089 - DNA, 75 bp, synthetic construct
  source 1..75: mol_type = other DNA
aacatactggttcttaataacccgcttgccaataccaccgggcatcagggctatatccagccagaacaggccgtt

SEQ ID NO: 172090 - DNA, 75 bp, synthetic construct
  source 1..75: mol_type = other DNA
ttgcgcacaggatatagttataccagcgttattgtcgttagtggtgagtcgtcggtatatctgaatggagatacg

SEQ ID NO: 172091 - DNA, 75 bp, synthetic construct
  source 1..75: mol_type = other DNA
acataacaaacaattggttgaggcagcgcagcaagctggggtagcgacagctatcgatttcgccatatttcagaa

SEQ ID NO: 172092 - DNA, 75 bp, synthetic construct
  source 1..75: mol_type = other DNA
tactttcatttctgcaattctttttgtggggaagttggctcaatacattcggttcctatatgtttatcacgctac

SEQ ID NO: 172093 - DNA, 75 bp, synthetic construct
  source 1..75: mol_type = other DNA
tactgatagttatagtggtgcagggaaaaatgcaacagcaattaaccaattgggcggtgttataactatttataa

SEQ ID NO: 172094 - DNA, 75 bp, synthetic construct
  source 1..75: mol_type = other DNA
agggttagtcgctcaatcgaatagcacaattatcaatactgacagcggcatcattgatttgtatggtcgtggtag

SEQ ID NO: 172095 - DNA, 75 bp, synthetic construct
  source 1..75: mol_type = other DNA
acagaaaaaacgttaactattcgcgattcagtttttacttataccgagaatgctgacgggactatatctctgcaa

SEQ ID NO: 172096 - DNA, 75 bp, synthetic construct
  source 1..75: mol_type = other DNA
cgcagaaggtgaagttctgcaactgatgaacgttaacgacccggacatcaccgaagaaaactacatgcgcgttat

SEQ ID NO: 172097 - DNA, 75 bp, synthetic construct
  source 1..75: mol_type = other DNA
ctcagaagcagggaaactccttcaaattgcgtgtgagctaacacacgaagcacagggttattcagcatcgctctc

SEQ ID NO: 172098 - DNA, 75 bp, synthetic construct
  source 1..75: mol_type = other DNA
gcttacgaagatgctgaaactgttactggtgttatcaacggcaaagttaagggcggcttcactgttgagctgaac

SEQ ID NO: 172099 - DNA, 75 bp, synthetic construct
  source 1..75: mol_type = other DNA
gtactgggtgctgcgagaactaactgaaacgcaaaacagctttttgatgggcggaacacctaaatcgcaggactt

SEQ ID NO: 172100 - DNA, 75 bp, synthetic construct
  source 1..75: mol_type = other DNA
ggcggcgttggcttgattgcctgccagtgggcaaaagcccttggcgcgaaacttatcggcaccgtaggaaccgcg

SEQ ID NO: 172101 - DNA, 75 bp, synthetic construct
  source 1..75: mol_type = other DNA
cgttacctcggcaccgcttttcagctcatcgacgatttgctcgattacagcgccgatggtgaacagttaggtaaa

SEQ ID NO: 172102 - DNA, 75 bp, synthetic construct
  source 1..75: mol_type = other DNA
agctgctggaaaacctgcaggaaggcatggaagttaaaggtatcgttaagaacctcactgactacggtgcattcg

SEQ ID NO: 172103 - DNA, 75 bp, synthetic construct
  source 1..75: mol_type = other DNA
ggcgctatcgtaaccggtaaagtaactgcagttgacgctaaaggcgcaaccatagaactggctgacggcgttgaa

SEQ ID NO: 172104 - DNA, 75 bp, synthetic construct
  source 1..75: mol_type = other DNA
ggtattcgtgcgttcctgccaggttctctggtagacgttcgtccggtgcgtgacactctgcacctggaaggcaaa

SEQ ID NO: 172105 - DNA, 75 bp, synthetic construct
  source 1..75: mol_type = other DNA
caactgggttgctctgaacaagaaaggcgctatcgtaaccggtaaagtaactgcagttgacgctaaaggcgcaac

SEQ ID NO: 172106 - DNA, 75 bp, synthetic construct
  source 1..75: mol_type = other DNA
gatgtagtggaagttatggttctggatatcgacgaggaacgtcgtcgtatctccctgggtctgaaacagtgcaaa

SEQ ID NO: 172107 - DNA, 75 bp, synthetic construct
  source 1..75: mol_type = other DNA
cccgtccaaagttgttaacgttggcgatgtagtggaagttatggttctggatatcgacgaggaacgtcgtcgtat

SEQ ID NO: 172108 - DNA, 75 bp, synthetic construct
  source 1..75: mol_type = other DNA
aagtgaaactccattgccgcatcgatggcgacgatgaagaccagttaatcagcggatacattgccgcatcgcttg

SEQ ID NO: 172109 - DNA, 75 bp, synthetic construct
  source 1..75: mol_type = other DNA
gcgatggaaggggataaaaacgcacgactggttaacaacggcacgatcaacctcggaacgtcgggcacgaccgac

SEQ ID NO: 172110 - DNA, 75 bp, synthetic construct
  source 1..75: mol_type = other DNA
ggtggacaacaaaggcggcatgactgtcaccgatccggactccatcggtattcagatcgacggcgacaaggcggt

SEQ ID NO: 172111 - DNA, 75 bp, synthetic construct
  source 1..75: mol_type = other DNA
gcccggtacacaactacatcccgaactggctgaagctcgccaacgaggggcgtatttttgaagcggcggaactgt

SEQ ID NO: 172112 - DNA, 75 bp, synthetic construct
  source 1..75: mol_type = other DNA
gaccgtcacccggaaattggcggattgctgaccttcggtattccggccttcaagctggaaaaagaggtaatgacg

SEQ ID NO: 172113 - DNA, 75 bp, synthetic construct
  source 1..75: mol_type = other DNA
atcaatgataaagcgttcgaaatgggctggcgtccggatatgtccggcgtgaaacagaccggtaaaaaagtggcg

SEQ ID NO: 172114 - DNA, 75 bp, synthetic construct
  source 1..75: mol_type = other DNA
ctctgtggcgaaggtgacgctaaacgcaggcacgttcgggaacaccggtacggttaactcgcgcatgttccagac

SEQ ID NO: 172115 - DNA, 75 bp, synthetic construct
  source 1..75: mol_type = other DNA
tgagatcggggcggatgccacgattaacatgcaggtagatatttatgaccactatgcgagatctgaatcccaaat

SEQ ID NO: 172116 - DNA, 75 bp, synthetic construct
  source 1..75: mol_type = other DNA
tagcgtacggcgacatcaataaaacagccgatgctaatgtgaaacaacagtacctggagttccgtagtgaaggag

SEQ ID NO: 172117 - DNA, 75 bp, synthetic construct
  source 1..75: mol_type = other DNA
agcatcggttttgccgctattactggtgaggattcattcggaagcaacactggcaatctcacgctttctcagtac

SEQ ID NO: 172118 - DNA, 75 bp, synthetic construct
  source 1..75: mol_type = other DNA
gtttaataattacgttatcctcgataaaacagaaaaaacgttaactattcgcgattcagtttttacttataccga

SEQ ID NO: 172119 - DNA, 75 bp, synthetic construct
  source 1..75: mol_type = other DNA
atgaaggagatatttcggtttccgatgagggctcaattggcgtactcatcaacggtgaaaaagcaaccgtatcca

SEQ ID NO: 172120 - DNA, 75 bp, synthetic construct
  source 1..75: mol_type = other DNA
atgatggtcatccgtcccgttgaacgcactgatgtctcagcgttaatgcagcttgccagcaaaacgggcggcggc

SEQ ID NO: 172121 - DNA, 75 bp, synthetic construct
  source 1..75: mol_type = other DNA
agacagacgtgatggccaccgctttcagcaccatgcgcaagtgcggcatgaatatcatcaccgccacgcagcata

SEQ ID NO: 172122 - DNA, 75 bp, synthetic construct
  source 1..75: mol_type = other DNA
cttctgaaaatgtataccgatgcggcgctggaagcctgccagaagcatatcgggaaacgttttgaagacgggctg

SEQ ID NO: 172123 - DNA, 75 bp, synthetic construct
  source 1..75: mol_type = other DNA
aagttctttcatttctgcaattctttttgtggggaagttggctcaacacattcggttcttatatgtttatcacgc

SEQ ID NO: 172124 - DNA, 75 bp, synthetic construct
  source 1..75: mol_type = other DNA
gcgcccgcgaaggcgcatcgctggaaaaactgatgcagattgcccgaaccactttgcgtttatggccggaactgg

SEQ ID NO: 172125 - DNA, 75 bp, synthetic construct
  source 1..75: mol_type = other DNA
gataaggctatgaaactgttctggctgcacggttatgaagcaacttcccttgccgatctcgtcgaagcgaccgga

SEQ ID NO: 172126 - DNA, 75 bp, synthetic construct
  source 1..75: mol_type = other DNA
tgctgaccttcggtattccggccttcaagctggaaaaagaggtaatgacgcgccgccgtgaaatcttcaccggca

SEQ ID NO: 172127 - DNA, 75 bp, synthetic construct
  source 1..75: mol_type = other DNA
gctggcgtccggatatgtccggcgtgaaacagaccggtaaaaaagtggcgattatcggcgcaggcccggcaggtc

SEQ ID NO: 172128 - DNA, 75 bp, synthetic construct
  source 1..75: mol_type = other DNA
gaaggcaacgacaatgccttccagaccagtaacccgaaaatctttgctggcggcgatatcgtccgtggttccgat

SEQ ID NO: 172129 - DNA, 75 bp, synthetic construct
  source 1..75: mol_type = other DNA
tggtgacattgtgcgaggttcagacctggtggtaacggcaattgccgaaggccgcaaagctgctgacgggatcat

SEQ ID NO: 172130 - DNA, 75 bp, synthetic construct
  source 1..75: mol_type = other DNA
acgcgcgggaagaaggcgtagagttcaaattcaacgtccagccgctgggtattgaagtgaatggcaacggcaaag

SEQ ID NO: 172131 - DNA, 75 bp, synthetic construct
  source 1..75: mol_type = other DNA
cggcgatatcgtccgtggttccgatctggtcgttaccgcaatcgctgaaggccgtaaagcggcagatgggattat

SEQ ID NO: 172132 - DNA, 75 bp, synthetic construct
  source 1..75: mol_type = other DNA
agcaaccgctttagcatgctggcggatgccgcaccgaaagtgggtaacggtctggcgttcaacgtggtggcgaaa

SEQ ID NO: 172133 - DNA, 75 bp, synthetic construct
  source 1..75: mol_type = other DNA
gacggtggataacaagggcaccatgaccgttaccgatccggagtccatcggtattcagatcgacggcgacaaggc

SEQ ID NO: 172134 - DNA, 75 bp, synthetic construct
  source 1..75: mol_type = other DNA
gcaaacctgggtagtaatacgctggtagggatggcagtgtataaaggtgctacggcaataaacgatcaaactggt

SEQ ID NO: 172135 - DNA, 75 bp, synthetic construct
  source 1..75: mol_type = other DNA
gaaagttcgctgcatctggatgcttaccactggaaagaggacggcatcagcgacaaaggcgtgatgctgaacttt

SEQ ID NO: 172136 - DNA, 75 bp, synthetic construct
  source 1..75: mol_type = other DNA
ggcgcagtcaatatttggggggggaacgggcgctttattaacaatggtaaagtggattcaatcgccaaatcagtc

SEQ ID NO: 172137 - DNA, 75 bp, synthetic construct
  source 1..75: mol_type = other DNA
acaaccagattaaactgaacgaaggcggagaggtcgataacgcgggtacacttagcaatatcgatgttgatggcg

SEQ ID NO: 172138 - DNA, 75 bp, synthetic construct
  source 1..75: mol_type = other DNA
gcattatggcgactatacgttgccggatgtgccggataccaatactgttagcgtaacgccgggaagtgatgcagt

SEQ ID NO: 172139 - DNA, 75 bp, synthetic construct
  source 1..75: mol_type = other DNA
atactggtcgataaaaaccagttggctgataatgcggcagaatatttttacgacccatccgttggcgttaatgtc

SEQ ID NO: 172140 - DNA, 75 bp, synthetic construct
  source 1..75: mol_type = other DNA
gcaaaacgacgattgtaaaaacctggtccgttgacgaggcggccaacactgtcagctttgacggcgtcaatacgg

SEQ ID NO: 172141 - DNA, 75 bp, synthetic construct
  source 1..75: mol_type = other DNA
ctcccattgttttactggctactaacggagggagcgccactaatgcaggtacgatcacaggtaaagtgacggaac

SEQ ID NO: 172142 - DNA, 75 bp, synthetic construct
  source 1..75: mol_type = other DNA
atgaacggcgtggggatcaacaccgggtttaccgcttgtacggcagacaccaccgttaattttgataacgtggtg

SEQ ID NO: 172143 - DNA, 75 bp, synthetic construct
  source 1..75: mol_type = other DNA
gggcaatacaccagttattaatgttagtggtgattcatccatctatttgaatggcgactccgtcattagcggtgc

SEQ ID NO: 172144 - DNA, 75 bp, synthetic construct
  source 1..75: mol_type = other DNA
ggatccagatcgacggcgacaaggccatcgtcaataacgaaggcgagagcaccatcaccaacggcggcaccggca

SEQ ID NO: 172145 - DNA, 75 bp, synthetic construct
  source 1..75: mol_type = other DNA
tcagcggcggcggtcacggcattgatatttctggcgataatgccgccgtcgataacaaaggcaatatgaccgtca

SEQ ID NO: 172146 - DNA, 75 bp, synthetic construct
  source 1..75: mol_type = other DNA
ggtaccatcacggctaaagtgatggaacagtatagcgttttgaatatgttcaatgctttgtcattgagcgacccc

SEQ ID NO: 172147 - DNA, 75 bp, synthetic construct
  source 1..75: mol_type = other DNA
gtggtctccggacatccctgtgcagggaaaacaaatctgacagcagagttaatttctgctgttgtggggagtaat

SEQ ID NO: 172148 - DNA, 75 bp, synthetic construct
  source 1..75: mol_type = other DNA
tttatggtggtccggaagactttctggctacatgtcgaaaagacatgattgacagaaagtcttccggaccaccaa

SEQ ID NO: 172149 - DNA, 75 bp, synthetic construct
  source 1..75: mol_type = other DNA
ccccgacgcctcccaaaccgatttcgtttaataattacgttatcctcgataaaacagaaaaaacgttaactattc

SEQ ID NO: 172150 - DNA, 75 bp, synthetic construct
  source 1..75: mol_type = other DNA
gttatcgttaatggcgatcgtacaatcttaaataacactggcgactccaccgtcaataatggtggaacaggggcc

SEQ ID NO: 172151 - DNA, 75 bp, synthetic construct
  source 1..75: mol_type = other DNA
ccagtaccaccggatgatggcggtgatacaccagtaccgccggacgatggcgatgatacgccagtaccgccggac

SEQ ID NO: 172152 - DNA, 75 bp, synthetic construct
  source 1..75: mol_type = other DNA
aaattcacccataacaactatgtcgcgcagaatgacggcaccatgaacatcagcggcaacaatgccgtggcgatg

SEQ ID NO: 172153 - DNA, 75 bp, synthetic construct
  source 1..75: mol_type = other DNA
gttctggtgccagcgttaattctaccgccattaatcagcagggtggtgaaataacactctataattccggtgcct

SEQ ID NO: 172154 - DNA, 75 bp, synthetic construct
  source 1..75: mol_type = other DNA
ggggacgaacgccgacggtagcgccggtaagctgatggtcaataacgccagtatgaaaggcgtggagatcaacac

SEQ ID NO: 172155 - DNA, 75 bp, synthetic construct
  source 1..75: mol_type = other DNA
tggttaacaatggcaccatcaatgtcggcagcgaaggcacgacacaaacaggcatgattgggatgcaattagcat

SEQ ID NO: 172156 - DNA, 75 bp, synthetic construct
  source 1..75: mol_type = other DNA
atgaaaatcaccccgactatgccaggcaatcgcccgacagccacaacggcaggctccagccagccgcgcaaaacc

SEQ ID NO: 172157 - DNA, 75 bp, synthetic construct
  source 1..75: mol_type = other DNA
ctgctgcatgcatttgtgaaaaagacgcaaaagacatcaacgaaagctattgaaatcgccaggatgcgcctgaag

SEQ ID NO: 172158 - DNA, 75 bp, synthetic construct
  source 1..75: mol_type = other DNA
ctgctgcatgcatttgtgaaaaagacgcaaaagacaccaacgaaagctattgaaattgccaggatgcgcctgaag

SEQ ID NO: 172159 - DNA, 75 bp, synthetic construct
  source 1..75: mol_type = other DNA
taagggatttctgggcgaagaatcccgatgcagaacagccattaaaggcatgggttgatgaagcaacaaaggctg

SEQ ID NO: 172160 - DNA, 75 bp, synthetic construct
  source 1..75: mol_type = other DNA
gaaacaaaagcggcaaagatgatccggaatcatgggttccaggcgggggcgcgaacttaccccggtcatacggga

SEQ ID NO: 172161 - DNA, 75 bp, synthetic construct
  source 1..75: mol_type = other DNA
aagccacgcagtgaaatgggtgtgacttgctcaggccgccagaagcgacgcggaaaatcaattccagcttattac

SEQ ID NO: 172162 - DNA, 75 bp, synthetic construct
  source 1..75: mol_type = other DNA
tcggtaccagaaagcgactttgagagattcttaggcgagaaaagcaagtcactcgaagagagactcaatgaccct

SEQ ID NO: 172163 - DNA, 75 bp, synthetic construct
  source 1..75: mol_type = other DNA
tgatgcacgctgaaaatgccctttcagaaagtgagtgcgcaatgtctgtgctgagcatgtggattgacagcattc

SEQ ID NO: 172164 - DNA, 75 bp, synthetic construct
  source 1..75: mol_type = other DNA
caacgcttctgacaaatctccgcctgatagagcgctctcaagttgcattcattgatgacgcccgacacaccgtat

SEQ ID NO: 172165 - DNA, 75 bp, synthetic construct
  source 1..75: mol_type = other DNA
ctcatgacagacaaaatattctgaacaactcctatgcactccgacaagctgaaaaacatcttgctcttggtggag

SEQ ID NO: 172166 - DNA, 75 bp, synthetic construct
  source 1..75: mol_type = other DNA
ctcatgacagacaaaatattttgaataactcttatgcactccgacatgctgaaaaacaccttgctcttggcggag

SEQ ID NO: 172167 - DNA, 75 bp, synthetic construct
  source 1..75: mol_type = other DNA
tcgtgacacgatgtattctgaggttctcaccttaattgctagtttcgaagctggcctcgctcacgagataaaaca

SEQ ID NO: 172168 - DNA, 75 bp, synthetic construct
  source 1..75: mol_type = other DNA
ttcacagtttataacgacacagacaatgagtatgtcatcactgcacgggttatcaggcctgacggtcgtggagag

SEQ ID NO: 172169 - DNA, 75 bp, synthetic construct
  source 1..75: mol_type = other DNA
ctccctttggccgctcgggaaccccaccacggggtaatgctttttactggcctgctcccttatcgggaagcgggg

SEQ ID NO: 172170 - DNA, 75 bp, synthetic construct
  source 1..75: mol_type = other DNA
cactcaaccctcttcacaacaggagcaaagaagtgatgaagagacaaaaaaaaatgcgatgaagctaataaatta

SEQ ID NO: 172171 - DNA, 75 bp, synthetic construct
  source 1..75: mol_type = other DNA
tggtcccgcgtgaagggatgcaggtgagtgagaagccgtcggtggcgagggtacggtttggtgacggttatgaac

SEQ ID NO: 172172 - DNA, 75 bp, synthetic construct
  source 1..75: mol_type = other DNA
ggatctgaaaacgtttaaaccggtatttcgtgtcacagatgaatattcccgtgccgcgctggacagttttttatc

SEQ ID NO: 172173 - DNA, 75 bp, synthetic construct
  source 1..75: mol_type = other DNA
tgaacgtgattcatttgaaaaatttttagcccggcatgaaggctataaatctttttttttggcgcccgccgggta

SEQ ID NO: 172174 - DNA, 75 bp, synthetic construct
  source 1..75: mol_type = other DNA
attcccacgcaggtggcctgctcgatcacagcctcgaagccgcctgctatgccgcacggctgcggcagagttatc

SEQ ID NO: 172175 - DNA, 75 bp, synthetic construct
  source 1..75: mol_type = other DNA
acaaagccatctggcgatgtcgaattgaggccagcggcggctggagcagcgaacttacgttgctgcgcttttccc

SEQ ID NO: 172176 - DNA, 75 bp, synthetic construct
  source 1..75: mol_type = other DNA
atgcggatatggctgacgcgcaaaaagcaaaacaccacaccatccactggcgaaccagacgtcacggagggatgg

SEQ ID NO: 172177 - DNA, 75 bp, synthetic construct
  source 1..75: mol_type = other DNA
cacatattttctggctcagtctcggcgggttgctgctggctgccgaaatgctgggcggcaatggttatctgttgt

SEQ ID NO: 172178 - DNA, 75 bp, synthetic construct
  source 1..75: mol_type = other DNA
accgtcacgccgatagtggaagtccagaatgcgacagaaacagtgattgcaacggatatcactgtggaacaacca

SEQ ID NO: 172179 - DNA, 75 bp, synthetic construct
  source 1..75: mol_type = other DNA
atactggcgggaagtacagaagaagttccagaacctgaatcttcaccgaaaacaaaaaaacggcctcaacatctg

SEQ ID NO: 172180 - DNA, 75 bp, synthetic construct
  source 1..75: mol_type = other DNA
tttctcattttaccttcaaagacaccattaaccggatctacaagaacgccaccgtacagcatcaaaatagtaaga

SEQ ID NO: 172181 - DNA, 75 bp, synthetic construct
  source 1..75: mol_type = other DNA
ttttgagaaaacaaatgaaataggagagagtctgaaagataaatactctactttatatatttttggtttttgtaa

SEQ ID NO: 172182 - DNA, 75 bp, synthetic construct
  source 1..75: mol_type = other DNA
ggtttaaaagaaattaatgaagtaattacaaaaggaacaattcaacgtaagcaacgttcaaaatcgatatctgac

SEQ ID NO: 172183 - DNA, 75 bp, synthetic construct
  source 1..75: mol_type = other DNA
tgtgtccggcgcagaatttaaccagcaaaaaaatacgcttctggtgctgtctcatgaatctcgcgcactccagga

SEQ ID NO: 172184 - DNA, 75 bp, synthetic construct
  source 1..75: mol_type = other DNA
tgtgtccggcgcagaatttaaccagcaaaaaatacgcttctggtgctgtctcatgaatctcgcgcactccaggaa

SEQ ID NO: 172185 - DNA, 75 bp, synthetic construct
  source 1..75: mol_type = other DNA
cagagggccctgtaatagccaggcggtaccgcgaaatgatgaccagcgccgctccgtgcgcggtgagcagcacct

SEQ ID NO: 172186 - DNA, 75 bp, synthetic construct
  source 1..75: mol_type = other DNA
cccgtaccgtctgatgaactcttgcggtggttttctcagtcgctatggcagctacagtaccgcacagatcagtgc

SEQ ID NO: 172187 - DNA, 75 bp, synthetic construct
  source 1..75: mol_type = other DNA
tattgaatgtgatgaattattgaaatttaaaaaaaatatagatactaatgattattcttgtgtgaccataaattt

SEQ ID NO: 172188 - DNA, 75 bp, synthetic construct
  source 1..75: mol_type = other DNA
ctgagtccggcgctgatggcgggcctctcccgcgattacctggtctattctgccgctgatatcatttcacacctt

SEQ ID NO: 172189 - DNA, 75 bp, synthetic construct
  source 1..75: mol_type = other DNA
cattttagcggcgtctattccattccgcctgatattagcggcgtcattggtgaagtagatttgagcggcgcgtta

SEQ ID NO: 172190 - DNA, 75 bp, synthetic construct
  source 1..75: mol_type = other DNA
tcacgtcattttcatgccgcggtgcttgtttctattgtggtgacgtcttgctgtggattatttttcggtgatgtt

SEQ ID NO: 172191 - DNA, 75 bp, synthetic construct
  source 1..75: mol_type = other DNA
gttcggaaataacccggcagaaacgcggatgagcggctttccgtctttacatggacagatgccatcgaccatggt

SEQ ID NO: 172192 - DNA, 75 bp, synthetic construct
  source 1..75: mol_type = other DNA
cgggttatttcagcagttgacagagggacttcttcttcgtcgcagacattgccgcaatctgagcaggtatcacag

SEQ ID NO: 172193 - DNA, 75 bp, synthetic construct
  source 1..75: mol_type = other DNA
cggattggcacggaggccagtgccaatccggtacgtggaaaaaaattggcgcaggtgatagccaaattgttaccg

SEQ ID NO: 172194 - DNA, 75 bp, synthetic construct
  source 1..75: mol_type = other DNA
atgcctcctccttttttccacacaccggattggcactggcctccgtgccaatccggtacgtggcagaaaaatggc

SEQ ID NO: 172195 - DNA, 75 bp, synthetic construct
  source 1..75: mol_type = other DNA
ccaacagagcagcaatacgttgttaatgctaatgacgcaataatggcaatactccgtcaggaaacaggggcagct

SEQ ID NO: 172196 - DNA, 75 bp, synthetic construct
  source 1..75: mol_type = other DNA
ctgagtatccagaagaatttgaaagcgttcagaaagggatgggctttattgatgacgaccagagaaattctattg

SEQ ID NO: 172197 - DNA, 75 bp, synthetic construct
  source 1..75: mol_type = other DNA
ttttgaaaagcggtaaagtgacgttcagtgccgatgagcccaccggtggaagacatatgaagttggtgatcgctg

SEQ ID NO: 172198 - DNA, 75 bp, synthetic construct
  source 1..75: mol_type = other DNA
ctttcagactcagcgttccccgacacactgcccggtaccgaatacggtcccgacagaggtatccgcctttcggcg

SEQ ID NO: 172199 - DNA, 75 bp, synthetic construct
  source 1..75: mol_type = other DNA
ggtcagtatgttgaggtagattgtaagaaagcgaaggaatatcttgataaaggtgtccacatttatggtggcccg

SEQ ID NO: 172200 - DNA, 75 bp, synthetic construct
  source 1..75: mol_type = other DNA
atggtcgaggggctgaagctcgcggcgcagaccttcaccaaggatgtcaaacaattgtcctgctgcgcaggatga

SEQ ID NO: 172201 - DNA, 75 bp, synthetic construct
  source 1..75: mol_type = other DNA
atgcctcctccttttttccacacaccggattggcacggaggccagtgccaatccggtacgtggcagaaaaatggc

SEQ ID NO: 172202 - DNA, 75 bp, synthetic construct
  source 1..75: mol_type = other DNA
atatgaacttactaatagcaatgatgatttttattattttttccaaggtctttggaggtaagattttaaataagg

SEQ ID NO: 172203 - DNA, 75 bp, synthetic construct
  source 1..75: mol_type = other DNA
cctatatctggtgatggcattaaaccaattagcttgccacaagcgcaaagcatcatagataaggctaatgagggt

SEQ ID NO: 172204 - DNA, 75 bp, synthetic construct
  source 1..75: mol_type = other DNA
aatgccatcagcaacggcggcactggcaccagcatcaccggcaacgaagccacagccaacaacaccggcaaaacc

SEQ ID NO: 172205 - DNA, 75 bp, synthetic construct
  source 1..75: mol_type = other DNA
gaacctgaccacatggcctttttaagctccagtggcggtagtgctgtgaacaacggaacgatcactgcaaaagtg

SEQ ID NO: 172206 - DNA, 75 bp, synthetic construct
  source 1..75: mol_type = other DNA
aacaataacggcaacactaccgttgacggcaaggattccaccggcaccgagataaacggtgacaaagccatcgtc

SEQ ID NO: 172207 - DNA, 75 bp, synthetic construct
  source 1..75: mol_type = other DNA
cggcgacaaggcggttgtcaataacgacggtgacagtgccatcagtaacggcggcaccggcacgcagattaacgg

SEQ ID NO: 172208 - DNA, 75 bp, synthetic construct
  source 1..75: mol_type = other DNA
atgacagtcacggctgatggtacatcgctcatcggcggcagctttgtgctttataacgaagcgggggcaatactc

SEQ ID NO: 172209 - DNA, 75 bp, synthetic construct
  source 1..75: mol_type = other DNA
accatcgagtattacgtcgaaacgaaagagggtgaagaaaaacagcggattgcgcaggcacaattgagcattgac

SEQ ID NO: 172210 - DNA, 75 bp, synthetic construct
  source 1..75: mol_type = other DNA
gtggcggcggcacagttggtgtggcggcctcagtccggaacaatttgaaaacagaacctcgcttaggcctgtgtc

SEQ ID NO: 172211 - DNA, 75 bp, synthetic construct
  source 1..75: mol_type = other DNA
acggtccgccataaaacgcgctcgatgcatggttccattgccgagcgttcattgcaggatattaatgccgattta

SEQ ID NO: 172212 - DNA, 75 bp, synthetic construct
  source 1..75: mol_type = other DNA
ttctccggggcatattgtggttgccggacaatccggtggcggaaaatctgttccggtgaaagaactaatcgacag

SEQ ID NO: 172213 - DNA, 75 bp, synthetic construct
  source 1..75: mol_type = other DNA
caatggcgacagtgcgacgttgaccaatacgggcgatattgacgtcagcaattcggctaccggattcagcctcgt

SEQ ID NO: 172214 - DNA, 75 bp, synthetic construct
  source 1..75: mol_type = other DNA
acggcaaagattccaccggcaccgagatcgcaggtaataacgccaccgttactcaggaaggtgaactcacggtta

SEQ ID NO: 172215 - DNA, 75 bp, synthetic construct
  source 1..75: mol_type = other DNA
ttgggcggcaatggttatctgttgtggagcggcgtggcagcggtgattaccggtctggtggtctggttgctgccg

SEQ ID NO: 172216 - DNA, 75 bp, synthetic construct
  source 1..75: mol_type = other DNA
tctggaacatgccggaaccgtcattcgtacctatggcggcgtggtgttaaataaagaggaatccgatccgcctat

SEQ ID NO: 172217 - DNA, 75 bp, synthetic construct
  source 1..75: mol_type = other DNA
ccaccgttactcaggaaggtgaactcacggttagcagcggcggtcgcggtatcgacatcacaggcaacaatgcca

SEQ ID NO: 172218 - DNA, 75 bp, synthetic construct
  source 1..75: mol_type = other DNA
aagataccatctcaggtctaatctcagtgattgacaagatggctagtgagttacgcccatcagttagacaggcag

SEQ ID NO: 172219 - DNA, 75 bp, synthetic construct
  source 1..75: mol_type = other DNA
acggtcagccagaatcttgccgatcacggcatcgagcatatagaacttggcggtatcgtaagtaacccggtgata

SEQ ID NO: 172220 - DNA, 75 bp, synthetic construct
  source 1..75: mol_type = other DNA
cgaactgcataaaatggctgacgctggtgatgtcgacgcacagagcctgttaggctgggaatatcatcagccccg

SEQ ID NO: 172221 - DNA, 75 bp, synthetic construct
  source 1..75: mol_type = other DNA
acgaacaaaccatcctgatgccaggcggaacatttcgcaaaaaatcggcctcatttcacgggcaactggcagaga

SEQ ID NO: 172222 - DNA, 75 bp, synthetic construct
  source 1..75: mol_type = other DNA
ggaacaataccgagtacgacatgctggcattgcgtaaaaccatcgacctgagcgaaagccagacgatgagtctgg

SEQ ID NO: 172223 - DNA, 75 bp, synthetic construct
  source 1..75: mol_type = other DNA
accaaaagagcccaaaatcttcaataacagtgtcacattcgacgaagacaaaggcacgctgcaaattcgcaatgc

SEQ ID NO: 172224 - DNA, 75 bp, synthetic construct
  source 1..75: mol_type = other DNA
aacaataacggtaaaaccaccgttgatggtcagggctcgatcggtaccgaaatcgcgggtaataacgcggtggtg

SEQ ID NO: 172225 - DNA, 75 bp, synthetic construct
  source 1..75: mol_type = other DNA
tacgatattcatcaactggacagcagccgctcggtggcttacggcgacgtcagtaagacggcggataccaacgtg

SEQ ID NO: 172226 - DNA, 75 bp, synthetic construct
  source 1..75: mol_type = other DNA
atgctggcgctgcgcaaaaacctcgacctgagcgaaaaccagaccatgagcctggagtacggtatcgcccgtctg

SEQ ID NO: 172227 - DNA, 75 bp, synthetic construct
  source 1..75: mol_type = other DNA
cctctatttgttgattcatcgttaattgttgctaagggaaatcagtctgttattcagaacaaaggcattattaac

SEQ ID NO: 172228 - DNA, 75 bp, synthetic construct
  source 1..75: mol_type = other DNA
ttcaactgtcattgttatggggatacaagttagcataggcaatatcattagtagtacagtgcaaaactatacagc

SEQ ID NO: 172229 - DNA, 75 bp, synthetic construct
  source 1..75: mol_type = other DNA
tgaacagaaaaaaaatttacaaaggttaaaagatcaacgagaaaccttaggagaaaatgacacaacagcatcaat

SEQ ID NO: 172230 - DNA, 75 bp, synthetic construct
  source 1..75: mol_type = other DNA
tgattgatgagatattcgagctaacagacccggaaaacttctggttctggcagaattacgtgaaggtggcctatc

SEQ ID NO: 172231 - DNA, 75 bp, synthetic construct
  source 1..75: mol_type = other DNA
taccaggctgtcacacgcacagcggcacgggaaaacgtacaccatagaagagcagcgcgaatggtggagcagatc

SEQ ID NO: 172232 - DNA, 75 bp, synthetic construct
  source 1..75: mol_type = other DNA
acgctcagcgtctggtgatatttgtggctatgtttctctacgagagttgaatgccactgacgcgcgcattggctt

SEQ ID NO: 172233 - DNA, 75 bp, synthetic construct
  source 1..75: mol_type = other DNA
tgcggtgttcttctgtggccccgcagtcgccgccatccctggcggctccggtgccgttctgcggcagcgtcatcg

SEQ ID NO: 172234 - DNA, 75 bp, synthetic construct
  source 1..75: mol_type = other DNA
tggcggttgactgccccctgccagcggcgtgcgcgggggtaaatgccgtccgccccgtggaggcagccgcgcccc

SEQ ID NO: 172235 - DNA, 75 bp, synthetic construct
  source 1..75: mol_type = other DNA
gaaggccgtgagtcgtttggtgggaaagtaaaaacaaggctattcagatatactcgtgagagtgaagaccatgtt

SEQ ID NO: 172236 - DNA, 75 bp, synthetic construct
  source 1..75: mol_type = other DNA
gttgtttctggaatttcttattcctttagggatagtgtgtctaatgttaaattttatattaataaaggaatggat

SEQ ID NO: 172237 - DNA, 75 bp, synthetic construct
  source 1..75: mol_type = other DNA
gatttcgtacatgcggctaaggtgcttgataataaaagtttgctgcttatttccaacttttttaaagatccgttt

SEQ ID NO: 172238 - DNA, 75 bp, synthetic construct
  source 1..75: mol_type = other DNA
tgcacatttcggcattgtcaccgactaccaggctatcacacgcacagcgacacgggaaaacatacaccatagaag

SEQ ID NO: 172239 - DNA, 75 bp, synthetic construct
  source 1..75: mol_type = other DNA
ctggtggatatgaatagtcagggtcaggtgcagatggcgatgaacggcggcatctatgatgaaagctatgcgccg

SEQ ID NO: 172240 - DNA, 75 bp, synthetic construct
  source 1..75: mol_type = other DNA
tatgggtatgggccactggtaaatcagaacgttttctcgttgggttgccagcgacagaaatcagagtttgccacc

SEQ ID NO: 172241 - DNA, 75 bp, synthetic construct
  source 1..75: mol_type = other DNA
agcgaaaccggatattcgcttaatcgacctgacgcctgctgccatcggcccttactgcgtgccggtggttaacct

SEQ ID NO: 172242 - DNA, 75 bp, synthetic construct
  source 1..75: mol_type = other DNA
ccgcgctgggctcggctctcatttggcgatcgtcaggtaagagttgaacgctttgctggattgctggattgctgg

SEQ ID NO: 172243 - DNA, 75 bp, synthetic construct
  source 1..75: mol_type = other DNA
agccgcagcttccctatttttccgtcaacttccggcgttggcggaacatctgaatttatgctgaatatcgaggaa

SEQ ID NO: 172244 - DNA, 75 bp, synthetic construct
  source 1..75: mol_type = other DNA
agcaaatgaaggatgcagcagatttcttttcaagaaataaaaatttaattacacattgtgactatatttcgaatg

SEQ ID NO: 172245 - DNA, 75 bp, synthetic construct
  source 1..75: mol_type = other DNA
agcgggcctggaaaatcatgccccgggaagcactgaaaagtacggcacagcgcatgagtgtgaagcccgtcggta

SEQ ID NO: 172246 - DNA, 75 bp, synthetic construct
  source 1..75: mol_type = other DNA
ctacagtattattcagtatgtcagccagtgcagcactgactccggcatgtgaagagtattataaagaaatcgata

SEQ ID NO: 172247 - DNA, 75 bp, synthetic construct
  source 1..75: mol_type = other DNA
agaacggcggtatcttttatcgttcagcgcgtgatggttatggctttgaagctaactggtcagagttttacacca

SEQ ID NO: 172248 - DNA, 75 bp, synthetic construct
  source 1..75: mol_type = other DNA
ttggtgcatatacgcaggcagaatgtaactcaaggtttattacaggtattcgcctgggcggtctgtcatctgttc

SEQ ID NO: 172249 - DNA, 75 bp, synthetic construct
  source 1..75: mol_type = other DNA
tgcaacagttgggattctcactggtagaaggtgaagttgatttggcgctacccgtgaccagagccagtgatagcg

SEQ ID NO: 172250 - DNA, 75 bp, synthetic construct
  source 1..75: mol_type = other DNA
atctcatccatcgcgagaagccgaacatcgaccggatcgtcgccacactcgggctgaaggaaatgacgcagggca

SEQ ID NO: 172251 - DNA, 75 bp, synthetic construct
  source 1..75: mol_type = other DNA
gcgcacgactacgaggcccaccacgtgttcgacatctggtatcgcaacacgtcggacatcatgccgaccgcgatc

SEQ ID NO: 172252 - DNA, 75 bp, synthetic construct
  source 1..75: mol_type = other DNA
gcgggaagaaaataccgttactcagtacagcgaatacctggactaatcgacaaacattcagcggtggcctttctg

SEQ ID NO: 172253 - DNA, 75 bp, synthetic construct
  source 1..75: mol_type = other DNA
ttgccgctgtcagcaccgctcgtcgggcagccgatgccatccttagccgggaaaatatccgttcccaccagcgcg

SEQ ID NO: 172254 - DNA, 75 bp, synthetic construct
  source 1..75: mol_type = other DNA
cgagtacaataaaggtacggcgctcaaccttggcaaacatgtagtggttgtcggtgcgggcaacaccgcaatgga

SEQ ID NO: 172255 - DNA, 75 bp, synthetic construct
  source 1..75: mol_type = other DNA
accctctccaccatgcacggctgtcctccgcatgaaatcgaagccatttgccgctacatgctggaagaaaaaggg

SEQ ID NO: 172256 - DNA, 75 bp, synthetic construct
  source 1..75: mol_type = other DNA
cttccttgccagagcgggtcatccggtgacgctatttgaacgcgaagctaacgccggcggcgtggtgaaaaatat

SEQ ID NO: 172257 - DNA, 75 bp, synthetic construct
  source 1..75: mol_type = other DNA
aaaaaagtcgcgctggaaaaaggctgggatgaatataagcaacgctggcacaaaccagcgggttccggttctcgc

SEQ ID NO: 172258 - DNA, 75 bp, synthetic construct
  source 1..75: mol_type = other DNA
cggcggctatttgcgtttaagtgcctgtatgcgcgagctggaaggctccgacgcctggggacttgaccacgttga

SEQ ID NO: 172259 - DNA, 75 bp, synthetic construct
  source 1..75: mol_type = other DNA
cgcgctattatcgctaagggcagtataaaagatgtcctcaattaccttggtttgggggaaggctctgcattgcct

SEQ ID NO: 172260 - DNA, 75 bp, synthetic construct
  source 1..75: mol_type = other DNA
accaaaagcggtcaaggctgcatacgacctcgcagccggcaaggcgcctggcagccacactcacccgtggagtca

SEQ ID NO: 172261 - DNA, 75 bp, synthetic construct
  source 1..75: mol_type = other DNA
accaaaagcggtcaaggctgcatacgaccttgcagccggcaaggcgccggacagccacactcacccgtggagtca

SEQ ID NO: 172262 - DNA, 75 bp, synthetic construct
  source 1..75: mol_type = other DNA
cactctcggcaccatcaacaataaaggcgcactgcctggtgaagagatgtatatgtcaggccgtgcgctgttccc

SEQ ID NO: 172263 - DNA, 75 bp, synthetic construct
  source 1..75: mol_type = other DNA
ccaggatgacgcatttttagcccgccacggattgcaggaaaaacgcgaaagcttgcaagccttacccgctcgcat

SEQ ID NO: 172264 - DNA, 75 bp, synthetic construct
  source 1..75: mol_type = other DNA
caccactggtgttcgcggtatccgtttaggcgaaggtgataaagtcgtatctctgatcgttccacgtggtgatgg

SEQ ID NO: 172265 - DNA, 75 bp, synthetic construct
  source 1..75: mol_type = other DNA
ttatcgtccacgagattccgtatcaggtgaacaaagctcgcctgatcgagaagattgcggagctggtaaaagaaa

SEQ ID NO: 172266 - DNA, 75 bp, synthetic construct
  source 1..75: mol_type = other DNA
gtgagcgaggttaactatcaggcactgcgtgaagcagcgcaaaactatcagtcgacgctggcgtggtatcaggaa

SEQ ID NO: 172267 - DNA, 75 bp, synthetic construct
  source 1..75: mol_type = other DNA
tcgtactgaaatcaccgccaacagcgcagacatcaacctggaagatctgatcactcaggaagatgtggtcgtgac

SEQ ID NO: 172268 - DNA, 75 bp, synthetic construct
  source 1..75: mol_type = other DNA
tgggtctgcaacgtgttgctgaaccggttgacgaggaagatctggataccatcgacggcagtgccgcggaagggg

SEQ ID NO: 172269 - DNA, 75 bp, synthetic construct
  source 1..75: mol_type = other DNA
gactttatcgaccgactgctggtggcgaacacccacgaccatattctgtgcttctccagccgtggtcgcgtctat

SEQ ID NO: 172270 - DNA, 75 bp, synthetic construct
  source 1..75: mol_type = other DNA
tcaccaccggcgtggaaaaagtgagtattcattttgggaaacccaaccagcatgcactggatacagtggatgtcc

SEQ ID NO: 172271 - DNA, 75 bp, synthetic construct
  source 1..75: mol_type = other DNA
cgcacatcgcgccgcgctcgtaaccagagatctacatgctgccgggacgctgttgcagcaggccgcgacagcgcc

SEQ ID NO: 172272 - DNA, 75 bp, synthetic construct
  source 1..75: mol_type = other DNA
tggcggctatctgcgcttaagtgcctgcatgcgcgagctggaaggctcagacgcctgggagcttaaccacgttga

SEQ ID NO: 172273 - DNA, 75 bp, synthetic construct
  source 1..75: mol_type = other DNA
gttgcggtagccgcgtgttaaataaacttggcccgcaaaccacgcataccattgtcgtaccctgtgatgagccgt

SEQ ID NO: 172274 - DNA, 75 bp, synthetic construct
  source 1..75: mol_type = other DNA
gcagctgaagcttctgaagagctgatggaaaaatacctgggtggtgaagaactgactgaagcagaaatcaaaggt

SEQ ID NO: 172275 - DNA, 75 bp, synthetic construct
  source 1..75: mol_type = other DNA
ctggcgtttattcgggacctggtaacttatgaggcttctacattagctgaactggaacaggagtttaaaacatcg

SEQ ID NO: 172276 - DNA, 75 bp, synthetic construct
  source 1..75: mol_type = other DNA
ggtgatgcggaggccgttttggctcctcaggatgagtccaggttcgataccgtcacctatacctactacgaacaa

SEQ ID NO: 172277 - DNA, 75 bp, synthetic construct
  source 1..75: mol_type = other DNA
gcagtacttgcttatcaaatcaccaccggcatcaggtaaaagccgcgcactgatgttcatagcactcgacaaact

SEQ ID NO: 172278 - DNA, 75 bp, synthetic construct
  source 1..75: mol_type = other DNA
caaccgctttatctgttggggccactctgcagatgatctatatcgggagtattgcccctggcggaaaccctcctg

SEQ ID NO: 172279 - DNA, 75 bp, synthetic construct
  source 1..75: mol_type = other DNA
gtccgcaaaaaggggcaacgccggaaatggtcgaagagctggagcaggggctgcaaaattacgcccgtgttttac

SEQ ID NO: 172280 - DNA, 75 bp, synthetic construct
  source 1..75: mol_type = other DNA
aggagatccgccagatcaatcgccatttctgcatccccgtcactctcagcgaactgggcatcgaccgtgcaaaaa

SEQ ID NO: 172281 - DNA, 75 bp, synthetic construct
  source 1..75: mol_type = other DNA
agacagaccgtgactatgtagacatcattattgcacttggtatggcgaaggaaggtttcgactggatctggtgcg

SEQ ID NO: 172282 - DNA, 75 bp, synthetic construct
  source 1..75: mol_type = other DNA
gccggtattgggttacctggtagcaattattgccggtacgctggtggcgggtttggcctatgccttcctgaaacg

SEQ ID NO: 172283 - DNA, 75 bp, synthetic construct
  source 1..75: mol_type = other DNA
gcagctgctggtgagaaagaagacgcaccgcgccgcgaacgcaagccacgtccgaccacgccacgccgcaaagaa

SEQ ID NO: 172284 - DNA, 75 bp, synthetic construct
  source 1..75: mol_type = other DNA
aacctgagcaaaacgcaattacgatccgctttacgtctctacacttcgagctggcgttatctttacggtgttaaa

SEQ ID NO: 172285 - DNA, 75 bp, synthetic construct
  source 1..75: mol_type = other DNA
tcttttgcttttggtatcgaagcgtttaaagagccgggtacgcttgctgctgcactgatgcagattggcggcggt

SEQ ID NO: 172286 - DNA, 75 bp, synthetic construct
  source 1..75: mol_type = other DNA
ctcttcctgagtgaagccaaaggccatgcgaagccttacactgcgccggccgctgcgacagcaccggttgccgcc

SEQ ID NO: 172287 - DNA, 75 bp, synthetic construct
  source 1..75: mol_type = other DNA
gtaaaaatgtctggctgggcgatatttcccgcgcagtcgcgcaccctgagctcttcctgagtgaagccaaaggcc

SEQ ID NO: 172288 - DNA, 75 bp, synthetic construct
  source 1..75: mol_type = other DNA
aagcccctgcatttgggttatatgaacacaacaatatgaatgggaagcaatggaacagccaaattccttattccg

SEQ ID NO: 172289 - DNA, 75 bp, synthetic construct
  source 1..75: mol_type = other DNA
atagttaatttttctctgtgtaagtttggtgtgccatcagtaattggccagaaagctgtaatattaaagcttaca

SEQ ID NO: 172290 - DNA, 75 bp, synthetic construct
  source 1..75: mol_type = other DNA
ggtgatacagatactcctgttacagccaaactgtatattagtggtgcaatatctgttccgcagagatgttatatc

SEQ ID NO: 172291 - DNA, 75 bp, synthetic construct
  source 1..75: mol_type = other DNA
cagggcgatcttatttatcaggacacctgcgaaaaaaacaaaatttatcaacgccagattcaggtaatgagagaa

SEQ ID NO: 172292 - DNA, 75 bp, synthetic construct
  source 1..75: mol_type = other DNA
aggcatggtaaaaatcgatccccccttacatcaggaaacagatattcgcttaattaatacggttagccaaaacta

SEQ ID NO: 172293 - DNA, 75 bp, synthetic construct
  source 1..75: mol_type = other DNA
tgcgcgacggcctgctggtgcgccgcacttgctgccagcgttatcgcttaccggatgtgcagcaatgtggcgatt

SEQ ID NO: 172294 - DNA, 75 bp, synthetic construct
  source 1..75: mol_type = other DNA
tccttgatgccgacggtcaggtgctggtggctaacggcggtaatttagcgcgcgtggcaagcattgagatggatg

SEQ ID NO: 172295 - DNA, 75 bp, synthetic construct
  source 1..75: mol_type = other DNA
gcacgcggcgcggcggcggtgtttggcccgcaaaaaggggcaacgccggagatggtcgaagaacttgaacagggg

SEQ ID NO: 172296 - DNA, 75 bp, synthetic construct
  source 1..75: mol_type = other DNA
agggcgcatcgactcgcaaacggcaggcggtaaagcgccgctgggcgtggcgtcggtggcgaagcagtttaatgt

SEQ ID NO: 172297 - DNA, 75 bp, synthetic construct
  source 1..75: mol_type = other DNA
aattctccgcctgtttcgcaacaagatacagccaaagcctctgcatctgcccaaggatattgtggcaatatttcg

SEQ ID NO: 172298 - DNA, 75 bp, synthetic construct
  source 1..75: mol_type = other DNA
ttgtggggagaatatggaatacccgtgctgctattgataacagttttaattctccgcctgtttcgcaacaagata

SEQ ID NO: 172299 - DNA, 75 bp, synthetic construct
  source 1..75: mol_type = other DNA
tttatcaggtggcttctgaccctgctcttggcgtcgttttcaatataaataattattctcagtgcgagtcaaata

SEQ ID NO: 172300 - DNA, 75 bp, synthetic construct
  source 1..75: mol_type = other DNA
cccaacctgatgatcattggcaccagctttttgacccacgacgacgccagtttcgtcaaaatggtctttacgctg

SEQ ID NO: 172301 - DNA, 75 bp, synthetic construct
  source 1..75: mol_type = other DNA
ctggcccgccacggcgagaaaaaagccgtcaccgtggtgactcaggtggaagtggataaaaacgatccggggttt

SEQ ID NO: 172302 - DNA, 75 bp, synthetic construct
  source 1..75: mol_type = other DNA
agtgattatcaccacgccggaatgcctgcctgcggcgctgcgtggtgaaacgggcacccatattattaaaacgta

SEQ ID NO: 172303 - DNA, 75 bp, synthetic construct
  source 1..75: mol_type = other DNA
gatggttacctgctgccggactggtatggcgcagagccgcgccgacactgcgtatccgtgacccacacaaagaag

SEQ ID NO: 172304 - DNA, 75 bp, synthetic construct
  source 1..75: mol_type = other DNA
gaacccaacgacgcctgatgcagaaaactatccataaaacaaaggacaaaaaccacgcccggcggctcaccgcca

SEQ ID NO: 172305 - DNA, 75 bp, synthetic construct
  source 1..75: mol_type = other DNA
ccgtttggtgccgcgaccagtattaccctgactatcgtaatgggtctgatgctgctggtttactggcgcgcttct

SEQ ID NO: 172306 - DNA, 75 bp, synthetic construct
  source 1..75: mol_type = other DNA
atgaatttatctgaaattactcaacaaatgggtgaggtaggtaaaacactgagcgattctgtgccagagttactt

SEQ ID NO: 172307 - DNA, 75 bp, synthetic construct
  source 1..75: mol_type = other DNA
ttcgcggcgcactggacgggctgagcgacggggatttaccccgtgtgacggcagcaaccagcaccctggctgtgg

SEQ ID NO: 172308 - DNA, 75 bp, synthetic construct
  source 1..75: mol_type = other DNA
gtagacttagtcactaaaccttgcgtggatattttaacagctacggttaaaaatattaaatctggaaaaattata

SEQ ID NO: 172309 - DNA, 75 bp, synthetic construct
  source 1..75: mol_type = other DNA
atttttacacagaaggtgaatttcttgatatgcttgaggagatagtaaatgcaactagcaaagataaatccctaa

SEQ ID NO: 172310 - DNA, 75 bp, synthetic construct
  source 1..75: mol_type = other DNA
cagtgtgtaggaatttcacagcgaggcaagacggtaaatcgggaactaaagcgagtattaaaaatatgctgcgta

SEQ ID NO: 172311 - DNA, 75 bp, synthetic construct
  source 1..75: mol_type = other DNA
caacgttgaccagaaaatatgaaggttcaacttgtcttccaaacgtagctctttacgcggcaggctaccggaaat

SEQ ID NO: 172312 - DNA, 75 bp, synthetic construct
  source 1..75: mol_type = other DNA
gaagcatccgcctgtggtatcaaaacaaaattagctgatctcgacttggaacaggcaacgagtgctgagtggcat

SEQ ID NO: 172313 - DNA, 75 bp, synthetic construct
  source 1..75: mol_type = other DNA
atgctgttcggtctggcacaacaagggaacgcgccaaaagcgctggcgtctgtcgataaacgcggcgtaccggtt

SEQ ID NO: 172314 - DNA, 75 bp, synthetic construct
  source 1..75: mol_type = other DNA
atcactacagagcgcatttttccttctctctgctggcattaacaattgccagctcgttacctgcgtatggcggaa

SEQ ID NO: 172315 - DNA, 75 bp, synthetic construct
  source 1..75: mol_type = other DNA
atggctatacatgacgccgggatgttcaccgtgaaagaaatcaaccgcctcaaaattcttcaggatgtcgttgaa

SEQ ID NO: 172316 - DNA, 75 bp, synthetic construct
  source 1..75: mol_type = other DNA
atattctaggccattctgcactagcaagacaggattgatcattaaagttaacgaactagtgcggaatcttgaagg

SEQ ID NO: 172317 - DNA, 75 bp, synthetic construct
  source 1..75: mol_type = other DNA
attacaatcatcggaaaaggcacatttattcttggatgttatgtcttgcccatttgtttcaattgagacaagacg

SEQ ID NO: 172318 - DNA, 75 bp, synthetic construct
  source 1..75: mol_type = other DNA
tactggcgcgtggagaaacaccaccagccgagttattaaacccggtaccaggcgcacatctggaacgcggcgaac

SEQ ID NO: 172319 - DNA, 75 bp, synthetic construct
  source 1..75: mol_type = other DNA
tcgtggacaactacattatccacaaaagccgggaaacacagcactggctgaaggagaacccgaagttcaggggca

SEQ ID NO: 172320 - DNA, 75 bp, synthetic construct
  source 1..75: mol_type = other DNA
gcaactgctaaaaaaagttaatcactttatggaaaccgccagtccatacccgggaggaaagcatggtctggcaaa

SEQ ID NO: 172321 - DNA, 75 bp, synthetic construct
  source 1..75: mol_type = other DNA
gaacgcattgaatcttgtgaagcattcctggaactggaagcacaggtgaatgctgtttctccgcgctttacttca

SEQ ID NO: 172322 - DNA, 75 bp, synthetic construct
  source 1..75: mol_type = other DNA
caattcatcgatttaatgactgttcaagtttttgatgcgttcgaaaatgtgttcgacgttcgcaaagcagcttaa

SEQ ID NO: 172323 - DNA, 75 bp, synthetic construct
  source 1..75: mol_type = other DNA
ggttgcatatgaaggtgaagaaaaagcacgtattgaatcttgcgacgctttcgtagaactggaagcacaggttaa

SEQ ID NO: 172324 - DNA, 75 bp, synthetic construct
  source 1..75: mol_type = other DNA
ggcgaagatctgaactatgcccgtcgcctggcacgcgatgcaggatgtgatgcgaaaattgttgccaaggttgaa

SEQ ID NO: 172325 - DNA, 75 bp, synthetic construct
  source 1..75: mol_type = other DNA
cggcctgtcggctgaagccctgaccgaaaaagacaaagcagacattaagactgccgctctgattggcgtagatta

SEQ ID NO: 172326 - DNA, 75 bp, synthetic construct
  source 1..75: mol_type = other DNA
cctgaatccccaatcccggcgaccttgccgggagcacagggccaggggaaggcaatcagccatgactggcagcag

SEQ ID NO: 172327 - DNA, 75 bp, synthetic construct
  source 1..75: mol_type = other DNA
aagaaacagcacatcaagacgcacgtatctgggatgaagccctggctattccccttttgacgtctctgtctgagc

SEQ ID NO: 172328 - DNA, 75 bp, synthetic construct
  source 1..75: mol_type = other DNA
tgctctctatcgtggcgttacgccggtgcactttgatagcgctaatgacggcgtagcagctgccagcgaagcggt

SEQ ID NO: 172329 - DNA, 75 bp, synthetic construct
  source 1..75: mol_type = other DNA
gtaaggtattcctcaatattggggataaattcctgctggacgccaacctggggaaaggtgaaggcgataaagaaa

SEQ ID NO: 172330 - DNA, 75 bp, synthetic construct
  source 1..75: mol_type = other DNA
ctggcagcagggcatttacttaattcgcgatatgccggggatgcttaataaactttctgattttgctgccacgct

SEQ ID NO: 172331 - DNA, 75 bp, synthetic construct
  source 1..75: mol_type = other DNA
tggccttcggcaagcaatttcccgagcagggcccgctcactgctgacagcttctccggtggcgagacgaccgtcg

SEQ ID NO: 172332 - DNA, 75 bp, synthetic construct
  source 1..75: mol_type = other DNA
gtcgttgttcagccacggaatgcagatctggtcatttgcgccatcggtcacattaccgctgttcactggcggaag

SEQ ID NO: 172333 - DNA, 75 bp, synthetic construct
  source 1..75: mol_type = other DNA
acactggaaagcctgccggaacagatgataagtctggttcctgcgggagtgtcatctgacgttctgctgcgtcgc

SEQ ID NO: 172334 - DNA, 75 bp, synthetic construct
  source 1..75: mol_type = other DNA
tggtgctgttgagtgcgggatgtgtgtcgctcgatccccactacagtacacctgaatccccaatcccggcgacgt

SEQ ID NO: 172335 - DNA, 75 bp, synthetic construct
  source 1..75: mol_type = other DNA
ttgctggtggcggggtcggtggcattgggcggcatcagtgatgggcagcgttgggggatgattctttgggtatct

SEQ ID NO: 172336 - DNA, 75 bp, synthetic construct
  source 1..75: mol_type = other DNA
ttctggttgtggcgggatggacttaggtttttgtggtgggttttctgtactaaataaacaatataaaaaaacaaa

SEQ ID NO: 172337 - DNA, 75 bp, synthetic construct
  source 1..75: mol_type = other DNA
aaagcaaaaaaaagcccagaccaaggaagtaggcgtttgaaagaagataaaccatctcagaccataagggccgaa

SEQ ID NO: 172338 - DNA, 75 bp, synthetic construct
  source 1..75: mol_type = other DNA
gatgattgttaatgtgcagggggatgaacccatgatccctgcaacaatcattcgtcaggttgccgataatctcgc

SEQ ID NO: 172339 - DNA, 75 bp, synthetic construct
  source 1..75: mol_type = other DNA
gttttgctggtgcattgcgtgttatttgtggctggtataggtcgtaagccgctaaggaaacgctatgaacctgtt

SEQ ID NO: 172340 - DNA, 75 bp, synthetic construct
  source 1..75: mol_type = other DNA
tttactctggaagggcgtcgcgggcgttttgctggtgcattgcgtgttatttgtggctggtataggtcgtaagcc

SEQ ID NO: 172341 - DNA, 75 bp, synthetic construct
  source 1..75: mol_type = other DNA
tatgtggcgctctgacgctgacctttgcatccgctcttgagtatgttggatggcctaaatcgctttctgttgcca

SEQ ID NO: 172342 - DNA, 75 bp, synthetic construct
  source 1..75: mol_type = other DNA
tggagttggtccagagctggtggcgtggagacacaccgctgggcgcagtgattatgtcgattgttatggctggct

SEQ ID NO: 172343 - DNA, 75 bp, synthetic construct
  source 1..75: mol_type = other DNA
tgggaacatgatcttcatgctgcgatggataatatccaggaagaaattgatttagttggagaaaacgcctccagt

SEQ ID NO: 172344 - DNA, 75 bp, synthetic construct
  source 1..75: mol_type = other DNA
tgggggctggaaacgaaaaacgcttgagattttgctctgtggtgctctgacgttgacctttgcatccgcgcttga

SEQ ID NO: 172345 - DNA, 75 bp, synthetic construct
  source 1..75: mol_type = other DNA
gtggggttgggttcgtaggtgtagacgccatcagggcgtttgcaatgaaatatctaggcagccgattcggtatcg

SEQ ID NO: 172346 - DNA, 75 bp, synthetic construct
  source 1..75: mol_type = other DNA
cggactggctggagttgttccagagctggtggcgtggagacaccccgctgggggcagtgattatgtcgatcgtta

SEQ ID NO: 172347 - DNA, 75 bp, synthetic construct
  source 1..75: mol_type = other DNA
aagtcaggagaagtgaaatcattggtttcgtcgctacaaaccaaatatgccctgaaaggctataacgtcgaagcc

SEQ ID NO: 172348 - DNA, 75 bp, synthetic construct
  source 1..75: mol_type = other DNA
ccccgcagcaaccggtaaagaagaacggcaagcgtaaacgcctgctactccttctcaccttgctctttattatta

SEQ ID NO: 172349 - DNA, 75 bp, synthetic construct
  source 1..75: mol_type = other DNA
tcactcaggcggttaactccctcgtcacagcactgaaactgcctgacgaatcagcaaaggccaatgaagtgctgg

SEQ ID NO: 172350 - DNA, 75 bp, synthetic construct
  source 1..75: mol_type = other DNA
atgctgtcatactgtgttattcaggaaatttaccgcaaactgtcgaaaaatatcacaaaattgttattccactgc

SEQ ID NO: 172351 - DNA, 75 bp, synthetic construct
  source 1..75: mol_type = other DNA
gttcgtatattaactccgagctgttatttcaaacaggcgcaaaacataaatctgagcgcaagtcagttgaggctc

SEQ ID NO: 172352 - DNA, 75 bp, synthetic construct
  source 1..75: mol_type = other DNA
gagagatgaaaatgacaaacctgttaaggaacaaaaacagcaactgaataccgcagtcagcatcgacaacgtgaa

SEQ ID NO: 172353 - DNA, 75 bp, synthetic construct
  source 1..75: mol_type = other DNA
ttcttttggcgctcaccacagcaatttgctggggggcgttgccaattgcaatgaagcaggtgctggaggtgatgg

SEQ ID NO: 172354 - DNA, 75 bp, synthetic construct
  source 1..75: mol_type = other DNA
acccaatacatcaggaatatctgtccgtagtactcaaagaaatcgattcaattaacaaagttattcagcaattgc

SEQ ID NO: 172355 - DNA, 75 bp, synthetic construct
  source 1..75: mol_type = other DNA
aaacaggtactactgaatatcctgatcaatgccgtccaggctatcagtgcacgagggaaaattcgcattcgaacc

SEQ ID NO: 172356 - DNA, 75 bp, synthetic construct
  source 1..75: mol_type = other DNA
ctggcgcgcatagcaaccacagagatcagaaaggttccaaaacttgcatcatgcgaccaagccagcttcctgggg

SEQ ID NO: 172357 - DNA, 75 bp, synthetic construct
  source 1..75: mol_type = other DNA
catcgtatttggggcggattacgtaagcatacaacggtggtatcgcaacccgcgcaggcgaatgatttacggaga

SEQ ID NO: 172358 - DNA, 75 bp, synthetic construct
  source 1..75: mol_type = other DNA
gtggcgcaaaaggttttattgcgtcggctggcctcaccgcagatcctgtttttgctgtacactttatgtacaatt

SEQ ID NO: 172359 - DNA, 75 bp, synthetic construct
  source 1..75: mol_type = other DNA
cgtgcaggcgatattgcccagcggctacgagctgatggacaaagacgaagtgctcggcagcagccagttcgtgca

SEQ ID NO: 172360 - DNA, 75 bp, synthetic construct
  source 1..75: mol_type = other DNA
aagcggcggcgacggtgatgcaaaaactcagccgcgaagaagtggtgcgcctgagcgaaaacatggcgcggcttt

SEQ ID NO: 172361 - DNA, 75 bp, synthetic construct
  source 1..75: mol_type = other DNA
tttccggcagtattccggggctgcacgccagcaaagtcagcgtcgtcgatcaggcgggaaatctgctgaccgacg

SEQ ID NO: 172362 - DNA, 75 bp, synthetic construct
  source 1..75: mol_type = other DNA
cgatgagttcgtgcaactgggccgcacgaaattcctggcgcgccacggctacggcaagtcccgcgacttcctggt

SEQ ID NO: 172363 - DNA, 75 bp, synthetic construct
  source 1..75: mol_type = other DNA
tgccagcagcaaaaaatgacgttattgatggtgtcgcacagtgtggaagatgcggcgcggatcgccacgcgctcg

SEQ ID NO: 172364 - DNA, 75 bp, synthetic construct
  source 1..75: mol_type = other DNA
ttttagcttaacggtagaacgcggcgagcaggtggcgatcctcgggccaagcggcgcgggtaaaagtaccctgct

SEQ ID NO: 172365 - DNA, 75 bp, synthetic construct
  source 1..75: mol_type = other DNA
gctcctgaagtcctgatggaaggtgcgcaacaacggaaagtcattcataacggcgttgttgctcaaatcagggaa

SEQ ID NO: 172366 - DNA, 75 bp, synthetic construct
  source 1..75: mol_type = other DNA
tgaatatggttgaggagcgcaaacgtgagtatcgcgccaatggtatttcctattatcgtccgtggattttcctga

SEQ ID NO: 172367 - DNA, 75 bp, synthetic construct
  source 1..75: mol_type = other DNA
ccagcgattttgccagtaacccggaaccacgttgcccctgcattctgctgctggatgtttctggctcgatgagcg

SEQ ID NO: 172368 - DNA, 75 bp, synthetic construct
  source 1..75: mol_type = other DNA
atgaatgcacaaataaagaagttaacccaggcgtttccggcgtttcgactgcgtctcgcagataacaaacgctgg

SEQ ID NO: 172369 - DNA, 75 bp, synthetic construct
  source 1..75: mol_type = other DNA
acggttggggcacttactttgaagatccaaatggtgaagatggcgacgatgaagagtacatcgacgatgacgatg

SEQ ID NO: 172370 - DNA, 75 bp, synthetic construct
  source 1..75: mol_type = other DNA
tacccacgcctttccgttatgcatggggcggtcaaatatctcggctacgctgatgaacacagtgcagagcctgat

SEQ ID NO: 172371 - DNA, 75 bp, synthetic construct
  source 1..75: mol_type = other DNA
taaagaaaaatatagttatcctaaagttggcgaagtattgatttctgccagtgggaccatcggcaggactgttat

SEQ ID NO: 172372 - DNA, 75 bp, synthetic construct
  source 1..75: mol_type = other DNA
gacgtaccggcgttgcgcgaaatattgcaacgcacaggcatgttggacgggggccgaaaattactctacctggcg

SEQ ID NO: 172373 - DNA, 75 bp, synthetic construct
  source 1..75: mol_type = other DNA
gacttgtcggtatacgactcacctgtcggccagcaaatccccggtaaataccgggtttcggtgtttgtaaacgaa

SEQ ID NO: 172374 - DNA, 75 bp, synthetic construct
  source 1..75: mol_type = other DNA
gcttaacatgcgtaaaaaacagtacaactactatcgcgaccagttgttgagttttaaagagggtgaggttgagtg

SEQ ID NO: 172375 - DNA, 75 bp, synthetic construct
  source 1..75: mol_type = other DNA
gcttagcatgcgtaaaaaacaatacaactactatcgcgaccagttgttgagttttaaagagggtgaggttgagtg

SEQ ID NO: 172376 - DNA, 75 bp, synthetic construct
  source 1..75: mol_type = other DNA
gagcttttcactcattatggtcccataattgacaaagtatgctcaaaaacaaaccaagcaatcaatgagtcaatt

SEQ ID NO: 172377 - DNA, 75 bp, synthetic construct
  source 1..75: mol_type = other DNA
caccacgcgcacctggttttgtagcgcatatatcacgaataccaatctaagctacgccaatttttcgaaagtcgt

SEQ ID NO: 172378 - DNA, 75 bp, synthetic construct
  source 1..75: mol_type = other DNA
tcgaattgttcattaaaaagccgcttgaaaacggtcttactcgtggagaacaaatggaactggcacgtattgctc

SEQ ID NO: 172379 - DNA, 75 bp, synthetic construct
  source 1..75: mol_type = other DNA
tcgaattgttcattaaaaagccgcttgaaaacggacttactcgtggtgaacaaatggaactggcacgtattgctc

SEQ ID NO: 172380 - DNA, 75 bp, synthetic construct
  source 1..75: mol_type = other DNA
gccggcaacatcatggaagcatggggcggtattgccggtctgcaaaactgtatggacgtgatgttcgatgaagcg

SEQ ID NO: 172381 - DNA, 75 bp, synthetic construct
  source 1..75: mol_type = other DNA
ctccggtctgggtgaaggtgaatcctgagagtggtctggggctgtgttccggttgtgacgcctttcttttgcagg

SEQ ID NO: 172382 - DNA, 75 bp, synthetic construct
  source 1..75: mol_type = other DNA
atgttgtcattactgtataaaaacacaggcatagatatgactctggcattagttggcgaaaaaattgacagaaac

SEQ ID NO: 172383 - DNA, 75 bp, synthetic construct
  source 1..75: mol_type = other DNA
gatgattactactcccggaccagtgcgctgcgacagcaactggcctccagacgctatgaatacaatgccctgtta

SEQ ID NO: 172384 - DNA, 75 bp, synthetic construct
  source 1..75: mol_type = other DNA
gatattcctgatatcgatgcgctttacttcaccatgcttaacactgagagatcccctcataatttccccaaagcg

SEQ ID NO: 172385 - DNA, 75 bp, synthetic construct
  source 1..75: mol_type = other DNA
gttgccggatttggcattatctttttctttagtggcctgcttgctccactgttggtggctattgtgctggcctat

SEQ ID NO: 172386 - DNA, 75 bp, synthetic construct
  source 1..75: mol_type = other DNA
accaaaagcggtcaaggctgcatacgacctagcagccggcaaggcgccggtcagccacactcacccgtggagtca

SEQ ID NO: 172387 - DNA, 75 bp, synthetic construct
  source 1..75: mol_type = other DNA
tcgaaacggcgtaccagtggcgggtgaagtatagggcatctatttattcatcatttgaaaaaagagttgtccgga

SEQ ID NO: 172388 - DNA, 75 bp, synthetic construct
  source 1..75: mol_type = other DNA
catctacctgatgaaattatcttgttttctttattcaaaaaccaagagaaaaattttataaattacgtttctcat

SEQ ID NO: 172389 - DNA, 75 bp, synthetic construct
  source 1..75: mol_type = other DNA
catttgttgctatggcgacagagatgaataagggggtgctgaagaatctcggtctgctgacccctgagctggaag

SEQ ID NO: 172390 - DNA, 75 bp, synthetic construct
  source 1..75: mol_type = other DNA
tagaatatgcacgttttttgattagagtaattcagaaacatccgcatatgaattttatttttaaaactcgaaatc

SEQ ID NO: 172391 - DNA, 75 bp, synthetic construct
  source 1..75: mol_type = other DNA
cagagctggaacagaaggagtttccccaggtgggtcaggtcacctgtagtatcggttttgcggctgtggaccctg

SEQ ID NO: 172392 - DNA, 75 bp, synthetic construct
  source 1..75: mol_type = other DNA
gctggtggcgattgtgctggcctatttactggaatggccaaccgtgcgcctgcaatctattggctgctcccgacg

SEQ ID NO: 172393 - DNA, 75 bp, synthetic construct
  source 1..75: mol_type = other DNA
aaatataggctcaagttctggatgcgacatgctgtatggcatggcggatgcctgcgccctgagccacaggtccgg

SEQ ID NO: 172394 - DNA, 75 bp, synthetic construct
  source 1..75: mol_type = other DNA
tacaaaataacctcaatgttatgctgttttctgacaacgtctctattgaggacgagctggaactcaagcatctgg

SEQ ID NO: 172395 - DNA, 75 bp, synthetic construct
  source 1..75: mol_type = other DNA
tgtcgaaccgccgcagcaaaatacggatgcatacggtgttgccacaatcaacatggtaagtcaggttgcggaaga

SEQ ID NO: 172396 - DNA, 75 bp, synthetic construct
  source 1..75: mol_type = other DNA
gcaatgcttatatcggcctgaccggctggcgtagcgcaccagaattgaataatgactacgaagcccgcccggcta

SEQ ID NO: 172397 - DNA, 75 bp, synthetic construct
  source 1..75: mol_type = other DNA
ggcgcagaatactggcgtgattatctgaagttgagcagcaacgcttatatcggcctgaccggctggcgtagcgca

SEQ ID NO: 172398 - DNA, 75 bp, synthetic construct
  source 1..75: mol_type = other DNA
ttccacattgcagaacagcaagttgacggcgcaagtgactacctcaaggatggagaatggcctattgataatgga

SEQ ID NO: 172399 - DNA, 75 bp, synthetic construct
  source 1..75: mol_type = other DNA
ttagccgaagtgctcgccagcggtgaaaccaatctcttcaacagcgcacgaaatattgcctgcgccattaaaata

SEQ ID NO: 172400 - DNA, 75 bp, synthetic construct
  source 1..75: mol_type = other DNA
gggcaaattatcacctttagcgtaacacctgatggtgcaacgctaagcaatacaggggaaatcctgactgatcag

SEQ ID NO: 172401 - DNA, 75 bp, synthetic construct
  source 1..75: mol_type = other DNA
tgtcattgatagtataaaacgctcagccgataagctaacgttaagctgccatgagccaacaggtgatgattcatt

SEQ ID NO: 172402 - DNA, 75 bp, synthetic construct
  source 1..75: mol_type = other DNA
tggcgaaaaaatccacgttgctgttgcccaggaagttcctggtacaggagtggatacccctgaagatctcgagcg

SEQ ID NO: 172403 - DNA, 75 bp, synthetic construct
  source 1..75: mol_type = other DNA
cggcgaaaaaatccacgttgctgtcgcccaggaagttcctggcacaggtgtggatacccctgaagatctcaagcg

SEQ ID NO: 172404 - DNA, 75 bp, synthetic construct
  source 1..75: mol_type = other DNA
tggaatttgtccagtcaggtgcctacgtgaacctcctgaagttgagcaatattgattacagccaaagaaattacg

SEQ ID NO: 172405 - DNA, 75 bp, synthetic construct
  source 1..75: mol_type = other DNA
gaaaccgatgacgcatacgtggcagggaatcagattcaaattatgtctcaggtgtctggcagcgtgacgaaagtc

SEQ ID NO: 172406 - DNA, 75 bp, synthetic construct
  source 1..75: mol_type = other DNA
atggaagatgcaattcagacctatgaaatcaatgatattgatgatataggaaatattttcgaccgagttatttca

SEQ ID NO: 172407 - DNA, 75 bp, synthetic construct
  source 1..75: mol_type = other DNA
attaaaggtatcgtgccactgatcattctttttttctttgtggtctcgctggcttatggcatcgctacccgcaca

SEQ ID NO: 172408 - DNA, 75 bp, synthetic construct
  source 1..75: mol_type = other DNA
ggtcgattctggcccccattttcgtaccaatgtttatgctacttggctttcacccggcatttgcgcaaatcctct

SEQ ID NO: 172409 - DNA, 75 bp, synthetic construct
  source 1..75: mol_type = other DNA
aaccgacaaaatcatcgagccacggttaggtcaatggcagggaaacagcgatgagaaactgcagacattgaccga

SEQ ID NO: 172410 - DNA, 75 bp, synthetic construct
  source 1..75: mol_type = other DNA
tcgaattgttcattaaaaatccgcttgaaaacggacttactcgtggagaacaaatggaactggcacgtattgctc

SEQ ID NO: 172411 - DNA, 75 bp, synthetic construct
  source 1..75: mol_type = other DNA
tttcccctcgcccagtttgtcgccatgtttaactggagcaacatggggaaattcatcgccgtggggctgaccgat

SEQ ID NO: 172412 - DNA, 75 bp, synthetic construct
  source 1..75: mol_type = other DNA
atttaatgattgaaccgatgaaagagatggcgggatttatcgtgatggtttttcccctcgcccagtttgtcgcca

SEQ ID NO: 172413 - DNA, 75 bp, synthetic construct
  source 1..75: mol_type = other DNA
tcgatagcgaatttaccaaagcgcagctgggcatcgcgctcggcctgcacaaggcatactgggatatcgattata

SEQ ID NO: 172414 - DNA, 75 bp, synthetic construct
  source 1..75: mol_type = other DNA
cagggcgaaataactaacaccaccatgctgttttatccgggagtgatgatcagccggacgcgttcgcgcggtggt

SEQ ID NO: 172415 - DNA, 75 bp, synthetic construct
  source 1..75: mol_type = other DNA
atcaaactcgattttgccgtaccggtcgcggataaagacgagcacgggttacagttttacatcggtctggggcca

SEQ ID NO: 172416 - DNA, 75 bp, synthetic construct
  source 1..75: mol_type = other DNA
ggccagctccgtagtcgtactgacgattgttggcggcctgataaccgacaaaatcatcgagccacggttaggtca

SEQ ID NO: 172417 - DNA, 75 bp, synthetic construct
  source 1..75: mol_type = other DNA
ctcatacggtcacagtctgaccaccagtaccagtatttccgcgccggaacagaccctcgacttcagctataaaat

SEQ ID NO: 172418 - DNA, 75 bp, synthetic construct
  source 1..75: mol_type = other DNA
tcatcgctttgtcacgcgcggcacgctgggttggattgaaacgggagattttgacaaagtaccgccggatctgcg

SEQ ID NO: 172419 - DNA, 75 bp, synthetic construct
  source 1..75: mol_type = other DNA
aatgcgcttgcgggtaagcaaccgaaagatgctaccctgacggcgctggcggggcttgctactgcggcagacagg

SEQ ID NO: 172420 - DNA, 75 bp, synthetic construct
  source 1..75: mol_type = other DNA
atccaatggagtgcgcgccagacttttttttttttcggtgaaaagatccccctgttgagcacggctaacacatgg

SEQ ID NO: 172421 - DNA, 75 bp, synthetic construct
  source 1..75: mol_type = other DNA
taagtctgtaaaaggtcttgctgataccaaagcgccaatagaaagcccgagtctgacaggaacgccaaccgcgcc

SEQ ID NO: 172422 - DNA, 75 bp, synthetic construct
  source 1..75: mol_type = other DNA
gggaagtatacagcccaggatgcaaccacggctcaaaaagggatagtccaactcagcagtgctaccaatagcacg

SEQ ID NO: 172423 - DNA, 75 bp, synthetic construct
  source 1..75: mol_type = other DNA
gttcgggatcacctgaatgtgaattgcggtcgccataccgtggtgcagcacggtatcagaagtaaggaaggtaaa

SEQ ID NO: 172424 - DNA, 75 bp, synthetic construct
  source 1..75: mol_type = other DNA
ctgagattgttttggaacatcgtccagttgaagccagagacagagcatccgggcggaacctgagtgaagtacatg

SEQ ID NO: 172425 - DNA, 75 bp, synthetic construct
  source 1..75: mol_type = other DNA
atgaatgacgttacagttgttacatcagttacttacccatcgcccgagtcactggctctggtggctgatgtgcaa

SEQ ID NO: 172426 - DNA, 75 bp, synthetic construct
  source 1..75: mol_type = other DNA
agctggctcatttggaatagatctggttgcctcatctacatcttggttcaaacaggctgttgattttttatccgg

SEQ ID NO: 172427 - DNA, 75 bp, synthetic construct
  source 1..75: mol_type = other DNA
tgatcggagatgccataaaaaccatattcgaaattgagcatgtaaaaaaacagttgaatcctcaaaggcaaatag

SEQ ID NO: 172428 - DNA, 75 bp, synthetic construct
  source 1..75: mol_type = other DNA
atggatgcgggcaacaattcggaaaccaatgatatgaagttcaggatagtatacgacggtccggcactggaaacg

SEQ ID NO: 172429 - DNA, 75 bp, synthetic construct
  source 1..75: mol_type = other DNA
agcgaaaggcatcactcagctcagtagtgctactgacagtacgtccgaagtgctggccgccacaccgaaagcagt

SEQ ID NO: 172430 - DNA, 75 bp, synthetic construct
  source 1..75: mol_type = other DNA
tacatccgagcgtattaaccgcacgatcggcattgatatttcagactctgtaaccagtagcagaagtgatgttgc

SEQ ID NO: 172431 - DNA, 75 bp, synthetic construct
  source 1..75: mol_type = other DNA
ccgaaagctgtcaaggctgcatatgacctggctaacgggaagtatacagcccaggatgcaaccacgacacaaaaa

SEQ ID NO: 172432 - DNA, 75 bp, synthetic construct
  source 1..75: mol_type = other DNA
atgtacgggctgacaaagccgaagccaataaatgcgacctgtgcaaccatcgtgaagacggcccggcgtgtatgg

SEQ ID NO: 172433 - DNA, 75 bp, synthetic construct
  source 1..75: mol_type = other DNA
cgccctggaatgtatccgatacaccgccacgcggtcgctgaatgacgctaaaaatattcttattgctgattgtaa

SEQ ID NO: 172434 - DNA, 75 bp, synthetic construct
  source 1..75: mol_type = other DNA
gaaaaccatcggcctgctgattttctgggtcctgctggtgatggcgattatgagctgggtaagccagggtcgtag

SEQ ID NO: 172435 - DNA, 75 bp, synthetic construct
  source 1..75: mol_type = other DNA
gcgctaatttgtgtcgatcgcaataaacttgaacaactgagcgcagaaaaacgccgccgtacggcgctgatgttc

SEQ ID NO: 172436 - DNA, 75 bp, synthetic construct
  source 1..75: mol_type = other DNA
tatggcgcgatggaagtggtggtacgtccggtgattcgcaacagcggcgcagggctgaatgtacgggctgacaaa

SEQ ID NO: 172437 - DNA, 75 bp, synthetic construct
  source 1..75: mol_type = other DNA
atgaccaataaattcatagtatctaccgttgtttgcatcaatgactttgcaagtgatgttccgcaaagtgtttcc

SEQ ID NO: 172438 - DNA, 75 bp, synthetic construct
  source 1..75: mol_type = other DNA
aaaacggcatccatattgcaacagcattgaagtagaaaaattgataaatgaattagaaaaagaaggtaaaataat

SEQ ID NO: 172439 - DNA, 75 bp, synthetic construct
  source 1..75: mol_type = other DNA
aactaaccctaataatcaagtgaaaattgcaataaagtgtcgttggcttgcattggctgaaagtataatcttgag

SEQ ID NO: 172440 - DNA, 75 bp, synthetic construct
  source 1..75: mol_type = other DNA
ataagcgaaagagaagtttcagaatatgaatgccagttattatatttaaccaacccaatagatgtaatgaataca

SEQ ID NO: 172441 - DNA, 75 bp, synthetic construct
  source 1..75: mol_type = other DNA
catctgctttatttaagtaatgaagacaaggaaaaaataatttctgacttagataaaattcaagttgcatgttat

SEQ ID NO: 172442 - DNA, 75 bp, synthetic construct
  source 1..75: mol_type = other DNA
ccattgtggtgatgacatgactcttaacactccttcaattccgctgtctgagttgaaaacaaatgtcacggcttt

SEQ ID NO: 172443 - DNA, 75 bp, synthetic construct
  source 1..75: mol_type = other DNA
cactcatcgtgcatgcgtgaatatagacgaaagtaattatattgacgttgccgccattattttatcagtcagtga

SEQ ID NO: 172444 - DNA, 75 bp, synthetic construct
  source 1..75: mol_type = other DNA
tatcgctcaacttttcccaccagtcgctttattgatactgggaattgcattgaatcgcttgtggtctaactttca

SEQ ID NO: 172445 - DNA, 75 bp, synthetic construct
  source 1..75: mol_type = other DNA
ttgaacaaatcagttacttctgcgctttccggggccacagatattaacagcgtcattgctctggtttcttcatta

SEQ ID NO: 172446 - DNA, 75 bp, synthetic construct
  source 1..75: mol_type = other DNA
atgacttcattatttttaccatttatatggagcaatatcggtccccattatttgaagagaaaaaaattgatgacc

SEQ ID NO: 172447 - DNA, 75 bp, synthetic construct
  source 1..75: mol_type = other DNA
cgtcaggtggtggataaaattggtcatctgtgtgactacattctgtttgactccgcatgggttggctatgagcaa

SEQ ID NO: 172448 - DNA, 75 bp, synthetic construct
  source 1..75: mol_type = other DNA
gcctcgccgttattcagctaggcacttacgacggtacgatttataacgcccgtcaggtggtggatggctttgttg

SEQ ID NO: 172449 - DNA, 75 bp, synthetic construct
  source 1..75: mol_type = other DNA
gatgtggtttgtaggcatgataagacgcgccagcgtcgcatcaggcattgtgcacagaacggcggatgcggcgaa

SEQ ID NO: 172450 - DNA, 75 bp, synthetic construct
  source 1..75: mol_type = other DNA
gaaagccgatccggaaagtgtcctctcctttcatgcggtgttttcttgcatttcgctgatatcccaggatatcgc

SEQ ID NO: 172451 - DNA, 75 bp, synthetic construct
  source 1..75: mol_type = other DNA
cgggaaaagagtttcagcccaactgcctgacggcgcatctgacggtaataaggcaatcagtgaaacagagcatga

SEQ ID NO: 172452 - DNA, 75 bp, synthetic construct
  source 1..75: mol_type = other DNA
ttgaacaaatcagttacttctgcgctttccgaggccgcagatattaacagcgtcattgctctggtttcttcatta

SEQ ID NO: 172453 - DNA, 75 bp, synthetic construct
  source 1..75: mol_type = other DNA
accccttctcacagtttgtggtgaaggtgacgcagccgattatcggaccactgcgccgcgttattccggcaatgg

SEQ ID NO: 172454 - DNA, 75 bp, synthetic construct
  source 1..75: mol_type = other DNA
gcctacaagattggcgttggccaccgccttccagtgacaacgtggaggcgctggagcagcagtattattcccagt

SEQ ID NO: 172455 - DNA, 75 bp, synthetic construct
  source 1..75: mol_type = other DNA
ttgcttttgatctggaagagaacgagccgactatccgttgcgttgcagcgccggtttacaacgcccgggatgaaa

SEQ ID NO: 172456 - DNA, 75 bp, synthetic construct
  source 1..75: mol_type = other DNA
actgggtgccaaactgatcgaattcggtgccagagcactggaaagcacctcgctgtacgaaattgcccagcccgt

SEQ ID NO: 172457 - DNA, 75 bp, synthetic construct
  source 1..75: mol_type = other DNA
caaaaacgctggactaaaagtgcacagtgggcaacaaagcaatggccacagtttccggtgtggtcgcgctgacgg

SEQ ID NO: 172458 - DNA, 75 bp, synthetic construct
  source 1..75: mol_type = other DNA
ttaaagagaccgagttcactcacggtgaatatgataaaaacaagtatttttcacttacgaataatgataagtcat

SEQ ID NO: 172459 - DNA, 75 bp, synthetic construct
  source 1..75: mol_type = other DNA
agacaaagtgttactggcttagtggttaatgataaagttaacattaacagaagatatataagaattacacgttca

SEQ ID NO: 172460 - DNA, 75 bp, synthetic construct
  source 1..75: mol_type = other DNA
ccggtttacaacgcccgggatgaaattgtggcggctatttctgtcgccagtaccactacgtatatgtcactggcg

SEQ ID NO: 172461 - DNA, 75 bp, synthetic construct
  source 1..75: mol_type = other DNA
gcggttgccagcctgcccgcgatgattatccagcgcgccaatccgcagctttatgatctgctgaccaacggcgta

SEQ ID NO: 172462 - DNA, 75 bp, synthetic construct
  source 1..75: mol_type = other DNA
gcccgggcagaaagggagttgtccggcaaacttctgccagaagaactgccaccagcagatatacccgagcgagtg

SEQ ID NO: 172463 - DNA, 75 bp, synthetic construct
  source 1..75: mol_type = other DNA
cagatatcgagaccggcgaattattcacggccgtggttaatccccaaaacccattcgattcaggatttcaacaat

SEQ ID NO: 172464 - DNA, 75 bp, synthetic construct
  source 1..75: mol_type = other DNA
actggccaaaaatctcaaaactcctgaagatctcagtcagttcgatcgcctgctcaagaaaatcaaagttgaggc

SEQ ID NO: 172465 - DNA, 75 bp, synthetic construct
  source 1..75: mol_type = other DNA
gctggccggaatgcgcgaacccaatgtatccggtgaaaaagaggcacaaaccgcgctgacccagaccactgccca

SEQ ID NO: 172466 - DNA, 75 bp, synthetic construct
  source 1..75: mol_type = other DNA
ggccagcgaaaaagacgccgttcgcgccgaccagagagcggccgaagaagcggcagagaaaggcaaacgctgggt

SEQ ID NO: 172467 - DNA, 75 bp, synthetic construct
  source 1..75: mol_type = other DNA
atggatataacagcttttcttcactcgctttgcgcttttgcggctcaggtactggttggtatttttaccggaaac

SEQ ID NO: 172468 - DNA, 75 bp, synthetic construct
  source 1..75: mol_type = other DNA
tgggcttacggagcgatagccggttgtacattcttcatcgctcgtgaacatacccaggcagaatatcgctggatt

SEQ ID NO: 172469 - DNA, 75 bp, synthetic construct
  source 1..75: mol_type = other DNA
atggatataacacccttacttcatgcactttgtgctgtggctgcgcagctactgattggtcattttaccggaaac

SEQ ID NO: 172470 - DNA, 75 bp, synthetic construct
  source 1..75: mol_type = other DNA
atggatataagccccttacttcatgcgctttgtgctgtggctgcgcaggtactgattggcctttttaccggaaac

SEQ ID NO: 172471 - DNA, 75 bp, synthetic construct
  source 1..75: mol_type = other DNA
tttttggggaggggtggctaaatcgaaagatttaatagctccatataaccgtgagtcattttcgttcgtgactga

SEQ ID NO: 172472 - DNA, 75 bp, synthetic construct
  source 1..75: mol_type = other DNA
gaggcccagatggagcgcaaagagtctgcatttaatcaggccgagtttaataaactacttcttgaatgcgttgta

SEQ ID NO: 172473 - DNA, 75 bp, synthetic construct
  source 1..75: mol_type = other DNA
cctgtcttcgaccagattgtcttattggatggtgaaaaattatcgcaatataaaacgaattataatgatgatgcc

SEQ ID NO: 172474 - DNA, 75 bp, synthetic construct
  source 1..75: mol_type = other DNA
aacaaaaatatctttaagtaatgacgctctgttattaagagatatattcgagttatctaagcaaaccagtgggga

SEQ ID NO: 172475 - DNA, 75 bp, synthetic construct
  source 1..75: mol_type = other DNA
ggatatcgaaagaattgctaagtattcgctcattaacaaagagtctggagttgttatacaaaatgctgctgtttc

SEQ ID NO: 172476 - DNA, 75 bp, synthetic construct
  source 1..75: mol_type = other DNA
cattgcgcgtgaacacacccaggcagaatatcgctggattgaaatgttcgggcatggcaagcgtatgaatatgcc

SEQ ID NO: 172477 - DNA, 75 bp, synthetic construct
  source 1..75: mol_type = other DNA
ggactacctccagaagcatggaactacgctgaaggtagaatgtgtaattggagtccaaataatcttagtgatgtt

SEQ ID NO: 172478 - DNA, 75 bp, synthetic construct
  source 1..75: mol_type = other DNA
gagggagcaagagaaaaagatgtcagtttttcagcaacagcttcaatgcttcttgagttagggcttcgtgtatat

SEQ ID NO: 172479 - DNA, 75 bp, synthetic construct
  source 1..75: mol_type = other DNA
gtacgttcttcattgcgcgtgaacacacccaggcagaatatcgctggatcgaaatgttcgggcatggcaagcgaa

SEQ ID NO: 172480 - DNA, 75 bp, synthetic construct
  source 1..75: mol_type = other DNA
cactttgtgctgtggctgcgcaaacactggttggtctttttaccggaaactgggcttacggagcgatagccggtt

SEQ ID NO: 172481 - DNA, 75 bp, synthetic construct
  source 1..75: mol_type = other DNA
tgatccacgcgtgtgggatgtgggaagtttgttggatttttctttcccaattatcggatgcttattggtatggat

SEQ ID NO: 172482 - DNA, 75 bp, synthetic construct
  source 1..75: mol_type = other DNA
cgcagatattcaccggtacgctggtggaagccgatcctttccatgccgttacactggtcgccaaccacgataccc

SEQ ID NO: 172483 - DNA, 75 bp, synthetic construct
  source 1..75: mol_type = other DNA
ctgacaatacgggttattacaaaaatgaaggtactgccgaaaatattcagatagagctgagggatgaccaggatg

SEQ ID NO: 172484 - DNA, 75 bp, synthetic construct
  source 1..75: mol_type = other DNA
aatcagcgcacttcccgttacaggtcagagcattgaccgtaaatggtggagccactcagggaaccattcaggcag

SEQ ID NO: 172485 - DNA, 75 bp, synthetic construct
  source 1..75: mol_type = other DNA
gcaagcctgatggattttgtggtgccggtggtggcctgtgcgggattgtatggctgtatgctgatttttagctga

SEQ ID NO: 172486 - DNA, 75 bp, synthetic construct
  source 1..75: mol_type = other DNA
gggttatagatgttatcaatacttctttttttagtggcaaaattttctacaggaaaatgaagtttgtgacagata

SEQ ID NO: 172487 - DNA, 75 bp, synthetic construct
  source 1..75: mol_type = other DNA
gcggtaaaaactggcgctgtagtaaataacttggatgcaaacattgtggcgggtggtacggttgccactgttgca

SEQ ID NO: 172488 - DNA, 75 bp, synthetic construct
  source 1..75: mol_type = other DNA
agcgtgtggcgattgcccgcgcgctgatgcagcaggcgaaggtcattctcgctgacgaacccatcgcctcgctgg

SEQ ID NO: 172489 - DNA, 75 bp, synthetic construct
  source 1..75: mol_type = other DNA
cgttggcatggtgcattttgcccatcagcgcgtttccaccctctccggcggacagcagcagcgtgtggcgattgc

SEQ ID NO: 172490 - DNA, 75 bp, synthetic construct
  source 1..75: mol_type = other DNA
acgttcgggcatggcaagcgtatgaatatgccgtggcagggtggttttgatccgtgcgtatggggtgttagaagc

SEQ ID NO: 172491 - DNA, 75 bp, synthetic construct
  source 1..75: mol_type = other DNA
tatgtcaggtattaaaggaatacaagatagtaaaaaagatatagtttttgaaaatcttaaaaattatttttccgc

SEQ ID NO: 172492 - DNA, 75 bp, synthetic construct
  source 1..75: mol_type = other DNA
ttgaacgtaggtactaaaaatacaaatgatgtcacaaaacaagttctccagagaataagtgaaagaaaaaaaacc

SEQ ID NO: 172493 - DNA, 75 bp, synthetic construct
  source 1..75: mol_type = other DNA
aatattcgcaaaaacagtacaccaggaaaaacaaaacttatcgcaactatcaacacatgcaaagaaacctgtaaa

SEQ ID NO: 172494 - DNA, 75 bp, synthetic construct
  source 1..75: mol_type = other DNA
gcttatttttttacaacaagacataaagacgtttaaagcacatcttcacatggaaaatgagagaagagacgcttg

SEQ ID NO: 172495 - DNA, 75 bp, synthetic construct
  source 1..75: mol_type = other DNA
gatggaatataacaccaacagaaataaatatatcaaagttaactgttggttggccatcagaaataaaaaaaacaa

SEQ ID NO: 172496 - DNA, 75 bp, synthetic construct
  source 1..75: mol_type = other DNA
attgtatgagattggaactataataaaaaataaaggtaatattaatgctaactttataaattatatattcaagca

SEQ ID NO: 172497 - DNA, 75 bp, synthetic construct
  source 1..75: mol_type = other DNA
tcaggtgcaaccatataccccggacaaggctcaaatataataaccattcctaagaacattaatgattttttcatt

SEQ ID NO: 172498 - DNA, 75 bp, synthetic construct
  source 1..75: mol_type = other DNA
tgacctttctgccaatcatctggattgctggtttattaattctgctgaagaccatcggcctgctgattttctggg

SEQ ID NO: 172499 - DNA, 75 bp, synthetic construct
  source 1..75: mol_type = other DNA
attgaatacgtgctgattcagttagccgatccgctgctgcgccctattcgccgcctgctgcctgctatgggggga

SEQ ID NO: 172500 - DNA, 75 bp, synthetic construct
  source 1..75: mol_type = other DNA
gacatccgaaatattaaaaatttttcctcacatcaacattcactgggcgacatgtttgatgaattaataaacatt

SEQ ID NO: 172501 - DNA, 75 bp, synthetic construct
  source 1..75: mol_type = other DNA
ttttcatctctggaacaatcattagaatttattgagcgttctgttatcatttctccagatataaaagaaatctat

SEQ ID NO: 172502 - DNA, 75 bp, synthetic construct
  source 1..75: mol_type = other DNA
ggatggattccgtagtgacatgaacattaaaaagttagttaagctgatgaaaaaaaatataaatagcttaagtaa

SEQ ID NO: 172503 - DNA, 75 bp, synthetic construct
  source 1..75: mol_type = other DNA
atgaccatgtgtctgaaaaaataaatgctattgctgtgcaaaggcgagcagagggagcaaaagagaaagatgtaa

SEQ ID NO: 172504 - DNA, 75 bp, synthetic construct
  source 1..75: mol_type = other DNA
tgcaaaatcgtcgccggtcagacagtgagttttgcaggtcacagcgtacaggttgttgcctgctccctttcccgg

SEQ ID NO: 172505 - DNA, 75 bp, synthetic construct
  source 1..75: mol_type = other DNA
acgcgcaaacgctgcaaaatcgtcgccggtcagacagtgagttttgcaggtcacagcgtacaggttgttgcctga

SEQ ID NO: 172506 - DNA, 75 bp, synthetic construct
  source 1..75: mol_type = other DNA
tatatcaaagaatgcagaaaaagttaaagaactatatagtgtattaaaagaaagtgaattttctgatagagttaa

SEQ ID NO: 172507 - DNA, 75 bp, synthetic construct
  source 1..75: mol_type = other DNA
atccttgatcttccattctctttagtctttgataccttactgctgccgatcgacattcaccacggagcatatgag

SEQ ID NO: 172508 - DNA, 75 bp, synthetic construct
  source 1..75: mol_type = other DNA
atgcgtttcattttggtaggcatcatggttgctttgctgagtggttgtggcagcatcatcagccgcaccataccg

SEQ ID NO: 172509 - DNA, 75 bp, synthetic construct
  source 1..75: mol_type = other DNA
caacttggtgatggagtatttaaagttatcgatttgtataattatggcgttttctttaatggtaaaagaatagat

SEQ ID NO: 172510 - DNA, 75 bp, synthetic construct
  source 1..75: mol_type = other DNA
acagagaaaattaaagaactatatagtgcattaaaagaaagcgaattttctgatagagttaaagtaaaagaaata

SEQ ID NO: 172511 - DNA, 75 bp, synthetic construct
  source 1..75: mol_type = other DNA
aaataaatctctcatgttgagggagttatggataattgaatccagaaggcaatcaatttataaactgctaaatgg

SEQ ID NO: 172512 - DNA, 75 bp, synthetic construct
  source 1..75: mol_type = other DNA
gatatttatgggagtggaaaaatttggcaccagcatctctcagattcgtttagaaacaatggctgctattaagtt

SEQ ID NO: 172513 - DNA, 75 bp, synthetic construct
  source 1..75: mol_type = other DNA
ttaagtcatggcactatgttattaagagatatattcgagttatctcagcgatctagtggggatgttctaatctat

SEQ ID NO: 172514 - DNA, 75 bp, synthetic construct
  source 1..75: mol_type = other DNA
ttttaatgtttttgtcaatttaaaccaaacagataaacaaaccgtggctgtttatcaatctgaagctgaattaaa

SEQ ID NO: 172515 - DNA, 75 bp, synthetic construct
  source 1..75: mol_type = other DNA
cgttatctgctggccgggcggacagtctttgccggaaggtgacggtaactgtcgccgccgcctggcaacctggct

SEQ ID NO: 172516 - DNA, 75 bp, synthetic construct
  source 1..75: mol_type = other DNA
tatcggtgcatttcggtgatgaaagcgcaccattccgcgccgtagaccgcatcagctacagcgtgaaacagggcg

SEQ ID NO: 172517 - DNA, 75 bp, synthetic construct
  source 1..75: mol_type = other DNA
gcctgcttaacccgcgctgcccctatgccactgacaaatgccgcgctgaagaaccggcgctgaatatgctcgctg

SEQ ID NO: 172518 - DNA, 75 bp, synthetic construct
  source 1..75: mol_type = other DNA
ttatctgctggccgggcgggcagtctttgccggaaggtgacagtaactgtcggcgtcgcctggcaacctggttac

SEQ ID NO: 172519 - DNA, 75 bp, synthetic construct
  source 1..75: mol_type = other DNA
ggtgctcaaaccgtttgtttatggtctggcgctggatgaaggcttgatccacccggcatcactgctgcaagacgt

SEQ ID NO: 172520 - DNA, 75 bp, synthetic construct
  source 1..75: mol_type = other DNA
ctgtctaagcgtgaaattctgaccttgtatcttaaccgcgctccgtttggcggtacgttgcaggggatcggtgcg

SEQ ID NO: 172521 - DNA, 75 bp, synthetic construct
  source 1..75: mol_type = other DNA
gatgatcttccaggacccgatgaccagtctcaacccgtgctacaccgtgggtttccagattatggaagcgattaa

SEQ ID NO: 172522 - DNA, 75 bp, synthetic construct
  source 1..75: mol_type = other DNA
tttttgcgggatatgatcaacggcaatcaaaaaagctggctggcacattgtaccgattcagaggcgttaataatc

SEQ ID NO: 172523 - DNA, 75 bp, synthetic construct
  source 1..75: mol_type = other DNA
aaaccgagcaatgttcctggaactgctggagatattggcggttctataggatctgagctaggtggaaaagtaaca

SEQ ID NO: 172524 - DNA, 75 bp, synthetic construct
  source 1..75: mol_type = other DNA
tcgcgcgccgcgccacccatacactcaggcgttgctacgcgcgctgccggaatttgcacaggacaaagcacgtct

SEQ ID NO: 172525 - DNA, 75 bp, synthetic construct
  source 1..75: mol_type = other DNA
cagaaagagaacatggcgctggtgttgattacccatgacctggcgctggtggcggaagcggcgcataaaatcatc

SEQ ID NO: 172526 - DNA, 75 bp, synthetic construct
  source 1..75: mol_type = other DNA
ggcggaagcggcgcataaaatcatcgtgatgtatgcaggccaggtggtggaaacgggcgatgctcacgccatctt

SEQ ID NO: 172527 - DNA, 75 bp, synthetic construct
  source 1..75: mol_type = other DNA
ggactgacaaagccactggatcagaaaatttatgcgttgagctatctgaatggaaagaaagcgtatcttgagtca

SEQ ID NO: 172528 - DNA, 75 bp, synthetic construct
  source 1..75: mol_type = other DNA
gatagaatcatggtggatgctggaagatacgcggtggcaaaggctgaacatgccgcttactgcggcaaataacag

SEQ ID NO: 172529 - DNA, 75 bp, synthetic construct
  source 1..75: mol_type = other DNA
gatagaatcatggtggatgcaggaagatacacggtggcaactgctgaacataccgtattctgaggcagataatgg

SEQ ID NO: 172530 - DNA, 75 bp, synthetic construct
  source 1..75: mol_type = other DNA
aagccagagcgaagcaggcagaattacaacagatcaacgacgcaacaaccgttgctgatccgcgcaaggctgccg

SEQ ID NO: 172531 - DNA, 75 bp, synthetic construct
  source 1..75: mol_type = other DNA
accatttagctgtattcgagcgatatggaatagccccaaacgatagctctaccacaattcaggcactgcgaatcg

SEQ ID NO: 172532 - DNA, 75 bp, synthetic construct
  source 1..75: mol_type = other DNA
tatttaattatgacggttttattcgtggctatgcagcagagccagattttacacttctgcatgatatacaagacg

SEQ ID NO: 172533 - DNA, 75 bp, synthetic construct
  source 1..75: mol_type = other DNA
cgccgattgcccacaggcgcgacaagaaatgatgaatgtctggccactaccgctggaaccctggttgcctgcatc

SEQ ID NO: 172534 - DNA, 75 bp, synthetic construct
  source 1..75: mol_type = other DNA
cgccgattgcccgcaggcgcgacaagaaatgatgaatgtctggccgctaccgctggaaccctggttgcctgcatc

SEQ ID NO: 172535 - DNA, 75 bp, synthetic construct
  source 1..75: mol_type = other DNA
gtaaatgctcgctatgtgataggaatatggactggcaggccggatggcacgcccgttgtcggtcagtttggtttt

SEQ ID NO: 172536 - DNA, 75 bp, synthetic construct
  source 1..75: mol_type = other DNA
gagcgtagtgaccgacgaaaacggcgaagcgaccttcttttgcaacggcggcagcgtcagcgtgtgggttatcga

SEQ ID NO: 172537 - DNA, 75 bp, synthetic construct
  source 1..75: mol_type = other DNA
acgccgctgtggcgttttgccgatgctgagggtatctggcgctatccggtgaccatcgaagacgtttctccgcgt

SEQ ID NO: 172538 - DNA, 75 bp, synthetic construct
  source 1..75: mol_type = other DNA
ttctggatgcatccgggggtgaatccgttctcggtggcgcgtgcagcctggcaagatctcacgtcgggtcgggtc

SEQ ID NO: 172539 - DNA, 75 bp, synthetic construct
  source 1..75: mol_type = other DNA
gaaggtgtcgcagaaaaatcggctgaccaatggttaatacaattgaccaatcaaattaaaaacatccctcaggct

SEQ ID NO: 172540 - DNA, 75 bp, synthetic construct
  source 1..75: mol_type = other DNA
gacgataaccgtcagcaaatggaaaggaatctcgaccgccttatccagcggataaaagatatgaaaatttccacc

SEQ ID NO: 172541 - DNA, 75 bp, synthetic construct
  source 1..75: mol_type = other DNA
tctttttgatgataagcatcattatgctttccgcatgtcttaatcatcaaaaaaatgactttatatcacctcaaa

SEQ ID NO: 172542 - DNA, 75 bp, synthetic construct
  source 1..75: mol_type = other DNA
acaaaaaggaacaggaaaagtatggcactggcagtgagattcagcgaggtatacaggccgcgacagccgcgcttc

SEQ ID NO: 172543 - DNA, 75 bp, synthetic construct
  source 1..75: mol_type = other DNA
gaggctacggcgaccagttacattagggaggctgtgaataagtatccggctggagctacagttgcaaatgttcct

SEQ ID NO: 172544 - DNA, 75 bp, synthetic construct
  source 1..75: mol_type = other DNA
ctggaaagtgtctggattcagggaaaactacgtatgtgggggcgctggtcgtatattggcggtggcaggtcaggg

SEQ ID NO: 172545 - DNA, 75 bp, synthetic construct
  source 1..75: mol_type = other DNA
gtaaagcgctcgcaagttatcctggattgattgatatcctgcggcaacggtacgaagggcgggggatgagtaaac

SEQ ID NO: 172546 - DNA, 75 bp, synthetic construct
  source 1..75: mol_type = other DNA
ggtcgtatattggtggcggtaagacggggaatatgtttaaccagatgttgacctctaaaaagctgacaaaaacgg

SEQ ID NO: 172547 - DNA, 75 bp, synthetic construct
  source 1..75: mol_type = other DNA
gacgtcggatcgacctatggctgaagattactgaatttatgctttataaaccaattctcataacactaaaaaagt

SEQ ID NO: 172548 - DNA, 75 bp, synthetic construct
  source 1..75: mol_type = other DNA
ttgagcattggctaaaggtggcagaatttattttgtacaaaccaatggttatggcttctggtatagataaaaaag

SEQ ID NO: 172549 - DNA, 75 bp, synthetic construct
  source 1..75: mol_type = other DNA
aacaagctgacgctgatggcgaacgtgtctatgacgcttccttacctgttcctcgcgctggctttcccgttcttt

SEQ ID NO: 172550 - DNA, 75 bp, synthetic construct
  source 1..75: mol_type = other DNA
acctctaaaaagctgacaaaaacggcaattaacgaggcgctccggaggatgaaaaaagcgggtctggacaaacct

SEQ ID NO: 172551 - DNA, 75 bp, synthetic construct
  source 1..75: mol_type = other DNA
cagtaagtacgacagtaaacagaccagcgcggctgccggcggcagttttacctttggctccatgaccggctcagg

SEQ ID NO: 172552 - DNA, 75 bp, synthetic construct
  source 1..75: mol_type = other DNA
caaccggggcagtctgctttcggccggcacgctctcccttgatggaaattcactggataaccgcggcactgtcca

SEQ ID NO: 172553 - DNA, 75 bp, synthetic construct
  source 1..75: mol_type = other DNA
aaaatgctctgaaagatcatgatattattggaactctcaaggatatggatggtaagccagttcctaaagagaatg

SEQ ID NO: 172554 - DNA, 75 bp, synthetic construct
  source 1..75: mol_type = other DNA
gcgatatcggcggccaggtggcggatatcgcccggacgcagggagagctgaatgcgctgaaagtagcgcaggata

SEQ ID NO: 172555 - DNA, 75 bp, synthetic construct
  source 1..75: mol_type = other DNA
atttgacaaggagaaagagcagaaccgcctgaaggaaatcgggatgatcagcgatatcggcggccaggtggcgga

SEQ ID NO: 172556 - DNA, 75 bp, synthetic construct
  source 1..75: mol_type = other DNA
aaccggtggctggaatcctaaattcgatccgactctactaaaatatactgaagttaaagggcagttaggtatctc

SEQ ID NO: 172557 - DNA, 75 bp, synthetic construct
  source 1..75: mol_type = other DNA
cggtcactgccgggaacagtctgatgctttccgccggtcgtgatgtgaacagcctggctgccggtattacggctg

SEQ ID NO: 172558 - DNA, 75 bp, synthetic construct
  source 1..75: mol_type = other DNA
atgacaccagcctgaatgcacagaacgatattctgctggctgccgccgctgacacccgacagaccaccgggaaga

SEQ ID NO: 172559 - DNA, 75 bp, synthetic construct
  source 1..75: mol_type = other DNA
ggaagaacagcggcaggcatatcaggcaaaactgcgtgatacgccggaatacaaaaaggaacaggaaaagtatgg

SEQ ID NO: 172560 - DNA, 75 bp, synthetic construct
  source 1..75: mol_type = other DNA
ggcgaagtgatcgcgtcagccattgcgaaaagcctctacccgggcgtagatccgtcgaaactgacagaagatcag

SEQ ID NO: 172561 - DNA, 75 bp, synthetic construct
  source 1..75: mol_type = other DNA
ccagtatttttaatggtcctggcgaaaaactcaatcttgttcctatggatggcaacttgaataaaggtgtatgga

SEQ ID NO: 172562 - DNA, 75 bp, synthetic construct
  source 1..75: mol_type = other DNA
tgcctccctcagcaatccgggaaaaatcatcgctgacacgctgagcgtcagggcgaccacgctggatggtgacgg

SEQ ID NO: 172563 - DNA, 75 bp, synthetic construct
  source 1..75: mol_type = other DNA
atcctgctggtttcctttggcggtggcaccgcatcggcgttctttaacaagctgacgctgatggcgaacgtttcc

SEQ ID NO: 172564 - DNA, 75 bp, synthetic construct
  source 1..75: mol_type = other DNA
agagggcggtatctattcctggatgaataatagcgttggaccacgttttgctttcatcggcacatttatgtggtt

SEQ ID NO: 172565 - DNA, 75 bp, synthetic construct
  source 1..75: mol_type = other DNA
gcaaatggcctgagccgaaagacggtgagccatgtgtacatgacagaatgaatcatgagcgtattgattttagct

SEQ ID NO: 172566 - DNA, 75 bp, synthetic construct
  source 1..75: mol_type = other DNA
tattaattttgtggtatctccaaatccgggatatcagtccggtctggcgatgttatcttttgtcgtatttgctat

SEQ ID NO: 172567 - DNA, 75 bp, synthetic construct
  source 1..75: mol_type = other DNA
gcgtatggtttgcgcgtattaccggactttccatgttcctcgcttacaccggtgcgttctttacgctctgctatt

SEQ ID NO: 172568 - DNA, 75 bp, synthetic construct
  source 1..75: mol_type = other DNA
ggatgccgtctatcgccatgtggatgcagtgcgggttggttactatcttcatcctgctggtttcgtttggtggcg

SEQ ID NO: 172569 - DNA, 75 bp, synthetic construct
  source 1..75: mol_type = other DNA
gaactggcggatgagctactggctatttacaacgcgaattaccagagcgagtaccgtgttgagcatgaagatatt

SEQ ID NO: 172570 - DNA, 75 bp, synthetic construct
  source 1..75: mol_type = other DNA
ttcgagcttcctgctacatctatggttagcgatccaaaatttttagccccaatactagtttatggggacttctgg

SEQ ID NO: 172571 - DNA, 75 bp, synthetic construct
  source 1..75: mol_type = other DNA
agcgatttttgcgccaggagatgcgcgaacccgcctccctggaactggtgcaaagtcgcctgcaaattctctttc

SEQ ID NO: 172572 - DNA, 75 bp, synthetic construct
  source 1..75: mol_type = other DNA
ctggagtcgatagcccgtgagcaggtacgctgtgaacatgcagcatggtcagatgaaacattcggcgatgtcggt

SEQ ID NO: 172573 - DNA, 75 bp, synthetic construct
  source 1..75: mol_type = other DNA
tcaacgttaattattcatttttatatgggagaaggaagttgtcctgcagctcagtttaggattaattataaaaat

SEQ ID NO: 172574 - DNA, 75 bp, synthetic construct
  source 1..75: mol_type = other DNA
gtaaccgcgttgcgcaaggtgaactggaaaatggacgtcattgggtacggtggcaggacccgttcccgaaaccgt

SEQ ID NO: 172575 - DNA, 75 bp, synthetic construct
  source 1..75: mol_type = other DNA
atgtaaaaaacgaaactccatacaatattcccttattgattaacgaaaatgtgatctccagcggaatttctctga

SEQ ID NO: 172576 - DNA, 75 bp, synthetic construct
  source 1..75: mol_type = other DNA
cgacgtattttttcagaaatggcgggcgaccatcaggcgtgattgaggtccccggcagtattacggaagaaaacg

SEQ ID NO: 172577 - DNA, 75 bp, synthetic construct
  source 1..75: mol_type = other DNA
cggccacgcaggggcatcatattcaggaaaattcgacgtcttttttcagaaatggcggcaggccgtccggggtga

SEQ ID NO: 172578 - DNA, 75 bp, synthetic construct
  source 1..75: mol_type = other DNA
caactgcctgacggcgcatctgacggtaataaggcaatcagtgaaacagagcatggtgcggtgaaagcgatgttg

SEQ ID NO: 172579 - DNA, 75 bp, synthetic construct
  source 1..75: mol_type = other DNA
tcgcttttctgacgaaaattatttatcagtggatttgtcttatgtacgcaggtgatgctgccaacttactgattt

SEQ ID NO: 172580 - DNA, 75 bp, synthetic construct
  source 1..75: mol_type = other DNA
cagcaaagcctttaaacataaatttggttatgcgccgtcagccgtgctaaagaatacggaccagcacccaacgga

SEQ ID NO: 172581 - DNA, 75 bp, synthetic construct
  source 1..75: mol_type = other DNA
atgatcgcctgcgtggtggtgtttatcgccatgcaaattctcggcgatcaggaagtgatgttatggctggcctgg

SEQ ID NO: 172582 - DNA, 75 bp, synthetic construct
  source 1..75: mol_type = other DNA
aacgtctggaaaaaattaagtcatggcgtgaaacctacggagccggaagcaacgtcatgctgccagctgaagagg

SEQ ID NO: 172583 - DNA, 75 bp, synthetic construct
  source 1..75: mol_type = other DNA
ggcggatatgcagttcctgttgtgggacgctcagcaccgttccggtattgcagatgagcagattacccaggcgat

SEQ ID NO: 172584 - DNA, 75 bp, synthetic construct
  source 1..75: mol_type = other DNA
gtgaaagtccgttatgcattggaaaagacagctttagataaaaccgtctcaccgcttgcgattcgtcacgagcaa

SEQ ID NO: 172585 - DNA, 75 bp, synthetic construct
  source 1..75: mol_type = other DNA
ggcaagccagatgtgaagttaacacagaatgttgttagggcgtatatgtctggtgtattacagtcaaatattccc

SEQ ID NO: 172586 - DNA, 75 bp, synthetic construct
  source 1..75: mol_type = other DNA
cggcagatccgcgttatctcgccgccagctggcagtcaggccataccgatagtggtctgcactatcgccgttttc

SEQ ID NO: 172587 - DNA, 75 bp, synthetic construct
  source 1..75: mol_type = other DNA
cttctctgcaaaaagagaatggcgaggcggatctctctgttgaggatgtcgagcatatcctgaagaaggtgaaat

SEQ ID NO: 172588 - DNA, 75 bp, synthetic construct
  source 1..75: mol_type = other DNA
aaaagcaaattctcatagatacagctaaccacataatccatcgtgataatacttcaccatatagcgaaaatctta

SEQ ID NO: 172589 - DNA, 75 bp, synthetic construct
  source 1..75: mol_type = other DNA
gggctttaccttgccgtggctggatgtcccggtcgtaaagattaccaactgtctgttggctccctctgccaatga

SEQ ID NO: 172590 - DNA, 75 bp, synthetic construct
  source 1..75: mol_type = other DNA
tcactggcggaagagtctctctggcaaaaatgtgcacaaaaacttattgccgcaattccacatattccagaatga

SEQ ID NO: 172591 - DNA, 75 bp, synthetic construct
  source 1..75: mol_type = other DNA
cggatgaaaaagaagctattcgcgtgcaacgtgtaaatgctgacgatcgtacgcaaattgacgaagaaatcattg

SEQ ID NO: 172592 - DNA, 75 bp, synthetic construct
  source 1..75: mol_type = other DNA
caaagaacgcctggatgttaatgtgaatgtgacaattgctgatcgcatagcggcagccaggaagagactgaaaga

SEQ ID NO: 172593 - DNA, 75 bp, synthetic construct
  source 1..75: mol_type = other DNA
aaaaaaataaaatctgggacttcaatggcggcattcatccaccggagatgaaaactcagtctaacggtactccct

SEQ ID NO: 172594 - DNA, 75 bp, synthetic construct
  source 1..75: mol_type = other DNA
ccagaagaacaggttgatccgcgcaaagctgccgtcgaagcggctattgcactgcgccaaagcacgcaagctgga

SEQ ID NO: 172595 - DNA, 75 bp, synthetic construct
  source 1..75: mol_type = other DNA
ggagccagaagaacaggtcgatccgcgcaaagctgccgtcgaagccgctattgcccgcgccaaagcacgcaagct

SEQ ID NO: 172596 - DNA, 75 bp, synthetic construct
  source 1..75: mol_type = other DNA
acgtctgggcgcgtctgggtacgccggtgcgtcatttattgaacgatgccggattctgcccttctgccgatcaaa

SEQ ID NO: 172597 - DNA, 75 bp, synthetic construct
  source 1..75: mol_type = other DNA
ggatatcggcgtgttaatgcaaaacgttggcacggcttacgcagtaaaacgcgcagtaatcgatggtgaaccgat

SEQ ID NO: 172598 - DNA, 75 bp, synthetic construct
  source 1..75: mol_type = other DNA
gtctgatgcaggattgcgcagctcaggtagtggaaggcattcgcattcttgcgcatatcttacagccgcgcgaaa

SEQ ID NO: 172599 - DNA, 75 bp, synthetic construct
  source 1..75: mol_type = other DNA
tagttaacttcactcaagcacttgctgaagaatggacaacagagaacattcgcgtaaattgtatcaatccggaaa

SEQ ID NO: 172600 - DNA, 75 bp, synthetic construct
  source 1..75: mol_type = other DNA
atttttaatggagggaaggaaagatttgattcaacatattcagcactacaaggattggaaggtgaggacgataat

SEQ ID NO: 172601 - DNA, 75 bp, synthetic construct
  source 1..75: mol_type = other DNA
ctggtggttcaggtgcaagatttggaggaaccttaccaaaacagtttacaaaattagctggaagagctgttatag

SEQ ID NO: 172602 - DNA, 75 bp, synthetic construct
  source 1..75: mol_type = other DNA
cgaacccgcctccctggaactggtgcaaagccgcctgcaaattctctttcctggtgccaaaaaggcagaacagta

SEQ ID NO: 172603 - DNA, 75 bp, synthetic construct
  source 1..75: mol_type = other DNA
taagcggctatgtgcagcaaaaattcagcgggccgtggtttggcgggctttctggcgtggtgtatgcactgatgg

SEQ ID NO: 172604 - DNA, 75 bp, synthetic construct
  source 1..75: mol_type = other DNA
ttattattagatcctagagatgttgccctgacaagcctcaaagtattaggagctaatagcacgggtcttattata

SEQ ID NO: 172605 - DNA, 75 bp, synthetic construct
  source 1..75: mol_type = other DNA
gaaggcggtgaagtggcttttatcaaaaagatgattgaagagagcaaaggcttcgcgaagcaggtgatgtggttt

SEQ ID NO: 172606 - DNA, 75 bp, synthetic construct
  source 1..75: mol_type = other DNA
atccgcgcaaccgtcatcacagccgctacgatctcgccacgctttgtcaggtcaatcctgaactcaggcaattcc

SEQ ID NO: 172607 - DNA, 75 bp, synthetic construct
  source 1..75: mol_type = other DNA
tcaggaacaacccttttgcgtagcagaagcccgtgtggctgacaaaaatacagatgatgttttaccgtggctggc

SEQ ID NO: 172608 - DNA, 75 bp, synthetic construct
  source 1..75: mol_type = other DNA
aaaagcagagtcgctttattgcctggacctttatgaacgatgagcagcgccgtcgttttgtcaatcgtcagcgtt

SEQ ID NO: 172609 - DNA, 75 bp, synthetic construct
  source 1..75: mol_type = other DNA
aaaagatgattgaagagagcaaaggcttcgcgaagcaggtgatgtggtttacctcactggtatctcgtggtgaaa

SEQ ID NO: 172610 - DNA, 75 bp, synthetic construct
  source 1..75: mol_type = other DNA
cggtcagcagcaggagctgtggtgcgaaggcggtgaagtggctttcatcaaaaagatgattgaagagagtaaagg

SEQ ID NO: 172611 - DNA, 75 bp, synthetic construct
  source 1..75: mol_type = other DNA
accctcgttgccaaccacgacacccaaccgttgcaagccctcgaagcgccggtcgaaccgtggtttaaaccgctg

SEQ ID NO: 172612 - DNA, 75 bp, synthetic construct
  source 1..75: mol_type = other DNA
gccaccagcaaaatcactaacgtcaccgctggcaacctgactgccggcagcactgacgccgttaacggctcccag

SEQ ID NO: 172613 - DNA, 75 bp, synthetic construct
  source 1..75: mol_type = other DNA
aacgtcaccgctggcaacctgactgccagcagcactgacgccgttaacggctctcagctcaaaaccaccaacgac

SEQ ID NO: 172614 - DNA, 75 bp, synthetic construct
  source 1..75: mol_type = other DNA
ggatgagaacctccgggggcagggaggttcgactcgacgtaggcctgataagacgcgtcagcgtcgcatcaggca

SEQ ID NO: 172615 - DNA, 75 bp, synthetic construct
  source 1..75: mol_type = other DNA
atgactcaacagccacaagccaaataccgtcacgattatcgtgcgccggattaccagattactgatattgacttg

SEQ ID NO: 172616 - DNA, 75 bp, synthetic construct
  source 1..75: mol_type = other DNA
caagatgccttgctatgggatggcactgcgtttagcgccaaacatggcaccagcaatactaacagcaaaatcacc

SEQ ID NO: 172617 - DNA, 75 bp, synthetic construct
  source 1..75: mol_type = other DNA
aatatcgccgataacactgccgatatctccactaacactacagatattgccaccaacactgccaatatcgccgat

SEQ ID NO: 172618 - DNA, 75 bp, synthetic construct
  source 1..75: mol_type = other DNA
cgctacagggattaaccgggcatcgacagcacctttttccgggcagggataatccgaaaggtccaatgacatcgc

SEQ ID NO: 172619 - DNA, 75 bp, synthetic construct
  source 1..75: mol_type = other DNA
cctcggctggagcggtacttatagcccacatgcaaccagaaccacaggaagtacccgcttaaacgagatgggcta

SEQ ID NO: 172620 - DNA, 75 bp, synthetic construct
  source 1..75: mol_type = other DNA
catttcatccgtttttgagctggcggtggcgacgcttagagcagatagcgatcctgtctggccagtgcgtaaggc

SEQ ID NO: 172621 - DNA, 75 bp, synthetic construct
  source 1..75: mol_type = other DNA
gagtgaattcgatggccctgggtaatgcaagtcaggcatctggcgaatccagtattgcattaggtagcaccagtg

SEQ ID NO: 172622 - DNA, 75 bp, synthetic construct
  source 1..75: mol_type = other DNA
cagcgacggcaccgtaaccgcactaagctacgcgttgaaaagcggcacctataataacgtgggtgatgctctgtc

SEQ ID NO: 172623 - DNA, 75 bp, synthetic construct
  source 1..75: mol_type = other DNA
gaaactctgcactgggactcagctaaaggggctttcagcgccagttatattgttaaaaatgctgatggaacgatt

SEQ ID NO: 172624 - DNA, 75 bp, synthetic construct
  source 1..75: mol_type = other DNA
tggcgctggagttgtatgtcgatcgcggcaatcttgatcgcgcgccgtgggcgatgacctcgctgaaaaattcca

SEQ ID NO: 172625 - DNA, 75 bp, synthetic construct
  source 1..75: mol_type = other DNA
gaaaatgcgcgcggcgctggaacagttgaaagggctggaaaatctctctggcgatctgtacgagaagatcactaa

SEQ ID NO: 172626 - DNA, 75 bp, synthetic construct
  source 1..75: mol_type = other DNA
gcgctggaacagttgaaagggctggaaaatctctctggcgatctgtacgagaagattaccaaagcactggcttga

SEQ ID NO: 172627 - DNA, 75 bp, synthetic construct
  source 1..75: mol_type = other DNA
agcgtcacgatggtagtgctgcgacctgcgacgatttcgttcaggcgatggaagatgcgtcaaatgtcgatcttt

SEQ ID NO: 172628 - DNA, 75 bp, synthetic construct
  source 1..75: mol_type = other DNA
cataactggaccggcaaccgcgttacctgccgtgactggttccagctcagtttgaaggaaggcttgactgttttc

SEQ ID NO: 172629 - DNA, 75 bp, synthetic construct
  source 1..75: mol_type = other DNA
acatgggcgcaatggagaataaaggtctcaacatctttaactccaaatatgtgctggcgcgtaccgacactgcaa

SEQ ID NO: 172630 - DNA, 75 bp, synthetic construct
  source 1..75: mol_type = other DNA
caccaaaattattgccgataaaaccaaatacccgttcctgctttccaacggtaaccgcgttgcgcaaggcgaact

SEQ ID NO: 172631 - DNA, 75 bp, synthetic construct
  source 1..75: mol_type = other DNA
gaagaagagggcgcactggtcatcagtaatttgccggagcgttttacgctcaagatcgttaatgaaattagccca

SEQ ID NO: 172632 - DNA, 75 bp, synthetic construct
  source 1..75: mol_type = other DNA
ccgataaagattacctcgatattgagcgtgttatcggccatgaatatttccataactggaccggtaaccgagtga

SEQ ID NO: 172633 - DNA, 75 bp, synthetic construct
  source 1..75: mol_type = other DNA
gcgcggaagtgattcgtatgatccacactctgcttggcgaagaaaacttccagaaagggatgcagctctatttcg

SEQ ID NO: 172634 - DNA, 75 bp, synthetic construct
  source 1..75: mol_type = other DNA
cgaatgtgctggagacggtgcgtggtctgttgcagcatcgctcatttaccatgagcaacccgaaccgtattcgtt

SEQ ID NO: 172635 - DNA, 75 bp, synthetic construct
  source 1..75: mol_type = other DNA
tcggttcccgtgcggttaaccgcattaataatgtacgcaccatgcgtggattacagtttgcagaagacgccagcc

SEQ ID NO: 172636 - DNA, 75 bp, synthetic construct
  source 1..75: mol_type = other DNA
attatatcgaatgtgattacattcgatggcggcggcacagttggtgtggcggtctcattcaggaacaatttgaaa

SEQ ID NO: 172637 - DNA, 75 bp, synthetic construct
  source 1..75: mol_type = other DNA
cgtggaagtatgagcgcaaaaggttgctgctacgataatgcctgcgtggaaagcttctttcattcgctgaaagtg

SEQ ID NO: 172638 - DNA, 75 bp, synthetic construct
  source 1..75: mol_type = other DNA
attatatcgagtgtgattacaatcgctggcgtcgtcacagtgcctgtggcggtctcagcccggaacaatttgaaa

SEQ ID NO: 172639 - DNA, 75 bp, synthetic construct
  source 1..75: mol_type = other DNA
attatatcgaatgtgattacattcgttggcggcggcacagttggtgtggcggtctcattctggaacaatttgaaa

SEQ ID NO: 172640 - DNA, 75 bp, synthetic construct
  source 1..75: mol_type = other DNA
attatatcgaatgtgattacattcgttggcggcggcacagttggtgtggcggtctcaatcaggaacaatttgaaa

SEQ ID NO: 172641 - DNA, 75 bp, synthetic construct
  source 1..75: mol_type = other DNA
attatatcgaatgtgattacattcgatggcggcggcacagttggtgtggcggtctcagtctggaacaatttgaaa

SEQ ID NO: 172642 - DNA, 75 bp, synthetic construct
  source 1..75: mol_type = other DNA
gcatgacggcgcaactggcctgcgatgccctgcagatggcgctgtggcggcgtaagaggccccggaacgttatcg

SEQ ID NO: 172643 - DNA, 75 bp, synthetic construct
  source 1..75: mol_type = other DNA
agcgttgtccgtgaggcttttacccggtcaaaacagcgttacagtgcaccacgcctgacggatgaactgtgtgct

SEQ ID NO: 172644 - DNA, 75 bp, synthetic construct
  source 1..75: mol_type = other DNA
tcagcccggtcagctaccgtgcacatggcctgcccgtattggagaatctgctggagcaggacttcagcgccagcg

SEQ ID NO: 172645 - DNA, 75 bp, synthetic construct
  source 1..75: mol_type = other DNA
tcgccacgcatgacggcgcaactggcctgcgatgccctgcagatggcgctgtggcggcgtaagaggccccggaac

SEQ ID NO: 172646 - DNA, 75 bp, synthetic construct
  source 1..75: mol_type = other DNA
ctgtggcggcgtaagaggccccggaacgttatcgttcacacggaccgtggaggccagtactgttcagcagattat

SEQ ID NO: 172647 - DNA, 75 bp, synthetic construct
  source 1..75: mol_type = other DNA
agacatcacgtacttacgtacagatgaaggctggctgtatctggcagtggtcacgtgccgttattggctggtcaa

SEQ ID NO: 172648 - DNA, 75 bp, synthetic construct
  source 1..75: mol_type = other DNA
atggctacaatcctcaccactgacagcgatttactcgatctattgaccgtccccttcaatgccaccacggatttc

SEQ ID NO: 172649 - DNA, 75 bp, synthetic construct
  source 1..75: mol_type = other DNA
cccacgttaccttcttgaaatctccgttgcgcttgattgcgacccaaactggctgctgcacggctcacaaaacga

SEQ ID NO: 172650 - DNA, 75 bp, synthetic construct
  source 1..75: mol_type = other DNA
agcgacgtaaagagctcaaaatgacgcaggtcacgctggctgagctaacaggggttagtcagcaggctatcaaca

SEQ ID NO: 172651 - DNA, 75 bp, synthetic construct
  source 1..75: mol_type = other DNA
aaaaggcatggcgctatcggtttaaactcaacggtaaatccagcatgtttgcgctaggtgagtacccggtggtca

SEQ ID NO: 172652 - DNA, 75 bp, synthetic construct
  source 1..75: mol_type = other DNA
atggctacaatcctcacccctgactgcgatttactcgatctgttatccgttcccttcaatgccaccacggatttt

SEQ ID NO: 172653 - DNA, 75 bp, synthetic construct
  source 1..75: mol_type = other DNA
ccgccacaccagagcactttatttccgaacctgattccttgtgcgaatactgcctcgcactactccagcttctgc

SEQ ID NO: 172654 - DNA, 75 bp, synthetic construct
  source 1..75: mol_type = other DNA
attatatcgaatgtgattacattcgctggcggcggcacagttggtgtggcggtctcattccggaacaatttgaaa

SEQ ID NO: 172655 - DNA, 75 bp, synthetic construct
  source 1..75: mol_type = other DNA
attatatcgaatgtgattacattcgttggcggcggcacagttggtgtggcggtctcagtcgggaacaatttgaaa

SEQ ID NO: 172656 - DNA, 75 bp, synthetic construct
  source 1..75: mol_type = other DNA
attatatcgaatgtgattacattcgttggcggcggcacagttggtgtggcggtctcactccggaacaatttgaaa

SEQ ID NO: 172657 - DNA, 75 bp, synthetic construct
  source 1..75: mol_type = other DNA
catcacgtacttacgtacagatgaaggctggctgtatctggcagtggtcattgacctgtggtcacgtgccgttat

SEQ ID NO: 172658 - DNA, 75 bp, synthetic construct
  source 1..75: mol_type = other DNA
attatatcgaatgtgattacattcggtggcggcggcacagttggtgtggcggtctcattcgggaacaatttgaaa

SEQ ID NO: 172659 - DNA, 75 bp, synthetic construct
  source 1..75: mol_type = other DNA
attatatcgaatgtgattacattcggtggcggcggcacagttggtgtggcggtctcaatctggaacaatttgaaa

SEQ ID NO: 172660 - DNA, 75 bp, synthetic construct
  source 1..75: mol_type = other DNA
atgagcacaaaattttataccctactgacggatattggcgcggcgaaacttgccagcgccaccgcgctcggtgtg

SEQ ID NO: 172661 - DNA, 75 bp, synthetic construct
  source 1..75: mol_type = other DNA
gcacggcttatgtgatggccgcgattgccgcacttgtagactcgtcgcctgacgcactgaatacgctgaacgagc

SEQ ID NO: 172662 - DNA, 75 bp, synthetic construct
  source 1..75: mol_type = other DNA
tcatgtcgttcgggatattcgtcttggcagcattgaatataaaaacgtatggcgcgactccggctttggcgatgc

SEQ ID NO: 172663 - DNA, 75 bp, synthetic construct
  source 1..75: mol_type = other DNA
cctgacgcactgaatacgctgaacgagctggcggcggcgctgggcaatgacccgaattttgctaccaccatgact

SEQ ID NO: 172664 - DNA, 75 bp, synthetic construct
  source 1..75: mol_type = other DNA
aatgataccggatttaaacagaatggtgatggtattcttgatgtttacgctaatagtcagcgagtattccgcttt

SEQ ID NO: 172665 - DNA, 75 bp, synthetic construct
  source 1..75: mol_type = other DNA
cgtggtggtcgttatgaaaaagccggacacgcaattaccggattaagaatcattggtgaagtagatggcgatgat

SEQ ID NO: 172666 - DNA, 75 bp, synthetic construct
  source 1..75: mol_type = other DNA
ttcgacaaattccggcgaatgagggattgtgcgagaactattattcaacaaatattatttcagcactgaacgaaa

SEQ ID NO: 172667 - DNA, 75 bp, synthetic construct
  source 1..75: mol_type = other DNA
gctgcagcaggccttcaaagatcgaaaaaataactaccatacgcctgatggcccggcctataccgctgtgcgagt

SEQ ID NO: 172668 - DNA, 75 bp, synthetic construct
  source 1..75: mol_type = other DNA
tagtcaggattttatcgatcccagtttcgacttcttccgcgaaacgcgtaacgaacatcgcgtgcgtcaacgtga

SEQ ID NO: 172669 - DNA, 75 bp, synthetic construct
  source 1..75: mol_type = other DNA
ctttcgttatggccgcgattgccgcacttgtagactcttcacctgacgcactgaacacgctgaacgagctggcgg

SEQ ID NO: 172670 - DNA, 75 bp, synthetic construct
  source 1..75: mol_type = other DNA
attttagattaaaaggtaattaccgccaccacattacattcgccaacgaagacggaagtattcgtatgtttttgt

SEQ ID NO: 172671 - DNA, 75 bp, synthetic construct
  source 1..75: mol_type = other DNA
tcgggcgggatattcttgcgaaatcgaccgttgccgccgttatcgaatacctcggtttacgagaactcggcacaa

SEQ ID NO: 172672 - DNA, 75 bp, synthetic construct
  source 1..75: mol_type = other DNA
gatgaatcttaaatgggatgctttgtatgttcttgttaaagcccttttcagcagtgaagtaaaaatatcgacagt

SEQ ID NO: 172673 - DNA, 75 bp, synthetic construct
  source 1..75: mol_type = other DNA
atggtgatggccacagtggattacgtggatgacaaactgaaagagcatgaacagtcacgacgtcacccggacgcc

SEQ ID NO: 172674 - DNA, 75 bp, synthetic construct
  source 1..75: mol_type = other DNA
ccgcacaggacgccaccacagcgcgaaaaggccttgtccagcttagtagcgccaccaacagcacgtctgaaacgc

SEQ ID NO: 172675 - DNA, 75 bp, synthetic construct
  source 1..75: mol_type = other DNA
gccgttcttgcccggattgtttttccactcatcgtgaatgcgtgaatattgacaaaagtaattatattgacgttg

SEQ ID NO: 172676 - DNA, 75 bp, synthetic construct
  source 1..75: mol_type = other DNA
tcgcattaaaatactggggaccagcttcaaacagttcaccatcaaaaacatttgcactcagcgacagtgccggtg

SEQ ID NO: 172677 - DNA, 75 bp, synthetic construct
  source 1..75: mol_type = other DNA
ccgtcggggatggcggtggtaaattgcctgtcccggatgccggacagaccgggcttatccacgaagtctggcgac

SEQ ID NO: 172678 - DNA, 75 bp, synthetic construct
  source 1..75: mol_type = other DNA
atggccgcgattgccgcacttgtagactcgtcgcctgacgcactgaatacgttgaacgagttagcggcggcgctg

SEQ ID NO: 172679 - DNA, 75 bp, synthetic construct
  source 1..75: mol_type = other DNA
gattccagatatgtgaaagatgttcgacttggttcacagcaatattatggagtgaacaactggcaaacatggaat

SEQ ID NO: 172680 - DNA, 75 bp, synthetic construct
  source 1..75: mol_type = other DNA
tttcagtaccaccattaacaatgcgctggcactgaaagcaccgttgtcgagtccggcactcaccggaacgccaac

SEQ ID NO: 172681 - DNA, 75 bp, synthetic construct
  source 1..75: mol_type = other DNA
atagacgctactggctatggcattcctgtttttattgcaacggaaaatgaagaacgtgtaccagcagaatatctg

SEQ ID NO: 172682 - DNA, 75 bp, synthetic construct
  source 1..75: mol_type = other DNA
actgcgccaaaagggactaataatactcagatcgcaagcacggcttatgtgatggccgcgattgccgcacttgta

SEQ ID NO: 172683 - DNA, 75 bp, synthetic construct
  source 1..75: mol_type = other DNA
gttaaaagattaaatgatcgcgatatgcaggtcacgttaatggaaaggtctgggggtgctgtttctaaaccattc

SEQ ID NO: 172684 - DNA, 75 bp, synthetic construct
  source 1..75: mol_type = other DNA
atgccaatatcggcccgtccgattcccccatcacccgtgcaattttacgcgcagatgctgagctgaagcaggttt

SEQ ID NO: 172685 - DNA, 75 bp, synthetic construct
  source 1..75: mol_type = other DNA
gacgaaaccatcaaacgtaacccgcaggcactggtacagctttgcctcggtgcctttaaagccggaatgcgtgaa

SEQ ID NO: 172686 - DNA, 75 bp, synthetic construct
  source 1..75: mol_type = other DNA
ctttacgcgcactctaccgcactactgccagcagcagatcgccatcatcgatgcgcggtgtgaattcctctatca

SEQ ID NO: 172687 - DNA, 75 bp, synthetic construct
  source 1..75: mol_type = other DNA
atgaataaaatatttaaagttatctggaatccggcaacaggtagttacaccgttgccagtgaaacagcaaaaagt

SEQ ID NO: 172688 - DNA, 75 bp, synthetic construct
  source 1..75: mol_type = other DNA
ttgtcgccaatactcccgtgaaatatggctggcaaaaacgcgccatgttacacgcacagtcggggatcagttccg

SEQ ID NO: 172689 - DNA, 75 bp, synthetic construct
  source 1..75: mol_type = other DNA
ctacctggggcaactggatgcgttgttgcaaccgtatgttagaattctaacacaagacgagatcgatattcgaat

SEQ ID NO: 172690 - DNA, 75 bp, synthetic construct
  source 1..75: mol_type = other DNA
agcagcatagcccaaaacaaaatcattaacgttgcaaagggtactatttccgccaccagcaccgatgtagtaaac

SEQ ID NO: 172691 - DNA, 75 bp, synthetic construct
  source 1..75: mol_type = other DNA
gcgatgacctcgctgaaaaattccatgaagtgggatgaagaacgctttggcctggagtatgacctcgacatctat

SEQ ID NO: 172692 - DNA, 75 bp, synthetic construct
  source 1..75: mol_type = other DNA
gaaaatgcgtgcggcgctggagcagttaaaaggactggaaaatctttctggtgatctgtacgagaagatcaccaa

SEQ ID NO: 172693 - DNA, 75 bp, synthetic construct
  source 1..75: mol_type = other DNA
tgataaaattttcacaaaagggggctacgggattgtgagctgttacaactcactgccgctggcgggtggtggcag

SEQ ID NO: 172694 - DNA, 75 bp, synthetic construct
  source 1..75: mol_type = other DNA
agcaactgccgtgggctactactccaaagcgttaggtatgtggagtactacgttaggtgcatatagccaatcgaa

SEQ ID NO: 172695 - DNA, 75 bp, synthetic construct
  source 1..75: mol_type = other DNA
cagctgaaaaccaccaacgataacgtggcgaccaacaccaccaatatcgccactaacaccaccaatatcaccaac

SEQ ID NO: 172696 - DNA, 75 bp, synthetic construct
  source 1..75: mol_type = other DNA
gccactggggacagatccacagcattcggtagcggcgcagagtcaaaagcagagtattcccttgcattgggtggg

SEQ ID NO: 172697 - DNA, 75 bp, synthetic construct
  source 1..75: mol_type = other DNA
ataccagtaaggatgcggttaacggttctcagctgaaaaccaccaacgataacgtagcgaccaatactaccaata

SEQ ID NO: 172698 - DNA, 75 bp, synthetic construct
  source 1..75: mol_type = other DNA
ggctaccgtcaatgcgcaaggcgtcgttacttccccaaattacaggctgaaaagtggtattttcggcactgttgg

SEQ ID NO: 172699 - DNA, 75 bp, synthetic construct
  source 1..75: mol_type = other DNA
taatctgaatgcagttgaatatccctgtggggaggggattagcgtggtggactttcatgcgactattgtttttca

SEQ ID NO: 172700 - DNA, 75 bp, synthetic construct
  source 1..75: mol_type = other DNA
caatttattttccaaaaaaatgactttgtgcataagtttgttttttgttgttggggggggcgatagttgctcaca

SEQ ID NO: 172701 - DNA, 75 bp, synthetic construct
  source 1..75: mol_type = other DNA
aggaagttgttccacgatcaacctatctgatggttatgattgctttattttttatcgatactgttgcatttattt

SEQ ID NO: 172702 - DNA, 75 bp, synthetic construct
  source 1..75: mol_type = other DNA
aagtctgacagttacgatgccattaatggttcacagctttatgccattagcgactcggtagcaaaaaaggcttgg

SEQ ID NO: 172703 - DNA, 75 bp, synthetic construct
  source 1..75: mol_type = other DNA
ctgcaaccagcaccgatgtagtaaacggctctcaattgtacgacctgcagcaggatgctctgttgtggaacggca

SEQ ID NO: 172704 - DNA, 75 bp, synthetic construct
  source 1..75: mol_type = other DNA
ctatcggcgcaggatcgaccacagatgcaagcaatacggtttcagttggcaacagcgcaacaaaacgcaaaattg

SEQ ID NO: 172705 - DNA, 75 bp, synthetic construct
  source 1..75: mol_type = other DNA
ggttaacggctctcagctcaaaactactaacgataatgtggcaaccaacaccaccaacatcaccaacctgacgga

SEQ ID NO: 172706 - DNA, 75 bp, synthetic construct
  source 1..75: mol_type = other DNA
gcggttggcgctgagaccgaagccgctgaaaatgcaacggcagtgggtactaaagctgaggcaaatgggcttaac

SEQ ID NO: 172707 - DNA, 75 bp, synthetic construct
  source 1..75: mol_type = other DNA
tcaccaacgtgaaagctggtaccctttcggatgacagtactgacgcggttaatggctcgcaactgaaagacacta

SEQ ID NO: 172708 - DNA, 75 bp, synthetic construct
  source 1..75: mol_type = other DNA
caccaatccaatggaatacctgaacccagcgcatccactgctgttgatctccttcggtcgatctggcaacagccc

SEQ ID NO: 172709 - DNA, 75 bp, synthetic construct
  source 1..75: mol_type = other DNA
cctcactgggcgatttcagcgaaggtgtgtttggttacgcaccgtggaaacggatcgtttatctcggcagcggtg

SEQ ID NO: 172710 - DNA, 75 bp, synthetic construct
  source 1..75: mol_type = other DNA
gtcagatattatatcagttctgctgatttaaccgctgagaaattcgccacagcgatccgaaatcactggcacgtg

SEQ ID NO: 172711 - DNA, 75 bp, synthetic construct
  source 1..75: mol_type = other DNA
taccaatccaatagattacctgaatccagcccatccattgttgcttatctcctttggccgttctggcaacagccc

SEQ ID NO: 172712 - DNA, 75 bp, synthetic construct
  source 1..75: mol_type = other DNA
acgctggtggtggtgtttgtctccagccacccctacacccgtcagtatgatcttgatctgctggcagaactccgc

SEQ ID NO: 172713 - DNA, 75 bp, synthetic construct
  source 1..75: mol_type = other DNA
atcacctgccgatcacctgcaatgaagcgggcgctctctatcaaaacgcgatcaacagcgataacgcgtttgccc

SEQ ID NO: 172714 - DNA, 75 bp, synthetic construct
  source 1..75: mol_type = other DNA
ggacaattttccacggtaccagtcgtacgtcctgaaagcaccgttatatccgaagcccccgtggtaaaaaaacgt

SEQ ID NO: 172715 - DNA, 75 bp, synthetic construct
  source 1..75: mol_type = other DNA
cgctttcggagagctggcctttcgtggcctttgcccgcaggcatgtcggagcaggaacttgatgcctgcctttac

SEQ ID NO: 172716 - DNA, 75 bp, synthetic construct
  source 1..75: mol_type = other DNA
gaatcaacgataacctgctctttaactggcggcatctctggcgtaacggcggcctgcagccgcccggcgaacatg

SEQ ID NO: 172717 - DNA, 75 bp, synthetic construct
  source 1..75: mol_type = other DNA
ggcacatcgctattaatattttgacgaatgataaggtattcaaggcagggttaagacgtaagatgcgaaaagcag

SEQ ID NO: 172718 - DNA, 75 bp, synthetic construct
  source 1..75: mol_type = other DNA
gcagggttaagacgtaagatgcgaaaagcagccatggacagaaactatctcgcgtcagtccttgcggggagcggg

SEQ ID NO: 172719 - DNA, 75 bp, synthetic construct
  source 1..75: mol_type = other DNA
gcagcagaattattttcagggatcaggtatatcggcattaatattttgacgaaacataaagtattcaaggctggg

SEQ ID NO: 172720 - DNA, 75 bp, synthetic construct
  source 1..75: mol_type = other DNA
ttcctcgatcacgtagcaagaaatcaccctgcaccgcaggcaccacgctatatctacaaacttgagcaggcgctg

SEQ ID NO: 172721 - DNA, 75 bp, synthetic construct
  source 1..75: mol_type = other DNA
aagcgattggcgaagcgaaagatgacgacaccgcagatatcctgaccgccgcgtctcgcgacctggataaattcc

SEQ ID NO: 172722 - DNA, 75 bp, synthetic construct
  source 1..75: mol_type = other DNA
aaattgcagggactttacggaaacattctttcctgctatgaggctggcccctgtggttttgggctatgtcatcaa

SEQ ID NO: 172723 - DNA, 75 bp, synthetic construct
  source 1..75: mol_type = other DNA
aaattgcagggactttacggaaacattctttcctgctatgaggctggcccctgtggttttggctatatcatcaac

SEQ ID NO: 172724 - DNA, 75 bp, synthetic construct
  source 1..75: mol_type = other DNA
gcccttaaaggtgttggtcagctaaccgcaataaccctggttgctgaactgggtgatttttcacgattttccagt

SEQ ID NO: 172725 - DNA, 75 bp, synthetic construct
  source 1..75: mol_type = other DNA
tggttgtgctattagcaggttgttcatcaaaacatgactacacaaacccgccgtggaatgcaaaagtcccggtac

SEQ ID NO: 172726 - DNA, 75 bp, synthetic construct
  source 1..75: mol_type = other DNA
aaattgcaaggactttacggaaacattctttcctgctatgaagctggcccctgtggttttggactatatcatcaa

SEQ ID NO: 172727 - DNA, 75 bp, synthetic construct
  source 1..75: mol_type = other DNA
ggcatgatgttgcgcttgagttgactaattgtccggtgggaacgtcgagggtcactgccagcttcagcggggcag

SEQ ID NO: 172728 - DNA, 75 bp, synthetic construct
  source 1..75: mol_type = other DNA
taagacgtaagatgcgaaaagcagccatggacagaaactacctggcgtcagtccttacggggagcgggctttcgt

SEQ ID NO: 172729 - DNA, 75 bp, synthetic construct
  source 1..75: mol_type = other DNA
atgcattcgggaaatattgcggcttacgtcgggctggatgtgcataaagaaacgttggtggttgctattgctgca

SEQ ID NO: 172730 - DNA, 75 bp, synthetic construct
  source 1..75: mol_type = other DNA
taatcagagcccgtgcagcagataaacgagacagcagagttgtccgacagcgaattctgagcatgctattgcgaa

SEQ ID NO: 172731 - DNA, 75 bp, synthetic construct
  source 1..75: mol_type = other DNA
ggaggatataaattaacttttcagacaaaagcggaagttgaatacgataatctgatcaatgcgtctcttggatgg

SEQ ID NO: 172732 - DNA, 75 bp, synthetic construct
  source 1..75: mol_type = other DNA
gcagcaactgagcgaaaagccggagacaacggaatcggagctgcatgagcttatccgtccactgctgcgcgacca

SEQ ID NO: 172733 - DNA, 75 bp, synthetic construct
  source 1..75: mol_type = other DNA
tttcccagcttaagggttcaccgcccgggtacgtgggatacggtcagggcggtattctgacggaagctgtgcgta

SEQ ID NO: 172734 - DNA, 75 bp, synthetic construct
  source 1..75: mol_type = other DNA
ggagcggcgttttcagatggtcaaagtggacgagccggatgatgagacggcctgtctgatgctgcgctccctgaa

SEQ ID NO: 172735 - DNA, 75 bp, synthetic construct
  source 1..75: mol_type = other DNA
tgtggacgcccgcgccgtcgccactgtggtggcggactggaccggcatcccgctctcttccctgctcaaggacga

SEQ ID NO: 172736 - DNA, 75 bp, synthetic construct
  source 1..75: mol_type = other DNA
gcgggtgtgaagggggaatttgaacagcgtctgaaaaacgtgattgatgcagtgcagcagtcaccagtaccagtt

SEQ ID NO: 172737 - DNA, 75 bp, synthetic construct
  source 1..75: mol_type = other DNA
aggccggtgccggcgtgaagggtgaatttgaacagcgtctgaaaaacgtgattgatgccgtgcagcagtcaccgg

SEQ ID NO: 172738 - DNA, 75 bp, synthetic construct
  source 1..75: mol_type = other DNA
ttacaactgaacagccacatatttccggaaaagatctttccatcgtacttacatccgcattcactacgcttattt

SEQ ID NO: 172739 - DNA, 75 bp, synthetic construct
  source 1..75: mol_type = other DNA
gatgaaaatggcgaagcgaccttcttttgcaacggcggtagcgtcagtgtgtgggttatcgaagaggtgatttaa

SEQ ID NO: 172740 - DNA, 75 bp, synthetic construct
  source 1..75: mol_type = other DNA
aaaccctgatgaagatggcatttttaaaattgttaacgactacaccggcgaaggctggaacgatcaggttgatga

SEQ ID NO: 172741 - DNA, 75 bp, synthetic construct
  source 1..75: mol_type = other DNA
tcagaccaaattgctggtggggtttttattatagaaataggcaaaaatgatggggtaattctgaattttggccac

SEQ ID NO: 172742 - DNA, 75 bp, synthetic construct
  source 1..75: mol_type = other DNA
tggctgcggtagcgacaccggctggtgccggaactcccttattagctcagatgttaaataaaaaaatttatccgt

SEQ ID NO: 172743 - DNA, 75 bp, synthetic construct
  source 1..75: mol_type = other DNA
gaatactatggtgtgattactgttatgacaacatttactaatgtttccatgatggggatcccaatgatatattct

SEQ ID NO: 172744 - DNA, 75 bp, synthetic construct
  source 1..75: mol_type = other DNA
tcggagagctggcctttcgtggcctttgcccgcaggcatgtcggagcaggaacttgatgcctgcctttacggaca

SEQ ID NO: 172745 - DNA, 75 bp, synthetic construct
  source 1..75: mol_type = other DNA
tgtggagatgaagcttgcacaggtctgtgaacgcctgcactgccattatgggctgagcacatcggttgatgaacg

SEQ ID NO: 172746 - DNA, 75 bp, synthetic construct
  source 1..75: mol_type = other DNA
gacagcatccagcgtacctgtctctgacgtggaatgacgaggacggtattgtgatggtatttgatacacaggcag

SEQ ID NO: 172747 - DNA, 75 bp, synthetic construct
  source 1..75: mol_type = other DNA
aagctttacgtcttcactttgaagaacatttaccacggattgtggccggacgtcgcttgggcgtaccaaaatcaa

SEQ ID NO: 172748 - DNA, 75 bp, synthetic construct
  source 1..75: mol_type = other DNA
catgtcggagcaggaacttgatgcctgcctttacggacaattttccacggtaccagtcgtacgtcctgaaagcac

SEQ ID NO: 172749 - DNA, 75 bp, synthetic construct
  source 1..75: mol_type = other DNA
cacggtaccagtcgtacgtcctgaaagcaccgttatatccgaacgcccccgtggtaaaaaaacgtccccggcggc

SEQ ID NO: 172750 - DNA, 75 bp, synthetic construct
  source 1..75: mol_type = other DNA
gtgccggacagcctgaaaacggtgcatatccgcacactggacctcggtctgttacaggctggcgcgggcgttaaa

SEQ ID NO: 172751 - DNA, 75 bp, synthetic construct
  source 1..75: mol_type = other DNA
ctcaggctgaaaggtgaactgacaccggcgttattacagacacttgtccgcgaaatgaaagggagctgccactga

SEQ ID NO: 172752 - DNA, 75 bp, synthetic construct
  source 1..75: mol_type = other DNA
ttgcaaaatactatgcccgttataaacaagtgactctgaccgcttctgataaaacctctttaaccgaacaacata

SEQ ID NO: 172753 - DNA, 75 bp, synthetic construct
  source 1..75: mol_type = other DNA
cagcagtacgcccgggagtgcgaactcaccggtgagttacttgaaagccgcagcgatatttcccgtcagagtgag

SEQ ID NO: 172754 - DNA, 75 bp, synthetic construct
  source 1..75: mol_type = other DNA
tgcctgctgccggatacgggtgcccggaatgtggagagtctgctgaaccagcaactgctgccggtactgagccgg

SEQ ID NO: 172755 - DNA, 75 bp, synthetic construct
  source 1..75: mol_type = other DNA
gatgcagtacagaaatcaccggagccggtactgctgtttattgatgaagcccataccattatcggcgcgggtaat

SEQ ID NO: 172756 - DNA, 75 bp, synthetic construct
  source 1..75: mol_type = other DNA
gaggcttgggaacgctacagcgttctggtcagtcgtgtggatcctacaaatcctgaatggccggaaatgacgcaa

SEQ ID NO: 172757 - DNA, 75 bp, synthetic construct
  source 1..75: mol_type = other DNA
ccggaaagccagacttcttgcagatgctgaatccgtgattttgccgctggagcgcgcggtcagactgaacatggc

SEQ ID NO: 172758 - DNA, 75 bp, synthetic construct
  source 1..75: mol_type = other DNA
ctaaccgacgggcggacatttcagggggctggatgtttaaggacggcaaagtgattaaacgcatttatacggcag

SEQ ID NO: 172759 - DNA, 75 bp, synthetic construct
  source 1..75: mol_type = other DNA
caggacaaggaacgctttgacggtgaaatttttgacctggatgtcgccatggaccgtgttgaaggagctgcgctg

SEQ ID NO: 172760 - DNA, 75 bp, synthetic construct
  source 1..75: mol_type = other DNA
cctgccgctggcgctcatcagcgaagacggcaatacggcgtggcgcggggagtatgatgaatggggcaaccagct

SEQ ID NO: 172761 - DNA, 75 bp, synthetic construct
  source 1..75: mol_type = other DNA
ccaaccgccgcgctgatgattcaggaaagtggatgtttaaggatggagctgtggttaaacggatttatacggcag

SEQ ID NO: 172762 - DNA, 75 bp, synthetic construct
  source 1..75: mol_type = other DNA
atcagcgtgttcattcttactggcgcgctggctgggacgtgatttgctactgaaatacgtcggccatactcatac

SEQ ID NO: 172763 - DNA, 75 bp, synthetic construct
  source 1..75: mol_type = other DNA
cgctttttggggcgcgatctgctgctgaaatacgtgggccatagccatacttttaaggttatagaaaaaggcatt

SEQ ID NO: 172764 - DNA, 75 bp, synthetic construct
  source 1..75: mol_type = other DNA
agcgtgctgtcaggctgaatatggcaacagatgaggagcgtagccgactggatgcatgggaacgctacagcgttc

SEQ ID NO: 172765 - DNA, 75 bp, synthetic construct
  source 1..75: mol_type = other DNA
ctaaccgacgggcggacatttcagggaactggatgtttaaggacggcaaagtgattaaacgcatttatacggcag

SEQ ID NO: 172766 - DNA, 75 bp, synthetic construct
  source 1..75: mol_type = other DNA
tcggaaagccagacttcttacagatgctgaatacgtgattttgccgttggagcgcgcggtcaggctgaacatagc

SEQ ID NO: 172767 - DNA, 75 bp, synthetic construct
  source 1..75: mol_type = other DNA
ttctgacccgcttaatcccgctatttccttacaatattcaaaattacgcttacggattaaccgcgataggctttt

SEQ ID NO: 172768 - DNA, 75 bp, synthetic construct
  source 1..75: mol_type = other DNA
cgtacagatgaaggctggctgtatctggcagtggtcattgacctgtggtcacgtgccgttattggctggtcaatg

SEQ ID NO: 172769 - DNA, 75 bp, synthetic construct
  source 1..75: mol_type = other DNA
ggtgtttaattatatcgaatgtgattacaatcggtggcggcggcacagttggtgtggcggcctcagtccggaaca

SEQ ID NO: 172770 - DNA, 75 bp, synthetic construct
  source 1..75: mol_type = other DNA
gtatctcgcagtagtcatcgacctgtggtcacgcgccgtcattggctggtcgatgtcactgcgaatgacagcaca

SEQ ID NO: 172771 - DNA, 75 bp, synthetic construct
  source 1..75: mol_type = other DNA
gaaaagcctgctcagcgagcaggcttttttgcatctgcagctcatgaggatgagaacctccgggggcggggaggt

SEQ ID NO: 172772 - DNA, 75 bp, synthetic construct
  source 1..75: mol_type = other DNA
gtatctcgcagtagtcatcgacctgtggtcacgcgccgttattggctggtcgatgtcaccgcgaatgacagcaca

SEQ ID NO: 172773 - DNA, 75 bp, synthetic construct
  source 1..75: mol_type = other DNA
gctgctacgataatgcctgcgtggaaagcttctttcattcgctgaaagtggaatgtatccatggagaacacttta

SEQ ID NO: 172774 - DNA, 75 bp, synthetic construct
  source 1..75: mol_type = other DNA
acacggaccgtggaggccagtactgttcagcagattatcaggcgcaactgaagcggcataatctgcgtggaagta

SEQ ID NO: 172775 - DNA, 75 bp, synthetic construct
  source 1..75: mol_type = other DNA
cgtggtggtcaatactgttcagaggattatcaggcgctgctgaagcgacacaaccagcgtggcagtatgagtgcg

SEQ ID NO: 172776 - DNA, 75 bp, synthetic construct
  source 1..75: mol_type = other DNA
gatgagctgtcgccggaaaagcgccccataattttagaggcgcagaatgtgtggataacctacaaaggaaagcta

SEQ ID NO: 172777 - DNA, 75 bp, synthetic construct
  source 1..75: mol_type = other DNA
tggcggcggcacagttggtgtggcggcctcagtccggacaatttgaaaaccagaacctcgcttaggcctgtgtcc

SEQ ID NO: 172778 - DNA, 75 bp, synthetic construct
  source 1..75: mol_type = other DNA
ggcgctgctgaagcgacacaacctgcgtggcagtatgagtgcgaaaggctactgttatgacaatgcctgtgtgga

SEQ ID NO: 172779 - DNA, 75 bp, synthetic construct
  source 1..75: mol_type = other DNA
tcgcagtagtcatcgacctgtggtcacgcgccgtcattggctggtcgatgtcaccgcgaatgacagcacaactgg

SEQ ID NO: 172780 - DNA, 75 bp, synthetic construct
  source 1..75: mol_type = other DNA
taaatggatgttcaaggacggagctgtggttaaacggatttatacggcagacgagcaacaacaacaggccgaatc

SEQ ID NO: 172781 - DNA, 75 bp, synthetic construct
  source 1..75: mol_type = other DNA
ctggcaaccctaaaacaaaagagcaataccagctaacgaaacgatttaacatcaaatggctttatacagaggatg

SEQ ID NO: 172782 - DNA, 75 bp, synthetic construct
  source 1..75: mol_type = other DNA
ttcctggagtaccacagcaacggtttatgctccaccggaaagtgcagcgggaactttcaggggaacggttacctt

SEQ ID NO: 172783 - DNA, 75 bp, synthetic construct
  source 1..75: mol_type = other DNA
cctgatgttgtgactctgggaagtctggcaccaggggagtcaaaagagagagtgtttgatttaatcgtgaactgt

SEQ ID NO: 172784 - DNA, 75 bp, synthetic construct
  source 1..75: mol_type = other DNA
taagtggatgtttaaggacggagctgtggttaaacggatttatacagctgacgaacagcaacaacaggccgaatc

SEQ ID NO: 172785 - DNA, 75 bp, synthetic construct
  source 1..75: mol_type = other DNA
gttgttgaagtatccgatattacggcaaatcgtcgcgcagataattacggaaactggatgtttctgaatggtaaa

SEQ ID NO: 172786 - DNA, 75 bp, synthetic construct
  source 1..75: mol_type = other DNA
ctggtgaacttacccctgtctggatccctgacctgactcatgaagctatgcgggatctaatcagagcccgtgcag

SEQ ID NO: 172787 - DNA, 75 bp, synthetic construct
  source 1..75: mol_type = other DNA
tccaaagatattgcatggaaagctcaacaacgattgtgttctcgttaccgaagtctgacagcaaaagggaaaaaa

SEQ ID NO: 172788 - DNA, 75 bp, synthetic construct
  source 1..75: mol_type = other DNA
gttctcgttaccgaagtctgacagcaaaagggaaaaaatcacaagtagccattacggcggtggctcgtgagttga

SEQ ID NO: 172789 - DNA, 75 bp, synthetic construct
  source 1..75: mol_type = other DNA
gctggaattccgtctggtaaacaccaacgttgatcaggccgctgcggcatccggccgcgtaccgggcgactctga

SEQ ID NO: 172790 - DNA, 75 bp, synthetic construct
  source 1..75: mol_type = other DNA
cctgcgtaaccgtgtaaaccaacttggcgtggcggagccggtggttcagcgtcagggtgctgaccgtatcgttgt

SEQ ID NO: 172791 - DNA, 75 bp, synthetic construct
  source 1..75: mol_type = other DNA
ccggtggaaaactggtacaaaatgatcggagactccacacatgcggatgccatcctagattgtcaacgacggatg

SEQ ID NO: 172792 - DNA, 75 bp, synthetic construct
  source 1..75: mol_type = other DNA
ccaatcgtcggaccgatgattccggtaagtggatgtttaaggacggagctgtggttaaacggatttatacggctg

SEQ ID NO: 172793 - DNA, 75 bp, synthetic construct
  source 1..75: mol_type = other DNA
aacagatgaggaacgtacacgactggaagcctgggagcgctacagcgttctggtcagccgtgtggatacggcaaa

SEQ ID NO: 172794 - DNA, 75 bp, synthetic construct
  source 1..75: mol_type = other DNA
gaaagatgggaacgctacagcgttctggtcagtcgtgtggatcctgcaaatcccgaatggccggaaatgccgcaa

SEQ ID NO: 172795 - DNA, 75 bp, synthetic construct
  source 1..75: mol_type = other DNA
atagcgtacgacaaagataatattatccgctatgtggaaaaggatgtgacagctatcagaccagatggattaagt

SEQ ID NO: 172796 - DNA, 75 bp, synthetic construct
  source 1..75: mol_type = other DNA
ctaatcgtcgtgctgatgattccggtaagtggatgtttaaggacggggctgtagttaagcggatttatacggcag

SEQ ID NO: 172797 - DNA, 75 bp, synthetic construct
  source 1..75: mol_type = other DNA
gtggttaaacggatttatacggctgacgaacagcaacaacaggccgaatcacaaaaggccgcattgctttccgaa

SEQ ID NO: 172798 - DNA, 75 bp, synthetic construct
  source 1..75: mol_type = other DNA
attgcatacgataaaaataatgtgattgttaccgtaagcaaagatgtttcaacgattaacccggaaggtttaagt

SEQ ID NO: 172799 - DNA, 75 bp, synthetic construct
  source 1..75: mol_type = other DNA
gctgaatccgtgattttgccgctggagcgcgcggtcagactgaacatggcaacagatgaggagcgtagccgactg

SEQ ID NO: 172800 - DNA, 75 bp, synthetic construct
  source 1..75: mol_type = other DNA
cgggtaatccaaaaacggttgaacaatatcaattgacaaaagactttgatgttgtctggtttttttcagaagatg

SEQ ID NO: 172801 - DNA, 75 bp, synthetic construct
  source 1..75: mol_type = other DNA
acaataccagctaacaaagaattttgatgttatctggttatggtccgaagacggtaaaaactggtacgaggaatt

SEQ ID NO: 172802 - DNA, 75 bp, synthetic construct
  source 1..75: mol_type = other DNA
atgcagcatttaaaaaatatcagatcaggaaatccaaaaacaaaagaacaatatcagctaacaaagaattttgat

SEQ ID NO: 172803 - DNA, 75 bp, synthetic construct
  source 1..75: mol_type = other DNA
tagtggccttttgctatggtatagcgtacagcaaactatctgaagaaactaaatttattgaagatctttctgccg

SEQ ID NO: 172804 - DNA, 75 bp, synthetic construct
  source 1..75: mol_type = other DNA
gcagtacagctacggctggatcaaaacagcagcgatccaatcttcgccacccgtcagatggcaaaaaccctgcct

SEQ ID NO: 172805 - DNA, 75 bp, synthetic construct
  source 1..75: mol_type = other DNA
agtgctgatccgtgaagatatccgacaacaactggataccgcgcaaaaaatccgcgacatcttcttcagccagca

SEQ ID NO: 172806 - DNA, 75 bp, synthetic construct
  source 1..75: mol_type = other DNA
gcccatataccagcgtgtctaccagacactacgcaccaaagcattaagcgtgttgcccgccgatatgaatttgcg

SEQ ID NO: 172807 - DNA, 75 bp, synthetic construct
  source 1..75: mol_type = other DNA
accggacgttttctggaagtgatttcgcgtacgctgggcaccagcatcgaggaactcgactgtattaccgaaaat

SEQ ID NO: 172808 - DNA, 75 bp, synthetic construct
  source 1..75: mol_type = other DNA
acagctcgacagcattaccgaaaatgtcacgccgcacgccatcacgagtatgtgcacagtatttgccgaatcaga

SEQ ID NO: 172809 - DNA, 75 bp, synthetic construct
  source 1..75: mol_type = other DNA
accaggatcgcttgtggttaagtgctgggttaacctacgcatttaatgaagatgcatccattgacgttggcgcat

SEQ ID NO: 172810 - DNA, 75 bp, synthetic construct
  source 1..75: mol_type = other DNA
acagcgattcggtgcgcatgatgcagggattttatgacgatgagttgtgtaacaccctggcgcagcagcacggga

SEQ ID NO: 172811 - DNA, 75 bp, synthetic construct
  source 1..75: mol_type = other DNA
atgaaagttaacggcagcggcgggattgatggcagcgacgcattaatggggccgaaggttcaggccaatgatatc

SEQ ID NO: 172812 - DNA, 75 bp, synthetic construct
  source 1..75: mol_type = other DNA
gggaaccgaccagtaattatctttaacgcccggttcgacaccctcattctgaaacagattgctgccgctcttcat

SEQ ID NO: 172813 - DNA, 75 bp, synthetic construct
  source 1..75: mol_type = other DNA
ggtgctgaacctgacgcaaagcgtcgcctacagcgaggccgaccgtgaagagatccagcgccatatcactgaaca

SEQ ID NO: 172814 - DNA, 75 bp, synthetic construct
  source 1..75: mol_type = other DNA
atgccgcgattcagggtatccgccgcctggctgctggcgctggcatggatttttctgctggtgtggatctggtgg

SEQ ID NO: 172815 - DNA, 75 bp, synthetic construct
  source 1..75: mol_type = other DNA
tgtggcgcggcaactgcgtcatgcaatcggggaccgaccagtaattatctttaatgcccggttcgacatccgcat

SEQ ID NO: 172816 - DNA, 75 bp, synthetic construct
  source 1..75: mol_type = other DNA
cgccgtttcctcgttccaacgccatttcgccccgccgacgccattgttgaagcgtgggaaaagctgcgtgaaggg

SEQ ID NO: 172817 - DNA, 75 bp, synthetic construct
  source 1..75: mol_type = other DNA
atgagcaaaactatcgcgacggaaaatgcaccggcagctatcggaccttatgttcagggcgttgatctgggcagt

SEQ ID NO: 172818 - DNA, 75 bp, synthetic construct
  source 1..75: mol_type = other DNA
atgcaccggcagctatcggtccttacgttcagggcgttgatctgggcagcatgatcatcacttccgggcagatcc

SEQ ID NO: 172819 - DNA, 75 bp, synthetic construct
  source 1..75: mol_type = other DNA
ccggccaatcttctagcggtggcgaatcctctggaggcggctttaaaggtagcgctgtaaaagcgggtcgtattg

SEQ ID NO: 172820 - DNA, 75 bp, synthetic construct
  source 1..75: mol_type = other DNA
ccggtaaatacccatcctgatgcgcaatttgctggcgcaattggcgcggcggtaattggtcaacgagtgaggaca

SEQ ID NO: 172821 - DNA, 75 bp, synthetic construct
  source 1..75: mol_type = other DNA
cgcgcacgcttggcaccagcgtcgagcaactcgacagcattaccgaaaatgtcacgccgcacgccatcacgagta

SEQ ID NO: 172822 - DNA, 75 bp, synthetic construct
  source 1..75: mol_type = other DNA
atggagctacgttgccggcaacactggctctggtacgcgtacaacaccaaaacaggcggtgtactggcctacact

SEQ ID NO: 172823 - DNA, 75 bp, synthetic construct
  source 1..75: mol_type = other DNA
gtggcgtttatctgcgagcttgatgagcaatggagctacgttggcagtaaagcccggcaacactggatctggtac

SEQ ID NO: 172824 - DNA, 75 bp, synthetic construct
  source 1..75: mol_type = other DNA
ctggcggtgtcagccattgccaggtcttttcccggatgctggaaactcacctgggaatgccagtacatacccatc

SEQ ID NO: 172825 - DNA, 75 bp, synthetic construct
  source 1..75: mol_type = other DNA
gtggcgcttatctgtgaacttgatgagcactggagcttcgttggcagcaaggcgcaacaacactggctctggtac

SEQ ID NO: 172826 - DNA, 75 bp, synthetic construct
  source 1..75: mol_type = other DNA
tggcgctgacactggcctacacttttgatccacgtaccgatgaaacctgtcgtgaattgctggcattgctcacac

SEQ ID NO: 172827 - DNA, 75 bp, synthetic construct
  source 1..75: mol_type = other DNA
cgcgtacaacaccaaaacaggcggtgtactggcctacacttttggcccccgaaccgatcaaacgtgccgggagct

SEQ ID NO: 172828 - DNA, 75 bp, synthetic construct
  source 1..75: mol_type = other DNA
cggcgctgagcgagcgcgtcacgggcttgagcaggcaggtgcagagtttgagcgagcagctgcgccggttgtcgc

SEQ ID NO: 172829 - DNA, 75 bp, synthetic construct
  source 1..75: mol_type = other DNA
caggagagataaaaggccgtcaggatgtgattcaggcgctcacggaagcagggattgaagtggtcagggtgacgc

SEQ ID NO: 172830 - DNA, 75 bp, synthetic construct
  source 1..75: mol_type = other DNA
gactactacagatgaaattgcccgtttgagcattctctccatgaaaaggggtatgttctactgggatggtgatta

SEQ ID NO: 172831 - DNA, 75 bp, synthetic construct
  source 1..75: mol_type = other DNA
ctgcgtatggtcggccggacgtggctgaccatcaccctggtctcggtactgctgatcgccacgagcgggagcatt

SEQ ID NO: 172832 - DNA, 75 bp, synthetic construct
  source 1..75: mol_type = other DNA
gatccccaacactgaactgctgaccgggaaacgcctgcagccgtattacgatcgcgccgaccggccgcgcatcga

SEQ ID NO: 172833 - DNA, 75 bp, synthetic construct
  source 1..75: mol_type = other DNA
cgcgccgaccgtccacgcatcgatgcctggcagaccatcgtgaacggcagactggggctgcacgacccgaacgca

SEQ ID NO: 172834 - DNA, 75 bp, synthetic construct
  source 1..75: mol_type = other DNA
tccgttggtgttgtcgctgcgtgaaaagcctcataatggctttttgttctatcacgccagcattacagagcgtgc

SEQ ID NO: 172835 - DNA, 75 bp, synthetic construct
  source 1..75: mol_type = other DNA
atatcgtggcgatatgcgcgatttaacccgcgaacaggcgctggacatccttgaagctgattactggtatggccc

SEQ ID NO: 172836 - DNA, 75 bp, synthetic construct
  source 1..75: mol_type = other DNA
ccgtggcgatatgcgagatctgacgcgagaacaggctctgatgattcttgaaggtgattattggtatgggcctcg

SEQ ID NO: 172837 - DNA, 75 bp, synthetic construct
  source 1..75: mol_type = other DNA
actcttaatgcattacgggcatatctgaaaaatcgcagcagggatggtgaactggtactggtgaaagctctgaac

SEQ ID NO: 172838 - DNA, 75 bp, synthetic construct
  source 1..75: mol_type = other DNA
acagcgttctgggtaaagaaggcggttacgtcaatcacccggatgataaaggtggcccgaccaaatggggaatta

SEQ ID NO: 172839 - DNA, 75 bp, synthetic construct
  source 1..75: mol_type = other DNA
atgaagtcctgggcaaagaaggcggttacgtcaatcacccggacgataagggcggtccgaccaaatggggcatta

SEQ ID NO: 172840 - DNA, 75 bp, synthetic construct
  source 1..75: mol_type = other DNA
ggacggagggcgaaacatccgacttaagggagccatctatgaacagtcttttaacgctggcgaaggacttagagc

SEQ ID NO: 172841 - DNA, 75 bp, synthetic construct
  source 1..75: mol_type = other DNA
ttacgggctgcgtgacccgaacgcaccggagaacagacggacgcttgtcacgccaaataatctgccaaaagcgaa

SEQ ID NO: 172842 - DNA, 75 bp, synthetic construct
  source 1..75: mol_type = other DNA
gaacttgcccggcggcaggaagagctgctctggaagctggtcaaagggcggatactgtacccgtcgctgacggcg

SEQ ID NO: 172843 - DNA, 75 bp, synthetic construct
  source 1..75: mol_type = other DNA
ctccagtttgctcctccgtctgacaatagggaatatggatggaattcagagggcagcattctcatgaaactatcc

SEQ ID NO: 172844 - DNA, 75 bp, synthetic construct
  source 1..75: mol_type = other DNA
gcggacgatgtctggtcttatgcaacgggagaacgcggcgctgagcgagcgcgtcacgggcttgagcaggcaggt

SEQ ID NO: 172845 - DNA, 75 bp, synthetic construct
  source 1..75: mol_type = other DNA
tcggggtttcgagagagcttgcggagctggtggctaaggcaacagacagccagttgcgccacatgtctggaacaa

SEQ ID NO: 172846 - DNA, 75 bp, synthetic construct
  source 1..75: mol_type = other DNA
gaaaatcaaagacgctatagccctgttcacaacgtcgacagaggaatcactgaaaaaacaccgggaaggggtgaa

SEQ ID NO: 172847 - DNA, 75 bp, synthetic construct
  source 1..75: mol_type = other DNA
ttacgggctgcatgacccgaacgccccggagaaccgccggacgctgacccttcctgataacctgccggaaacgaa

SEQ ID NO: 172848 - DNA, 75 bp, synthetic construct
  source 1..75: mol_type = other DNA
gctgtgggttgagcaccaggacaaggggcggctggagctgaacttcctcatcccgaacacggagctgctgaccgg

SEQ ID NO: 172849 - DNA, 75 bp, synthetic construct
  source 1..75: mol_type = other DNA
tggagacgctgaacagtgccgtgaacgcgcagttcagcgccacagagaacgaacttgcccggcggcaggaagagc

SEQ ID NO: 172850 - DNA, 75 bp, synthetic construct
  source 1..75: mol_type = other DNA
acagaacgcttgagccagttatacagcgagaactggagataagagaggaacggctgatacaggagcgcgaacatg

SEQ ID NO: 172851 - DNA, 75 bp, synthetic construct
  source 1..75: mol_type = other DNA
gctgtgacatcaaacgagacgaaaatcagagacgctatagccctgttcacagcctcgacagaggaatcgctggaa

SEQ ID NO: 172852 - DNA, 75 bp, synthetic construct
  source 1..75: mol_type = other DNA
atttttacagtcagagaaatacagataacagcatcacttttgctgttaacgggcaggtatcaccatctaactata

SEQ ID NO: 172853 - DNA, 75 bp, synthetic construct
  source 1..75: mol_type = other DNA
aaaaggtcttgtccagctcagtagtgccaccaacagcacgtctgaaacgctcgccgcaacaccaaaagcggttaa

SEQ ID NO: 172854 - DNA, 75 bp, synthetic construct
  source 1..75: mol_type = other DNA
cagtagcgccaccaacagcgattctgaaacgcttgcggcaacaccaaaggcggttaagacagcgtatgaccttgc

SEQ ID NO: 172855 - DNA, 75 bp, synthetic construct
  source 1..75: mol_type = other DNA
gtcaccctgtaccacaacggttatacctgcgaagccgatactcttggcagttgcggctacgtatacatcgctgtt

SEQ ID NO: 172856 - DNA, 75 bp, synthetic construct
  source 1..75: mol_type = other DNA
gaggtcatgggaactaaatctgcaatcactatccgagtgaccacgccgacaacatcaagcggtggcggtacaacc

SEQ ID NO: 172857 - DNA, 75 bp, synthetic construct
  source 1..75: mol_type = other DNA
tgatgcaggctggcatttttacagtcagagaaatacagataacagcatcacttttgctgttaacggtcaggtatc

SEQ ID NO: 172858 - DNA, 75 bp, synthetic construct
  source 1..75: mol_type = other DNA
caaccgaacaggctgctgtggtcctgccagtgtttggggagtggaaggggaccgggacctatcatgcggcgctaa

SEQ ID NO: 172859 - DNA, 75 bp, synthetic construct
  source 1..75: mol_type = other DNA
cccctgtgcggtgccgatgagaaagtgcaggagcgaatgaatggcttcctgaatcaggaatttccgtcgaagact

SEQ ID NO: 172860 - DNA, 75 bp, synthetic construct
  source 1..75: mol_type = other DNA
gcacaatgacggcggtgaactacatccggatcatgagcaccatcctgaattgggggccggatgcttcatggcgac

SEQ ID NO: 172861 - DNA, 75 bp, synthetic construct
  source 1..75: mol_type = other DNA
attattgttcaggataccggctcaaactctgccgataacattggtggcgtatattacagaccggtgcagaaatac

SEQ ID NO: 172862 - DNA, 75 bp, synthetic construct
  source 1..75: mol_type = other DNA
aatctgcaatcactatccgagtgaccacgccgacaacatcaagtggtggcggtacaaccagcgcgcaattcactt

SEQ ID NO: 172863 - DNA, 75 bp, synthetic construct
  source 1..75: mol_type = other DNA
gaaagtttcgtggtggagaaggagacactatctggcatgaaacagtacagggcggggtaattcgctgggcgacag

SEQ ID NO: 172864 - DNA, 75 bp, synthetic construct
  source 1..75: mol_type = other DNA
gatctgcgaggctaacacgctcggctcctgtggctacgtgtatatcgccatttatcccatggcttcccggtcttc

SEQ ID NO: 172865 - DNA, 75 bp, synthetic construct
  source 1..75: mol_type = other DNA
gtgatcaacgccgccagcggtcgtcaaactgttgatgccgcgctgaaagatgcgcagggtcgtatcaccaagtaa

SEQ ID NO: 172866 - DNA, 75 bp, synthetic construct
  source 1..75: mol_type = other DNA
atgaaaataaaaacaggtgcacgcatcctcgcattatctgttttgacgacgatgatgttttccgcctcggctctc

SEQ ID NO: 172867 - DNA, 75 bp, synthetic construct
  source 1..75: mol_type = other DNA
tgtggtcgcgaggtcaaatttaccctcgagactctccctggaaatgccgttgaagaaatgtcccgtgtctggtca

SEQ ID NO: 172868 - DNA, 75 bp, synthetic construct
  source 1..75: mol_type = other DNA
gagtgtctggggtcatagaaattgccgatgggagccgccgtcgtaaagctgctgcacttacagaaagtgattatc

SEQ ID NO: 172869 - DNA, 75 bp, synthetic construct
  source 1..75: mol_type = other DNA
acaccaaagaagttaaaaaatggctggatgttgatagctatcgtaagtttgaagagcttccgctcatacagcttt

SEQ ID NO: 172870 - DNA, 75 bp, synthetic construct
  source 1..75: mol_type = other DNA
agcgtgacgtcacaccacgcttcggtgtccggctggtgcaggagagcaaccgactgcactatctgtctgaccggg

SEQ ID NO: 172871 - DNA, 75 bp, synthetic construct
  source 1..75: mol_type = other DNA
ccagcatcaccggcaagttcagtgacatcgaatgccggaagctggatgaaacattcccgcactttatccgccaga

SEQ ID NO: 172872 - DNA, 75 bp, synthetic construct
  source 1..75: mol_type = other DNA
actgaatccccgccatacccactgcattgccctgtaccacaatggttttacctgcgaagccgatactcttggcag

SEQ ID NO: 172873 - DNA, 75 bp, synthetic construct
  source 1..75: mol_type = other DNA
ttaaagtcaccgttgagcatccggataaactggaagagaaattccctcaggttgcggcaactggcgatggccctg

SEQ ID NO: 172874 - DNA, 75 bp, synthetic construct
  source 1..75: mol_type = other DNA
actgaatccccgccatgcccactgcgtcaccctgtaccacaatggtttcacctgcgaagccgacacccttggcag

SEQ ID NO: 172875 - DNA, 75 bp, synthetic construct
  source 1..75: mol_type = other DNA
agcgggataccacgccgcgtctgggagcccgtctggtacaggaggggaaccaactgcattatctggctgaccggg

SEQ ID NO: 172876 - DNA, 75 bp, synthetic construct
  source 1..75: mol_type = other DNA
ttggaaagaccgtcctgacatcggtctggaggctattcttgtcggacgtaatgacgcgcgcactggttcccgccg

SEQ ID NO: 172877 - DNA, 75 bp, synthetic construct
  source 1..75: mol_type = other DNA
gatatcctgaaccagaacgcgcagagcatcgccgacctgtcagcgaaactcgacacgcctgacccggctaagtgg

SEQ ID NO: 172878 - DNA, 75 bp, synthetic construct
  source 1..75: mol_type = other DNA
tcgccagtaaaagatatttttacggtgatttccagggagggggtaagttacgtgagcaaagacggagattacatt

SEQ ID NO: 172879 - DNA, 75 bp, synthetic construct
  source 1..75: mol_type = other DNA
gcgtccggcagatgccaagacattcctcgcagccgcatctcagggcggcggcctaggcatcttgggcgacttcat

SEQ ID NO: 172880 - DNA, 75 bp, synthetic construct
  source 1..75: mol_type = other DNA
tgacccaggctctttggagcgatatcagcgccgggttgagcgtgagcagggtaacgactttctgattccaccatc

SEQ ID NO: 172881 - DNA, 75 bp, synthetic construct
  source 1..75: mol_type = other DNA
gcagtgttggctgggctaatgcctcagccaacgtgcgcggctggctgcgtatgagtcagcttggaggagcggtca

SEQ ID NO: 172882 - DNA, 75 bp, synthetic construct
  source 1..75: mol_type = other DNA
gacgagcaaataccatcatggaaaaggtttcgaatggtctgcatggtctggcagccgtcaccatcaccgtcgctg

SEQ ID NO: 172883 - DNA, 75 bp, synthetic construct
  source 1..75: mol_type = other DNA
tttacggctggaaccagtatttgtggccgttgttgattattaccgacgttgatctcggcaccaccgtggcaggga

SEQ ID NO: 172884 - DNA, 75 bp, synthetic construct
  source 1..75: mol_type = other DNA
atgagagagctttaattttaagcagacctcatgggtacattgaaaaggtatctatagatagaattgagattcttc

SEQ ID NO: 172885 - DNA, 75 bp, synthetic construct
  source 1..75: mol_type = other DNA
tgagcaggctattctgaaaggtgtcagggagttcgccactaaaacaaaatccatcgaatataagtcggcgaatga

SEQ ID NO: 172886 - DNA, 75 bp, synthetic construct
  source 1..75: mol_type = other DNA
ccgtgcaatccgactgggctaatgaagcacttaatcaacgtgtctcaccagcccttaaggaagccatacgatcat

SEQ ID NO: 172887 - DNA, 75 bp, synthetic construct
  source 1..75: mol_type = other DNA
gtggaaaggcgaaagcctgtcgcagtgcggttacatcatcattggcggcattttaattggcggaggcagtgaaat

SEQ ID NO: 172888 - DNA, 75 bp, synthetic construct
  source 1..75: mol_type = other DNA
aatcatccggcgcatatctggtgatgacacgctgaatggaaagcttggtcgcgcgcagcagcttttctttaagta

SEQ ID NO: 172889 - DNA, 75 bp, synthetic construct
  source 1..75: mol_type = other DNA
caagggcagaattttatgcaggcgttgcttggtgctatgagaggccgcttcacgcgttacaacagcgcggagcag

SEQ ID NO: 172890 - DNA, 75 bp, synthetic construct
  source 1..75: mol_type = other DNA
gtatcaactacgattttgaccgtgccgggctggtgcaattcatcgccagcggcagcaatgaccgggaaattgccg

SEQ ID NO: 172891 - DNA, 75 bp, synthetic construct
  source 1..75: mol_type = other DNA
cagaagctgctttattcgactgacccggtggacgtcaacgccatcgaccaatttgtgaaacaaggcatgagcatc

SEQ ID NO: 172892 - DNA, 75 bp, synthetic construct
  source 1..75: mol_type = other DNA
ctgtatgccatcggtgtggagtggacggagaacgcggcggccatgattgccgccggtgagtacaaatttatttcc

SEQ ID NO: 172893 - DNA, 75 bp, synthetic construct
  source 1..75: mol_type = other DNA
ccttgacccaggctctcttgagcgttatcagcgccgtgttgagcgtgagcaggggaacgactttctgatcccacc

SEQ ID NO: 172894 - DNA, 75 bp, synthetic construct
  source 1..75: mol_type = other DNA
aacgcgcttcagagctgttgccagtattggcctattccgacgatgagcaactgtttttcatggaagaccagagtg

SEQ ID NO: 172895 - DNA, 75 bp, synthetic construct
  source 1..75: mol_type = other DNA
gtggaaagacaggcctgacattgggctggaagcaatgctggtaggccgcaatgacgcgcgcaccggctcccgccg

SEQ ID NO: 172896 - DNA, 75 bp, synthetic construct
  source 1..75: mol_type = other DNA
gaagcggcgatgcgcgccgcgcaggagcttggcaaccgcgagcaactggcgaaagtaatcgaggcacgcaacaag

SEQ ID NO: 172897 - DNA, 75 bp, synthetic construct
  source 1..75: mol_type = other DNA
tggccaacctaaagcgtcagacccgtgaactgtgggagaaaaaaggtcgtgccatgttagttgatgatgtggcag

SEQ ID NO: 172898 - DNA, 75 bp, synthetic construct
  source 1..75: mol_type = other DNA
gcgggacagtggcatttgcttaaatccgtttgaaatcgttgaggactatgacgaagaagcggatgtactggttgg

SEQ ID NO: 172899 - DNA, 75 bp, synthetic construct
  source 1..75: mol_type = other DNA
tagagacgaagcgtcaatgggcggtcaatcaggcctatggcccgatgctcaagtttgtgccggtgcttgcagcca

SEQ ID NO: 172900 - DNA, 75 bp, synthetic construct
  source 1..75: mol_type = other DNA
tgacctgacgcgagatggtgacggtttctactgtcgtgaagttgtgaagcgaatgtttgacgtgtggtgccactg

SEQ ID NO: 172901 - DNA, 75 bp, synthetic construct
  source 1..75: mol_type = other DNA
gttatggtaaattccagaccactgaatacccgacctacaaacacgacaccagcgactacggtttctcctacggtg

SEQ ID NO: 172902 - DNA, 75 bp, synthetic construct
  source 1..75: mol_type = other DNA
agtactacggcatcactgctggtccggcttaccgcatcaacgattgggcaagcatctacggtgtagttggtgttg

SEQ ID NO: 172903 - DNA, 75 bp, synthetic construct
  source 1..75: mol_type = other DNA
tacgccagcgttacggcaatcgctatgacctgacgcgagacgttgacggcttctactgtcgtgaagttgtgaggc

SEQ ID NO: 172904 - DNA, 75 bp, synthetic construct
  source 1..75: mol_type = other DNA
tgatctgacgcgagatgttgacggtttctactgtcgtgaagttgtgaagcgaatgtttgaaatgtggtgccactg

SEQ ID NO: 172905 - DNA, 75 bp, synthetic construct
  source 1..75: mol_type = other DNA
atgaataaagcgtttgagctatgggtgcgccagcgttacggcaatcgctatgacctgacgcgagatgttgacggt

SEQ ID NO: 172906 - DNA, 75 bp, synthetic construct
  source 1..75: mol_type = other DNA
aagaagctgtctctggcgtataacgcgcaaagccagtcctctgccacctggggcaataacgtgatcgtcattcgc

SEQ ID NO: 172907 - DNA, 75 bp, synthetic construct
  source 1..75: mol_type = other DNA
atggcaacttattcttttctcgatgtaaccgcgtcgctcaccgggccgaccggcgttatcgatcttggtcagggt

SEQ ID NO: 172908 - DNA, 75 bp, synthetic construct
  source 1..75: mol_type = other DNA
gcgatacccatccgcgtctggctatgcatcgcggcgcaaaacacgccaaaggtgaatatttcggcccgttcccaa

SEQ ID NO: 172909 - DNA, 75 bp, synthetic construct
  source 1..75: mol_type = other DNA
tttgtgccgttatttcgggtgcagaaggctgggaagatatagaggattttggggaaacacatctcgattttttga

SEQ ID NO: 172910 - DNA, 75 bp, synthetic construct
  source 1..75: mol_type = other DNA
ccggtaagagcggcactatcacgttgactttgctgaaaacctccccggtaaacaaaaagctctcgctgatgtaca

SEQ ID NO: 172911 - DNA, 75 bp, synthetic construct
  source 1..75: mol_type = other DNA
gggcaacaacgtattcgtatttcgcaatacggcctccggcgacatcatgacagcgcgcggtggggcattccagaa

SEQ ID NO: 172912 - DNA, 75 bp, synthetic construct
  source 1..75: mol_type = other DNA
cgtgtccggcgcacgcactccacttcacccgtggagaactccttaattaccaaccctcaggagggtgaatgttaa

SEQ ID NO: 172913 - DNA, 75 bp, synthetic construct
  source 1..75: mol_type = other DNA
ctcagcaagaatctctgattgagttaagtgcccatcacaatatgatcactgaccttatattacacaatcatccca

SEQ ID NO: 172914 - DNA, 75 bp, synthetic construct
  source 1..75: mol_type = other DNA
tacgccagcgttacggcaatcgttatgacctgacgcgagatgttgacggtttctactgccgtgaagttgtgaaac

SEQ ID NO: 172915 - DNA, 75 bp, synthetic construct
  source 1..75: mol_type = other DNA
aacatttcagtgactggggatattatgaggtcaacttaatcggcggcgaacagcaaattgccgatttacaacagc

SEQ ID NO: 172916 - DNA, 75 bp, synthetic construct
  source 1..75: mol_type = other DNA
atgggaaataatttgttatcagcaaaagcgacactccctgtttatgatcgtaataacctggccccaagaattgtt

SEQ ID NO: 172917 - DNA, 75 bp, synthetic construct
  source 1..75: mol_type = other DNA
tctgcaagattatgctaaccgattgattgagcgctacagtaaccctgctttacgccatcggacctggcagattgc

SEQ ID NO: 172918 - DNA, 75 bp, synthetic construct
  source 1..75: mol_type = other DNA
ggacgattattttgcgaaactctggcgacgcgtggagtgacaattacgagtggactggcgcgtggaatcgatggt

SEQ ID NO: 172919 - DNA, 75 bp, synthetic construct
  source 1..75: mol_type = other DNA
tcttgtctcggaatttcccctcgatgttcctccccttgcttacaatttccacgaagaaatcgcattatcagtggt

SEQ ID NO: 172920 - DNA, 75 bp, synthetic construct
  source 1..75: mol_type = other DNA
atcgcagctgtacccggcggctatgtccggttgaggagggcatgccatgttcgacgtactaatgtatttgtttga

SEQ ID NO: 172921 - DNA, 75 bp, synthetic construct
  source 1..75: mol_type = other DNA
gtgaaggacctcactggttaataaagcaaggtgcgattcttgtgacggagccagaagaaattctggcaaatttgc

SEQ ID NO: 172922 - DNA, 75 bp, synthetic construct
  source 1..75: mol_type = other DNA
tggactggcgcgtggaatcgatggtgtggcgcataaagcggcggtacaggtaaatggcgttagtattgcggtgct

SEQ ID NO: 172923 - DNA, 75 bp, synthetic construct
  source 1..75: mol_type = other DNA
cgttttctttcattttcgcagaagagtttcgaaagctcattccgctggctggaacaaccaaatcaccatttaatc

SEQ ID NO: 172924 - DNA, 75 bp, synthetic construct
  source 1..75: mol_type = other DNA
ggtggtacatgccggatacgcgcgctggcgtaaaaaactgctccgctatggcgttgaattgtatgaacttaagcc

SEQ ID NO: 172925 - DNA, 75 bp, synthetic construct
  source 1..75: mol_type = other DNA
tgttcccgatggcgaaatggctgaccgtattgagctacctgcgtcctggtacaacgacaccgagacacatcgcta

SEQ ID NO: 172926 - DNA, 75 bp, synthetic construct
  source 1..75: mol_type = other DNA
tttgctgcacgatatcgcctcgcagagttggcggaacatacgctggatgttcagtattacatctggcaggacgat

SEQ ID NO: 172927 - DNA, 75 bp, synthetic construct
  source 1..75: mol_type = other DNA
cctttatgtcgattcagtacccaacaatcttctcgctgggcattaagaatctcggccaggacaccaaatacggtt

SEQ ID NO: 172928 - DNA, 75 bp, synthetic construct
  source 1..75: mol_type = other DNA
gtcatcacgggatgaaataccgttcggactcgatgaagatcaaaacaacatgcttaccgcattaaaaattgcact

SEQ ID NO: 172929 - DNA, 75 bp, synthetic construct
  source 1..75: mol_type = other DNA
tattggtgatgcctattttggggcaggggaagagccacttttttcggatttagatgtcatggcaataggacccgt

SEQ ID NO: 172930 - DNA, 75 bp, synthetic construct
  source 1..75: mol_type = other DNA
tcatacaacattcttttgctaccgacagcaaagttggttttgcatgtatgaatatttatcattacctgcttaatg

SEQ ID NO: 172931 - DNA, 75 bp, synthetic construct
  source 1..75: mol_type = other DNA
atgcgtgttgagatctatatcgctaaagaaaaaatcagcaaaatgccaaaaggttctgttcctgccctgcagcaa

SEQ ID NO: 172932 - DNA, 75 bp, synthetic construct
  source 1..75: mol_type = other DNA
atatccgctggatttattcaaagggggtgaaactccccggtcttgaggcccgccgttcggcggatgaatggttat

SEQ ID NO: 172933 - DNA, 75 bp, synthetic construct
  source 1..75: mol_type = other DNA
gtccgcttggttatatcaccgatttttcccgcctcaatcgtcgtatgcacaataaaagttttaccgtcgatggcg

SEQ ID NO: 172934 - DNA, 75 bp, synthetic construct
  source 1..75: mol_type = other DNA
cgttgccgcttatctgggcgaaaacacgtttattaagtgatgatccggcgaaaggggagggcaaggcaaaacggc

SEQ ID NO: 172935 - DNA, 75 bp, synthetic construct
  source 1..75: mol_type = other DNA
aagaaaaaatcagcaaaatgccaaaaggttctgttcctgccctgcagcaagaaatgctgcgacgtgtcagtaaac

SEQ ID NO: 172936 - DNA, 75 bp, synthetic construct
  source 1..75: mol_type = other DNA
aggcggtgcggcgcgtaaccgaaaaacagtttgtctccaatactggtgatgatcttgacgttattggcgtggcgt

SEQ ID NO: 172937 - DNA, 75 bp, synthetic construct
  source 1..75: mol_type = other DNA
tcctgagtggcgatacccacccgcgtctggcgatgcatcgtggtgcgaagcatgccaaaggtgaatatttcggcc

SEQ ID NO: 172938 - DNA, 75 bp, synthetic construct
  source 1..75: mol_type = other DNA
cgataaagattcagctaaaacttttgttcaggaaactctgaaagatacctgggagtctgctgacgagtggtttgt

SEQ ID NO: 172939 - DNA, 75 bp, synthetic construct
  source 1..75: mol_type = other DNA
aaaccattgaaggagtcgggccaaaacgccggcaaatgttgttgaaatatatgggcggtttgcaaggtttacgta

SEQ ID NO: 172940 - DNA, 75 bp, synthetic construct
  source 1..75: mol_type = other DNA
cgccgggcgatgattatgcggcgatgaatcaggtgctgcgtcggcgttatggtaaagctatcgacgacagtaaga

SEQ ID NO: 172941 - DNA, 75 bp, synthetic construct
  source 1..75: mol_type = other DNA
acgccagcgtcgaggaaattgcaaaagtgccgggaatttcgcaaggtctggcagaaaagatcttctggtcgttga

SEQ ID NO: 172942 - DNA, 75 bp, synthetic construct
  source 1..75: mol_type = other DNA
gattctgcaaaaacttttgttcaggagacgctgaaagatacctgggagtctgctgacgagtggtttgttcactaa

SEQ ID NO: 172943 - DNA, 75 bp, synthetic construct
  source 1..75: mol_type = other DNA
atggaaaaacgctccggcattcttatgacaagagtcgccgcaggggagcgattcatgtcattagtgtgttctcaa

SEQ ID NO: 172944 - DNA, 75 bp, synthetic construct
  source 1..75: mol_type = other DNA
gaaatgcttcgacgtgtcagtaaacgttatgacgatgtggacgtgattgtcagagccgccaacaatgacagtctc

SEQ ID NO: 172945 - DNA, 75 bp, synthetic construct
  source 1..75: mol_type = other DNA
actattttaagagccgtggataaagaatccgcgcaagagtttgtacaagaaacgcttcaggaagtctgggaaaca

SEQ ID NO: 172946 - DNA, 75 bp, synthetic construct
  source 1..75: mol_type = other DNA
aagaaaaattcagcaaaatgccaaaaggctctgttcctgccctgcaacaggaaatgttgcgccgcatcagtaagc

SEQ ID NO: 172947 - DNA, 75 bp, synthetic construct
  source 1..75: mol_type = other DNA
atgcgtgttgagatctgtatcgctaaagaaaaaatcagcaaaatgccaaaaggttctgttcctgccctacagcaa

SEQ ID NO: 172948 - DNA, 75 bp, synthetic construct
  source 1..75: mol_type = other DNA
accactgacgcgcctgcggcttgtacaacaccgcgccgaccgggaaaagatttcccgcccgtcccggcgttatca

SEQ ID NO: 172949 - DNA, 75 bp, synthetic construct
  source 1..75: mol_type = other DNA
cgtgactggttcagggctgcgccccgaaacccgctaaaagccactgacgcgcctgcggcttgtccaacaccgtgc

SEQ ID NO: 172950 - DNA, 75 bp, synthetic construct
  source 1..75: mol_type = other DNA
tcctgttcgaaaatctggtggatgtcgacgatcgcagcattcagcgtctgttgcaggaagtggattccgaatcgc

SEQ ID NO: 172951 - DNA, 75 bp, synthetic construct
  source 1..75: mol_type = other DNA
atgagcaccgccgtctgctggaacgctgcgacggtaaacagcttgcagcctggatgcgccagacgtgcctggccg

SEQ ID NO: 172952 - DNA, 75 bp, synthetic construct
  source 1..75: mol_type = other DNA
acgagcaccggcggctgcttgagcgctgtgacggcaggccgctggcggcctggatgcggcagacctgcctggacg

SEQ ID NO: 172953 - DNA, 75 bp, synthetic construct
  source 1..75: mol_type = other DNA
cgctacgtgactggttcagggctgcgccccgaaacccgctgaaaagtactgccgcgccctgcgggcttgcccaac

SEQ ID NO: 172954 - DNA, 75 bp, synthetic construct
  source 1..75: mol_type = other DNA
tggttaccataaccgtggtaatacagtgtctggccgttcagatgagtcgctatcgactctcccggatgaagaatg

SEQ ID NO: 172955 - DNA, 75 bp, synthetic construct
  source 1..75: mol_type = other DNA
cctggatcgcgggcagtgaacgcgcatgcttattttcctggtatctgttgatgcagtttatccagaataacagga

SEQ ID NO: 172956 - DNA, 75 bp, synthetic construct
  source 1..75: mol_type = other DNA
acacaaccgtaaggattaacgaaaacagaaaactggagctaaaacgaagagtgctggaaatcggtaataaaacag

SEQ ID NO: 172957 - DNA, 75 bp, synthetic construct
  source 1..75: mol_type = other DNA
gtatggaatccccgagcaaagatgctactccgggcaacgtttacgctcaggctgactataagattgcttacgagt

SEQ ID NO: 172958 - DNA, 75 bp, synthetic construct
  source 1..75: mol_type = other DNA
attacgcagttctgcaatacagacggaaaaagaaatgggcatatacagggaccgcaaaacaggagcctgtacata

SEQ ID NO: 172959 - DNA, 75 bp, synthetic construct
  source 1..75: mol_type = other DNA
agacggatacagcactgcctgaagcgtgcaaaaatgaaatcacagagagcaaccagccaggaagagttctcctaa

SEQ ID NO: 172960 - DNA, 75 bp, synthetic construct
  source 1..75: mol_type = other DNA
gcacgctctatcccgaactgattgcggatggttttataggtccgcgaactgttagtgcgctaaaaagttacctat

SEQ ID NO: 172961 - DNA, 75 bp, synthetic construct
  source 1..75: mol_type = other DNA
atgaccaaagatgagatttttaacagcattcttgggaaagagggcggttatgttgatcaccctgacgacaaggga

SEQ ID NO: 172962 - DNA, 75 bp, synthetic construct
  source 1..75: mol_type = other DNA
aagaactctttcaccctggcgagggcataggcttgatgcagaacaaagcatagagagctacgaggcattttctaa

SEQ ID NO: 172963 - DNA, 75 bp, synthetic construct
  source 1..75: mol_type = other DNA
actggtcttactaaccgcgctgaactgtacgcagggtgaccgttatctggagctggcagagaaacgcgaggccaa

SEQ ID NO: 172964 - DNA, 75 bp, synthetic construct
  source 1..75: mol_type = other DNA
ctggagctggcagaaaaacgcgaggccaacgagtcgtttgtctacggctggatgaaagagcgcgtagcagtttaa

SEQ ID NO: 172965 - DNA, 75 bp, synthetic construct
  source 1..75: mol_type = other DNA
agccagggtcagcgttatcttgagctggcagaacagcgcagcgcgaacgagacgtttgtttatggctgggtaaag

SEQ ID NO: 172966 - DNA, 75 bp, synthetic construct
  source 1..75: mol_type = other DNA
cagcgggggttccgacccgaacacggaatgtcacggcaatattgcttaatctgcaacatccaacgcgagccgggc

SEQ ID NO: 172967 - DNA, 75 bp, synthetic construct
  source 1..75: mol_type = other DNA
gtggaaaccgcgctgcggattagcggctcatggaccgattatccgctggaaattgtcgaaattggcgctggcgaa

SEQ ID NO: 172968 - DNA, 75 bp, synthetic construct
  source 1..75: mol_type = other DNA
ccagtgccgggtaaagcgctcgctattttcggcgataccggcccctgcgatgccgcgctggagctggctaaaggc

SEQ ID NO: 172969 - DNA, 75 bp, synthetic construct
  source 1..75: mol_type = other DNA
atgtccatagctgaattaatattaaattcaaacctgtattttcctcatccatttataaaggattatagtcatgtt

SEQ ID NO: 172970 - DNA, 75 bp, synthetic construct
  source 1..75: mol_type = other DNA
ggaaggtaacatcggcggcgcaactgatgtaggcgtacgtctggtgaaatcagacaacaccaacgtgactcttgg

SEQ ID NO: 172971 - DNA, 75 bp, synthetic construct
  source 1..75: mol_type = other DNA
ttttcggtgataccggcccttgcgatgccgcaatcgatcttgctaaaggtgtcgacataatggttcacgaaacga

SEQ ID NO: 172972 - DNA, 75 bp, synthetic construct
  source 1..75: mol_type = other DNA
accttcgagagctataaagtcttctgtgcatggtcgattttttcgctatgggcatttttcggctggtacacctta

SEQ ID NO: 172973 - DNA, 75 bp, synthetic construct
  source 1..75: mol_type = other DNA
tattcaacgctttgcactggatgatgcccaacatagagctccgttctggtactacttgccggtcatcattgccgg

SEQ ID NO: 172974 - DNA, 75 bp, synthetic construct
  source 1..75: mol_type = other DNA
aatgctgatggcgcattacgctttgctggcagcaaaaaataatcctctggcgctgcggattaatggctggattaa

SEQ ID NO: 172975 - DNA, 75 bp, synthetic construct
  source 1..75: mol_type = other DNA
ggtggcagggatgtgcagcttctggctggcaatgcaggcacaaacgaggagaggcaaaagcgcgggatttttgct

SEQ ID NO: 172976 - DNA, 75 bp, synthetic construct
  source 1..75: mol_type = other DNA
actacttgccggtcatcattgccggtagcctgccgtggctgggattactccccggagcactttacgcaggctgga

SEQ ID NO: 172977 - DNA, 75 bp, synthetic construct
  source 1..75: mol_type = other DNA
ccgttgctgtttttctctatcgctaaaggtaaactgccaacctatattctttcctgctttgcccctctggcgata

SEQ ID NO: 172978 - DNA, 75 bp, synthetic construct
  source 1..75: mol_type = other DNA
cgtagtgaaaaaagcgctgcatgtgcaaatcgacggtttggaagcggtactggctgccatgtgtgaaccgcaaat

SEQ ID NO: 172979 - DNA, 75 bp, synthetic construct
  source 1..75: mol_type = other DNA
tttgcaagattatgctaatcgattaattgcacgctacagcaacccggcgttacgtcaccggacctggcagatagc

SEQ ID NO: 172980 - DNA, 75 bp, synthetic construct
  source 1..75: mol_type = other DNA
atgggaaataatttgttatcagccaaaacgacactccctgtttatgatcgtaataacctggcgcccaaaattgtt

SEQ ID NO: 172981 - DNA, 75 bp, synthetic construct
  source 1..75: mol_type = other DNA
tatgccatcggcacttatgccgtgctcgatccgtttattgcattctggctggtggcgggaatgtgcagcttctgg

SEQ ID NO: 172982 - DNA, 75 bp, synthetic construct
  source 1..75: mol_type = other DNA
tttatagaaaattatctgatgacagatgaaggacttaccacgctgaatgatgccgttccattaggtgcagttaca

SEQ ID NO: 172983 - DNA, 75 bp, synthetic construct
  source 1..75: mol_type = other DNA
cctgcgcttatatcgttttcctggttctgttttgaccgattaccggatactgaagaattacgccaaaacactgaa

SEQ ID NO: 172984 - DNA, 75 bp, synthetic construct
  source 1..75: mol_type = other DNA
tttccttcagaaaccaacgtctgaaaaacaactgaatattgaactggtaagcgcaccaaaagacaccaataaaaa

SEQ ID NO: 172985 - DNA, 75 bp, synthetic construct
  source 1..75: mol_type = other DNA
atgtatacctgcttaacacaaaaacaaccatagagaaaggtgctgatgtgacagctcagagtggtatgttctcca

SEQ ID NO: 172986 - DNA, 75 bp, synthetic construct
  source 1..75: mol_type = other DNA
taaagtcaatgtacagttttttcttgacgcagaaaccagggcgcagctcaaagaattatcgagggtcagaagact

SEQ ID NO: 172987 - DNA, 75 bp, synthetic construct
  source 1..75: mol_type = other DNA
accttaaacctttacgtgcattacttaacattcagaaatctgtaagcaataaagacaaattactatttaagaaat

SEQ ID NO: 172988 - DNA, 75 bp, synthetic construct
  source 1..75: mol_type = other DNA
gctaccagttcgacctgctggctaatggcgaaaccgtattgcgggatgcatctggtgaaaaacgcatcaaaggtg

SEQ ID NO: 172989 - DNA, 75 bp, synthetic construct
  source 1..75: mol_type = other DNA
agcacgcattcatggtatgccggtgcagaagcgggctaccgctatcatgtcactgaggatgcctggattgagcca

SEQ ID NO: 172990 - DNA, 75 bp, synthetic construct
  source 1..75: mol_type = other DNA
attcaatatcttcaggatgaagaacaaaaaagagttttaagtgagttggtaaatgtcctgatttcaaaaagataa

SEQ ID NO: 172991 - DNA, 75 bp, synthetic construct
  source 1..75: mol_type = other DNA
ggaatcctggttaaatgaactgttttttgctgtgattgctccgctataccgtgttgcccccgaacaaacagaaca

SEQ ID NO: 172992 - DNA, 75 bp, synthetic construct
  source 1..75: mol_type = other DNA
atgattgcatcaatattaacgtttataggcggtatggcggctggattcattctttgcatgtttctggtggttatg

SEQ ID NO: 172993 - DNA, 75 bp, synthetic construct
  source 1..75: mol_type = other DNA
gtattactcttattatcttggagggcgtaatatctccgtactgccccttaatgtttatgatcccccggaacgttt

SEQ ID NO: 172994 - DNA, 75 bp, synthetic construct
  source 1..75: mol_type = other DNA
gataacctttccaaatgaatcaaaactggaaaatatttatattgatcataacgatctggaaagtttagattttaa

SEQ ID NO: 172995 - DNA, 75 bp, synthetic construct
  source 1..75: mol_type = other DNA
agcagtattcccttctctggataacttcaaatatctggataagcattatgttttcaatgtcggggcaatgaatta

SEQ ID NO: 172996 - DNA, 75 bp, synthetic construct
  source 1..75: mol_type = other DNA
ttgaggtgctccggggtgatagtgttgagaagacctctcgggtatggtcaggtaatgaacgtgaccaggaactgc

SEQ ID NO: 172997 - DNA, 75 bp, synthetic construct
  source 1..75: mol_type = other DNA
atgcattgcagcattatcaactcgctcttcacgatgccattttataacaatgaaagtggaatcatatttttaaat

SEQ ID NO: 172998 - DNA, 75 bp, synthetic construct
  source 1..75: mol_type = other DNA
tgttaggtgtttctattgttgtctttatacttataaatatagcattaatatatgggtttaaaaaagctaacccgt

SEQ ID NO: 172999 - DNA, 75 bp, synthetic construct
  source 1..75: mol_type = other DNA
cgccgctggaagagaaggtatttattgccgccgcgctggcgcataaccagaccggacgcccgatctccacgcata

SEQ ID NO: 173000 - DNA, 75 bp, synthetic construct
  source 1..75: mol_type = other DNA
atatgaatctgtttggtattaaacagtatttaatcgccctgtttccattggcaattattgtgctggtattcccga

SEQ ID NO: 173001 - DNA, 75 bp, synthetic construct
  source 1..75: mol_type = other DNA
atactggataatgtcacgccctcacagtggacggctattggagtgctggggagtctgttttttggtttgctgaca

SEQ ID NO: 173002 - DNA, 75 bp, synthetic construct
  source 1..75: mol_type = other DNA
gaacatgcggaggaaagaaagtgatccttgcccggtgcaggtgtggcggtaaaggcgaagtgttggaccgcaaag

SEQ ID NO: 173003 - DNA, 75 bp, synthetic construct
  source 1..75: mol_type = other DNA
gctctctgtggcgaaaagagaaaacagactggcagataatgtaaggctattgcgtcaggaggaacgggaaaggcg

SEQ ID NO: 173004 - DNA, 75 bp, synthetic construct
  source 1..75: mol_type = other DNA
gaaaaatatagaaaagttaattcagattgagcgtaacgcgaaagcgcggatacgcagggcgaaaaaaaacagaac

SEQ ID NO: 173005 - DNA, 75 bp, synthetic construct
  source 1..75: mol_type = other DNA
taagtaatattgttttatttccggtaaaagaggatgacccacgtaatcaggttaattttctttatgagtcatcgg

SEQ ID NO: 173006 - DNA, 75 bp, synthetic construct
  source 1..75: mol_type = other DNA
gcaattgcgccagtcaggattcagtcaggccgatgtggatgtgatgttacgtgaaaatccctctcaatttttcca

SEQ ID NO: 173007 - DNA, 75 bp, synthetic construct
  source 1..75: mol_type = other DNA
cgctacgtgaccgtgggttgctgaaccgcgtcatgctgtcgatggatattacgcgccgctcccatttaaaagcca

SEQ ID NO: 173008 - DNA, 75 bp, synthetic construct
  source 1..75: mol_type = other DNA
taaaaatatagaaaagctaattcagattgagcgtaatgtgaaagcgcggatacgcagggcgacaaaacttggccc

SEQ ID NO: 173009 - DNA, 75 bp, synthetic construct
  source 1..75: mol_type = other DNA
caatcctgggaccatcatttccctggatttgaacacgaaacagaagggacagaaattattgacggtatttaccac

SEQ ID NO: 173010 - DNA, 75 bp, synthetic construct
  source 1..75: mol_type = other DNA
atctgggtgacaccatgtttgcctggctgaaagaaaacaaccctggcgcacggttgaatgaagcctattccggcc

SEQ ID NO: 173011 - DNA, 75 bp, synthetic construct
  source 1..75: mol_type = other DNA
cgatcgtctgcactttgacgaagcctggtacggctatgcacgtttcaacccgatctatgccgatcactatgccat

SEQ ID NO: 173012 - DNA, 75 bp, synthetic construct
  source 1..75: mol_type = other DNA
tttgaggccaaacagaaagataaaagtatcgccagcgccgaaagctgggaagatgcgctcagcgcaatgagcgaa

SEQ ID NO: 173013 - DNA, 75 bp, synthetic construct
  source 1..75: mol_type = other DNA
cgtggtgtgcggcagtgataattttatggcaaccaccaaatttgacgcgcacttcaccgggaccgccgctcacgc

SEQ ID NO: 173014 - DNA, 75 bp, synthetic construct
  source 1..75: mol_type = other DNA
acttcaccgggaccgccgctcacgcaggcgcaaaaccacaagacggtcacaatgccttactggcggcagcacaag

SEQ ID NO: 173015 - DNA, 75 bp, synthetic construct
  source 1..75: mol_type = other DNA
gttaactgccagactgacttcgttgcaaaagacgctggtttccaggcgttcgcagacaaagttctggacgcagct

SEQ ID NO: 173016 - DNA, 75 bp, synthetic construct
  source 1..75: mol_type = other DNA
aggccgtattgtcgtgcctgaaagcgacgtgcagggagaataccgtcctgttcgatggacttcctgcttttattg

SEQ ID NO: 173017 - DNA, 75 bp, synthetic construct
  source 1..75: mol_type = other DNA
ctgagcaggacttcctcggcattgaagtgcattcaccgggcgttggtgcgtgcctggcttctgcgcatgaagagg

SEQ ID NO: 173018 - DNA, 75 bp, synthetic construct
  source 1..75: mol_type = other DNA
ggacgcgccgttgccgcgatgacccgctaccgccagcagctgttgccgccactgttcagcgcgctgatgaaatat

SEQ ID NO: 173019 - DNA, 75 bp, synthetic construct
  source 1..75: mol_type = other DNA
aggccgcatgaagaaattcaccagcgaagtttctctgaccggtcagccgttcgttatggaaccaagcaaaactgt

SEQ ID NO: 173020 - DNA, 75 bp, synthetic construct
  source 1..75: mol_type = other DNA
agaacgtgttgcgctggtagcgaaaattggtgaaaacatcaacattcgccgcgttgctgcgctggaaggcgacgt

SEQ ID NO: 173021 - DNA, 75 bp, synthetic construct
  source 1..75: mol_type = other DNA
actggattgaagtcttcaacagcaacggtgcactgactgcccgtgcggttgtcagccagcgtgttccggcaggga

SEQ ID NO: 173022 - DNA, 75 bp, synthetic construct
  source 1..75: mol_type = other DNA
acctctatcggcccgctgatggagaaaatcggtaacggcggtaaagggattgcctggaacacccagagcgaaatg

SEQ ID NO: 173023 - DNA, 75 bp, synthetic construct
  source 1..75: mol_type = other DNA
cctgatcgactttaacgtccgtgcggaacgcatgggctggctgccgtctgcaccgcagttaggcactaacccgct

SEQ ID NO: 173024 - DNA, 75 bp, synthetic construct
  source 1..75: mol_type = other DNA
gctggaaaatctacgttaaaaaaggtctggtgacctgggaaaaccagcagactgactagccgcgcactcgcccgg

SEQ ID NO: 173025 - DNA, 75 bp, synthetic construct
  source 1..75: mol_type = other DNA
aaactcgtaccccagacgctcacttctttaccgaagtgcgttacaaagggactaaaactgttgccgtaacgccgg

SEQ ID NO: 173026 - DNA, 75 bp, synthetic construct
  source 1..75: mol_type = other DNA
cgccgataaagcgaaaagctttaagcaggcgcgtggacgcggtggttttgttcgttcttcctggcaggaggtgaa

SEQ ID NO: 173027 - DNA, 75 bp, synthetic construct
  source 1..75: mol_type = other DNA
tatttttatccctgtcaggcggtaatgatgctttagctggatggcacaatgtcatgttttatgcttttaacgact

SEQ ID NO: 173028 - DNA, 75 bp, synthetic construct
  source 1..75: mol_type = other DNA
tcagtcagctgattgcttatagctggcttaaaattcctgctgatatcggcatcatggatgctcttaatagcggga

SEQ ID NO: 173029 - DNA, 75 bp, synthetic construct
  source 1..75: mol_type = other DNA
cgcctggcggatatccgtctacaaagcgaaaaatcgctaaccgacttctttgcgccattacgctctgtcccgtcg

SEQ ID NO: 173030 - DNA, 75 bp, synthetic construct
  source 1..75: mol_type = other DNA
ccagtggcgttatgaaaccgtcacggcggaagagctgctgtcaccgctggcggataaatcccgttataccggcca

SEQ ID NO: 173031 - DNA, 75 bp, synthetic construct
  source 1..75: mol_type = other DNA
ggggtaaactgcaccggctcctgcagctggaaaatctacgtcaaaaacggtctggtcacctgggaaacccagcag

SEQ ID NO: 173032 - DNA, 75 bp, synthetic construct
  source 1..75: mol_type = other DNA
taatgaggggtttaatatatttcttgatgttcagagcaaatatggttggtctatggagaatgaaaatgacaaaga

SEQ ID NO: 173033 - DNA, 75 bp, synthetic construct
  source 1..75: mol_type = other DNA
taaccctgaagtctggatagcgatcaccgccaatatttatggcgtggatgaaaccggtgcgccggtaggcggtaa

SEQ ID NO: 173034 - DNA, 75 bp, synthetic construct
  source 1..75: mol_type = other DNA
aatggcggaagaactggtgatcagggaggacgaaaacggggcgatcccgtggcgggggaaacgctggtcgctggt

SEQ ID NO: 173035 - DNA, 75 bp, synthetic construct
  source 1..75: mol_type = other DNA
ctttaatgaatcaaatgtccgcaggctggatattgatgaacgaataattattcattacttacacaatgtccgtcc

SEQ ID NO: 173036 - DNA, 75 bp, synthetic construct
  source 1..75: mol_type = other DNA
caggtccgctgtaaaatatgcggtgcagttgtggagccatttgactggatgctctctgtggcgaaaagagaaacc

SEQ ID NO: 173037 - DNA, 75 bp, synthetic construct
  source 1..75: mol_type = other DNA
tacgttcgaccacaaaaccaataaatcacgttcagtatatttgcttcggcacaatagccgcgtaagaaataccgt

SEQ ID NO: 173038 - DNA, 75 bp, synthetic construct
  source 1..75: mol_type = other DNA
atgtggagaggtaatagtcatggcaaaagccagatgatacttaccgaatatcagtttgaccataaaaccaacaaa

SEQ ID NO: 173039 - DNA, 75 bp, synthetic construct
  source 1..75: mol_type = other DNA
gctggaaaatctacgttaaaaagggtctggtgacctgggaaaaccaacagactgactagccgcgcactcgcccgg

SEQ ID NO: 173040 - DNA, 75 bp, synthetic construct
  source 1..75: mol_type = other DNA
gctggaaaatctacgttaaaaatggtctggtgacctgggaaaaccagcagactgactatccgcgcactcgcccgg

SEQ ID NO: 173041 - DNA, 75 bp, synthetic construct
  source 1..75: mol_type = other DNA
gctggaaaatctacgttaaaaatggtctggtgacctgggaaaaccatcagactgactagccgcgcactcgcccgg

SEQ ID NO: 173042 - DNA, 75 bp, synthetic construct
  source 1..75: mol_type = other DNA
atctttaactcgttccatctgttaccgcagagcgtggtgaacatgctggtaacgctggataccttcctgctggca

SEQ ID NO: 173043 - DNA, 75 bp, synthetic construct
  source 1..75: mol_type = other DNA
gctggaaaatctacgttaaaaagggtctggtgacctgggaaaaccagcagactgactaaccgcgcactcgcccgg

SEQ ID NO: 173044 - DNA, 75 bp, synthetic construct
  source 1..75: mol_type = other DNA
gctggaaaatctacgttaaaaagggtctggtgacctgggaaaaccatcagactgactatccgcgcactcgcccgg

SEQ ID NO: 173045 - DNA, 75 bp, synthetic construct
  source 1..75: mol_type = other DNA
gatgcttatgccgaaaatccgcagatcgctaacctgctgctggctccgtacttcaagcaaattgccgatgactac

SEQ ID NO: 173046 - DNA, 75 bp, synthetic construct
  source 1..75: mol_type = other DNA
tacattgaggatatggcgatgtttttatcgccattaccggtcgtgctggagtggcattgtgtgatgtgcgggcag

SEQ ID NO: 173047 - DNA, 75 bp, synthetic construct
  source 1..75: mol_type = other DNA
gaaatagaaaatcttgttgatcaacagggatattttaactgcgattcattaacagccgaagaattaatgatatta

SEQ ID NO: 173048 - DNA, 75 bp, synthetic construct
  source 1..75: mol_type = other DNA
cagcaagctctgcgtgatgttgttgcttatgcggtgcagaacggcattccagtacctaccttctctgcagcggtt

SEQ ID NO: 173049 - DNA, 75 bp, synthetic construct
  source 1..75: mol_type = other DNA
ttttccgtgctggctgcatcatccgtgcacagttcctgcagaaaatcactgatgcttacgctgaaaatccgaaga

SEQ ID NO: 173050 - DNA, 75 bp, synthetic construct
  source 1..75: mol_type = other DNA
acgatgccagccattatctcaagatgttttcccgtgatggggaagagttccgtaaaacgatggttgatatggaaa

SEQ ID NO: 173051 - DNA, 75 bp, synthetic construct
  source 1..75: mol_type = other DNA
ttcgtcgtaaccgtgagctttctgcagaaggctttaacttcatcggtaccggtgtttccggcggtgaagaaggtg

SEQ ID NO: 173052 - DNA, 75 bp, synthetic construct
  source 1..75: mol_type = other DNA
atgaacggtctaaaaacggggctggggatgacgccgggtgagcacattatcagtgccgattctgcgctcagcaga

SEQ ID NO: 173053 - DNA, 75 bp, synthetic construct
  source 1..75: mol_type = other DNA
catctgggcgtctggcaactcaatatacatcagcaacaacaggttcctctggctcacattctcatactgtaggta

SEQ ID NO: 173054 - DNA, 75 bp, synthetic construct
  source 1..75: mol_type = other DNA
aggcctgtggtacggggatttattgcagagcaacatgtacgaagtctgtttacaggtaccagccagatttgtacc

SEQ ID NO: 173055 - DNA, 75 bp, synthetic construct
  source 1..75: mol_type = other DNA
ggggatctattccagagcggtatgtacaaagtatgtttacagctaccagccagacttgttcctggactgtggaag

SEQ ID NO: 173056 - DNA, 75 bp, synthetic construct
  source 1..75: mol_type = other DNA
gacagatgctcagggggcgtggtttgagcatgatttacatgccctgagcgagcaacagaaggcggcctgtgtggt

SEQ ID NO: 173057 - DNA, 75 bp, synthetic construct
  source 1..75: mol_type = other DNA
cctgccatggccggttgattctgcagacagatgctcagggggcgtggtttgagcatgatttacatgccctgagtg

SEQ ID NO: 173058 - DNA, 75 bp, synthetic construct
  source 1..75: mol_type = other DNA
aaacctgtggtacggggatttattgccgggcggcatgtacaaagtctgtttacaggtaccagccagatttgctcc

SEQ ID NO: 173059 - DNA, 75 bp, synthetic construct
  source 1..75: mol_type = other DNA
gtggcattgtgtgatgtgcgaccagttttttcatgggaagaagttctgtgaaacctgtggtacggggatttattg

SEQ ID NO: 173060 - DNA, 75 bp, synthetic construct
  source 1..75: mol_type = other DNA
caggagtcaaaggtcgggcgctcttttcactgctctttgcggcaccgatgattcatgcaacagacactgtaacga

SEQ ID NO: 173061 - DNA, 75 bp, synthetic construct
  source 1..75: mol_type = other DNA
caaagaaatacaaactctgtatttcgcctgtaacgggtattatctgctctgttgctgaagatgtctctgctttat

SEQ ID NO: 173062 - DNA, 75 bp, synthetic construct
  source 1..75: mol_type = other DNA
gatgtgccatgacgcagtcgaagtgctgcataaaatgattcctgacaattcattgagcatggttcagctcttttt

SEQ ID NO: 173063 - DNA, 75 bp, synthetic construct
  source 1..75: mol_type = other DNA
ggcaaccaatggggctgactattatctgccaggctatttcgttgccgatgccttcgccgcatacaaaatgaaatt

SEQ ID NO: 173064 - DNA, 75 bp, synthetic construct
  source 1..75: mol_type = other DNA
gggaaaccattgccgaatgttcctcgtcataccggttcgctattcctgacctatgacattcataacatgccaggc

SEQ ID NO: 173065 - DNA, 75 bp, synthetic construct
  source 1..75: mol_type = other DNA
tttcaaataggaagatagctgaattagttggtgtttcacatccaacaatcgcgaataaattacaaaagtggggga

SEQ ID NO: 173066 - DNA, 75 bp, synthetic construct
  source 1..75: mol_type = other DNA
cacaacccaacacctggcaacgtcgctggtcaacgttctttgctgaacaacgtattggctggcaactggaactgg

SEQ ID NO: 173067 - DNA, 75 bp, synthetic construct
  source 1..75: mol_type = other DNA
tctcccgcctcgcccattggatgcacataatgcatttattttagggcagcaaattgcgcgcctgcatcaatggag

SEQ ID NO: 173068 - DNA, 75 bp, synthetic construct
  source 1..75: mol_type = other DNA
agcagcaaacgggactgacgcctcaacgttacctgaaccgcctgcgactgatgaaagcccgacatctgctacgcc

SEQ ID NO: 173069 - DNA, 75 bp, synthetic construct
  source 1..75: mol_type = other DNA
tatctgggtaagattgtttcttacgcgcagggcttctcgcagttacgtgccgcgtctgaagagtacaactgggat

SEQ ID NO: 173070 - DNA, 75 bp, synthetic construct
  source 1..75: mol_type = other DNA
tgtttgcacgctacatctcttccctgaaagatcagcgcgtggccgcgtctaaagtactgtcaggtccacaagcgc

SEQ ID NO: 173071 - DNA, 75 bp, synthetic construct
  source 1..75: mol_type = other DNA
tggtaaagcggcggtggtggtgccgaccggctttatcaccgctcagtcgggtattgataaagggattcgtgaaca

SEQ ID NO: 173072 - DNA, 75 bp, synthetic construct
  source 1..75: mol_type = other DNA
gcttctttgccgggataccgaaagtacccaaagccgccaaagacaaaatggcgatttaccagttgttcctgcaac

SEQ ID NO: 173073 - DNA, 75 bp, synthetic construct
  source 1..75: mol_type = other DNA
caaattcctgaacgacaaattcgcctttgaagccaaaaaggtggataaaagcatcgccagcgccgaaaaatggga

SEQ ID NO: 173074 - DNA, 75 bp, synthetic construct
  source 1..75: mol_type = other DNA
aaatctatgacggctatcagtccgtttcaccgctaccggcagatttcctcgaacgtcaaccaatttaccaactct

SEQ ID NO: 173075 - DNA, 75 bp, synthetic construct
  source 1..75: mol_type = other DNA
acgccttattagctttgatatcgctaaacgttggtatctacgcgatatcgcagaaagaatgtataccagcgagag

SEQ ID NO: 173076 - DNA, 75 bp, synthetic construct
  source 1..75: mol_type = other DNA
ccgtggcgcgcatcatggcggaaatcctggtgccgaaagcacaacagggcgtggtgcgcaacgtaagctgttacg

SEQ ID NO: 173077 - DNA, 75 bp, synthetic construct
  source 1..75: mol_type = other DNA
atggatctgttgtaccgggtaaaaacactttgggccgcgctgcgcggtaatcattactcctggcctgccatcgat

SEQ ID NO: 173078 - DNA, 75 bp, synthetic construct
  source 1..75: mol_type = other DNA
gctgaagcaccaggactatccccgcacgcgccaggtgaaaatttttctgaattcagacttctgggagaagggtaa

SEQ ID NO: 173079 - DNA, 75 bp, synthetic construct
  source 1..75: mol_type = other DNA
agtctggaagcgcaactggcgaccgaagttcgccatcaggttgcagcctttatggagcgtcgcggcatgggcggg

SEQ ID NO: 173080 - DNA, 75 bp, synthetic construct
  source 1..75: mol_type = other DNA
ggtgtttccggcggtgaagagggcgcgctgaaaggtccttccattatgcctggtggccagaaagaagcctatgaa

SEQ ID NO: 173081 - DNA, 75 bp, synthetic construct
  source 1..75: mol_type = other DNA
gacctttaccgagtggaataacggtgaactgagcagctacctgatcgacatcaccaaagacatcttcaccaaaaa

SEQ ID NO: 173082 - DNA, 75 bp, synthetic construct
  source 1..75: mol_type = other DNA
atgttgctccagctccctgacaaaggactggcgctgctggacgatacgctgacccactggcacaccaacgcacgg

SEQ ID NO: 173083 - DNA, 75 bp, synthetic construct
  source 1..75: mol_type = other DNA
ctctcaaaggcccgtcaatcatgcctggtggccagaaagaagcctatgaacttgtcgctccgattctgacaaaga

SEQ ID NO: 173084 - DNA, 75 bp, synthetic construct
  source 1..75: mol_type = other DNA
ctggtcaacattttttgctgaacagcgaattggctggcagctagagctggcggcagaaaaagggatcgcctttgg

SEQ ID NO: 173085 - DNA, 75 bp, synthetic construct
  source 1..75: mol_type = other DNA
ttgcaaacctgctgcttgctccgtatttcaaacatatcgctgatgaatatcaacatgccctccgtgatgtagtgt

SEQ ID NO: 173086 - DNA, 75 bp, synthetic construct
  source 1..75: mol_type = other DNA
cctgcgcagttaaaaagcggcgagcgcataaaagttatgctcaatgcgggattaagcccggaacatgaagaaaaa

SEQ ID NO: 173087 - DNA, 75 bp, synthetic construct
  source 1..75: mol_type = other DNA
tgcagagtgggcggtgaaaacggtcattgaaaaattcgccgaacagtttgctgcgctaagtgatagctatctcaa

SEQ ID NO: 173088 - DNA, 75 bp, synthetic construct
  source 1..75: mol_type = other DNA
cctggtgacgcttgccacccagatggcagctattctttctcagtcgcagttgactgccctgtttgggcaatatcg

SEQ ID NO: 173089 - DNA, 75 bp, synthetic construct
  source 1..75: mol_type = other DNA
tcgataagctggtggcgcttttaggcattgaaccgttgcttgagcgtttaccgggcagcctttccggaggcgaaa

SEQ ID NO: 173090 - DNA, 75 bp, synthetic construct
  source 1..75: mol_type = other DNA
aggtggaagtggaactggaagtcggcggtaaaacgctgtgggcgcgaataagtccgtgggccagggatgaactgg

SEQ ID NO: 173091 - DNA, 75 bp, synthetic construct
  source 1..75: mol_type = other DNA
cgtttggcccgctggaagaagtgtggggcagtagcgtaatgaatccgtggctaccaaaagagcagcaaagcagca

SEQ ID NO: 173092 - DNA, 75 bp, synthetic construct
  source 1..75: mol_type = other DNA
ttcaaatttctggccggaccagaaaccgtgctggcactactggatgaccagcaatacataaaacgccgcgatcag

SEQ ID NO: 173093 - DNA, 75 bp, synthetic construct
  source 1..75: mol_type = other DNA
acatcctcgaatatgccagacagcagaagcgctttggtcagcattgcaaaattccgccaggagatatggttgaaa

SEQ ID NO: 173094 - DNA, 75 bp, synthetic construct
  source 1..75: mol_type = other DNA
gtgccagtagtaccggaagaaaaaccaatgcctaatcctcttagcatgtacgcggttgatgctgttgccgctatt

SEQ ID NO: 173095 - DNA, 75 bp, synthetic construct
  source 1..75: mol_type = other DNA
agtgcgtggcaatctgcgctacggcatggcgaaaagcatggtcgatcagttcgataagctggtggcgcttttagg

SEQ ID NO: 173096 - DNA, 75 bp, synthetic construct
  source 1..75: mol_type = other DNA
cgttctggaatcattacggggcacatgtaacccactggatgccgctaccggaaccgccgcaggaagttaaccgtg

SEQ ID NO: 173097 - DNA, 75 bp, synthetic construct
  source 1..75: mol_type = other DNA
gggaggagttccactctacgccacccctccagtgccagtagtaccggaagaaaaaccaatgcctaatcctcttag

SEQ ID NO: 173098 - DNA, 75 bp, synthetic construct
  source 1..75: mol_type = other DNA
gtactggaaaacggtcaggtgaaagcctttggcgcactggaagaagtctggggtagtagcgtgatgaatccgtgg

SEQ ID NO: 173099 - DNA, 75 bp, synthetic construct
  source 1..75: mol_type = other DNA
agcccgtgggccagggatgaactggcaatcagaccaggcctgtggctgtacgcgcaaattaaaagtgtgtcgata

SEQ ID NO: 173100 - DNA, 75 bp, synthetic construct
  source 1..75: mol_type = other DNA
caggcttccgatgtctcgctggttttacagcctccgcagcaaaccagcattcgtaacgtgttgcgcgcaaaagtg

SEQ ID NO: 173101 - DNA, 75 bp, synthetic construct
  source 1..75: mol_type = other DNA
atgggcgttgattgctttaagaccgactttggcgaacgtatcccaactgatgttcagtggtttgacggttccgat

SEQ ID NO: 173102 - DNA, 75 bp, synthetic construct
  source 1..75: mol_type = other DNA
ggttcggtgatctttactctaaaagcaacacgtactggtaacacgattactgtgactggtgcgggcgaggcgaag

SEQ ID NO: 173103 - DNA, 75 bp, synthetic construct
  source 1..75: mol_type = other DNA
aaaataccgctccggcgcatgtttacaaacgctggtgcgcgtttggtttgctttccagccatagccgtttacatg

SEQ ID NO: 173104 - DNA, 75 bp, synthetic construct
  source 1..75: mol_type = other DNA
atatgctaaggctaataaatacaggcaatcctgtgaaatgtatataaaagcatatgactcttctcaggaaattta

SEQ ID NO: 173105 - DNA, 75 bp, synthetic construct
  source 1..75: mol_type = other DNA
aacaactcgaacagtgtgcaaggcatcttgataagttaaataatcatatggtgagcaaatcatctactgaagaag

SEQ ID NO: 173106 - DNA, 75 bp, synthetic construct
  source 1..75: mol_type = other DNA
ttgagttattaattcttggagacggccccctcaagattgatttacaacgccagattataactttaggacttgaaa

SEQ ID NO: 173107 - DNA, 75 bp, synthetic construct
  source 1..75: mol_type = other DNA
cttgccagggcgattcgcaaaggtccggatatgcctactgttcagggtggcaactctccggtaactccggatggt

SEQ ID NO: 173108 - DNA, 75 bp, synthetic construct
  source 1..75: mol_type = other DNA
gatggtcgtgagtataacgctcgcaatgaattttctggtggagggggaggagttccactctacgccacccctcca

SEQ ID NO: 173109 - DNA, 75 bp, synthetic construct
  source 1..75: mol_type = other DNA
tgggatgatggcaccgaatatccggatccgcactcagttacgcactggcgtgaaatgccagcagcaccgaagcag

SEQ ID NO: 173110 - DNA, 75 bp, synthetic construct
  source 1..75: mol_type = other DNA
ggttccatagtttcaaaagaatttactgaacagtttacagctatagccggtataccagcagaagtagtaaaaact

SEQ ID NO: 173111 - DNA, 75 bp, synthetic construct
  source 1..75: mol_type = other DNA
acaaaaataatatgtggtagtatggctcatatctgtataaaaaaaacacataacaaggggattaaaaacacaaaa

SEQ ID NO: 173112 - DNA, 75 bp, synthetic construct
  source 1..75: mol_type = other DNA
atatagcgactggcgagattctaaataaatccaagccgatcgttatcggggatcacgtatgggttggtgctggct

SEQ ID NO: 173113 - DNA, 75 bp, synthetic construct
  source 1..75: mol_type = other DNA
gtgcgatggttgttattcgcgcgtcgccgaggggaaacaacccatatgtgtcgaatcctgcccactgcgtgcact

SEQ ID NO: 173114 - DNA, 75 bp, synthetic construct
  source 1..75: mol_type = other DNA
gctgccccgatggtggattcgttaattgcgcgcgtaggagtaatggctcgcggtaatgccattactttgcctgta

SEQ ID NO: 173115 - DNA, 75 bp, synthetic construct
  source 1..75: mol_type = other DNA
agcccggtcaggtgaggcgcttcaaaaggcctttacagataaagaagaattacttatacaacaggcatctaacct

SEQ ID NO: 173116 - DNA, 75 bp, synthetic construct
  source 1..75: mol_type = other DNA
gaaacgccagacgccgcccacactggagagcaaaattatcctcgtgcagggcagtatcccggagatgcagaagtc

SEQ ID NO: 173117 - DNA, 75 bp, synthetic construct
  source 1..75: mol_type = other DNA
gttgagccattgatccctaatggatttatggtttcacgaatacataagatgaatggtcagctaggttttccgcca

SEQ ID NO: 173118 - DNA, 75 bp, synthetic construct
  source 1..75: mol_type = other DNA
gatatggttgtttgccatggtgatccctgcatgccgaacttcatggtggaccctaaaactcttcaatgcacgggt

SEQ ID NO: 173119 - DNA, 75 bp, synthetic construct
  source 1..75: mol_type = other DNA
aacatgctcttaatactcaatctgttgaagatacttcgtcatcgacgcctgccgccccgatggtggattcgttaa

SEQ ID NO: 173120 - DNA, 75 bp, synthetic construct
  source 1..75: mol_type = other DNA
gggcaacagcattgtataagggcgataaaatagtgcttaacctggataggtcccgcattcctgcggagtgtatag

SEQ ID NO: 173121 - DNA, 75 bp, synthetic construct
  source 1..75: mol_type = other DNA
gagcgacagtgttgtacaagggcgataaaatagtgctaaacctagatagatctcgagtttcaactgagtggatag

SEQ ID NO: 173122 - DNA, 75 bp, synthetic construct
  source 1..75: mol_type = other DNA
gctggaaatatttctgcgctggccgatgcggaaaatatttctcgtaagattattacccgctgtatcaacacggct

SEQ ID NO: 173123 - DNA, 75 bp, synthetic construct
  source 1..75: mol_type = other DNA
catcccttcttttctactgactggtcagcagacacccgcgttcggtcgcagagtgtctggtgtcatagaaattgc

SEQ ID NO: 173124 - DNA, 75 bp, synthetic construct
  source 1..75: mol_type = other DNA
atgtggaaaatatttctcgtaagattattacccgctgtatcaacacagctaagctgcctaaatcagttgttgctc

SEQ ID NO: 173125 - DNA, 75 bp, synthetic construct
  source 1..75: mol_type = other DNA
tctttcaccgaacaatcaataaaagaaataacggaacctgatctcaaacccggcgatttgctgttctcctcaagc

SEQ ID NO: 173126 - DNA, 75 bp, synthetic construct
  source 1..75: mol_type = other DNA
gcctgcttctcccctgctttcttttcctttcggcctgtaccgtagatatcagccagccagactcatcagccacag

SEQ ID NO: 173127 - DNA, 75 bp, synthetic construct
  source 1..75: mol_type = other DNA
atggataaaccaaaggcgcactaccgcctgtttctcccctgctttcttttgctttcggcctgcaccgttgatatc

SEQ ID NO: 173128 - DNA, 75 bp, synthetic construct
  source 1..75: mol_type = other DNA
cagattgtttcccttaaaaaagcgatgaagcatagtgataagcttttcgtcttacgagtcccggatcttaccccg

SEQ ID NO: 173129 - DNA, 75 bp, synthetic construct
  source 1..75: mol_type = other DNA
tgccgaggcaaaaacatgggctgtcaaattccagcatcaaagctctttcaccgaacaatcaataaaagaaataac

SEQ ID NO: 173130 - DNA, 75 bp, synthetic construct
  source 1..75: mol_type = other DNA
caccgcgttcgccaataaaattaaagatagcggttataactattgtaagcgtcaacggagcaccgtattgacgct

SEQ ID NO: 173131 - DNA, 75 bp, synthetic construct
  source 1..75: mol_type = other DNA
cggaacggtgctggcatttgaagcgggcgtactggatgtgccgtttgcgccagccgcctgcaacgcgggcaaaat

SEQ ID NO: 173132 - DNA, 75 bp, synthetic construct
  source 1..75: mol_type = other DNA
gtggttaaccacggtgtcgcagcgtgccgccgtctgaccgaaaccctgcaaaaaccgttacagatccgccacggc

SEQ ID NO: 173133 - DNA, 75 bp, synthetic construct
  source 1..75: mol_type = other DNA
aaattcttccggtccgtgacaacaccggcgcgatacgcgtactggaagccggagccgttccattgccaaaagata

SEQ ID NO: 173134 - DNA, 75 bp, synthetic construct
  source 1..75: mol_type = other DNA
agttgagcgacggcactttatcgtggttagggaacgccttgttctggatgcctctaccagaaccgcctcgattaa

SEQ ID NO: 173135 - DNA, 75 bp, synthetic construct
  source 1..75: mol_type = other DNA
ttcaaaactggacgaacttatgctgacgagcattacaaaaaatcgcgcataacagtagttgatgatagcgatcct

SEQ ID NO: 173136 - DNA, 75 bp, synthetic construct
  source 1..75: mol_type = other DNA
aaaaccgctacagatccgccacggcacgccagatgcgcgtctgctggctgaaatctcgatgtccagcggctttac

SEQ ID NO: 173137 - DNA, 75 bp, synthetic construct
  source 1..75: mol_type = other DNA
ccgccgcacgagatgcaggtatgagtttagctaattggatgaaaaccttggggcgcaaagaactccagcggctgg

SEQ ID NO: 173138 - DNA, 75 bp, synthetic construct
  source 1..75: mol_type = other DNA
tactcggttataccgaacaaaaagtgaaatttcgtgcgttgtttctggagctgtttttccgccgtacggtgaatt

SEQ ID NO: 173139 - DNA, 75 bp, synthetic construct
  source 1..75: mol_type = other DNA
aggccagcagcgaacaggaagcacgccagcaatccccggctggctgcgtgatggtattcgccgcccgtattcgtc

SEQ ID NO: 173140 - DNA, 75 bp, synthetic construct
  source 1..75: mol_type = other DNA
aacataatcaggcgcgggcaaacgtgctaacactccgctcgcttattgacacctacgcctcaacccattccaaaa

SEQ ID NO: 173141 - DNA, 75 bp, synthetic construct
  source 1..75: mol_type = other DNA
agcaaatgttaagagaagatgccagctcccgtgaagattttgagtctgcagagacaatgcttgccaccactcacg

SEQ ID NO: 173142 - DNA, 75 bp, synthetic construct
  source 1..75: mol_type = other DNA
aaagactcttatggcaatctaaataaaatgtatacttatgatggcttacattttaatagtaatgggtatacggta

SEQ ID NO: 173143 - DNA, 75 bp, synthetic construct
  source 1..75: mol_type = other DNA
tgtgtctgatgatgagtatatttgttgttctcgaatgataaaaaagggtatgggtatctcatttaaagggtacta

SEQ ID NO: 173144 - DNA, 75 bp, synthetic construct
  source 1..75: mol_type = other DNA
tacagttgccgcggggcaggtattcaacgctccaggtggagccactggcatccggggtacgccgtctggaagact

SEQ ID NO: 173145 - DNA, 75 bp, synthetic construct
  source 1..75: mol_type = other DNA
cctgggtagctggatcacgcagcagtttgtgctctgggccagatgccttccgccagaaacccgggttttgccgat

SEQ ID NO: 173146 - DNA, 75 bp, synthetic construct
  source 1..75: mol_type = other DNA
ttgggttctataccgcgccgctttagttcagcgcgccccaactctttaagccagttggctaggcttatgccgtcg

SEQ ID NO: 173147 - DNA, 75 bp, synthetic construct
  source 1..75: mol_type = other DNA
attaccaggccctgcaacttcgttaatttgttgcaacaatgtgtcttcgaagcggatgtttttctttgtgctgcc

SEQ ID NO: 173148 - DNA, 75 bp, synthetic construct
  source 1..75: mol_type = other DNA
atggcacataaaacaaaggcgaccgcaaaagggtcgccagtgggaacaagggaaaacaaaagcatcaccaacaat

SEQ ID NO: 173149 - DNA, 75 bp, synthetic construct
  source 1..75: mol_type = other DNA
acttcaactgttcgacgcactgcctgaatcagagcaaaaagctcaattgtcagagatgcgtgccagagttgagaa

SEQ ID NO: 173150 - DNA, 75 bp, synthetic construct
  source 1..75: mol_type = other DNA
ccctggcccacgagcatctgcatatcgatctctctggctttaaaaataatctggactgctgccttgatcagtatg

SEQ ID NO: 173151 - DNA, 75 bp, synthetic construct
  source 1..75: mol_type = other DNA
agttactacccggacgaaaagcgcattgcgatgctccatgcgctacgtgaccgtgggttgctgaaccgcgtcatg

SEQ ID NO: 173152 - DNA, 75 bp, synthetic construct
  source 1..75: mol_type = other DNA
ttattgcagtcaccaaaatgaacgccagcccgctggagactttgctcgacagcatgaatgcccctgtcgccttta

SEQ ID NO: 173153 - DNA, 75 bp, synthetic construct
  source 1..75: mol_type = other DNA
catcacggtaaaccgtctgcccatagcagcctgtggcatgctatctggttgattatccatctgattgccgttatt

SEQ ID NO: 173154 - DNA, 75 bp, synthetic construct
  source 1..75: mol_type = other DNA
gctggagacattgctcgacagcatgaatgcccctgtcgcctttactggcttcctggtggctctgttgattctgtc

SEQ ID NO: 173155 - DNA, 75 bp, synthetic construct
  source 1..75: mol_type = other DNA
cccagtttcactcaatagcaccttagacttatcggaagatgaactggagatgttgcgactgtatcgcgcacttcc

SEQ ID NO: 173156 - DNA, 75 bp, synthetic construct
  source 1..75: mol_type = other DNA
aaatcgcaaatcctgcgcgacgaaatcaaaaccgtaatgagcagaccgcgcccgacagaaatgacagtggcctgt

SEQ ID NO: 173157 - DNA, 75 bp, synthetic construct
  source 1..75: mol_type = other DNA
cgtggcggatcaattttctctttcactgcgaacgctacatcggcagcttaagcagcaaacgggactgacgcctca

SEQ ID NO: 173158 - DNA, 75 bp, synthetic construct
  source 1..75: mol_type = other DNA
ggagttgatctttcgcgcgtcactgtcgggcactgcgatctgaaagacaacctcgacaatattttgaagatgatc

SEQ ID NO: 173159 - DNA, 75 bp, synthetic construct
  source 1..75: mol_type = other DNA
cgccgctggaagagaaggtgtttattgccgccgcgctggcacataaccagaccggacgcccgatctccacgcata

SEQ ID NO: 173160 - DNA, 75 bp, synthetic construct
  source 1..75: mol_type = other DNA
accaggacgcgtttttcccggaacatgtggcgacccgcagcgtgcaggaactggcgcaggagatggtcgatgaaa

SEQ ID NO: 173161 - DNA, 75 bp, synthetic construct
  source 1..75: mol_type = other DNA
atatgcagatgtcattgataaactggtgacaaagtgctggcaggaagaagcatatgctgagacacaattgaggag

SEQ ID NO: 173162 - DNA, 75 bp, synthetic construct
  source 1..75: mol_type = other DNA
acccggcttcatggcgcgcctgtttataagatttgtgggcgttgcaatggaaaccggtttagtcgtttaccaacg

SEQ ID NO: 173163 - DNA, 75 bp, synthetic construct
  source 1..75: mol_type = other DNA
agctggtaccagacctgacggattatcagtggtacaaaggatatgcagatgtcattgataaactggtgacaaagt

SEQ ID NO: 173164 - DNA, 75 bp, synthetic construct
  source 1..75: mol_type = other DNA
ccagtggcgatacgctgttccagaaacatgaaggctttaaagatgcttaccgcatcgcgttgggtaccacttatt

SEQ ID NO: 173165 - DNA, 75 bp, synthetic construct
  source 1..75: mol_type = other DNA
acgctggcacgacgttatgtccagaagctggttcccggtttaactgattatcagtggtacaaaggatatgcagat

SEQ ID NO: 173166 - DNA, 75 bp, synthetic construct
  source 1..75: mol_type = other DNA
gaagtcagcacagcgtgcagagggtgtaagggtaaaggtattgtcctggatgaaaaaaggacccggcttcatggc

SEQ ID NO: 173167 - DNA, 75 bp, synthetic construct
  source 1..75: mol_type = other DNA
aatgcttgtttttgacacatctaatttcaatggttttaaaagaaacagcaatgaggtcattaccattcttcaaaa

SEQ ID NO: 173168 - DNA, 75 bp, synthetic construct
  source 1..75: mol_type = other DNA
gaaaaaacgatggagttgaacagagataacttaagcgaattttttaatattgagcatgataagtttatttattgt

SEQ ID NO: 173169 - DNA, 75 bp, synthetic construct
  source 1..75: mol_type = other DNA
atgagttactaggggcgattgatattcttatcacagattattcaagtattgctttcgatttttttgtaatgaata

SEQ ID NO: 173170 - DNA, 75 bp, synthetic construct
  source 1..75: mol_type = other DNA
ggcggcctgtcttacccataaaaacctggcgcaacttcacattaagcaacctgaacagcctgtcactttactcgc

SEQ ID NO: 173171 - DNA, 75 bp, synthetic construct
  source 1..75: mol_type = other DNA
gctgattattccaggtctgcggcaagtaaggctcgctgtgagcattgtgcaggtactggatttcataatgtattg

SEQ ID NO: 173172 - DNA, 75 bp, synthetic construct
  source 1..75: mol_type = other DNA
gacatgaatatatatatgtcactcccaagaagtaaaaacgtattacctttgaagacagaagatgattataagact

SEQ ID NO: 173173 - DNA, 75 bp, synthetic construct
  source 1..75: mol_type = other DNA
ggggtacacaataaagacgattcagcatcctttgtttggtgacgaacctgttaaggttttcgctatccactgcga

SEQ ID NO: 173174 - DNA, 75 bp, synthetic construct
  source 1..75: mol_type = other DNA
atttaaaaggtgaatacttccacgccatacgcgcgggaaagaaggtggaggaataccggctttataatgactatt

SEQ ID NO: 173175 - DNA, 75 bp, synthetic construct
  source 1..75: mol_type = other DNA
atggcaagtaaagacctgcatttgaatctgaaaggggaatatttccacgccatatggactggaaagaaggtggag

SEQ ID NO: 173176 - DNA, 75 bp, synthetic construct
  source 1..75: mol_type = other DNA
ccattttatcatctgttgcacaggaaagggggccagctcccggacgagaaatatgacgccctgccgctgcgggca

SEQ ID NO: 173177 - DNA, 75 bp, synthetic construct
  source 1..75: mol_type = other DNA
gcgggcagacgaactgcagttgccgcggggcaggtgttcaacgctccgggtggagcccctggtatccgcggtacg

SEQ ID NO: 173178 - DNA, 75 bp, synthetic construct
  source 1..75: mol_type = other DNA
atcgtgggggccaacttctgaccattttcccgacggattgtaccgggtctcctgcataatgacactgtacctggc

SEQ ID NO: 173179 - DNA, 75 bp, synthetic construct
  source 1..75: mol_type = other DNA
atgatgaacatcgaagaactgcgtaaaattttttgtgaagatggcctctatgctgtgtgcgttgaaatggcagcg

SEQ ID NO: 173180 - DNA, 75 bp, synthetic construct
  source 1..75: mol_type = other DNA
agtctgctctcgcagtcgcagtcgcagtggcacttatctccacccaggcctggtcggcaggctttcagttaaacg

SEQ ID NO: 173181 - DNA, 75 bp, synthetic construct
  source 1..75: mol_type = other DNA
tcagagtgtgaagattaacgaaggcccataccaattcgagtccgaaggtaaagcctggctgttcggtactaactt

SEQ ID NO: 173182 - DNA, 75 bp, synthetic construct
  source 1..75: mol_type = other DNA
taccggctgaaccgcgtaaaaaacgggatatcagtaagttggttgcggagattcgggcgcaatgtttggagaaaa

SEQ ID NO: 173183 - DNA, 75 bp, synthetic construct
  source 1..75: mol_type = other DNA
gagcgatgacgcaccggcgacaggctcgggtggtttaacgattacggatgtgatggctgcgcaggggatggtgca

SEQ ID NO: 173184 - DNA, 75 bp, synthetic construct
  source 1..75: mol_type = other DNA
tcagtggtacaaaggatatgcagatgtcattgataaactggttacaaagtgctggcaggaagaagcatacgcgaa

SEQ ID NO: 173185 - DNA, 75 bp, synthetic construct
  source 1..75: mol_type = other DNA
tgaaaccggggatgacaaaaactgatgaagagtgtctggagctgctggaaaaggacatgaaatgggcctttgcgg

SEQ ID NO: 173186 - DNA, 75 bp, synthetic construct
  source 1..75: mol_type = other DNA
acgattgagtacgacccaagctttctcatgggctcttccgccagaggaatagacttatcgcgctattctgatggc

SEQ ID NO: 173187 - DNA, 75 bp, synthetic construct
  source 1..75: mol_type = other DNA
tcgctattatcttctcctgcatttatgcccaaagcacgaatgcaacagagacgattgagtacgacccaagctttc

SEQ ID NO: 173188 - DNA, 75 bp, synthetic construct
  source 1..75: mol_type = other DNA
attacgttttctggcgacagcttcagcgacagcgatacattggttctggtaaaagcccctggcgctgcaggcgca

SEQ ID NO: 173189 - DNA, 75 bp, synthetic construct
  source 1..75: mol_type = other DNA
aaactgacgaggggcgttctgccgtgctgaatattactgccgccaatggcaaatccattccgtttgctgcggagg

SEQ ID NO: 173190 - DNA, 75 bp, synthetic construct
  source 1..75: mol_type = other DNA
tgaccagtttctcgatctgacgatccctcaggcctatgttctgaaaagctatggcggctacgttgacccttcttt

SEQ ID NO: 173191 - DNA, 75 bp, synthetic construct
  source 1..75: mol_type = other DNA
tatcagcgccggtgaggtcaataaagaggaactccaggataaaccgaacctgctgcaaggtacctactattacgg

SEQ ID NO: 173192 - DNA, 75 bp, synthetic construct
  source 1..75: mol_type = other DNA
tgccctcaacgtggacgacctggatgaagatgtggagctgaaaagcaccagcaccgtcgcgctcccgcgccaggg

SEQ ID NO: 173193 - DNA, 75 bp, synthetic construct
  source 1..75: mol_type = other DNA
tgatgatggctacaacggaatcgtctcctatgggcgtatgaaaaaccagttcagcgtcagccttaaccagacctt

SEQ ID NO: 173194 - DNA, 75 bp, synthetic construct
  source 1..75: mol_type = other DNA
atcgacaaagcccgtaatgcgccgtaccgcgcaccgctcatcataacggtggtggcaaaatgcgaagaaaatcat

SEQ ID NO: 173195 - DNA, 75 bp, synthetic construct
  source 1..75: mol_type = other DNA
tgaagagcaccagtacggttgccgtaccacgccagggctcggttatctttgctggttttgaaaccaatcagggac

SEQ ID NO: 173196 - DNA, 75 bp, synthetic construct
  source 1..75: mol_type = other DNA
ggtggcgggctgacgtataccaatcacagctttagcgataccgatacgcttgtcctggtgaaagcccctggagcg

SEQ ID NO: 173197 - DNA, 75 bp, synthetic construct
  source 1..75: mol_type = other DNA
ggcgtgagtaccgatggcggctttgtgttacatcgccacgggcttacgttcagtaacgacagctttaccgattca

SEQ ID NO: 173198 - DNA, 75 bp, synthetic construct
  source 1..75: mol_type = other DNA
cataccatgaaaaccgaattgcactcgatattaacggtctcgaaaatgacgttgaactgaaaagtacaagtgcag

SEQ ID NO: 173199 - DNA, 75 bp, synthetic construct
  source 1..75: mol_type = other DNA
agctatgaatctccctggggaacacttgccagttcagtttccgccagcagcgataatagccgtcagatctcattt

SEQ ID NO: 173200 - DNA, 75 bp, synthetic construct
  source 1..75: mol_type = other DNA
gtgttggaagatgggacatcagtgctggtcaggtattaaaagacgatattcaaaatgagccaaatttgttccagg

SEQ ID NO: 173201 - DNA, 75 bp, synthetic construct
  source 1..75: mol_type = other DNA
aatctcaccctcccatttattgatgtcggcacccaaagcgccgcggcctgtttaactgcgaaaaacctggcgcaa

SEQ ID NO: 173202 - DNA, 75 bp, synthetic construct
  source 1..75: mol_type = other DNA
ctacatattcgtcagccggataacagcgtggtactggtcaagcgcgatagcgaagatggcgactgcctggatatg

SEQ ID NO: 173203 - DNA, 75 bp, synthetic construct
  source 1..75: mol_type = other DNA
ttacttggatttgcccctatatttccagacacctgttatcacttaacccattactggcttgctgccgtagatatt

SEQ ID NO: 173204 - DNA, 75 bp, synthetic construct
  source 1..75: mol_type = other DNA
gcaataatcagctcaacatcagcagcagtggctttagcgacgcaaatcgcatcagttacagcgtaaacaccggct

SEQ ID NO: 173205 - DNA, 75 bp, synthetic construct
  source 1..75: mol_type = other DNA
tgacatcagcccttccggatttggtagcgaactggttattaccattgaagaagcggatggttccaaacgttcctt

SEQ ID NO: 173206 - DNA, 75 bp, synthetic construct
  source 1..75: mol_type = other DNA
aaaaccgggtaggtctgaacattgaaacactggaaaacgatgttgaactgaaaagtaccagcgccaccaccgtac

SEQ ID NO: 173207 - DNA, 75 bp, synthetic construct
  source 1..75: mol_type = other DNA
tgtcattgatgatgtaagcccatcaggctacggcagcgatctcattgtcacaatcgaagagtctgatggcacaaa

SEQ ID NO: 173208 - DNA, 75 bp, synthetic construct
  source 1..75: mol_type = other DNA
gccgcatttaacggcggtataaatctgggggcatggcgacttcgcgcaaccggcaactacaactggatgaccaat

SEQ ID NO: 173209 - DNA, 75 bp, synthetic construct
  source 1..75: mol_type = other DNA
ctaccttgcccggcgtgtatgacgtcagtgtttatatcaatgatcaaccggttatcaaccaaagcatttccttta

SEQ ID NO: 173210 - DNA, 75 bp, synthetic construct
  source 1..75: mol_type = other DNA
cacggtagtgattggccgcgcacaaaacccgtggaaagagtgtaatacccggcggatggaagaagataatgtccg

SEQ ID NO: 173211 - DNA, 75 bp, synthetic construct
  source 1..75: mol_type = other DNA
aacaggagtgcgaagcgctgttggttgacttcccggaacaggaaaaagagctacgggagttgtcggcatggatag

SEQ ID NO: 173212 - DNA, 75 bp, synthetic construct
  source 1..75: mol_type = other DNA
atgtccacattacgcctgctcatctctgactcttacgacccgtggtttaacctggcggttgaggaatgtattttt

SEQ ID NO: 173213 - DNA, 75 bp, synthetic construct
  source 1..75: mol_type = other DNA
gagcgactacaggaagagattgacgccctcggcgatacacagccagaggggatgcacccagggcagcgtcttctc

SEQ ID NO: 173214 - DNA, 75 bp, synthetic construct
  source 1..75: mol_type = other DNA
ccgcgcgctacgccaatcaacgtattcaattcggtaagaatattggccagtttcagatgattcaactcaagttga

SEQ ID NO: 173215 - DNA, 75 bp, synthetic construct
  source 1..75: mol_type = other DNA
agcggaaatcatctccccggacaaaacgccagacttgccaaacttcgccgaaacctttgcccgccagagtagctg

SEQ ID NO: 173216 - DNA, 75 bp, synthetic construct
  source 1..75: mol_type = other DNA
ctgactcttacgacccgtggtttaacctggcggtggaggagtgtatttttcgccagatgcccgccacgcagcgcg

SEQ ID NO: 173217 - DNA, 75 bp, synthetic construct
  source 1..75: mol_type = other DNA
agcgggcgatattctggtcatcatcggcgttggcccttccggcaccgggatggaggaaacctaccaggtcaccag

SEQ ID NO: 173218 - DNA, 75 bp, synthetic construct
  source 1..75: mol_type = other DNA
agtgatgctgcatcttcgcagtctgggattgctgcatgaagacgtgatgaccgtcaccggcagcacgctgaaaga

SEQ ID NO: 173219 - DNA, 75 bp, synthetic construct
  source 1..75: mol_type = other DNA
gccagggatcacccatgaacaggtttgcgaggcgattcgtgaagcctttttcgcccattatggcgagcgtgtaga

SEQ ID NO: 173220 - DNA, 75 bp, synthetic construct
  source 1..75: mol_type = other DNA
tgcctgtaccgcgcggatatgctgcaacaggagtgcgaagcgctgttggttgacttcccggaccaggaaaaagag

SEQ ID NO: 173221 - DNA, 75 bp, synthetic construct
  source 1..75: mol_type = other DNA
ttctgtttctctggcgcaatgccgacacggtagtgattggtcgcgcgcagaacccgtggaaagagtgtaataccc

SEQ ID NO: 173222 - DNA, 75 bp, synthetic construct
  source 1..75: mol_type = other DNA
ccggattgatattaaaccgtcacgggaatatgccagcacaatcatgaacgctatctggactggcgagccgagtgt

SEQ ID NO: 173223 - DNA, 75 bp, synthetic construct
  source 1..75: mol_type = other DNA
accgtgtttaccatgccgcgatgatggacccacataccgctgccgtgctgggcattgatgaaatctatgctctta

SEQ ID NO: 173224 - DNA, 75 bp, synthetic construct
  source 1..75: mol_type = other DNA
gatccgcaacatgtcgagacggaagaacagttgtgggataaatttgtgctgatgcatcacgcggataaaatttaa

SEQ ID NO: 173225 - DNA, 75 bp, synthetic construct
  source 1..75: mol_type = other DNA
aagctcttatgcctgagattttttcttccgatgattccatccaggctgatttgcaaggtatttcgcagcaaacct

SEQ ID NO: 173226 - DNA, 75 bp, synthetic construct
  source 1..75: mol_type = other DNA
atcaaccatatggcgttctacctggagctggagcgcaaaaccgccgacggcagttacgtgaatctctacccggaa

SEQ ID NO: 173227 - DNA, 75 bp, synthetic construct
  source 1..75: mol_type = other DNA
accattccgcacctgtggcaaatttgcgaggacatgacggaagtctgccccgatgccaccatgctcaactacgtt

SEQ ID NO: 173228 - DNA, 75 bp, synthetic construct
  source 1..75: mol_type = other DNA
agtaatgtggctcgtttatttcgggcttatcctgatgaagatttcaatactgattttgtttgtcacaataaattt

SEQ ID NO: 173229 - DNA, 75 bp, synthetic construct
  source 1..75: mol_type = other DNA
caatatgaaaaaaaatgaggttaaggcgaaagctaaggctgccgggaaaagtacaaaacagcgcgcaaaaagcag

SEQ ID NO: 173230 - DNA, 75 bp, synthetic construct
  source 1..75: mol_type = other DNA
tgagatgatgaagaacggcgcgactgaacatttacgacttgcgatacagatggcgcaggaacgagcaattcagta

SEQ ID NO: 173231 - DNA, 75 bp, synthetic construct
  source 1..75: mol_type = other DNA
atacccatgttggccatgacggctcagggcgcttccgtcagggtgtctttgagttgcatggctgccgtattacct

SEQ ID NO: 173232 - DNA, 75 bp, synthetic construct
  source 1..75: mol_type = other DNA
ctgtatgctatacttgaagtaggtggtgctgaggtttccattaatgacgaagtgcagaaatgtattgagcacatt

SEQ ID NO: 173233 - DNA, 75 bp, synthetic construct
  source 1..75: mol_type = other DNA
ctacagatgttaccattaatgatgaagtacgaatgtgtattgagcaccttgtcaatgaaaaaaatattatcagaa

SEQ ID NO: 173234 - DNA, 75 bp, synthetic construct
  source 1..75: mol_type = other DNA
tggagtgacagaaaagcgttacctgcgctgctctggcagcaccgcatggatgaacccatcggtgtttacactgaa

SEQ ID NO: 173235 - DNA, 75 bp, synthetic construct
  source 1..75: mol_type = other DNA
gtcattcggattggcgtggaaagctggcctccgttaatgatggcgggcgttcgattcctggcagccggtatttta

SEQ ID NO: 173236 - DNA, 75 bp, synthetic construct
  source 1..75: mol_type = other DNA
atgcagacaaaacagcgtcttgatataccgctgaacctgaaatccgtcagtgattctggtgagtttgaaggttac

SEQ ID NO: 173237 - DNA, 75 bp, synthetic construct
  source 1..75: mol_type = other DNA
gcctggatgttagccattcagtactgcgactatccgttcgacaaccacaaagtgccgtttaaagagatgcgcact

SEQ ID NO: 173238 - DNA, 75 bp, synthetic construct
  source 1..75: mol_type = other DNA
tttacccaactggatgtctggatcccttcactgatgagtcacgtaccaggctggttgcaatggttaagttacttg

SEQ ID NO: 173239 - DNA, 75 bp, synthetic construct
  source 1..75: mol_type = other DNA
atacggcgctttatccctgcgtgatgctgaggatgtggatgccgcactgaatgcactgaaaaatcttaaatttta

SEQ ID NO: 173240 - DNA, 75 bp, synthetic construct
  source 1..75: mol_type = other DNA
acagggaacactaatgacaggcagctacaagcactgtttaattacgttttacaaacgggggatgcccagcggttc

SEQ ID NO: 173241 - DNA, 75 bp, synthetic construct
  source 1..75: mol_type = other DNA
tttcaatgtaatgccacgacgtcggatacctgtatgacgatggagcaggcaaatgaaaaagcgaagctgaaagag

SEQ ID NO: 173242 - DNA, 75 bp, synthetic construct
  source 1..75: mol_type = other DNA
tgccggtgtatcggcccgtggctgtagcgccagctgttcgaccagtgagtgtatcaacttttacatcgccggtga

SEQ ID NO: 173243 - DNA, 75 bp, synthetic construct
  source 1..75: mol_type = other DNA
ggctctgtttttggtgttaaggacagccacgatgatgtggtggtccccggtgcctttaccacaacactccagaaa

SEQ ID NO: 173244 - DNA, 75 bp, synthetic construct
  source 1..75: mol_type = other DNA
tataaagacgctaatggcaacaaacagcagatcaaccgtaccgacgtgaaagagatggtcgaactggatcggtaa

SEQ ID NO: 173245 - DNA, 75 bp, synthetic construct
  source 1..75: mol_type = other DNA
gagagaggtttagacagagagttagttctgacgctgacccgactttcgccagacgatcttatcgcgcaaagccac

SEQ ID NO: 173246 - DNA, 75 bp, synthetic construct
  source 1..75: mol_type = other DNA
aggctgggatcaacaccgttttcgcttctcgacaaagggtgagttattacctgactggggcctggaatgcgcaaa

SEQ ID NO: 173247 - DNA, 75 bp, synthetic construct
  source 1..75: mol_type = other DNA
cgtcatcgatcccagcgacgcgcgcaaaattaccacctccgaagggcaaagctacggcatgttctttgccctggc

SEQ ID NO: 173248 - DNA, 75 bp, synthetic construct
  source 1..75: mol_type = other DNA
agcaattcggcctccgatggtgatgtctggatggcctggtcgttgctggaggcggggcgtttgtggaaagagcag

SEQ ID NO: 173249 - DNA, 75 bp, synthetic construct
  source 1..75: mol_type = other DNA
ttatcgtcctcaccgtggtggcagtggtggctatcagcttcctcattgtctgggagctgaccgacgataacccga

SEQ ID NO: 173250 - DNA, 75 bp, synthetic construct
  source 1..75: mol_type = other DNA
aaggctgggatcaacaccgtttccgcttctcgacaaaaggtgagttattacctgactggggccaggaatgcgcaa

SEQ ID NO: 173251 - DNA, 75 bp, synthetic construct
  source 1..75: mol_type = other DNA
tagtgttcaggcagcctgtacctggcctgcctgggagcagttcaaaaaggattacatcagtcaggaagggcgcgt

SEQ ID NO: 173252 - DNA, 75 bp, synthetic construct
  source 1..75: mol_type = other DNA
gccgtggagcgccattaatctcatcgactactacttcatctcacaaggtaaaaccgatattccggcactttatac

SEQ ID NO: 173253 - DNA, 75 bp, synthetic construct
  source 1..75: mol_type = other DNA
cgtcgcgttggcggcaagcgcagactttttgaataatttcaaaaacttcgttctgctgctgttgacggtatttgt

SEQ ID NO: 173254 - DNA, 75 bp, synthetic construct
  source 1..75: mol_type = other DNA
acgcactgatgatgcaactgatacgccagtatggcaggacatgtcgccgttattttttccaggttatcaaccaga

SEQ ID NO: 173255 - DNA, 75 bp, synthetic construct
  source 1..75: mol_type = other DNA
atacgtttgaatgtatcggtaacgtaaacgtaatgcgttctgcacttgaagcggcacaccgtggctggggtcagt

SEQ ID NO: 173256 - DNA, 75 bp, synthetic construct
  source 1..75: mol_type = other DNA
tctttagatcaggcaattaaatcggcaatcgataatattgaaacagcaggtattggcgcagtggtggaatcggta

SEQ ID NO: 173257 - DNA, 75 bp, synthetic construct
  source 1..75: mol_type = other DNA
gcaaagacgaaaaagcacgggaagaactggtgcgtaacgcgcgcacattgagtacgtggaatcttgccctgcgta

SEQ ID NO: 173258 - DNA, 75 bp, synthetic construct
  source 1..75: mol_type = other DNA
agtcgatgcccgactgacgaaagaggcgcagagcgcgctgcgtccggtgatcaacctgacgggaaccgtgctgca

SEQ ID NO: 173259 - DNA, 75 bp, synthetic construct
  source 1..75: mol_type = other DNA
gccgcacattacggcgcggagtttgcggtacaggttatgccatgtctttcgcagattggcagtggttcgctgccg

SEQ ID NO: 173260 - DNA, 75 bp, synthetic construct
  source 1..75: mol_type = other DNA
tagccagtatggtttgccgaaagagccgatgccgcaggagttgattgccgctggcgtcagcctggtcagcttctc

SEQ ID NO: 173261 - DNA, 75 bp, synthetic construct
  source 1..75: mol_type = other DNA
gccaacacggcgacggctacacaacgaacgctgttgattggtcagatgctggcatcaggctctgcacaggaaaaa

SEQ ID NO: 173262 - DNA, 75 bp, synthetic construct
  source 1..75: mol_type = other DNA
cacaagccggaagaagctgcagcgatgcgtcgcgacggtttgatgttaacgttgcagaacaacccaccacagtag

SEQ ID NO: 173263 - DNA, 75 bp, synthetic construct
  source 1..75: mol_type = other DNA
tacgtttcatctggtgaagcgagtaaaaactttttctaagtctgcgactttaggaaaaacgaaagcaacggtgaa

SEQ ID NO: 173264 - DNA, 75 bp, synthetic construct
  source 1..75: mol_type = other DNA
tactaatcttggtcgggcattgcaggcggaagcggcggtggaagctgttgcgcaagttatgcgttcaccggtgac

SEQ ID NO: 173265 - DNA, 75 bp, synthetic construct
  source 1..75: mol_type = other DNA
cggtgattggacgtatctacgacgggcgattgtggctggatctacgctgccttgaagatgagcaacggtttatgg

SEQ ID NO: 173266 - DNA, 75 bp, synthetic construct
  source 1..75: mol_type = other DNA
ttctgctcattgttatctgctgtgtggctggcgttgtgaatgcactggcggtgcagcgtgaattacatgcacgca

SEQ ID NO: 173267 - DNA, 75 bp, synthetic construct
  source 1..75: mol_type = other DNA
taggcagtggctcgctggtggatcttagccagtatggtttgccgaaagagccgatgccgcaggagttgattgccg

SEQ ID NO: 173268 - DNA, 75 bp, synthetic construct
  source 1..75: mol_type = other DNA
ccgatgccgcaggagttgattgccgcgggcgtcagcctcgtgagcttctccggcgacaagctgttaggcgggcca

SEQ ID NO: 173269 - DNA, 75 bp, synthetic construct
  source 1..75: mol_type = other DNA
aagagatgatcgcccgcctgcaaagccacccgctgaagcgtgcattacgcgcggataaaatgaccctcgcggcgc

SEQ ID NO: 173270 - DNA, 75 bp, synthetic construct
  source 1..75: mol_type = other DNA
gtattaactacggaaacagcaccgtagaccgctggggttatggtgtgaccagcgccctttcgccataccatgaaa

SEQ ID NO: 173271 - DNA, 75 bp, synthetic construct
  source 1..75: mol_type = other DNA
ctgctcgaacagaatggccgtggtcgtgttctcgtcgttgacggcggtggttctgttcgtcgcgcactggtcgat

SEQ ID NO: 173272 - DNA, 75 bp, synthetic construct
  source 1..75: mol_type = other DNA
tccaggcgatggcggcaattccggtcggtgccgctggcgaaggcattggtgaaagcgatgtccgcgtcaactttg

SEQ ID NO: 173273 - DNA, 75 bp, synthetic construct
  source 1..75: mol_type = other DNA
cgggaaaaggctccagtctttgccggtagtgaaaatgtctttaccagtagtggcgtcaacgtttacgtcaccgtc

SEQ ID NO: 173274 - DNA, 75 bp, synthetic construct
  source 1..75: mol_type = other DNA
actgggcctccggacaaaacagtactaattactctattggttatagcaatagtgcgtcctggggcagttacagta

SEQ ID NO: 173275 - DNA, 75 bp, synthetic construct
  source 1..75: mol_type = other DNA
atggtaaaaatattccatttgcagcggatatttatgatgaacaaaacaatatcatcggcaacgtaggtcagggtg

SEQ ID NO: 173276 - DNA, 75 bp, synthetic construct
  source 1..75: mol_type = other DNA
aagaatatgaagaagttagacattaaattctatgttcagatcggtgatggtcagatcgtagaagcaacaggtttt

SEQ ID NO: 173277 - DNA, 75 bp, synthetic construct
  source 1..75: mol_type = other DNA
gatggctgatattgcctacgcttactatacagcggatcgcgggaaggaagcgaaagaacagattcttagtgaaca

SEQ ID NO: 173278 - DNA, 75 bp, synthetic construct
  source 1..75: mol_type = other DNA
agcggtatctcaaccttcacggtgtcggacgacgatacggtgacgcttgagaataccatcaccacgtaccagacc

SEQ ID NO: 173279 - DNA, 75 bp, synthetic construct
  source 1..75: mol_type = other DNA
cgatggcggtggttctgttcgtcgcgcactggtcgatgctgaactggcgcgtctggcagtacaaaatgaatggga

SEQ ID NO: 173280 - DNA, 75 bp, synthetic construct
  source 1..75: mol_type = other DNA
ttcttctccggcgaccatctttatgccgacaataccgggattattctttcagaagatccgctggatattgaatga

SEQ ID NO: 173281 - DNA, 75 bp, synthetic construct
  source 1..75: mol_type = other DNA
atgactactaaagctactcgcggtcgccctgcccgttttaatcgtgaacaactggcagcgattgtaaaagcatac

SEQ ID NO: 173282 - DNA, 75 bp, synthetic construct
  source 1..75: mol_type = other DNA
ttgaggagtgggcgagtatctggggtataacctttatttctaatcagattttcaacattattttcggctggatgg

SEQ ID NO: 173283 - DNA, 75 bp, synthetic construct
  source 1..75: mol_type = other DNA
tctttgcagttgctcactctcaatttaaaaatatgagtaaagaagaagtccatggaataattagaaatgatggtg

SEQ ID NO: 173284 - DNA, 75 bp, synthetic construct
  source 1..75: mol_type = other DNA
atgcgtacacgaattgattatctggcggataaatacagttttactgagctgaatgagtctccccgtcttcgccgg

SEQ ID NO: 173285 - DNA, 75 bp, synthetic construct
  source 1..75: mol_type = other DNA
gccttttcacgtttgtccggctatgacgattgcctctcagccacatctaactataaacagtttgagcagtggtat

SEQ ID NO: 173286 - DNA, 75 bp, synthetic construct
  source 1..75: mol_type = other DNA
tcgcattggaagttgcgttgggtgagaagcatccacagcttcaacgcttacagcgcagtattgcccggcagagac

SEQ ID NO: 173287 - DNA, 75 bp, synthetic construct
  source 1..75: mol_type = other DNA
atagacgaagccttagcagggtttgctactgaaatctggatcaggatccatcaggacggttctgccagtgtagag

SEQ ID NO: 173288 - DNA, 75 bp, synthetic construct
  source 1..75: mol_type = other DNA
accgtattcgtcgcgtggttgggaatgaaaacacatcattgccatatcagcaggttgcccgggaagtgaaagcgc

SEQ ID NO: 173289 - DNA, 75 bp, synthetic construct
  source 1..75: mol_type = other DNA
ctgagcgcatagaagacgctaagccaattaagttcatggcacaggacgtgatctggcaacagaaagaatacagac

SEQ ID NO: 173290 - DNA, 75 bp, synthetic construct
  source 1..75: mol_type = other DNA
caggctaaaggtactcacgaaacgcctgagcgcatagaagacgctaagccaattaagttcatggcacaggacgtg

SEQ ID NO: 173291 - DNA, 75 bp, synthetic construct
  source 1..75: mol_type = other DNA
gaaagcacatcatcgccatatcagcaggttgccagggaagtgaaagcgccccgtgaacggctgaagtatgcgctg

SEQ ID NO: 173292 - DNA, 75 bp, synthetic construct
  source 1..75: mol_type = other DNA
atacattccggtatcatctgtctcaccgtattcgtcgcgtggttgggaatgaaaacacatcattgccatatcagc

SEQ ID NO: 173293 - DNA, 75 bp, synthetic construct
  source 1..75: mol_type = other DNA
acactctccaggaaacccggggcggttcagaaggccagtctttccagtgtgccggatacataccggtatcatctg

SEQ ID NO: 173294 - DNA, 75 bp, synthetic construct
  source 1..75: mol_type = other DNA
aacttcagatatgtacttgaaatctgatgtaatagaagtaatcttacagaagaataaaataacagggtacgataa

SEQ ID NO: 173295 - DNA, 75 bp, synthetic construct
  source 1..75: mol_type = other DNA
ataagtatattgggaatagagaaatgttttttaaagattctaaaaataaatttattttacattattataatctat

SEQ ID NO: 173296 - DNA, 75 bp, synthetic construct
  source 1..75: mol_type = other DNA
ctgacgcgcggaaaggctgactgggctgacttcacccgctccacgctctccatgctgacacagatcctgctgaaa

SEQ ID NO: 173297 - DNA, 75 bp, synthetic construct
  source 1..75: mol_type = other DNA
ggttgctctaccgatcccactttcccctttaacctgccgcttgcacagtgggcaccaaactggttcaaaccgacc

SEQ ID NO: 173298 - DNA, 75 bp, synthetic construct
  source 1..75: mol_type = other DNA
tctcaagatgctaaaataaaatctgaactctcagttacagatgtaaataatacggtgagcactaagaaagataaa

SEQ ID NO: 173299 - DNA, 75 bp, synthetic construct
  source 1..75: mol_type = other DNA
taatgagaatattgcggtagttgatatcggttatgctgcatcaatgcaatctgcatatcaaaaaatacttaataa

SEQ ID NO: 173300 - DNA, 75 bp, synthetic construct
  source 1..75: mol_type = other DNA
cgaacctcgtccgctaactgaaagtgactggaaaatcgcccgccaggtcgggccgacgctgaaagaaaaagggct

SEQ ID NO: 173301 - DNA, 75 bp, synthetic construct
  source 1..75: mol_type = other DNA
ggcgatccaaacctcggcgtcattgccgaaaccttgaccgaacacggcactcgctactgcatggcacaaaattat

SEQ ID NO: 173302 - DNA, 75 bp, synthetic construct
  source 1..75: mol_type = other DNA
ccgctggccgatctcgatgtgatcctgatgcgtaaagacccgccgtttgataccgagtttatctacgcgacctat

SEQ ID NO: 173303 - DNA, 75 bp, synthetic construct
  source 1..75: mol_type = other DNA
ggatggacgtctgccgaataccaactatcgtaacaatagtcagggtgtatggttgggttataactccggaaacca

SEQ ID NO: 173304 - DNA, 75 bp, synthetic construct
  source 1..75: mol_type = other DNA
atctcgcatggacgaaataagctccttgaactgacaggaaaaagccatagtgaagaattatggagttcggttcgt

SEQ ID NO: 173305 - DNA, 75 bp, synthetic construct
  source 1..75: mol_type = other DNA
gattttattgatggttatgaggcagaacttcggcgcttaggactgattgactatgatgatatgccactcatcgct

SEQ ID NO: 173306 - DNA, 75 bp, synthetic construct
  source 1..75: mol_type = other DNA
atcaggaagaggcgatgaccatggcggggcgcatcgcgattatgaatcgcggtaaatttgttcagattggcgagc

SEQ ID NO: 173307 - DNA, 75 bp, synthetic construct
  source 1..75: mol_type = other DNA
gtgcatccactgaaagtcgatgtagatgcttcggtggtcgataacgtgccggtgcatgtggcgcttcgcccggaa

SEQ ID NO: 173308 - DNA, 75 bp, synthetic construct
  source 1..75: mol_type = other DNA
aaaatcatgctttgcgaggaacctcccgctgacggttttaactttgcggtaggtgaggtgatgcacattgcctat

SEQ ID NO: 173309 - DNA, 75 bp, synthetic construct
  source 1..75: mol_type = other DNA
ctgcgtgaagaatgggacatcagccagaaaaatgtgatgttcaacgataaacgctttggttgcgtgtacagcctg

SEQ ID NO: 173310 - DNA, 75 bp, synthetic construct
  source 1..75: mol_type = other DNA
tgtctttgaaggtgtactcaaagagcgtcaggaagatggtctggtgctttattcgccggggctggtgcatccact

SEQ ID NO: 173311 - DNA, 75 bp, synthetic construct
  source 1..75: mol_type = other DNA
cccaaaacttctgctgcttgatgaaccgatgggcgcgctggataaaaaactacgtgaccggatgcagcttgaagt

SEQ ID NO: 173312 - DNA, 75 bp, synthetic construct
  source 1..75: mol_type = other DNA
gaggcggggttgctggtgactgcactggacggcctgttctggtctggcagtcagcgtattgcggctgatgtcctg

SEQ ID NO: 173313 - DNA, 75 bp, synthetic construct
  source 1..75: mol_type = other DNA
tcaacgcctgaaattgctgagattgtcgataaattatatggaaccatcatcaccgctggaacgcataaagcatct

SEQ ID NO: 173314 - DNA, 75 bp, synthetic construct
  source 1..75: mol_type = other DNA
aagatttcggctactgcgaatcctgcggtgttgaaattggtattcgccgtctggaagcgcgcccgacagccgatc

SEQ ID NO: 173315 - DNA, 75 bp, synthetic construct
  source 1..75: mol_type = other DNA
gtgcatccactgaaagtcgatgcggatgcttcagtggttgataacgtgccggtgcatgtggcgcttcgcccggaa

SEQ ID NO: 173316 - DNA, 75 bp, synthetic construct
  source 1..75: mol_type = other DNA
gtgaatgacgctatccctcgcccccaggcgaaaacccgtaaggcgctgacgccgctattagaaatccgcaacctg

SEQ ID NO: 173317 - DNA, 75 bp, synthetic construct
  source 1..75: mol_type = other DNA
aaagggttaccgacctggggcgacgaagtgcgtttgtgctgggaagtggacagctgtgtggtgctgacggtttaa

SEQ ID NO: 173318 - DNA, 75 bp, synthetic construct
  source 1..75: mol_type = other DNA
tgccggatacataccggtatcatctgtctcatcgtattcgccggctgcttgggagtgaaaagacatcatcgccat

SEQ ID NO: 173319 - DNA, 75 bp, synthetic construct
  source 1..75: mol_type = other DNA
tgccggatacataccggtatcatctgtctcatcgtattcgccggttggttgggattgaaaagacatcatcgccat

SEQ ID NO: 173320 - DNA, 75 bp, synthetic construct
  source 1..75: mol_type = other DNA
tgccggatacataccggtatcatctgtctcatcgtattcgccggttgtttgggaatgaaaagacatcatcgccat

SEQ ID NO: 173321 - DNA, 75 bp, synthetic construct
  source 1..75: mol_type = other DNA
gcgtattgcggctgatgttctgaggctgagaaaggccggaatgccggtggtgaccacgaccgtggaggtgcacga

SEQ ID NO: 173322 - DNA, 75 bp, synthetic construct
  source 1..75: mol_type = other DNA
atgtgtacacgaattgactatctggcggataaatactgctttacagaacggaacgaatcgccccgtcttcgccgg

SEQ ID NO: 173323 - DNA, 75 bp, synthetic construct
  source 1..75: mol_type = other DNA
ccgtacaccacaactgattgccgcgctgcgtgaagaatgggacatcagccagaaaaatgtggtgttcaacgataa

SEQ ID NO: 173324 - DNA, 75 bp, synthetic construct
  source 1..75: mol_type = other DNA
cgacctccaacctttacctcggcagcggcttattcaacttgaaaaaagcatggcagaagaaagtcaaagtgggca

SEQ ID NO: 173325 - DNA, 75 bp, synthetic construct
  source 1..75: mol_type = other DNA
ttcagcatgcatttagggaaaaagattgggtttcgaattatgatagcctcttaactttgagggagttctttcgtt

SEQ ID NO: 173326 - DNA, 75 bp, synthetic construct
  source 1..75: mol_type = other DNA
aatctggcggtagatagtgatattaccgaagaggagatttgcgagaaatataaatctaccattgaggcgtttaaa

SEQ ID NO: 173327 - DNA, 75 bp, synthetic construct
  source 1..75: mol_type = other DNA
tgccggatacataccggtatcatctgtctcatcgtattcgccggatgattgggactgaaaagacatcatcgccat

SEQ ID NO: 173328 - DNA, 75 bp, synthetic construct
  source 1..75: mol_type = other DNA
tcagccagaaaaatgtggtgttcaacgataaacggtttggctgcgtgtacagcctgaaggccagtctttctggtg

SEQ ID NO: 173329 - DNA, 75 bp, synthetic construct
  source 1..75: mol_type = other DNA
cacccgtacagtcgataacccggaagagatcgcctctgcgctgcgatttattgaggatggtttactgctcattaa

SEQ ID NO: 173330 - DNA, 75 bp, synthetic construct
  source 1..75: mol_type = other DNA
ttggtgtggcggaagaaaaacagtcgatgtttggtagcagtaaagtgctgcgtgtctggctgccatacagcacga

SEQ ID NO: 173331 - DNA, 75 bp, synthetic construct
  source 1..75: mol_type = other DNA
cgatggcatggcgggcgctggcagcgaataaaatgcgtactttactgaccatgctggggattattatcggtattg

SEQ ID NO: 173332 - DNA, 75 bp, synthetic construct
  source 1..75: mol_type = other DNA
atgaatattctcggctgcctggataaggccaccagcggcacctatcgcgtagccggtaaggatgttgccacgctg

SEQ ID NO: 173333 - DNA, 75 bp, synthetic construct
  source 1..75: mol_type = other DNA
tggaagagcgcgtagattattatcctgcgcaactgtccggcggtcagcaacaacgcgtcagtattgcccgcgcat

SEQ ID NO: 173334 - DNA, 75 bp, synthetic construct
  source 1..75: mol_type = other DNA
ccagcgttatcatttgctttcacacctaaccgctgagcagaacgttgaagttcccgcagtgtatgctggtgttga

SEQ ID NO: 173335 - DNA, 75 bp, synthetic construct
  source 1..75: mol_type = other DNA
gttcctttgctcgaccgttactggcgttttatttggctggttgcctgcaagaaatgcggcgcgcctggatccagt

SEQ ID NO: 173336 - DNA, 75 bp, synthetic construct
  source 1..75: mol_type = other DNA
cgttcgaaattcgagtctaccgtcattaccgcattgttcatggtactcgtgttgcgctggcgttcttgctcacct

SEQ ID NO: 173337 - DNA, 75 bp, synthetic construct
  source 1..75: mol_type = other DNA
aagatccacaaaaactcaaaacgcccgcagatatcatgccactgtacctctggctgatgggcgatgacagccgcc

SEQ ID NO: 173338 - DNA, 75 bp, synthetic construct
  source 1..75: mol_type = other DNA
acacctccggttccaccggtgtccctaaaggggtggcgacggaacatgcagcgctgctaaaccgaattgtctgga

SEQ ID NO: 173339 - DNA, 75 bp, synthetic construct
  source 1..75: mol_type = other DNA
gttgcgccagaaacaatacgagtactatcgtgatttactgttcagtttcccaaaacctgaaactgtcagtaatta

SEQ ID NO: 173340 - DNA, 75 bp, synthetic construct
  source 1..75: mol_type = other DNA
gaaatcgttcggattctggataagtttactgcacttaccgctgagcttaccgctgagcttaatatgcgtaaaaaa

SEQ ID NO: 173341 - DNA, 75 bp, synthetic construct
  source 1..75: mol_type = other DNA
gcaatgttgtttaccggtatctggccacaacgggcgttcatccactggcgcattcaactggcgaaaagtctgacc

SEQ ID NO: 173342 - DNA, 75 bp, synthetic construct
  source 1..75: mol_type = other DNA
agaaagtgactgagctggaaacgctggtggcgcaggccaaagaagcggataaaggtggcatgaatttctcattca

SEQ ID NO: 173343 - DNA, 75 bp, synthetic construct
  source 1..75: mol_type = other DNA
gttgcaaaagcagaagctaaacctgaaacacctgcgcaaccggtggtcgatgaacaagcggttttcgacgaaaaa

SEQ ID NO: 173344 - DNA, 75 bp, synthetic construct
  source 1..75: mol_type = other DNA
agctggatggtcgaagactctttcccgagagcattacgcgagtacaacgaaatggtcgatgattataatcgcctg

SEQ ID NO: 173345 - DNA, 75 bp, synthetic construct
  source 1..75: mol_type = other DNA
cagcaagcaaaagcgcgcggattaacctcaactatcaccttcccggtgggcaatattgcgccagaaggttcggtg

SEQ ID NO: 173346 - DNA, 75 bp, synthetic construct
  source 1..75: mol_type = other DNA
acgaaagtcgcgatatctacaccgtcagaacccacgccgatggccctgacggagaactgccgcttacggcggaaa

SEQ ID NO: 173347 - DNA, 75 bp, synthetic construct
  source 1..75: mol_type = other DNA
tgggaaggtgaaaaaggcgggaaagcaagattgctcgcaggttccggtggccctgatatgaccgagctctggatg

SEQ ID NO: 173348 - DNA, 75 bp, synthetic construct
  source 1..75: mol_type = other DNA
aaaccgctaacaacgatatcagcctgcgcacctacctggagcgtaccggtaacggcgcacgcaaaagcaatggtc

SEQ ID NO: 173349 - DNA, 75 bp, synthetic construct
  source 1..75: mol_type = other DNA
gttcccacaaggttgcgtatacgatcttcaaggttggggtgaagttgcagcacctaatgtttttatctgctttcg

SEQ ID NO: 173350 - DNA, 75 bp, synthetic construct
  source 1..75: mol_type = other DNA
aatactggactttaaccgcttatattatcggtgatattcagcgttctattcctgatgaaaaaccctccgagccta

SEQ ID NO: 173351 - DNA, 75 bp, synthetic construct
  source 1..75: mol_type = other DNA
aaccgatgataacggtaacgatcaaacaatcgttttagatgggaattgtgtatttggtgaatgggaactaacaac

SEQ ID NO: 173352 - DNA, 75 bp, synthetic construct
  source 1..75: mol_type = other DNA
gccgtcgaagccgctattgcccgtgccaaagcacgcaagctggaacagcagcaggctaatgcggaggcacaagaa

SEQ ID NO: 173353 - DNA, 75 bp, synthetic construct
  source 1..75: mol_type = other DNA
aattttatatgcttgataagcagtttcatctgaccatttctgaagccagccataatagggtgttgttagatatgt

SEQ ID NO: 173354 - DNA, 75 bp, synthetic construct
  source 1..75: mol_type = other DNA
gcgggtggcgttgatggatgagtggtcggggtattgttttgcaaacatattaaccccactaagtgatgttactat

SEQ ID NO: 173355 - DNA, 75 bp, synthetic construct
  source 1..75: mol_type = other DNA
ttggcaaataaggcagaagctgcgtatcaacgtgggacgttatggcctaagcgggtggcgttaatggatgattgg

SEQ ID NO: 173356 - DNA, 75 bp, synthetic construct
  source 1..75: mol_type = other DNA
gagccggatccgtacttggatgaaacggtaaatatcgcgctcgatctggcgcgactggaaaaagccagacccgcg

SEQ ID NO: 173357 - DNA, 75 bp, synthetic construct
  source 1..75: mol_type = other DNA
gttaatgccagaggtaagaccgttccaaaacgcttgaacttgggtcttggcccctaccccgaagtctccttggca

SEQ ID NO: 173358 - DNA, 75 bp, synthetic construct
  source 1..75: mol_type = other DNA
cctcgaaccaatctggttaaccaaaaatgaaacagccagccgtgtgcgggggcgtatagaaacggtgatggatta

SEQ ID NO: 173359 - DNA, 75 bp, synthetic construct
  source 1..75: mol_type = other DNA
ataattatatttttctattattatacaatatgttgtcattattctttgtccggcaatgtattgctgttttgttta

SEQ ID NO: 173360 - DNA, 75 bp, synthetic construct
  source 1..75: mol_type = other DNA
tgagccggagttgttgaaggaacataatgcgcgtatcgcgaaggatcctgaattccagaatatcatgaaggatat

SEQ ID NO: 173361 - DNA, 75 bp, synthetic construct
  source 1..75: mol_type = other DNA
gctctctgaaccgcatctacgatcagatgttgcgcccagaatggcctgcgttaggctcagtacaatatacaatcc

SEQ ID NO: 173362 - DNA, 75 bp, synthetic construct
  source 1..75: mol_type = other DNA
ctctacatggccccatgtgaacagtgcgtttacatccgtttcgccatgttcgtgatggttattggaggattgatt

SEQ ID NO: 173363 - DNA, 75 bp, synthetic construct
  source 1..75: mol_type = other DNA
ggacgatctgccaaaagattacaaggagccagatccgtatctggatgaaacagtgaacatcgcgcttgatttggc

SEQ ID NO: 173364 - DNA, 75 bp, synthetic construct
  source 1..75: mol_type = other DNA
atgaacatgttttttaggcttaccgcgttagctagcctgcttgcaatagcaggccagaccttcgctgtagaagat

SEQ ID NO: 173365 - DNA, 75 bp, synthetic construct
  source 1..75: mol_type = other DNA
aatgcgcgtatcgcgaaagatccagagttccagaacatcatgaaggatatcgcgcgcttcaacgctatgaaggac

SEQ ID NO: 173366 - DNA, 75 bp, synthetic construct
  source 1..75: mol_type = other DNA
ttctgcaacttccggtgattaatgcagtgagtgctattcagcgtcagggcaatacactggtgattgaacgcacgc

SEQ ID NO: 173367 - DNA, 75 bp, synthetic construct
  source 1..75: mol_type = other DNA
gtgggttggtgactggaaatatgtaccgacaaaagaggattgcaacgacaggccgagctatgaaattcaggcgtt

SEQ ID NO: 173368 - DNA, 75 bp, synthetic construct
  source 1..75: mol_type = other DNA
gctgctgttgccttgttaaaagctttaccacgctttaagggtatcaattttgtattccctgccacccggaaggga

SEQ ID NO: 173369 - DNA, 75 bp, synthetic construct
  source 1..75: mol_type = other DNA
tgttgcaactccctgtgatcaatgcggtgagtgctattcagcgtcaggggaatacgctggtggttgaacgcactc

SEQ ID NO: 173370 - DNA, 75 bp, synthetic construct
  source 1..75: mol_type = other DNA
actctcgcttcccgccgtactttgcgtcacgtctgatatcaacgttccacgtatcccctccatgaaagccattct

SEQ ID NO: 173371 - DNA, 75 bp, synthetic construct
  source 1..75: mol_type = other DNA
cagtggcaggcaagtgatattgactggagccagagcgcgccacttgctgaactggtcggcattcgcgtaccgccg

SEQ ID NO: 173372 - DNA, 75 bp, synthetic construct
  source 1..75: mol_type = other DNA
caggactcgtcgtatcacgattaaaatccgaaggcatgtatgccgttggtggtgtggatggtttataccttcgca

SEQ ID NO: 173373 - DNA, 75 bp, synthetic construct
  source 1..75: mol_type = other DNA
tgaaaatccgccagtcgaaaccggagcatggaaagacgctgttgactgggtactcaaagaggcttgccaggctgt

SEQ ID NO: 173374 - DNA, 75 bp, synthetic construct
  source 1..75: mol_type = other DNA
aatgaaacagcaagccgccttcgcgggcgtattgaagccgttctcgactatgccaaagcaaaagaatattttgaa

SEQ ID NO: 173375 - DNA, 75 bp, synthetic construct
  source 1..75: mol_type = other DNA
acgtgaacgaagcggcgtttctcctcgtgcgcttgagtttgccatactgaccgcagcacgctcaggtgaaattcg

SEQ ID NO: 173376 - DNA, 75 bp, synthetic construct
  source 1..75: mol_type = other DNA
tcaccaaagtcgatcttctggcaatactggaacctatctggttaaccaagaatgaaaccgccagtcgtctacgtg

SEQ ID NO: 173377 - DNA, 75 bp, synthetic construct
  source 1..75: mol_type = other DNA
tctttgcgtggctatgggaacccgaatcaacaatctcggtagaacagttccaagacgtttgaatatggggcttgg

SEQ ID NO: 173378 - DNA, 75 bp, synthetic construct
  source 1..75: mol_type = other DNA
gcagttgttgcaggaggtatacggctacacggcaacctgggcagggctggcgtctgcgccggtagggattattcc

SEQ ID NO: 173379 - DNA, 75 bp, synthetic construct
  source 1..75: mol_type = other DNA
gcatttaaaaacaagttaatattagataatgcgatcccgtttattggcaaaagagccgtaaaaatacaggcagca

SEQ ID NO: 173380 - DNA, 75 bp, synthetic construct
  source 1..75: mol_type = other DNA
ttcgcgtcgagaggcttcagaatgccgatgaatcaaacctcctgaatgaccttggagatatgctagagcattgcg

SEQ ID NO: 173381 - DNA, 75 bp, synthetic construct
  source 1..75: mol_type = other DNA
ggccattatggatatggatgtaaacgcgatgatgaccgtgctcccccgcatctccagtccggcactgactgcaca

SEQ ID NO: 173382 - DNA, 75 bp, synthetic construct
  source 1..75: mol_type = other DNA
cttgccatcgggttattggccgaaacggcaccatgaccggatatgcaggcggagttcagcgaaaagagtggttat

SEQ ID NO: 173383 - DNA, 75 bp, synthetic construct
  source 1..75: mol_type = other DNA
ttgccaccccattgggtccactatgggtgatttgcgatgaacaattccgtctgcgggcggttgaatgggaagagt

SEQ ID NO: 173384 - DNA, 75 bp, synthetic construct
  source 1..75: mol_type = other DNA
tatgagcgtatttccgcaactaacccaggcggacttagcgataaactacgtgattactttgccggtaatcttagt

SEQ ID NO: 173385 - DNA, 75 bp, synthetic construct
  source 1..75: mol_type = other DNA
ccattcaactggatacccctatcaagcgcggtaaaacggaaatcaccgaaattgtgctgcgtaagccgcagtccg

SEQ ID NO: 173386 - DNA, 75 bp, synthetic construct
  source 1..75: mol_type = other DNA
gtgcgctgcgcggcacacgcctgcaggccattatggatatggatgtgaacgcgatgatgaccgtgatcccccgca

SEQ ID NO: 173387 - DNA, 75 bp, synthetic construct
  source 1..75: mol_type = other DNA
atgcgttacagcacgcgctgaagagcctggagatcggctgcaaagatttaaccccggcgatgcacaagattgccg

SEQ ID NO: 173388 - DNA, 75 bp, synthetic construct
  source 1..75: mol_type = other DNA
aagcgcgctggctgcggcaaaagcccaggccgaagcgaaagagctggaaggttatttgctgacgctggatatccc

SEQ ID NO: 173389 - DNA, 75 bp, synthetic construct
  source 1..75: mol_type = other DNA
caccatatgctgacccgcattgaaaccgctggtgtttccgggatcagcggggtgccgtgggatgcggtcgaactg

SEQ ID NO: 173390 - DNA, 75 bp, synthetic construct
  source 1..75: mol_type = other DNA
tcgcgtactacagcgaaaaacaaaaacagcacctctacagcatcagtgacgaacagctgcgtccgtacttcccgg

SEQ ID NO: 173391 - DNA, 75 bp, synthetic construct
  source 1..75: mol_type = other DNA
actgattgaactgtggcgcgaagccctcaaacaacacagcgatccggtactggcgtgggcatcgattatgaacga

SEQ ID NO: 173392 - DNA, 75 bp, synthetic construct
  source 1..75: mol_type = other DNA
ggcggtcgatccggcgtgggaatcacgcagcgactgggaaatctacaaaggtatcgccaaagcattttcgcaagt

SEQ ID NO: 173393 - DNA, 75 bp, synthetic construct
  source 1..75: mol_type = other DNA
gtttctttgttcaaccgttaccgggattttatttggctggctgcctgcgcgaaatgcggcaaaactggatccagt

SEQ ID NO: 173394 - DNA, 75 bp, synthetic construct
  source 1..75: mol_type = other DNA
tgaaactcgccggacggaagctgtggagcgatcaggacgtcacgaccgctgcagcgttgctgaaaagtgcagatg

SEQ ID NO: 173395 - DNA, 75 bp, synthetic construct
  source 1..75: mol_type = other DNA
gcgtatcaatctgcaaaaaagctggcagaactttatggacaacttcattacgattcgccgtcgtgatgacaccgc

SEQ ID NO: 173396 - DNA, 75 bp, synthetic construct
  source 1..75: mol_type = other DNA
cgtaccgctgttagcgccaaatcaggatatctatctgcgcgaaaatattcgctctcgcctgctggtcgcggcaca

SEQ ID NO: 173397 - DNA, 75 bp, synthetic construct
  source 1..75: mol_type = other DNA
tggctcctccggcaaaggccacgagtatatgcagaagtatctgctgggaaccgaaagtgggattcagggtcagga

SEQ ID NO: 173398 - DNA, 75 bp, synthetic construct
  source 1..75: mol_type = other DNA
gccgaatttaccgtccaggcactgaagtcaggcgaattacgcatggcctgcgaacagccggacaacggcagcaac

SEQ ID NO: 173399 - DNA, 75 bp, synthetic construct
  source 1..75: mol_type = other DNA
ggtgatttgcgatgagcaatttcgtctgcgggcggttgaatgggaagagtacagcgaacgcatggtgcagctgct

SEQ ID NO: 173400 - DNA, 75 bp, synthetic construct
  source 1..75: mol_type = other DNA
tggtgggcggcattggcgtcatgaatattatgctggtatcggtgacagagcggacgcgggaaattggtatccgca

SEQ ID NO: 173401 - DNA, 75 bp, synthetic construct
  source 1..75: mol_type = other DNA
gatgtttggcagtagtaaagtgctgcgcgtgtggttaccttacagcacgatgtccgggagagttatgggccagtc

SEQ ID NO: 173402 - DNA, 75 bp, synthetic construct
  source 1..75: mol_type = other DNA
cgacggcgaaattgtgcgcaatcctcccgccattgaaaaagtgaatgttgctggcgggacggaacctgttgtcaa

SEQ ID NO: 173403 - DNA, 75 bp, synthetic construct
  source 1..75: mol_type = other DNA
aatatggcaaacctttttcaggctatgaacgcattaaaagctcttgaatggttcccaaattcagtcagggatatc

SEQ ID NO: 173404 - DNA, 75 bp, synthetic construct
  source 1..75: mol_type = other DNA
tacgatggaaaaacaaattggcgcactggaaaaaatcgcccgccagcatccggataatccggttgggcaattctg

SEQ ID NO: 173405 - DNA, 75 bp, synthetic construct
  source 1..75: mol_type = other DNA
actaatgacggtattgctggtgacgcaaaatggttatggcgcgactcgtctgcgaattgtgaatcgttctgtcgg

SEQ ID NO: 173406 - DNA, 75 bp, synthetic construct
  source 1..75: mol_type = other DNA
tccatttgctgcagatatttatgatgagaaaggcaatgtcattggtaatgttggacagggtggacaagcatttgt

SEQ ID NO: 173407 - DNA, 75 bp, synthetic construct
  source 1..75: mol_type = other DNA
gtgcatggcgactgcgtgcctcaggcaactacaactggatgaccgattctggcagtaattatgattttaagaatc

SEQ ID NO: 173408 - DNA, 75 bp, synthetic construct
  source 1..75: mol_type = other DNA
gacagtcgaatgctgcctccggtattagccagttttgcgccaatcattcatggcgtagcgaataccaatgccaaa

SEQ ID NO: 173409 - DNA, 75 bp, synthetic construct
  source 1..75: mol_type = other DNA
atcgcctgccaacgcgttttacgatggaaaagcaaattggcgcactggaaaaaatcgcccgccaacacccggata

SEQ ID NO: 173410 - DNA, 75 bp, synthetic construct
  source 1..75: mol_type = other DNA
gcacataacactctgtataactcattgatcaggcgatgcaggaaccggcgtttaacagccattatctggcagata

SEQ ID NO: 173411 - DNA, 75 bp, synthetic construct
  source 1..75: mol_type = other DNA
gaaagcggctggcgacctgatgcggtctcgccggttggcgctcagggactggcgcagtttatgcccaccaccgct

SEQ ID NO: 173412 - DNA, 75 bp, synthetic construct
  source 1..75: mol_type = other DNA
taaacagcgccgaatgccgttactcccggcgctgaaaagctatctttccctgaaatcgccagcactgcgtaatgc

SEQ ID NO: 173413 - DNA, 75 bp, synthetic construct
  source 1..75: mol_type = other DNA
gctgtaccgtgaactggcagattattgcgaagccaaatacagcctgcttacccaacacaccgatcctgagaaagc

SEQ ID NO: 173414 - DNA, 75 bp, synthetic construct
  source 1..75: mol_type = other DNA
gtcgctgtttgccacctgcagcttgctaacacaactgctgctggaaaaagatatccccctgccatttctgctgac

SEQ ID NO: 173415 - DNA, 75 bp, synthetic construct
  source 1..75: mol_type = other DNA
attacgctcacaactaattattggcgaatcatataccactggtgaaacatttgattcggtcagtattcgcggtat

SEQ ID NO: 173416 - DNA, 75 bp, synthetic construct
  source 1..75: mol_type = other DNA
taggtcttggtctgaatacttcagttggtgcattttctttcgatgtgactcattccaatgttcgtatcccggatg

SEQ ID NO: 173417 - DNA, 75 bp, synthetic construct
  source 1..75: mol_type = other DNA
cgcctatcattcatggcgttgctaataccaacgccaaagtcactattacgcaaggtggctataagatttatgaaa

SEQ ID NO: 173418 - DNA, 75 bp, synthetic construct
  source 1..75: mol_type = other DNA
atgcgggcgatttgcgatgaaatggacattggtattgatatcgatttatggatggacgaagaacccgtgccgatg

SEQ ID NO: 173419 - DNA, 75 bp, synthetic construct
  source 1..75: mol_type = other DNA
cgttgcgccaacgttggcttcgactggacgacgttaggcccggtggtcgataaagtctacgaagagattgacgag

SEQ ID NO: 173420 - DNA, 75 bp, synthetic construct
  source 1..75: mol_type = other DNA
gttttacgcgcaaatggctcaggaagaagggcgctttgactttaatgatatttgcgctgcaatcagcgataaatt

SEQ ID NO: 173421 - DNA, 75 bp, synthetic construct
  source 1..75: mol_type = other DNA
cagattaccgataataactataccgctggtttgttaggtcttggtctgaatacttcagttggtgcattttctttc

SEQ ID NO: 173422 - DNA, 75 bp, synthetic construct
  source 1..75: mol_type = other DNA
tattggctacagtaacagtgcatcctggggcagctacagtgtcagtgcccagcgttcatggaatgaagacggcga

SEQ ID NO: 173423 - DNA, 75 bp, synthetic construct
  source 1..75: mol_type = other DNA
aattacttggcactgaacaacgtacttcaggtttccagagtattgatactcaaatgagcagtgactttaagggta

SEQ ID NO: 173424 - DNA, 75 bp, synthetic construct
  source 1..75: mol_type = other DNA
gagtcttatacaacgggcgaaacctttgattctgtcagtatccgcggcattcgtttatacagcgacagccgcatg

SEQ ID NO: 173425 - DNA, 75 bp, synthetic construct
  source 1..75: mol_type = other DNA
aactatgttgatccatcgttatgggaaaatggcattaatgcggccatgttgtcatacaacctcaacggatatcat

SEQ ID NO: 173426 - DNA, 75 bp, synthetic construct
  source 1..75: mol_type = other DNA
caatagtgcgtcctggggcagttacagtatcagtgctcaacgttcgttgaatgaagatggtcaaaccgacgatag

SEQ ID NO: 173427 - DNA, 75 bp, synthetic construct
  source 1..75: mol_type = other DNA
tggaagtcctgctgagtcgcctgaaaatggagcatctgagttatcatgttgaaagcctgctggaacaggcagcta

SEQ ID NO: 173428 - DNA, 75 bp, synthetic construct
  source 1..75: mol_type = other DNA
accgggagttcctgtgtatggcgctgcaacaggaatggaacggcagacatcagcgcggaatggaatcccggctga

SEQ ID NO: 173429 - DNA, 75 bp, synthetic construct
  source 1..75: mol_type = other DNA
gctaccgattaaaggaaaaacgcaaagcgggagtgctggcaaaaaaagccacgccaatcagtgatgatgaaatgg

SEQ ID NO: 173430 - DNA, 75 bp, synthetic construct
  source 1..75: mol_type = other DNA
cgacagaatatagagaaaatcgtgtcgctcttaacgcgaattcccttgcagataatgttgaactggatgaaaccg

SEQ ID NO: 173431 - DNA, 75 bp, synthetic construct
  source 1..75: mol_type = other DNA
ggttacagttctcttaattatcgtggagcttacggtaatacgaatgtcggttacagtcggagtggtgacagcagc

SEQ ID NO: 173432 - DNA, 75 bp, synthetic construct
  source 1..75: mol_type = other DNA
aatggagcatctgagttatcatgttgaaagcctgctggaacaggcagctaaaaaagaactgaactaccgggagtt

SEQ ID NO: 173433 - DNA, 75 bp, synthetic construct
  source 1..75: mol_type = other DNA
tccatctcctcgcaaaacgagcttcctaaatacctcacagacttgcataaccagctcgatattgtagaaattctc

SEQ ID NO: 173434 - DNA, 75 bp, synthetic construct
  source 1..75: mol_type = other DNA
actacagtttgttgctcatcgacaccgatcgttttaaacatatcaatgacttatacggtcatcagaaaggggatg

SEQ ID NO: 173435 - DNA, 75 bp, synthetic construct
  source 1..75: mol_type = other DNA
atgcagcacctggcaatcgctcaggactacagtttgttgctcatcgacaccgatcgttttaaacatatcaatgac

SEQ ID NO: 173436 - DNA, 75 bp, synthetic construct
  source 1..75: mol_type = other DNA
gcgcaggcggcggaaagcgatgtctctttgtttgtcctgccggaagccctgctggcacgagacgatcatgatccc

SEQ ID NO: 173437 - DNA, 75 bp, synthetic construct
  source 1..75: mol_type = other DNA
agcatcactggtcaacgttgcttgccgctcgtgcgctggataccacctgttatatggtggcggcgggggagtgcg

SEQ ID NO: 173438 - DNA, 75 bp, synthetic construct
  source 1..75: mol_type = other DNA
cggaagtgacgcccgaacgtgtgcgtcaggtgcgcctgcccgtcttaaacaaccgtcgctttgcgccgccgcaat

SEQ ID NO: 173439 - DNA, 75 bp, synthetic construct
  source 1..75: mol_type = other DNA
ggctcctggtgctgataatgtcaaaatagagaaccagaccggaattcataccgactggcgtggctatgccatatt

SEQ ID NO: 173440 - DNA, 75 bp, synthetic construct
  source 1..75: mol_type = other DNA
taatgcacaaatcggcgggaaagtattaatgacgttgaagtacggtaataagagcgttccattcggtgcaattgt

SEQ ID NO: 173441 - DNA, 75 bp, synthetic construct
  source 1..75: mol_type = other DNA
tgaccttcatgccgggatgcagtggatcccattggtaccagaacagaacaatattttgccttactccgctcgttt

SEQ ID NO: 173442 - DNA, 75 bp, synthetic construct
  source 1..75: mol_type = other DNA
taccggagacaccagtgagcagacactatttattgattattttaatctgttctacagtaagcgtggtcaggaaca

SEQ ID NO: 173443 - DNA, 75 bp, synthetic construct
  source 1..75: mol_type = other DNA
ggagagaataaaaatggcagcattgtcgcggaaaatggtcaggtttatctgactggacttccacagtcagggaaa

SEQ ID NO: 173444 - DNA, 75 bp, synthetic construct
  source 1..75: mol_type = other DNA
aacttattggggaacgagtaatgtcgatgagcaattccaggctggattaaatactgcgttcgaagatatcaactg

SEQ ID NO: 173445 - DNA, 75 bp, synthetic construct
  source 1..75: mol_type = other DNA
agtttctcctggtaccttactatggacaaacaggaaacaaggtttcagccggaaccgcccagtcagtcattggtg

SEQ ID NO: 173446 - DNA, 75 bp, synthetic construct
  source 1..75: mol_type = other DNA
ttcccttgcagataatgttgaactggatgaaaccgtggtcactgtcatcccaactcacggtgcctgctttatccg

SEQ ID NO: 173447 - DNA, 75 bp, synthetic construct
  source 1..75: mol_type = other DNA
ggcaatgataaaaactcaaactgtattgtcgattacaagcttcctgcagtctctcctggaaccttgctgaaccag

SEQ ID NO: 173448 - DNA, 75 bp, synthetic construct
  source 1..75: mol_type = other DNA
tcgcggaaaacggtcaggtttatctgactggacttccacagtcagggaaattacaggtttcatggggcaaagata

SEQ ID NO: 173449 - DNA, 75 bp, synthetic construct
  source 1..75: mol_type = other DNA
accgatatgctgccagaatttggcggtgactcctacaccaatgcagacaactttatgaccggtcgtgctaatggc

SEQ ID NO: 173450 - DNA, 75 bp, synthetic construct
  source 1..75: mol_type = other DNA
atgctgcctgaatttggcggtgactcttataccaatgcagacaactttatgactggtcgagccaatggcgtcgcg

SEQ ID NO: 173451 - DNA, 75 bp, synthetic construct
  source 1..75: mol_type = other DNA
accgtcgatatgaaaaagcgagcattatactgacgtcaaacaaagggttcgcagactggggagaaatgttcggag

SEQ ID NO: 173452 - DNA, 75 bp, synthetic construct
  source 1..75: mol_type = other DNA
ttatacgttaggaacacgagcagcaagagaaggctatggagaattcattatcgcagagctacttgatcactccac

SEQ ID NO: 173453 - DNA, 75 bp, synthetic construct
  source 1..75: mol_type = other DNA
aatgcggtaagaaccatacaaactgcaaaattcttctccggtaaagaacccgtcgttatggacagtttatcagac

SEQ ID NO: 173454 - DNA, 75 bp, synthetic construct
  source 1..75: mol_type = other DNA
ccggttaaaagagaaacgtaaagctggagtgctgaccaaaaacacaacgccaatcagtgatgatgaaatggtgaa

SEQ ID NO: 173455 - DNA, 75 bp, synthetic construct
  source 1..75: mol_type = other DNA
tattgataatggctaacaaagctattgacacccttcagcagatgtatgagcaggtttatccatccgaacctgctg

SEQ ID NO: 173456 - DNA, 75 bp, synthetic construct
  source 1..75: mol_type = other DNA
tgctacaggaaaaatgagttatcaaatgctcactgcaagtgatgcaaaaggcgagacattaacttggtttaatgc

SEQ ID NO: 173457 - DNA, 75 bp, synthetic construct
  source 1..75: mol_type = other DNA
ttatccggcacgtccgtttttgcctgttgatagcgacggcaacctgaccacccgcgcaaaacgggtggtgctggc

SEQ ID NO: 173458 - DNA, 75 bp, synthetic construct
  source 1..75: mol_type = other DNA
cgcgcgtgcgcaatctgctggcgcaaccagcagcagaggctaaacctgcacctgcacctgcaccgcaagctgata

SEQ ID NO: 173459 - DNA, 75 bp, synthetic construct
  source 1..75: mol_type = other DNA
tttctaatcaggtggataacctgcgcctggccgataatgacagcgacggctcgccgatggattctgatggtgaag

SEQ ID NO: 173460 - DNA, 75 bp, synthetic construct
  source 1..75: mol_type = other DNA
aaggtattaagttcgcaacaatcttcagtgaatatgatatttactccagcaatgcggtaagaaccatacaaactg

SEQ ID NO: 173461 - DNA, 75 bp, synthetic construct
  source 1..75: mol_type = other DNA
ttcggataagagcggaatcactattaccggtacagagaaagcacagcaggaaggtattaagttcgcaacaatctt

SEQ ID NO: 173462 - DNA, 75 bp, synthetic construct
  source 1..75: mol_type = other DNA
ccaaagcggaaggtccggcaaaaggccagccgatgctcaataccgcaattgatgcggcagagatgatcctgacgc

SEQ ID NO: 173463 - DNA, 75 bp, synthetic construct
  source 1..75: mol_type = other DNA
cagtcgctcggcaaattatcagcgcaaaaaacaaggtttttatgcgcgcttttttctgactaactctgcaccaat

SEQ ID NO: 173464 - DNA, 75 bp, synthetic construct
  source 1..75: mol_type = other DNA
cagcattaagctgtcggcttgttttgcgaaagctgacagaagcagaaccggtgattattttcgaaggtatcgaag

SEQ ID NO: 173465 - DNA, 75 bp, synthetic construct
  source 1..75: mol_type = other DNA
atgctcgggcgtcgcgtcatgcctatcatgcatgaaatttcgcatttacccggcggtcataaacctttgaatttt

SEQ ID NO: 173466 - DNA, 75 bp, synthetic construct
  source 1..75: mol_type = other DNA
gcaaacgtatgccggccccattgagatttatggtgacaggttaatgttatgcatcgtgcacgatattaccgaaca

SEQ ID NO: 173467 - DNA, 75 bp, synthetic construct
  source 1..75: mol_type = other DNA
caaagagatgagtggcgctggagaagtaattatctttgaagggatggaaacacccgcaactctggggctaaaagc

SEQ ID NO: 173468 - DNA, 75 bp, synthetic construct
  source 1..75: mol_type = other DNA
atttatggcgacaagctcatgttatgtattgtgcatgatattactgagcaaaaacggctggaggagcagctggaa

SEQ ID NO: 173469 - DNA, 75 bp, synthetic construct
  source 1..75: mol_type = other DNA
ttccagccgggcatcgatcgtaaggtcgtccgggaactggcaggtctggcgttcgtggagcgcagcgaaaacgtg

SEQ ID NO: 173470 - DNA, 75 bp, synthetic construct
  source 1..75: mol_type = other DNA
cctggaccgtctgctgcaccactcaacgacgctgaacataaaaggagaaagctaccggttgaaagagaaacgcaa

SEQ ID NO: 173471 - DNA, 75 bp, synthetic construct
  source 1..75: mol_type = other DNA
agcggacagcatcagtaacgaaagtatcttagcgggcatgaaaatggcaaataacggtcaaacatcgtggcgttg

SEQ ID NO: 173472 - DNA, 75 bp, synthetic construct
  source 1..75: mol_type = other DNA
tttttctgaccaactctgcaccgatgctgttaattgatccctcacgtgatggccaaatcgtcgatgctaatctgg

SEQ ID NO: 173473 - DNA, 75 bp, synthetic construct
  source 1..75: mol_type = other DNA
cctggatcgactgctccaccactcaaccacactgaacatcaaaggagaaagctaccggttaaaggaaaaacgcaa

SEQ ID NO: 173474 - DNA, 75 bp, synthetic construct
  source 1..75: mol_type = other DNA
tggcgtaaaagcggtggatgcgggacatcgggtactgtttatgccactggacagactgatcgcgacactggtgaa

SEQ ID NO: 173475 - DNA, 75 bp, synthetic construct
  source 1..75: mol_type = other DNA
gaactgcttgccaaagttcagagtggtgaattgtcctttactgccgcacaaaccatgtatgaggaaacgcgccgt

SEQ ID NO: 173476 - DNA, 75 bp, synthetic construct
  source 1..75: mol_type = other DNA
gcgagtgatcacccataccaatccggtacacgcactgctgtacctgattatttcgctgctggcgatctctggggt

SEQ ID NO: 173477 - DNA, 75 bp, synthetic construct
  source 1..75: mol_type = other DNA
aggtatcgacggtacgccaatcagtgctaaagcagtgggtattacgctgttcgggccttacgtactggcggtgga

SEQ ID NO: 173478 - DNA, 75 bp, synthetic construct
  source 1..75: mol_type = other DNA
atggtaattgcgagggcattcctgagtcagtaaaagatgccgatcctgacaccgtactgaaaatgtacacaacgc

SEQ ID NO: 173479 - DNA, 75 bp, synthetic construct
  source 1..75: mol_type = other DNA
gtgacagtcccggcggtgatgctggaaaaagtgatggcgctggcaggcagtgaaatgaagcgcctgtatgccgtc

SEQ ID NO: 173480 - DNA, 75 bp, synthetic construct
  source 1..75: mol_type = other DNA
atggttgaagatgcgatgaaaggtgatatcgatctggaaccgtttgtcacgcataccatgagcctggatgaaatt

SEQ ID NO: 173481 - DNA, 75 bp, synthetic construct
  source 1..75: mol_type = other DNA
gtatgcggtactgaaaatcgtgatgccgccgaaaccggatgaaaacactgccgcgctgtggcagcaactggcaga

SEQ ID NO: 173482 - DNA, 75 bp, synthetic construct
  source 1..75: mol_type = other DNA
agcaggaagccaggccgggcaacgattgcgtattaaaggcaaaggtctggtgagcaaaaaacaaactggtgactt

SEQ ID NO: 173483 - DNA, 75 bp, synthetic construct
  source 1..75: mol_type = other DNA
caaacaggtggcattgatggcaccaaccgaattactcgccgagcagcacgccaataacttccgcaactggtttgc

SEQ ID NO: 173484 - DNA, 75 bp, synthetic construct
  source 1..75: mol_type = other DNA
atggaattaaaggattactacgccatcatgggcgtgaaaccgacggacgatctcaagacaatcaagaccgcctat

SEQ ID NO: 173485 - DNA, 75 bp, synthetic construct
  source 1..75: mol_type = other DNA
ctgaaaggccaggggacgccgggcgaaaacggcggtccaaatggcgacctgtggctggtgattcatattgcgcca

SEQ ID NO: 173486 - DNA, 75 bp, synthetic construct
  source 1..75: mol_type = other DNA
acctggaagtcaggctgggcaacggttgcgcgttaaaggtaaaggtctggtgagcaaaaaacagacgggtgactt

SEQ ID NO: 173487 - DNA, 75 bp, synthetic construct
  source 1..75: mol_type = other DNA
ctcggcggtcacctcttccatcgaagaagaagtggaaaagctggtatggtccacgcgctggggagcggataccgt

SEQ ID NO: 173488 - DNA, 75 bp, synthetic construct
  source 1..75: mol_type = other DNA
atgttaagcaggggcttatcacctataagattgccgcccacgccgccgacctggcgaaagggcatccgggcgcgc

SEQ ID NO: 173489 - DNA, 75 bp, synthetic construct
  source 1..75: mol_type = other DNA
tgaaaccctgccgcaagagtccggcaaagtcgcccatttttgctccatgtgtgggccgaaattctgctcgatgaa

SEQ ID NO: 173490 - DNA, 75 bp, synthetic construct
  source 1..75: mol_type = other DNA
accgcgcgtttatcggcctcgaactggtacccggcacccgtcgtctggcgctaatgaactgcctgctgcacgata

SEQ ID NO: 173491 - DNA, 75 bp, synthetic construct
  source 1..75: mol_type = other DNA
ttattcatctgctgaaaccgcagccgcgtgaagtggtgcaggacccggcagcaggtacggcgggctttttgattg

SEQ ID NO: 173492 - DNA, 75 bp, synthetic construct
  source 1..75: mol_type = other DNA
gagaaggtgaacgggatcgctgaagatcttacctgggaagtcttccgcgacaccctgctggaacaagccgagcaa

SEQ ID NO: 173493 - DNA, 75 bp, synthetic construct
  source 1..75: mol_type = other DNA
acaaccaaattcccgttatcactaccgagttactggcacagctttatggcacggactcagataacatcaaaaaga

SEQ ID NO: 173494 - DNA, 75 bp, synthetic construct
  source 1..75: mol_type = other DNA
atggcgggctgtgtgggggagccgaaaggctcgccggtttccgtacccggttacgccaaccctgcacagttcgcc

SEQ ID NO: 173495 - DNA, 75 bp, synthetic construct
  source 1..75: mol_type = other DNA
atgaagcgcaaagtattgttaattccgttgattatcttcctggcgattgccgcggcgctgctgtggcagctggcg

SEQ ID NO: 173496 - DNA, 75 bp, synthetic construct
  source 1..75: mol_type = other DNA
atcttacctgggaagcgttccgcgacacgctgctggaacaggccgagcaaggtgtggattatttcacgattcatg

SEQ ID NO: 173497 - DNA, 75 bp, synthetic construct
  source 1..75: mol_type = other DNA
aggtgatgattgaaggcccaggccacgtgccgatgcagatgattcgccgcaatatgaccgaggagttagagcact

SEQ ID NO: 173498 - DNA, 75 bp, synthetic construct
  source 1..75: mol_type = other DNA
acatctgccggaaaatatcactgcggaatttgtccgtgatgaagttgctgccggacgtgcgattatcccggccaa

SEQ ID NO: 173499 - DNA, 75 bp, synthetic construct
  source 1..75: mol_type = other DNA
atgatgcgctgccctttctgccgcacggcggctcacgtccgcaccagccgctatatgtccgagagcgtcaaagag

SEQ ID NO: 173500 - DNA, 75 bp, synthetic construct
  source 1..75: mol_type = other DNA
atatcgatctggaaccgtttgtcacgcataccatgagcctggatgaaattaatgacgccttcgacctgatgcatg

SEQ ID NO: 173501 - DNA, 75 bp, synthetic construct
  source 1..75: mol_type = other DNA
gccgcaccggagaaacccgaccccgccccggtgacgccaccgccgccgcgtaaagtacagggctgctacagctcg

SEQ ID NO: 173502 - DNA, 75 bp, synthetic construct
  source 1..75: mol_type = other DNA
taattaagaaatccaatacgagcgtttttggtactatggatttacatggatttgatgaattcctgcctgttttat

SEQ ID NO: 173503 - DNA, 75 bp, synthetic construct
  source 1..75: mol_type = other DNA
tgatagtgatcctgctaaagatgtagtaggtgagccagaatcagggcacggtatctttttaggtcaaacaggtac

SEQ ID NO: 173504 - DNA, 75 bp, synthetic construct
  source 1..75: mol_type = other DNA
caatctcaatgattggggataacaagctaatggctacggttaaaatagcgggttatccatatgagctggctgatg

SEQ ID NO: 173505 - DNA, 75 bp, synthetic construct
  source 1..75: mol_type = other DNA
aggcatctggctggattgcccagcagatcaccaatcaggggctgattatttccgccaatgagatcttctggatgt

SEQ ID NO: 173506 - DNA, 75 bp, synthetic construct
  source 1..75: mol_type = other DNA
gggctggatcttttttatcaacgtgccaattggcatagcagtagtgttgatgacgctgcaaaccctgcgcggacg

SEQ ID NO: 173507 - DNA, 75 bp, synthetic construct
  source 1..75: mol_type = other DNA
tcattctgcaaacggttgttttatacactcattcggtgtatcttttcgccgccccaaactcttccattcaccatt

SEQ ID NO: 173508 - DNA, 75 bp, synthetic construct
  source 1..75: mol_type = other DNA
cgagtcggttgacggtgtgatacgtgccgcaccggagaaacccgaccccgccccggtgacgccaccgccgccgcg

SEQ ID NO: 173509 - DNA, 75 bp, synthetic construct
  source 1..75: mol_type = other DNA
gcagtgccacctatgaggccagccgcagcgaggaagccagccacgccgacctcgcctgggcgaccatgcacgccc

SEQ ID NO: 173510 - DNA, 75 bp, synthetic construct
  source 1..75: mol_type = other DNA
gtggtggctatctgcttcctgattgtctgggagctgaccgacgataacccgatagtcgatctgtcgttgtttaag

SEQ ID NO: 173511 - DNA, 75 bp, synthetic construct
  source 1..75: mol_type = other DNA
ttctggcgcgatgtccgctgtgaacgcatcggcggcggtactgacgaaataatgatttatgttgcgggccgacaa

SEQ ID NO: 173512 - DNA, 75 bp, synthetic construct
  source 1..75: mol_type = other DNA
aagaactactgctggccagtattcgcgatctgattacaaccaacttcccggaagaatattttcgtacctgcgatc

SEQ ID NO: 173513 - DNA, 75 bp, synthetic construct
  source 1..75: mol_type = other DNA
gtatctgtcactggagcccgcaacgacaagggtaaagaacgtatccagtctctgctggaagaaatctggcaggac

SEQ ID NO: 173514 - DNA, 75 bp, synthetic construct
  source 1..75: mol_type = other DNA
cgggccgccgtgtactggcctatggcgaagcaaagcgcggcaaatatggcgcagagatgatccacccggaatacc

SEQ ID NO: 173515 - DNA, 75 bp, synthetic construct
  source 1..75: mol_type = other DNA
tccgccagtgttactgtcgggcaaccatgccgagatacgttgctggcgtttgaaacagtcgctgggccgtacctg

SEQ ID NO: 173516 - DNA, 75 bp, synthetic construct
  source 1..75: mol_type = other DNA
gagcaagcaaggttgctggcgaagttcaaaacggaacacgcacaacagcaacataaacatgatgggatggcgtaa

SEQ ID NO: 173517 - DNA, 75 bp, synthetic construct
  source 1..75: mol_type = other DNA
tttatacgcgccagctaacttcaatggctattattgatgggcaggctaacaaaattagctcaaccaacaccgcaa

SEQ ID NO: 173518 - DNA, 75 bp, synthetic construct
  source 1..75: mol_type = other DNA
agggattacaattccgtgaactgtttagctggttatccagttcgctgcgttcggtttcccgctccacgccgggaa

SEQ ID NO: 173519 - DNA, 75 bp, synthetic construct
  source 1..75: mol_type = other DNA
attaacatcgatatcgatcattgacgggcaagcgaataaaatcaattccacaaatgccgcaattgatgaagaggg

SEQ ID NO: 173520 - DNA, 75 bp, synthetic construct
  source 1..75: mol_type = other DNA
cacactacccggaaatctggctgcgtatagaccagggcagcgccccgtctgtatctgtcacaggagcccgcaacg

SEQ ID NO: 173521 - DNA, 75 bp, synthetic construct
  source 1..75: mol_type = other DNA
cggctgagattcttcttgcggtattgttcttttataaagatttaatgaaattaaatccgcgtaagaaagggcgct

SEQ ID NO: 173522 - DNA, 75 bp, synthetic construct
  source 1..75: mol_type = other DNA
gaaggggcgttatgcctgggcggttgatagtcctgaaaacgtatttgatccgctctctatggataaagtagcgtt

SEQ ID NO: 173523 - DNA, 75 bp, synthetic construct
  source 1..75: mol_type = other DNA
gcgccaccggcgacgatgcgcgtgaagggctgattgcggttgtgtctgtgaaagtaccagacccgaaattctcct

SEQ ID NO: 173524 - DNA, 75 bp, synthetic construct
  source 1..75: mol_type = other DNA
aaattcattgaagcatatgaagcagaacttaggcgttctgacttgattgactttgatgatatgcctcttatcgca

SEQ ID NO: 173525 - DNA, 75 bp, synthetic construct
  source 1..75: mol_type = other DNA
cgacgctgaaagtgcagggcgttgatttgcaagattacgctaaccgattaattgaacgctatagcaacccggcgc

SEQ ID NO: 173526 - DNA, 75 bp, synthetic construct
  source 1..75: mol_type = other DNA
cgtgacggcggtactcacctggcaggtttccgtgcggcgatgacccgtactctgaacgcctacatggacaaagaa

SEQ ID NO: 173527 - DNA, 75 bp, synthetic construct
  source 1..75: mol_type = other DNA
gctggaaaacccaaccgacgcgaaaatcgtggtcggcaaaattatcgatgctgcccgtgcccgtgaagctgcgcg

SEQ ID NO: 173528 - DNA, 75 bp, synthetic construct
  source 1..75: mol_type = other DNA
cgtgacggcggtactcacctggcaggtttccgtgcggcgatgacccgcaccctgaacgcctacatggacaaagaa

SEQ ID NO: 173529 - DNA, 75 bp, synthetic construct
  source 1..75: mol_type = other DNA
agagtatcaacgccctgaccatgatgctggacaccattgatttactggcagaactggcgcagcaatgcgcgaacc

SEQ ID NO: 173530 - DNA, 75 bp, synthetic construct
  source 1..75: mol_type = other DNA
gcgggaagaagtatccctgagggtgactcaggcgggtgactgggtaaggcagaccgatcagaccatcagcgaaac

SEQ ID NO: 173531 - DNA, 75 bp, synthetic construct
  source 1..75: mol_type = other DNA
caaagatggccagagtcgtggcgcattcagagccggtaaaaagcggtaactttgccgatcccttccgtccacgtt

SEQ ID NO: 173532 - DNA, 75 bp, synthetic construct
  source 1..75: mol_type = other DNA
taaaatgcggatgataccagtacgtctgagctcgcggggtaaggctctgcttgtcaaaaagcgaaccaccaaacc

SEQ ID NO: 173533 - DNA, 75 bp, synthetic construct
  source 1..75: mol_type = other DNA
atgtcacatgctatcttgcccggtgctgcatttggcttcttactctacggattagatatattaccgatgactatt

SEQ ID NO: 173534 - DNA, 75 bp, synthetic construct
  source 1..75: mol_type = other DNA
cgcgaggttgccagctggctggaagaaaacagcgggatcacggtcagtgtgcctgatgcagagtacagcgatacc

SEQ ID NO: 173535 - DNA, 75 bp, synthetic construct
  source 1..75: mol_type = other DNA
ggacttaacagccgtgagccgtttaatccggcatgggccatccgggcgctggtcagctatgaccgctggctgtgg

SEQ ID NO: 173536 - DNA, 75 bp, synthetic construct
  source 1..75: mol_type = other DNA
gtagcagagctcgggctgttctcctcaatgatgggggctggtggtctccttggcattgccattcatgcgtcggtc

SEQ ID NO: 173537 - DNA, 75 bp, synthetic construct
  source 1..75: mol_type = other DNA
aaccccttctattgtgagctgacggcccactactgggtgtggaagaatgaatctctggctgactatgtgggattc

SEQ ID NO: 173538 - DNA, 75 bp, synthetic construct
  source 1..75: mol_type = other DNA
ccagttgatgccggggcttaacagccgtgagccgtttaatcctgcatgggctatccgggcgctggtcagctatga

SEQ ID NO: 173539 - DNA, 75 bp, synthetic construct
  source 1..75: mol_type = other DNA
ctgccagctggcgggagaaccgtcattatccgcaacgcatcctgcgtgagctggcaccgcgatatctcacatggg

SEQ ID NO: 173540 - DNA, 75 bp, synthetic construct
  source 1..75: mol_type = other DNA
ggcggtctgggctgggtacagcgggacaaacggctggcctcacagaaagggctggacagtgcccgctggtttggc

SEQ ID NO: 173541 - DNA, 75 bp, synthetic construct
  source 1..75: mol_type = other DNA
tcttctatcgtcagatgccggaaatcgttgaacgcggtcacgtctacatcgctcagccgccgctgtacaaagtga

SEQ ID NO: 173542 - DNA, 75 bp, synthetic construct
  source 1..75: mol_type = other DNA
tgtcggagtacaatgcggcgcagaaaatgatcgttcgcatggaacgtcgctatccgaaagcaatgctgaaagagc

SEQ ID NO: 173543 - DNA, 75 bp, synthetic construct
  source 1..75: mol_type = other DNA
gcctgccgggcaaactggcagactgccaggaacgcgatccggcgctttccgaactgtacctggtggaaggggact

SEQ ID NO: 173544 - DNA, 75 bp, synthetic construct
  source 1..75: mol_type = other DNA
atggatatcaagaagaatataataattgtttttgctacaactttattgggtgggtgtggtagtattggaaatata

SEQ ID NO: 173545 - DNA, 75 bp, synthetic construct
  source 1..75: mol_type = other DNA
ttgtattcataaaggggggaagatggtacaggagggacggtggtgtaaggtaaatggcgagccattattctatgt

SEQ ID NO: 173546 - DNA, 75 bp, synthetic construct
  source 1..75: mol_type = other DNA
ccgccgtaaaggtgcgctggatttagctggcctgccgggcaaactggcagactgccaggaacgcgatccggcgct

SEQ ID NO: 173547 - DNA, 75 bp, synthetic construct
  source 1..75: mol_type = other DNA
tttacgtattcgataaatggcaggcggagtcattgagcacaaatattgaacacattcctggagtactggagaatg

SEQ ID NO: 173548 - DNA, 75 bp, synthetic construct
  source 1..75: mol_type = other DNA
atgattaattctacacctatttataacaagtttaagtacgtatctgctgagtgtggctcaggtaaaacaacagct

SEQ ID NO: 173549 - DNA, 75 bp, synthetic construct
  source 1..75: mol_type = other DNA
gaaaagtttgatggtgggtggcgtccatcaattcacatgccgcgatgggcatcacgcattctgttggaaattacc

SEQ ID NO: 173550 - DNA, 75 bp, synthetic construct
  source 1..75: mol_type = other DNA
taatctgattgtttttgccctggcaatgttgctcccagtaacaacggttttcatttttatgttacttggcggcaa

SEQ ID NO: 173551 - DNA, 75 bp, synthetic construct
  source 1..75: mol_type = other DNA
taatctaatcgttttcatcctggcaatgttgctcccagtaacaactgttttcatttttatgttactgggcggtaa

SEQ ID NO: 173552 - DNA, 75 bp, synthetic construct
  source 1..75: mol_type = other DNA
ctttatgggagcaaattttgaaaactcattaatttataaggcaggatcagaattttttgaacaaaccagtctgaa

SEQ ID NO: 173553 - DNA, 75 bp, synthetic construct
  source 1..75: mol_type = other DNA
gtattattcgcaacgagaacaatgaaatctttataacccgtcgcgccgcagatgcgcacatggcgaataaactgg

SEQ ID NO: 173554 - DNA, 75 bp, synthetic construct
  source 1..75: mol_type = other DNA
atgattaccgcaacaagatcctcagcggtgaaatctttttcagtggtgatactgagaccattggatatgagcttg

SEQ ID NO: 173555 - DNA, 75 bp, synthetic construct
  source 1..75: mol_type = other DNA
cggtattttttacgctcagggcgtgaagaccaacgtgctgttctttaccaaagggacggtggcgaacccgaatca

SEQ ID NO: 173556 - DNA, 75 bp, synthetic construct
  source 1..75: mol_type = other DNA
gtaactcctggacagaacaaacgcaccgggttccggtcgaggtttgtaataaaccagtatcagaaaagtggacgc

SEQ ID NO: 173557 - DNA, 75 bp, synthetic construct
  source 1..75: mol_type = other DNA
ccatatggtcaaccgggcgatcgtatttgggttcgcgaaacctaccgggtacatggcaaagcgacggacgtcgca

SEQ ID NO: 173558 - DNA, 75 bp, synthetic construct
  source 1..75: mol_type = other DNA
cccggtgagtggatggcgctggccagcctcaatgcagaagattttccgccagccaatgaaccggtaattgcgaag

SEQ ID NO: 173559 - DNA, 75 bp, synthetic construct
  source 1..75: mol_type = other DNA
tcaccccaacacaggggccagcgggcaggctgcgcagttcagcgcaacggccactaaaaccggtacattgaaaag

SEQ ID NO: 173560 - DNA, 75 bp, synthetic construct
  source 1..75: mol_type = other DNA
ttctttccagcatccaacgttgcgccagattactgactggataagtgagcaaagcgggctgaccgtcacaacgcc

SEQ ID NO: 173561 - DNA, 75 bp, synthetic construct
  source 1..75: mol_type = other DNA
ggttatgatggtctggtcctgcgctggtttaccgggtacgtcgaacggtcacagcctgctgataatggaacatgc

SEQ ID NO: 173562 - DNA, 75 bp, synthetic construct
  source 1..75: mol_type = other DNA
agaccgatcagaccatcagcgaaacatcgatggcgcggacgatcaaagccgatacggaacagcgcgagctggtca

SEQ ID NO: 173563 - DNA, 75 bp, synthetic construct
  source 1..75: mol_type = other DNA
gggcagggcgttcagtatccaggattacatctggtaccagttgcctgatggttcgctttacgtcggcggtgcaga

SEQ ID NO: 173564 - DNA, 75 bp, synthetic construct
  source 1..75: mol_type = other DNA
atgatgaaaccagtaaaacgcctttacctttcaacggatgaagttcacctggtggatgccagcctggtactggag

SEQ ID NO: 173565 - DNA, 75 bp, synthetic construct
  source 1..75: mol_type = other DNA
caccgtatcctgttgtctgatatccgcgaatacctgctcgaacagggtcatctgaattacgcaaccgtcgcagcc

SEQ ID NO: 173566 - DNA, 75 bp, synthetic construct
  source 1..75: mol_type = other DNA
cgtccggtggacgtaaaaatgtgccgttccagcaatacatcaacgccgggtatttcacggtgaaagaagtggtgc

SEQ ID NO: 173567 - DNA, 75 bp, synthetic construct
  source 1..75: mol_type = other DNA
gtacatcaacgccgggtatttcacggtgaaagaagtggtgctggatgatgaaaatggctaccagatacggctgac

SEQ ID NO: 173568 - DNA, 75 bp, synthetic construct
  source 1..75: mol_type = other DNA
gcctgatgcacagtacagcgatacccccatcccacattttacccataacggtaccggctatcagttgctgaacaa

SEQ ID NO: 173569 - DNA, 75 bp, synthetic construct
  source 1..75: mol_type = other DNA
gccaccctgttggccggtgccatccagcaggtcagcgccggggattttagccaggccgtgaagggcaacagactg

SEQ ID NO: 173570 - DNA, 75 bp, synthetic construct
  source 1..75: mol_type = other DNA
atgttcatttcagcaccccactttgcgcaaggtagccagctggctggaggaaaacagcggaattgctgtcagtgt

SEQ ID NO: 173571 - DNA, 75 bp, synthetic construct
  source 1..75: mol_type = other DNA
ggtattgcgatcggcatcccggtgctgtggtttgttccgtcgctggaaggacaactggtactactggtcattaca

SEQ ID NO: 173572 - DNA, 75 bp, synthetic construct
  source 1..75: mol_type = other DNA
ctggcaaaagccgaagggtacgaagacataaggatctctggccttcggcttgatatggataacgactttaaaacg

SEQ ID NO: 173573 - DNA, 75 bp, synthetic construct
  source 1..75: mol_type = other DNA
ctcaacctgaaattgccatcgttgatggtcaggctgttacatcttctttggctgttgctgacttcttctctaaac

SEQ ID NO: 173574 - DNA, 75 bp, synthetic construct
  source 1..75: mol_type = other DNA
agacaaagttgttacttcttctctggctgttgctagttatttcggcaaacaacacaaaaatgtcattcaaaaaat

SEQ ID NO: 173575 - DNA, 75 bp, synthetic construct
  source 1..75: mol_type = other DNA
cgcgcgcaagaactttctctcgcctgcctgctgacttcacttgtcgttacgctgctcaaggttttgctgattttt

SEQ ID NO: 173576 - DNA, 75 bp, synthetic construct
  source 1..75: mol_type = other DNA
cggctatctcgattacactgaagtgaaacgcggcagctcggtctacttcgtcatccactatagacggccgaagtt

SEQ ID NO: 173577 - DNA, 75 bp, synthetic construct
  source 1..75: mol_type = other DNA
attacccagaatgcgacagtcaggaaggcgatggagcagctgcgagagatcggctatctcgattacactgaagtg

SEQ ID NO: 173578 - DNA, 75 bp, synthetic construct
  source 1..75: mol_type = other DNA
ccctcaatccggcctatgaccttgtcggtttctgcccggaaattgaacgcggcgaagtgaacctggtgaaaacca

SEQ ID NO: 173579 - DNA, 75 bp, synthetic construct
  source 1..75: mol_type = other DNA
gttggcgcaggggattctatggttggtggcctgatttatggcttgctgatgcgtgaatccagtgaacacacactg

SEQ ID NO: 173580 - DNA, 75 bp, synthetic construct
  source 1..75: mol_type = other DNA
atattaatgatgcttcggcgctggcctgcctcataaatttgtcgctgaacccttcagaggtaagggggcgcaaat

SEQ ID NO: 173581 - DNA, 75 bp, synthetic construct
  source 1..75: mol_type = other DNA
gcggttttttcgtgtcatgagcattgctacgcccaaattatggtggggcgtacagggccgacttcggtcgggccg

SEQ ID NO: 173582 - DNA, 75 bp, synthetic construct
  source 1..75: mol_type = other DNA
ggctgttacctcttctttggtcgttgccgaatatttctgcaagcagcacaaaaacgttattcaaaaaatccagac

SEQ ID NO: 173583 - DNA, 75 bp, synthetic construct
  source 1..75: mol_type = other DNA
gagctgggcattgccaaccgtttccaggttgtacaggggcgtacccgcattaacgttaagttgacggaaaaagac

SEQ ID NO: 173584 - DNA, 75 bp, synthetic construct
  source 1..75: mol_type = other DNA
ttatccgggcaggctgctgacaagatgcaggctggcgtgattctgctggactttatgcgccgggagttaaatctg

SEQ ID NO: 173585 - DNA, 75 bp, synthetic construct
  source 1..75: mol_type = other DNA
agcagtatggtatccgcctgacggctaatcaggcatatcaccagatggcgaagctggggatcgttgaacaacgcg

SEQ ID NO: 173586 - DNA, 75 bp, synthetic construct
  source 1..75: mol_type = other DNA
ccagcgcaccggaaaaattatccggacaggctgctgacaagatgcaggctggcgtgattctgctggactttatgc

SEQ ID NO: 173587 - DNA, 75 bp, synthetic construct
  source 1..75: mol_type = other DNA
gggaaagtttctttccagccaacagactgttgaacttgttcaggaattgaccgacacccaaaatttgggtgtcgg

SEQ ID NO: 173588 - DNA, 75 bp, synthetic construct
  source 1..75: mol_type = other DNA
caattacgttaaattacgtgaacggtacgtttatcctgcattacaggacgattacgagaccgtacagatctacaa

SEQ ID NO: 173589 - DNA, 75 bp, synthetic construct
  source 1..75: mol_type = other DNA
agcgatgcggaacgcgagatcaactacttcggctttaccgtcaccagttggcagaccgaccgcgaaatccgggga

SEQ ID NO: 173590 - DNA, 75 bp, synthetic construct
  source 1..75: mol_type = other DNA
gttgaacttgttcatgaattgaccaacacccagaatttgggtgttgacccggtgagtgtgattcatgggggaaat

SEQ ID NO: 173591 - DNA, 75 bp, synthetic construct
  source 1..75: mol_type = other DNA
atacccaaaatttgggtgtcggttcattcaatgaaactacccaaaatttgggtagtaaaccagtaagtaaaatag

SEQ ID NO: 173592 - DNA, 75 bp, synthetic construct
  source 1..75: mol_type = other DNA
tcagtgcaccggaaaaattatccgggcaggctgctgacaagatgcaggcaggtgtgattctgctggactttatgc

SEQ ID NO: 173593 - DNA, 75 bp, synthetic construct
  source 1..75: mol_type = other DNA
ccgccttacggctaatcaggcatatcaccagatggcgaagctggggatcgttgaacaacgcgaacgatacagccg

SEQ ID NO: 173594 - DNA, 75 bp, synthetic construct
  source 1..75: mol_type = other DNA
ccgcgcgagacgcagccgcacttcttcgaatcccgattccctgagctgttaaagctgctcgataccgttcattga

SEQ ID NO: 173595 - DNA, 75 bp, synthetic construct
  source 1..75: mol_type = other DNA
aaaaattatccgggcaggctgctgacaagatgcaggctggtgtgattctgctggactttatgcgtcgggagttaa

SEQ ID NO: 173596 - DNA, 75 bp, synthetic construct
  source 1..75: mol_type = other DNA
ctgataattctgggcgttatattgttctggcagcggcaaaatccgttgccgggattggcgtcctgaaattgatta

SEQ ID NO: 173597 - DNA, 75 bp, synthetic construct
  source 1..75: mol_type = other DNA
gtttgtcgcaacaaccggtggtcagcgtcgctgaacaccggttgttatggcatgaatgcagattaccaaatcacc

SEQ ID NO: 173598 - DNA, 75 bp, synthetic construct
  source 1..75: mol_type = other DNA
aagtcaatcatctgtttaccattattcgtaaattaaaagaacgcggctgcggtattgtctatatctcgcataaaa

SEQ ID NO: 173599 - DNA, 75 bp, synthetic construct
  source 1..75: mol_type = other DNA
ccatgggcttcactggtaaacgtgctgcccggttcaaagaggcatacataaatgcctttaaccagatggaaaaac

SEQ ID NO: 173600 - DNA, 75 bp, synthetic construct
  source 1..75: mol_type = other DNA
atgagacaaactctttgcgacggatatctggtcatttttgcgttagcacaggccgtgattctgctgatgctaacc

SEQ ID NO: 173601 - DNA, 75 bp, synthetic construct
  source 1..75: mol_type = other DNA
ggtttccgtatgcgccggttacgccaaccctgctcagttcaccaccagcgaaattggcgtttccggtggtggaag

SEQ ID NO: 173602 - DNA, 75 bp, synthetic construct
  source 1..75: mol_type = other DNA
tatttggtattcgcgagaaatcggctggcaccattacgttgcacggcaaaaagatcaataaccataatgccaatg

SEQ ID NO: 173603 - DNA, 75 bp, synthetic construct
  source 1..75: mol_type = other DNA
tcgcacatgcgcataaccgcgcttcagcggtttttttgcgcacgtttcctcacatccaaattatggtggggcgtg

SEQ ID NO: 173604 - DNA, 75 bp, synthetic construct
  source 1..75: mol_type = other DNA
ttgtggaaattcaggcgtgattttgttgagtgtgaaggaccaccagcatattgattctgcaattccgggacgtta

SEQ ID NO: 173605 - DNA, 75 bp, synthetic construct
  source 1..75: mol_type = other DNA
gaaatattaatgctcgatgaaccgacgcgcggtattgatgttggggctaagtttgagatttatcagttaattgcc

SEQ ID NO: 173606 - DNA, 75 bp, synthetic construct
  source 1..75: mol_type = other DNA
ttactggataactcgcggatgaaaagcgatacccagtgggtgattgattcgatgcgggtaaaaacaccggggcat

SEQ ID NO: 173607 - DNA, 75 bp, synthetic construct
  source 1..75: mol_type = other DNA
aagaaaacaagccgggcgaagtcatcctcgaggtgcgtaacctgacgtcactgcgccagccgtcgattcgcgatg

SEQ ID NO: 173608 - DNA, 75 bp, synthetic construct
  source 1..75: mol_type = other DNA
aatgcctttaaccagatggagaaacagctttcaaagccctctgtaccgagcgacgttgcacataacgccagcgtt

SEQ ID NO: 173609 - DNA, 75 bp, synthetic construct
  source 1..75: mol_type = other DNA
ttagtcctttgtggaaattcaggcgtgattttgttgagtgtgaaggaccaccagcatattgattctgcaattccg

SEQ ID NO: 173610 - DNA, 75 bp, synthetic construct
  source 1..75: mol_type = other DNA
gagcacaattttgtgtcgagcgaatataccgactcaaccggtcgcaaactcccaatgtaccaaatcaccaaaaac

SEQ ID NO: 173611 - DNA, 75 bp, synthetic construct
  source 1..75: mol_type = other DNA
tttttcactgtcaacggaggctgccatcatggctacgatcccagccctcactcaacctgaaatcaccattgacaa

SEQ ID NO: 173612 - DNA, 75 bp, synthetic construct
  source 1..75: mol_type = other DNA
cgcgacggttttgcgtttcttgctatgggtttcacgggtaaacgtgctgcccagttcaaagaggcatacatcaat

SEQ ID NO: 173613 - DNA, 75 bp, synthetic construct
  source 1..75: mol_type = other DNA
cgtgcaggggcatcgaaagatgcgccggggtcatgtgcgaccggttacgccaaccctgtacgtctcaccacctct

SEQ ID NO: 173614 - DNA, 75 bp, synthetic construct
  source 1..75: mol_type = other DNA
ctgatgatgcttcagcttgggttaagtctccgcacaatgcggtactacgagagctgtattgatgcattccatgaa

SEQ ID NO: 173615 - DNA, 75 bp, synthetic construct
  source 1..75: mol_type = other DNA
aaactgactaccggggctgtcactatgactactctcccaaccctctctcaacctgaaattgccatcgttgatggt

SEQ ID NO: 173616 - DNA, 75 bp, synthetic construct
  source 1..75: mol_type = other DNA
gggcaggggagccgaaaggctcgccggtttccgtatgcgccggtactgcgaaccctgttcagtctgccaccagtg

SEQ ID NO: 173617 - DNA, 75 bp, synthetic construct
  source 1..75: mol_type = other DNA
aacctgaaattgccatcgttgatggtcaggctgttacatcttctttggctgttgctgacttcttctctaaacgtc

SEQ ID NO: 173618 - DNA, 75 bp, synthetic construct
  source 1..75: mol_type = other DNA
ttgctatgggcttcactggtaaacgtgccgcccggttcaaagaggcatacatcaatgcctttaaccagatggaga

SEQ ID NO: 173619 - DNA, 75 bp, synthetic construct
  source 1..75: mol_type = other DNA
actaccttgctatcaaataacccgcgacggctttgcgtttcttgctatgggtttcacgggtaaacgtgctgcccg

SEQ ID NO: 173620 - DNA, 75 bp, synthetic construct
  source 1..75: mol_type = other DNA
gtggatttaatcagatggagtacaacaaactcatgctggataatatatcaagagtgagatttatgtgtagtgaaa

SEQ ID NO: 173621 - DNA, 75 bp, synthetic construct
  source 1..75: mol_type = other DNA
caaactcatgctggacaatatatcaagagtgagatttatgtgtagtgaaattatgaacatgagtatgctcaatca

SEQ ID NO: 173622 - DNA, 75 bp, synthetic construct
  source 1..75: mol_type = other DNA
gtcaggcaataatggtacgttctgaaccatttcatcaaattgattattctgcaatgggaaattactggacattag

SEQ ID NO: 173623 - DNA, 75 bp, synthetic construct
  source 1..75: mol_type = other DNA
aggacgatgatggatcaatcgcgaatggctttgaatgaagcacatttagtgcagaccaaactgattgaaggcgac

SEQ ID NO: 173624 - DNA, 75 bp, synthetic construct
  source 1..75: mol_type = other DNA
gcggttatttcacgattgaaaagattaagcccgctatggaaaaattcgttaatgagcaggtgggtattttttttc

SEQ ID NO: 173625 - DNA, 75 bp, synthetic construct
  source 1..75: mol_type = other DNA
atctctggtaatggaaaggaggcaggagggagcaacagaaaatgatgccactgtatcatctgttacttcaatgct

SEQ ID NO: 173626 - DNA, 75 bp, synthetic construct
  source 1..75: mol_type = other DNA
agggcttctcccctgaggagattgtcgcacgccaccgattcaaacccatcaacgacatcccacgcgaagaaatgc

SEQ ID NO: 173627 - DNA, 75 bp, synthetic construct
  source 1..75: mol_type = other DNA
tcatgccggtattttgcatcgccagaacgcgattatcctcggtagcttcagcggcagtacgccaaatgattatga

SEQ ID NO: 173628 - DNA, 75 bp, synthetic construct
  source 1..75: mol_type = other DNA
acactgccgttaggcgctcatgccattctgaataacgctaaagcaggtactcagttgacgataagtggccatcct

SEQ ID NO: 173629 - DNA, 75 bp, synthetic construct
  source 1..75: mol_type = other DNA
atggcaatgcctgtgtgctttttaccgcctcaatgacatcgttcctcggtcaaccttatgtcaccggctatgctg

SEQ ID NO: 173630 - DNA, 75 bp, synthetic construct
  source 1..75: mol_type = other DNA
tcactgcaaaaagccgattgaagaaatgagcgtcaatgattttgaatctgtgcttgatgttcacgtagttggcgc

SEQ ID NO: 173631 - DNA, 75 bp, synthetic construct
  source 1..75: mol_type = other DNA
acgctggggataaatgcgagctgggtagagatggatgtgagagagaccgcaaccacgcaggcaaaagtggatacg

SEQ ID NO: 173632 - DNA, 75 bp, synthetic construct
  source 1..75: mol_type = other DNA
cggcgggactggtcgcaatcgcgttattactgacgtggcgattaaaaaaacggcccccggtggaaatacctgagg

SEQ ID NO: 173633 - DNA, 75 bp, synthetic construct
  source 1..75: mol_type = other DNA
aatcgcgttattactgacgtggcgattaaaaaaacggcctccggtggaagttcctgaggccatctcatcatctta

SEQ ID NO: 173634 - DNA, 75 bp, synthetic construct
  source 1..75: mol_type = other DNA
gcggcgctggcaacttacaccgtatttatggatttatcgcttggcgtgaccggaccactggctgggctggtgatg

SEQ ID NO: 173635 - DNA, 75 bp, synthetic construct
  source 1..75: mol_type = other DNA
gatttatctggcagcggcggggctggtagcaatcgcgttattgctgacgtggcgattaaaaaaacggcctccggt

SEQ ID NO: 173636 - DNA, 75 bp, synthetic construct
  source 1..75: mol_type = other DNA
gtcggtacgcgactgttattccctaacggcattaatcgtatcggcggcttaaacgtggcgatgatctgctttagc

SEQ ID NO: 173637 - DNA, 75 bp, synthetic construct
  source 1..75: mol_type = other DNA
aaacggattgcgcctgaatttgcgcattgtctccattgtcatgtttaacttcgccagctacctcaccatcgggtt

SEQ ID NO: 173638 - DNA, 75 bp, synthetic construct
  source 1..75: mol_type = other DNA
ggctggatatcattagagaaatcttcacccgcgaatcactggctgaatttggctgggatctgtatcccgcctgga

SEQ ID NO: 173639 - DNA, 75 bp, synthetic construct
  source 1..75: mol_type = other DNA
gatcctcggtgtaattggtaagaaaaagcacctggaatacttaagcaaggccagtcaaaagcatcccgctgcggc

SEQ ID NO: 173640 - DNA, 75 bp, synthetic construct
  source 1..75: mol_type = other DNA
ccgatgatactgctctgagtacagtggaaaaatacgacttcccaccgttgtatcgtgattttcgtaattttcgcg

SEQ ID NO: 173641 - DNA, 75 bp, synthetic construct
  source 1..75: mol_type = other DNA
gcggtgcttgggcgcgtctggctatacggcatggcactggcgttagcttccgccggatttggtgtcatcgccact

SEQ ID NO: 173642 - DNA, 75 bp, synthetic construct
  source 1..75: mol_type = other DNA
taatattgcaggtgtttattacagaccagttcaaaagtatataaatggcaactggtataatgtagcgagcgttta

SEQ ID NO: 173643 - DNA, 75 bp, synthetic construct
  source 1..75: mol_type = other DNA
tcacctgttttcgcgtggcagaagacagcacttacagcgatgcgcaggatgagttattcacgctgccagcaggaa

SEQ ID NO: 173644 - DNA, 75 bp, synthetic construct
  source 1..75: mol_type = other DNA
agacgtttacgcatcatcctgccccggcatgctggcactcggtcaggttaaagcccttcaggttgagcagaagcg

SEQ ID NO: 173645 - DNA, 75 bp, synthetic construct
  source 1..75: mol_type = other DNA
atcggcctcaccagtctgtcgcagaccgttggcttcatcggtcaactcgcacaattcaaacctgaagcactcgac

SEQ ID NO: 173646 - DNA, 75 bp, synthetic construct
  source 1..75: mol_type = other DNA
cgtgggtacagtgttcctcggtagtggtcagccgctggatggcaacaccactggctttcatttaatcaccgataa

SEQ ID NO: 173647 - DNA, 75 bp, synthetic construct
  source 1..75: mol_type = other DNA
cacatcgacagcctcaaacaagcgatgctgttgattgagcacaagcataccggggattcatcctggtggaagttc

SEQ ID NO: 173648 - DNA, 75 bp, synthetic construct
  source 1..75: mol_type = other DNA
ccggtatttgatgccgataaattctggggcgaatacagcgtcgatggcctgacggtcaaaacgctgccaggcgtg

SEQ ID NO: 173649 - DNA, 75 bp, synthetic construct
  source 1..75: mol_type = other DNA
atcgccaaccgtcatcgttccgcaggagcaggtacagggtattcgtgaagagcgagctaaacaggctcaggcggc

SEQ ID NO: 173650 - DNA, 75 bp, synthetic construct
  source 1..75: mol_type = other DNA
ggttataggctggtttggtgtgcgcaaacgcgttgctgaaattcacagcactgcgccagtcgtcgaggaagatga

SEQ ID NO: 173651 - DNA, 75 bp, synthetic construct
  source 1..75: mol_type = other DNA
tgggcgttacagcctgaacgatctgcatcgcgcagcagtagcatctggtgcaaatgccagaaccaaggagccagg

SEQ ID NO: 173652 - DNA, 75 bp, synthetic construct
  source 1..75: mol_type = other DNA
aacgatacagccgcactgcgattaacaacatcaaaaaattctggtcgctgacggcgaaaggctgcatgttcggca

SEQ ID NO: 173653 - DNA, 75 bp, synthetic construct
  source 1..75: mol_type = other DNA
gactttcttctctaaactgggcgtgccatacattggcagtattatgaatattgtagtgctgaccgcggccctctc

SEQ ID NO: 173654 - DNA, 75 bp, synthetic construct
  source 1..75: mol_type = other DNA
ggtgcaggagcccgactgcaaatggcggggccagcactggcactggtttatttaatttgtggcttgttttcgttt

SEQ ID NO: 173655 - DNA, 75 bp, synthetic construct
  source 1..75: mol_type = other DNA
attcctcaattatctggtgccgtcgcgcgtatttgagattgtcctgaacttcgcgtcattgggaattatcgcctc

SEQ ID NO: 173656 - DNA, 75 bp, synthetic construct
  source 1..75: mol_type = other DNA
ggacacaggagagacaacgatgagatggtacaaagcaggtacacaaaacctgaccatcggcagtcgcctctatgg

SEQ ID NO: 173657 - DNA, 75 bp, synthetic construct
  source 1..75: mol_type = other DNA
tattttccttgtgtgtgtctggtgagtcctctgcatggaataatattgtcttttactcccttggaaacgttaact

SEQ ID NO: 173658 - DNA, 75 bp, synthetic construct
  source 1..75: mol_type = other DNA
gcaggctacgcatcacgatacgattgaggccatcaatcatgctaaaatcgatttttattttgaaaagccatggca

SEQ ID NO: 173659 - DNA, 75 bp, synthetic construct
  source 1..75: mol_type = other DNA
cggcgatacacatattgacccgccggcgatggtcatcaccattatgaccacgatgattaatctgttggcgaccat

SEQ ID NO: 173660 - DNA, 75 bp, synthetic construct
  source 1..75: mol_type = other DNA
ttaacagcgcctactttgtcgatctgttcatgatgttgcagaacatcaatacccgctcgatgcctgttgaagcgg

SEQ ID NO: 173661 - DNA, 75 bp, synthetic construct
  source 1..75: mol_type = other DNA
cccgaatactgcagatcttctggctgacattcaggatacccgccagaccatcaacagcgcctacttcgtcgacct

SEQ ID NO: 173662 - DNA, 75 bp, synthetic construct
  source 1..75: mol_type = other DNA
atgtgttacaggttccaatattccacactcggtaatcacttagtcagacagaatttagcagacgctgaatttgaa

SEQ ID NO: 173663 - DNA, 75 bp, synthetic construct
  source 1..75: mol_type = other DNA
aatggctatccgctgattcagtctgcggctaaccagctggctgtcattaagcgactccttggcgacacgaagtac

SEQ ID NO: 173664 - DNA, 75 bp, synthetic construct
  source 1..75: mol_type = other DNA
agtggcgcgtgttttcaggaggcacggcgtactcacattaatggtcagggagtatgaaaatgcgcttcttcatca

SEQ ID NO: 173665 - DNA, 75 bp, synthetic construct
  source 1..75: mol_type = other DNA
cggttaatggcgtggacaaaggagagacaacgatgagatggtacagagcaggtacacaaaacctgaccatcggca

SEQ ID NO: 173666 - DNA, 75 bp, synthetic construct
  source 1..75: mol_type = other DNA
caaggtaataagtccctgagtgaaataacaacagggaatattattatgcgacgctgcaacggatttttgatttct

SEQ ID NO: 173667 - DNA, 75 bp, synthetic construct
  source 1..75: mol_type = other DNA
tccgtggagcattgtgctgatatgggcattctttgccagttcatccagagcgcataatcaacacgcagatcagat

SEQ ID NO: 173668 - DNA, 75 bp, synthetic construct
  source 1..75: mol_type = other DNA
atgacacctaccgaagcagtgcgggaggttgcccgacgcatggagacattcgccagcctgatgacatctgagccg

SEQ ID NO: 173669 - DNA, 75 bp, synthetic construct
  source 1..75: mol_type = other DNA
atgacaccgaccgaagcggtgcgggaggttgcccgccgcatggagacgttcgccagcctgataacgtcagcgccg

SEQ ID NO: 173670 - DNA, 75 bp, synthetic construct
  source 1..75: mol_type = other DNA
aaagactttaccgtccaggcactttgccctgagtgtcatcagccgttacaagtgttaaaagcttgtggtgctgtg

SEQ ID NO: 173671 - DNA, 75 bp, synthetic construct
  source 1..75: mol_type = other DNA
aaccggaatttcgcaaacatgcgccgctgctggtgcgtcagctctataatgtcggcgtcctgtcgatgctgatta

SEQ ID NO: 173672 - DNA, 75 bp, synthetic construct
  source 1..75: mol_type = other DNA
cagtccgccgcgaatatctgccaggctatcacgaaagccgtgacggactcaaagcactgggcgcagaacgtcacc

SEQ ID NO: 173673 - DNA, 75 bp, synthetic construct
  source 1..75: mol_type = other DNA
aacagttaggcttactgatagtcatgcagaaaatcgagcaggcagcatttgacgaggcgatacagagcggcatga

SEQ ID NO: 173674 - DNA, 75 bp, synthetic construct
  source 1..75: mol_type = other DNA
aagcgattgcgttgccaccggttaaagaaaattatccgggcgaacagtttgtggaatggcagagaaaagaggtgt

SEQ ID NO: 173675 - DNA, 75 bp, synthetic construct
  source 1..75: mol_type = other DNA
gcgaacaagccaggcgtacacatctacaacctcggcgctggcgtaggcagcagcgtgctggacgtggttaatgcc

SEQ ID NO: 173676 - DNA, 75 bp, synthetic construct
  source 1..75: mol_type = other DNA
gtgttttcttattactttcaaggtcttgcacttggcgcagctatgatcctaccgctcggtccacaaaatgctttt

SEQ ID NO: 173677 - DNA, 75 bp, synthetic construct
  source 1..75: mol_type = other DNA
cgcgaaacgcccatcaccatttatagctgggtcgcggcggcaacgcgctatcagttgctcaagcgaggcgtcatc

SEQ ID NO: 173678 - DNA, 75 bp, synthetic construct
  source 1..75: mol_type = other DNA
tcattattgcgatgatccgcgcgccattgttgatgattctggtgtgctgtatctgggccggtttttgtacctgga

SEQ ID NO: 173679 - DNA, 75 bp, synthetic construct
  source 1..75: mol_type = other DNA
acacgtccagtcctgtcgcgcgatttatcccgcaccagcaaaataacggtgaacgcgagcacacagccgacgatt

SEQ ID NO: 173680 - DNA, 75 bp, synthetic construct
  source 1..75: mol_type = other DNA
ctggcacagcgtgctgttgatctgatcagcaacgtcgcaggcgatcgtgtgacttatcggatcaccaaaggcgaa

SEQ ID NO: 173681 - DNA, 75 bp, synthetic construct
  source 1..75: mol_type = other DNA
atttgcgccgggatttttggtggtagcgcgttactgatgcagtctccgtggttattggcattagtgacctggggt

SEQ ID NO: 173682 - DNA, 75 bp, synthetic construct
  source 1..75: mol_type = other DNA
tatttgcttttttatcgcttaattctttacacgccatggcagcaaattgtagtggaggatcaatacgttttaata

SEQ ID NO: 173683 - DNA, 75 bp, synthetic construct
  source 1..75: mol_type = other DNA
tctctccccaacctgccgacgcacgttggggagaaaaagcgacttacagcattaataatgatggcattaccctgc

SEQ ID NO: 173684 - DNA, 75 bp, synthetic construct
  source 1..75: mol_type = other DNA
ctggggagaaaaagcgacttacagcattaataatgatggcattaccctgcatttgaacggggcagacgatctggg

SEQ ID NO: 173685 - DNA, 75 bp, synthetic construct
  source 1..75: mol_type = other DNA
tgggcgatatcatcacctatcgcaacggtaaaaaagttgaagtgatgaacactgatgccgaagggcgtctggtgc

SEQ ID NO: 173686 - DNA, 75 bp, synthetic construct
  source 1..75: mol_type = other DNA
tgtgcgcaaacgcgttgctgaaattcacagcactgcgccagtcgtcgaggaagatgaaattgtgtttaagcctga

SEQ ID NO: 173687 - DNA, 75 bp, synthetic construct
  source 1..75: mol_type = other DNA
ctagcgaaatgggggctggggctgaaacaggtcgtgatggcatcactgtttgtggccctgtttctgccctttggg

SEQ ID NO: 173688 - DNA, 75 bp, synthetic construct
  source 1..75: mol_type = other DNA
tgaaagagaggcctgctctgacaccaacaactctgctggagatgctacaggataaatatcccggtcagtacccca

SEQ ID NO: 173689 - DNA, 75 bp, synthetic construct
  source 1..75: mol_type = other DNA
gactatttgcaacagtgcctctcaaaatcggtggagctgcatgacaaagtcatcgggcattatctgaacataaaa

SEQ ID NO: 173690 - DNA, 75 bp, synthetic construct
  source 1..75: mol_type = other DNA
cgatcttgcagagcgtctggccaatttttttaagggagaaatcagcgaaatgcagattctctatcctgcacgctt

SEQ ID NO: 173691 - DNA, 75 bp, synthetic construct
  source 1..75: mol_type = other DNA
ctgggcgatgacggggattgtcgatattaccgccgtcgctctgtatatgcattactggggtgcgtttggcggcgt

SEQ ID NO: 173692 - DNA, 75 bp, synthetic construct
  source 1..75: mol_type = other DNA
tgctgagcgccgcaggtattacggtgcctgatgccatggtggggcgtgatttgcaaacggctctggatactgagc

SEQ ID NO: 173693 - DNA, 75 bp, synthetic construct
  source 1..75: mol_type = other DNA
atgttggcgttattgcaggacgtatcacgtcaggtgctttggcatggacagagacttgcgccggaggactggaaa

SEQ ID NO: 173694 - DNA, 75 bp, synthetic construct
  source 1..75: mol_type = other DNA
agacgccattctctcactacccatcgacgacaagtcaccccacgaagtccacgttaaagaacccaagcgcagcaa

SEQ ID NO: 173695 - DNA, 75 bp, synthetic construct
  source 1..75: mol_type = other DNA
tttactgaagatgccattaataagagaaaacacgaacgggagttattaaataaaatatgcattgtttcaatgctg

SEQ ID NO: 173696 - DNA, 75 bp, synthetic construct
  source 1..75: mol_type = other DNA
tccagaacgatatggcgcgttttgtcgccccggatggctacgccgaacgcttccagaccgcatcggtgccaccgg

SEQ ID NO: 173697 - DNA, 75 bp, synthetic construct
  source 1..75: mol_type = other DNA
gcctgatgccatggtggggcgtgatttgcaaacggctctggatactgagcactgggatgaagaggtgcttatcca

SEQ ID NO: 173698 - DNA, 75 bp, synthetic construct
  source 1..75: mol_type = other DNA
gcatgtttactatagttcttcgcacccttacccgtgatgaccagttctttttcaccacgaaaaacaacggtgcag

SEQ ID NO: 173699 - DNA, 75 bp, synthetic construct
  source 1..75: mol_type = other DNA
ccgaagaaacccctatggggcgtgtgaaaatgaagactatcggcaaaatgctggacgagaaaatcactgtcgaag

SEQ ID NO: 173700 - DNA, 75 bp, synthetic construct
  source 1..75: mol_type = other DNA
gttattcaccaggataatggatttgcccctatatttccagacacctgttatcacttaacccattactggcttgct

SEQ ID NO: 173701 - DNA, 75 bp, synthetic construct
  source 1..75: mol_type = other DNA
gcaacgaagcaatcagaaataacgccatagacgccattctctcactacccatcgacgacaagtcaccccacgaag

SEQ ID NO: 173702 - DNA, 75 bp, synthetic construct
  source 1..75: mol_type = other DNA
gaaaacacgaacgggagtcattaaataaaatatgcattgtttcaatgctggctcgtttgcgtctgatgcaaaaag

SEQ ID NO: 173703 - DNA, 75 bp, synthetic construct
  source 1..75: mol_type = other DNA
ttattaccaaacgttaatacgtctgaaggttgttttgaaattggtgtcactatcagtaaccctgtatttactgaa

SEQ ID NO: 173704 - DNA, 75 bp, synthetic construct
  source 1..75: mol_type = other DNA
cggtaactgttatccggtcgagaaagttattcgcatggataataccgaaatcccggcaggacttaaaacagcgcc

SEQ ID NO: 173705 - DNA, 75 bp, synthetic construct
  source 1..75: mol_type = other DNA
atggaaacgttattaccaaacgttaatacgtctgaaggttgttttgatattggtgttctgctcagtaaccgggta

SEQ ID NO: 173706 - DNA, 75 bp, synthetic construct
  source 1..75: mol_type = other DNA
gagctattaaataaaatatgcattctttcaatgcaggcccgtttacgtccgatacaaaaaggatgctggcaatga

SEQ ID NO: 173707 - DNA, 75 bp, synthetic construct
  source 1..75: mol_type = other DNA
cggactgatttttcgcggcgtggccttcgagtttcgcttcaaggccacgccagcccaccgcccattttgggacca

SEQ ID NO: 173708 - DNA, 75 bp, synthetic construct
  source 1..75: mol_type = other DNA
tgttcggtacaatgaaacacgtattacttcctctggttgctgcctccgcgttacttatcactgcatgtcaatctc

SEQ ID NO: 173709 - DNA, 75 bp, synthetic construct
  source 1..75: mol_type = other DNA
tggtgtcactatcagtaaccctgtatttactgaagatgccattaacaagagaaaacaagaacgtaagcgtaaact

SEQ ID NO: 173710 - DNA, 75 bp, synthetic construct
  source 1..75: mol_type = other DNA
aaacgttgccggatacgatctctcacggctaatggccggaagctatggctgtcttggcgtacttactgaaatctc

SEQ ID NO: 173711 - DNA, 75 bp, synthetic construct
  source 1..75: mol_type = other DNA
cggcaactgttatccggttgataaagttattcgcatggacaataacgaaatcccggcaggacttaaaacagcacc

SEQ ID NO: 173712 - DNA, 75 bp, synthetic construct
  source 1..75: mol_type = other DNA
atacgtctgaaggttgttttgaaattggtgtcagaatcagtaactctgtatttactgaagatgccattaataaga

SEQ ID NO: 173713 - DNA, 75 bp, synthetic construct
  source 1..75: mol_type = other DNA
tgagggcggcgaaggatcggtaaaagcggcgcgtgaactgctgggggggcgaagaggttgcgggtcagttctggc

SEQ ID NO: 173714 - DNA, 75 bp, synthetic construct
  source 1..75: mol_type = other DNA
tcagcctacaagaagccatgagtgaaatcgcccagtggcaactccagccacttcccattagcggcttatgttatt

SEQ ID NO: 173715 - DNA, 75 bp, synthetic construct
  source 1..75: mol_type = other DNA
gtcttggcgtgctcactgaaatctcgatgaaagtgttaccgcgaccgcgcgcctccctgagcctgcgtcgggaaa

SEQ ID NO: 173716 - DNA, 75 bp, synthetic construct
  source 1..75: mol_type = other DNA
gatgagcagacgctcaggcagcgtattgatgaggggctgggatttgcgaatgctgccggaacgggagtaaagagt

SEQ ID NO: 173717 - DNA, 75 bp, synthetic construct
  source 1..75: mol_type = other DNA
gcgtattgatgatgcgctggaatttgcgaacgctgccgttacaggaacaggcagcggtatgaaagcatcacctga

SEQ ID NO: 173718 - DNA, 75 bp, synthetic construct
  source 1..75: mol_type = other DNA
attaccgtttgattcacggacaagtcatcacaaaatggttaaaaaggagtgatgctaataaaataattgtcattg

SEQ ID NO: 173719 - DNA, 75 bp, synthetic construct
  source 1..75: mol_type = other DNA
tttgatggtaacgttaaagcattagccgaggctgaaaatatagatagaaatattatcactcgctgtatcaataca

SEQ ID NO: 173720 - DNA, 75 bp, synthetic construct
  source 1..75: mol_type = other DNA
tgatgctggcagtgtctggcgtgcaggcttccacgcttgatgaactgcgccagcttgaggcgcataaggtatcgc

SEQ ID NO: 173721 - DNA, 75 bp, synthetic construct
  source 1..75: mol_type = other DNA
atgtggaagcaggccctgacgggcgtgttgctgattgccaccagtgtacaggcgtccacgctggaagagctgcgc

SEQ ID NO: 173722 - DNA, 75 bp, synthetic construct
  source 1..75: mol_type = other DNA
cacgtgttgtagcacaagagtttgagaccggaagaaatgctattcagcaaaaacttgctgaggtggattgggggt

SEQ ID NO: 173723 - DNA, 75 bp, synthetic construct
  source 1..75: mol_type = other DNA
acagcattttagccgcgaggcgctggcggtggatcgcaccgatggcatcagcatgacctttgccgactggcgctt

SEQ ID NO: 173724 - DNA, 75 bp, synthetic construct
  source 1..75: mol_type = other DNA
cgctgggcgaactggtgcgcgaccggatggcggcgtttccggcaagcggtgagatcaacagcaaactggcgcacc

SEQ ID NO: 173725 - DNA, 75 bp, synthetic construct
  source 1..75: mol_type = other DNA
gcgccaagtggcgtcgaagtaataatgacatctattgaagatgtattacagcgctggaatagcaataacttctat

SEQ ID NO: 173726 - DNA, 75 bp, synthetic construct
  source 1..75: mol_type = other DNA
agacagggcatgcgttcatcaaggagcggatgcgccaggaagacgccatctacggcggggagatgagcgcgcacc

SEQ ID NO: 173727 - DNA, 75 bp, synthetic construct
  source 1..75: mol_type = other DNA
agtcataccttctccttgacgaaaaggctatgaggcttcaggggtcaaggttaaaaaatataatattcaacgata

SEQ ID NO: 173728 - DNA, 75 bp, synthetic construct
  source 1..75: mol_type = other DNA
cccaattgaaggagcgcaacgaaggcgcatttgttccttttgttaccctcggtgaccccggcattgaacagtcgc

SEQ ID NO: 173729 - DNA, 75 bp, synthetic construct
  source 1..75: mol_type = other DNA
cttacgtgccgaaaggcaaggagatgtatgggtccaccacatattgcaatttttattctcttttaaaatatattc

SEQ ID NO: 173730 - DNA, 75 bp, synthetic construct
  source 1..75: mol_type = other DNA
atgcactcccgccgcggaccggggatctggcaggattatcgcgatatccacaaactgtttaaacgccaggaagtt

SEQ ID NO: 173731 - DNA, 75 bp, synthetic construct
  source 1..75: mol_type = other DNA
ctttagtcggactaacgacttcttcgaaaatgaggtatcgcttagcattgaaggtcacaatggggtgacattcat

SEQ ID NO: 173732 - DNA, 75 bp, synthetic construct
  source 1..75: mol_type = other DNA
gtgaccccggcgcagtgctttgagatgctggcactcattcgccagaaacacccgaccattcccattggcctgctg

SEQ ID NO: 173733 - DNA, 75 bp, synthetic construct
  source 1..75: mol_type = other DNA
cgcgttgcgccataatgtcgcacctatcttcatctgcccgccaaatgccgatgacgacctgctgcgccagatagc

SEQ ID NO: 173734 - DNA, 75 bp, synthetic construct
  source 1..75: mol_type = other DNA
tgccagcggtaagtgatatgctgccatctgttttttatatgctgtcagcggcaaataaagtatgctgtcagcggt

SEQ ID NO: 173735 - DNA, 75 bp, synthetic construct
  source 1..75: mol_type = other DNA
catcgacaactttgaagaaggttcccttgaattgtacacaggggaacttgtccctaatagcaacaatacagtcca

SEQ ID NO: 173736 - DNA, 75 bp, synthetic construct
  source 1..75: mol_type = other DNA
caatatcaacgctacaccagtaattgtgctgattaaacgcaatggcagcgcaagtaactggcagacagtctccat

SEQ ID NO: 173737 - DNA, 75 bp, synthetic construct
  source 1..75: mol_type = other DNA
gttacaggcccggtatactttttcctttggacactacttcgaccctaaattgttaggctacgcctccctgcgcgt

SEQ ID NO: 173738 - DNA, 75 bp, synthetic construct
  source 1..75: mol_type = other DNA
tgtggctgcatcatattgtgctcgacaaaggcgaaagtgcgaatttccagttgcatgggccacgcgcgtatttgc

SEQ ID NO: 173739 - DNA, 75 bp, synthetic construct
  source 1..75: mol_type = other DNA
ttggctggatgcctgcccgcagcgagagaatccgctgattcaaaagctggcgcttaatatgggcaagcagcaatt

SEQ ID NO: 173740 - DNA, 75 bp, synthetic construct
  source 1..75: mol_type = other DNA
atacttattagtatagtgtcagtatgcaataatctaattttattgtattttattgataaatcccatcctgcatgg

SEQ ID NO: 173741 - DNA, 75 bp, synthetic construct
  source 1..75: mol_type = other DNA
tgagtcaatgctggaagcaacagaagatgatcgtcatccgggttgtccggtatttgccggcatggaattaccgga

SEQ ID NO: 173742 - DNA, 75 bp, synthetic construct
  source 1..75: mol_type = other DNA
tctggggctaatttccatcgttgcgatttatccccgccagacggtgaattttttctattcgacagcaattcagat

SEQ ID NO: 173743 - DNA, 75 bp, synthetic construct
  source 1..75: mol_type = other DNA
ttgaaggttatatcagaaaattatgatttttcagtcataatgctagatattgacaactttaaaagcattaatgat

SEQ ID NO: 173744 - DNA, 75 bp, synthetic construct
  source 1..75: mol_type = other DNA
gtgcagtttccgtccggacgtgggtttaagtttatggcagaagtacgtcagcatacctggtcttccggcactaat

SEQ ID NO: 173745 - DNA, 75 bp, synthetic construct
  source 1..75: mol_type = other DNA
agcagaccaaagtcatgatctcgtctgcaccggtaacggcagaaacgctgagttctgccagttttcttgaactga

SEQ ID NO: 173746 - DNA, 75 bp, synthetic construct
  source 1..75: mol_type = other DNA
gccaaattgatcacatttgcaggagcatgttcagaaaaaattaaagatttaccctccgatgaatttaataaaatt

SEQ ID NO: 173747 - DNA, 75 bp, synthetic construct
  source 1..75: mol_type = other DNA
taccgtaaagcaccagttgaacagtggtctgcgggtgcgaccgggctgggtgtgcgcacgattgctaatctgtta

SEQ ID NO: 173748 - DNA, 75 bp, synthetic construct
  source 1..75: mol_type = other DNA
agaacgttctccggtattgctggcgctggattacaacccaactggcgataaagaagcaccggtgtacgcgtgcct

SEQ ID NO: 173749 - DNA, 75 bp, synthetic construct
  source 1..75: mol_type = other DNA
cgtcggtatccgcttcagttcaggcgcgattatttctgcaaacggtggatttctcacaaggcgatttccctgccg

SEQ ID NO: 173750 - DNA, 75 bp, synthetic construct
  source 1..75: mol_type = other DNA
ttttcgcgtaactggcaactaagccgcgaaaatggcctgctgcgcggggcgtatcattatttctccccgtcggta

SEQ ID NO: 173751 - DNA, 75 bp, synthetic construct
  source 1..75: mol_type = other DNA
tgcatggtatgcatgggtttctaataccggtgatacctgtttcgaacagttccgggatgcgtggcttggtggtcc

SEQ ID NO: 173752 - DNA, 75 bp, synthetic construct
  source 1..75: mol_type = other DNA
tgagtcccgtatgtcggctggcacgccggtgttgcgtctgacctgcccggagggttacgagctgaagcccgatga

SEQ ID NO: 173753 - DNA, 75 bp, synthetic construct
  source 1..75: mol_type = other DNA
gacatgaccgtcgaatatatccaggcctgtgccatgtgggcacgggtattcaactacgcagccagtgaaattgaa

SEQ ID NO: 173754 - DNA, 75 bp, synthetic construct
  source 1..75: mol_type = other DNA
cgtatacctgcgagatttctgattcagcaagccctgttaacaaggtgacctctacttcctgcactgttaccgtca

SEQ ID NO: 173755 - DNA, 75 bp, synthetic construct
  source 1..75: mol_type = other DNA
aacagcaggagcaaatcgcctggtacctgatggattgcctgccaaacctgatgggcgcggcgcttgatgcccgtg

SEQ ID NO: 173756 - DNA, 75 bp, synthetic construct
  source 1..75: mol_type = other DNA
ctggagctgcgcaacgtgccgttcaaacagcaggagcaaatcgcctggtacctgatggattgcctgccaaacctg

SEQ ID NO: 173757 - DNA, 75 bp, synthetic construct
  source 1..75: mol_type = other DNA
tccgataacgtactgaccgccgcctcttctgcgccagcaggcgggatgaatgtgtattacatcgcttataaccag

SEQ ID NO: 173758 - DNA, 75 bp, synthetic construct
  source 1..75: mol_type = other DNA
cagacacttccggttatgatgcccctcccgttctgttgccctaccagcagcgctgggtggcagatgcctctccgc

SEQ ID NO: 173759 - DNA, 75 bp, synthetic construct
  source 1..75: mol_type = other DNA
atgggcgcggcgcttgatgcccgtggtaacggctcttacctcgccgaatacgccatgcagcgctacggctccagc

SEQ ID NO: 173760 - DNA, 75 bp, synthetic construct
  source 1..75: mol_type = other DNA
tgttgctttatgtgttgccggtgattgtctggatgcgctgataatgagctgccgggtgcctgaacattttgcccg

SEQ ID NO: 173761 - DNA, 75 bp, synthetic construct
  source 1..75: mol_type = other DNA
tattcctcgcaagtccggcatcgaattatgtcaacggacatttattagtggttgatggcggttatttagtgcgct

SEQ ID NO: 173762 - DNA, 75 bp, synthetic construct
  source 1..75: mol_type = other DNA
catgcagcgctacggctccagccggattcagcaggtgatgccaaccgaaggctggtacagggagcatatgcctcc

SEQ ID NO: 173763 - DNA, 75 bp, synthetic construct
  source 1..75: mol_type = other DNA
ccggtgctgcgcctgacctgcccggagggctacgagctgaagcccgacgacgtccgctggagcgagacgcaggac

SEQ ID NO: 173764 - DNA, 75 bp, synthetic construct
  source 1..75: mol_type = other DNA
cgccagtctgcccgtcatcagcctgttattactgtgcctggggcgcgtgatccttgggattgggcaaagttttgc

SEQ ID NO: 173765 - DNA, 75 bp, synthetic construct
  source 1..75: mol_type = other DNA
agaacgcctgtctgagctggagactgctctgcaggagcagcaaaccgcctttaaagaactggtgaataagctgag

SEQ ID NO: 173766 - DNA, 75 bp, synthetic construct
  source 1..75: mol_type = other DNA
acgcaccgaaaaatccctgtctgagcaggaagaacgcctgtctgaactggagtctgctctgcagaagcagcaaac

SEQ ID NO: 173767 - DNA, 75 bp, synthetic construct
  source 1..75: mol_type = other DNA
gaagacagccgccaggactaccgccagcgtgcaacaggcggcaacgcccccgctgacactctgaccaattgctga

SEQ ID NO: 173768 - DNA, 75 bp, synthetic construct
  source 1..75: mol_type = other DNA
ccgaaatgctggctttcagtgccagcgctgcgcacaacccgctggcgaaccgtaaacagaaccctgaaaacctgt

SEQ ID NO: 173769 - DNA, 75 bp, synthetic construct
  source 1..75: mol_type = other DNA
ttaccgctgcagaggaaacagtgatcgaactggaagaagtccaggacgaaaaaacatccctgtttgcccgtgtca

SEQ ID NO: 173770 - DNA, 75 bp, synthetic construct
  source 1..75: mol_type = other DNA
atgacagtgaaagcaaaacgttttcgcatcggggtggaaggtgccactaccgacggacgcgaaatccagcgtgaa

SEQ ID NO: 173771 - DNA, 75 bp, synthetic construct
  source 1..75: mol_type = other DNA
gtccgatgacgccaggttctctgatgtgcataaggccgtggagctggtcgccactgagcagcagaacctgagcgc

SEQ ID NO: 173772 - DNA, 75 bp, synthetic construct
  source 1..75: mol_type = other DNA
catcaggtgcaattgttagaacgcaacagccaggcaggtgtcgccaccagtttcgctaacggtgggcaactcagt

SEQ ID NO: 173773 - DNA, 75 bp, synthetic construct
  source 1..75: mol_type = other DNA
tgtaatcgtttcacaggccaaatgatactttggtctgtgaaaaaagaaaccgatatccggcgtggaaggcattgt

SEQ ID NO: 173774 - DNA, 75 bp, synthetic construct
  source 1..75: mol_type = other DNA
agcctacctggttggcctggctgccactgatgatcccgccagtctgggtacggaaatgctgacattcagcgccag

SEQ ID NO: 173775 - DNA, 75 bp, synthetic construct
  source 1..75: mol_type = other DNA
tggaagaaatccaggacgacaaaccgtccctgtttgcccgtgtcacggcgctgtttaccaaaaaagagcagtccg

SEQ ID NO: 173776 - DNA, 75 bp, synthetic construct
  source 1..75: mol_type = other DNA
atgacagtgaaagcaaagcgttttcgcattggggtggaaggtgccaccaccgacggacgcgaaatccagcgtgaa

SEQ ID NO: 173777 - DNA, 75 bp, synthetic construct
  source 1..75: mol_type = other DNA
gtgcataaggccgtggaactggtcgctaccgagcagcagaacctgagtacgcgcaccgaaaaatccctgtctgag

SEQ ID NO: 173778 - DNA, 75 bp, synthetic construct
  source 1..75: mol_type = other DNA
aagccgtccctgtttgcccgtgtcacggcgctgtttaccaaaaaagagcagtccgatgacgcccggttctctgat

SEQ ID NO: 173779 - DNA, 75 bp, synthetic construct
  source 1..75: mol_type = other DNA
tccaggtggacgccttcccgtaaaccgacatcgtctgatgctcgcccttcttccgatgacacgcctttgtcgggt

SEQ ID NO: 173780 - DNA, 75 bp, synthetic construct
  source 1..75: mol_type = other DNA
agcctacctggttggcctggctgccactgatgatcctgccagtctgggcacggaaatgctgacattcagcgccag

SEQ ID NO: 173781 - DNA, 75 bp, synthetic construct
  source 1..75: mol_type = other DNA
caggaagaacgcctgtctaagttggagactgccctgcaggcacaacaggccgcctttaacgaactggtggacaag

SEQ ID NO: 173782 - DNA, 75 bp, synthetic construct
  source 1..75: mol_type = other DNA
agactgccctgcaggcacagcagaccgcctttaatgaactggtggacaagctgagccatgaagacaggcgccagg

SEQ ID NO: 173783 - DNA, 75 bp, synthetic construct
  source 1..75: mol_type = other DNA
tatcccaaatcgccgtattcacgccgcctgttctacaaacgcaatatcattggcaatcaggtctttacctgggcg

SEQ ID NO: 173784 - DNA, 75 bp, synthetic construct
  source 1..75: mol_type = other DNA
cgatgacgatgacgaatggacacccaaccgcctgagcgtcttcctcgcccataaacagcaactggtcactcacgc

SEQ ID NO: 173785 - DNA, 75 bp, synthetic construct
  source 1..75: mol_type = other DNA
cgcaataagcacatgacctggcgcactttgctgacactgttgtcagtgcgcaatggtaaacgtctggcggacggg

SEQ ID NO: 173786 - DNA, 75 bp, synthetic construct
  source 1..75: mol_type = other DNA
tggcctggtccatttttccaggcggacgcctttccgtaaaccaacatcgtctgatgctcgcccttcttccgatga

SEQ ID NO: 173787 - DNA, 75 bp, synthetic construct
  source 1..75: mol_type = other DNA
atgaaaaaacgcattgtagttattggcggcggggtaattggtctggcgacagcatgggtgctggtaaaacagggc

SEQ ID NO: 173788 - DNA, 75 bp, synthetic construct
  source 1..75: mol_type = other DNA
acgctgaaagcggcgcaggattacgacatcttcctgcgcatggtggtggcgtatggcaaaccgtggaaggtcaaa

SEQ ID NO: 173789 - DNA, 75 bp, synthetic construct
  source 1..75: mol_type = other DNA
tgccgaagtgctgcacctggtggatctgaccggggcaaaagatccggctaaacgtcaaatcccgctgattaaaac

SEQ ID NO: 173790 - DNA, 75 bp, synthetic construct
  source 1..75: mol_type = other DNA
tctctttatatgaagaagtgtgtgccagatatccgcaggtggcgtttcagtcctccggcggcattggcgacatta

SEQ ID NO: 173791 - DNA, 75 bp, synthetic construct
  source 1..75: mol_type = other DNA
ggaagcgggcgttgcgcgcgtggtggtcggctccaccgcggtgaaatcaccagaaatggtgaaaggctggtttga

SEQ ID NO: 173792 - DNA, 75 bp, synthetic construct
  source 1..75: mol_type = other DNA
caactggtggaaacctatctgcccgtcggcctgaaacatgtgctgtgtaccgatatctcgcgcgacggcacgctg

SEQ ID NO: 173793 - DNA, 75 bp, synthetic construct
  source 1..75: mol_type = other DNA
gcgaagaagacgtggcagcattactggaagcaggcgttgcgcgcgtcgtagtcggctccaccgcagtgaaatcac

SEQ ID NO: 173794 - DNA, 75 bp, synthetic construct
  source 1..75: mol_type = other DNA
cggcgtgcgcggcgtaattgtcgggcgagcactgctggaagataaattcaccgtaacggaggccatccaatgctg

SEQ ID NO: 173795 - DNA, 75 bp, synthetic construct
  source 1..75: mol_type = other DNA
atatgccgtgatgcaggaacagtttggtctgggcgtagatgatgcgaaacatggcggaacttcaaccgttggcgt

SEQ ID NO: 173796 - DNA, 75 bp, synthetic construct
  source 1..75: mol_type = other DNA
atgaaaaaaataaactttgcttttattatattatttctgttttcactccctctgattattttttaccaaccctgg

SEQ ID NO: 173797 - DNA, 75 bp, synthetic construct
  source 1..75: mol_type = other DNA
ttaccgccaacgccccgacacgcaagtcctgagcaattagaaaaaacagttcgttatcttacacaaactgtgcat

SEQ ID NO: 173798 - DNA, 75 bp, synthetic construct
  source 1..75: mol_type = other DNA
tattaatgactgtatgcatatttggtttgtttatagttggttcgattttttatcttcttctggagatatttatgt

SEQ ID NO: 173799 - DNA, 75 bp, synthetic construct
  source 1..75: mol_type = other DNA
aaaattgatgatgcgtcctacagtgacgctctggaagctgaaagggagtgcagggctgagatataccgcgagcag

SEQ ID NO: 173800 - DNA, 75 bp, synthetic construct
  source 1..75: mol_type = other DNA
ttgcgcgatcatctttcagtacttaatgaagctgacgcaaataaattaagacattatgccgaaagcaaaggcacg

SEQ ID NO: 173801 - DNA, 75 bp, synthetic construct
  source 1..75: mol_type = other DNA
gactcgttccctgaaggccactaaatcacaggcaaagccaacactgggtgagttcaccgaaactgaagcaggggt

SEQ ID NO: 173802 - DNA, 75 bp, synthetic construct
  source 1..75: mol_type = other DNA
aacaggtatcaccccggaagcgccgtcattatcgggcgcagcctctacggggtcgtcggtatcagattggacaga

SEQ ID NO: 173803 - DNA, 75 bp, synthetic construct
  source 1..75: mol_type = other DNA
ctatgacctggttgagcgtaataacaacatcgttcttgaataccgcaaatctgaagtgatccgtattgctctgcc

SEQ ID NO: 173804 - DNA, 75 bp, synthetic construct
  source 1..75: mol_type = other DNA
gaccagatattgcagtcaggtattactacaaaggcgttttgtggagtcctggctattttgccagtagctgcggag

SEQ ID NO: 173805 - DNA, 75 bp, synthetic construct
  source 1..75: mol_type = other DNA
gactgcgcagattactctcggctctacggcgggtgaattagaagttatgccgaagctaaatggacaggatgcggc

SEQ ID NO: 173806 - DNA, 75 bp, synthetic construct
  source 1..75: mol_type = other DNA
gggagaagccagccgcttgcgatttgttccgcaagacactaatggtgtaaccgttggtgccatttcggaaataaa

SEQ ID NO: 173807 - DNA, 75 bp, synthetic construct
  source 1..75: mol_type = other DNA
gcctgagtgggcacggttttaaatttgcgtcagttttaggggaaatagctgccgattttgcgcaagacaaaaaaa

SEQ ID NO: 173808 - DNA, 75 bp, synthetic construct
  source 1..75: mol_type = other DNA
tgaacgtgggagcctggtgataaccagtaaccatccgttcagcatgtggggcagcatcttcgtggatgagactat

SEQ ID NO: 173809 - DNA, 75 bp, synthetic construct
  source 1..75: mol_type = other DNA
aatacgacttcattcagttgccggaactgaatggagctcagttccagcaactctgtgaaacgacagactgggttg

SEQ ID NO: 173810 - DNA, 75 bp, synthetic construct
  source 1..75: mol_type = other DNA
cgtcatgacgatgatggcgtaactattgaaacggctgacggtgagtatcaggcgaaaaaagcgattgtctgcgcg

SEQ ID NO: 173811 - DNA, 75 bp, synthetic construct
  source 1..75: mol_type = other DNA
gcagcggttctgtaggcgccgccgccgggtattatgccacccaggctggtttgaaagtgctgatgaccgatgccc

SEQ ID NO: 173812 - DNA, 75 bp, synthetic construct
  source 1..75: mol_type = other DNA
ccttcccgttcttgcgcaatgtattgccgggtatcggttgctgcctgtacggcgctgcctgcacctatgataatt

SEQ ID NO: 173813 - DNA, 75 bp, synthetic construct
  source 1..75: mol_type = other DNA
tggatgttctgataccaggaaggcttcagacaaaaagccgggtgcagccgctgtgctctggatcaagcgtggtga

SEQ ID NO: 173814 - DNA, 75 bp, synthetic construct
  source 1..75: mol_type = other DNA
tggatgttctgataccaggaaggcttcagacaaaaagccgggtgcagccgctgtactctgggtcaagcgtggtga

SEQ ID NO: 173815 - DNA, 75 bp, synthetic construct
  source 1..75: mol_type = other DNA
tggatgttctgataccaggaaggcttcagacaaaaagccgggtgaagccgctgtcctctggctcaagcgtggtga

SEQ ID NO: 173816 - DNA, 75 bp, synthetic construct
  source 1..75: mol_type = other DNA
aaaatggattgctgatgtcggtttcggtgggcagacgctaaccgcgccgattcgtttagtttccgatctcgtgca

SEQ ID NO: 173817 - DNA, 75 bp, synthetic construct
  source 1..75: mol_type = other DNA
gattcagcggtgatttctcgttttttcgaatccctgaaagccaaaattcaggcttaccagcggaaaaaacgacgt

SEQ ID NO: 173818 - DNA, 75 bp, synthetic construct
  source 1..75: mol_type = other DNA
tgaaacgaagctgcatgacggttcaggtcaacgtaattatggttgcagtcgtggggtgaggtgtctactggatgg

SEQ ID NO: 173819 - DNA, 75 bp, synthetic construct
  source 1..75: mol_type = other DNA
gcggctaaagtgaccgtggtggctgatgcgttatcttcaggccagtcgacagtgtctgtagccgcagatcgcgta

SEQ ID NO: 173820 - DNA, 75 bp, synthetic construct
  source 1..75: mol_type = other DNA
agggtatgaaatgaaaccagtgactgtgacaattaacgccgttcctgcagatactgaaggtgctgaggagaaata

SEQ ID NO: 173821 - DNA, 75 bp, synthetic construct
  source 1..75: mol_type = other DNA
cgaatctaaattcgtcgcggatgataaaaacgcggagctcgctgcatctccagagcgtgtagattctctggtggc

SEQ ID NO: 173822 - DNA, 75 bp, synthetic construct
  source 1..75: mol_type = other DNA
gcagggtaatggactggtccatttttccaggcggactccttcccgtcccgtaaaaccaacatcgcctgatgctcc

SEQ ID NO: 173823 - DNA, 75 bp, synthetic construct
  source 1..75: mol_type = other DNA
tgtgctctgggtcaagcgtggtgatgtggaagcgatgcagaaagcccggaacagagccagttatctcgtgaaata

SEQ ID NO: 173824 - DNA, 75 bp, synthetic construct
  source 1..75: mol_type = other DNA
ggaaacattatcacgtgatattactgctcaacaaagatacctggtgctcgccaggggatttcaccgttccttctt

SEQ ID NO: 173825 - DNA, 75 bp, synthetic construct
  source 1..75: mol_type = other DNA
ataagcagaaagccaaaccagtatccttgctcagggaacgagcaggaatgaagttgatttcagccgttgatatca

SEQ ID NO: 173826 - DNA, 75 bp, synthetic construct
  source 1..75: mol_type = other DNA
agcgatccagaatgacaggctgaaaagtggtgatataaagctcaacacctacaagcagaaagccaaacctgtctc

SEQ ID NO: 173827 - DNA, 75 bp, synthetic construct
  source 1..75: mol_type = other DNA
attgccactgaagccaatacgcgcctggctgaacaaagaacccggcagattctggccatcagtgacaggatcgca

SEQ ID NO: 173828 - DNA, 75 bp, synthetic construct
  source 1..75: mol_type = other DNA
gagctgaatatgtggtccggaattgtcttcagtattacctttttattttctgctatcgcctccccgttttggggc

SEQ ID NO: 173829 - DNA, 75 bp, synthetic construct
  source 1..75: mol_type = other DNA
ctggcgtagtgttattcaacgccgtctattcatggaacagtctgcgccgtcgtcggataccccaggtatcgaact

SEQ ID NO: 173830 - DNA, 75 bp, synthetic construct
  source 1..75: mol_type = other DNA
atgtcaccctgtgaaaatgacacccctataaactggaaacgaaacctgatcgtcgcctggctaggctgttttctt

SEQ ID NO: 173831 - DNA, 75 bp, synthetic construct
  source 1..75: mol_type = other DNA
tttgagcgggtgttacgcgagctggggtttaacgttcgcagcttgttagggcgcgtagtgttatcaaatccgcca

SEQ ID NO: 173832 - DNA, 75 bp, synthetic construct
  source 1..75: mol_type = other DNA
atatgccgtgatgcaggaacaatttgggctgggcgtggatgatgcgaaacatgggtttaccgtggatgaactggc

SEQ ID NO: 173833 - DNA, 75 bp, synthetic construct
  source 1..75: mol_type = other DNA
acgcgttgtgttatctaatccaccatcgttgccgccgcgcacgcaccgtttgctgttggtggagctggaagatga

SEQ ID NO: 173834 - DNA, 75 bp, synthetic construct
  source 1..75: mol_type = other DNA
tcagggcgtcgacacccaaaaacttctgggacataaatcgcctaaccagacagctaaataccatgatgatcgtgg

SEQ ID NO: 173835 - DNA, 75 bp, synthetic construct
  source 1..75: mol_type = other DNA
tataaccctgctcttgcaacgaagcaacccagaaggaaaattagccgtcaacgcctcagcctagaagaatggaaa

SEQ ID NO: 173836 - DNA, 75 bp, synthetic construct
  source 1..75: mol_type = other DNA
tccgtttagtgccggatatcgcgcaaactacaccgcacggagaataccgtctgttgcaagagggcagcgactggg

SEQ ID NO: 173837 - DNA, 75 bp, synthetic construct
  source 1..75: mol_type = other DNA
actggttatcccgttttgaaagtattctcaacagtgccctggcgcaacaccgtgtcgtctcgttaatccggatgg

SEQ ID NO: 173838 - DNA, 75 bp, synthetic construct
  source 1..75: mol_type = other DNA
gcgacgatgatccaggaggcatggtgcagcgccctgcatcttgagccctggcaaggcgatggcctggtccatttt

SEQ ID NO: 173839 - DNA, 75 bp, synthetic construct
  source 1..75: mol_type = other DNA
gagccctggcagggtaatggactggttcatttttccaggcggacgcctttccgtaaaccgacatcatctgatgct

SEQ ID NO: 173840 - DNA, 75 bp, synthetic construct
  source 1..75: mol_type = other DNA
atgcgttatcttcaaaccagtcgaaagtctctgtcgcagaagatcacgtaaaagccggcgaaagcacaaccgtga

SEQ ID NO: 173841 - DNA, 75 bp, synthetic construct
  source 1..75: mol_type = other DNA
atgcgttatcttcaggccagtcgacagtgtctgtagccgcagatcgcgtaaaagcaggcgaaagcacaaccgtga

SEQ ID NO: 173842 - DNA, 75 bp, synthetic construct
  source 1..75: mol_type = other DNA
ttccgatgacacgcctttgcctggtgggtgttctgatacccggaaggcttctgacaaaaagtctggtggatccgc

SEQ ID NO: 173843 - DNA, 75 bp, synthetic construct
  source 1..75: mol_type = other DNA
gcgcaccgaaaaatccctgtctgaacaggaagaacgcctgtctgagcttgagacagccctgcaggcacagcagac

SEQ ID NO: 173844 - DNA, 75 bp, synthetic construct
  source 1..75: mol_type = other DNA
tgccgaagaaatcacggaaggtccgctggcaggcaagatggcgctgtatgccgacgttgagccaacggaatccct

SEQ ID NO: 173845 - DNA, 75 bp, synthetic construct
  source 1..75: mol_type = other DNA
ccgacgttgagccaacggagtccttggtggaactggtgaaaaaaggccagaaattattcacctctatggaagtca

SEQ ID NO: 173846 - DNA, 75 bp, synthetic construct
  source 1..75: mol_type = other DNA
aagcagcatgacggttccgggcaacgtaattatggttgcagtcgtgggccggggcgtctgctggatggcaggtga

SEQ ID NO: 173847 - DNA, 75 bp, synthetic construct
  source 1..75: mol_type = other DNA
ccgttcgcgctgtatcggcattcactaaatcaatcaagcggccaaccattactataaacggaatcgggcggcggc

SEQ ID NO: 173848 - DNA, 75 bp, synthetic construct
  source 1..75: mol_type = other DNA
acgagattgtcacagttgaaggggtacgctgtttctacgtcagcaaatccaaaacgaaagcgggcatcaggtacg

SEQ ID NO: 173849 - DNA, 75 bp, synthetic construct
  source 1..75: mol_type = other DNA
aacggccaaaatgccgttgctcagccactggtgctgaatgttgcaggtgacgcatctaaggctgagattcgtgat

SEQ ID NO: 173850 - DNA, 75 bp, synthetic construct
  source 1..75: mol_type = other DNA
gtgaattagaagttatgccgaagctaaatggacaggatgcggcagcaaatgcggcaaaagtaaccgtggtggctg

SEQ ID NO: 173851 - DNA, 75 bp, synthetic construct
  source 1..75: mol_type = other DNA
cagacggtttccctggggcttgtggtcagcaaagcaactcacggtctgaaaaatgtgcaatgggaagcgccgtct

SEQ ID NO: 173852 - DNA, 75 bp, synthetic construct
  source 1..75: mol_type = other DNA
ctgaagtttgtcgccgggccgcttgatgcagcacattcgaccatcgccctgaatccggataaaccggtggttggt

SEQ ID NO: 173853 - DNA, 75 bp, synthetic construct
  source 1..75: mol_type = other DNA
cgaaaaatgaccatttcgtgagcggaaaaatcacgcgtacatttagtaccagcaagcctggtgtctatacgttca

SEQ ID NO: 173854 - DNA, 75 bp, synthetic construct
  source 1..75: mol_type = other DNA
aagggcaggctattttcaccgctaccactactgttgcggcgacatacacactcaaggcgcaagtgagtcagacca

SEQ ID NO: 173855 - DNA, 75 bp, synthetic construct
  source 1..75: mol_type = other DNA
cctttatcgaccatgatttatcccgtagtcatacccgcattggtgttggtgcggaatactggcgtgattatttga

SEQ ID NO: 173856 - DNA, 75 bp, synthetic construct
  source 1..75: mol_type = other DNA
actggttatcccgctttgaaagtattctcaacagtgccctggcgcaacaccgtgccgtctcgttaatccgggtgg

SEQ ID NO: 173857 - DNA, 75 bp, synthetic construct
  source 1..75: mol_type = other DNA
gtacgaaatgaagccagtgacggtgaccattaccgcggtggatgccgatacggcaaaggacgaggaggcgatgaa

SEQ ID NO: 173858 - DNA, 75 bp, synthetic construct
  source 1..75: mol_type = other DNA
gcgccgatcgtacggcgttaacgcttgacggtcagagccgtattcaaatgcttgctaacggtaatgagcaaaagc

SEQ ID NO: 173859 - DNA, 75 bp, synthetic construct
  source 1..75: mol_type = other DNA
aaaaacgcgcagctcaccgcatcatctaatgtgccttcgctggtggcggatgggaaatcgactgcgaagctggag

SEQ ID NO: 173860 - DNA, 75 bp, synthetic construct
  source 1..75: mol_type = other DNA
aaacgctgaagtttgttgccgggccgcttgatgcagcacattcgtccatcaccctgaatcctgataaaccggtgg

SEQ ID NO: 173861 - DNA, 75 bp, synthetic construct
  source 1..75: mol_type = other DNA
tgagcaacaggataatgagcttcatattagatggggtaaagtcggtactaacgggcaaagtcagataaaaagttt

SEQ ID NO: 173862 - DNA, 75 bp, synthetic construct
  source 1..75: mol_type = other DNA
gccgccgggctactgcctgtagcgttaggcaaaccaggtaaaaatcgtgattgcgcccgccaggcgctccgtctg

SEQ ID NO: 173863 - DNA, 75 bp, synthetic construct
  source 1..75: mol_type = other DNA
tgcagatgctgcggcggcggcaaaagcggagcttaagctgatcgcagagaaaacgaaaaaaggctatgtggaaaa

SEQ ID NO: 173864 - DNA, 75 bp, synthetic construct
  source 1..75: mol_type = other DNA
tctctttctggtggaacatccgctgatgtgtcacttaacccgacggctattatggggagtatataacgatgaaaa

SEQ ID NO: 173865 - DNA, 75 bp, synthetic construct
  source 1..75: mol_type = other DNA
tgcggtataagccggatacttcttgagttaacggaagaccatcctgacaatcccacacatcttttgggtcgcatc

SEQ ID NO: 173866 - DNA, 75 bp, synthetic construct
  source 1..75: mol_type = other DNA
aatggcattgcgcaaaagattaaattcgttgcattacaggaacatgccagcgacagaatcaatatggtcgccgaa

SEQ ID NO: 173867 - DNA, 75 bp, synthetic construct
  source 1..75: mol_type = other DNA
gtggcagcacgcccaatgattatgatgcgggttacaacctggcgtcggtgtacgcgttcttgcgttcccgcctgt

SEQ ID NO: 173868 - DNA, 75 bp, synthetic construct
  source 1..75: mol_type = other DNA
ttgtgagaatgcgattgcgcaaagtgagctacttaagccgctgcaacaacatgacgtagaggcaatctggctggg

SEQ ID NO: 173869 - DNA, 75 bp, synthetic construct
  source 1..75: mol_type = other DNA
gacggcacgctggcaggctctaacgtctcgctgtatgaagaagtctgctcccgctacccgcaggtggcatttcag

SEQ ID NO: 173870 - DNA, 75 bp, synthetic construct
  source 1..75: mol_type = other DNA
aactcgccaacaacatgatccgttgctcatctgcgggcatagcgattttacgaccattcagtgcgctcttctggc

SEQ ID NO: 173871 - DNA, 75 bp, synthetic construct
  source 1..75: mol_type = other DNA
cgattccactcattaccggcctcgattttggtcatgaacaacgcacggttacactgccgttgggcgcacatgcca

SEQ ID NO: 173872 - DNA, 75 bp, synthetic construct
  source 1..75: mol_type = other DNA
aacggtattctggtgctggaagatattaacgagcaccctttccgcgtcgaacgtatgctgttgcagctctatcat

SEQ ID NO: 173873 - DNA, 75 bp, synthetic construct
  source 1..75: mol_type = other DNA
aatacttaagcaaagcctgtcaaaaacatcccgctgcggctattgccgcttatgctactttgctggcaatacatg

SEQ ID NO: 173874 - DNA, 75 bp, synthetic construct
  source 1..75: mol_type = other DNA
ggaaaacgaatcacccggatgcgattcaaattctgatcctcggtgtaattggcaagaaaaagcacctggaatact

SEQ ID NO: 173875 - DNA, 75 bp, synthetic construct
  source 1..75: mol_type = other DNA
gcagtcattccggtaactggcgatattaatcgatttgcttttcctcatcgctctcgccccagagagatcaattat

SEQ ID NO: 173876 - DNA, 75 bp, synthetic construct
  source 1..75: mol_type = other DNA
ttgaaatcgcccttctcgctcttcgactcaaatataaaccagtaaaagccgacgtcaccaccatcattccccctg

SEQ ID NO: 173877 - DNA, 75 bp, synthetic construct
  source 1..75: mol_type = other DNA
cgtttgccgagttacaaagtcgaattctggacaatcaacaaacagggagtgcgcaatctgatgcggcattgctct

SEQ ID NO: 173878 - DNA, 75 bp, synthetic construct
  source 1..75: mol_type = other DNA
agtaaatcctggcagttgtacgctctctgtttcctacccactcaacatgctatttctttcctcaatcaaataatc

SEQ ID NO: 173879 - DNA, 75 bp, synthetic construct
  source 1..75: mol_type = other DNA
tgcatttatggcctgcctgcaacgtgatccacgacgtctgtgcttcttcccctttttcctcggtgtcagtgaact

SEQ ID NO: 173880 - DNA, 75 bp, synthetic construct
  source 1..75: mol_type = other DNA
tgatagcagtggctcgctgacactggatttcggcccacgccaattcaccgttggttttgacgaaactttaaaacc

SEQ ID NO: 173881 - DNA, 75 bp, synthetic construct
  source 1..75: mol_type = other DNA
aggggaacgctacagtacacagccctcgctcacgttctccgcgcttgatgccatcaccgccagcgaactgattaa

SEQ ID NO: 173882 - DNA, 75 bp, synthetic construct
  source 1..75: mol_type = other DNA
tgcggatgctgcggcggcggaaaaagcggagctgaagctgattgcggagaaaacgaaaaaggggtatgtggaagg

SEQ ID NO: 173883 - DNA, 75 bp, synthetic construct
  source 1..75: mol_type = other DNA
catagttgctgaaaaccgtgggctgactatggctgaactggaagaccgcctggctccagatttagggcttgatag

SEQ ID NO: 173884 - DNA, 75 bp, synthetic construct
  source 1..75: mol_type = other DNA
ctcacccactttctccatgctcgacgacatcaccgccagcgagctgattaacgacattgaatcactgtttgatta

SEQ ID NO: 173885 - DNA, 75 bp, synthetic construct
  source 1..75: mol_type = other DNA
cgatagtcagacctggacaaccgcacaattcatttcgtggctggagagtcagggggcatttaaccatccttactg

SEQ ID NO: 173886 - DNA, 75 bp, synthetic construct
  source 1..75: mol_type = other DNA
gcaaacaataaggtcattacagatacaggttgcggaaatatttgtcttgcaggtgctgtggtggaagttattggc

SEQ ID NO: 173887 - DNA, 75 bp, synthetic construct
  source 1..75: mol_type = other DNA
cattctggtcgaaccaatgcttattctctcactgctggtattggcgctgatagcaggttccacgcatatcgagat

SEQ ID NO: 173888 - DNA, 75 bp, synthetic construct
  source 1..75: mol_type = other DNA
ggcttcacattgccattgcacttctcattgatggcctttgccgatgactacggcgagtggaaaacccgcgtacgt

SEQ ID NO: 173889 - DNA, 75 bp, synthetic construct
  source 1..75: mol_type = other DNA
ttgcaacagtgccgcaccttcgaccagaacccggaacggcaactggaaggcgtcaaggttgatcgcgcttttagc

SEQ ID NO: 173890 - DNA, 75 bp, synthetic construct
  source 1..75: mol_type = other DNA
ggcacacgatcactgcaaacaaatgctgatgagctgggtggaacggcatcaaccgttactggaacaacacgtact

SEQ ID NO: 173891 - DNA, 75 bp, synthetic construct
  source 1..75: mol_type = other DNA
gttcattaagtgaaaaatggaaataccgatttaatttttatgacaaatatggttttcctggattctggggggcaa

SEQ ID NO: 173892 - DNA, 75 bp, synthetic construct
  source 1..75: mol_type = other DNA
tgggcgggcgtaccggtgatttatctggcggcggcgggactggtcgcaatcgcgttattactgacgtggcgataa

SEQ ID NO: 173893 - DNA, 75 bp, synthetic construct
  source 1..75: mol_type = other DNA
ggcgctggtggccattttgttggcgatcccgcgtccgacggtaaaagccagtaaaggcaaaccgctgccgtttcg

SEQ ID NO: 173894 - DNA, 75 bp, synthetic construct
  source 1..75: mol_type = other DNA
cgctgcgaattttcaatgatgccttcggtcttattttccgtcgttcagaagattttcttcatttcattccgacgg

SEQ ID NO: 173895 - DNA, 75 bp, synthetic construct
  source 1..75: mol_type = other DNA
aacagcacttccgagtcactggcggcaacaccaaaggcagtaaaggcagcatatgaccttgctaacgcaaaatat

SEQ ID NO: 173896 - DNA, 75 bp, synthetic construct
  source 1..75: mol_type = other DNA
actgttcaaatgaatttcattgcttttttcttctcctggatatatttatttgtcctgggattatggaaaaaagca

SEQ ID NO: 173897 - DNA, 75 bp, synthetic construct
  source 1..75: mol_type = other DNA
cagggtgaacatgtcgaatttgccctgattccggtcaccgcggtgaaatacacctacacagtgatcccggcgctg

SEQ ID NO: 173898 - DNA, 75 bp, synthetic construct
  source 1..75: mol_type = other DNA
atggcgaaagcggctcagggtgaacatgttgaatttgccctgattccggtcacggcggtgaaatacacctacacg

SEQ ID NO: 173899 - DNA, 75 bp, synthetic construct
  source 1..75: mol_type = other DNA
tgccgcagatttttgttgatcagcaacacattggcggctataccgattttgccgcatgggtgaaagagaatcttg

SEQ ID NO: 173900 - DNA, 75 bp, synthetic construct
  source 1..75: mol_type = other DNA
gacggcacgctggctggctccaacgtttcgctatatgaagaggtctgcgcccgctatccgcaggtggcgttccag

SEQ ID NO: 173901 - DNA, 75 bp, synthetic construct
  source 1..75: mol_type = other DNA
tgcactggatggtatccaggtaccggaagtgaacgatcaggacggcaacggcaaggcggatgcagaggaagcggc

SEQ ID NO: 173902 - DNA, 75 bp, synthetic construct
  source 1..75: mol_type = other DNA
gccggtatggcggggcttgccagccactcaatggcagcgccggggctatttaccagcgtgcagttcttcgatccg

SEQ ID NO: 173903 - DNA, 75 bp, synthetic construct
  source 1..75: mol_type = other DNA
ggctgctgggcgcatcgtcgcggtacgctgctggttcatgccgatctctcctttgaaaacctttctcacacccgg

SEQ ID NO: 173904 - DNA, 75 bp, synthetic construct
  source 1..75: mol_type = other DNA
aataccggtagcggcgtaccgtgggtcacctgggacatcatccccgacaatgacgatgcggaaatcgaagtttac

SEQ ID NO: 173905 - DNA, 75 bp, synthetic construct
  source 1..75: mol_type = other DNA
atgatgagcgaatgtaataaacaacaggcagtgaataagttgacggatattgtcgctaactttaccgccatgatt

SEQ ID NO: 173906 - DNA, 75 bp, synthetic construct
  source 1..75: mol_type = other DNA
aacagcgtggcgcttatcggggtcgaaagaaatcgctgtctgacccagagatagcggaagtacggcggcgagtca

SEQ ID NO: 173907 - DNA, 75 bp, synthetic construct
  source 1..75: mol_type = other DNA
acctcggtggaaaccgccgccgtgctctcgcgaaaagccattttgcgcccgattggcagccgccaccccaatcca

SEQ ID NO: 173908 - DNA, 75 bp, synthetic construct
  source 1..75: mol_type = other DNA
tgacgatgcggaaatcgaagtttacatggcaggcggcggctgcacgctaccaggccgctcgaaagtgttaatgcc

SEQ ID NO: 173909 - DNA, 75 bp, synthetic construct
  source 1..75: mol_type = other DNA
cagaccctcgccccgcaattccacatgacgaggtaatggctgaaatggaaaatcttattgctcaaattgctgtaa

SEQ ID NO: 173910 - DNA, 75 bp, synthetic construct
  source 1..75: mol_type = other DNA
attcactggtaccaccattaactctcaggtaaaagaactgggtactgctggtgataccggtactgctgttgtcgt

SEQ ID NO: 173911 - DNA, 75 bp, synthetic construct
  source 1..75: mol_type = other DNA
tacaagcggataataacactctgcactttacctcttgggtgaaaaaagctactggggccccagctgttgctgaag

SEQ ID NO: 173912 - DNA, 75 bp, synthetic construct
  source 1..75: mol_type = other DNA
tttctgaatttgaaacagtcgaacaagaaaacagctataacgaatggttgcgagccaaagtggcagcaagcctct

SEQ ID NO: 173913 - DNA, 75 bp, synthetic construct
  source 1..75: mol_type = other DNA
aatgatggtgatgttaaatatttcacctatcagtccagtgatattcctggtttaactctttggatacaggagggt

SEQ ID NO: 173914 - DNA, 75 bp, synthetic construct
  source 1..75: mol_type = other DNA
aataccagtgcaggatacacggatcactctcatcgtactgatatggggaatggagatgataccttggttgttggt

SEQ ID NO: 173915 - DNA, 75 bp, synthetic construct
  source 1..75: mol_type = other DNA
tggtgatactggtacagctattgcgctggccagtgcagatggttctctggttacttttgatggaaccacggcagg

SEQ ID NO: 173916 - DNA, 75 bp, synthetic construct
  source 1..75: mol_type = other DNA
cggcgaaccgtggaaagtggaagaggcgacgcagatcctgcatatcaatcacggtgaaatgcagatcacctcgtc

SEQ ID NO: 173917 - DNA, 75 bp, synthetic construct
  source 1..75: mol_type = other DNA
gagtctgctgatcagaccattgattttggtcagatttctaaagcgcatctgaacaatgacggcctgtcaattcag

SEQ ID NO: 173918 - DNA, 75 bp, synthetic construct
  source 1..75: mol_type = other DNA
tgggtccagaaagcaagtggtgaaggaactgtaaccgaaggtgactttgcagctgtagccaacgtcaacctgacc

SEQ ID NO: 173919 - DNA, 75 bp, synthetic construct
  source 1..75: mol_type = other DNA
atttggtgataaggtatcttctgtttctaagaactggtctactttacttgatagtaatcctggaagttatgttac

SEQ ID NO: 173920 - DNA, 75 bp, synthetic construct
  source 1..75: mol_type = other DNA
gctttggttaaaaaagacacaagtggtgatgatgtagctgaaggtgctttctcagcagttgcgaatttcaacctg

SEQ ID NO: 173921 - DNA, 75 bp, synthetic construct
  source 1..75: mol_type = other DNA
gtatttggcgttcatgctgtagatctggactggaaaacgatagcggaaaatatagcattaatggaaatggaataa

SEQ ID NO: 173922 - DNA, 75 bp, synthetic construct
  source 1..75: mol_type = other DNA
tgtatggactgtttgctatggtcacgccggaaaagacatcatgttgggcaagacatacacacaagcagaatgcga

SEQ ID NO: 173923 - DNA, 75 bp, synthetic construct
  source 1..75: mol_type = other DNA
gcctataacgtaggcgcaaccaacttcaaaacatcaaccttattaaaactactcaatgacggcaagaaatcagaa

SEQ ID NO: 173924 - DNA, 75 bp, synthetic construct
  source 1..75: mol_type = other DNA
tggctttatcccgatcggggagactttattgcctggtcggcagaatacaggatatcaacgccgttcgtcaggtaa

SEQ ID NO: 173925 - DNA, 75 bp, synthetic construct
  source 1..75: mol_type = other DNA
aagctcgcgtgattggttgcttgctggaaaagcaggtgaccacgccggagcaatacccgctctcagtcaatggtg

SEQ ID NO: 173926 - DNA, 75 bp, synthetic construct
  source 1..75: mol_type = other DNA
tatattgatgagttgatagatttgctgttcatgcaggcatcctcttttcagcaagaaaaatggcaggggtggtca

SEQ ID NO: 173927 - DNA, 75 bp, synthetic construct
  source 1..75: mol_type = other DNA
gaccttccaggccctgcacttgccagtacgctggttcgtgagctggcagcccggtttgcgactcagcagcaaggt

SEQ ID NO: 173928 - DNA, 75 bp, synthetic construct
  source 1..75: mol_type = other DNA
gggcttggtgttgccctggctccttttgccgtttggggggctcgtttcctgtttttcattcacagaagtatttgg

SEQ ID NO: 173929 - DNA, 75 bp, synthetic construct
  source 1..75: mol_type = other DNA
gctgctgttatcttttggggagggatcgcttacttccagtggcaagttgctttggttgtcggggctctgtttgga

SEQ ID NO: 173930 - DNA, 75 bp, synthetic construct
  source 1..75: mol_type = other DNA
tggatgattgatggacgcgggattaacaacgtctgcgatgtgttgatgtatctcgaagaagacgatacccgtgat

SEQ ID NO: 173931 - DNA, 75 bp, synthetic construct
  source 1..75: mol_type = other DNA
ccgcattcccatttacgtgatgatcatcgcctcggtggtcagcgctgtacagatgctgatcaacgcctacgcctt

SEQ ID NO: 173932 - DNA, 75 bp, synthetic construct
  source 1..75: mol_type = other DNA
tttgactataaccatgctatcgcgctctggagactgaaaagatataaacaagcagaaacactgtgtctgagcgta

SEQ ID NO: 173933 - DNA, 75 bp, synthetic construct
  source 1..75: mol_type = other DNA
gccagcaacgtcttttccgaggtgaaaggtcgttttgacatgattatctccaacccaccgttccacgatggaatg

SEQ ID NO: 173934 - DNA, 75 bp, synthetic construct
  source 1..75: mol_type = other DNA
ctggatgtcggctgcggtgcaggcgttctttcagttgcctttgcacgccactcaccgaagattcgtctcacgttg

SEQ ID NO: 173935 - DNA, 75 bp, synthetic construct
  source 1..75: mol_type = other DNA
ggggcgaatacagcgtcgatggcctgacggtcaaaacgctgccgggcgtgtttagccgcgacggtctggatgtcg

SEQ ID NO: 173936 - DNA, 75 bp, synthetic construct
  source 1..75: mol_type = other DNA
gttatcaggtaatggatcctgaacgattcggtgtggtcgaatttgatagcaattataaagcattaagtattgttg

SEQ ID NO: 173937 - DNA, 75 bp, synthetic construct
  source 1..75: mol_type = other DNA
attggttaactaaggaggatatacggtttcttgcaaaaaaactaacaaaaacagattatgggaaatatttattgg

SEQ ID NO: 173938 - DNA, 75 bp, synthetic construct
  source 1..75: mol_type = other DNA
gttctgggacaaggctttatccaattacaatgggggtttcaaagcagctattgcccatttatgataaaccgatga

SEQ ID NO: 173939 - DNA, 75 bp, synthetic construct
  source 1..75: mol_type = other DNA
atgaactatgcaggacacgaaaaactccgcgcagaagtggcggaagtcgccaacagcatgtgtgacctgcgggcg

SEQ ID NO: 173940 - DNA, 75 bp, synthetic construct
  source 1..75: mol_type = other DNA
tcgacggcaccgtggtgcgtctccatcagggcgattacggcaaacaacgcgattacggtaacgacccgctgccgc

SEQ ID NO: 173941 - DNA, 75 bp, synthetic construct
  source 1..75: mol_type = other DNA
gcgcaatctgatgcggcattgctctggagtttctggaattcttactctgcagatgaactagtcgatgacttaatc

SEQ ID NO: 173942 - DNA, 75 bp, synthetic construct
  source 1..75: mol_type = other DNA
gccgattatgcaccgttgaataaggtagacagcgcccgtcgctgcggcctctattttggtcgtctggaaaagcag

SEQ ID NO: 173943 - DNA, 75 bp, synthetic construct
  source 1..75: mol_type = other DNA
ctgctattggtgttaacggtgatgcggttgatccgaaatcgattaccagttgggccgatctgtggaagcctgaat

SEQ ID NO: 173944 - DNA, 75 bp, synthetic construct
  source 1..75: mol_type = other DNA
tgaacgcctggcacgccagacgctgtatcgcgccaatcgcctgttcatggaggcatataccgaaattctggaact

SEQ ID NO: 173945 - DNA, 75 bp, synthetic construct
  source 1..75: mol_type = other DNA
tcgggcaaccaaagttggcgactggctggagatggcaaaatcgctcgccggtagcggcaagcagattgtgctctc

SEQ ID NO: 173946 - DNA, 75 bp, synthetic construct
  source 1..75: mol_type = other DNA
aagaccgcccgaaagatgagtgtgaaacctgctgcattaagtatccgaacgggcgcaacgtgctgtcgcaggaaa

SEQ ID NO: 173947 - DNA, 75 bp, synthetic construct
  source 1..75: mol_type = other DNA
cgaagtggttcattcactggcgaagtggaaacgtcagaccttagggcaacacgacttcagcgcgggggggggggg

SEQ ID NO: 173948 - DNA, 75 bp, synthetic construct
  source 1..75: mol_type = other DNA
acaattcacggggacaacagaagctggtggtgcagctactaatttaggtctttccagaactaatgcaattattcg

SEQ ID NO: 173949 - DNA, 75 bp, synthetic construct
  source 1..75: mol_type = other DNA
atgagcttcaaagcaagttatcatcactgaatgcgactgaacaaaaagctaaagagctgcgttctggcatttcac

SEQ ID NO: 173950 - DNA, 75 bp, synthetic construct
  source 1..75: mol_type = other DNA
aggaaaaccaacaagtgtttgtactcaatggcattcagaccatgagcggctacgtttacaacctcggtaacgagc

SEQ ID NO: 173951 - DNA, 75 bp, synthetic construct
  source 1..75: mol_type = other DNA
atggctggctgacaaaaaaagaattattaattcgctcagaattgatgtcaaaaaatagctatggacaatatttgt

SEQ ID NO: 173952 - DNA, 75 bp, synthetic construct
  source 1..75: mol_type = other DNA
ttttatactaacgaagtagtagaatacgctaaacttgtgaagccctcttctcgaggagaactcgaaatcacatcg

SEQ ID NO: 173953 - DNA, 75 bp, synthetic construct
  source 1..75: mol_type = other DNA
aggggaggaatttattgccaatgattctgtttgcttagttcttggtgataatatcttttatggacaaggtttttc

SEQ ID NO: 173954 - DNA, 75 bp, synthetic construct
  source 1..75: mol_type = other DNA
atttgcaggggcgccctgtggttgtcctcagcaacaatgacggggcgcttgttgcggtcaatcgcgcggcgaaag

SEQ ID NO: 173955 - DNA, 75 bp, synthetic construct
  source 1..75: mol_type = other DNA
gttgcatgatgcagccgaggttctttgttcggatgttgtcacgccggtcaagaaagcaaatgctgttttgcagcg

SEQ ID NO: 173956 - DNA, 75 bp, synthetic construct
  source 1..75: mol_type = other DNA
atgtctaattcaaatttcggctttctagctctggccttgcgccaacgcctgatcaaacgctggtcactgatgcac

SEQ ID NO: 173957 - DNA, 75 bp, synthetic construct
  source 1..75: mol_type = other DNA
gcggcgatggggatgttgcaaatgctgatctttaccgtaggtattgagatcagtaaacatgcctggctgaatggc

SEQ ID NO: 173958 - DNA, 75 bp, synthetic construct
  source 1..75: mol_type = other DNA
gatccagacccgcgattctgtgtaccagaatcagccagaaacgaaacagcctgagccagtagtgcaacaacagga

SEQ ID NO: 173959 - DNA, 75 bp, synthetic construct
  source 1..75: mol_type = other DNA
aagtactgactgaaactgatcatgccaaccctgatccggtaatcgtggatattgcctgcggtcgttcctctgccc

SEQ ID NO: 173960 - DNA, 75 bp, synthetic construct
  source 1..75: mol_type = other DNA
ggatgtgaaacaacctgagccagtagtgcaacaggaaccggaaatagtctgcaatgcctgcggtcagactggcgg

SEQ ID NO: 173961 - DNA, 75 bp, synthetic construct
  source 1..75: mol_type = other DNA
gtattcgcaccgtgcaaattgccggtagcgatccgaaagaaatggcagatgcagcacgtattaacgtggaaagcg

SEQ ID NO: 173962 - DNA, 75 bp, synthetic construct
  source 1..75: mol_type = other DNA
ccattccggttatcgcgaatggcgacattactgacccgcttaaagccagagctgtgctcgactatacaggggcgg

SEQ ID NO: 173963 - DNA, 75 bp, synthetic construct
  source 1..75: mol_type = other DNA
cactggggagttgctgcccccgctgcctttggcagaggttaagcgcttgctttgcgcgcacgttcgggaactgca

SEQ ID NO: 173964 - DNA, 75 bp, synthetic construct
  source 1..75: mol_type = other DNA
caaacatgataagacatcactcgcacgagatgtagccaccggcgttctggcccgttcaatggatgtggatattta

SEQ ID NO: 173965 - DNA, 75 bp, synthetic construct
  source 1..75: mol_type = other DNA
tgtttcaggaattacccgtacgccttccggtgctaacgctggcggcggaaatattaccgatcgtggtgaaggatt

SEQ ID NO: 173966 - DNA, 75 bp, synthetic construct
  source 1..75: mol_type = other DNA
agaacagctatcccgttcgaaggagtaccccacaatgcactggatgatgcccgtcaccaggcgaaatacgtttca

SEQ ID NO: 173967 - DNA, 75 bp, synthetic construct
  source 1..75: mol_type = other DNA
cacgatctgacgtcactggcacgcgatgtagccactggcgtactggcccgttcaatggacgtggacatctataac

SEQ ID NO: 173968 - DNA, 75 bp, synthetic construct
  source 1..75: mol_type = other DNA
tggcaaaaacagaacgggctaaatctttgccttacaacatcagtggtacaaaagagcaattaaccgaaatcgccc

SEQ ID NO: 173969 - DNA, 75 bp, synthetic construct
  source 1..75: mol_type = other DNA
gcacaatgctgaaggatgcccgcatcagtctgatgtattaccacgggcggcacattgccggaactatcccgaacg

SEQ ID NO: 173970 - DNA, 75 bp, synthetic construct
  source 1..75: mol_type = other DNA
tttgatcgctttgcatcctggtgtgcgcgtacaaaaagttgcccgctttcttcagacagagataaggcaataact

SEQ ID NO: 173971 - DNA, 75 bp, synthetic construct
  source 1..75: mol_type = other DNA
ggagtcgtcgatattgatgacctggaggacaacttcacatggcaactcaaacaggcacaaagttatcaggaaacg

SEQ ID NO: 173972 - DNA, 75 bp, synthetic construct
  source 1..75: mol_type = other DNA
accgaaaagcaacgagtactaaataaaattaatgcctgtatccataataccggagccgaagtcattcgccatatc

SEQ ID NO: 173973 - DNA, 75 bp, synthetic construct
  source 1..75: mol_type = other DNA
tgcaaacattatcactagattgtctgtaattggaatcaaaaacagacctggtattatatcaactgcacataataa

SEQ ID NO: 173974 - DNA, 75 bp, synthetic construct
  source 1..75: mol_type = other DNA
aatggtgatgggcatacattagctctcaccggagttaatttatgtgtagataaagcagttgtacattacctgatc

SEQ ID NO: 173975 - DNA, 75 bp, synthetic construct
  source 1..75: mol_type = other DNA
attttccagcccgttactgacaataaatggtgatgggcatacattagctcttaccggagtcaatttatgtgtgga

SEQ ID NO: 173976 - DNA, 75 bp, synthetic construct
  source 1..75: mol_type = other DNA
ctcttttgatagcgttaaccatttatctatttttatttgatgttattttattagggtcaggggcatggagcatta

SEQ ID NO: 173977 - DNA, 75 bp, synthetic construct
  source 1..75: mol_type = other DNA
ggataaccccgacgttggcattatgattatggatagccaacaggaatccgtagacttaaatgcattggctgcgca

SEQ ID NO: 173978 - DNA, 75 bp, synthetic construct
  source 1..75: mol_type = other DNA
tcattgaagttccacaaggttgcacaattaatgagggaactagttttaccgttaatatgccggatgtctgggcca

SEQ ID NO: 173979 - DNA, 75 bp, synthetic construct
  source 1..75: mol_type = other DNA
ggataaacaactgacagccgtggcgtattcgtatggaactcaaattgcagccttatatgcagaacgttttcccta

SEQ ID NO: 173980 - DNA, 75 bp, synthetic construct
  source 1..75: mol_type = other DNA
cacgtacaaaaagttgcccactttcttcagtcagagataaggcaataactcagttccatgagctgttatcaaaat

SEQ ID NO: 173981 - DNA, 75 bp, synthetic construct
  source 1..75: mol_type = other DNA
gaaggaccttagtattgtttatcttttctgtttttctttgcggaacagtgtctgccagacagatcgagtggcaat

SEQ ID NO: 173982 - DNA, 75 bp, synthetic construct
  source 1..75: mol_type = other DNA
ccactggtgaaaccattaacttttccagtcgagaagacgatcacgctattttgatttataaactggaacctacta

SEQ ID NO: 173983 - DNA, 75 bp, synthetic construct
  source 1..75: mol_type = other DNA
atggggaaagaagtgatgggaaaaaaagagaacgagatggcgcaggaaaaagagcgtccagccggaagccagagt

SEQ ID NO: 173984 - DNA, 75 bp, synthetic construct
  source 1..75: mol_type = other DNA
aagaaaacgccgggaaaacgtttatcagtccggatatgtatgaacaggcaaaaaatattcacgctgcactgcaaa

SEQ ID NO: 173985 - DNA, 75 bp, synthetic construct
  source 1..75: mol_type = other DNA
acaaacaactggccagcaccgattaccgaaagttataccgacgaattaaacgactttgatcttcgtcgtcttgaa

SEQ ID NO: 173986 - DNA, 75 bp, synthetic construct
  source 1..75: mol_type = other DNA
cgattctgtgtaccagaatcagccagaaacggaacagcctgagccagtagtgcaacaacaggaaacggagaaagt

SEQ ID NO: 173987 - DNA, 75 bp, synthetic construct
  source 1..75: mol_type = other DNA
ggtgaacggtcatcgcattatcacatccaccagcaggacgtgtgaccatctaatgatcgaccttgaaaccatggg

SEQ ID NO: 173988 - DNA, 75 bp, synthetic construct
  source 1..75: mol_type = other DNA
accgcaggcggagtcatcgatcgggacaccattaagtggtggctgaaacagtcacgggaagcacaatcagccatt

SEQ ID NO: 173989 - DNA, 75 bp, synthetic construct
  source 1..75: mol_type = other DNA
cctctgttgaaaaccagtggagcacgggagcagcttctggatcaaattgaaactgtagacccagaactggcaaaa

SEQ ID NO: 173990 - DNA, 75 bp, synthetic construct
  source 1..75: mol_type = other DNA
gaaatatcagaaactgcgggcagaacttcatgaagcccggaaaaccattccgcccaaaaatcctgtcgatgccga

SEQ ID NO: 173991 - DNA, 75 bp, synthetic construct
  source 1..75: mol_type = other DNA
taaaaaacacaatgccagtctgccagcactgatgacaccagagcagatgaaagagtggatcgaaagctacaacag

SEQ ID NO: 173992 - DNA, 75 bp, synthetic construct
  source 1..75: mol_type = other DNA
aagcgacagcacctgtagaaactgaaatcatgtggccgtcatatttcgagccaggccgctatgaaaacctcccga

SEQ ID NO: 173993 - DNA, 75 bp, synthetic construct
  source 1..75: mol_type = other DNA
tttaaagctgttgccacgaattttcctgtcgttaatgaccttccccctgaaggtgagatcgattttacctggagt

SEQ ID NO: 173994 - DNA, 75 bp, synthetic construct
  source 1..75: mol_type = other DNA
agtcacaggtaaattctgctgatgcgaaatatcaggaactgcgggcagaactccatgaagcccggaaaaacattc

SEQ ID NO: 173995 - DNA, 75 bp, synthetic construct
  source 1..75: mol_type = other DNA
cggtttacggtttatgtgcaaatcctgcgggtatagcctcagcgccattaattccgggtattgcaatgatgattg

SEQ ID NO: 173996 - DNA, 75 bp, synthetic construct
  source 1..75: mol_type = other DNA
accaattgggatcgaggttatccccgcacacgtcactgaatatcttaacaaagtactgactgaaactgatcatgc

SEQ ID NO: 173997 - DNA, 75 bp, synthetic construct
  source 1..75: mol_type = other DNA
ccagactcgcgattctgtgaaccagaaccagcatgaatcggaacagaatgaccaaaaagcggaacaaaacaaccc

SEQ ID NO: 173998 - DNA, 75 bp, synthetic construct
  source 1..75: mol_type = other DNA
attcgatggagagaatcagcctgaagttcaggaaaatgatccggaggaaatggaaggcactgcgcatcagcacaa

SEQ ID NO: 173999 - DNA, 75 bp, synthetic construct
  source 1..75: mol_type = other DNA
acgaaacaacctgaaccagtagtgcaacaggaaccggaaaagatctgcaccgcctgcggtcagagcggtggcggc

SEQ ID NO: 174000 - DNA, 75 bp, synthetic construct
  source 1..75: mol_type = other DNA
cagaagcggaacaaaacagcccggatacgcaacaaaacggaccagaagagaaacagccagggccagtaacgcaac

SEQ ID NO: 174001 - DNA, 75 bp, synthetic construct
  source 1..75: mol_type = other DNA
aacaaaacagcccggatacgcaacaaaacggaccggaagagcaacagccagggccagtaatgcaacaggaagtgg

SEQ ID NO: 174002 - DNA, 75 bp, synthetic construct
  source 1..75: mol_type = other DNA
taccagaatcagccagaaacggaacagcctgagccagtagtgcaacaacaggaaacggagaaagtttgcaccgcc

SEQ ID NO: 174003 - DNA, 75 bp, synthetic construct
  source 1..75: mol_type = other DNA
ttgaaactgtagatccagaactggcaaaaaagaacgtgctaaatctttgccttacaacatcagtggcacaaaaga

SEQ ID NO: 174004 - DNA, 75 bp, synthetic construct
  source 1..75: mol_type = other DNA
acacgggagcagctcctggagcaaattgaaactgtagatccagaactggcaaaaaagaacgtgctaaatctttgc

SEQ ID NO: 174005 - DNA, 75 bp, synthetic construct
  source 1..75: mol_type = other DNA
aaagcctgtattaaagaatacaacgcaaacctccctcctctgttgaaaaccagtggatcacgggagcaacttctg

SEQ ID NO: 174006 - DNA, 75 bp, synthetic construct
  source 1..75: mol_type = other DNA
caaattttgatttcaatattgtatccattatatatttgctgattgcttgcattgtaatcatgaagttcccattat

SEQ ID NO: 174007 - DNA, 75 bp, synthetic construct
  source 1..75: mol_type = other DNA
agattataaagactatgttgaaggtgccaaagtatcccccgaacacttcgaaataatcaggaatattgaccctga

SEQ ID NO: 174008 - DNA, 75 bp, synthetic construct
  source 1..75: mol_type = other DNA
ataaaagaactcaggttcaaaggatatacgattatctcaaagcaaaacggcggattagcatcagcaagaaatgaa

SEQ ID NO: 174009 - DNA, 75 bp, synthetic construct
  source 1..75: mol_type = other DNA
aagggaaaggcagttacatgcgaaaaggaaaacatggcaatcgggggaactgggaggccagtggcaagaaagtaa

SEQ ID NO: 174010 - DNA, 75 bp, synthetic construct
  source 1..75: mol_type = other DNA
gctcctttcttttgcttgacgcctttgccacaacagattgtaatactaaaagggattcatatttgtatcttagaa

SEQ ID NO: 174011 - DNA, 75 bp, synthetic construct
  source 1..75: mol_type = other DNA
ttccttatttgcgcgtatcaaaacaaaaaaacacatgttgataaaatcattgaaaatagcatagtaaaatggatt

SEQ ID NO: 174012 - DNA, 75 bp, synthetic construct
  source 1..75: mol_type = other DNA
gattggttcttccactatgccgcacaaggtgaacccaatcgacttcgagaactccgaaggtaacctggggctttc

SEQ ID NO: 174013 - DNA, 75 bp, synthetic construct
  source 1..75: mol_type = other DNA
ttgctgccgacgcaatcggttaccttgatgcaatcgtcgccagtttcagcgaagaagatgccgcacgcatcaaaa

SEQ ID NO: 174014 - DNA, 75 bp, synthetic construct
  source 1..75: mol_type = other DNA
atgctctggtttcagaggtttcagttacacagaatagcctcggttctaataatatttcgctccagcaaatgtttg

SEQ ID NO: 174015 - DNA, 75 bp, synthetic construct
  source 1..75: mol_type = other DNA
taccgttatacaaccaaggagagtatatcgaggaaactctgaattcggtcaagcaacagtcttattcaaattatg

SEQ ID NO: 174016 - DNA, 75 bp, synthetic construct
  source 1..75: mol_type = other DNA
cggagatttgatcgtgtctcagcagtcggccatgcaggttctgccgatgattcgtatcatccaggcgaataatca

SEQ ID NO: 174017 - DNA, 75 bp, synthetic construct
  source 1..75: mol_type = other DNA
gtcccgtacccacggtcagccagccacgccgtcaaccatcgggaaagagatggctaacgttgcctaccgtatgga

SEQ ID NO: 174018 - DNA, 75 bp, synthetic construct
  source 1..75: mol_type = other DNA
cgctggcgtctggctggtggacagcgccctgtacaacctactcatcttccggtgccggaagccctggattttatt

SEQ ID NO: 174019 - DNA, 75 bp, synthetic construct
  source 1..75: mol_type = other DNA
ttttgaaggactggcatggaaagcagataatcggatgctgtttgtcgcaaaagaacgacgccctgcaggcatgtt

SEQ ID NO: 174020 - DNA, 75 bp, synthetic construct
  source 1..75: mol_type = other DNA
gccccaacctgaaggaattgtaactctgtctgatgaaagcatttatgttgccagtgaacctgatatcctcgcgaa

SEQ ID NO: 174021 - DNA, 75 bp, synthetic construct
  source 1..75: mol_type = other DNA
aaagtgctgagtggtccgcaggctcaatcggtcggtgataaagctgaatttatagaaaaagtgcgtcgcgcgttg

SEQ ID NO: 174022 - DNA, 75 bp, synthetic construct
  source 1..75: mol_type = other DNA
cgatatcatcatcgctatctctgccggcaccggcggtattgctgcaggtactgcggtgaagttcgctggtgatga

SEQ ID NO: 174023 - DNA, 75 bp, synthetic construct
  source 1..75: mol_type = other DNA
acgtcttccacaatcaccattagcgcgccgggcctccgtcaggatctggcagatcaggctgatgttaccgtgttg

SEQ ID NO: 174024 - DNA, 75 bp, synthetic construct
  source 1..75: mol_type = other DNA
tgtcggtactgaccttcatcatccgccaggcgcgtgagtgtcaggaaaagataaaccaggcagaaatgctgtatc

SEQ ID NO: 174025 - DNA, 75 bp, synthetic construct
  source 1..75: mol_type = other DNA
aagaacgacgccctacaggcatgtttgcctatcagctttctccagatctgctgagtgcaaaacaagtaacgattc

SEQ ID NO: 174026 - DNA, 75 bp, synthetic construct
  source 1..75: mol_type = other DNA
ggaaactgggaggccagtggcaagaacgtaaatcacttttttaccactggccttctgctttcaggggctttttaa

SEQ ID NO: 174027 - DNA, 75 bp, synthetic construct
  source 1..75: mol_type = other DNA
atcaacctgaacttgttaattattctattcaaaacacccagtcaatacttgttttttcatctgtcagagaattag

SEQ ID NO: 174028 - DNA, 75 bp, synthetic construct
  source 1..75: mol_type = other DNA
gatattcaggtggtgcaaaacttcgttgcgctggcagatctggcagagttcgaccctgcggaactgctggcccct

SEQ ID NO: 174029 - DNA, 75 bp, synthetic construct
  source 1..75: mol_type = other DNA
tactggcgtaaagcgggagataaatcaaagaaacaactttgtttatggcaagcacaaagagagcgcatgaatgag

SEQ ID NO: 174030 - DNA, 75 bp, synthetic construct
  source 1..75: mol_type = other DNA
tgctggaactcaatagctacggtgagaatcgccaacctgcgaacctaaaaaaatattacaatagtattttttacg

SEQ ID NO: 174031 - DNA, 75 bp, synthetic construct
  source 1..75: mol_type = other DNA
tatacgggtgatatcgccgccgaaggcatcagcaaagccctgcgtggtggcgcgaagttcctgcatcacggtatt

SEQ ID NO: 174032 - DNA, 75 bp, synthetic construct
  source 1..75: mol_type = other DNA
gccagcagcttgctgcactgattcgcagtggtgagctggaagtgcagggcgatattcaggtggtgcaaaactttg

SEQ ID NO: 174033 - DNA, 75 bp, synthetic construct
  source 1..75: mol_type = other DNA
caggaattgaaagtctgctcaacaccttcctgtatcgctcacccgcgctgaaaacggcccgctcgcgtctgctgg

SEQ ID NO: 174034 - DNA, 75 bp, synthetic construct
  source 1..75: mol_type = other DNA
cagtggaatatcactgttaacgccttctgcccgggtattatcgaaagcgaaatgtgggactacaacgaccgcgta

SEQ ID NO: 174035 - DNA, 75 bp, synthetic construct
  source 1..75: mol_type = other DNA
ttactgggctgggattaggtggggctgaaaaacaaatatgtttgttagctgataaattgtatttgcataataatg

SEQ ID NO: 174036 - DNA, 75 bp, synthetic construct
  source 1..75: mol_type = other DNA
gcgctcatcatggccaacacttgcaacggccgtacgtcagttctctcagggtattgtcagcaatgaaattgaaac

SEQ ID NO: 174037 - DNA, 75 bp, synthetic construct
  source 1..75: mol_type = other DNA
gcaagcgtggctttatccgcgcggtggcggtggtaacgcgccgtctgaaaccgctgaatgtaaacggtcagcagg

SEQ ID NO: 174038 - DNA, 75 bp, synthetic construct
  source 1..75: mol_type = other DNA
tatgcggggtttcgagaagggcagaacgtcagactgcaccgaccggtcagtgggcgggaacagcagaaactggag

SEQ ID NO: 174039 - DNA, 75 bp, synthetic construct
  source 1..75: mol_type = other DNA
tatgcggggtttcgagaagggcagaacgtcagactgcaccgaccggtcagtgggcaggaacaacagaaactggag

SEQ ID NO: 174040 - DNA, 75 bp, synthetic construct
  source 1..75: mol_type = other DNA
cttcatccggcacacgctaaacgtgtcgaggaaattatcgctgaaaataaaccccccttttctgttttccgcgac

SEQ ID NO: 174041 - DNA, 75 bp, synthetic construct
  source 1..75: mol_type = other DNA
accagaaccagccagaaacggaaaaaaccagcccggatatgaatcaacctgagccagtagtgcaacaggaaccgg

SEQ ID NO: 174042 - DNA, 75 bp, synthetic construct
  source 1..75: mol_type = other DNA
tccatcaaaaaatcctgtcgatgccgataaattgcttgctgcatcacgtggtgaatttgttgacggaattagcga

SEQ ID NO: 174043 - DNA, 75 bp, synthetic construct
  source 1..75: mol_type = other DNA
cgttttggccgggcaatgggggaaaacactgctaattatgcggatagcctgcttgagcaaattcgcaataaagat

SEQ ID NO: 174044 - DNA, 75 bp, synthetic construct
  source 1..75: mol_type = other DNA
agagcttcccaatgaatggaacgcgagtaattactataacggtgaatatggcttaaaatccgctaataatttacg

SEQ ID NO: 174045 - DNA, 75 bp, synthetic construct
  source 1..75: mol_type = other DNA
aacagaacgaccaaaaagcggaacaaaacagcccaaatgcgttacaagacgagccagaaacgaaacaatccgaac

SEQ ID NO: 174046 - DNA, 75 bp, synthetic construct
  source 1..75: mol_type = other DNA
agctgaaacggctcataaatcaatacggggttaatgactcaagtgttaaagcgatgatagatgatgaattagacc

SEQ ID NO: 174047 - DNA, 75 bp, synthetic construct
  source 1..75: mol_type = other DNA
ctcataaataaatatggagtgaatgactccggcgtcaaagccatgatagatgatgaattagaccatctcacctaa

SEQ ID NO: 174048 - DNA, 75 bp, synthetic construct
  source 1..75: mol_type = other DNA
tggtttgcggaagagacatccgccgttgagcgtgctgtcgatgcgctaaccaaacggctggaaaaactggaggca

SEQ ID NO: 174049 - DNA, 75 bp, synthetic construct
  source 1..75: mol_type = other DNA
ccggcactatatttgtggcgtaaaaatgcccccgtggacaccacaaagacaaaaacgctcgatttagcttcgaat

SEQ ID NO: 174050 - DNA, 75 bp, synthetic construct
  source 1..75: mol_type = other DNA
ctgatactccggcactgtatttgtggcgtaaaaatgcccccgtggacaccacaaagacaaaaacgctcgatttag

SEQ ID NO: 174051 - DNA, 75 bp, synthetic construct
  source 1..75: mol_type = other DNA
gagcaatggcatctggtcggaaataagaatatggatatattggctaagggtgttttccctgaggagattcaagtt

SEQ ID NO: 174052 - DNA, 75 bp, synthetic construct
  source 1..75: mol_type = other DNA
gaaacaccagacgaagaagagctggatctacattttctcgcaagtcgaatggatacctcaaagctggatttgatt

SEQ ID NO: 174053 - DNA, 75 bp, synthetic construct
  source 1..75: mol_type = other DNA
ttgctgtagccagtgatgtgccgcttaatcttgatgtcgcgttactggatattaatgatgttggggggctggctg

SEQ ID NO: 174054 - DNA, 75 bp, synthetic construct
  source 1..75: mol_type = other DNA
cagtgatgtgccgcttaagcttaataccacattactggatattaatgatgttgaggggctggctgattttgtggt

SEQ ID NO: 174055 - DNA, 75 bp, synthetic construct
  source 1..75: mol_type = other DNA
agtctgtaagagatctctcacaaccagatggggtatttggattacagaagaggcttaagttgattaaggaattcc

SEQ ID NO: 174056 - DNA, 75 bp, synthetic construct
  source 1..75: mol_type = other DNA
agcttgaaaggctgaatatcatcgatcaggggcgtcgttgcgtacgcgtgattagagctggcgagctttccgaaa

SEQ ID NO: 174057 - DNA, 75 bp, synthetic construct
  source 1..75: mol_type = other DNA
cagacgcgccagcgtcgcatccggcatttttttgcaccaacgcaaaaaggccatccgtcaggatggccttctgct

SEQ ID NO: 174058 - DNA, 75 bp, synthetic construct
  source 1..75: mol_type = other DNA
aacgactcaatgtaccaaccggagggtaagaaagtgggcgcgacactgacagctatcgacggcggcaagaaaaaa

SEQ ID NO: 174059 - DNA, 75 bp, synthetic construct
  source 1..75: mol_type = other DNA
gcagattattgaacaggcagaggcgtttcttgctgcctacggcatgagcaggtttgcgcctgtcaattatgaccc

SEQ ID NO: 174060 - DNA, 75 bp, synthetic construct
  source 1..75: mol_type = other DNA
atgcgtaatatcgaccttatccgcgaagtgaccagcgccgcagcagggcgatggccttatgtgctggccggattg

SEQ ID NO: 174061 - DNA, 75 bp, synthetic construct
  source 1..75: mol_type = other DNA
ggacatcgacctgaagaattagtgatagacaggcatgttattgctgtagccagtgatgtgccgcttaatcttgat

SEQ ID NO: 174062 - DNA, 75 bp, synthetic construct
  source 1..75: mol_type = other DNA
taacggctccgggaaattacagggggcgaaggacggcggcaaccgggagataaaacactggcgcacggtggcaat

SEQ ID NO: 174063 - DNA, 75 bp, synthetic construct
  source 1..75: mol_type = other DNA
ttttctgggtaacgcccaaagtggataagcagtcaggcgaaattatccggcctgagacgtggttatgttctccgc

SEQ ID NO: 174064 - DNA, 75 bp, synthetic construct
  source 1..75: mol_type = other DNA
aaaaaccaaagccgggcaactggtgcgactgctgaatattccgttgagtaaagcagtacgctttcacgattacca

SEQ ID NO: 174065 - DNA, 75 bp, synthetic construct
  source 1..75: mol_type = other DNA
tttaacggtgtagggaaactgcaaggcgctaaagatggtggaaaccgggatctaaaacgctggcgtacagtggca

SEQ ID NO: 174066 - DNA, 75 bp, synthetic construct
  source 1..75: mol_type = other DNA
gggataaatttccttcagcacaaatcatcattgctgcggataacgaccacagcgaaggaagacaaaacacgggga

SEQ ID NO: 174067 - DNA, 75 bp, synthetic construct
  source 1..75: mol_type = other DNA
tcttatctggaatattattcactggatatatacttcggttatttattgtgttcattaaatacaacatgcaaatga

SEQ ID NO: 174068 - DNA, 75 bp, synthetic construct
  source 1..75: mol_type = other DNA
atgcagtatttcttacaaacgtacctgctttctataaagtaaatttgttcaacgaaattcaaaaaaataaagata

SEQ ID NO: 174069 - DNA, 75 bp, synthetic construct
  source 1..75: mol_type = other DNA
tcgttatcggttcgcgcaacccatcgatttcgacccatctgttaggttctaacgcctcgagcgtgatccgccacg

SEQ ID NO: 174070 - DNA, 75 bp, synthetic construct
  source 1..75: mol_type = other DNA
accgccagactatttttggccttgtccgtgaacgtccgatcgacattcacaaagaccctgtggcactgaacaaat

SEQ ID NO: 174071 - DNA, 75 bp, synthetic construct
  source 1..75: mol_type = other DNA
gtcattagtgtctgtaactctgataacagtcaggggatgctacggcaagttttcatgggaagcgatcggatactg

SEQ ID NO: 174072 - DNA, 75 bp, synthetic construct
  source 1..75: mol_type = other DNA
gcgtgataacgtggcgcgtctggcctttggtaactattcaatgatgaccgggatcggcgcagcactggcagcgcc

SEQ ID NO: 174073 - DNA, 75 bp, synthetic construct
  source 1..75: mol_type = other DNA
gcactgccgccgacagactacaaagccgactgggacgactaccgccagcaaaacgggctggaagtcgctacggct

SEQ ID NO: 174074 - DNA, 75 bp, synthetic construct
  source 1..75: mol_type = other DNA
tctggttgccagcacaactgttgaatgcggacgttatccggttgagattttcatgatgggcgaagaagcaaaact

SEQ ID NO: 174075 - DNA, 75 bp, synthetic construct
  source 1..75: mol_type = other DNA
gacaccacaaagacaaaaacgctcgatttaggaaccgctttccactgccgggtacttgagccggaagaattcagt

SEQ ID NO: 174076 - DNA, 75 bp, synthetic construct
  source 1..75: mol_type = other DNA
cgggagctggcaggtggaaaatctgcgcctggcggatatccgtctacaaagcgaaaactcgcttaccgacttctt

SEQ ID NO: 174077 - DNA, 75 bp, synthetic construct
  source 1..75: mol_type = other DNA
atcctgctggaaaacgggacgctgaatctcaccgaccagaccgcgccgctaccgttcaaagccgatcgtctgcaa

SEQ ID NO: 174078 - DNA, 75 bp, synthetic construct
  source 1..75: mol_type = other DNA
tgcttttttatcgcctcggcctcggtagaattgctgtttccctggccctggctgtttgccattggcttaacgctc

SEQ ID NO: 174079 - DNA, 75 bp, synthetic construct
  source 1..75: mol_type = other DNA
tctgaaatcatcccgtcatactcatgcagttgagcacaaacatcctgttcataaagcagaactcacctttgtaac

SEQ ID NO: 174080 - DNA, 75 bp, synthetic construct
  source 1..75: mol_type = other DNA
tggccaacgccagatggtcgtcatattgaccagatcactacggtactgaaccagctgaaaaacgacccggattcc

SEQ ID NO: 174081 - DNA, 75 bp, synthetic construct
  source 1..75: mol_type = other DNA
tttgtcactaaatatgcgaaatcttttattcctggtgaacagcagatgccagcacaactctatcagtctccaacg

SEQ ID NO: 174082 - DNA, 75 bp, synthetic construct
  source 1..75: mol_type = other DNA
cttgccagcaactgtcacgctgtattttgctgcgtcagccttaccaacacgacccgcattttgaacgcgccttca

SEQ ID NO: 174083 - DNA, 75 bp, synthetic construct
  source 1..75: mol_type = other DNA
cattggcttaacgctctccaccagcggcttcattttgctcggcggactggggcaacgctacgcgactatcgcttt

SEQ ID NO: 174084 - DNA, 75 bp, synthetic construct
  source 1..75: mol_type = other DNA
ttcaatatcaaacgctgcgcgaacattttcgccacagcgacgtactgttccgtttccagcggctaatgtcgatgc

SEQ ID NO: 174085 - DNA, 75 bp, synthetic construct
  source 1..75: mol_type = other DNA
cgctgccacgcgtaatcgatacgctaatcgggtgtgccatagcatgggcagcggtaagttacatctggccagact

SEQ ID NO: 174086 - DNA, 75 bp, synthetic construct
  source 1..75: mol_type = other DNA
aagaacctctggtcgtacagcaaatcgggttactgattgcattactgccagaaattggccgtctgcaacgtcgga

SEQ ID NO: 174087 - DNA, 75 bp, synthetic construct
  source 1..75: mol_type = other DNA
gtcacaccgcaaattcgcgatgacgcgttccgtttactgtgccttaatcatacgtttaccagctatatttctgcc

SEQ ID NO: 174088 - DNA, 75 bp, synthetic construct
  source 1..75: mol_type = other DNA
atctgggtgtggacaggctataaactcgacgaactcaacgctgcgcaaatgcaggttgttgatttgattaacgtg

SEQ ID NO: 174089 - DNA, 75 bp, synthetic construct
  source 1..75: mol_type = other DNA
tatcaaacgccaggggatttccctctccggcggcgatccgctgcatccgcaaaacgtgccggatattctgaaact

SEQ ID NO: 174090 - DNA, 75 bp, synthetic construct
  source 1..75: mol_type = other DNA
taatagaagaagttctaggattgttgagtcgattgacgaaaaaggcaaatattatatttttttgttctttccgcg

SEQ ID NO: 174091 - DNA, 75 bp, synthetic construct
  source 1..75: mol_type = other DNA
atttagaaacgttcatcgccaccgcaggacgcaagacaaaagcggggcaactggtgcgactgctgaatatcccgc

SEQ ID NO: 174092 - DNA, 75 bp, synthetic construct
  source 1..75: mol_type = other DNA
atcccgctggctgatattggcgagcgtgaaggctggcgcaccctgaaagctggtggggttaacgtcacgaccaaa

SEQ ID NO: 174093 - DNA, 75 bp, synthetic construct
  source 1..75: mol_type = other DNA
tgcggctaaaaaaggcaaaaaaccttcattctgcatgatggccctccttatgcgaatggcagcattcatattggt

SEQ ID NO: 174094 - DNA, 75 bp, synthetic construct
  source 1..75: mol_type = other DNA
tggacagtatccgctcaggtatccggaatatctgccgggacggactgcattcagtaaatggttgtcaggcagaat

SEQ ID NO: 174095 - DNA, 75 bp, synthetic construct
  source 1..75: mol_type = other DNA
cccgtttgcgccgctttggctgcgtctgacgattatcggcatgatcctgctgacttatgcgctgtatggactgta

SEQ ID NO: 174096 - DNA, 75 bp, synthetic construct
  source 1..75: mol_type = other DNA
ggatactggtcgagaacctcgtcaggatggaaaccggtcagccgggagggcagaaatgatgtggcttactgtgaa

SEQ ID NO: 174097 - DNA, 75 bp, synthetic construct
  source 1..75: mol_type = other DNA
cggatatcatctgaagtatttttattcacgggcgcaatatcgcaattcgtgttatcacgttgataatatcatgca

SEQ ID NO: 174098 - DNA, 75 bp, synthetic construct
  source 1..75: mol_type = other DNA
ccaatatgaaaagaaacgcattacaggctctctggcttatactccaccaagctcagtggtcaggaaaagactatg

SEQ ID NO: 174099 - DNA, 75 bp, synthetic construct
  source 1..75: mol_type = other DNA
gttttcatgtcgataatattatgcagatgttcacaggtgtagtttcatcactcagggctaatgtgctaataaagc

SEQ ID NO: 174100 - DNA, 75 bp, synthetic construct
  source 1..75: mol_type = other DNA
tgacgcaatggcaggtgaacaggcaacaactgaaacaatggaaccggatacaactgaacatggccagaacgcgca

SEQ ID NO: 174101 - DNA, 75 bp, synthetic construct
  source 1..75: mol_type = other DNA
tggcgattgccgccagccccagtaaaaaaccgatgtttaccctggaagagcgtgtggcactggcacagcaggcaa

SEQ ID NO: 174102 - DNA, 75 bp, synthetic construct
  source 1..75: mol_type = other DNA
cgctcacaccagtacatacaggtacggaaataaaaccagtcgaaatgccggtaacgacgattactcctgtctctg

SEQ ID NO: 174103 - DNA, 75 bp, synthetic construct
  source 1..75: mol_type = other DNA
acgccataatgccctgcacgatgcgcgttaccaggcaaaatacgtttcagctatctggcaaaaactgttcccgaa

SEQ ID NO: 174104 - DNA, 75 bp, synthetic construct
  source 1..75: mol_type = other DNA
gaatcggaacagaacgaccagaaagcggaacaaaacagcccaaatgcgttacaaaacgagccagaaacgaaacaa

SEQ ID NO: 174105 - DNA, 75 bp, synthetic construct
  source 1..75: mol_type = other DNA
gaaagcggcgcttactggacttttttcattcagtgccgggatgtcacgttgataggcgcatctcctgagcgacat

SEQ ID NO: 174106 - DNA, 75 bp, synthetic construct
  source 1..75: mol_type = other DNA
aaaaatatggagatgaacgtggcttacttattgctattgaagagcaaaaagatataccattttcgataaaacgga

SEQ ID NO: 174107 - DNA, 75 bp, synthetic construct
  source 1..75: mol_type = other DNA
cacaaaaatttgaaacagctagttatcgctgttaaaggatcgtgtcgttttactttagatgatggaagcgaaaga

SEQ ID NO: 174108 - DNA, 75 bp, synthetic construct
  source 1..75: mol_type = other DNA
taattgcggatgatttctataaagagtctgattatatacgcaattatgatgattttattagaagagtaaattcaa

SEQ ID NO: 174109 - DNA, 75 bp, synthetic construct
  source 1..75: mol_type = other DNA
aaatgttgtcagaggttaccatgcacatagaaagctgaaacaaatggcgatttgtgtgaagggctattgtacttt

SEQ ID NO: 174110 - DNA, 75 bp, synthetic construct
  source 1..75: mol_type = other DNA
tcaggcattcgttctgctgcgggtggcgcttccggcggcgaaagtggctgaattttccgcaaagctggcggattt

SEQ ID NO: 174111 - DNA, 75 bp, synthetic construct
  source 1..75: mol_type = other DNA
cataaagttacacggcaagtagctattgtggttcgtggtagttgtaaattcctaatggatgatggccatcagaaa

SEQ ID NO: 174112 - DNA, 75 bp, synthetic construct
  source 1..75: mol_type = other DNA
attgcctgcggtcgctcctctgccccgatgccgcagcgtgtaacagaagaagaaaaacaggatgatgaagaaaaa

SEQ ID NO: 174113 - DNA, 75 bp, synthetic construct
  source 1..75: mol_type = other DNA
tggcatcacaatggtatttatcgcgccctcaccctctgcgcagggcaaaccagccggcactgacaacaccaatgt

SEQ ID NO: 174114 - DNA, 75 bp, synthetic construct
  source 1..75: mol_type = other DNA
cgacactgaggaccagaatcagcccaaagtggaacaaattgccccagaagcgggacaaaacagcccggatacgca

SEQ ID NO: 174115 - DNA, 75 bp, synthetic construct
  source 1..75: mol_type = other DNA
ccatttgctatcgtccacgtcggaaaagatgacggagtggcgttatcgtgaaaggctgtatgataaagttctctc

SEQ ID NO: 174116 - DNA, 75 bp, synthetic construct
  source 1..75: mol_type = other DNA
gccagaaacgaaacagcctgagccagtagtgcaacaacaggaaacggagaaagtttgcaccgcctgcggtaaggc

SEQ ID NO: 174117 - DNA, 75 bp, synthetic construct
  source 1..75: mol_type = other DNA
gcatcctttacggttcgcttccggaggaattccggcgtattcctgagggggaaaaacacacagcatcagcaatga

SEQ ID NO: 174118 - DNA, 75 bp, synthetic construct
  source 1..75: mol_type = other DNA
aactcgctgttttgttcggtggcttacagtgtgctggaacagcctgatgaagatgaaggacgggacgagtattaa

SEQ ID NO: 174119 - DNA, 75 bp, synthetic construct
  source 1..75: mol_type = other DNA
ttgtacgttgcctggtcatgctgccatttgttgacccgatggcacggttttgcaaaacgattattcgcgatgaac

SEQ ID NO: 174120 - DNA, 75 bp, synthetic construct
  source 1..75: mol_type = other DNA
cgttactacaacgatcgcgatgtacgcacaatcgttgagctggggaaagccatagacttcgatgccagaactgct

SEQ ID NO: 174121 - DNA, 75 bp, synthetic construct
  source 1..75: mol_type = other DNA
gactggcgatattttactggatgcgctgattggcgcgatgttcgccattatcagttactccagtcttgccgccgt

SEQ ID NO: 174122 - DNA, 75 bp, synthetic construct
  source 1..75: mol_type = other DNA
agcaagcatcgttttcgcattcttaatcgccgctattcccacgcccacgtcgatcgcctgcatcagcaaaacgtg

SEQ ID NO: 174123 - DNA, 75 bp, synthetic construct
  source 1..75: mol_type = other DNA
ccaatgccgcagcccgccgtgtcgcgctgggtagtctgctgtttaagctggtgggtagcctgattatcctgccgt

SEQ ID NO: 174124 - DNA, 75 bp, synthetic construct
  source 1..75: mol_type = other DNA
aaacagcgcgatgaactggttgaactgacggcgatggattcctgggtactcaacctcacccgcagcgtgaaatac

SEQ ID NO: 174125 - DNA, 75 bp, synthetic construct
  source 1..75: mol_type = other DNA
gcagccagccgtcttttctgaaaaactttctgacaaagaacgggagttagccctcgcagagccggactaccaatt

SEQ ID NO: 174126 - DNA, 75 bp, synthetic construct
  source 1..75: mol_type = other DNA
atgctgtatccgcgtgtggaacaccaggcggtgctggctgtcgtagtggtagtagtgggtccgctcgtcgtccgt

SEQ ID NO: 174127 - DNA, 75 bp, synthetic construct
  source 1..75: mol_type = other DNA
ttcacccgtcgtgcccatgaaaacgaggactggcgaagcgaacttaatgccttctggcagtcgtggtgtgaccga

SEQ ID NO: 174128 - DNA, 75 bp, synthetic construct
  source 1..75: mol_type = other DNA
gccagcagcttcactgccagttgccggtctatgtggtgctgacccggctggatctgctgcatggttttgccacgc

SEQ ID NO: 174129 - DNA, 75 bp, synthetic construct
  source 1..75: mol_type = other DNA
cgctgaccgtgctgcgtgacaacacacaaccaggcgccttttctgaaaagctatctgctaaagaacgggatgagg

SEQ ID NO: 174130 - DNA, 75 bp, synthetic construct
  source 1..75: mol_type = other DNA
ttcacgtctgccgatgacaacaaactggttgttccgcagtttctcacccgttacggcctgcaaagctactttgtg

SEQ ID NO: 174131 - DNA, 75 bp, synthetic construct
  source 1..75: mol_type = other DNA
agaaagaactgagcaaactgcctgtctaccagcgggtttaccagagcctgaaaacgcgggcactgggcgtactgc

SEQ ID NO: 174132 - DNA, 75 bp, synthetic construct
  source 1..75: mol_type = other DNA
agccgcctggcggatatggggttataccaggggcggcgtgtcgggccgtatgtggagcagacctacctgcaactg

SEQ ID NO: 174133 - DNA, 75 bp, synthetic construct
  source 1..75: mol_type = other DNA
cgatattcgccacccgccagatggcaaaaactctgccagcgccactcaatcgctggataggccggctagctgacc

SEQ ID NO: 174134 - DNA, 75 bp, synthetic construct
  source 1..75: mol_type = other DNA
ctggtgtggcttaccgtccgggtgatgaagcgcctgcaacagcttgaaaaaatgcaaaagcaacagcgcgaggag

SEQ ID NO: 174135 - DNA, 75 bp, synthetic construct
  source 1..75: mol_type = other DNA
tggcgaaaatatgaacgtgatgctgcgtggtgtctatctcacctcttcgcttcagcgtggacagatggatgatat

SEQ ID NO: 174136 - DNA, 75 bp, synthetic construct
  source 1..75: mol_type = other DNA
caaaaaatattcatctcaggaagatgcaaaaaaagcagttgaagacgaggagcttatcgtcataagcggttttct

SEQ ID NO: 174137 - DNA, 75 bp, synthetic construct
  source 1..75: mol_type = other DNA
gcatcaatttttctgattccgttttagctcaaatgcttgaggatttcaacgcttgtgatggacaccagtatagag

SEQ ID NO: 174138 - DNA, 75 bp, synthetic construct
  source 1..75: mol_type = other DNA
aggcattcatcggctgtatggccaccatcaccggttatcacgcagtggcgggttccccctgtgaaggtcgcttca

SEQ ID NO: 174139 - DNA, 75 bp, synthetic construct
  source 1..75: mol_type = other DNA
tgcaaaaacatggggatgagcgtggtgcattaattgctcttgaagagcaacgaaatatacctttcgaagtcaaaa

SEQ ID NO: 174140 - DNA, 75 bp, synthetic construct
  source 1..75: mol_type = other DNA
atgatgctggcgcaaaaacaaaactttatgaatcaattttataaaaaatctcattatagtatacaaaaacatcag

SEQ ID NO: 174141 - DNA, 75 bp, synthetic construct
  source 1..75: mol_type = other DNA
cctatttcccgccatcatggtgagtctttcaaggttccgagccaagtaactagtgtccagtctttatgcgtcaat

SEQ ID NO: 174142 - DNA, 75 bp, synthetic construct
  source 1..75: mol_type = other DNA
attgatcaggctggatccctgcgtggtctgtcgctgtctgatgtgctgaatctgaaagcggataccatgttcagg

SEQ ID NO: 174143 - DNA, 75 bp, synthetic construct
  source 1..75: mol_type = other DNA
attgaacaggctggatccctgcgtggtctgtcgctgtctgatgtgctgaatctgaaagcggataccatgtttacg

SEQ ID NO: 174144 - DNA, 75 bp, synthetic construct
  source 1..75: mol_type = other DNA
gcagcgatccgatattcgccacccgccagatggcaaaaacgctgcctgctccgctcaaccgctgggttggcagac

SEQ ID NO: 174145 - DNA, 75 bp, synthetic construct
  source 1..75: mol_type = other DNA
agggtcttattattcatctgctgcaggctcctgccccgaacattctccttgcaccactttgcctgctgctgacat

SEQ ID NO: 174146 - DNA, 75 bp, synthetic construct
  source 1..75: mol_type = other DNA
attgagcaggctggatccctgcgtggtctgtcgctgtctgatgtgctgaatctgaaagcggataccatgttcatg

SEQ ID NO: 174147 - DNA, 75 bp, synthetic construct
  source 1..75: mol_type = other DNA
attgaccaggctggatccctgcgtggtctgtcgctgtctgatgtgctgaatctgaaagcggataccatgtttaag

SEQ ID NO: 174148 - DNA, 75 bp, synthetic construct
  source 1..75: mol_type = other DNA
tggttcacaacggtattgaatacggtgatatgcagttgattgccgaagcctattctctgctaaaaggtggcctga

SEQ ID NO: 174149 - DNA, 75 bp, synthetic construct
  source 1..75: mol_type = other DNA
gcgggcagggaacgtcaggatatcgtcaccctggtgaaacgacagctgacgcgtgaaatctcggaagggcgcttc

SEQ ID NO: 174150 - DNA, 75 bp, synthetic construct
  source 1..75: mol_type = other DNA
gtgaatattaattatcctgctgaatatgaaactggtgatattgtatttacatgtataggtgccgcattattcggc

SEQ ID NO: 174151 - DNA, 75 bp, synthetic construct
  source 1..75: mol_type = other DNA
cggtcatgacggcgatgattttctggtcgcagaaagccgtgttcccctctccaccatcaccacactgtcccattt

SEQ ID NO: 174152 - DNA, 75 bp, synthetic construct
  source 1..75: mol_type = other DNA
cccgtgcgcgtcgtgatgcgggcagggaacgtcaggatatcgtcaccctggtgaaacgacagctgacgcgtgaaa

SEQ ID NO: 174153 - DNA, 75 bp, synthetic construct
  source 1..75: mol_type = other DNA
gccaaccgcgtccagtgctccatcaccacgctggccattgagtgcggactggcgacggagtctgctgccggaaaa

SEQ ID NO: 174154 - DNA, 75 bp, synthetic construct
  source 1..75: mol_type = other DNA
ctacattccgaccgatatcacgttcacaccggcgttatttgccgcccttgatgtgtctgaggatgcagtggttgc

SEQ ID NO: 174155 - DNA, 75 bp, synthetic construct
  source 1..75: mol_type = other DNA
tataaagaggcgttatgtattccggtgggtgaaatagagacgtttggagaactgctaaatagcaatccgaacgca

SEQ ID NO: 174156 - DNA, 75 bp, synthetic construct
  source 1..75: mol_type = other DNA
gggacgctgaagttctgcgaaaaactgatggaaaaggcggtgggcttcacctcccgttttgatttcgccattcat

SEQ ID NO: 174157 - DNA, 75 bp, synthetic construct
  source 1..75: mol_type = other DNA
tcgtcagaaaatttacgatctggtggaagcaatcacgggtttccgtatgcacccggcgtggttccgtattggcgg

SEQ ID NO: 174158 - DNA, 75 bp, synthetic construct
  source 1..75: mol_type = other DNA
tggcatcatccgggtttagtgttgattcacgctgagggagttgaaacacctcagcctgaactgaccgaggcggta

SEQ ID NO: 174159 - DNA, 75 bp, synthetic construct
  source 1..75: mol_type = other DNA
ttaattaccctgctgaatatgaaattggtgatatcgtctttacatgtataggtgctgccttatttggtcaaatat

SEQ ID NO: 174160 - DNA, 75 bp, synthetic construct
  source 1..75: mol_type = other DNA
ccgtgggagcgtaaaaccgtcacgccagccagtttgtggcatcatccgggtttggtgttgattcatgcggaggga

SEQ ID NO: 174161 - DNA, 75 bp, synthetic construct
  source 1..75: mol_type = other DNA
gaacccgaatccggtgttcacaccccgtgaaggtgccggaacgctgaagttctgcgaaaaactgatggaaaaggc

SEQ ID NO: 174162 - DNA, 75 bp, synthetic construct
  source 1..75: mol_type = other DNA
atgagcgagaaacccgacgatttactcaccccggatgaagtatgccaaaagttaggtattacacagaaaacgcta

SEQ ID NO: 174163 - DNA, 75 bp, synthetic construct
  source 1..75: mol_type = other DNA
agctatcagcattagtggcgtggaaattcagatacctaaagaaaaaattgaatattattcaactttggttcttga

SEQ ID NO: 174164 - DNA, 75 bp, synthetic construct
  source 1..75: mol_type = other DNA
tgattgcagaaaaattagccagtgaagtcgatttcttttccatcggcaccaacgatctgacgcaatatattatgg

SEQ ID NO: 174165 - DNA, 75 bp, synthetic construct
  source 1..75: mol_type = other DNA
ctttttcagcgatttattgcatccggtatcgcatggccattgcccgattcagtttcattagctcagcttgacgcc

SEQ ID NO: 174166 - DNA, 75 bp, synthetic construct
  source 1..75: mol_type = other DNA
accgccaggtaaagaacccgaatccggtgtttacaccccgtaaacggtgccggaacgctgaagttctgcgaaaac

SEQ ID NO: 174167 - DNA, 75 bp, synthetic construct
  source 1..75: mol_type = other DNA
tgcggactggcgacagagtccggtgcaggaaaactctccatcacccgtgccacccgggctctgacgttcctgtca

SEQ ID NO: 174168 - DNA, 75 bp, synthetic construct
  source 1..75: mol_type = other DNA
cgcacgccgcagtcgtgtggaatgggaaaacagacagcgcaagaagcagggactggatgcactgagtatggatga

SEQ ID NO: 174169 - DNA, 75 bp, synthetic construct
  source 1..75: mol_type = other DNA
cgcgcgccgcagtcgtgtggaatgggaaaacagacagcgcaaaaagcaggggctggataccctgggtatggatga

SEQ ID NO: 174170 - DNA, 75 bp, synthetic construct
  source 1..75: mol_type = other DNA
taaataccatcatcgcactcttcaaagataccagcctggtgatcattatcgggttgttcgatcttttcagtagcg

SEQ ID NO: 174171 - DNA, 75 bp, synthetic construct
  source 1..75: mol_type = other DNA
atgatgcaacaggactggcattccaccgacattatcgccacgctgaaaaagcggggaacgtctctggcggcgcag

SEQ ID NO: 174172 - DNA, 75 bp, synthetic construct
  source 1..75: mol_type = other DNA
cactgctgattttgctggtgggcgtgtgtgttatctggtttggcggtgtgtcgctggcccgtcgattgtcgggca

SEQ ID NO: 174173 - DNA, 75 bp, synthetic construct
  source 1..75: mol_type = other DNA
tgccgaaagcggatgtcattgtcaataacccgacccactattcggtagcgttgcagtatgacgaaaacaaaatga

SEQ ID NO: 174174 - DNA, 75 bp, synthetic construct
  source 1..75: mol_type = other DNA
gaagcagtttaattacgacgaagtgattcgcccggaaaccaccgtggaagccctcgccacgctgcgtccggcgtt

SEQ ID NO: 174175 - DNA, 75 bp, synthetic construct
  source 1..75: mol_type = other DNA
atgcttaacgaactggacgaggaaccgtcaacgcgtcgtcgtactcgtcgcccacgcaaacgcgcgccgcgtcgt

SEQ ID NO: 174176 - DNA, 75 bp, synthetic construct
  source 1..75: mol_type = other DNA
gctgatagcgaaagcctggcgttttgtgcgtgagcgtttccgcagttaccagacagagcttaagtcccggggaat

SEQ ID NO: 174177 - DNA, 75 bp, synthetic construct
  source 1..75: mol_type = other DNA
cttatttttccctaacaaatgatgatgggggtaggtttaagaaaacattgacagtgagggccagggaacaagtgg

SEQ ID NO: 174178 - DNA, 75 bp, synthetic construct
  source 1..75: mol_type = other DNA
actgcgtttaaaactctacggcaagatcctgaaaagccgatgcctgaccgcaccggccttaagaaagtggattat

SEQ ID NO: 174179 - DNA, 75 bp, synthetic construct
  source 1..75: mol_type = other DNA
atgtcatttttcgtgcagacggctgggagcagcatattaccgcccgctatctggtcggtgccgatggtgccaact

SEQ ID NO: 174180 - DNA, 75 bp, synthetic construct
  source 1..75: mol_type = other DNA
gcggtggttgattgaagaatccgaccttaaccggcgtccccagcagtccctggccgatgaactgggaatcacgct

SEQ ID NO: 174181 - DNA, 75 bp, synthetic construct
  source 1..75: mol_type = other DNA
ttggcctcggcccggcaggttcggcgctggcgcggcagttagcaggcaaaatgcaggtcatcgtgctggataaaa

SEQ ID NO: 174182 - DNA, 75 bp, synthetic construct
  source 1..75: mol_type = other DNA
tgaatgcctttcagttccagtttggcaaagcggtgaaaagtgaaaaatgcaccgtattgttcccctcacgctggc

SEQ ID NO: 174183 - DNA, 75 bp, synthetic construct
  source 1..75: mol_type = other DNA
ctatccgatgaaagacggtcagacgcgtttcacggcgctgaaagagaaaatgagtgcctttcagttccagtttgg

SEQ ID NO: 174184 - DNA, 75 bp, synthetic construct
  source 1..75: mol_type = other DNA
tgatggaaaaggcggtgggcttcacctcccgttttgatttcgccattcatgtggcgcatgcccgttcccgtggtc

SEQ ID NO: 174185 - DNA, 75 bp, synthetic construct
  source 1..75: mol_type = other DNA
tcgggtgctacattccgaccgatatcacgttcacatctgcactgtttgctgccctcgatgtatcagaggaggcag

SEQ ID NO: 174186 - DNA, 75 bp, synthetic construct
  source 1..75: mol_type = other DNA
gtggctgagcttcaacaaacttattaccgccaggtaaagaacccgaatccggtgttcacaccccgtgaaggagca

SEQ ID NO: 174187 - DNA, 75 bp, synthetic construct
  source 1..75: mol_type = other DNA
aaagcgtgcccgtgcgcgtcgtgatgcgaacagggaacgtcaggatatcgtcaccctggtgaaacgacagctgac

SEQ ID NO: 174188 - DNA, 75 bp, synthetic construct
  source 1..75: mol_type = other DNA
ctcccgttttgattttgccgcgcatgtggcgtatgcccgttcgcgcggcctgcgccggcgtatgccgccggtgct

SEQ ID NO: 174189 - DNA, 75 bp, synthetic construct
  source 1..75: mol_type = other DNA
tgatggaaaaggcggtgggcttcacctcccgttttgatttcgctattcatgtggcgcatgcccgttcccgtggtt

SEQ ID NO: 174190 - DNA, 75 bp, synthetic construct
  source 1..75: mol_type = other DNA
gtggcgcatgcccgttcgcgtggtctgcgtcggcgcatgccaccggtgctgcgtcgacgggccattgatgcgctg

SEQ ID NO: 174191 - DNA, 75 bp, synthetic construct
  source 1..75: mol_type = other DNA
ttatagtctgttccccgtcatcagatttttacaataagcgctgcacaataacgttgacgcctcgtttttttgagt

SEQ ID NO: 174192 - DNA, 75 bp, synthetic construct
  source 1..75: mol_type = other DNA
gatagcgaaagcctggcgttttgtgcgtgagcgtttccgcagttaccagacagagcttaagtcccgtggaataaa

SEQ ID NO: 174193 - DNA, 75 bp, synthetic construct
  source 1..75: mol_type = other DNA
aaggcagcgcatcagctaacctggcaacaggcacaaaaaacatcagagccgttaaacattatcgaccttgaaaag

SEQ ID NO: 174194 - DNA, 75 bp, synthetic construct
  source 1..75: mol_type = other DNA
tgatggaaaaggccgtgggcttcacctcccgttttgattttgccgcgcatgtggcgtatgcccgttcgcgcggcc

SEQ ID NO: 174195 - DNA, 75 bp, synthetic construct
  source 1..75: mol_type = other DNA
caggaaaactctccatcacccgtgccacccgagccctgacgttcctgtcagagctggggctgattagctaccaga

SEQ ID NO: 174196 - DNA, 75 bp, synthetic construct
  source 1..75: mol_type = other DNA
cggcaactgttatccggacgataaagttattcacatggacaataacgaaatcccggcaggattaaaaacagcgcc

SEQ ID NO: 174197 - DNA, 75 bp, synthetic construct
  source 1..75: mol_type = other DNA
tggtgaagaagccacctggggcgggatggtcgcctgcgggctggcggggccgcgtcgcccgtggagcggttcggt

SEQ ID NO: 174198 - DNA, 75 bp, synthetic construct
  source 1..75: mol_type = other DNA
cggttaatggccggaagctacggttgtcttggcgtgctcactgaaatctcgatgaaagtgttaccgcgaccacgc

SEQ ID NO: 174199 - DNA, 75 bp, synthetic construct
  source 1..75: mol_type = other DNA
ccggcggtgaaaagcgtgaatgcgcatagctttcaaaagatcggcacgcaaaagagctgtggtcaatttggcgag

SEQ ID NO: 174200 - DNA, 75 bp, synthetic construct
  source 1..75: mol_type = other DNA
cgctgcgggtcgcgatcataggcgcgggccaggtggcggataaggttcatgcttcgtactactgcacccgcaacg

SEQ ID NO: 174201 - DNA, 75 bp, synthetic construct
  source 1..75: mol_type = other DNA
cggtaactgctatccggtcgataaagttattcacatgaataataacgaaatcccgacaggattaaaaacagcgcc

SEQ ID NO: 174202 - DNA, 75 bp, synthetic construct
  source 1..75: mol_type = other DNA
gacctccaggagtttgaatctctggtctcttccgccggtgtcgaagcattgcaggtgattaccggtagccgtaaa

SEQ ID NO: 174203 - DNA, 75 bp, synthetic construct
  source 1..75: mol_type = other DNA
agcgacaaaatgtacgctggttatttagcctgtcagtattaatgctgctggcgcttcttttaagcctctgtgctg

SEQ ID NO: 174204 - DNA, 75 bp, synthetic construct
  source 1..75: mol_type = other DNA
gtaatgcaggcgttgtttgaaaatcctctggcagaacctggactacttggcgtctctaacggcgcaggcgtgggg

SEQ ID NO: 174205 - DNA, 75 bp, synthetic construct
  source 1..75: mol_type = other DNA
gtgagcttaccgccattcgcagcacggggttttctatcttccgtattgcactggtggcgctggttgccgggatac

SEQ ID NO: 174206 - DNA, 75 bp, synthetic construct
  source 1..75: mol_type = other DNA
agaaaccgacagactggtggcaccgtgggtgaatcagtgtctgaatatcaccggcctgactgcggtcacggatgc

SEQ ID NO: 174207 - DNA, 75 bp, synthetic construct
  source 1..75: mol_type = other DNA
tggcgaacagaaatttgttgcctggtatggtttccggtcagtgcgcatttaagctccgcactttctctccggtgg

SEQ ID NO: 174208 - DNA, 75 bp, synthetic construct
  source 1..75: mol_type = other DNA
ttatcctggcgacttcgcccggttggtatcataccgacccgggaaaatttgcgctgaccgtacaacttttacgca

SEQ ID NO: 174209 - DNA, 75 bp, synthetic construct
  source 1..75: mol_type = other DNA
caactggtttatcagctaccgcacctcaagaagataggcatgttggttttgccacgcattaacttccacgatgcg

SEQ ID NO: 174210 - DNA, 75 bp, synthetic construct
  source 1..75: mol_type = other DNA
ggctgtcactttctattggtctggcggcgtgtctgaatgcttcgctgctttactggcagttgcgtaagcagaaaa

SEQ ID NO: 174211 - DNA, 75 bp, synthetic construct
  source 1..75: mol_type = other DNA
cgctttgtggcgggggcgctggcgctgggattcgttagtctgccgttgctggcgtggatcgcccagtcgccgatt

SEQ ID NO: 174212 - DNA, 75 bp, synthetic construct
  source 1..75: mol_type = other DNA
ttttcctctctgtctggtgctctacgaattctcgacctatatcggcaatgatatgattcaacccggtatgctcgc

SEQ ID NO: 174213 - DNA, 75 bp, synthetic construct
  source 1..75: mol_type = other DNA
tatcgtcacctgtctggcaatattactggcgcaaaacattgaacaattcaccctgttgcgcttcttgcagggcat

SEQ ID NO: 174214 - DNA, 75 bp, synthetic construct
  source 1..75: mol_type = other DNA
gacatcggcattcatatgctggatgcggcgatgtatgtgctgggttttccagcggtgaaaagcgtgactgcgcat

SEQ ID NO: 174215 - DNA, 75 bp, synthetic construct
  source 1..75: mol_type = other DNA
gtgaaaagtgcaatgacaagctctccgctgcgagtcgcgatcataggcgcgggccaggtggcggataaagttcat

SEQ ID NO: 174216 - DNA, 75 bp, synthetic construct
  source 1..75: mol_type = other DNA
cgaaaaaccgcccgccatgacgccagaacaggcgcgggaaatgtgcgataccgcgcgcaaacagggcaaggtgct

SEQ ID NO: 174217 - DNA, 75 bp, synthetic construct
  source 1..75: mol_type = other DNA
tttttgggatgtttcatatcatgccgggggggtcattgggtaccatgccctggggcttactgcggttaatggcgg

SEQ ID NO: 174218 - DNA, 75 bp, synthetic construct
  source 1..75: mol_type = other DNA
tgactgtatatctcaatactggtgagtcgcttgatgcaatcaccggcatgtacaactcaatgaaagaatgcatgg

SEQ ID NO: 174219 - DNA, 75 bp, synthetic construct
  source 1..75: mol_type = other DNA
gaagaaacggttaaccatcatgatcacgcaatgacatttgggcgtttgtgggaaaaatttctcgccagcgcctat

SEQ ID NO: 174220 - DNA, 75 bp, synthetic construct
  source 1..75: mol_type = other DNA
tacatgaaatatatataagcatcaagaaaaattcactcaacttatttaaaaacatcgataaagtaattgtgttca

SEQ ID NO: 174221 - DNA, 75 bp, synthetic construct
  source 1..75: mol_type = other DNA
gcctgaaaacctggcagagctgcgtcaggcgattgaaacggccgtgccgcacgggcgtaccactggccgttgtaa

SEQ ID NO: 174222 - DNA, 75 bp, synthetic construct
  source 1..75: mol_type = other DNA
tggcgagcgctgattttgtggtatgccctattgagcttgaggtgtactcaattcagggtattaaaaaaatgctga

SEQ ID NO: 174223 - DNA, 75 bp, synthetic construct
  source 1..75: mol_type = other DNA
tttggcaatgcgctcgaattttttgattttggcgtttacaacttttttgtggtctatatcagtacgctatttttc

SEQ ID NO: 174224 - DNA, 75 bp, synthetic construct
  source 1..75: mol_type = other DNA
ggctgttggtgaattacccaagccctggcatgttgctgacggtggttttcgtgatggtcagctttaccacgcttg

SEQ ID NO: 174225 - DNA, 75 bp, synthetic construct
  source 1..75: mol_type = other DNA
ctgctaccagcgaaagcgcgttttctctgctcctgcaacataaggcgactatcgttaatggcgttttactcgcta

SEQ ID NO: 174226 - DNA, 75 bp, synthetic construct
  source 1..75: mol_type = other DNA
gccgggttggcagcagccagagcacagggacgcataggtggaaggcccaatgcattaaaaccgcatgagcgggaa

SEQ ID NO: 174227 - DNA, 75 bp, synthetic construct
  source 1..75: mol_type = other DNA
tgatgaatttttgcacacaataatacgcaaaggagcatcaataggtgctaatgcaaccatcctgccaggaattga

SEQ ID NO: 174228 - DNA, 75 bp, synthetic construct
  source 1..75: mol_type = other DNA
cagcacgactgctcaccatggggattgataagctcagtgccagtccatcccggcttccggccttgaaagcagcaa

SEQ ID NO: 174229 - DNA, 75 bp, synthetic construct
  source 1..75: mol_type = other DNA
ttctttatcaaatgctgtacccgagatgtctggtcagatcctcgcctttgcggccacgagtaatatgctggcagc

SEQ ID NO: 174230 - DNA, 75 bp, synthetic construct
  source 1..75: mol_type = other DNA
gaagtatggactaccaaaaatgcagaaattgaagctggcagtgaaatttttaattgttttagccccgcagataaa

SEQ ID NO: 174231 - DNA, 75 bp, synthetic construct
  source 1..75: mol_type = other DNA
taattgttttagccccgcaggtaatgactccaacttattgatagtgttttatgttcagataatgcccgatgactt

SEQ ID NO: 174232 - DNA, 75 bp, synthetic construct
  source 1..75: mol_type = other DNA
tcaactgacatgtccggtgcctgtggacagcaaactggaacgaaacacgctcactgctcttctgaatgtggccag

SEQ ID NO: 174233 - DNA, 75 bp, synthetic construct
  source 1..75: mol_type = other DNA
cgggggatcagtattaatggtgaagcgcagggcggaatacgtcccccttactgggtcctagattctacgtcagta

SEQ ID NO: 174234 - DNA, 75 bp, synthetic construct
  source 1..75: mol_type = other DNA
cgcaaccaataacttagtttattggtacaatctctctgatgaagttagtaaccaaattcagactgagtggtacaa

SEQ ID NO: 174235 - DNA, 75 bp, synthetic construct
  source 1..75: mol_type = other DNA
gcagagctacctattggcgtagttaccgcaacgttgggagcgccagtgtttatctggttgttgctaaaagcggga

SEQ ID NO: 174236 - DNA, 75 bp, synthetic construct
  source 1..75: mol_type = other DNA
gtttcgcccgcaggcatctttcgaccagtcggttactgctggcaggcgttgcgttagggattatctgtagcgcat

SEQ ID NO: 174237 - DNA, 75 bp, synthetic construct
  source 1..75: mol_type = other DNA
tgcttaccataatggtgagagctcctccgttcgcaagaaacgtccgcgccttgcccgtttactcctgtcgcttat

SEQ ID NO: 174238 - DNA, 75 bp, synthetic construct
  source 1..75: mol_type = other DNA
tcgtggattcaccttgcgtactgtccgttgactctcagaaccaggaagttgtgttgggtcaggtacaaaaatctg

SEQ ID NO: 174239 - DNA, 75 bp, synthetic construct
  source 1..75: mol_type = other DNA
ccgctgccagcgaaagtgcgtttaccctgctcctgcaacataaatccaccattattaacggcatcttgcttgcta

SEQ ID NO: 174240 - DNA, 75 bp, synthetic construct
  source 1..75: mol_type = other DNA
tattagcacctatcggttgctggttgcgtctgagcctggaaaatgacgtacctgagccagtgcgcaataaaaaag

SEQ ID NO: 174241 - DNA, 75 bp, synthetic construct
  source 1..75: mol_type = other DNA
atttagttgcagatattaacgatatcttggaagaagatagagccaagctaaagatgtcatttcattttgctgttg

SEQ ID NO: 174242 - DNA, 75 bp, synthetic construct
  source 1..75: mol_type = other DNA
aataccaatacgctggttgatctgaataccggtaaatctgctaccgtcctgaaagaaggccagactgttctgtat

SEQ ID NO: 174243 - DNA, 75 bp, synthetic construct
  source 1..75: mol_type = other DNA
aggtgttggtatcggtatttatgataacagcaacaccctggtcgctcttaacggtggtaaagcaagtgttgacct

SEQ ID NO: 174244 - DNA, 75 bp, synthetic construct
  source 1..75: mol_type = other DNA
attaataactggcaaagcaaatatgaccagcttcgtaaggaaagagaggcttacgctgctgtcagtgagaaaata

SEQ ID NO: 174245 - DNA, 75 bp, synthetic construct
  source 1..75: mol_type = other DNA
tcgcatcaatttccgatgaaactaaaattcctacccaagacactgatcttctgcgtgagaatgaacgtttacgca

SEQ ID NO: 174246 - DNA, 75 bp, synthetic construct
  source 1..75: mol_type = other DNA
ttacgctgctgtcagtgagaaaattgcctttcttaacctggaagataattctgactgggatagtgtcaggcaaca

SEQ ID NO: 174247 - DNA, 75 bp, synthetic construct
  source 1..75: mol_type = other DNA
atggaaaaattaaatattaatctcatggaaaggtatcttcttctgcttgatagatttgtggataaacttacgcaa

SEQ ID NO: 174248 - DNA, 75 bp, synthetic construct
  source 1..75: mol_type = other DNA
ttcaaagtttggcattcgttcatttgttgattcagaagtgtgggggtatatggatgatgcactccgtgaactaaa

SEQ ID NO: 174249 - DNA, 75 bp, synthetic construct
  source 1..75: mol_type = other DNA
ttaatgagcgctttattgatgcagtatcgaatccggcaggtattattggtttgttttttggtttgcttactgtat

SEQ ID NO: 174250 - DNA, 75 bp, synthetic construct
  source 1..75: mol_type = other DNA
atgtccaagcaacagatcggggttgtcggtatggccgtgatggggcgcaacctagcgctgaacatcgaaagccgt

SEQ ID NO: 174251 - DNA, 75 bp, synthetic construct
  source 1..75: mol_type = other DNA
acctctctaacgacgagctggcgactatcttcaccgagtggaacgaaggcgaactgagcagctatctgatcgaca

SEQ ID NO: 174252 - DNA, 75 bp, synthetic construct
  source 1..75: mol_type = other DNA
gcttattatgacagctaccgtgcagcggtactaccggcgaacctaatacaggcgcagcgcgattattttggtgca

SEQ ID NO: 174253 - DNA, 75 bp, synthetic construct
  source 1..75: mol_type = other DNA
tccgccgacgccgaaacgctggtcacccgcctggaagaccgcttttccgactcgatgacgctgctgaaacgcatt

SEQ ID NO: 174254 - DNA, 75 bp, synthetic construct
  source 1..75: mol_type = other DNA
atggccgagatcgacatctctgtaaatctcagttcttcgctgatgcgtattcttgaagctgaagaaattcagcca

SEQ ID NO: 174255 - DNA, 75 bp, synthetic construct
  source 1..75: mol_type = other DNA
ttgcgcctttattctgactcacgggcgaccggacaaagttctgacttaccgaacgttgcgtcgtgctggctagca

SEQ ID NO: 174256 - DNA, 75 bp, synthetic construct
  source 1..75: mol_type = other DNA
gaaaaatttggctataaggattgcccggcacacccaacctggcttgcgcctgatgagtggaaaggtaccgccgac

SEQ ID NO: 174257 - DNA, 75 bp, synthetic construct
  source 1..75: mol_type = other DNA
ccccagctcgcagctggcaaatgcctgtgccggtaactctgcgctggtgtatatcgaaaaatatacgggcaatgc

SEQ ID NO: 174258 - DNA, 75 bp, synthetic construct
  source 1..75: mol_type = other DNA
cggcgattgccggacaggcaagtgaggaagctgatgatggcggaatgaccgcgattccggtcgcccgtattgtcg

SEQ ID NO: 174259 - DNA, 75 bp, synthetic construct
  source 1..75: mol_type = other DNA
ggcagatgctaaagcgaaggccgaagcggatgataaagctgcggaagaagcagcgaagaaagcggctgcagacgc

SEQ ID NO: 174260 - DNA, 75 bp, synthetic construct
  source 1..75: mol_type = other DNA
gccagattatgccttgtagcggccagacgaccagatgaagtgctccgagctaaaagatcagaattcaacctcgaa

SEQ ID NO: 174261 - DNA, 75 bp, synthetic construct
  source 1..75: mol_type = other DNA
atgaacccgctgaacacgctcaaaattgcctggagcagtaccgatgagcaagggctggaatacttccatcagctg

SEQ ID NO: 174262 - DNA, 75 bp, synthetic construct
  source 1..75: mol_type = other DNA
tggccagatctggaaaacggcttgtgtaaaaacggcagtgcgaacgtgttaacggcggatatccccagctcgcag

SEQ ID NO: 174263 - DNA, 75 bp, synthetic construct
  source 1..75: mol_type = other DNA
gtgccgatgaagcaggctgttgctccgcaatttgaagcgcgtaacgattttgacgtatttgccgatcttgctgaa

SEQ ID NO: 174264 - DNA, 75 bp, synthetic construct
  source 1..75: mol_type = other DNA
cgcgccaaatatgggcaccgacgtggcgctgatgttggggattgcgcataccctgatgacacaaggcaaacacga

SEQ ID NO: 174265 - DNA, 75 bp, synthetic construct
  source 1..75: mol_type = other DNA
acctacccggatattaaaatgatttggtgggccggcggcggtaatttcacccatcaccaggatactaatcgcctg

SEQ ID NO: 174266 - DNA, 75 bp, synthetic construct
  source 1..75: mol_type = other DNA
gaagcagttgcagcttctgaccgcacatccggcacatcgtttacacagtcagcttaactatgcggaactgcgcaa

SEQ ID NO: 174267 - DNA, 75 bp, synthetic construct
  source 1..75: mol_type = other DNA
taatgccacctggatcgcgccgaatatgggcaccgacgtggcactgatgttagggattgcgcataccctgatgac

SEQ ID NO: 174268 - DNA, 75 bp, synthetic construct
  source 1..75: mol_type = other DNA
cgctgaaaggtccttccattatgcctggtggccagaaagaagcctatgaactggttgcaccgatcctgaccaaaa

SEQ ID NO: 174269 - DNA, 75 bp, synthetic construct
  source 1..75: mol_type = other DNA
ctcagggcttctcccagctacgagctgcttctgatgaatacaactgggagctgaactacggcgagatcgctaaga

SEQ ID NO: 174270 - DNA, 75 bp, synthetic construct
  source 1..75: mol_type = other DNA
tatgcgctgttgaaaggcggtctggctctttccaacgaagagctggcgcaaaccttcaccgaatggaacgaaggt

SEQ ID NO: 174271 - DNA, 75 bp, synthetic construct
  source 1..75: mol_type = other DNA
cgctctccaacgaagagcttgcgcaaactttcactgaatggaatgaaggtgaactgagcagctaccttatcgaca

SEQ ID NO: 174272 - DNA, 75 bp, synthetic construct
  source 1..75: mol_type = other DNA
tggtggccagaaagaagcttatgagctggttgctccaattctgaagcagattgctgcggttgcagaagacggtga

SEQ ID NO: 174273 - DNA, 75 bp, synthetic construct
  source 1..75: mol_type = other DNA
taaagatcagcgtgtagccgcttcaaaagtgctgagtggtccgcaggctaagccggccggtgataaagctgaatt

SEQ ID NO: 174274 - DNA, 75 bp, synthetic construct
  source 1..75: mol_type = other DNA
gatagctgaaaaccctggcaagaagcttgttccttactacacagtacaagagtttgttgaatccctcgaaacacc

SEQ ID NO: 174275 - DNA, 75 bp, synthetic construct
  source 1..75: mol_type = other DNA
atgtcaaagcaacagattggagttgtcggtatggctgtgatggggcgcaaccttgcgctgaacattgaaagccgt

SEQ ID NO: 174276 - DNA, 75 bp, synthetic construct
  source 1..75: mol_type = other DNA
cctatgctgtgcagaatggtattccggtaccaacgttctcagccgcaattgcctactatgacagctaccgttccg

SEQ ID NO: 174277 - DNA, 75 bp, synthetic construct
  source 1..75: mol_type = other DNA
ggtgtttccggtggtgaagaaggtgcgctgaaaggaccttccatcatgcctggtggccagaaagaagcctatgaa

SEQ ID NO: 174278 - DNA, 75 bp, synthetic construct
  source 1..75: mol_type = other DNA
ttagaaactccccgtcgcatcctgttaatggtgaaagcgggcgctggcacagatgctgctattgactccctgaaa

SEQ ID NO: 174279 - DNA, 75 bp, synthetic construct
  source 1..75: mol_type = other DNA
ggctcagcgtgactacttcggcgcgcatacctataaacgcactgataaagaaggtgtgttccacaccgaatggct

SEQ ID NO: 174280 - DNA, 75 bp, synthetic construct
  source 1..75: mol_type = other DNA
ccgtactgcctgccaacctgattcaggcgcagcgtgactacttcggtgcgcatacgtataaacgtacagataaag

SEQ ID NO: 174281 - DNA, 75 bp, synthetic construct
  source 1..75: mol_type = other DNA
ggtgtttccggtggtgaagaaggtgcgctgaaaggtccttccattatgcctggtgggcagaaagaagcctatgaa

SEQ ID NO: 174282 - DNA, 75 bp, synthetic construct
  source 1..75: mol_type = other DNA
ggtaccgacattctctgctgcaattgcttactacgacagctaccgttccgcggttctgcccgctaatctgattca

SEQ ID NO: 174283 - DNA, 75 bp, synthetic construct
  source 1..75: mol_type = other DNA
tcgagaacctgctcctggatccctacttcaagaatattgctgatgaataccagcaagctctgcgtgatgtggtaa

SEQ ID NO: 174284 - DNA, 75 bp, synthetic construct
  source 1..75: mol_type = other DNA
taaagaccagcgtgtagccgcctcgaaagtgttgagtggtccgcaggttcagccggccggtgataaagctgaatt

SEQ ID NO: 174285 - DNA, 75 bp, synthetic construct
  source 1..75: mol_type = other DNA
cgtgattactttggtgcgcacacctataagcgtactgataaagaaggtgtattccacacagaatggttggaataa

SEQ ID NO: 174286 - DNA, 75 bp, synthetic construct
  source 1..75: mol_type = other DNA
gattgccgaaaatccaggcaagaaactggttccttattacacagtacaagagtttgttgaatccctcgaaacacc

SEQ ID NO: 174287 - DNA, 75 bp, synthetic construct
  source 1..75: mol_type = other DNA
tatcgagaaagttcgtcgtgcgctgtatctgggcaaaatcgtttcttacgctcagggcttctctcagttgcgtgc

SEQ ID NO: 174288 - DNA, 75 bp, synthetic construct
  source 1..75: mol_type = other DNA
ggctcagcgtgattactttggtgcgcacacctataagcgcactgataaagaaggcgttttccacactgagtggtt

SEQ ID NO: 174289 - DNA, 75 bp, synthetic construct
  source 1..75: mol_type = other DNA
agccagctggcgacaaggctgagttcatcgaaaaagttcgccgtgcgctgtatctgggcaaaatcgtttcttacg

SEQ ID NO: 174290 - DNA, 75 bp, synthetic construct
  source 1..75: mol_type = other DNA
aaagttctctctggcccgcaagcgcagccagcaggcgataaggctgagtttatcgagaaagttcgtcgtgcgctg

SEQ ID NO: 174291 - DNA, 75 bp, synthetic construct
  source 1..75: mol_type = other DNA
ggctcagcgtgattactttggtgcgcatacttataagcgtaccgataaagagggtatattccatacagagtggtt

SEQ ID NO: 174292 - DNA, 75 bp, synthetic construct
  source 1..75: mol_type = other DNA
tcccagatttttttccgcacgtagcggtggatatatcaatatacacaaatgtagaagatgattatttttttctta

SEQ ID NO: 174293 - DNA, 75 bp, synthetic construct
  source 1..75: mol_type = other DNA
tccggcctacgaatggcacgggaatctgtaggcctgataagcgtagcgcatcaggcagtctggcgttggtcataa

SEQ ID NO: 174294 - DNA, 75 bp, synthetic construct
  source 1..75: mol_type = other DNA
gaatttagttcacagcagcgaatgggaaggtcgcaatgttgcagggtcaattggtgggctgacctgcccccacga

SEQ ID NO: 174295 - DNA, 75 bp, synthetic construct
  source 1..75: mol_type = other DNA
tgtttgcctcactcgatatctcagaagaggcggtggcttccgcacgccgcagccgcgtggaatgggaaaacaggc

SEQ ID NO: 174296 - DNA, 75 bp, synthetic construct
  source 1..75: mol_type = other DNA
cgctggagatggacgaactgatcgcaaaagcgtggcggtttgtgcgtgagcgttttcgcagctaccaggctgaac

SEQ ID NO: 174297 - DNA, 75 bp, synthetic construct
  source 1..75: mol_type = other DNA
caatatggccatcgaatgtggactggccaccgagtccaggagcggcaacctgtcgatcacccgagccacccgggc

SEQ ID NO: 174298 - DNA, 75 bp, synthetic construct
  source 1..75: mol_type = other DNA
gtaaaaaatatggtggctattatggtagtgcttcatttgcgtcaagtagtcccgaaccggagcaaatatatctag

SEQ ID NO: 174299 - DNA, 75 bp, synthetic construct
  source 1..75: mol_type = other DNA
ggccaacaacatttcagcattaacaccgatgcgcttaatcttggctttatgctgtttattttctgcgtcggggtc

SEQ ID NO: 174300 - DNA, 75 bp, synthetic construct
  source 1..75: mol_type = other DNA
gcctttaatctttacctgcacgatcaatggcgggatctgaccacgcttcgccagatccctgtggaaaagatcttc

SEQ ID NO: 174301 - DNA, 75 bp, synthetic construct
  source 1..75: mol_type = other DNA
actcaatggcaatgagtggtgccagtgctcctgagatagcttatatattgggacaatcctcttatgttgttgcag

SEQ ID NO: 174302 - DNA, 75 bp, synthetic construct
  source 1..75: mol_type = other DNA
cttactgtataagtacctagttggaattggtgataccgacccaatgttttccatcatagtatcttcaatgaagat

SEQ ID NO: 174303 - DNA, 75 bp, synthetic construct
  source 1..75: mol_type = other DNA
taaagcatcctatgttcgtgctgaaacaagcacagcaccaactgctggttatgttaaaaccaacactgcatatac

SEQ ID NO: 174304 - DNA, 75 bp, synthetic construct
  source 1..75: mol_type = other DNA
tcccggatccgttcgatccgtcgaagaaacgtaagccgacgatgttggtcactgacctgactctgcgttttgatc

SEQ ID NO: 174305 - DNA, 75 bp, synthetic construct
  source 1..75: mol_type = other DNA
cttcgtgaacttgctggatatgcgttacgagtggaaagcgaccgacgaatcgaaagagctgttcgaaggccgtga

SEQ ID NO: 174306 - DNA, 75 bp, synthetic construct
  source 1..75: mol_type = other DNA
cgcgtcaggatcagactgacattgaaatgttcgaactgctggagccaattgctgacggtttccgtaactaccgcg

SEQ ID NO: 174307 - DNA, 75 bp, synthetic construct
  source 1..75: mol_type = other DNA
agtgccggagaggaaggcaataaacgttattttattgcgtctgcaccggataaagaccaggaatggggggggtaa

SEQ ID NO: 174308 - DNA, 75 bp, synthetic construct
  source 1..75: mol_type = other DNA
gatgcccacgagaagtttgttaaagacttcgtggcagcgtgggtgaaagtgatgaacctcgaccgtttcgacctg

SEQ ID NO: 174309 - DNA, 75 bp, synthetic construct
  source 1..75: mol_type = other DNA
tacgctgggtaaaactcacggtgccggtccgacatctaacgttggccctgacccggaagctgcaccgattgaaga

SEQ ID NO: 174310 - DNA, 75 bp, synthetic construct
  source 1..75: mol_type = other DNA
gtacttaccgttccatcgacggacgcggcggcgccgggcgtggtcagcaacgttttgctccgctcaactcctggc

SEQ ID NO: 174311 - DNA, 75 bp, synthetic construct
  source 1..75: mol_type = other DNA
aactgaaaccgctggagatggacgaactgatcgcaaaagcgtggcggtttgtgcgtgagcgttttcgcagctacc

SEQ ID NO: 174312 - DNA, 75 bp, synthetic construct
  source 1..75: mol_type = other DNA
gcaataaacgttattttattgcgtctgcaccggataaagaccaggaatggggggggggggtaatcggccatcttt

SEQ ID NO: 174313 - DNA, 75 bp, synthetic construct
  source 1..75: mol_type = other DNA
tacgagtggaaagcgaccgacgaatcgaaagagctgttcgaaggccgtgaccgtgaaaccggcgaagtgaaatac

SEQ ID NO: 174314 - DNA, 75 bp, synthetic construct
  source 1..75: mol_type = other DNA
aacgaagcctttgcccgtgcctggttcaaactgacgcacagggatatggggccgaaatctcgctacatcggaccg

SEQ ID NO: 174315 - DNA, 75 bp, synthetic construct
  source 1..75: mol_type = other DNA
aaaacctggcttgctcaccgtaacccggaagaactggcaaaacgcccgttagcagcaactgaaatggggcttatt

SEQ ID NO: 174316 - DNA, 75 bp, synthetic construct
  source 1..75: mol_type = other DNA
gggagcgcagccgccaacaccggagtggggcaccatgctctccgatgtgttgcagttcgcgcaaagcgcctggtg

SEQ ID NO: 174317 - DNA, 75 bp, synthetic construct
  source 1..75: mol_type = other DNA
caatcctgggatcatcatttccctggatttgaacacgaaactgaaggtactgaaattattgacggtatttaccac

SEQ ID NO: 174318 - DNA, 75 bp, synthetic construct
  source 1..75: mol_type = other DNA
gtcgcaggcgtcttatattcatgtacgtgaaggccggggcgcgattaacttctcccgttttaatcaggcatacat

SEQ ID NO: 174319 - DNA, 75 bp, synthetic construct
  source 1..75: mol_type = other DNA
cccggcactggcagacctgattacgacgatggttacgcagggctatgagtatcgtcgtgatgacgatatggcgtt

SEQ ID NO: 174320 - DNA, 75 bp, synthetic construct
  source 1..75: mol_type = other DNA
gggggctcagccgccaacaccggagtggggcactatgctctccgacgtgttgcagtttgcgcaaagcgcctggtg

SEQ ID NO: 174321 - DNA, 75 bp, synthetic construct
  source 1..75: mol_type = other DNA
gccggggcaatgcgccagatgtttattaacatcttcccgaactgccttgcgccgctgattgttcaggcgtcgctc

SEQ ID NO: 174322 - DNA, 75 bp, synthetic construct
  source 1..75: mol_type = other DNA
ggaagatactgccgattttattgccggacgcgccatcgccgcgatgacccgctaccgtcaacagttgttaccgcc

SEQ ID NO: 174323 - DNA, 75 bp, synthetic construct
  source 1..75: mol_type = other DNA
cctggatttgaacacgaaacagaagggactgaaattattgacggtatttaccacgttatgtgtgtgaaagcgtaa

SEQ ID NO: 174324 - DNA, 75 bp, synthetic construct
  source 1..75: mol_type = other DNA
ctgcagcaaaagctgccgcggaggcagatgatattttcggtgagctaagctctggtaagaatgcaccgaaaacgg

SEQ ID NO: 174325 - DNA, 75 bp, synthetic construct
  source 1..75: mol_type = other DNA
agagtttaccgccgaaggcagctggttctttaaaccgtggaacaaagaagtggtcaccgacccacaaaccggcaa

SEQ ID NO: 174326 - DNA, 75 bp, synthetic construct
  source 1..75: mol_type = other DNA
cgtggtgaccaactgtacctatgacggtgtgtgttataacgccaaaaaagcgcaggacctgctggaaaaaaccgc

SEQ ID NO: 174327 - DNA, 75 bp, synthetic construct
  source 1..75: mol_type = other DNA
ggaagataccgctgactttattgccggacgcgccgttgccgcaatccgtcgctaccgtcagcaactattgccgcc

SEQ ID NO: 174328 - DNA, 75 bp, synthetic construct
  source 1..75: mol_type = other DNA
caaaacgcaccgggtatcgcagcaatgaaagcagccggatattcaactcctgtttcgccattaattgtatttact

SEQ ID NO: 174329 - DNA, 75 bp, synthetic construct
  source 1..75: mol_type = other DNA
ggtgcctgtccgctataacgcacgaggtgattatgcgtctgttttctgttcctccacctacattactggcgggat

SEQ ID NO: 174330 - DNA, 75 bp, synthetic construct
  source 1..75: mol_type = other DNA
gtgcgttataacggacaaatgctacggtacctgtacgttataacgcacgaagtgactatgcgtctgttttctatt

SEQ ID NO: 174331 - DNA, 75 bp, synthetic construct
  source 1..75: mol_type = other DNA
gtcgcctcggttaatgcggcaatcgcgacgggtgccagtttcgccggacagcgaaatggccttgtcgcgcacaaa

SEQ ID NO: 174332 - DNA, 75 bp, synthetic construct
  source 1..75: mol_type = other DNA
aaatcagtggcctggccctcgccatcagttgtgcagacgcgatggcaaaagccgcgtccatcacgctggttggcc

SEQ ID NO: 174333 - DNA, 75 bp, synthetic construct
  source 1..75: mol_type = other DNA
ttttcccctttcggcgtttattccgtcggtattgcggcaatcaccgcggctatttgccaaagcccggaagcgcat

SEQ ID NO: 174334 - DNA, 75 bp, synthetic construct
  source 1..75: mol_type = other DNA
cgtgcccggtctcagtgcactactgctgaaaatgaaccttcaggggtacgactaccgccgcgatgatgagtttat

SEQ ID NO: 174335 - DNA, 75 bp, synthetic construct
  source 1..75: mol_type = other DNA
caaacgaaagaaacgcaaaccggaactgccacgatccttgttaatgaaggtactggcgataatgttattgcgatc

SEQ ID NO: 174336 - DNA, 75 bp, synthetic construct
  source 1..75: mol_type = other DNA
gacggtcgcccggtttttattgatgaacaggaactgcctgctgttgctgtttacctgacagatgcgtctgctgct

SEQ ID NO: 174337 - DNA, 75 bp, synthetic construct
  source 1..75: mol_type = other DNA
aatctctggctggatgacggcgctgggattggcaatgggcgtcagtacgctggctctgacattgtggtaccgtgt

SEQ ID NO: 174338 - DNA, 75 bp, synthetic construct
  source 1..75: mol_type = other DNA
gtgcctgtacgctataacgcacgaggtgactatgcgtctgttttctattcctccacccacgctactggcggggtt

SEQ ID NO: 174339 - DNA, 75 bp, synthetic construct
  source 1..75: mol_type = other DNA
cctttttctggtgacgatggcatcgcaaaacgcaccgggtatcgcagcaatgaaagcagccggatattcggctcc

SEQ ID NO: 174340 - DNA, 75 bp, synthetic construct
  source 1..75: mol_type = other DNA
gcgccgcagcctggcggatacccttcagcagtccggcggcgaagacggtggcagtgtggtgttcccgccggtgct

SEQ ID NO: 174341 - DNA, 75 bp, synthetic construct
  source 1..75: mol_type = other DNA
cacgcgtatcattttgatggaaggccataccggcgcggcggcggcagggaaggtcgtcgaagcgttcggtcattt

SEQ ID NO: 174342 - DNA, 75 bp, synthetic construct
  source 1..75: mol_type = other DNA
tgccgcagttagtggtcctgtcgaatctggaactgtctgataaccgacatatccgcatgacggcgacaattggcg

SEQ ID NO: 174343 - DNA, 75 bp, synthetic construct
  source 1..75: mol_type = other DNA
accctggaaccgctgccgggacgttacctggtgaggcgaccgtcgatccggcatttggcctgaatgctatctgga

SEQ ID NO: 174344 - DNA, 75 bp, synthetic construct
  source 1..75: mol_type = other DNA
gatttggttcctggcgttatcacgcttaccacgctgcataaagtgctacaaaacctgcttgatgaaaaagtaccg

SEQ ID NO: 174345 - DNA, 75 bp, synthetic construct
  source 1..75: mol_type = other DNA
gtgggcgcgcgctttgttctcgatggtatgccgggtaagcagatggcgattgacgccgaccttaacgccggattg

SEQ ID NO: 174346 - DNA, 75 bp, synthetic construct
  source 1..75: mol_type = other DNA
caaacctggtatttttactgttcacagcgggattgctggggctggcgtggtggatacgtggacgcgaacaaaacg

SEQ ID NO: 174347 - DNA, 75 bp, synthetic construct
  source 1..75: mol_type = other DNA
cgatttttacggctcaatggacggggcaagtaagtttgttcgcggcgatgccatcgccgggatcctcatcatggt

SEQ ID NO: 174348 - DNA, 75 bp, synthetic construct
  source 1..75: mol_type = other DNA
ggcgaagcgactgtcgatccggcatttggtttgagtgccatctggatcgaaagcgcgctaaaagaacaggcgcag

SEQ ID NO: 174349 - DNA, 75 bp, synthetic construct
  source 1..75: mol_type = other DNA
ccgtctcggtgatccgcgtcgtacacgacgccttgtgtcactgacctcttctctcgctcagcatgcaggtctttc

SEQ ID NO: 174350 - DNA, 75 bp, synthetic construct
  source 1..75: mol_type = other DNA
ctatcgcattttgatgaaaggcgtggagataggcagtggtgatgcttatccggggcgctggttggcgattaaccc

SEQ ID NO: 174351 - DNA, 75 bp, synthetic construct
  source 1..75: mol_type = other DNA
cattaacgtcgtcggcggattgctggtcggcgtgctgcaacatggcatgagcatgggccatgcggcagaaagtta

SEQ ID NO: 174352 - DNA, 75 bp, synthetic construct
  source 1..75: mol_type = other DNA
ccatcgccgggatcctcatcatggtcataaacgttgtcggtgggttgctggtcggtgtgctgcaacatggcatga

SEQ ID NO: 174353 - DNA, 75 bp, synthetic construct
  source 1..75: mol_type = other DNA
gcaactggtggtactgtcgaatctcgaactctctgataaccggcagattcggatgacggcgactattgggggtaa

SEQ ID NO: 174354 - DNA, 75 bp, synthetic construct
  source 1..75: mol_type = other DNA
ggaagcgcgtcagcaatctccggctggctgcgtgatggtattcgctgcccgtattcgccaggggtcatatcatgc

SEQ ID NO: 174355 - DNA, 75 bp, synthetic construct
  source 1..75: mol_type = other DNA
ggtgaagctgggtaaagataagcagcgcgtcgaaattgctcatttctactgcgagttagccctacagcatatggc

SEQ ID NO: 174356 - DNA, 75 bp, synthetic construct
  source 1..75: mol_type = other DNA
cagataaaaacagcgcccgcgtatccatcatgatgggacgcgtgtttatggcgaaaggagaatacgccaaagccg

SEQ ID NO: 174357 - DNA, 75 bp, synthetic construct
  source 1..75: mol_type = other DNA
gtatagtggctgacacctttattgaggtaatcgatgaaaagacaaagcccgcaggtgctaccaacaccaacgggc

SEQ ID NO: 174358 - DNA, 75 bp, synthetic construct
  source 1..75: mol_type = other DNA
ccaccagcgaacaggaagcacgccagcaatccccggctggctgcgtgatggtattcgccgcccgtattcgtcagg

SEQ ID NO: 174359 - DNA, 75 bp, synthetic construct
  source 1..75: mol_type = other DNA
ccaccagcgaacaggaagcacgccagcaatctccggctggctgcgtgatggtattcgctgcccgtattcgtcagg

SEQ ID NO: 174360 - DNA, 75 bp, synthetic construct
  source 1..75: mol_type = other DNA
gtgcaaaaattgcctacatcaacggactgaaatcaccgtcagagcagcagagattacttgtgttactggcagaga

SEQ ID NO: 174361 - DNA, 75 bp, synthetic construct
  source 1..75: mol_type = other DNA
aacccgtatcattttgatggaagggcatactggcgcggcggcggcagggaaggtggtcgaagcgttcggtcactt

SEQ ID NO: 174362 - DNA, 75 bp, synthetic construct
  source 1..75: mol_type = other DNA
aacccgtatcattttgatggaagggcataccggcgcggcggcggctgggaaggtggtcgaagcattcggtcactt

SEQ ID NO: 174363 - DNA, 75 bp, synthetic construct
  source 1..75: mol_type = other DNA
tgcctgtagccgctgcctatggctggtatatgggccgcagaagtgcgcaacaaaacaagcaagatgaagccaacc

SEQ ID NO: 174364 - DNA, 75 bp, synthetic construct
  source 1..75: mol_type = other DNA
gcgaacaggaagcacgccagcaatccccggctggctgcgtgatggtattcgccgcccgtattcgtcagggggtgt

SEQ ID NO: 174365 - DNA, 75 bp, synthetic construct
  source 1..75: mol_type = other DNA
ttgatgaagaaacactgaaagcgtggattgcgaagctggaaaaagcgccggtatttgcatttgatactgaaaccg

SEQ ID NO: 174366 - DNA, 75 bp, synthetic construct
  source 1..75: mol_type = other DNA
cattttagcagcaatggcacacgctacggaccctacgtaaaactgtcctgggacgcgacaaaagatcttaatttt

SEQ ID NO: 174367 - DNA, 75 bp, synthetic construct
  source 1..75: mol_type = other DNA
aagcctaccgacagcaagacttatccggcgatatttctcgtgataacgttcatcgttgggatggatatgtcactt

SEQ ID NO: 174368 - DNA, 75 bp, synthetic construct
  source 1..75: mol_type = other DNA
ttggggctgttcaaaaagtatgagttcaaacgctggactgctgatgtcgaagcgggcaaatggttacaggccaaa

SEQ ID NO: 174369 - DNA, 75 bp, synthetic construct
  source 1..75: mol_type = other DNA
acgcgattaaacttgatgatcaatggacggtgcgcccgggaatgttaacgcattttagcagcaacggcacacgct

SEQ ID NO: 174370 - DNA, 75 bp, synthetic construct
  source 1..75: mol_type = other DNA
cattgattgcccaaggggttatggattttctgccaacaatcacgattctgactgccgcagccagcctgggttgtt

SEQ ID NO: 174371 - DNA, 75 bp, synthetic construct
  source 1..75: mol_type = other DNA
ataataaaaaagaaaatcttgcactgaatgatgtccaagcagaaattaattatgctattaaacttgatgataaat

SEQ ID NO: 174372 - DNA, 75 bp, synthetic construct
  source 1..75: mol_type = other DNA
agtggcggaaaagtgagaaccaactcttcaggtcaggctgaaccgccccgggtttcctggagagtattttatctg

SEQ ID NO: 174373 - DNA, 75 bp, synthetic construct
  source 1..75: mol_type = other DNA
gaggtaacatttactctgccggaagatgtgaaggcgaacttcacgctgagcgatggcggtaaagtgattactgat

SEQ ID NO: 174374 - DNA, 75 bp, synthetic construct
  source 1..75: mol_type = other DNA
gtgaaggcgaacttcacgctgagcgatggcgacaaagcggttactgatgccgatggcaaagcgaaagtcacgctg

SEQ ID NO: 174375 - DNA, 75 bp, synthetic construct
  source 1..75: mol_type = other DNA
cgcgaccgaaagaacccaactggaccgcatgggccaacgacgtgcgcacaatgcggatgctggatggcagaactc

SEQ ID NO: 174376 - DNA, 75 bp, synthetic construct
  source 1..75: mol_type = other DNA
acagacaaatttgcgaaatgtttggtcgggttcagcgagatccattctgggtaaaaaacatcatgagcccgtcaa

SEQ ID NO: 174377 - DNA, 75 bp, synthetic construct
  source 1..75: mol_type = other DNA
tcttcaggtcaggctccagtcgttctgaccagcaataaagtcggtacatatacggtgactgcatcgttccataac

SEQ ID NO: 174378 - DNA, 75 bp, synthetic construct
  source 1..75: mol_type = other DNA
tggtgggcaagttttgagtcaaacacctggaatacaattcacaacaatgaaaatgaattgtttgcactcaattat

SEQ ID NO: 174379 - DNA, 75 bp, synthetic construct
  source 1..75: mol_type = other DNA
gtacgctgtcgtctttgtgatgtgcttcctgttaggtttcgtcagccgtcaccgtcagcataacaccctgacctc

SEQ ID NO: 174380 - DNA, 75 bp, synthetic construct
  source 1..75: mol_type = other DNA
tgtttctctctgttgcggcgctgtgctacatcctcggtcagttaggttttatctcctgggtgcctgagtatgcca

SEQ ID NO: 174381 - DNA, 75 bp, synthetic construct
  source 1..75: mol_type = other DNA
ttctgcatcgaggcggtggaggaggcacttgcccgtcatggcaggccggaaatcttcaataccgaccagggatcg

SEQ ID NO: 174382 - DNA, 75 bp, synthetic construct
  source 1..75: mol_type = other DNA
tattgtgaaatcatcccagtccactgctcaggttgaaggtgcgtaccgcctgatgcgtaacccgtctgtatcccc

SEQ ID NO: 174383 - DNA, 75 bp, synthetic construct
  source 1..75: mol_type = other DNA
tacattcctggtaacacaaatgtatgaaggacgtcagcgcggttcacgcctgttatttaccgactccttcttcag

SEQ ID NO: 174384 - DNA, 75 bp, synthetic construct
  source 1..75: mol_type = other DNA
tgtttctctccattgcggcactgtgctacatcctcggtcagttaggttttatctcctgggtgccggagtatgcca

SEQ ID NO: 174385 - DNA, 75 bp, synthetic construct
  source 1..75: mol_type = other DNA
agctttgtctgggcgaatgattcctggactttttactatgtgcgcaaacatccggtgacgctgctgccttatcag

SEQ ID NO: 174386 - DNA, 75 bp, synthetic construct
  source 1..75: mol_type = other DNA
attgctctgtaccgacatggactcaggccatggcggtaaatctggccgctttaaatcgtacgaaggcgtagcgat

SEQ ID NO: 174387 - DNA, 75 bp, synthetic construct
  source 1..75: mol_type = other DNA
cgaagaaaaagacgatacctattacgtcagcctgcataaaacgacctcgaagcactatgtagtcattcatctggc

SEQ ID NO: 174388 - DNA, 75 bp, synthetic construct
  source 1..75: mol_type = other DNA
atgccgattcagcaacttccgctcatgaaaggcgtcggcaaagacttccgaaacgccgactatatcgactatctg

SEQ ID NO: 174389 - DNA, 75 bp, synthetic construct
  source 1..75: mol_type = other DNA
aggacacaacccgttgctggtgtatggctacggttcttacggcgcaagtattgatgccgatttcagttttagccg

SEQ ID NO: 174390 - DNA, 75 bp, synthetic construct
  source 1..75: mol_type = other DNA
ttaaatcttacgaaggcgtggcgatggaatatgctttcctgatagctctggcgcaggggacattgccgggcaaac

SEQ ID NO: 174391 - DNA, 75 bp, synthetic construct
  source 1..75: mol_type = other DNA
atgaagaagattttactcgttactggcgcagctctggcactggcaggatgtggtgagaaaggtgattttgaggaa

SEQ ID NO: 174392 - DNA, 75 bp, synthetic construct
  source 1..75: mol_type = other DNA
gtgatcctcgatggatttgttgagcagggcctgatggtctttgagcagggctataactcgaacgtattagggata

SEQ ID NO: 174393 - DNA, 75 bp, synthetic construct
  source 1..75: mol_type = other DNA
cctcgatggatttgttgaacagggaatgatggtctttgaacagggctatgactcgaacgtcttagggataacaga

SEQ ID NO: 174394 - DNA, 75 bp, synthetic construct
  source 1..75: mol_type = other DNA
atcgggtgaacgcggaaggaaagctgaagtggtcaacaaaaactggccaccgagttagagttttttccagtatcg

SEQ ID NO: 174395 - DNA, 75 bp, synthetic construct
  source 1..75: mol_type = other DNA
gcgggctggatacggaagggatcactccggatggtaaaggaggttactggctgtgcgatgagtatggcccgttcc

SEQ ID NO: 174396 - DNA, 75 bp, synthetic construct
  source 1..75: mol_type = other DNA
gcgcagctctggcactggcgggatgtggtgagaaaggtgattttgagaaagcgattaatgccaagattgggcagg

SEQ ID NO: 174397 - DNA, 75 bp, synthetic construct
  source 1..75: mol_type = other DNA
ggtcatccagaaaacgaacgttgcgatgaactggctcgtgccgcagcgatgaatcccacactggaagatacgggc

SEQ ID NO: 174398 - DNA, 75 bp, synthetic construct
  source 1..75: mol_type = other DNA
tgccagccatttctgttctggcactggtagtgagtggcgtgatgtcagtgatgcaggggcgcagagctggcgact

SEQ ID NO: 174399 - DNA, 75 bp, synthetic construct
  source 1..75: mol_type = other DNA
gttgaaggcttccgccaggcacgggatgaaggctgcgaagaggcttatcgtctctgggtggatgataccggtgag

SEQ ID NO: 174400 - DNA, 75 bp, synthetic construct
  source 1..75: mol_type = other DNA
gcgatcaatgccaagattgggcaggacaaatactgcttctcgctggataacaataacaccagcttccccatccgt

SEQ ID NO: 174401 - DNA, 75 bp, synthetic construct
  source 1..75: mol_type = other DNA
caataacaccagcttccccatccgtcttgccaagccacgacttgattcgactggcacagggacgaattcagtgat

SEQ ID NO: 174402 - DNA, 75 bp, synthetic construct
  source 1..75: mol_type = other DNA
taataacaccagctttcccattcgtcttgccaagccacgacttgattcgactggtacagggacgaattcagtgat

SEQ ID NO: 174403 - DNA, 75 bp, synthetic construct
  source 1..75: mol_type = other DNA
tcactgtggagtcgcgagctggactttgagacccgactgactatggccaccgacattggcatacagcacaaccgc

SEQ ID NO: 174404 - DNA, 75 bp, synthetic construct
  source 1..75: mol_type = other DNA
ctattgccagtacacctcaagtatcagcaaatgaaagcacaaggcattcgctttgtggtcgccagcgggaatcaa

SEQ ID NO: 174405 - DNA, 75 bp, synthetic construct
  source 1..75: mol_type = other DNA
caacgatatagagatgttgcgccaggccggctatagctttgcaatggaaaatgccggcagtgccgtagttgcagc

SEQ ID NO: 174406 - DNA, 75 bp, synthetic construct
  source 1..75: mol_type = other DNA
atttgattatccccggcgtacataaagccaatggcctgcgtcaactccagaaattatggggcatagacgacagcg

SEQ ID NO: 174407 - DNA, 75 bp, synthetic construct
  source 1..75: mol_type = other DNA
actcacgcttgctccgctatgtcctcgaaaccaaaaccgaaaaggttgtgacacagtctcgcttcgatcctcttt

SEQ ID NO: 174408 - DNA, 75 bp, synthetic construct
  source 1..75: mol_type = other DNA
ctggaagagcaggccagtcgcctgaccgaagctgtggcagtgttccggattcagcaacagcagcaacatcagcgt

SEQ ID NO: 174409 - DNA, 75 bp, synthetic construct
  source 1..75: mol_type = other DNA
gctgtagtaaaaaccgtgacaccagctacgccgcgtaaaatggccatggcagatagcgaggagaactgggaaacg

SEQ ID NO: 174410 - DNA, 75 bp, synthetic construct
  source 1..75: mol_type = other DNA
ggtatcgagttaattcgccaggcgcggcgggaatatccgcaacttgatggcgtgttctgtaccaatgatgacctg

SEQ ID NO: 174411 - DNA, 75 bp, synthetic construct
  source 1..75: mol_type = other DNA
cgctgatgatcttcacggtcttcgggcaatgtgtcgcgggtggttttatcgttctggctttggcgctgctcaaag

SEQ ID NO: 174412 - DNA, 75 bp, synthetic construct
  source 1..75: mol_type = other DNA
gacgagctgggcatcccgaaacgcattctgaactcatgcctggttcaacgcagtgtcgatacctttgttggtatg

SEQ ID NO: 174413 - DNA, 75 bp, synthetic construct
  source 1..75: mol_type = other DNA
agggatcccgcgttcgccagacgtatgcattactggcgaaacaatatggtgtgaaatggaatggtcgcaaatacg

SEQ ID NO: 174414 - DNA, 75 bp, synthetic construct
  source 1..75: mol_type = other DNA
caaagactgggaaaaaggcgatgttgttaatcgctgtatcagtgctgccacatcatgcctgtacggtatatctga

SEQ ID NO: 174415 - DNA, 75 bp, synthetic construct
  source 1..75: mol_type = other DNA
gaaattgaaccgccacaacctgcgccggatatgttaccgccagccatccccgaacctgaaacgttgggcgatagc

SEQ ID NO: 174416 - DNA, 75 bp, synthetic construct
  source 1..75: mol_type = other DNA
atagactaaaaatgctgaaaggccagatgtatggtcgagccggatttgaactactcagacagagggtcatgagtc

SEQ ID NO: 174417 - DNA, 75 bp, synthetic construct
  source 1..75: mol_type = other DNA
atggctaagtcagcaaaacgaatcaggaacgccgcagcgacttatgttccgcaatcccgtgatgccgtggtatgt

SEQ ID NO: 174418 - DNA, 75 bp, synthetic construct
  source 1..75: mol_type = other DNA
gttgccggaattacagttaaatcaggcattgaggatttttctattattccatttgaacaggaagccggtatttaa

SEQ ID NO: 174419 - DNA, 75 bp, synthetic construct
  source 1..75: mol_type = other DNA
cagttgggattgcgggggcgttaccgtgggggatcttactggcgttaggtcgccgctcccatatgccgattgtgc

SEQ ID NO: 174420 - DNA, 75 bp, synthetic construct
  source 1..75: mol_type = other DNA
gcctcttccggaaaaccctgtgaaggaaaactcactgatcaatttggtcaaatacactatttattactggaaccc

SEQ ID NO: 174421 - DNA, 75 bp, synthetic construct
  source 1..75: mol_type = other DNA
agccctcgtcgtcctctgtctgttggcaggcttttttggcctcattggcattcttcttcagcatgtctgtgtcat

SEQ ID NO: 174422 - DNA, 75 bp, synthetic construct
  source 1..75: mol_type = other DNA
atggttttattcatgttgttagcattatttatttttatcccagaattaattaccgccccactaaaatggatgagc

SEQ ID NO: 174423 - DNA, 75 bp, synthetic construct
  source 1..75: mol_type = other DNA
gcgccgggcgtcatgatgggcgtcacgctgatggttacctggtggtggcaggcaaaacgactgaatttaccttgt

SEQ ID NO: 174424 - DNA, 75 bp, synthetic construct
  source 1..75: mol_type = other DNA
ggaagcccgccagcaatccccagctggctgcgtgatggtgttcaccgcccgtatccgcaaggaggtgcgccatgc

SEQ ID NO: 174425 - DNA, 75 bp, synthetic construct
  source 1..75: mol_type = other DNA
gctgtattcggcaaatgaagttgatgttgatgtctcctggctcagtccgcaaagcgaatatcgtcctactgaata

SEQ ID NO: 174426 - DNA, 75 bp, synthetic construct
  source 1..75: mol_type = other DNA
gccgattcactgggaagtagtacgcaagattattgaaaaagagcgcccggacgcggtgctgccaacgatgggcgg

SEQ ID NO: 174427 - DNA, 75 bp, synthetic construct
  source 1..75: mol_type = other DNA
gcctgttaggtgcaatcgctattggtattcccatcgcctggtcattattgctttgcggcgtagccttgatgttct

SEQ ID NO: 174428 - DNA, 75 bp, synthetic construct
  source 1..75: mol_type = other DNA
agcaatcagtgtgaatattcgaggcatgagcggatttggtcgtgtaaacactatggtcgatggtattacccagag

SEQ ID NO: 174429 - DNA, 75 bp, synthetic construct
  source 1..75: mol_type = other DNA
gcgactgatgcgctgctgcactgtgcggaacaacttcgcgcacctgaaggcttggtaatactagctgaatgccca

SEQ ID NO: 174430 - DNA, 75 bp, synthetic construct
  source 1..75: mol_type = other DNA
tggcgataccgtaacgcttaaggaagcgacagatacgctgctgcattgtgcggaacagcttcgtatatctgaata

SEQ ID NO: 174431 - DNA, 75 bp, synthetic construct
  source 1..75: mol_type = other DNA
ggatgtgcgggcaggggcgtttaacgacctttgcgcggcgtttgtcaggcacgcaaaaattgcaggactgggtga

SEQ ID NO: 174432 - DNA, 75 bp, synthetic construct
  source 1..75: mol_type = other DNA
ggtcagcagcaacgtgttgccatagcacgttcgctgtgtatgaagccgaaaattatgttgtttgatgagccaacg

SEQ ID NO: 174433 - DNA, 75 bp, synthetic construct
  source 1..75: mol_type = other DNA
ctaacgcgatgattacgctggaaaacgtcaataaatggtatgggcaattccatgttttgaaaaatataaatttaa

SEQ ID NO: 174434 - DNA, 75 bp, synthetic construct
  source 1..75: mol_type = other DNA
gaagaaggaaaaattttcactaaaggagacaaagtgctgatgaatcccctaatgatttttatcaaaatcattaag

SEQ ID NO: 174435 - DNA, 75 bp, synthetic construct
  source 1..75: mol_type = other DNA
aaaacgtttgtcatcatgctcggcggtgaagccattgagcatgagaatttctccagtatcgttaatgatatcggg

SEQ ID NO: 174436 - DNA, 75 bp, synthetic construct
  source 1..75: mol_type = other DNA
gctctggcaatcaccactccccaacctgttcgtggttcctgtcagtttactgtttacaattattgcagtgcatta

SEQ ID NO: 174437 - DNA, 75 bp, synthetic construct
  source 1..75: mol_type = other DNA
taacttactggtagcagttgatgttacacgcggtgacagcagtggctctgaagggatcaacgcccttgccggtag

SEQ ID NO: 174438 - DNA, 75 bp, synthetic construct
  source 1..75: mol_type = other DNA
aatatattttaaaagagaataaaaattgcaatatgtggtggacccatacaatgtcttgcctccctgcaaagaaga

SEQ ID NO: 174439 - DNA, 75 bp, synthetic construct
  source 1..75: mol_type = other DNA
acctgttcgtggttcctgtcagtttactgtttacgattattgcggtgcattataccggtaaaatagttgcgccct

SEQ ID NO: 174440 - DNA, 75 bp, synthetic construct
  source 1..75: mol_type = other DNA
gcagatcgacgcaaatctggctgcacatcaccacgaaccgctgtatcacaagaatatacgtgtgaccgacgccaa

SEQ ID NO: 174441 - DNA, 75 bp, synthetic construct
  source 1..75: mol_type = other DNA
gatgaaaaactgacactcacgtccagtccgcttatcggtgacggcaatgctaacctctgcaaatggcactccagt

SEQ ID NO: 174442 - DNA, 75 bp, synthetic construct
  source 1..75: mol_type = other DNA
acaggccgagcaaccgcgcgttcgtatgatcatgcaggtacacgatgaactggtatttgaagttcataaagatga

SEQ ID NO: 174443 - DNA, 75 bp, synthetic construct
  source 1..75: mol_type = other DNA
catcagtctggcctcaccagcccatttttgtggttaagtagggcagggtacctcggatgtttaattggcatgata

SEQ ID NO: 174444 - DNA, 75 bp, synthetic construct
  source 1..75: mol_type = other DNA
taaaagtggtgtggttaaaagatttccgcctatttttggcttgttgttttatgaacaggaaaggttaacaggagg

SEQ ID NO: 174445 - DNA, 75 bp, synthetic construct
  source 1..75: mol_type = other DNA
gcgtattgcagttgacgtcgctcgggaaacgggggcaccgctcaatatggggattgcagcagaaagttattacgc

SEQ ID NO: 174446 - DNA, 75 bp, synthetic construct
  source 1..75: mol_type = other DNA
gaccacctggcctggcaaagtgctgaaaggcgatctttcacccgccttcatggtggatctggcgttgaaagatct

SEQ ID NO: 174447 - DNA, 75 bp, synthetic construct
  source 1..75: mol_type = other DNA
ccggctactgtgctggggatcccttatgttattgatcaggctattgacgggattggtaccggaaaaaattcattt

SEQ ID NO: 174448 - DNA, 75 bp, synthetic construct
  source 1..75: mol_type = other DNA
atccgttgactggctttcaaaaaaaggcaatgtcaatcttatatacccaacagtatataacaaagctcatgagct

SEQ ID NO: 174449 - DNA, 75 bp, synthetic construct
  source 1..75: mol_type = other DNA
gcttaatcccattatcgtggggttaatgtgggttacctttggctggaaagtaactttgttgtacgcgatcatcgc

SEQ ID NO: 174450 - DNA, 75 bp, synthetic construct
  source 1..75: mol_type = other DNA
gcgcacagccttcaggtgaattgaccattggtaactacatgggtgcgttgcgtcagtgggtaaacatgcaggatg

SEQ ID NO: 174451 - DNA, 75 bp, synthetic construct
  source 1..75: mol_type = other DNA
accctgtctttgaagttgtctgccgtatcctggggaacggctggcgcgtgaacacacttgatgattgtccgtctc

SEQ ID NO: 174452 - DNA, 75 bp, synthetic construct
  source 1..75: mol_type = other DNA
gacacctatatagttaattcagaagaaattatggcgttggagatacctccacttaaacggtacgaagattatctt

SEQ ID NO: 174453 - DNA, 75 bp, synthetic construct
  source 1..75: mol_type = other DNA
ctaataaatctgttggcaaagggaatgaggatgattatatttcagggctttcgactcaaccctataggaatagtg

SEQ ID NO: 174454 - DNA, 75 bp, synthetic construct
  source 1..75: mol_type = other DNA
ttttggtttgttgttttatgaacaggaaaggttaacaggaggtgtttttcgttatgtgttgataaagttttataa

SEQ ID NO: 174455 - DNA, 75 bp, synthetic construct
  source 1..75: mol_type = other DNA
ttgctgaacttgtggcaatgaaagccagtgcgctcatgaaagatatggacatgagttccggggttattaacggta

SEQ ID NO: 174456 - DNA, 75 bp, synthetic construct
  source 1..75: mol_type = other DNA
gttatgctcgcggaaagcagagactttgctgaacttgtggcaatgaaagccggtgcattcatgaaagacaggagc

SEQ ID NO: 174457 - DNA, 75 bp, synthetic construct
  source 1..75: mol_type = other DNA
tcgaatacagggagaacgttatccgtaaaaacgctgatggaagcacgcacatgggggtaagtctggatatacgtt

SEQ ID NO: 174458 - DNA, 75 bp, synthetic construct
  source 1..75: mol_type = other DNA
gctgttttccccatgtggaaagttacattatcggaggactgattcgcccaggttatttttcggtaggagagagtc

SEQ ID NO: 174459 - DNA, 75 bp, synthetic construct
  source 1..75: mol_type = other DNA
aatgatcaaagatggcgactgcttttttctcgactccggctcaacctgcctcgaactggcgaaatgcctggccga

SEQ ID NO: 174460 - DNA, 75 bp, synthetic construct
  source 1..75: mol_type = other DNA
taaaaacgctgatggaacagtgcgcatgggggtaagtctggacatacgttcaaccgggaaaaagcagaaaggtga

SEQ ID NO: 174461 - DNA, 75 bp, synthetic construct
  source 1..75: mol_type = other DNA
ggaacaagtctttgcggtcgcgcctcatcatccgttagccctggaagaagaaccgttaaaccgtcgtatcattaa

SEQ ID NO: 174462 - DNA, 75 bp, synthetic construct
  source 1..75: mol_type = other DNA
aattcatcatttaattgcaaaccctgagttcgtggtccatctgacagatgaatattacttgatgctatcaattac

SEQ ID NO: 174463 - DNA, 75 bp, synthetic construct
  source 1..75: mol_type = other DNA
ctccattaaggcaaaaagtaaaaagaaaataccctgctaattcgtctggagtgtcaggatatagtgattcaaaaa

SEQ ID NO: 174464 - DNA, 75 bp, synthetic construct
  source 1..75: mol_type = other DNA
gatgcagacgtcaccttacaattgcatctgaaaatgtggccggatctgcagaaacacaaagggccgttgaacgtc

SEQ ID NO: 174465 - DNA, 75 bp, synthetic construct
  source 1..75: mol_type = other DNA
gcggtcttggttgtggctatttacctcgctatctggcgcaacgctttctcgatagtggcgcgttaattgagaaga

SEQ ID NO: 174466 - DNA, 75 bp, synthetic construct
  source 1..75: mol_type = other DNA
gaccttaatattcaattgcttgatcgtagcggtcaccgcgctaaattcacccgcaccggaaaaatgttattagag

SEQ ID NO: 174467 - DNA, 75 bp, synthetic construct
  source 1..75: mol_type = other DNA
tcttcaaaaatctgtcagatgaaacccgtctaggcatcgtgttaatgctcaaagagatgggagagctatgcgtat

SEQ ID NO: 174468 - DNA, 75 bp, synthetic construct
  source 1..75: mol_type = other DNA
atgggttcattatcgcttatccccgcatattccttcctgggctgccctggtgattgagcaggcctggttaagtca

SEQ ID NO: 174469 - DNA, 75 bp, synthetic construct
  source 1..75: mol_type = other DNA
agagagatgggagagctgtgcgtgtgcgatctctgtacagcgctggatcagtcacagcccaagatctcccgccac

SEQ ID NO: 174470 - DNA, 75 bp, synthetic construct
  source 1..75: mol_type = other DNA
ggactggatgcgcggcgtccgtgaggaccgacccaatggctggctgtttatctcctccaatgctgacacccatgc

SEQ ID NO: 174471 - DNA, 75 bp, synthetic construct
  source 1..75: mol_type = other DNA
atattgaaatgccgtgggtgactgaatttggtgccgaagttggttgcatgctggccggggaacaactggaaaaaa

SEQ ID NO: 174472 - DNA, 75 bp, synthetic construct
  source 1..75: mol_type = other DNA
atctttgcactgcacttgatcaatcacagcctaagatctcccggcatctggcaatgttgcgggaaagcgggattt

SEQ ID NO: 174473 - DNA, 75 bp, synthetic construct
  source 1..75: mol_type = other DNA
agatggaaaaataaggcggacaccttttcgtcgtggtgtccgtactttatgggaggtggcaagggaaaaggaaaa

SEQ ID NO: 174474 - DNA, 75 bp, synthetic construct
  source 1..75: mol_type = other DNA
catgcgacaaacccataaccccggagactctaaccagcgtcatgaacagtaactcgatgtttgccgccatgatgg

SEQ ID NO: 174475 - DNA, 75 bp, synthetic construct
  source 1..75: mol_type = other DNA
ccttgttgacttgagtgatacagcaagagagttactgttggaaaatgagaaaatccgcacgagtctcgataaagc

SEQ ID NO: 174476 - DNA, 75 bp, synthetic construct
  source 1..75: mol_type = other DNA
atatcattaaccgataaaagtaaaattatgttgccgtgggcttgggcagtgacagcagttataacatttttacct

SEQ ID NO: 174477 - DNA, 75 bp, synthetic construct
  source 1..75: mol_type = other DNA
atatgttgaagagttttatttctaaaaaccccgaactcatcacaattaatttactgcataagataaatgaaataa

SEQ ID NO: 174478 - DNA, 75 bp, synthetic construct
  source 1..75: mol_type = other DNA
accctgatgctccgccagtgcgtgttggcacctctcttgcagatctctgtggcggtgtctatttattcagtggaa

SEQ ID NO: 174479 - DNA, 75 bp, synthetic construct
  source 1..75: mol_type = other DNA
tgaatgcctggatcattgaaggaaaggaattattgcgcaaacagttgtcaaccctggtgttatcacagttgtttt

SEQ ID NO: 174480 - DNA, 75 bp, synthetic construct
  source 1..75: mol_type = other DNA
cacttttttgtttgtttcaccgttgcttaatcccattatcgtggggttaatgtgggttacctttggctggaaagt

SEQ ID NO: 174481 - DNA, 75 bp, synthetic construct
  source 1..75: mol_type = other DNA
aatattgagcctgcctttttatatttaacacggttgtttcattatttaaatttcccctatatattttttgcaatg

SEQ ID NO: 174482 - DNA, 75 bp, synthetic construct
  source 1..75: mol_type = other DNA
tcagcactgggctcgtgagctgaaaaaactggagcatgaagttcggctgttgcaggctcgcttcgtcaaagcgtt

SEQ ID NO: 174483 - DNA, 75 bp, synthetic construct
  source 1..75: mol_type = other DNA
gcgcagaaaaagccagcgcacacgcttcccgcacgttgaaagcggtttacgaagcgattggttttgtggcgaagc

SEQ ID NO: 174484 - DNA, 75 bp, synthetic construct
  source 1..75: mol_type = other DNA
gtatcaaactaatctggtgccggtgggtgaagaccagaaacagcacctggaactgagccgcgatatcgcccagcg

SEQ ID NO: 174485 - DNA, 75 bp, synthetic construct
  source 1..75: mol_type = other DNA
tatcggcgtgttgtccctcaattctatcagaaaaatcttctgaaagttgttgcagcagcgagagtcagggcaaca

SEQ ID NO: 174486 - DNA, 75 bp, synthetic construct
  source 1..75: mol_type = other DNA
agcagaaagatcactatctgccgcgtctggcgcgtggtcaggagatcccctgctttgcactgaccagcccggaag

SEQ ID NO: 174487 - DNA, 75 bp, synthetic construct
  source 1..75: mol_type = other DNA
gacttgttccagggcaagccggactggaaaaagctgcataactatccgcagccgcgcctgaccgccgaagagcaa

SEQ ID NO: 174488 - DNA, 75 bp, synthetic construct
  source 1..75: mol_type = other DNA
tatcctgaacctgttgcgccagaaggatataaaagccaaaatcgccgccctgacctgcgtccatttcgaggtaac

SEQ ID NO: 174489 - DNA, 75 bp, synthetic construct
  source 1..75: mol_type = other DNA
tgtggagcctcgcagatttccggcatcatagtgcccaatacgggatacaaaaagttccctcagactggagactcc

SEQ ID NO: 174490 - DNA, 75 bp, synthetic construct
  source 1..75: mol_type = other DNA
tgcaatcctggtcactgagctttcccggtgggggcgctcgacgctcgatctgctcaatacgctacgtgaactgga

SEQ ID NO: 174491 - DNA, 75 bp, synthetic construct
  source 1..75: mol_type = other DNA
aaaacctgaagatctggtgcattatgatttgaatgtcgccacccgaaaaacgttacgtttgaaaggtcttctgta

SEQ ID NO: 174492 - DNA, 75 bp, synthetic construct
  source 1..75: mol_type = other DNA
ggattgctgatgagtcgaaacgtgcgggggaaattcacccggcggcagataacaactggcgtttagcaccgatag

SEQ ID NO: 174493 - DNA, 75 bp, synthetic construct
  source 1..75: mol_type = other DNA
ttaacccgttcgaccgcgacgaaggaccgagcgtgaaagcgacgcaaattggctttgggcaattaagccgcgcac

SEQ ID NO: 174494 - DNA, 75 bp, synthetic construct
  source 1..75: mol_type = other DNA
tgatgaattatgaaaatttatctgaagacaataaaaaaacaataataaaaattattgataaaaataatattacga

SEQ ID NO: 174495 - DNA, 75 bp, synthetic construct
  source 1..75: mol_type = other DNA
ttgtcaccctggcacaacgtggtgatgcttgtgccatgcagcaggtggcacgttttcgccaacagcttgcccgca

SEQ ID NO: 174496 - DNA, 75 bp, synthetic construct
  source 1..75: mol_type = other DNA
ttacctgatctttgactgcgtctctgctaaccgggaagtgaaaattaatgaagagtttcaggaatacgcatgggt

SEQ ID NO: 174497 - DNA, 75 bp, synthetic construct
  source 1..75: mol_type = other DNA
taaatgtcccggatgcagtatttgcctggatgctgaatggtaaaggcggcgttaaaccgctggaagatacagata

SEQ ID NO: 174498 - DNA, 75 bp, synthetic construct
  source 1..75: mol_type = other DNA
agaaaaccagatttccagcgtgaaacaaatcattgggggcctgagcaggttgtatcgcttctcgaatgctacatc

SEQ ID NO: 174499 - DNA, 75 bp, synthetic construct
  source 1..75: mol_type = other DNA
gataacagctcttgcgtctgttacaaatccaatgtttgcaaaagttgcggcagttggagctggtatcggtatggc

SEQ ID NO: 174500 - DNA, 75 bp, synthetic construct
  source 1..75: mol_type = other DNA
accgtcgcctcgttaagcgcattaaaaaaacaggcgcgggtatggctaaaatcacaaccggttagtactcaactt

SEQ ID NO: 174501 - DNA, 75 bp, synthetic construct
  source 1..75: mol_type = other DNA
ggaaatcgagcagatttcagaaaagccatagggcactacgcgcgaaaagcctccggagggagcagtaacgctgct

SEQ ID NO: 174502 - DNA, 75 bp, synthetic construct
  source 1..75: mol_type = other DNA
tgcaggaaaacttagcgcgtcgcacgtatacgatgtccttgatggcaatggtctttttacccagtacgtttttaa

SEQ ID NO: 174503 - DNA, 75 bp, synthetic construct
  source 1..75: mol_type = other DNA
atggttcatcttatctttatcgcgcatatcacgcgtttccccccgctgactaacagcgcaggcgagccgaccggt

SEQ ID NO: 174504 - DNA, 75 bp, synthetic construct
  source 1..75: mol_type = other DNA
aatccattgaaaataatgatgatgattttatagtatgtagaacatttgtaacaaatgtcgttgaatcaggtgatg

SEQ ID NO: 174505 - DNA, 75 bp, synthetic construct
  source 1..75: mol_type = other DNA
aaacgaagtgggtaaggtgacgtccgtcactctgcctaaactgacgcgcaaaaccgacagctaccggggtggtgc

SEQ ID NO: 174506 - DNA, 75 bp, synthetic construct
  source 1..75: mol_type = other DNA
tctgaatttctggatatggttattttgccaaccagattctctaccgatgacctggaaaccaccgttaacactgct

SEQ ID NO: 174507 - DNA, 75 bp, synthetic construct
  source 1..75: mol_type = other DNA
aacgcgaattgttaagcagcgatcccttctccagtcgtaccaccttgccagacagcgcccgcgtcgccagtgctt

SEQ ID NO: 174508 - DNA, 75 bp, synthetic construct
  source 1..75: mol_type = other DNA
agcgatgccaaccgcgataacaaccatcgcgaattgttaagcagcgatccgttctccagccgtactaccttgcct

SEQ ID NO: 174509 - DNA, 75 bp, synthetic construct
  source 1..75: mol_type = other DNA
gagagcgcccgtgttgccagtgcctcaacaatcccgaatcgtgatgcgcgaaatattcctctgcgtgtggatcta

SEQ ID NO: 174510 - DNA, 75 bp, synthetic construct
  source 1..75: mol_type = other DNA
gttacaaccggcccggtcgcggcattacattacgatggcacaaccacctcgatgtataacgagtttggcgacagt

SEQ ID NO: 174511 - DNA, 75 bp, synthetic construct
  source 1..75: mol_type = other DNA
aacacagcttacgcctggcaacaagaatatatcgttgatacgcaacccggacattccacagagcgttacacctgg

SEQ ID NO: 174512 - DNA, 75 bp, synthetic construct
  source 1..75: mol_type = other DNA
ggatctgaaattttattagaccggggatgggattttagcataggcgaaaagcactttaatgatcctgtcaatttg

SEQ ID NO: 174513 - DNA, 75 bp, synthetic construct
  source 1..75: mol_type = other DNA
gataaagaaatttttagacgacttatgagtgatgatttaccaccatacaggcaagtttataagattgcttattta

SEQ ID NO: 174514 - DNA, 75 bp, synthetic construct
  source 1..75: mol_type = other DNA
ttaaaaaaaatacgtttttacaatagtgcagtgatttttatcagaaatgcacaattagtgattaaggcaacagat

SEQ ID NO: 174515 - DNA, 75 bp, synthetic construct
  source 1..75: mol_type = other DNA
tcccgtgcatcccttaaacgtcaggttacatgcatacctgagcattgtgagctgagtatcgcagatggacgctat

SEQ ID NO: 174516 - DNA, 75 bp, synthetic construct
  source 1..75: mol_type = other DNA
cggcagcggtggcgtatacggatgcatcttctcttgctcttcaggatgaaataaaagaaaaagcggatgaaacag

SEQ ID NO: 174517 - DNA, 75 bp, synthetic construct
  source 1..75: mol_type = other DNA
ccattaagcgccgttgtcggtattccgctgtatatccgggctgaggcagttatccctctggcatctgttctgatg

SEQ ID NO: 174518 - DNA, 75 bp, synthetic construct
  source 1..75: mol_type = other DNA
gccggcgtctccgttcttgccagtattatcctggattctctggggtttgaacgtcatatcattgccagtaaaagc

SEQ ID NO: 174519 - DNA, 75 bp, synthetic construct
  source 1..75: mol_type = other DNA
cgcagaagtacatggacctttacttcgaacgctacccaggcgtgctggagtatatggaacgcacccgtgctcagg

SEQ ID NO: 174520 - DNA, 75 bp, synthetic construct
  source 1..75: mol_type = other DNA
tcgataacaacatggctaaatcaaaaggtgttggctactatctgtcacgcctgtctgtagccataagtatagtta

SEQ ID NO: 174521 - DNA, 75 bp, synthetic construct
  source 1..75: mol_type = other DNA
aggtaaagttgtatatgcatatggcaatggaggcgcaatttttgaccattttgaaatagttcttcccaaaagtag

SEQ ID NO: 174522 - DNA, 75 bp, synthetic construct
  source 1..75: mol_type = other DNA
gatgcggataaatccatggcagtgggaaataatacagctgtttttaatgcagacaacagtgtcgctctggggtat

SEQ ID NO: 174523 - DNA, 75 bp, synthetic construct
  source 1..75: mol_type = other DNA
ggatggccgtttcaccggcaccggcgcagtgacggagacgaacgtagagcagttgatccgcctgatggtagggcg

SEQ ID NO: 174524 - DNA, 75 bp, synthetic construct
  source 1..75: mol_type = other DNA
ggcatgatccgcggtcacggttgtctcgacttcgacgacagtacagacgacaaagagtatgtcttcgaagtgaaa

SEQ ID NO: 174525 - DNA, 75 bp, synthetic construct
  source 1..75: mol_type = other DNA
caccttgttgtacgcgattatcgccgccggcgtctccgttcttgccagtattatcctggattctctggggtttga

SEQ ID NO: 174526 - DNA, 75 bp, synthetic construct
  source 1..75: mol_type = other DNA
cacctgaacagaggtgatatgctcacctcagaacaacacaggtgctccaatgaaaaaaagaaatttcagcgcaga

SEQ ID NO: 174527 - DNA, 75 bp, synthetic construct
  source 1..75: mol_type = other DNA
catgctggagtcctacattctcaatagcgttgccgggcgccacgatatggacagcctcgcggaacgttggttgaa

SEQ ID NO: 174528 - DNA, 75 bp, synthetic construct
  source 1..75: mol_type = other DNA
gtgagagttgcgggtgatgatggctatcctgcatgggatgacgtaccgccgctaactcatgaagaacaacagtca

SEQ ID NO: 174529 - DNA, 75 bp, synthetic construct
  source 1..75: mol_type = other DNA
aggcagacggggcggattatttcccgctggtgtgcgatttttacctcatccgcacgttaatcagtttatggacgc

SEQ ID NO: 174530 - DNA, 75 bp, synthetic construct
  source 1..75: mol_type = other DNA
gtaaaatgccaggcagggatggcgatactcttgcccgactgacaacgctgccacaggcgctggccgatcatgcga

SEQ ID NO: 174531 - DNA, 75 bp, synthetic construct
  source 1..75: mol_type = other DNA
aaccccggagctttccctgtatgccgtcgggattttgctctcccgcgccagcaaaatgccgggcagagacggaga

SEQ ID NO: 174532 - DNA, 75 bp, synthetic construct
  source 1..75: mol_type = other DNA
ccatcgtcactcttccttctggcgaatatgcacttaacaagcctggcctgtcaccgcaggatgtaacgtcattcc

SEQ ID NO: 174533 - DNA, 75 bp, synthetic construct
  source 1..75: mol_type = other DNA
tttacctgtgacagcgaaagaagttatcacgatgtttaatcacggacattggagcaagattggcgatattaagtt

SEQ ID NO: 174534 - DNA, 75 bp, synthetic construct
  source 1..75: mol_type = other DNA
acggtgtttatcagtcattggcttcacgcgcctattatcgccttgaaggtgaacacgtaatgatgcgattgcgcc

SEQ ID NO: 174535 - DNA, 75 bp, synthetic construct
  source 1..75: mol_type = other DNA
gattaccgttacctctatgcctgcttatcctgagtctggcgtggaaatcgcgcaccgttcgcttttctcccaata

SEQ ID NO: 174536 - DNA, 75 bp, synthetic construct
  source 1..75: mol_type = other DNA
attactcctacaccgtatattcgcactgttaccgctgccgagctgcgggagatcaccgttacttctatgcctgct

SEQ ID NO: 174537 - DNA, 75 bp, synthetic construct
  source 1..75: mol_type = other DNA
ccgtaaccgccgctgaactccgagaaatcacaataacgtcgatgcctgcttatccagaatctggcgtggagattg

SEQ ID NO: 174538 - DNA, 75 bp, synthetic construct
  source 1..75: mol_type = other DNA
agactgacggcgcagattattgcccgctggtgtgtgatttttatctcatccgcacgttaatcagtttatggacgc

SEQ ID NO: 174539 - DNA, 75 bp, synthetic construct
  source 1..75: mol_type = other DNA
aatttatcattaccatgttgccgaatggcgatctggtgcgcaacgtgttgttcggtgaaaacggcgtttgcgaag

SEQ ID NO: 174540 - DNA, 75 bp, synthetic construct
  source 1..75: mol_type = other DNA
ggaactgtacgaaattaccgttacatcggtaccggcttaccctgattccggcgtggagctggcccgccgttccct

SEQ ID NO: 174541 - DNA, 75 bp, synthetic construct
  source 1..75: mol_type = other DNA
atggtgagatgcttgtggggtcgcggcggatatcccaggacatcagcacccgtgatgaaggcggagacgggcagg

SEQ ID NO: 174542 - DNA, 75 bp, synthetic construct
  source 1..75: mol_type = other DNA
ttgtccacacagctcccggcgtttcgtcagaaactgaatgacggctggtatcaggtgcgcattgccgggcgtgat

SEQ ID NO: 174543 - DNA, 75 bp, synthetic construct
  source 1..75: mol_type = other DNA
ggtatcaggtgcgcattgccgggcgtgatgcaggcgaaaatgaattatcagcccgtcttaatgaaccgctggcaa

SEQ ID NO: 174544 - DNA, 75 bp, synthetic construct
  source 1..75: mol_type = other DNA
atgatgttctctacaccatgtgaaccgtatgaagtcaatccaattctggaacgcgcgatggaccgcattctgatc

SEQ ID NO: 174545 - DNA, 75 bp, synthetic construct
  source 1..75: mol_type = other DNA
gaaaatgccgaccatggccgcgatgtgttacaagtattccattggtcagccatttgtttacccgcgcaacgatct

SEQ ID NO: 174546 - DNA, 75 bp, synthetic construct
  source 1..75: mol_type = other DNA
agtgacggtatgaagattgcccgtccgcgtcagctttacaccggctacgcgcagcgtgattttaagtcggatatt

SEQ ID NO: 174547 - DNA, 75 bp, synthetic construct
  source 1..75: mol_type = other DNA
gtacggtgaaatgcgcgtggggtcacgtgtggcatctcaggagatcagcacggcagatgaaggggatggtggtca

SEQ ID NO: 174548 - DNA, 75 bp, synthetic construct
  source 1..75: mol_type = other DNA
atgatgttctccacaccgtgcgaaccgtatgaagtcaatccgattctggaacgcgcgatggatcgtattctgatc

SEQ ID NO: 174549 - DNA, 75 bp, synthetic construct
  source 1..75: mol_type = other DNA
gaaagacaaaaatgactctttccgcctgatgggcttcggtcaccgcgtgtacaaaaattacgacccgcgcgccac

SEQ ID NO: 174550 - DNA, 75 bp, synthetic construct
  source 1..75: mol_type = other DNA
gcggcgctgattgcggtggcatggtggaaccctgcaggctggctgggtgctgcggctttatcgggcatgtatgcg

SEQ ID NO: 174551 - DNA, 75 bp, synthetic construct
  source 1..75: mol_type = other DNA
ctgtgatccatatcgtgccgcgtctggcaggagccaaaagtggcggtgtgtttcaggctgtgctgggggcggctg

SEQ ID NO: 174552 - DNA, 75 bp, synthetic construct
  source 1..75: mol_type = other DNA
cagcaacatcatgttctctatgggctctgcaatggcactgggtggtgtggcccagatgctggccccgaaggcaaa

SEQ ID NO: 174553 - DNA, 75 bp, synthetic construct
  source 1..75: mol_type = other DNA
gggcgctgtctctgcagctgccgggattccgccgtcagatgaccgaaggctggtaccgggtacgtattgccggtg

SEQ ID NO: 174554 - DNA, 75 bp, synthetic construct
  source 1..75: mol_type = other DNA
cggtgaaatgcgtgtggggtcacgggtaatttcgcaggaaatcagcacggcagacgaaggggatggtggtgaaat

SEQ ID NO: 174555 - DNA, 75 bp, synthetic construct
  source 1..75: mol_type = other DNA
tttggccgccgcctcagcctgtatgtgaacacggcagcggaagccatccgggcgctgtcgttacaggtgcccgga

SEQ ID NO: 174556 - DNA, 75 bp, synthetic construct
  source 1..75: mol_type = other DNA
tgaacacggcagcagaggccatccgtgccctgtcgcagcaggtgccgggattccgctgtcagatgaacgaaggct

SEQ ID NO: 174557 - DNA, 75 bp, synthetic construct
  source 1..75: mol_type = other DNA
gcgactggccggagccggaaagggcggactgcagattgtgctgggggcagcagccatcgtgggctctttcttcac

SEQ ID NO: 174558 - DNA, 75 bp, synthetic construct
  source 1..75: mol_type = other DNA
tgtacggtgaaatgcgcgtggggtcacgggtgatttctcaggagatcagcacggcagatgaaggagatggtggtc

SEQ ID NO: 174559 - DNA, 75 bp, synthetic construct
  source 1..75: mol_type = other DNA
ctgcctttacggggatttccaacgatttggccgccgcatcgatcttcgtgtgaaaacgggggcagaagctatccg

SEQ ID NO: 174560 - DNA, 75 bp, synthetic construct
  source 1..75: mol_type = other DNA
tcactggcagcggctaaaggagtccgatctgaagccctggaagtggcccgtcgtcagtatccggatgacagacgt

SEQ ID NO: 174561 - DNA, 75 bp, synthetic construct
  source 1..75: mol_type = other DNA
cggatatgccgtcgcaactggctgccaggctggatgaggcctgggcggccattaagaccgggctggtcagggggc

SEQ ID NO: 174562 - DNA, 75 bp, synthetic construct
  source 1..75: mol_type = other DNA
ggtgatccgtgtggagcagaaactggataaggggattggtttcgcacgttttgccaaatcgctggccgcggctaa

SEQ ID NO: 174563 - DNA, 75 bp, synthetic construct
  source 1..75: mol_type = other DNA
cgcggctgtatcgggcatgtatgcggcaggggccagtatgatcttgggcggtgtggcgcagatgctggcacctaa

SEQ ID NO: 174564 - DNA, 75 bp, synthetic construct
  source 1..75: mol_type = other DNA
attgcggtactgacggaagaattgatccgtttttccagcccggctgctgatgcgctggtccgtaatgcactggcg

SEQ ID NO: 174565 - DNA, 75 bp, synthetic construct
  source 1..75: mol_type = other DNA
ggagtaattacttcaatatttataccaacctataatgatgaggatatcaaagcaggtgaagcattatctgcatgt

SEQ ID NO: 174566 - DNA, 75 bp, synthetic construct
  source 1..75: mol_type = other DNA
gtgaaaacgggggccgaagccatccgggcgctggccacgcagctccctgcgtttcgtcagaaactgagcgacggc

SEQ ID NO: 174567 - DNA, 75 bp, synthetic construct
  source 1..75: mol_type = other DNA
atgcagcaggggccagtatgatcctgggtggtgtggcgcagatgctggcaccgaaagccaggacgcccacggcag

SEQ ID NO: 174568 - DNA, 75 bp, synthetic construct
  source 1..75: mol_type = other DNA
ttatcatcccgtcttaatgagccgctggcaaatggtgcagtgatccacatcgtgccgcgtcttgcgggagcaaaa

SEQ ID NO: 174569 - DNA, 75 bp, synthetic construct
  source 1..75: mol_type = other DNA
gatgccggtgccttacggtgaaatgctggttggctcccggcgaatctcccaggacatcagtacccgtgatgaagg

SEQ ID NO: 174570 - DNA, 75 bp, synthetic construct
  source 1..75: mol_type = other DNA
caacggataacggcagacagaacacgtatttttcctcactggacaacatgattgctcaggggaacccgatgccgg

SEQ ID NO: 174571 - DNA, 75 bp, synthetic construct
  source 1..75: mol_type = other DNA
aatggtgcagtgatccacatcgtgccgcgtcttgcgggagcaaaaagtggcggtgtgtttcaggcggtgctgggt

SEQ ID NO: 174572 - DNA, 75 bp, synthetic construct
  source 1..75: mol_type = other DNA
aatggtgccgtgatccacatcgtgccgcgtctggcgggtgctaaaagtggcggtatttttcaggcagtgctgggt

SEQ ID NO: 174573 - DNA, 75 bp, synthetic construct
  source 1..75: mol_type = other DNA
cagcaacatcatgttctccatgggctctgcaatggcgctgggtggcgtggcccggatgctggccccgaagcccaa

SEQ ID NO: 174574 - DNA, 75 bp, synthetic construct
  source 1..75: mol_type = other DNA
cggggatcagtatcgctttcagtgacattctcttttcaatgggtgcggcgatgacgcttggtggtgtggcgcaga

SEQ ID NO: 174575 - DNA, 75 bp, synthetic construct
  source 1..75: mol_type = other DNA
tggtgacaccgtccttcttcaaggtgaagccgaatggtcagcagacgctgcgtatcatcatggcctcggaccatc

SEQ ID NO: 174576 - DNA, 75 bp, synthetic construct
  source 1..75: mol_type = other DNA
tgacgggagatacaacttacagcgcgatgtttacctcttccaccgcagaacaaccgctgatgccgtactccgtga

SEQ ID NO: 174577 - DNA, 75 bp, synthetic construct
  source 1..75: mol_type = other DNA
gcacgggaataagcgaccgtcgcgaattacggctggccgccatgtttttatacctcaacaggcactgctttaatg

SEQ ID NO: 174578 - DNA, 75 bp, synthetic construct
  source 1..75: mol_type = other DNA
caccggaggttatcgccaccctgagatgcatcacatccgccttatcaacggttcgcacttctgcgccacgaacat

SEQ ID NO: 174579 - DNA, 75 bp, synthetic construct
  source 1..75: mol_type = other DNA
cttaagaacgaaaggaagcgcccgcgtcccggccctgaagctggagcactggcagcagtttatgactcaggttta

SEQ ID NO: 174580 - DNA, 75 bp, synthetic construct
  source 1..75: mol_type = other DNA
cagggctactgttctcgcagtttgtggcagcagagcagatcacaatgtccgatcctcagcaggaaacgacggaga

SEQ ID NO: 174581 - DNA, 75 bp, synthetic construct
  source 1..75: mol_type = other DNA
gttggcgcaagaacccgcgaacccgcaccggaggttatcgccaccctgaaacagtgcgacgcatgcggtcgccat

SEQ ID NO: 174582 - DNA, 75 bp, synthetic construct
  source 1..75: mol_type = other DNA
cggaatgggcatcatttacgcaagcgagtcctaaagcccaacttcctttactaaagcgttctctaagggcaatga

SEQ ID NO: 174583 - DNA, 75 bp, synthetic construct
  source 1..75: mol_type = other DNA
tacattaaaagaaaagaacaaagactttccagtaacaaagagacaatcaataaaaacatagatgtaactaaaatg

SEQ ID NO: 174584 - DNA, 75 bp, synthetic construct
  source 1..75: mol_type = other DNA
gggcagcaacgccttgccgccgtgcaacgggccatgcagcagggggccgcgaatgataactggtttgaaccggag

SEQ ID NO: 174585 - DNA, 75 bp, synthetic construct
  source 1..75: mol_type = other DNA
aagcgttacatcctgggtgattccaatggtgcgctgattaatttctaccggcaagccagggacaacaccgacaac

SEQ ID NO: 174586 - DNA, 75 bp, synthetic construct
  source 1..75: mol_type = other DNA
ctgagtgggctgctttcactcaagcaagttcaaaggtgcaacttcctttactacgtcgtgctttgagggcaatga

SEQ ID NO: 174587 - DNA, 75 bp, synthetic construct
  source 1..75: mol_type = other DNA
ctactgaccgacaattacaatcaataattgaatcaggtgataatagaagggtaaaaataggagatagccccctag

SEQ ID NO: 174588 - DNA, 75 bp, synthetic construct
  source 1..75: mol_type = other DNA
attgcattaggacttttgtgcaccttagtcgctttgctgcatattgatactgaagagaagaatattccatggtgg

SEQ ID NO: 174589 - DNA, 75 bp, synthetic construct
  source 1..75: mol_type = other DNA
tgttccgtgtgatggtctttttattgctgattgcctccggttctatgttgataaaaggcgcgctgggaattcccg

SEQ ID NO: 174590 - DNA, 75 bp, synthetic construct
  source 1..75: mol_type = other DNA
aaaaaaatcaatggttacatgattaaaggacgtcagatttttggcatgaatatgccggaggaatcattgtttatt

SEQ ID NO: 174591 - DNA, 75 bp, synthetic construct
  source 1..75: mol_type = other DNA
atgaaaatgactatgattatgtcataattgataccccaccaaccccatcagtttggatgtccagcgcattaattg

SEQ ID NO: 174592 - DNA, 75 bp, synthetic construct
  source 1..75: mol_type = other DNA
cctgaccaccaaagagacactgttgtcctggacgctgatgtcgacgctgttatccatctgtgggctgatatttat

SEQ ID NO: 174593 - DNA, 75 bp, synthetic construct
  source 1..75: mol_type = other DNA
gttcttaggtaattcaacgatcgccatgctgatttcactgctattcgcgatctataccatgggcctggggcgcgg

SEQ ID NO: 174594 - DNA, 75 bp, synthetic construct
  source 1..75: mol_type = other DNA
ttcgctattgcccgtgaagcaaaaatatcaccgatgtttatgtgtgtgccgatgctttctggtttgctggtcgca

SEQ ID NO: 174595 - DNA, 75 bp, synthetic construct
  source 1..75: mol_type = other DNA
cctgatggccggattgttcatcgcgttcttcatccccatagcgctcgatccggttgtcatcccgatgacaatgat

SEQ ID NO: 174596 - DNA, 75 bp, synthetic construct
  source 1..75: mol_type = other DNA
gtgagttttaggtttgaggttctgtctccagcaccgggggggcgcatgtcaaaactgcaggaccatctgctgcat

SEQ ID NO: 174597 - DNA, 75 bp, synthetic construct
  source 1..75: mol_type = other DNA
catatattactgatttcagacttgagcgcaacaaaaatttcgatgcagatcactcaactgcttatgattcgcacg

SEQ ID NO: 174598 - DNA, 75 bp, synthetic construct
  source 1..75: mol_type = other DNA
tcgtcctcgttatcggtgccggctgcggtagatagctatacttctgagtcttttaattcggatacaggcaatcag

SEQ ID NO: 174599 - DNA, 75 bp, synthetic construct
  source 1..75: mol_type = other DNA
tttcccagaaagcggaagagaaaacattgcgtgtttccccgggaaacacgcaggaaaggccattatttatccgtg

SEQ ID NO: 174600 - DNA, 75 bp, synthetic construct
  source 1..75: mol_type = other DNA
aacaggtgagaaaggaccttttttattctatatattaggagccttaatatgttgttcatatgctcaggggaaaat

SEQ ID NO: 174601 - DNA, 75 bp, synthetic construct
  source 1..75: mol_type = other DNA
actacaccttatatctatgccattggaaatctgctggatgcaaatggaaaaaaaattagtgtagacagcgatgcc

SEQ ID NO: 174602 - DNA, 75 bp, synthetic construct
  source 1..75: mol_type = other DNA
gtgaccgtcaggggcgtaccattgccggcgataaaaccgatgaatggctgcaaccggcctgtaatgagatgtacc

SEQ ID NO: 174603 - DNA, 75 bp, synthetic construct
  source 1..75: mol_type = other DNA
aggtgagcttctatggctggaatcgcgtcgatcgttttatgtcgcctggaaaatgcgggattcagcgttgttggt

SEQ ID NO: 174604 - DNA, 75 bp, synthetic construct
  source 1..75: mol_type = other DNA
tccgtgaccgttccgggcgcaccatcgccggcgataaaaccgatgagtggctgcaaccggcctgtaatgagatgt

SEQ ID NO: 174605 - DNA, 75 bp, synthetic construct
  source 1..75: mol_type = other DNA
ctggacccgtttgcaggcagcggctcaacctgcgtggccgccctccagtccggacgccggtatatcggtatcgag

SEQ ID NO: 174606 - DNA, 75 bp, synthetic construct
  source 1..75: mol_type = other DNA
tcggattgtcaggtgtggggatgatgttctcatcaatggcgtctggacatgacgctggcgggcttcaatctccgg

SEQ ID NO: 174607 - DNA, 75 bp, synthetic construct
  source 1..75: mol_type = other DNA
atgacaagacccatacatttggtggtcaggcgtgggttgacaatattgttgagaaagacacccgcccgacttttg

SEQ ID NO: 174608 - DNA, 75 bp, synthetic construct
  source 1..75: mol_type = other DNA
accgcgtactcaaaaaagatgcgctgatggtcagcttctatggctggaaccgcgtcgatcgctttgtggccgcct

SEQ ID NO: 174609 - DNA, 75 bp, synthetic construct
  source 1..75: mol_type = other DNA
gcgtgcgtgttatggccacgttgccggataatgctgtcgatttcattctgacagacccgccatatctggtcggct

SEQ ID NO: 174610 - DNA, 75 bp, synthetic construct
  source 1..75: mol_type = other DNA
tggccacctggtcttcaccaaaacctacacatcgaaggccgcatatgtgggctatcgccacgaatgcgcttacat

SEQ ID NO: 174611 - DNA, 75 bp, synthetic construct
  source 1..75: mol_type = other DNA
ttcgtgaccgacaggggcgtaccatcgccggcgataaaaccgatgaatggctgcaaccggcctgtaatgaaatgt

SEQ ID NO: 174612 - DNA, 75 bp, synthetic construct
  source 1..75: mol_type = other DNA
tggccatatcgtcttcgccaagtcctacgcctcaaaatcgacgttcgtgggttacacccatgagagcgcctacct

SEQ ID NO: 174613 - DNA, 75 bp, synthetic construct
  source 1..75: mol_type = other DNA
gctgcttgaacagtatcaccgtgccggacagcaacgccttgccgccgtgcaacgggccatgcagcagggggccgc

SEQ ID NO: 174614 - DNA, 75 bp, synthetic construct
  source 1..75: mol_type = other DNA
gttatcgccatgaatgtgcctatatcctggcaaaaggccgtccggcgttgcctccaaacccgttaccggacgttc

SEQ ID NO: 174615 - DNA, 75 bp, synthetic construct
  source 1..75: mol_type = other DNA
gcgtgcgtgttatggccacgtttccggacaattctgtcgatttcatccttaccgacccgccatatctcgtcggtt

SEQ ID NO: 174616 - DNA, 75 bp, synthetic construct
  source 1..75: mol_type = other DNA
ctgcaaccggcctgtaatgaaatgttccgcgtgctgaaaaaagacgcgttaatggtgagcttctatggctggaac

SEQ ID NO: 174617 - DNA, 75 bp, synthetic construct
  source 1..75: mol_type = other DNA
cgtgccgggcagcaacgccttgccgccgtgcaacgggccatgcagcagggggccgcgaatgatgactggtttatg

SEQ ID NO: 174618 - DNA, 75 bp, synthetic construct
  source 1..75: mol_type = other DNA
cattcactggcactggcggcgtcactggatgcgcaggggtacagcgtcagtgacatcatccatatcctgatggcg

SEQ ID NO: 174619 - DNA, 75 bp, synthetic construct
  source 1..75: mol_type = other DNA
atgtcccgttttgtcctcggtaactgcatcgatgttatggcccgtattcctgataacgctattgatttcatactg

SEQ ID NO: 174620 - DNA, 75 bp, synthetic construct
  source 1..75: mol_type = other DNA
ctacatcctggcaaaaggacgtccggcgctgcctcagaagccattgcccgacgtgctgggctggaaatattcagg

SEQ ID NO: 174621 - DNA, 75 bp, synthetic construct
  source 1..75: mol_type = other DNA
ctgtacggtgaaatgcgcgtggggtcacgtgtggcatctcaggagatcagtacagctgatgaaggtgatggtggt

SEQ ID NO: 174622 - DNA, 75 bp, synthetic construct
  source 1..75: mol_type = other DNA
acggtatcggtacgcaaattgtgatggaaagcgcggagcagattcgtcgcgcaacaatcaacgatattggcggca

SEQ ID NO: 174623 - DNA, 75 bp, synthetic construct
  source 1..75: mol_type = other DNA
gcattgccgctcaggcgaagcagagcggcttaagcaaattgtttgtgctgaccacgcgcagtattcactggttcc

SEQ ID NO: 174624 - DNA, 75 bp, synthetic construct
  source 1..75: mol_type = other DNA
cgataacacgactattgcctgcgccgcgctctatccgttcccggaagagaagattggggaaatggcctgtgtggc

SEQ ID NO: 174625 - DNA, 75 bp, synthetic construct
  source 1..75: mol_type = other DNA
tgttcagattgatggttctccacatgactggtttgaaggacgcgccccaaatgctgcctgcttgtcttcattgat

SEQ ID NO: 174626 - DNA, 75 bp, synthetic construct
  source 1..75: mol_type = other DNA
ggctcaccatcccatgctggaggggattttgctgtctgagtgtgtgcgtttaaaacaacgccctctggcaaataa

SEQ ID NO: 174627 - DNA, 75 bp, synthetic construct
  source 1..75: mol_type = other DNA
tattgattcactgccagagagcaaaaagcagatgtacaactatcagcgtaaatccaaagtgctgatggcggattt

SEQ ID NO: 174628 - DNA, 75 bp, synthetic construct
  source 1..75: mol_type = other DNA
caatatctcaaacgtctgaaacaactagaacttgaatttgctgacctgcttactctctcttctgctgaattaaaa

SEQ ID NO: 174629 - DNA, 75 bp, synthetic construct
  source 1..75: mol_type = other DNA
gcggtcggcgcggcgtttgaatgccagcgtctggggttgaaagttcctgacgatatggcgattgccggtttccac

SEQ ID NO: 174630 - DNA, 75 bp, synthetic construct
  source 1..75: mol_type = other DNA
gattcccgtggtggaactgatggacagcaagtcgccatgcctcgatattgccgtcggttttgataactttgaagc

SEQ ID NO: 174631 - DNA, 75 bp, synthetic construct
  source 1..75: mol_type = other DNA
cgtatcctggggcgtgtgtcatccgaatatctactacttccataatctgacgcccgggtgggtgtcattcaatgg

SEQ ID NO: 174632 - DNA, 75 bp, synthetic construct
  source 1..75: mol_type = other DNA
aatggtgaaaaaccggagattgccatcgtaccccagagtctgcaccggctgatttatggtccggacaaacggacc

SEQ ID NO: 174633 - DNA, 75 bp, synthetic construct
  source 1..75: mol_type = other DNA
cattcgtcgccgtgaacctcacgttgccggacttattctggggctaatcctcatacttggcggtgagatgatcgg

SEQ ID NO: 174634 - DNA, 75 bp, synthetic construct
  source 1..75: mol_type = other DNA
tcaaactggtctggctctgctggcttgacttaatgaccggaaacagccttgacgactggacggagaacctgaaac

SEQ ID NO: 174635 - DNA, 75 bp, synthetic construct
  source 1..75: mol_type = other DNA
tggcaaataaactgatcagcctcttccgtcagtttggtggcacggagttgcgcctcaaactagtctggctttgct

SEQ ID NO: 174636 - DNA, 75 bp, synthetic construct
  source 1..75: mol_type = other DNA
acagtttgctggtcagctatcaacgttggctaaacgggttcacaaaactggccatcataaatggcatgtgtcatc

SEQ ID NO: 174637 - DNA, 75 bp, synthetic construct
  source 1..75: mol_type = other DNA
atccgaatatctactacttccataatctgacgcccgggtgggtgtcattcaatggcgaaaaaccggagattgcca

SEQ ID NO: 174638 - DNA, 75 bp, synthetic construct
  source 1..75: mol_type = other DNA
ataccgcccctggacgatgatttggtggtgagtttatgtaccagtgagcatttgcttgtgcatcatccgatgctg

SEQ ID NO: 174639 - DNA, 75 bp, synthetic construct
  source 1..75: mol_type = other DNA
atgaatggctttgcgaaagttaccagaaatggctgaccggcttcacccggcatgcagtatccaggggaatgtgcc

SEQ ID NO: 174640 - DNA, 75 bp, synthetic construct
  source 1..75: mol_type = other DNA
aacgtctgaggcagcgttctctggcaaataaactgatcagcctcttccgtcagtttgaaccgccccgggtttcct

SEQ ID NO: 174641 - DNA, 75 bp, synthetic construct
  source 1..75: mol_type = other DNA
aggggatggggtggccgccgtgtggtcgtactatggtgcactggtggtcgcagaaagaacgtggcggcattgtgt

SEQ ID NO: 174642 - DNA, 75 bp, synthetic construct
  source 1..75: mol_type = other DNA
tcgtaccccagagcctgcaccggctgatttatggccctgacaaacgggccacgccgcccctggatgatgatctga

SEQ ID NO: 174643 - DNA, 75 bp, synthetic construct
  source 1..75: mol_type = other DNA
gccatcatatggcgcgattaaaaaaatccgctgccgttatcgcactgcaggcgatggaagcaaaaaagcatcagg

SEQ ID NO: 174644 - DNA, 75 bp, synthetic construct
  source 1..75: mol_type = other DNA
ttatgggctttgtgccatgggcgacgtcgagcattgcggtgatgtttgtacttttgttcctctgcggttggttcc

SEQ ID NO: 174645 - DNA, 75 bp, synthetic construct
  source 1..75: mol_type = other DNA
ggaattatcatggccattttactggccctggcaccggtgatgttggtacaggacaaaatgggcgtttttgcctcg

SEQ ID NO: 174646 - DNA, 75 bp, synthetic construct
  source 1..75: mol_type = other DNA
tggcatcatgctggtggtcattcctggtattatcatggctatcttgctggcgctggcgccagtgatgctggtaca

SEQ ID NO: 174647 - DNA, 75 bp, synthetic construct
  source 1..75: mol_type = other DNA
ggagagcgaactgttcggttatgttaaaggcgcatttactggcgcttctgccaacggtaaaacagggttgattca

SEQ ID NO: 174648 - DNA, 75 bp, synthetic construct
  source 1..75: mol_type = other DNA
ccagaatttggcccagttcattgccgaaggtaaattccgcgaagatctcttctaccgacttaatgttatcccgat

SEQ ID NO: 174649 - DNA, 75 bp, synthetic construct
  source 1..75: mol_type = other DNA
taatgttgcaggctaaattactgcgcgctattgaggcgcgtgaaattctgccgattggtgccagtagcccaatac

SEQ ID NO: 174650 - DNA, 75 bp, synthetic construct
  source 1..75: mol_type = other DNA
acggcaacactggtgaagcccgtaccggatatgccgtcgcaactggctgcccggctggatgaggcatgggctgcc

SEQ ID NO: 174651 - DNA, 75 bp, synthetic construct
  source 1..75: mol_type = other DNA
ggatgcagaggccgcgtttggtcagtttgtggcagcaaacctgcagcccaccggtgcggtctggctgatgtccag

SEQ ID NO: 174652 - DNA, 75 bp, synthetic construct
  source 1..75: mol_type = other DNA
tgcactggtccgtaatgcgctggcggaagcggtggtggcgcgtctggacacggactttgtggacccgaaaaaagc

SEQ ID NO: 174653 - DNA, 75 bp, synthetic construct
  source 1..75: mol_type = other DNA
gcaagtcgctgatgaactgggcatcggcattgctacgctctatcgtaagattaaaaaatatgaattgttaagcgc

SEQ ID NO: 174654 - DNA, 75 bp, synthetic construct
  source 1..75: mol_type = other DNA
atggagcttgctactacgcagtcagtactgatgcaaattcaaccgacaattcagcgttttgccagaatgcttgcc

SEQ ID NO: 174655 - DNA, 75 bp, synthetic construct
  source 1..75: mol_type = other DNA
ttattgacagtacacttctgccgccaaatctgctgaatatcagtacggaacaagctgaaggagcagaagccagtg

SEQ ID NO: 174656 - DNA, 75 bp, synthetic construct
  source 1..75: mol_type = other DNA
ggaaacgaaaactgaaaaagttgtgacacaatctcgcttcgatcccctttgcgaaggttgcgatagtaaagaaaa

SEQ ID NO: 174657 - DNA, 75 bp, synthetic construct
  source 1..75: mol_type = other DNA
cttctggaggatcaggggccaggagataacatcagtaaaatattcgcgaccatgatcgataatatggatcagggc

SEQ ID NO: 174658 - DNA, 75 bp, synthetic construct
  source 1..75: mol_type = other DNA
caatctggtaaataacggtgcgatggagcaaagtgagatgccagaagcttgcgaggcacatttggcacttgatga

SEQ ID NO: 174659 - DNA, 75 bp, synthetic construct
  source 1..75: mol_type = other DNA
ccggtaacgggaatgtggccacggtggcttcagcgccggtgatccgtgttgagcagaaactggagaaggggattg

SEQ ID NO: 174660 - DNA, 75 bp, synthetic construct
  source 1..75: mol_type = other DNA
cgtctctatgacatcgccgtcaccgataataatgcttcctataaccaggcaatgtgggtgctggcgtgcgtgctg

SEQ ID NO: 174661 - DNA, 75 bp, synthetic construct
  source 1..75: mol_type = other DNA
ctggaagagcaggccagtcgcctgaccgaagcagtggcagtgttccggattcagcaacagcagcaacagcagcgt

SEQ ID NO: 174662 - DNA, 75 bp, synthetic construct
  source 1..75: mol_type = other DNA
ttttggccttttacaactgacttcaggcggtctgttctttaatgccttaaagaacgacaaagaaaatttcactgt

SEQ ID NO: 174663 - DNA, 75 bp, synthetic construct
  source 1..75: mol_type = other DNA
cagttcagtggtaccgaactacgcctcaagctggtctggttgtgctggtatgacttaatgatcggcaacagcctg

SEQ ID NO: 174664 - DNA, 75 bp, synthetic construct
  source 1..75: mol_type = other DNA
ggcgctgaacgcctgctggcgcgtattcgtggcgaagcagtgacaccgaaaatgttagatttaggtttcaccttg

SEQ ID NO: 174665 - DNA, 75 bp, synthetic construct
  source 1..75: mol_type = other DNA
ctgaaacagcacaacgcggcggaaatgtggtggatagcgtggtacagaccatgcgtgatatttctaccagttcgc

SEQ ID NO: 174666 - DNA, 75 bp, synthetic construct
  source 1..75: mol_type = other DNA
ttgaaaaatataaatttaaccgtgcaaccgggagaacggatcgttctgtgtggcccttcaggttccggtaaatcg

SEQ ID NO: 174667 - DNA, 75 bp, synthetic construct
  source 1..75: mol_type = other DNA
tcggcgctcgatccggagatggtgaaagaagtgctggatacgatgattgggctggcgcagtcgggtatgacaatg

SEQ ID NO: 174668 - DNA, 75 bp, synthetic construct
  source 1..75: mol_type = other DNA
tcgtcagtatccggatgacagtcgtctgcatcatgtcctgaaatcggcggtgggggcagggaccaccacggaccc

SEQ ID NO: 174669 - DNA, 75 bp, synthetic construct
  source 1..75: mol_type = other DNA
cgcggcggattgggtgttaaatagcctggcagacctgccgcaagcgataaaaaagcagcaaaaaccggcacaatg

SEQ ID NO: 174670 - DNA, 75 bp, synthetic construct
  source 1..75: mol_type = other DNA
cgcggcagattgggtgttaaatagcctggcagacctgccgcaagcgataaaaaagcagcaaaaaccggcgcaatg

SEQ ID NO: 174671 - DNA, 75 bp, synthetic construct
  source 1..75: mol_type = other DNA
tttgtcagcacgcgattatttgcatattgatatggccgcttcttatatggtgggcgataaattagaagatatgca

SEQ ID NO: 174672 - DNA, 75 bp, synthetic construct
  source 1..75: mol_type = other DNA
tttgcctattgcctggtcgctactgttgtgcggggcggcgcttatgttctggctggatatgtttgatgtccagat

SEQ ID NO: 174673 - DNA, 75 bp, synthetic construct
  source 1..75: mol_type = other DNA
cgttgccgctctactggtgccgatgatgcgcagcgccaactacccggtcaaccgggcggcggggctgattgcctc

SEQ ID NO: 174674 - DNA, 75 bp, synthetic construct
  source 1..75: mol_type = other DNA
atcgctttcagtgacattctcttttcaatgggggcggcgatgacacttggtggtgttgcacagatgctggcaccg

SEQ ID NO: 174675 - DNA, 75 bp, synthetic construct
  source 1..75: mol_type = other DNA
cgttgctgctttctatgcgttgtttgtcgccacagttatttaccgtgaaatgaccttcgccacactttggcatgt

SEQ ID NO: 174676 - DNA, 75 bp, synthetic construct
  source 1..75: mol_type = other DNA
cccccttccattccgtttattatcttcggtgtttccagcggattatccatcagtaagctgtttatggcgggcatt

SEQ ID NO: 174677 - DNA, 75 bp, synthetic construct
  source 1..75: mol_type = other DNA
atgcgcagcgctaactacccggtcaaccgtgctgcggggctgattgcctctggcggcattatcgcgccaattatt

SEQ ID NO: 174678 - DNA, 75 bp, synthetic construct
  source 1..75: mol_type = other DNA
tgaacggcatcctgtttaaccagatggctaacgatccatgcaatatgattatcggacaatcaaccgctaaagaaa

SEQ ID NO: 174679 - DNA, 75 bp, synthetic construct
  source 1..75: mol_type = other DNA
atgaaactgatttcgaacaaggccaaattaaaaaagattcttaaaaatgccgcaaaatatattacgccaccgcct

SEQ ID NO: 174680 - DNA, 75 bp, synthetic construct
  source 1..75: mol_type = other DNA
tcagatgaaagtaacatttctgagataaattatgattctgaaaggcgtgaaaatcacctttatgaaaaatccaaa

SEQ ID NO: 174681 - DNA, 75 bp, synthetic construct
  source 1..75: mol_type = other DNA
tgcccgtcttaatgagccgctggcaaatggtgccgtgatccacatcgtaccgcgtctggcgggtgccaaaagtgg

SEQ ID NO: 174682 - DNA, 75 bp, synthetic construct
  source 1..75: mol_type = other DNA
atgaaactaatttctaataaggccaaattaaaaaagattcttaaaaatatctctgctgcaattcgaccgcctaaa

SEQ ID NO: 174683 - DNA, 75 bp, synthetic construct
  source 1..75: mol_type = other DNA
cattaaaggcgcaagcaatgttgatgcaccaatccttccggtaaaagacacaagaacgggtggttttacccttaa

SEQ ID NO: 174684 - DNA, 75 bp, synthetic construct
  source 1..75: mol_type = other DNA
taccattgctgaactgccaatgatggtttctgatttactgcaaccgttagtggaatcaccgcgtctgctgtttat

SEQ ID NO: 174685 - DNA, 75 bp, synthetic construct
  source 1..75: mol_type = other DNA
tggcgtcaccgccactggtccgcatctgccttcacggggatttacaacgatttggccgccgcctcagcctgtatg

SEQ ID NO: 174686 - DNA, 75 bp, synthetic construct
  source 1..75: mol_type = other DNA
gctaaaagtggcggcgtgtttcaggctgtgctgggcgttgcgctggttgcggctgctatctggatgccgggcatc

SEQ ID NO: 174687 - DNA, 75 bp, synthetic construct
  source 1..75: mol_type = other DNA
ggtgaaatgcgcgtggggtcccgtgtggtatctcaggagatcagcactgcagaagaaggcgatggtggtcaggtt

SEQ ID NO: 174688 - DNA, 75 bp, synthetic construct
  source 1..75: mol_type = other DNA
ggtgaaatgcgcgtgggttcccgtgtggtatctcaggagatcagcactgcagatgaaggcgatggtggtcaggtt

SEQ ID NO: 174689 - DNA, 75 bp, synthetic construct
  source 1..75: mol_type = other DNA
ggtgaaatgcgcgtgggatcccgtgtggtatctcaggagatcagcactgcagaggaaggcgatggtggtcaggtt

SEQ ID NO: 174690 - DNA, 75 bp, synthetic construct
  source 1..75: mol_type = other DNA
tgcccagggcaatgttctgcccgttctgtacggtgaaatgcgcgtggggtcgcgggtggtctctcaggagatcag

SEQ ID NO: 174691 - DNA, 75 bp, synthetic construct
  source 1..75: mol_type = other DNA
gatccatatcgtgccgcgtctggcgggagctaaaagtggcggtgtgtttcaggctgtgctgggggcggcgctgat

SEQ ID NO: 174692 - DNA, 75 bp, synthetic construct
  source 1..75: mol_type = other DNA
agcaatggtgtcaggcatgaccgtcacgggcgcctcgatgatgctgggaggggtggcacagatgctggcaccgaa

SEQ ID NO: 174693 - DNA, 75 bp, synthetic construct
  source 1..75: mol_type = other DNA
atgcagatcccggcgtttcgtcagaagctgagcgacggctggtatcaggtacacattgccgggcgggatacaggc

SEQ ID NO: 174694 - DNA, 75 bp, synthetic construct
  source 1..75: mol_type = other DNA
gaattatctgcccgtcttaatgagccgctggcaaatggtgccgtgatccacatcgtgccgcgtctggcgggagct

SEQ ID NO: 174695 - DNA, 75 bp, synthetic construct
  source 1..75: mol_type = other DNA
aatggtgccgtgatccacatcgtaccgcgtctggcgggtgccaaaagtggcggtatttttcaggcagtgctgggg

SEQ ID NO: 174696 - DNA, 75 bp, synthetic construct
  source 1..75: mol_type = other DNA
atcctgctgcgcaaaagtgtcagcgttattatcaaaggtacgataaaaaccattattggtttcatgttgttgcag

SEQ ID NO: 174697 - DNA, 75 bp, synthetic construct
  source 1..75: mol_type = other DNA
gtctggtgatggggatgatcgaaatctttggctgcgtctgggcggtgaaactcaccggtatgagtgcctggatgg

SEQ ID NO: 174698 - DNA, 75 bp, synthetic construct
  source 1..75: mol_type = other DNA
ggctggcgggcggcgatcaagatttgtctggtgatggggatgatcgaaatctttggctgtgtctgggcggtgaaa

SEQ ID NO: 174699 - DNA, 75 bp, synthetic construct
  source 1..75: mol_type = other DNA
ttcgcggtggcgatcttcatcatcactcagggcgtgccatgtttgtggcggaactctctgaagcgtttaacggta

SEQ ID NO: 174700 - DNA, 75 bp, synthetic construct
  source 1..75: mol_type = other DNA
tggcaggcaaagtgcactggacggtctatatcctgcaaaccggtttctcctttgcggtagcgattttcatcatca

SEQ ID NO: 174701 - DNA, 75 bp, synthetic construct
  source 1..75: mol_type = other DNA
acctccaacatgatgtacaagccgacacaaatcgttacggatggttgcggcttctctatcggtcaccagcaacag

SEQ ID NO: 174702 - DNA, 75 bp, synthetic construct
  source 1..75: mol_type = other DNA
atggagatcctctacaacatctttaccgtgttttttaaccaggtcatgaccaatgccccgttgttgctgggtatt

SEQ ID NO: 174703 - DNA, 75 bp, synthetic construct
  source 1..75: mol_type = other DNA
catcgtgccgcgtctggcgggagctaaaagtggcggtgtgtttcaggtggtgctgggggcggcgctgattgcggt

SEQ ID NO: 174704 - DNA, 75 bp, synthetic construct
  source 1..75: mol_type = other DNA
atgcctatagctgggtaggttacgcggtgttgttagcgctggcgctgaacatctgttacgtgctgctgcgtcgca

SEQ ID NO: 174705 - DNA, 75 bp, synthetic construct
  source 1..75: mol_type = other DNA
ggaactctctgaagcattcaacggtatctcccagcgcctgatcccgggtgcggttctggcgattgactgtgcggc

SEQ ID NO: 174706 - DNA, 75 bp, synthetic construct
  source 1..75: mol_type = other DNA
caatgccccgttgttgctgggtattgtgacctgtctgggctacatcctactgcgcaaaagtgtcagcgttattat

SEQ ID NO: 174707 - DNA, 75 bp, synthetic construct
  source 1..75: mol_type = other DNA
tgtacggtgaaatgcgtgtggggtcgcgggtggcatctcaggagatcagtacagctgatgaaggtgatggtggtg

SEQ ID NO: 174708 - DNA, 75 bp, synthetic construct
  source 1..75: mol_type = other DNA
gtgagggaacggtcatccacattgtgccgcgactggccggggccggaaagggtggattgcagattgtgctggggg

SEQ ID NO: 174709 - DNA, 75 bp, synthetic construct
  source 1..75: mol_type = other DNA
ggggccgggggaaatggtgtttttcaggtggtgctgggggctgcagccatcgtgggctctttcttcaccgccggt

SEQ ID NO: 174710 - DNA, 75 bp, synthetic construct
  source 1..75: mol_type = other DNA
agttgggattgcaggggcgctgccgtgggggattttattggcgttaggccgccgttctcatatgccgattgtgcg

SEQ ID NO: 174711 - DNA, 75 bp, synthetic construct
  source 1..75: mol_type = other DNA
atggcaattggttacacggcgaagcggttgctgcaggtatggtgatggcggcgcggacgtcggaacgtcttgggc

SEQ ID NO: 174712 - DNA, 75 bp, synthetic construct
  source 1..75: mol_type = other DNA
gcttcattcttaccgctgaaatcgggcgagcaggtgatgttggtcaccaacgaaaccctggctcccttgtatctc

SEQ ID NO: 174713 - DNA, 75 bp, synthetic construct
  source 1..75: mol_type = other DNA
aagatgcacgacccgaaagcagcaataaagcagttggctgaattgcaggggtgggaagcacctaagaaaaccgaa

SEQ ID NO: 174714 - DNA, 75 bp, synthetic construct
  source 1..75: mol_type = other DNA
atagcctactgactattggctgcatatggttgatgtgggaactgatcccaccgttgctgaactgggcatttttgc

SEQ ID NO: 174715 - DNA, 75 bp, synthetic construct
  source 1..75: mol_type = other DNA
cccacacgaccaacgctggcgaattaacctggcattactgattggccttgtgtcgatcgcaccaatgttctggaa

SEQ ID NO: 174716 - DNA, 75 bp, synthetic construct
  source 1..75: mol_type = other DNA
cgcggctgtatcgggtctgtatgcagcaggggccagtatgatcctgggtggtgtggcgcagatgctggcaccgaa

SEQ ID NO: 174717 - DNA, 75 bp, synthetic construct
  source 1..75: mol_type = other DNA
gtacgagcagcggcactgcatgtgctcggggacctgctgggttcggttggggctattattgccgcgttgattatt

SEQ ID NO: 174718 - DNA, 75 bp, synthetic construct
  source 1..75: mol_type = other DNA
gtttcccggcacacaaggcgctgcaatatgcaaatgccagcggcgcgctcgccgtaatgcggcaaggtccgatgg

SEQ ID NO: 174719 - DNA, 75 bp, synthetic construct
  source 1..75: mol_type = other DNA
catcgggccatcttcttcggatgtgttggtaatgatgattttggccgactcattgtagaacgtcttcgtcatgaa

SEQ ID NO: 174720 - DNA, 75 bp, synthetic construct
  source 1..75: mol_type = other DNA
aaagcctatcgatatgaccaaccagaacaatttcagccagacgattgcccttcgtgcctctcaggctgcagaact

SEQ ID NO: 174721 - DNA, 75 bp, synthetic construct
  source 1..75: mol_type = other DNA
ttcgaaaatcgaaccgttacgtacgtagttttacacagagtgtaaaagatacgtacgtagggggcgaaagtcggt

SEQ ID NO: 174722 - DNA, 75 bp, synthetic construct
  source 1..75: mol_type = other DNA
tctttacagaaaatgtcaggtactccggatgtatcacagcacacgcaaaccaaaccggagagaacggagagaagt

SEQ ID NO: 174723 - DNA, 75 bp, synthetic construct
  source 1..75: mol_type = other DNA
tgctgctcaggtggcaaaactgtcccatcgggccatcttcttcggatgtgttggtaatgatgattttggccgact

SEQ ID NO: 174724 - DNA, 75 bp, synthetic construct
  source 1..75: mol_type = other DNA
tacttctcaggtttgcaaggctgcaatcagcggaatgttcgggtatgaagtgaatacaatcaaagctgcaaaagc

SEQ ID NO: 174725 - DNA, 75 bp, synthetic construct
  source 1..75: mol_type = other DNA
gtgggcatagtgtttcaagcagcgcgaaggtgtgcccatcctgtggagtaaaaaagccctatatttcacccctca

SEQ ID NO: 174726 - DNA, 75 bp, synthetic construct
  source 1..75: mol_type = other DNA
gggcagcaattgcaggtatgtttggtaagaatgtgggtaaaactcaagtagccaaaacgaaaacggctggggtgt

SEQ ID NO: 174727 - DNA, 75 bp, synthetic construct
  source 1..75: mol_type = other DNA
gcgccatcagcagcagtagctgggatcctgatggataagccaggaggagtggtagctgagaaaaactggtttaac

SEQ ID NO: 174728 - DNA, 75 bp, synthetic construct
  source 1..75: mol_type = other DNA
gactaccaggcattatcatttgatagcgtggaatcgacgagagttagcagaaatgcagacgttacaagctatgct

SEQ ID NO: 174729 - DNA, 75 bp, synthetic construct
  source 1..75: mol_type = other DNA
gtcagtactcgttcgactgcaaactatccggcaacaatgtgatatggactgagtcggggcagacttccaaccgtt

SEQ ID NO: 174730 - DNA, 75 bp, synthetic construct
  source 1..75: mol_type = other DNA
gaggtacatgaggatgcgtttgataaacttactatgctcattcaacaatcattaagaaatgataagttggcttta

SEQ ID NO: 174731 - DNA, 75 bp, synthetic construct
  source 1..75: mol_type = other DNA
tctcctgaggcgcaggcaagttttatgcgacaggcggatcaactgcgtcggcagcagcaggctgaatataaaacg

SEQ ID NO: 174732 - DNA, 75 bp, synthetic construct
  source 1..75: mol_type = other DNA
cggcggttttactcctgtatcatatgaaacaacagagtgccgccttccatgccgctgatgcggcatatcctggta

SEQ ID NO: 174733 - DNA, 75 bp, synthetic construct
  source 1..75: mol_type = other DNA
taatcagtgtggtcgatgtgttggctactggttccgttaaggtgaaagcaggtgagtttgacgttgagaaagacg

SEQ ID NO: 174734 - DNA, 75 bp, synthetic construct
  source 1..75: mol_type = other DNA
agtgaatcagatcaggccagcgtgttgcgacagactgatgcactagccagacaacagcaggctgaatataaaacg

SEQ ID NO: 174735 - DNA, 75 bp, synthetic construct
  source 1..75: mol_type = other DNA
atggctggagcgacgagcaaatcccaggccaagaaagtcgagtttaaagagaaggttgctgatgccgcattgtcc

SEQ ID NO: 174736 - DNA, 75 bp, synthetic construct
  source 1..75: mol_type = other DNA
aatcttcatcgccagggatatggagaaacacttgttactcatgctatgagagttgtgtatcaggcctcgcaagct

SEQ ID NO: 174737 - DNA, 75 bp, synthetic construct
  source 1..75: mol_type = other DNA
gctgacgacatgcaaaaactgcttcgcggcaccgaccaagatcatggtggaagttatgcttggatcggaggacaa

SEQ ID NO: 174738 - DNA, 75 bp, synthetic construct
  source 1..75: mol_type = other DNA
cacaagagacaaatggggtaatgagcatgtttttgatgttgggctatctaacaatggccctgattttactgctct

SEQ ID NO: 174739 - DNA, 75 bp, synthetic construct
  source 1..75: mol_type = other DNA
gtgttggtcctggcgcttggagaggtgttggggatgcggttctcagatctgagcttgttaacggacaatatagaa

SEQ ID NO: 174740 - DNA, 75 bp, synthetic construct
  source 1..75: mol_type = other DNA
gcgataaatggcatccacgcggcgtttcattatttgaaaaagaattacatttcaggttgcgttatgacagtccca

SEQ ID NO: 174741 - DNA, 75 bp, synthetic construct
  source 1..75: mol_type = other DNA
ggctacgccgatgcgttacgtgccgctcacgcaagtggtattagcgcgccgtggctacccctgccgccggaactg

SEQ ID NO: 174742 - DNA, 75 bp, synthetic construct
  source 1..75: mol_type = other DNA
ctgaaagccatgggcaaatgccgttttcgtacgctgctgctttcggcgacttacagcaaaagtacccgcgacatt

SEQ ID NO: 174743 - DNA, 75 bp, synthetic construct
  source 1..75: mol_type = other DNA
tttattttcactctggcgatggccctgaaatgctacccgctgctccccggtggcctgttggctatcgaagcggta

SEQ ID NO: 174744 - DNA, 75 bp, synthetic construct
  source 1..75: mol_type = other DNA
tttgcgtggcggcagcgttcctctccgcgttcctcgatgccttaaccgtcgtggcggtggtgatcagcgttgctg

SEQ ID NO: 174745 - DNA, 75 bp, synthetic construct
  source 1..75: mol_type = other DNA
atgaccacgccttcagttttgccgcaaaagttatggcgtccgcttgcagagattaaaaacttcgttgaaaaaatg

SEQ ID NO: 174746 - DNA, 75 bp, synthetic construct
  source 1..75: mol_type = other DNA
ctgctctgcgtcgagtttacgcttgcccctgtaaccgaatggtttatgcaaatgggctggatagcaacgctttga

SEQ ID NO: 174747 - DNA, 75 bp, synthetic construct
  source 1..75: mol_type = other DNA
tcgacaagcattacaaggtggtgctggagcagttccgtggttttctgcgtagcctgatgatgcacgcgggtgtcg

SEQ ID NO: 174748 - DNA, 75 bp, synthetic construct
  source 1..75: mol_type = other DNA
acgtccgtgaagaggtggcggcaaatcttgaagtcttgctgttactgatgtttatggtggcgggtatctatttta

SEQ ID NO: 174749 - DNA, 75 bp, synthetic construct
  source 1..75: mol_type = other DNA
cttgacacattagcccaaagaataacaaacaaccgtgttgaacttgaatctaagaagaaggatttaagacaggct

SEQ ID NO: 174750 - DNA, 75 bp, synthetic construct
  source 1..75: mol_type = other DNA
ggcggaagaactgcctgctgttactgccctggccatttctcacaaaacaaagctgctcgacccgctggagattcg

SEQ ID NO: 174751 - DNA, 75 bp, synthetic construct
  source 1..75: mol_type = other DNA
gcaagccacgcagtgaaatgggtgtgacttgtgttggtcgccagaaaatgaaattaggcagcaaaccacttattt

SEQ ID NO: 174752 - DNA, 75 bp, synthetic construct
  source 1..75: mol_type = other DNA
ggcgtgcgagtgcctttatctgccagataagaagtttgttcactgcggtgagtcatgggtatttgcctggtatcc

SEQ ID NO: 174753 - DNA, 75 bp, synthetic construct
  source 1..75: mol_type = other DNA
aatcagtatcggtagtaatgagcgatgtcacagcacaacgtcttcatgaggccgctaagcgttcagggcgtaaag

SEQ ID NO: 174754 - DNA, 75 bp, synthetic construct
  source 1..75: mol_type = other DNA
tttcagttgcacgagaagacaaagacttcgaccatagttcaatgtttgaagtgcttcaaaagtcattattagacg

SEQ ID NO: 174755 - DNA, 75 bp, synthetic construct
  source 1..75: mol_type = other DNA
gtcgtccgttagatcttttacgaaaatggcacgagaaaattgagacatggatcttaaatgaagcaggtattacca

SEQ ID NO: 174756 - DNA, 75 bp, synthetic construct
  source 1..75: mol_type = other DNA
atgattgaaagagatagtcagctacgagagctattagatatcgatgacaaaatgagtttaagcgagcgccttgtt

SEQ ID NO: 174757 - DNA, 75 bp, synthetic construct
  source 1..75: mol_type = other DNA
gtgaaagtagttagggataaaaaacgaaaagttgattttagtggttttgaaataatactcaacacttttaaagat

SEQ ID NO: 174758 - DNA, 75 bp, synthetic construct
  source 1..75: mol_type = other DNA
tttacttaattttctgcgcaataaagttaaaagctgcccagacgatgtaactgaaatgagaaagatgaaatatat

SEQ ID NO: 174759 - DNA, 75 bp, synthetic construct
  source 1..75: mol_type = other DNA
aagactgggacaaaaggggtttacactatttcgtatcgtcgcccatcggataatcagaaattttcattcgactgt

SEQ ID NO: 174760 - DNA, 75 bp, synthetic construct
  source 1..75: mol_type = other DNA
caaagtatgtcctaattgtggcgtaaaagagccgtatcaatccccagttagagggttaattttcattgctatcgt

SEQ ID NO: 174761 - DNA, 75 bp, synthetic construct
  source 1..75: mol_type = other DNA
atgattgaaagagatagtcagctacgagagctattagatatcgatgataaaatgcgcttaagcgagcgtcttgtc

SEQ ID NO: 174762 - DNA, 75 bp, synthetic construct
  source 1..75: mol_type = other DNA
ttatcggaactaacaccagagaacattgccgcatggctaagtacagagagacaaaatcggcctaccgtcactgct

SEQ ID NO: 174763 - DNA, 75 bp, synthetic construct
  source 1..75: mol_type = other DNA
tatcagccttcacggtttacgtcgtagttttggtactttggccgagtgggttgaagttcccactggtattgttgc

SEQ ID NO: 174764 - DNA, 75 bp, synthetic construct
  source 1..75: mol_type = other DNA
aaattgcgtcgcttcgctggtcagacgtagatttcaaatggtcaagcatgcgaattaaagacaagatcgaaggtg

SEQ ID NO: 174765 - DNA, 75 bp, synthetic construct
  source 1..75: mol_type = other DNA
cacttagggctgctacttcacgtgaagacttggctaaaattttagatgttaagttggtatttttaactaacgttc

SEQ ID NO: 174766 - DNA, 75 bp, synthetic construct
  source 1..75: mol_type = other DNA
tgatgttggcggagagtctgtaaccctaagtccaactttaattaaagagattataaaggctggctttaaaataaa

SEQ ID NO: 174767 - DNA, 75 bp, synthetic construct
  source 1..75: mol_type = other DNA
ggcggtgctacagacttcaaaagatttatattaagataccaagaacaaaaaaagaggttcgagaaatttaaacca

SEQ ID NO: 174768 - DNA, 75 bp, synthetic construct
  source 1..75: mol_type = other DNA
gtggctggtagaaaccgtacaaatgctgaccgaacgtgccgttccggtttgtggtcatttaggcctaaccccaca

SEQ ID NO: 174769 - DNA, 75 bp, synthetic construct
  source 1..75: mol_type = other DNA
caactgctggtactggagtgcgtgccggttgaactggcaaaacgcattaccgaagcactggcgatcccggttatc

SEQ ID NO: 174770 - DNA, 75 bp, synthetic construct
  source 1..75: mol_type = other DNA
tgaccgcgatctggcggcacgtctgcaaacgcatccgttcttaggcccgaaactgacgatttatcagcaggatgc

SEQ ID NO: 174771 - DNA, 75 bp, synthetic construct
  source 1..75: mol_type = other DNA
tatgactatgtccaccgcgttcgtgatattgaagccgacacgcccgcacgttataacgccgatccggatcggtta

SEQ ID NO: 174772 - DNA, 75 bp, synthetic construct
  source 1..75: mol_type = other DNA
gttcaggggcatgactccacgctaccggttaccgttgccgatatcgcctatcacaccgccgctgtgcgtcgcggc

SEQ ID NO: 174773 - DNA, 75 bp, synthetic construct
  source 1..75: mol_type = other DNA
acgtttcgcaaccatcaccgcttacgactatagcttcgcaaaactgtttgccgatgaagggcttaacgtcatgct

SEQ ID NO: 174774 - DNA, 75 bp, synthetic construct
  source 1..75: mol_type = other DNA
tcaagcgatggcaccgccgcaaaatgctggccgcgatgggaatgcccgaacgcacgctgatggggtatgacgccg

SEQ ID NO: 174775 - DNA, 75 bp, synthetic construct
  source 1..75: mol_type = other DNA
gtattgcttccctcaccaagctaatgaccagtgagatgctggtgaaattgctcgaccaggggaccgtgaagttaa

SEQ ID NO: 174776 - DNA, 75 bp, synthetic construct
  source 1..75: mol_type = other DNA
ggtatcccggcgtatttcaccaactacgttgatccagagctgattcgcgttctggtcaccccaatgaaggcagca

SEQ ID NO: 174777 - DNA, 75 bp, synthetic construct
  source 1..75: mol_type = other DNA
tgttgagtcgcatcaccaccgaagcctttaaccagcgtcgtaaaaccattcgtaacagcctcggcaacctgttta

SEQ ID NO: 174778 - DNA, 75 bp, synthetic construct
  source 1..75: mol_type = other DNA
atgaatcgcgcttccctgattaccttaatacatgtcgcaaaacgcgatctacagcttgaccatgagacctacaca

SEQ ID NO: 174779 - DNA, 75 bp, synthetic construct
  source 1..75: mol_type = other DNA
ctggcagtggctggagcaacaccccgcgctggcctctgatgtgctggagcgtctcaagcgatggcaccgccgcaa

SEQ ID NO: 174780 - DNA, 75 bp, synthetic construct
  source 1..75: mol_type = other DNA
ttataacgccgatccggatcggttatttgaatcttctggttgcgccgggaagctggccgtctttgcagtacgtct

SEQ ID NO: 174781 - DNA, 75 bp, synthetic construct
  source 1..75: mol_type = other DNA
aaaagatattcaaaaacagtttaacgacatgctcaaaaaggcatttaaaggaagtaaaaatataaggattaaata

SEQ ID NO: 174782 - DNA, 75 bp, synthetic construct
  source 1..75: mol_type = other DNA
cgatcagcgtacgctggagacctggttcagaaaatattcggaaatacaggttgtctcgcgtgatcgcagtggagt

SEQ ID NO: 174783 - DNA, 75 bp, synthetic construct
  source 1..75: mol_type = other DNA
agctctattacggccattttatgtgctatgtcttccatcaggattacatcgtgaaaaaaggcgtggatgtgcatg

SEQ ID NO: 174784 - DNA, 75 bp, synthetic construct
  source 1..75: mol_type = other DNA
agttgtcgtcggcgccggatacagcatctaccctgctaagggcatacgctatggcttgtattttccgtccgccac

SEQ ID NO: 174785 - DNA, 75 bp, synthetic construct
  source 1..75: mol_type = other DNA
agtctgatgtgtgaaaaagaaccggagttgaaaatagcgcagcaactggtactcgagttctaccgtattctgaaa

SEQ ID NO: 174786 - DNA, 75 bp, synthetic construct
  source 1..75: mol_type = other DNA
gagacgaaacagtcaggcgcgcctcatgtcggtattgatgagtgggcgtggcatcggggccaccgttacggtacg

SEQ ID NO: 174787 - DNA, 75 bp, synthetic construct
  source 1..75: mol_type = other DNA
tcgttatcaggcggtgcattccgatgaagtcgaagacattctggcactggatatcgctctgcggcgtaacgacac

SEQ ID NO: 174788 - DNA, 75 bp, synthetic construct
  source 1..75: mol_type = other DNA
aaccatctggggattgatctgggcgaaacgccggagcagatccttagcaagctggatgacgatcgcatcaaagat

SEQ ID NO: 174789 - DNA, 75 bp, synthetic construct
  source 1..75: mol_type = other DNA
atatgcaccgggatatctacgatattgcggaaaaatacggcaaagacaccttcctgatgattgataagttaggca

SEQ ID NO: 174790 - DNA, 75 bp, synthetic construct
  source 1..75: mol_type = other DNA
gaagttttatcgcgagaacgatccaaccaacagtatgaaccctgggatcggtaaaaccagcaagcggaaaaactg

SEQ ID NO: 174791 - DNA, 75 bp, synthetic construct
  source 1..75: mol_type = other DNA
gctcgacgccaaacggtaacgactatgatcgcgatatcgtgatcatcagcaccctgcgtctcgacaaactgcacg

SEQ ID NO: 174792 - DNA, 75 bp, synthetic construct
  source 1..75: mol_type = other DNA
gttatcggcggtatctgtaataactctggtggttcgctggtgcagcgtggcccggcgtataccgaaatgtcgtta

SEQ ID NO: 174793 - DNA, 75 bp, synthetic construct
  source 1..75: mol_type = other DNA
cagcctgcgacattgttcaacgtcgccgaaagcaatgcgtcttatgcaccgtatctgttgatgaccctgccgttc

SEQ ID NO: 174794 - DNA, 75 bp, synthetic construct
  source 1..75: mol_type = other DNA
gtaacgctgggtttgtttgactatctggcagatctgtttggtttcgatgactcagccctggggcgcttgaaaacg

SEQ ID NO: 174795 - DNA, 75 bp, synthetic construct
  source 1..75: mol_type = other DNA
tgcggtagcgagttcgttccttggcgtaacgctgggtttgtttgactatctggcagatctgtttggtttcgatga

SEQ ID NO: 174796 - DNA, 75 bp, synthetic construct
  source 1..75: mol_type = other DNA
ctggtcaatggcggcgctaatcttcacctggttttgtatgctgcattccggtttgatgattctggaagctaacct

SEQ ID NO: 174797 - DNA, 75 bp, synthetic construct
  source 1..75: mol_type = other DNA
cttcggtagcctactggggcatgtgcagcctgcgacattgttcaacgtcgccgaaagcaatgcgtcttatgcacc

SEQ ID NO: 174798 - DNA, 75 bp, synthetic construct
  source 1..75: mol_type = other DNA
gcaagccgatgattgccctgattctggtctttggcgttggcaacgcactggtgcacatcctgtcgagttttaatt

SEQ ID NO: 174799 - DNA, 75 bp, synthetic construct
  source 1..75: mol_type = other DNA
acgtctgcaggttgaaatttttctttcatcgcgtgaagtggaatgccaggctcttggacatggctctgcattttg

SEQ ID NO: 174800 - DNA, 75 bp, synthetic construct
  source 1..75: mol_type = other DNA
gcacgctgaatctggcggcaaactgccttgaccgccatctgcaagaaaacggcgatcgcaccgccatcatctggg

SEQ ID NO: 174801 - DNA, 75 bp, synthetic construct
  source 1..75: mol_type = other DNA
gctctttatgacaacgttgtttcggctgcaaatcaggtgataaagcagcggcagtcggatcctgtgcagttctct

SEQ ID NO: 174802 - DNA, 75 bp, synthetic construct
  source 1..75: mol_type = other DNA
gacctcgggaaaaaagcggcagcggactttatgcaacagcaggcccgtgatggtggtcggttaagtggagcatat

SEQ ID NO: 174803 - DNA, 75 bp, synthetic construct
  source 1..75: mol_type = other DNA
gctgatggtaagctggggggtgtggcggatactggtggttcaggcatggtgatgtttgccccgcagtacaacatt

SEQ ID NO: 174804 - DNA, 75 bp, synthetic construct
  source 1..75: mol_type = other DNA
aggattggatttgcccctatatttccagacacctgttatcacttaacccattactggcctgctgccgcagatatt

SEQ ID NO: 174805 - DNA, 75 bp, synthetic construct
  source 1..75: mol_type = other DNA
aatacttgcaaggtttttttattacatagaacaagataaagatatagctttcagtgaaataaatagtaatgagcg

SEQ ID NO: 174806 - DNA, 75 bp, synthetic construct
  source 1..75: mol_type = other DNA
gcggtacgataccccaataaggcagtcgggggactaattgcgatgctgttgttaaccggtacccgcaaatcagaa

SEQ ID NO: 174807 - DNA, 75 bp, synthetic construct
  source 1..75: mol_type = other DNA
tttgttatcgggatttctctccgtacaattgcaaaaaagcggaagtgttcagatggcacaatcagaaaagaacta

SEQ ID NO: 174808 - DNA, 75 bp, synthetic construct
  source 1..75: mol_type = other DNA
agataacagcggtgtggactggcagccgatagcggctggtttcaaggggcttttacctcatggtaaaaaaacacg

SEQ ID NO: 174809 - DNA, 75 bp, synthetic construct
  source 1..75: mol_type = other DNA
atatgtccacttttgttgattacaaaatcaacctgattgataagagcgatttcacgaaagcatctggcgttgcta

SEQ ID NO: 174810 - DNA, 75 bp, synthetic construct
  source 1..75: mol_type = other DNA
acctattacttcaacaaaaatatgtccacttttgttgattacaaaatcaacctgattgataagagcgatttcacg

SEQ ID NO: 174811 - DNA, 75 bp, synthetic construct
  source 1..75: mol_type = other DNA
ggcttttacctcatggtaaaaagtcacggattcagtgtgatgatgacgaaggcattatgatagacagttgtgtgg

SEQ ID NO: 174812 - DNA, 75 bp, synthetic construct
  source 1..75: mol_type = other DNA
cggcgtgccagaactgaaaaagcagctcgatcttaacgacgctgttccagaaattagcggtactattttgttccg

SEQ ID NO: 174813 - DNA, 75 bp, synthetic construct
  source 1..75: mol_type = other DNA
taatcaacacaagcatgcctggtttaattaaaataggtcgaacgctacgcgactcacgcatgcgtgcgcgtgaac

SEQ ID NO: 174814 - DNA, 75 bp, synthetic construct
  source 1..75: mol_type = other DNA
ttcagcttcatctttaagaccgatgattttgttgagattgctttcactcataatctttgagcaagaccgcttaaa

SEQ ID NO: 174815 - DNA, 75 bp, synthetic construct
  source 1..75: mol_type = other DNA
ctcggcataaatacggtctttttccaggtaaagcccgatggcactgccctttggccatcaaaaattttgccgtgg

SEQ ID NO: 174816 - DNA, 75 bp, synthetic construct
  source 1..75: mol_type = other DNA
accgctggggagcatgggctgcagcagataacagtagtgtggattggcagccgatagcagcaggcttcaaggggc

SEQ ID NO: 174817 - DNA, 75 bp, synthetic construct
  source 1..75: mol_type = other DNA
tgatgtcgaagtgggcgaaaaccaccattgaactggaaacgccttacaacgcccgcgatgttgctgccctcgcag

SEQ ID NO: 174818 - DNA, 75 bp, synthetic construct
  source 1..75: mol_type = other DNA
tttatttgcgatcgctgcggcgcggtgaaagaagagtgtgctgaaggcgtggaagacatcatgcatacgttggcg

SEQ ID NO: 174819 - DNA, 75 bp, synthetic construct
  source 1..75: mol_type = other DNA
acagttccggtgacacggtcgatgccattaactctgcgcagtggggcgcgggtgcttatgatgcttatgggacgg

SEQ ID NO: 174820 - DNA, 75 bp, synthetic construct
  source 1..75: mol_type = other DNA
cagaagacatgatggggctgttcgacacaattcagaaggcgttttatctgggcgttgacgataccaacatgttgt

SEQ ID NO: 174821 - DNA, 75 bp, synthetic construct
  source 1..75: mol_type = other DNA
acccttcaggtggtcaatgctctgatcgataaaggaaaggatggttacgatcagatccagcagaagatgaataaa

SEQ ID NO: 174822 - DNA, 75 bp, synthetic construct
  source 1..75: mol_type = other DNA
gcggcgcattttctggtgacgctaaaaatatcacgcaatggctgggggagttgggggaaaaattcacgaagtttg

SEQ ID NO: 174823 - DNA, 75 bp, synthetic construct
  source 1..75: mol_type = other DNA
ggcaatatttggtgatgatgccgaaacccttcaggtggtcaatgcgctgatcgataaaggaaaggatggttacga

SEQ ID NO: 174824 - DNA, 75 bp, synthetic construct
  source 1..75: mol_type = other DNA
gagatcaaggtctcttttgtgaatttgcctccgggtatgcgggttatggaaacgcgatccagcggttttgatgtc

SEQ ID NO: 174825 - DNA, 75 bp, synthetic construct
  source 1..75: mol_type = other DNA
gggcggtagccggcgcttatattgccgatatcactgatggcgatgagcgcgcgcgggcacttcgcttcatgagcg

SEQ ID NO: 174826 - DNA, 75 bp, synthetic construct
  source 1..75: mol_type = other DNA
aaccagctccgttatccgggaaaataccgtgttgtggaaaacctgcccgacgtttccccgtggagtgaacactga

SEQ ID NO: 174827 - DNA, 75 bp, synthetic construct
  source 1..75: mol_type = other DNA
aggctgttgccagaacggattactggcagtctgtacaggcgcaggccggatatgtctacctcagctggaatgccg

SEQ ID NO: 174828 - DNA, 75 bp, synthetic construct
  source 1..75: mol_type = other DNA
gatgcgggtgaccgatacccgctccagtggtatcgacgtgaatcacgacgttggttacacccggtttggtatggg

SEQ ID NO: 174829 - DNA, 75 bp, synthetic construct
  source 1..75: mol_type = other DNA
tgcagatgctggtgcgtcaggggatcccggcagaaaacattcttggcggtgtgggtaaagcgacagcttatcttg

SEQ ID NO: 174830 - DNA, 75 bp, synthetic construct
  source 1..75: mol_type = other DNA
ggtctgacgctttccctgaaatcttatgccgatcaggaaaacgccgccaccgggctgaaagtcgccatgatggat

SEQ ID NO: 174831 - DNA, 75 bp, synthetic construct
  source 1..75: mol_type = other DNA
gaacgcaacgctatttgccgtgcgcgatcgtctcgtggagcgctggctgcgatcaaaccgtgcccagttgtcgca

SEQ ID NO: 174832 - DNA, 75 bp, synthetic construct
  source 1..75: mol_type = other DNA
ccgccaatgccggaagagttgcacaacgagatgcctgcattacgcgccgcctttgagcaacgcggcgtcccgtgc

SEQ ID NO: 174833 - DNA, 75 bp, synthetic construct
  source 1..75: mol_type = other DNA
cataaagagatggcgtttctgtgccgcgatattgcccgcttacaaaccgatttgcatatcgacggcaatttacag

SEQ ID NO: 174834 - DNA, 75 bp, synthetic construct
  source 1..75: mol_type = other DNA
cccgcatgcgttagcgcgtgaaaaaacagaagcagtaagaagtatgctgctggatagtgtcgagccgcttcctct

SEQ ID NO: 174835 - DNA, 75 bp, synthetic construct
  source 1..75: mol_type = other DNA
atggttattagtattcgacgctcacggcatgaggagggggggggggaactcgttgcgatttggtgtcgttctgtc

SEQ ID NO: 174836 - DNA, 75 bp, synthetic construct
  source 1..75: mol_type = other DNA
gtgggccggatgctggtgaagcatgcgctatcaatggccccggaactgacaaccaatgttaatgagcaaaatgag

SEQ ID NO: 174837 - DNA, 75 bp, synthetic construct
  source 1..75: mol_type = other DNA
gaagaactgcgtcgtcagggctacaaaccgcgtgaatactacgagaaagatgaggagctgcatcaggtgctgacg

SEQ ID NO: 174838 - DNA, 75 bp, synthetic construct
  source 1..75: mol_type = other DNA
atgtcggtgctgacaatatctttatctttggtaacactgcggaagaagtggaagaactgcgtcgtcagggctaca

SEQ ID NO: 174839 - DNA, 75 bp, synthetic construct
  source 1..75: mol_type = other DNA
ctctctctaacgccatgttgtcgttaggaatttatgaggatgtacaaaaagctctggaaggtatggggctggatc

SEQ ID NO: 174840 - DNA, 75 bp, synthetic construct
  source 1..75: mol_type = other DNA
aaaaagcgccacgcagctgctggtcgagtttcagagtctggaagggatatatgagaatctggatgcggttgccga

SEQ ID NO: 174841 - DNA, 75 bp, synthetic construct
  source 1..75: mol_type = other DNA
ctgtcgattcctgagctgatgcgtctgctgatcgatgagcacaaatttagctgggacgacgcttttgaagtgtgc

SEQ ID NO: 174842 - DNA, 75 bp, synthetic construct
  source 1..75: mol_type = other DNA
taatcttggtaaatttaaccagggtgactacttcgcggcagtggaagataaaaaccactctgagaacgtatcccg

SEQ ID NO: 174843 - DNA, 75 bp, synthetic construct
  source 1..75: mol_type = other DNA
actgagcgagaaagaactgccgctgacggaaagcctggcgctgaccattgaccgcgtgatcccttactggaatga

SEQ ID NO: 174844 - DNA, 75 bp, synthetic construct
  source 1..75: mol_type = other DNA
ggcgttgagcgtgctgatgccaccattcgcgtctgggtgcgttttcgtacagacatctcagcttcttcccgtttg

SEQ ID NO: 174845 - DNA, 75 bp, synthetic construct
  source 1..75: mol_type = other DNA
gggtcaccatccaaaacttcaccacctccagaacgccttcaggtcagccggttgaaaaatgggaagatgggaaaa

SEQ ID NO: 174846 - DNA, 75 bp, synthetic construct
  source 1..75: mol_type = other DNA
cgcctccgggtatgcgggttatggaaacgcgatccagcggttttgatgtcagccatgatgttggctatacgcgct

SEQ ID NO: 174847 - DNA, 75 bp, synthetic construct
  source 1..75: mol_type = other DNA
atggagccagtgacactgttgctgctgctaacgctgcgcagtggggcgctggtggttacggtgcttatggtactg

SEQ ID NO: 174848 - DNA, 75 bp, synthetic construct
  source 1..75: mol_type = other DNA
ccgagaaaaatcctgatgtaatcaggggagtagtcggccttgttgctggtcttgctgctttaaaacttgggttta

SEQ ID NO: 174849 - DNA, 75 bp, synthetic construct
  source 1..75: mol_type = other DNA
agcgcctaaatgctctgtttgtggcgaggaaatgtcaatacagcgcatatctggagcacatgttgtttatgcctg

SEQ ID NO: 174850 - DNA, 75 bp, synthetic construct
  source 1..75: mol_type = other DNA
acagcccattaatactctgaacaaccctaaccagccggggtatcagatccccagccagcagcggatgcaaaccca

SEQ ID NO: 174851 - DNA, 75 bp, synthetic construct
  source 1..75: mol_type = other DNA
acatttagaaaatcagattaacagtaactcgcagcgggtattgcagtcgcagccgggggagctaaatcccgcccg

SEQ ID NO: 174852 - DNA, 75 bp, synthetic construct
  source 1..75: mol_type = other DNA
gaatctgcgtgttgagctggaagccgctaaaaagtgtattgcagagctggaaagcaattgcggggcgctggtggc

SEQ ID NO: 174853 - DNA, 75 bp, synthetic construct
  source 1..75: mol_type = other DNA
tgctggcgcaaaaagcggtgcgtactgaaggtaaacagtcaccattcagctttgttctgccatttaacccggcag

SEQ ID NO: 174854 - DNA, 75 bp, synthetic construct
  source 1..75: mol_type = other DNA
ggtaccgtctggatccgtcagaaagtcgcactgccgcctgatgctgtgctgaccgtgacactttctgacgcgtcg

SEQ ID NO: 174855 - DNA, 75 bp, synthetic construct
  source 1..75: mol_type = other DNA
tgccactaggtatgcgggttacggaaacacgttccagtggcattgatattaatcacgatgttgggtacaccagat

SEQ ID NO: 174856 - DNA, 75 bp, synthetic construct
  source 1..75: mol_type = other DNA
ttcctgctgcgcgcctaccgcaccacgctggcgaagctcgcggtaagcgagccgctcgacaccacggagatgcgc

SEQ ID NO: 174857 - DNA, 75 bp, synthetic construct
  source 1..75: mol_type = other DNA
gccgctcgacaccacggagatgcgtctcgaacggcgtatttcagcggtttataaagatattcccggcggtcagtt

SEQ ID NO: 174858 - DNA, 75 bp, synthetic construct
  source 1..75: mol_type = other DNA
ttatcgacccgccggatgagccgccgcacttcacgcgcggctacgggctggtgttcggcatgagcgagcgcaaag

SEQ ID NO: 174859 - DNA, 75 bp, synthetic construct
  source 1..75: mol_type = other DNA
atgcggcaaaacatttactcagggagatgcgggggggctgagtacgtcatcatcagtaagggaacgctggatggc

SEQ ID NO: 174860 - DNA, 75 bp, synthetic construct
  source 1..75: mol_type = other DNA
aaacgctactatctgggtaatgctgacgagatcgcggcaaaagcagctgctgttgcaaaccagggtaaagcgaag

SEQ ID NO: 174861 - DNA, 75 bp, synthetic construct
  source 1..75: mol_type = other DNA
tctcaaaaaatatattgctgaccttgaatctcaggttggcaccacatcacgacgccgggggccagcagggtttta

SEQ ID NO: 174862 - DNA, 75 bp, synthetic construct
  source 1..75: mol_type = other DNA
tcatactaggcggtgagatgatcgggcgtacgctcttttatggcctgcacatgacggtaggaatggctattgcag

SEQ ID NO: 174863 - DNA, 75 bp, synthetic construct
  source 1..75: mol_type = other DNA
atgagaggtaaaatactactttaccagttaaagtatcgctggcaatcactctctatttttggttgttttttatgc

SEQ ID NO: 174864 - DNA, 75 bp, synthetic construct
  source 1..75: mol_type = other DNA
atgagaggtaaaatactactttaccactcaaagtatcgctggcaatcacgctctatttttggttattttttatac

SEQ ID NO: 174865 - DNA, 75 bp, synthetic construct
  source 1..75: mol_type = other DNA
ttcgtcacggcgaaagtcagtggaacaaagaaaaccgctttactggttggtatgatgtagatctgtctgagaaag

SEQ ID NO: 174866 - DNA, 75 bp, synthetic construct
  source 1..75: mol_type = other DNA
atgcaggatgctaccggaacggcttcagaagacatgatggggctgttcgacactatccagaaggcgttttatctg

SEQ ID NO: 174867 - DNA, 75 bp, synthetic construct
  source 1..75: mol_type = other DNA
gatgacgccgattggcatgattgcgacggcgatagccctggctgcgggattaattatcactaactgggatgttgt

SEQ ID NO: 174868 - DNA, 75 bp, synthetic construct
  source 1..75: mol_type = other DNA
ataatatttttgtttcagatattaacaaagagagctatgaggatgctggatcgtggccagcagatgcaaaagaag

SEQ ID NO: 174869 - DNA, 75 bp, synthetic construct
  source 1..75: mol_type = other DNA
gtggctggattacctggacgcactggagctggttgatacctccagtgtgctagatattgaatggcctacgcctcc

SEQ ID NO: 174870 - DNA, 75 bp, synthetic construct
  source 1..75: mol_type = other DNA
cagttaaaggaagaaaactgtaactcgctcttctatccgacaaaatcttttgaagaattgttcgaagtaaaagat

SEQ ID NO: 174871 - DNA, 75 bp, synthetic construct
  source 1..75: mol_type = other DNA
gtggctggattatctggacgcactggagctggtcgatacttccggtgcgccagatactgaatggcctacgcctcc

SEQ ID NO: 174872 - DNA, 75 bp, synthetic construct
  source 1..75: mol_type = other DNA
gctggattatctggacgcactggaactggtcgatacctccagtgctccagatattgaatggcctacgcctccggc

SEQ ID NO: 174873 - DNA, 75 bp, synthetic construct
  source 1..75: mol_type = other DNA
tgattaatcaggtcaacgaatacatgaacagtaaacaatgggctggtaaagcggctattggtcgtctgaaaggtg

SEQ ID NO: 174874 - DNA, 75 bp, synthetic construct
  source 1..75: mol_type = other DNA
acacgtgaaacgttgcaacgtctggggctggaagatattgccaccgatctggctgcacacaatctgctgcctgcg

SEQ ID NO: 174875 - DNA, 75 bp, synthetic construct
  source 1..75: mol_type = other DNA
gtgtggcagctattggtcaggctggtgaaaaccttgtgccgctctctggcatgttgaatagccgtaatcacagcg

SEQ ID NO: 174876 - DNA, 75 bp, synthetic construct
  source 1..75: mol_type = other DNA
cttgcccgatccgttgtatgacccaaatgaatattcctcgggtgaaagagtttggcgtgcctggcacaggtggta

SEQ ID NO: 174877 - DNA, 75 bp, synthetic construct
  source 1..75: mol_type = other DNA
gtgggcggagtactccgatcccaagtctcgctggacggcgcgtaaaggtctgttctggggagcggcggaaggtgg

SEQ ID NO: 174878 - DNA, 75 bp, synthetic construct
  source 1..75: mol_type = other DNA
caaaggtgtgttcaagcgtgttctgcctgctgaagagtatgcggaaattcgctgggatcaactggaagcgggtga

SEQ ID NO: 174879 - DNA, 75 bp, synthetic construct
  source 1..75: mol_type = other DNA
gagctgagtcacctggctgatggttcatatgccatcgcagaacgctggaatttgggtgaagagtactggggctac

SEQ ID NO: 174880 - DNA, 75 bp, synthetic construct
  source 1..75: mol_type = other DNA
ggctgcctgcgtgggcagatattcctccacccacgcatgaagaacttattgaaattactgaatcagaaagacagc

SEQ ID NO: 174881 - DNA, 75 bp, synthetic construct
  source 1..75: mol_type = other DNA
cgaccagtggctggcaccgaaacaaggcactgacagcgccctggcgatggcaatgggccatgtgattttaaaaga

SEQ ID NO: 174882 - DNA, 75 bp, synthetic construct
  source 1..75: mol_type = other DNA
tacttttatgtcggggattaaagagcatcaagactattgtatgttattaacgctttgttgctatcattggattgc

SEQ ID NO: 174883 - DNA, 75 bp, synthetic construct
  source 1..75: mol_type = other DNA
ccaggttgtattctgcaaacagcctctgagatacgaaaaattgtggttaaagtcgcattaacggcgctgaattaa

SEQ ID NO: 174884 - DNA, 75 bp, synthetic construct
  source 1..75: mol_type = other DNA
aaaatgtaactgataacacgtcaaaaaaattaaaaaaagaaaagcaacatagtggtggaaggttgcagcgagtgt

SEQ ID NO: 174885 - DNA, 75 bp, synthetic construct
  source 1..75: mol_type = other DNA
gtgatctcctttcatgaaaatacgcaacgcgaacgtcgcgcagagaaacaggctcaatggaaagcagcaaatccc

SEQ ID NO: 174886 - DNA, 75 bp, synthetic construct
  source 1..75: mol_type = other DNA
agatggaatgtgacgggatgacatgggcagttagtcacctactcaatgaagccggtgtcccgcataactgcatgc

SEQ ID NO: 174887 - DNA, 75 bp, synthetic construct
  source 1..75: mol_type = other DNA
caaaaatatttatgcgcaaattatcgatttaaccacacgcgaagcggtggaaaaccgtccggaagtgcatcgtcg

SEQ ID NO: 174888 - DNA, 75 bp, synthetic construct
  source 1..75: mol_type = other DNA
tatgaacagtaagcaatggcctggcaaagcagctattggtcgtctgaaaggtgacgaactggcgcaatataattt

SEQ ID NO: 174889 - DNA, 75 bp, synthetic construct
  source 1..75: mol_type = other DNA
cgacgttagctttttatccggtagatatgctggagctatatcgctcatatgacagcttaccggatgatattacgc

SEQ ID NO: 174890 - DNA, 75 bp, synthetic construct
  source 1..75: mol_type = other DNA
ccgcaggatgttcaccgaccggcatgtaataaaaatgccccaatggcaatccgcaaaatcgtggttaaagtagcc

SEQ ID NO: 174891 - DNA, 75 bp, synthetic construct
  source 1..75: mol_type = other DNA
accgggcagctacgcaattttctttccgcaggatgttcaccgaccaggttgtattatgcaaacagcggctttgtt

SEQ ID NO: 174892 - DNA, 75 bp, synthetic construct
  source 1..75: mol_type = other DNA
aaaaccgtccggaagtgcatcgtcgatatatcgatattcaatttctggcgtggggcaaagagaaaatcggcattg

SEQ ID NO: 174893 - DNA, 75 bp, synthetic construct
  source 1..75: mol_type = other DNA
cgataatctcctcaggcggcaacgttgattcgctggtgaaatcgttcctcggcaccaaacagcatgggattatcg

SEQ ID NO: 174894 - DNA, 75 bp, synthetic construct
  source 1..75: mol_type = other DNA
aacgccttgcttcgagaatggaaacatagcggtagccaatggtctggttaacggcattgggtttggctctactga

SEQ ID NO: 174895 - DNA, 75 bp, synthetic construct
  source 1..75: mol_type = other DNA
gggtggggatttccttttatggcgtgtcagatattcacgagccggagttgctgtcggtggatgaggagaatgatg

SEQ ID NO: 174896 - DNA, 75 bp, synthetic construct
  source 1..75: mol_type = other DNA
gacaacagccaccaaccattgaagccagtagttactacggcagttttggcagctggcgctatgggctgaaagcaa

SEQ ID NO: 174897 - DNA, 75 bp, synthetic construct
  source 1..75: mol_type = other DNA
gcagtggtgctgtataccacgcaggatgacgctctgccgcagacggacatcccgtttgaggtggtgtatctggat

SEQ ID NO: 174898 - DNA, 75 bp, synthetic construct
  source 1..75: mol_type = other DNA
atgaaaaaacgatttttatccctttccggattgctgatgctgtcgctgtcatgtctgccgttcactgccggggca

SEQ ID NO: 174899 - DNA, 75 bp, synthetic construct
  source 1..75: mol_type = other DNA
tggatggccctgccttacaccctcgtcctgacactcgtcgggctgctctgcgctgatgaatcccctaatgatttt

SEQ ID NO: 174900 - DNA, 75 bp, synthetic construct
  source 1..75: mol_type = other DNA
tccaaaatgctgctgtcgctctctttttgcgtggcggcggcgttcctctccgcgttcctcgatgccttaaccgtc

SEQ ID NO: 174901 - DNA, 75 bp, synthetic construct
  source 1..75: mol_type = other DNA
ggtcgtcgcccaatggctgtaggaacggggagtgaaagcgccatcgctgaggcattgctggcgcacctgggatta

SEQ ID NO: 174902 - DNA, 75 bp, synthetic construct
  source 1..75: mol_type = other DNA
atttaatgaaagcggagagctggtaaaacttaatcagcctccggagatctgggtgcatcttacccgcggagatat

SEQ ID NO: 174903 - DNA, 75 bp, synthetic construct
  source 1..75: mol_type = other DNA
tctctggagagaaagattatgatctaaacggttttgattgcggcgaagagtcactaaacgcatttttgaccaacc

SEQ ID NO: 174904 - DNA, 75 bp, synthetic construct
  source 1..75: mol_type = other DNA
gttgtcgatccgtatcgatcctgaacatcatacctgccaggaatcaaaaggcattgtgcaggaaagactacagga

SEQ ID NO: 174905 - DNA, 75 bp, synthetic construct
  source 1..75: mol_type = other DNA
cctgcggatcctgactggcctgagcgtgactactttgtgttgtcgaaaggacatgcagggccggctctttatagc

SEQ ID NO: 174906 - DNA, 75 bp, synthetic construct
  source 1..75: mol_type = other DNA
tcaatgacgcgaaaattaaatatgccaagtggtcgctgttacgcgtttgtttacacaatgccgtcaccttatgca

SEQ ID NO: 174907 - DNA, 75 bp, synthetic construct
  source 1..75: mol_type = other DNA
atcgcgactttacttattgttacagcaaaggggtgttcaagcgtgttctgccagctgaagagtatgcggaaattc

SEQ ID NO: 174908 - DNA, 75 bp, synthetic construct
  source 1..75: mol_type = other DNA
cagttaaaggaagaaaactgtaactcgctcttttacccgacaaaatctattgaagaattgttcgaagtaaatgat

SEQ ID NO: 174909 - DNA, 75 bp, synthetic construct
  source 1..75: mol_type = other DNA
tggctatccagttcaccacgccaattgtcaacgacggatgaaaagtgatccacttatatctccaccaacggccca

SEQ ID NO: 174910 - DNA, 75 bp, synthetic construct
  source 1..75: mol_type = other DNA
acgcaaaaattaaatatgctaagtggtcgctgttgcgggtctgtttgcataacgccgtcaccctgtgcaactggg

SEQ ID NO: 174911 - DNA, 75 bp, synthetic construct
  source 1..75: mol_type = other DNA
gattggtaacctggtgggtctgaatttgttcgatgactacggcctatggtgtaactacgggcagttgcatcgcga

SEQ ID NO: 174912 - DNA, 75 bp, synthetic construct
  source 1..75: mol_type = other DNA
cagtatcagttttttccagaaacggcatcaaagcccttcacttttccggcattccaaaactctccgggcataaag

SEQ ID NO: 174913 - DNA, 75 bp, synthetic construct
  source 1..75: mol_type = other DNA
gtcatgaggacagcaagccgcaggaagagacgcaccagacaaagaatggtaatgcgtctgacagcactttgcgca

SEQ ID NO: 174914 - DNA, 75 bp, synthetic construct
  source 1..75: mol_type = other DNA
tcagaacggtacacgtttaccaagtcatcccgacagattaaaaactcgcggtgtggatgccactacaggatcgct

SEQ ID NO: 174915 - DNA, 75 bp, synthetic construct
  source 1..75: mol_type = other DNA
ccaaatctgctgtcaggtatgcagccttacccggttttcagacagctcttgatacagaactcatctctgtcacgt

SEQ ID NO: 174916 - DNA, 75 bp, synthetic construct
  source 1..75: mol_type = other DNA
cccgtcggtttttcttgccggggcgatatctgcggttgtaggaatagtggttacgctgatctcttttcggcgtgg

SEQ ID NO: 174917 - DNA, 75 bp, synthetic construct
  source 1..75: mol_type = other DNA
tctggctggcgctttctggttactggcggcactaatgcccgtctctgcacctgcaaaattcgctttgttagttat

SEQ ID NO: 174918 - DNA, 75 bp, synthetic construct
  source 1..75: mol_type = other DNA
ccgcgcattagaagaaggcattcgcaccggggatttagcccgtggcgctgccgccgttagtaccgatgaaatggg

SEQ ID NO: 174919 - DNA, 75 bp, synthetic construct
  source 1..75: mol_type = other DNA
gctcgaaatcgaccataaaataaatcagatatgtaaggacagagagatgaactactcccagtgcgtcaggatgtt

SEQ ID NO: 174920 - DNA, 75 bp, synthetic construct
  source 1..75: mol_type = other DNA
gccctggcgacgcagaactccgccctggcggctatcgttgaaaaaatgtggacccagcgtagccataacccgtac

SEQ ID NO: 174921 - DNA, 75 bp, synthetic construct
  source 1..75: mol_type = other DNA
tggcgacattctgtctgacgagtgcgcaatgatcactggctcgatggggatgttgccttccgccagcctgaacga

SEQ ID NO: 174922 - DNA, 75 bp, synthetic construct
  source 1..75: mol_type = other DNA
gccttccgccagcctgaacgagcaaggttttggtctgtatgaaccggcgggcggctcggcaccagatatcgcagg

SEQ ID NO: 174923 - DNA, 75 bp, synthetic construct
  source 1..75: mol_type = other DNA
taccaccagaccagcaaccagaacgcggcgcgctgttgcctctgcgtaagcacttcaaattattcagcaacctgc

SEQ ID NO: 174924 - DNA, 75 bp, synthetic construct
  source 1..75: mol_type = other DNA
cggcaggtggtgcgctgggtaactggatcgacaacaaagatcctctgtctggtgcaatttcaaatggtatcggtt

SEQ ID NO: 174925 - DNA, 75 bp, synthetic construct
  source 1..75: mol_type = other DNA
ggcggtggcacagggaaataatgctcttgccggtgctgcaggtgcagccgccggcgaggtggtgggaatgattgc

SEQ ID NO: 174926 - DNA, 75 bp, synthetic construct
  source 1..75: mol_type = other DNA
tggcacagcgggcctacaataacggtatggcggcctcaggttttggaacaggaggcaaataccagcaggcgatac

SEQ ID NO: 174927 - DNA, 75 bp, synthetic construct
  source 1..75: mol_type = other DNA
tctcgaaaatacgaagattatgttatttaatgaaaccagtgatgatttcgagttcaatgccgaccgctatttgtt

SEQ ID NO: 174928 - DNA, 75 bp, synthetic construct
  source 1..75: mol_type = other DNA
agttcaacgccgaccgttacctgttcgcagaaaacccggttgtgcatctggatacggccgccagcggcagcaaat

SEQ ID NO: 174929 - DNA, 75 bp, synthetic construct
  source 1..75: mol_type = other DNA
attacgaatgctgtaggaaaatgggtgacaaatggctgggatcctaagtacgatccaacatggataaaatatgct

SEQ ID NO: 174930 - DNA, 75 bp, synthetic construct
  source 1..75: mol_type = other DNA
tgccgccagaccagcaaccagaacgcggcgcactgttgcctttgcgtaagcacttcaaattattcagcaatctgc

SEQ ID NO: 174931 - DNA, 75 bp, synthetic construct
  source 1..75: mol_type = other DNA
caaggttcagtatcaataacctacccaggttcaaggacgtcattacgggcagggatgcccacccttgtgcgataa

SEQ ID NO: 174932 - DNA, 75 bp, synthetic construct
  source 1..75: mol_type = other DNA
tcgcggatggtaaaaatccagatgtgctttccgtgggagaggggccagggatagccaccaatattggcgtagcgt

SEQ ID NO: 174933 - DNA, 75 bp, synthetic construct
  source 1..75: mol_type = other DNA
ctgacgctatactgcttctctttcttattgctcaaactgtcgacatcactatgcccgtttttgctctgctcgcgc

SEQ ID NO: 174934 - DNA, 75 bp, synthetic construct
  source 1..75: mol_type = other DNA
gaatggctttaacggcggtgttctgaacggtgttccttctgcatatcactggtataccgaacggtatggcgtgaa

SEQ ID NO: 174935 - DNA, 75 bp, synthetic construct
  source 1..75: mol_type = other DNA
gaagaagcccagcatgaaatggccgctgaagcagggattaatcccgcgcacattgatgagatcgcagagttcttg

SEQ ID NO: 174936 - DNA, 75 bp, synthetic construct
  source 1..75: mol_type = other DNA
cccacccttgtgcgataaaaataacgatgaaaaggaagagattatttctattagcgtcgttgctgccaatgtttg

SEQ ID NO: 174937 - DNA, 75 bp, synthetic construct
  source 1..75: mol_type = other DNA
ggcataaacgtcaataattatgaagcccgcaaatggttgaaactggcagcggaacaacattataaaaatgcggaa

SEQ ID NO: 174938 - DNA, 75 bp, synthetic construct
  source 1..75: mol_type = other DNA
gcgatattcatgcccaatatacgctgggcttaatctacagaaatggtacaggtattaatgtcaacaattacgaag

SEQ ID NO: 174939 - DNA, 75 bp, synthetic construct
  source 1..75: mol_type = other DNA
ggccgcgaaggtagcggacaatatgaaaaagcgtttgataccgaggtgtatcaccgttttgagatcgaacgtatt

SEQ ID NO: 174940 - DNA, 75 bp, synthetic construct
  source 1..75: mol_type = other DNA
cgctgtacgtcaggcgctggcggatgacaatctggctctggcagaaagtttactggggcacccgtttgccatctc

SEQ ID NO: 174941 - DNA, 75 bp, synthetic construct
  source 1..75: mol_type = other DNA
ctgttcgccattaaggataatggcaaaccgatatcggaaccccgatgggcatatgaaaaaatactggcacagtgc

SEQ ID NO: 174942 - DNA, 75 bp, synthetic construct
  source 1..75: mol_type = other DNA
tagccttggcggattttatcttcatggcagcaatggtaagcctctggattacacgatggcgagatactggtatga

SEQ ID NO: 174943 - DNA, 75 bp, synthetic construct
  source 1..75: mol_type = other DNA
tcactcgagtccacgaaagcggatcagcagaatttcggcgcgtggccgcggggatggaagctgatgctgctgcta

SEQ ID NO: 174944 - DNA, 75 bp, synthetic construct
  source 1..75: mol_type = other DNA
tcactcgagtccacgaaagcggatcagcagaatttcggcgcgtggctgcggggatggaagctgatgctgccgcta

SEQ ID NO: 174945 - DNA, 75 bp, synthetic construct
  source 1..75: mol_type = other DNA
tcactcgagtccacgaaagcggatcagcagaatttcggtgcgtggccgcggggatggaagctgatgctgccgcta

SEQ ID NO: 174946 - DNA, 75 bp, synthetic construct
  source 1..75: mol_type = other DNA
tctgcaacagcacttccagaacattccacgttcatccggtcgtcatctttctgtagagaatattgagctggctga

SEQ ID NO: 174947 - DNA, 75 bp, synthetic construct
  source 1..75: mol_type = other DNA
tgagttctaccgtattctgaaaaccccaaataaatcaaatctaagcagttggttcactcgagtccacgaaaacgg

SEQ ID NO: 174948 - DNA, 75 bp, synthetic construct
  source 1..75: mol_type = other DNA
gcagaatttcggcgcgtggcggcggggatggaagctgatgctgcagctatatgtgaggcaatcagtagtagctgg

SEQ ID NO: 174949 - DNA, 75 bp, synthetic construct
  source 1..75: mol_type = other DNA
gctatatgtgaggcaatcagcagtcgttggagtaatggtgttgtcgacggtcatgtaaatcacctgaagatgttg

SEQ ID NO: 174950 - DNA, 75 bp, synthetic construct
  source 1..75: mol_type = other DNA
gggatggaagctgatgctgcggctatatgtgaggcaaccagcagccgctggagtaacggtgttgtcgaaggtcat

SEQ ID NO: 174951 - DNA, 75 bp, synthetic construct
  source 1..75: mol_type = other DNA
gttaccactgatatataatcatatattggataagaaaaaaacagaattaatccctgttgaagttatagaaaaaat

SEQ ID NO: 174952 - DNA, 75 bp, synthetic construct
  source 1..75: mol_type = other DNA
aaatagcgcagcaactggcactcgagttctaccgtattctgaaaacccaaaataaatcacagctaaggagcttgt

SEQ ID NO: 174953 - DNA, 75 bp, synthetic construct
  source 1..75: mol_type = other DNA
atgtgtgaaaaagaaccggagttgaaaatagcacagcaactggtactcgagttctaccgtattctgaaaacctat

SEQ ID NO: 174954 - DNA, 75 bp, synthetic construct
  source 1..75: mol_type = other DNA
gtaaatcgcctgaaggtgctgatacgccagatgtatggtcgagccggatttgaactacttaggcggagggtaatg

SEQ ID NO: 174955 - DNA, 75 bp, synthetic construct
  source 1..75: mol_type = other DNA
gctgcatacaaaaatcatctgaatatccagttaggagatggcgttctgaatctggcagacattgttgcggaatac

SEQ ID NO: 174956 - DNA, 75 bp, synthetic construct
  source 1..75: mol_type = other DNA
gcggcggtgaaacgtattgagttcgtcggcccgagcgtgggcgcggaccttgcgcagaccggcgccatggcgctg

SEQ ID NO: 174957 - DNA, 75 bp, synthetic construct
  source 1..75: mol_type = other DNA
ggcgtagatccgtcgaaactgacagaagatcagaagcaaactgtaagcacgctggcaacgctgtcagcgggtatg

SEQ ID NO: 174958 - DNA, 75 bp, synthetic construct
  source 1..75: mol_type = other DNA
ccattgcccatgccattctcggtggtgtgacagcagcccttcagggcaacagtgcggcagcaggcgcaattggcg

SEQ ID NO: 174959 - DNA, 75 bp, synthetic construct
  source 1..75: mol_type = other DNA
caattggtgacattggtggtagtatcacttcagaagccggaggtaagtatacagagtacaaaatgaagcaggaag

SEQ ID NO: 174960 - DNA, 75 bp, synthetic construct
  source 1..75: mol_type = other DNA
taaatcgcctgaagatgctgaaacgccagatgtatggtcgagcaggatttgaactactcaggcagagggtaatga

SEQ ID NO: 174961 - DNA, 75 bp, synthetic construct
  source 1..75: mol_type = other DNA
tcatgcaagcatcaaaaaagatgggagcttcatcaaaaacattacaggctgtgaaaccatcgtcagggatgctgt

SEQ ID NO: 174962 - DNA, 75 bp, synthetic construct
  source 1..75: mol_type = other DNA
ctccggaggcgggaataaccgctatattatcccccgggatttaaaaacgccgttgacactgacgctgtccagtaa

SEQ ID NO: 174963 - DNA, 75 bp, synthetic construct
  source 1..75: mol_type = other DNA
aattgacgtaatgcgtgatgcattgcaaaaagccggttttgaagagccaatgctgcaaaactttggtagcagcca

SEQ ID NO: 174964 - DNA, 75 bp, synthetic construct
  source 1..75: mol_type = other DNA
tgctgcaaaactttggtagcagccacgacatcatggtccgtatgccgcctgctgaaggcgaaacaggcggtcagg

SEQ ID NO: 174965 - DNA, 75 bp, synthetic construct
  source 1..75: mol_type = other DNA
gcagcagcggcaatgcagggtaataatgttgctgccggtgcagcaggcgccgcaacaggagaattggcagccaga

SEQ ID NO: 174966 - DNA, 75 bp, synthetic construct
  source 1..75: mol_type = other DNA
cggagaaggctggctgattggctggcgttctctctggtacacctggggacaaaaagaaaccggagaatggcagtg

SEQ ID NO: 174967 - DNA, 75 bp, synthetic construct
  source 1..75: mol_type = other DNA
aaaccgtaaaacgcgactggtatgttgtggacgcgaccggtaaaactctgggccgtctggctactgaactggctc

SEQ ID NO: 174968 - DNA, 75 bp, synthetic construct
  source 1..75: mol_type = other DNA
aagggtttcttcgcgggaaatgtgtaccacgagatctgaaagtgaatgaaacaaatgctgagtacctggtgcgta

SEQ ID NO: 174969 - DNA, 75 bp, synthetic construct
  source 1..75: mol_type = other DNA
accgcgagatctgaaagtgaacgaaacaaatgctgagtacctggtacgtaaattcgatgcgcttgaagctaaatg

SEQ ID NO: 174970 - DNA, 75 bp, synthetic construct
  source 1..75: mol_type = other DNA
ccgtgtggcgagtgcgcagcctgtcgggaagagaaaacgaactgctgcgaacgtgtttcgctgtatggcgtgcat

SEQ ID NO: 174971 - DNA, 75 bp, synthetic construct
  source 1..75: mol_type = other DNA
aaaaagaaaccggagaatggcagtggacatttcaggtcggggaccttgaaaacttcaatatcactcactgggcag

SEQ ID NO: 174972 - DNA, 75 bp, synthetic construct
  source 1..75: mol_type = other DNA
atgcaaaaatccttccgattcaccaattcatccatcaaagcccttccggcaaacacagatacccgatctacagag

SEQ ID NO: 174973 - DNA, 75 bp, synthetic construct
  source 1..75: mol_type = other DNA
atgaccacctttacccaaaaagaactgattaaagaaatgaaagagcgcatcagcagcctcgacgtacgagacgat

SEQ ID NO: 174974 - DNA, 75 bp, synthetic construct
  source 1..75: mol_type = other DNA
atgaccacctttacccaaaaagaactgattaaagaaatcaaagaccgcatcagcagcctcgacgtacgagacgat

SEQ ID NO: 174975 - DNA, 75 bp, synthetic construct
  source 1..75: mol_type = other DNA
aagggtttcttcacgggagatgtgtaccacgagacctgaaagtgaatgaaacggatgctaaatacctggagcgta

SEQ ID NO: 174976 - DNA, 75 bp, synthetic construct
  source 1..75: mol_type = other DNA
catccctgcggtcatcgcggcgggtattctctccacttactattttggcatcactggcaccttttgggctgtcac

SEQ ID NO: 174977 - DNA, 75 bp, synthetic construct
  source 1..75: mol_type = other DNA
gctgggcgctgctgacggcgatgaaccagcccaaactggggctggcaatgctgtttggcgtcggctttggtttac

SEQ ID NO: 174978 - DNA, 75 bp, synthetic construct
  source 1..75: mol_type = other DNA
aagggtttcttcgcgggaaatgtgtaccgcgtgatctgaaagtgaacgaaacaaatgctgagtacctggtacgta

SEQ ID NO: 174979 - DNA, 75 bp, synthetic construct
  source 1..75: mol_type = other DNA
ttgagaaatacctgataggaggaattacagacgccacaaagagattgatgatgtcgtactcttctatgatgatgg

SEQ ID NO: 174980 - DNA, 75 bp, synthetic construct
  source 1..75: mol_type = other DNA
ttcccgtggtcgcttgaccctggaagtgcgtgatgcgctgaactccggttctgcgggtaccgaagacgaagttac

SEQ ID NO: 174981 - DNA, 75 bp, synthetic construct
  source 1..75: mol_type = other DNA
caaaacccttttgtgtcaggcgctgatgtcggagcctgacttgctgattttagatgaaccgttcgatggtcttga

SEQ ID NO: 174982 - DNA, 75 bp, synthetic construct
  source 1..75: mol_type = other DNA
tgcttttcgccctactcgccgtgcaattttcacgtcgtcctcccaccattcgccacactttcggttggctaagat

SEQ ID NO: 174983 - DNA, 75 bp, synthetic construct
  source 1..75: mol_type = other DNA
atgacgctgcatgtgcaggtgatcccgccacacgatcacgacgcgttgttggatcagatccaacattatctgatg

SEQ ID NO: 174984 - DNA, 75 bp, synthetic construct
  source 1..75: mol_type = other DNA
ttttgcttaatgtatggttttctacgccccatgtttaataactggctacaaaatatatttgcagccatattaact

SEQ ID NO: 174985 - DNA, 75 bp, synthetic construct
  source 1..75: mol_type = other DNA
gaaacatccgacgttgcttattctcgatgaaccactacaggggcttgatccgctcaatcgccagcttatccgccg

SEQ ID NO: 174986 - DNA, 75 bp, synthetic construct
  source 1..75: mol_type = other DNA
agcggaataacaccgatatgctcggccctggcgaagatgacaccggacgcactacggctgagatcattcaggatg

SEQ ID NO: 174987 - DNA, 75 bp, synthetic construct
  source 1..75: mol_type = other DNA
ggccaaacaagaacgttccggggctgattagaggcgcagagatatgcgtaagtattgctgaacagcttcgcgaag

SEQ ID NO: 174988 - DNA, 75 bp, synthetic construct
  source 1..75: mol_type = other DNA
tggcatttatcaggccgtttcggatcgccagcaaaaactggtgcaacagtggctggatattctcggcattgataa

SEQ ID NO: 174989 - DNA, 75 bp, synthetic construct
  source 1..75: mol_type = other DNA
accgccctcctcgaccgacgctttaaatacctttccactggcgagacgcgtaaaaccctgctctgtcaggcgctg

SEQ ID NO: 174990 - DNA, 75 bp, synthetic construct
  source 1..75: mol_type = other DNA
gccggagccggatgaaccttcagcacgtcacgccttacccgccaacgaaccgcgcattgtgctgaacaatggcgt

SEQ ID NO: 174991 - DNA, 75 bp, synthetic construct
  source 1..75: mol_type = other DNA
tgcggatgaagttttcattctgccgctgaatgctgtcatggaatcactgcaaccccgtgaagccgatctgcatcc

SEQ ID NO: 174992 - DNA, 75 bp, synthetic construct
  source 1..75: mol_type = other DNA
agatgggcggccatgtcgaaattaagtcgaagccgggcacaggtacaacgatccgcattttactaccgctgacac

SEQ ID NO: 174993 - DNA, 75 bp, synthetic construct
  source 1..75: mol_type = other DNA
agtgaccgacgatggcgcgggactaaatcgtgagcggattctggcaaaagccgcctcgcaagggctgcctgtcag

SEQ ID NO: 174994 - DNA, 75 bp, synthetic construct
  source 1..75: mol_type = other DNA
ttgtggtgatcttgcaaagtggcggtcgccgctacgccttgctggtggatcaattaattggtcaacaccaggttg

SEQ ID NO: 174995 - DNA, 75 bp, synthetic construct
  source 1..75: mol_type = other DNA
cgccagatgccgaacagttgaatgccatctttcgtgcagctcattccatcaaaggaggggcaggaacgtttggtt

SEQ ID NO: 174996 - DNA, 75 bp, synthetic construct
  source 1..75: mol_type = other DNA
gtgagcatggatataagcgatttttatcagacattttttgatgaggcggacgaactgttagccgatatggagcag

SEQ ID NO: 174997 - DNA, 75 bp, synthetic construct
  source 1..75: mol_type = other DNA
cttctatgcattcatccgtagcctgcgtgcttatgagaacagcttctctggcaatcaggacgtgatggtcatgag

SEQ ID NO: 174998 - DNA, 75 bp, synthetic construct
  source 1..75: mol_type = other DNA
tttcgctgttttggcgaggcggaagtgattgccgaaccaatgatccatccggtagttggcgtgagtggttcttct

SEQ ID NO: 174999 - DNA, 75 bp, synthetic construct
  source 1..75: mol_type = other DNA
atcaacgccgcagaatcggcacaagaagtggcgcaaatcgccgacatcgtttttgccgccgttaagccaggcatt

SEQ ID NO: 175000 - DNA, 75 bp, synthetic construct
  source 1..75: mol_type = other DNA
ttgatctggcgctcctggaattttgaggactgtgccgggtactggatgaaccggtacatcaggaatttcgggatt

SEQ ID NO: 175001 - DNA, 75 bp, synthetic construct
  source 1..75: mol_type = other DNA
aacgggtaacaaacgtttcctcctgcgctacacattccacggtaccaaaaaaagtatcagtattggcagattccc

SEQ ID NO: 175002 - DNA, 75 bp, synthetic construct
  source 1..75: mol_type = other DNA
ggttaccgtcatcgttcgtggtgatgtcggggcggtaaaagcggcaacagacgcgggtaacgatgtcgaaagcgg

SEQ ID NO: 175003 - DNA, 75 bp, synthetic construct
  source 1..75: mol_type = other DNA
cagtaagcgccctggaaaaacctgaggttgcaccacaggtcagtgttcccaaatgccatcagccgaaccgaggtg

SEQ ID NO: 175004 - DNA, 75 bp, synthetic construct
  source 1..75: mol_type = other DNA
atgaccacctttacccaaaaagaactgattaaagaaataaaagaacgcatcagcagcctcgacgtacgagacgat

SEQ ID NO: 175005 - DNA, 75 bp, synthetic construct
  source 1..75: mol_type = other DNA
atggcccaatcggacgatgatgagtatgcggcagcggagaacgcgcgccggctgcgtgacgcagttaaacgcggc

SEQ ID NO: 175006 - DNA, 75 bp, synthetic construct
  source 1..75: mol_type = other DNA
ttatcgtcgtttttttgctgttggttggctatggtgcttggattggatctgagcaaaatcagcgaggagtatctt

SEQ ID NO: 175007 - DNA, 75 bp, synthetic construct
  source 1..75: mol_type = other DNA
atgaccacctttacccaaaaagaactgattaaagaaataaaagagcgcatcagcagcctcgacgtgcgagacgat

SEQ ID NO: 175008 - DNA, 75 bp, synthetic construct
  source 1..75: mol_type = other DNA
atgaccacctttacccaaaaagaactgattaaagaaataaaagaccgcatcagcagcctcgacgtccgagacgat

SEQ ID NO: 175009 - DNA, 75 bp, synthetic construct
  source 1..75: mol_type = other DNA
atgaccacctttacccaaaaagaactgattaaagaaataaaagatcgcatcagcagcctcgacgttcgagacgat

SEQ ID NO: 175010 - DNA, 75 bp, synthetic construct
  source 1..75: mol_type = other DNA
cgggaaaaactgcgttacctcgctgagtgcggcgtggattacgtgctgtgcgtgcgttttgacagacgctttgcg

SEQ ID NO: 175011 - DNA, 75 bp, synthetic construct
  source 1..75: mol_type = other DNA
ggtattcgccagcagctggaagtgcatttgttagatgttgcaatggacctttacggtcgccatatacaagtagtg

SEQ ID NO: 175012 - DNA, 75 bp, synthetic construct
  source 1..75: mol_type = other DNA
aaggcgatttcttgttattacagaaagctggcatggaatacggcttcgatatcaccagtacgcaaactttttgcg

SEQ ID NO: 175013 - DNA, 75 bp, synthetic construct
  source 1..75: mol_type = other DNA
ttggtctggcgtacctggaattttgaggacggtgccgggtactggatgaaccatgtcatcagggatttcggcatt

SEQ ID NO: 175014 - DNA, 75 bp, synthetic construct
  source 1..75: mol_type = other DNA
ccagtcatcagggatttcgggattcgtaagtaagagaggtgccggacgggaacgcgtccggcagacatacaacca

SEQ ID NO: 175015 - DNA, 75 bp, synthetic construct
  source 1..75: mol_type = other DNA
cggcgaatgtgccgctgcgtcgtcaggtttccccggttaaaggggtttatgcggtggaagtgctgggcctcggcg

SEQ ID NO: 175016 - DNA, 75 bp, synthetic construct
  source 1..75: mol_type = other DNA
ttttcactaagatcgacacaactatcccacgcgatacaatgcccattcttcgtcgctaccatctatggaccaatg

SEQ ID NO: 175017 - DNA, 75 bp, synthetic construct
  source 1..75: mol_type = other DNA
ggttttgccgcactggcgcttactacaatggtattgccgttactggcgtgggtctgcaatggcacagtacgcaaa

SEQ ID NO: 175018 - DNA, 75 bp, synthetic construct
  source 1..75: mol_type = other DNA
tggatctgtacgggaaagttaatgctaagcactacttctcctctaatgatgcagatgatggtgatactacttatg

SEQ ID NO: 175019 - DNA, 75 bp, synthetic construct
  source 1..75: mol_type = other DNA
tcaaatcaacgatcaactgactggtttcggtcagtgggaatatgaattcaaaggcaaccgtgctgaatctcaagg

SEQ ID NO: 175020 - DNA, 75 bp, synthetic construct
  source 1..75: mol_type = other DNA
cgtgactgactccgttcgatgcatggataaaccggaagaagcaaaaaagaatatcactcgtcttgccgaccggaa

SEQ ID NO: 175021 - DNA, 75 bp, synthetic construct
  source 1..75: mol_type = other DNA
tttttctttacggttttgaagactgcgtgaccgactccgttcggtgcatggataaaccggaagaagcgaaaagga

SEQ ID NO: 175022 - DNA, 75 bp, synthetic construct
  source 1..75: mol_type = other DNA
gatgtttggctggatgccagatcgttttggcggcgtaaaagtggcgattgtctctctgctggtggaaacgatagg

SEQ ID NO: 175023 - DNA, 75 bp, synthetic construct
  source 1..75: mol_type = other DNA
gcccagggggggggacaggcagtgaaaccatcgtcagggatactgttgccaaatggcgtaaaggctggaacccac

SEQ ID NO: 175024 - DNA, 75 bp, synthetic construct
  source 1..75: mol_type = other DNA
acccaccggttactactgccgtcagacttccttcagtgtcccgggtaagccgctggttgatgccctggagaataa

SEQ ID NO: 175025 - DNA, 75 bp, synthetic construct
  source 1..75: mol_type = other DNA
accggttactactgccgccagacttccttcagtgtcccgggtaagccggtggttgatgtcacgaacggtgcaata

SEQ ID NO: 175026 - DNA, 75 bp, synthetic construct
  source 1..75: mol_type = other DNA
tacggagcgctacgcgaaattgacaccagagcgtatgcgtcagaccgggcagggcgtaactgacctgcttctgaa

SEQ ID NO: 175027 - DNA, 75 bp, synthetic construct
  source 1..75: mol_type = other DNA
ttatggccctgcataacaagggatgtagtttcagggaaatatcccgtattacagacctgtcgcgtgtgacagtca

SEQ ID NO: 175028 - DNA, 75 bp, synthetic construct
  source 1..75: mol_type = other DNA
tagctatatatagcgtctggtgcattatagcgattttgctctgcaaggatggcttgtaccagatgaacatatgga

SEQ ID NO: 175029 - DNA, 75 bp, synthetic construct
  source 1..75: mol_type = other DNA
gaatttctcgggaacggcgacaatgtcggtgagttgtttgaaggggaatattttacggtgcgtggctaccagaaa

SEQ ID NO: 175030 - DNA, 75 bp, synthetic construct
  source 1..75: mol_type = other DNA
gcgccaaactgcctgctgttggctgacctgccgtttatggcgtatgccacgccggaacaagcctttgaaaacgcc

SEQ ID NO: 175031 - DNA, 75 bp, synthetic construct
  source 1..75: mol_type = other DNA
atgcgggaaaactggcaacagatataggtgttggcatgctaacaggtggtgctgttaatactgttgcaaaagggc

SEQ ID NO: 175032 - DNA, 75 bp, synthetic construct
  source 1..75: mol_type = other DNA
cggtaaactcggtattggcgatggaacatatcaaccagcgccacgagtaacaactaagggattagagcaggcgtt

SEQ ID NO: 175033 - DNA, 75 bp, synthetic construct
  source 1..75: mol_type = other DNA
tgctgacggtacaacgcactggaatttcctgatttactgcaatccccatgagagcgcaacggtgctggccatttt

SEQ ID NO: 175034 - DNA, 75 bp, synthetic construct
  source 1..75: mol_type = other DNA
cagcgtataacgccatcgacgcggcatccgttgcccttggtcgtccctgcctgacgctgcccgaacgtgagcatt

SEQ ID NO: 175035 - DNA, 75 bp, synthetic construct
  source 1..75: mol_type = other DNA
tcgctgaaacgggcgacatccgcgctgctgtgcggcagtatatggctgaagtggagtccggcgtttatccgggcg

SEQ ID NO: 175036 - DNA, 75 bp, synthetic construct
  source 1..75: mol_type = other DNA
ggtacggtgcatatcaccttccgtcgccctgaccttgttgagcaactgaataacatcattgcccgccattatccc

SEQ ID NO: 175037 - DNA, 75 bp, synthetic construct
  source 1..75: mol_type = other DNA
gtcagcgtctgaaagcggtgttgatcactggcggtattctgctggcatttatggtggtggcactgttcattgcgg

SEQ ID NO: 175038 - DNA, 75 bp, synthetic construct
  source 1..75: mol_type = other DNA
acatgctgattggcgacggcatcaaaacaggtcttagtaagatgggctttagcgttgactggtttacggaaggtc

SEQ ID NO: 175039 - DNA, 75 bp, synthetic construct
  source 1..75: mol_type = other DNA
tttggtgggaagaacggaaaagagatagaggggatgttatctattctcgatgctaccaaaagagcatctgaggct

SEQ ID NO: 175040 - DNA, 75 bp, synthetic construct
  source 1..75: mol_type = other DNA
caaagcaggaacgccagcctatgaaagagcattaagtaacgctgcaaatgccatcagaccgctgcttgccactga

SEQ ID NO: 175041 - DNA, 75 bp, synthetic construct
  source 1..75: mol_type = other DNA
ccttgccgctcagggggttctttccgcagcagcaaagggaatagggcgtggaattactgctgttcgtggcgaaat

SEQ ID NO: 175042 - DNA, 75 bp, synthetic construct
  source 1..75: mol_type = other DNA
gctatatgtgaggcaatcagcagtcgctggagtaatggtgttgtcgaaggtcatgtaaatcgcctgaagatgctg

SEQ ID NO: 175043 - DNA, 75 bp, synthetic construct
  source 1..75: mol_type = other DNA
ttagtctgatgtgtgaaaaagaaccggagttgaaaatagcgcagcaactggtactcgagttctaccgtattctga

SEQ ID NO: 175044 - DNA, 75 bp, synthetic construct
  source 1..75: mol_type = other DNA
tttcggcgcgtggcggcggggatggaagctgatgctgcagctatatgtgaggcaatcagtagtcactggagtaat

SEQ ID NO: 175045 - DNA, 75 bp, synthetic construct
  source 1..75: mol_type = other DNA
tacggcagcattagtcactgtgggactacggcattagccgtggtatctcgtcaaccgattggcattgatatcgaa

SEQ ID NO: 175046 - DNA, 75 bp, synthetic construct
  source 1..75: mol_type = other DNA
gcgacagcagcacgtgaaggtgcacctcaggccagacaggtggccgatcgatggcacctgctaaaaaatattggt

SEQ ID NO: 175047 - DNA, 75 bp, synthetic construct
  source 1..75: mol_type = other DNA
atcgtcaatcttgatactcaccgtcccctcgtcctgcttcccggccgtgatcagcgtacgctggcgacctggttc

SEQ ID NO: 175048 - DNA, 75 bp, synthetic construct
  source 1..75: mol_type = other DNA
ccggaaatacaggttgtctcgcgtgatcgcagtggagtctatgcgacagcagcacgtgaaggtgcacctcaggcc

SEQ ID NO: 175049 - DNA, 75 bp, synthetic construct
  source 1..75: mol_type = other DNA
tgaacgaatgatgtaccgacatatgcctctgatacgtcttgttgccagtgagttgtcaccaaagaaatcacctga

SEQ ID NO: 175050 - DNA, 75 bp, synthetic construct
  source 1..75: mol_type = other DNA
agttgtcgtcggcgccggatacagcatctaccctgcttagggcagacgctatggcttgtattttccgtccgccac

SEQ ID NO: 175051 - DNA, 75 bp, synthetic construct
  source 1..75: mol_type = other DNA
tgatcagcgtacgctggcgacctggttcagaaaatatccggaaatacaggttgtctcgcgtgatcgcagtggagt

SEQ ID NO: 175052 - DNA, 75 bp, synthetic construct
  source 1..75: mol_type = other DNA
ttgcagtgctgatactcttcttcgcagggttatcaataccccggagacgaaacagtcaggcgcgcctcatgtcgg

SEQ ID NO: 175053 - DNA, 75 bp, synthetic construct
  source 1..75: mol_type = other DNA
cgcgtgatcgcagtggagtctatgcaacagcagcacgtgaaggtgcacctcaggccagacaggtggccgatcgat

SEQ ID NO: 175054 - DNA, 75 bp, synthetic construct
  source 1..75: mol_type = other DNA
cgctgacactggcattttccgccaaagagagcgcatttaaggcaagcaagatacaggccgctcaaggttttctgg

SEQ ID NO: 175055 - DNA, 75 bp, synthetic construct
  source 1..75: mol_type = other DNA
ccaacggtcaaacaccgtttgtaacctttggttttggtctgggcaccagctgggagtcgcgcctgattcaggaat

SEQ ID NO: 175056 - DNA, 75 bp, synthetic construct
  source 1..75: mol_type = other DNA
gcgaacggtggcttcatttgctacggcgagtatccaaacattcagcacaacctgaaggcgctggaagatgtctgg

SEQ ID NO: 175057 - DNA, 75 bp, synthetic construct
  source 1..75: mol_type = other DNA
ttatatggcggcagaggcgctggaaagtgccgcgaaagcgaaaggctgggaagtgaaagtagaaacccaggggtc

SEQ ID NO: 175058 - DNA, 75 bp, synthetic construct
  source 1..75: mol_type = other DNA
gtagccctgatgctcgcccgtttaacgccggtaagcaggaagaagttaagcgccgcgttaaacatttggggaatg

SEQ ID NO: 175059 - DNA, 75 bp, synthetic construct
  source 1..75: mol_type = other DNA
ctgttcggcggcgagcatgtttatgataacgaacagcttcgcgcaaaaggtattgcgattgtcgaacgtctgcgt

SEQ ID NO: 175060 - DNA, 75 bp, synthetic construct
  source 1..75: mol_type = other DNA
cagcacgccgagtgaaaacctgtgcgaccgcttctgccgtctcgataccgctgagtttggcgtggtgccgggcgt

SEQ ID NO: 175061 - DNA, 75 bp, synthetic construct
  source 1..75: mol_type = other DNA
tcaaccgattggcgttgatatcgaagaaattttttctgcgcaaacagcgaccgaattgacagacaacattattac

SEQ ID NO: 175062 - DNA, 75 bp, synthetic construct
  source 1..75: mol_type = other DNA
ccccactgaacgcgagtttattacaggctgcaatttacctttccctgtggcacttacactggcattttcagcaaa

SEQ ID NO: 175063 - DNA, 75 bp, synthetic construct
  source 1..75: mol_type = other DNA
gaaaactacgcataccgccctcccctttaccggacatacgctgcattttgttgagttcgatcctgcgagttttcg

SEQ ID NO: 175064 - DNA, 75 bp, synthetic construct
  source 1..75: mol_type = other DNA
gggattaatagctggaggtgaggctggaaaacgggctgcaacggcagcgggtctccgttgcagtgctgatatgat

SEQ ID NO: 175065 - DNA, 75 bp, synthetic construct
  source 1..75: mol_type = other DNA
agcgactcgcagaatgcggtttaaccttttctctggcgctgacactggcattttccgccaaagagagcgcattta

SEQ ID NO: 175066 - DNA, 75 bp, synthetic construct
  source 1..75: mol_type = other DNA
cgctgacactggcattttccgccaaagagagcgcatttaaggcatcggagagacaaactgatgcaggatttctgg

SEQ ID NO: 175067 - DNA, 75 bp, synthetic construct
  source 1..75: mol_type = other DNA
ataacaggtgtacatactgcagaaaatttgcttccagccccttcagcagcattgattaatatattaaataaatac

SEQ ID NO: 175068 - DNA, 75 bp, synthetic construct
  source 1..75: mol_type = other DNA
aaagaaatgcgcaaagatggagatagcgcgttggcaacttggattaaaagaattttacgtaaagaactacaatca

SEQ ID NO: 175069 - DNA, 75 bp, synthetic construct
  source 1..75: mol_type = other DNA
atgtcaacaccacaagagaaacgttctccaccattccaaatgcgtcttaccgacgattttaggttgcaactcgaa

SEQ ID NO: 175070 - DNA, 75 bp, synthetic construct
  source 1..75: mol_type = other DNA
attattgactaaaatagatactgatgttttttttctacaatggtccgctaaaactaaaaaagaattacaaaaaaa

SEQ ID NO: 175071 - DNA, 75 bp, synthetic construct
  source 1..75: mol_type = other DNA
tgatataaaaagctttcgcgaaacaattaagagtaataaggaaaaagtaaaagaaataataagtaatctgcagag

SEQ ID NO: 175072 - DNA, 75 bp, synthetic construct
  source 1..75: mol_type = other DNA
cacaccgtcgatatagagaaaaatattcatgctatatgggtagctggttccccaccagaaagtataactgattat

SEQ ID NO: 175073 - DNA, 75 bp, synthetic construct
  source 1..75: mol_type = other DNA
tataataccagcaccttcccgcagtctgatcgcgaaatgggtaataaatcctatggtctggcatgggatatggat

SEQ ID NO: 175074 - DNA, 75 bp, synthetic construct
  source 1..75: mol_type = other DNA
tcttatgtaattaatgccgcaggaaagaaaactaaccataccatttaccataaaggtaaaggtagccttggaatt

SEQ ID NO: 175075 - DNA, 75 bp, synthetic construct
  source 1..75: mol_type = other DNA
cgggtggtttataacggtaatctggtctcttacgatagcgttccagtggcggattttaataatccactaaagatc

SEQ ID NO: 175076 - DNA, 75 bp, synthetic construct
  source 1..75: mol_type = other DNA
atccaggaaacaaaccaacgctttaaatcgttagttcaaagcggggtaaaaagtgatattgcgtacactttttac

SEQ ID NO: 175077 - DNA, 75 bp, synthetic construct
  source 1..75: mol_type = other DNA
ctcacaacttctcgacgaacaagaagccattaccgttttcgattttaaaaccaagctggagctgcaaattagcgg

SEQ ID NO: 175078 - DNA, 75 bp, synthetic construct
  source 1..75: mol_type = other DNA
gcgcgactaaaaccaccattactgaatataacaacgatggcaaaaccaaaacgcattcgttcaacctcagttttg

SEQ ID NO: 175079 - DNA, 75 bp, synthetic construct
  source 1..75: mol_type = other DNA
accaggatatcaccgggccagagtgtcacaatggccatatggatggctaaaggttggggcgttactccagacacc

SEQ ID NO: 175080 - DNA, 75 bp, synthetic construct
  source 1..75: mol_type = other DNA
cgggtatccggaagtgcagagcaggtattgtgccttgaaaacctgagtggcgtcaggaaaaaagtggagggtgag

SEQ ID NO: 175081 - DNA, 75 bp, synthetic construct
  source 1..75: mol_type = other DNA
ctatgaacaatggctgaaatataaaaaattcctgactgacggcagtaaacacattgttgtggcctctccggaaag

SEQ ID NO: 175082 - DNA, 75 bp, synthetic construct
  source 1..75: mol_type = other DNA
ggcctgatcggagcgggtttaacctacttcctttggttccgggggatctcgcgactcgaacctacagttgtttcc

SEQ ID NO: 175083 - DNA, 75 bp, synthetic construct
  source 1..75: mol_type = other DNA
gagataatctcgtttcaaaaataagcatttccagagatgcttctgatacagaaataaaacatattgaacatgcaa

SEQ ID NO: 175084 - DNA, 75 bp, synthetic construct
  source 1..75: mol_type = other DNA
aaattcctgactgatggcagtaaacacattgttgtggcctctccggaaagaggtctgctggatttctccggaaac

SEQ ID NO: 175085 - DNA, 75 bp, synthetic construct
  source 1..75: mol_type = other DNA
agaaaacctgctaccagctccttcatcgtccttaattaatatattgaaagaacattataatgaagatgaaattag

SEQ ID NO: 175086 - DNA, 75 bp, synthetic construct
  source 1..75: mol_type = other DNA
aataacatccgcaggagagatgcagttatctgaaaggcagtggcaacagcaggaacatattattgtcaagcccga

SEQ ID NO: 175087 - DNA, 75 bp, synthetic construct
  source 1..75: mol_type = other DNA
gcaacgggtatcagaagcttccagtgcccggacacaggattactggctgatggatgcagcggtaagaaacggaga

SEQ ID NO: 175088 - DNA, 75 bp, synthetic construct
  source 1..75: mol_type = other DNA
tcattatgtgatgttcaacgctggcaggctgtttatccggaagaaaataacagaccggatgccatactggacagg

SEQ ID NO: 175089 - DNA, 75 bp, synthetic construct
  source 1..75: mol_type = other DNA
atgtcacaccccgcgttaacgcaactgcgtgcgctgcgctattttgcagagatccctgcgctggaaccgcaactg

SEQ ID NO: 175090 - DNA, 75 bp, synthetic construct
  source 1..75: mol_type = other DNA
gtgatgatgactcaccttcaggtattgtaaacacagtaaaacaatggcgagccgctaacggtaagtcaggattta

SEQ ID NO: 175091 - DNA, 75 bp, synthetic construct
  source 1..75: mol_type = other DNA
acactttatgatatcggagccacccttgacggtcggcgcatcacctctcctccaacatcggagcaaatcccttct

SEQ ID NO: 175092 - DNA, 75 bp, synthetic construct
  source 1..75: mol_type = other DNA
gctatcgtgaccatagtggcgcacagaaaaatttagccaatgccaaactgggcgtacgcattgatgacgccagca

SEQ ID NO: 175093 - DNA, 75 bp, synthetic construct
  source 1..75: mol_type = other DNA
aatgagctgatctgtacgctggaagatgcgcataacgcctctgtttcgaatccgaaaaaccggattgctgaactc

SEQ ID NO: 175094 - DNA, 75 bp, synthetic construct
  source 1..75: mol_type = other DNA
tcttctgctctgagcgtctgctgcgtccgttttacattcagccgcaggaagggggtaagcctcgttttaaccgtt

SEQ ID NO: 175095 - DNA, 75 bp, synthetic construct
  source 1..75: mol_type = other DNA
gtctggcaacgccgcgcatcaatttgtctgaatcactgactagtgtgcctggtttgcaggtacaaaaccggcaga

SEQ ID NO: 175096 - DNA, 75 bp, synthetic construct
  source 1..75: mol_type = other DNA
gctatgagcgtagcctgagttcgcgggatgatatgagtgtgatgatgtatgccggagagcgagaaacgacccagt

SEQ ID NO: 175097 - DNA, 75 bp, synthetic construct
  source 1..75: mol_type = other DNA
aacgggcgatattacgaacctgcgcccgggcgaaattatggtgtcggcatgaatattgcatggcgatttgagtaa

SEQ ID NO: 175098 - DNA, 75 bp, synthetic construct
  source 1..75: mol_type = other DNA
cgtcagtactgtgaggagaacggctgtaagcgctggtacgcatttgctccgcgcgattcggcgacagaccgcgtt

SEQ ID NO: 175099 - DNA, 75 bp, synthetic construct
  source 1..75: mol_type = other DNA
gacaccgcaaatgtagtaactcagacggggcaatcgcaagccaacaggataaggacgattggcgcaactgcgact

SEQ ID NO: 175100 - DNA, 75 bp, synthetic construct
  source 1..75: mol_type = other DNA
taaccttgccgctcagggtgttctttccgcagcagcaaagggaatagggcgtggaataacggctataaaaggtga

SEQ ID NO: 175101 - DNA, 75 bp, synthetic construct
  source 1..75: mol_type = other DNA
cgtaccgacagatgagacgttaccgcgcaccgttctctgtttcagatgtgcagttacgccagttttcacctgagc

SEQ ID NO: 175102 - DNA, 75 bp, synthetic construct
  source 1..75: mol_type = other DNA
gacgaatatctggttaatgtgctgcactatttttactccgtgagcggatttgattttcttccggttatcgggcag

SEQ ID NO: 175103 - DNA, 75 bp, synthetic construct
  source 1..75: mol_type = other DNA
cacgcgcctccggcgcggggctgtcggggcggtccgacgccccttggacttgtgacaataactatcctgatgatt

SEQ ID NO: 175104 - DNA, 75 bp, synthetic construct
  source 1..75: mol_type = other DNA
gatgccagggatcgcccgtaatatgggctttgcgtcgataggttatgtaccggaagatggctggtatgcaggcac

SEQ ID NO: 175105 - DNA, 75 bp, synthetic construct
  source 1..75: mol_type = other DNA
cacaatgactctttctatggcctgcgtgaagggacggcaaaaacagcactgctatatggccatggcctgggtgcg

SEQ ID NO: 175106 - DNA, 75 bp, synthetic construct
  source 1..75: mol_type = other DNA
cgttatccggatttttataacgaagagatattcagggaggtgacagaagagagagaatcaacttttaaagaactt

SEQ ID NO: 175107 - DNA, 75 bp, synthetic construct
  source 1..75: mol_type = other DNA
aacagctttatgcgcccgagcccgcgcgttctggtttgtgtgccggttggcgcgacccaggttgaacgccgtgct

SEQ ID NO: 175108 - DNA, 75 bp, synthetic construct
  source 1..75: mol_type = other DNA
atggattcaacgcaaagtacctcgttgaaccagggagatattcgccctgagaaaatctctattcacggtgcgtcg

SEQ ID NO: 175109 - DNA, 75 bp, synthetic construct
  source 1..75: mol_type = other DNA
tggcaagaagcgcgtaaagctcgcattatcctgggtaagacaaatgcgcaatacatcagcgaatattcagattac

SEQ ID NO: 175110 - DNA, 75 bp, synthetic construct
  source 1..75: mol_type = other DNA
actggataactacgccagtgatgatgctttcggcggtagcgggtttaatgcaggcggggaatggaattttggcgt

SEQ ID NO: 175111 - DNA, 75 bp, synthetic construct
  source 1..75: mol_type = other DNA
cctttctacggcgaagctaaaagccgcacccggcagccaggctgcatactctaaccttgcgttcgatctgctggc

SEQ ID NO: 175112 - DNA, 75 bp, synthetic construct
  source 1..75: mol_type = other DNA
agacgttgatttatcagcgcgcgcagtttacgaaagtgattggcatggatgtccccggcaaagcggatgcgcttg

SEQ ID NO: 175113 - DNA, 75 bp, synthetic construct
  source 1..75: mol_type = other DNA
ttgtcgatcgttatgccgatcatattttttacggcagcggtgccacggggatggcgctggttgttatcgacggta

SEQ ID NO: 175114 - DNA, 75 bp, synthetic construct
  source 1..75: mol_type = other DNA
agcgtagctgcagtaggccatgatgcgaagcagatgctgggccgtacaccaggcaatattgctgccattcgcccg

SEQ ID NO: 175115 - DNA, 75 bp, synthetic construct
  source 1..75: mol_type = other DNA
acgatccgctaagtaaatatgctccaccaggcgcacgtgtgccgacttacaatggcacgcctattaccctggtga

SEQ ID NO: 175116 - DNA, 75 bp, synthetic construct
  source 1..75: mol_type = other DNA
gctttaaaaatatgagcgatggcatcaatgacctggtgaccgaactgagcgggaataaaccgttggtcatccccg

SEQ ID NO: 175117 - DNA, 75 bp, synthetic construct
  source 1..75: mol_type = other DNA
cgaacacccggtactgctgaaccgtgcaccgactctgcaccgtctgggtatccaggcatttgaaccggtactgat

SEQ ID NO: 175118 - DNA, 75 bp, synthetic construct
  source 1..75: mol_type = other DNA
ctagtgtccatcctaccggaaccaagaataagtatgcgggggtctacaggtgtaataaccatcttgacggtcgct

SEQ ID NO: 175119 - DNA, 75 bp, synthetic construct
  source 1..75: mol_type = other DNA
cccggatggattgaccctgagacttttaaactcaatgaacacgctgagactgtgagattgatattcaaactgctg

SEQ ID NO: 175120 - DNA, 75 bp, synthetic construct
  source 1..75: mol_type = other DNA
gggaagtcacgcaaatcaccactctgcaaggccagacggtgattgccgcacaacaagcaccgaacattctgacgc

SEQ ID NO: 175121 - DNA, 75 bp, synthetic construct
  source 1..75: mol_type = other DNA
tggctattgttccttcaagcgcttcgtcggccgcgaaagtggggaaacagtagacgagatcgccatgaacccggt

SEQ ID NO: 175122 - DNA, 75 bp, synthetic construct
  source 1..75: mol_type = other DNA
cccggatggattgaccccgatacttttaaactcaatgaacacgctgagactgtaagactgattttcaagctgctg

SEQ ID NO: 175123 - DNA, 75 bp, synthetic construct
  source 1..75: mol_type = other DNA
gattctcatcagccacacaaggtgctgaaggtgctgattcaaccagacggcaaaatgagctattcaaacagtggt

SEQ ID NO: 175124 - DNA, 75 bp, synthetic construct
  source 1..75: mol_type = other DNA
ctggcattaagagtgattacgtatcgaaaaccgtaaccgaatcgcagtctcttgcgtcaccgctggatgtaaaaa

SEQ ID NO: 175125 - DNA, 75 bp, synthetic construct
  source 1..75: mol_type = other DNA
taaatctccttgaggtcaggttaacaaccgccgaagggaagatagtcgtactgcgtagcgatgttgattacttgc

SEQ ID NO: 175126 - DNA, 75 bp, synthetic construct
  source 1..75: mol_type = other DNA
gattatccacacgatccacatcatgtatttgtttctgattttgtcgatttttcgatatatgttgatgcaccggaa

SEQ ID NO: 175127 - DNA, 75 bp, synthetic construct
  source 1..75: mol_type = other DNA
cgatccactgacgcgctacgaggggcaaatcaaggatgtactaccgacgccggaaaaggttaacgacgctatttt

SEQ ID NO: 175128 - DNA, 75 bp, synthetic construct
  source 1..75: mol_type = other DNA
cgctggcagatatgagcaccatgctggtaaaagcgcaggtttctgaagcggatgtaatccacctgaagccggggc

SEQ ID NO: 175129 - DNA, 75 bp, synthetic construct
  source 1..75: mol_type = other DNA
tggagctacgtgcgcagcggcagcaggcggaagcggagctgaaactggcgcgggtgacgtattcccgtcagcaac

SEQ ID NO: 175130 - DNA, 75 bp, synthetic construct
  source 1..75: mol_type = other DNA
taccacaacaaagagtgggctgcacggatggaacgagtagggttgatgccttcagatactggcgaaccgggaggc

SEQ ID NO: 175131 - DNA, 75 bp, synthetic construct
  source 1..75: mol_type = other DNA
gtatggaagcaattccagcagctgaatcgaaattcacacaaagatcatcaaatgccaaatacacaggccttcgtt

SEQ ID NO: 175132 - DNA, 75 bp, synthetic construct
  source 1..75: mol_type = other DNA
tccagctataaatcagaacactctcttggcaaaaaaaacagttgaccgtattatagctcacatacttcctgttta

SEQ ID NO: 175133 - DNA, 75 bp, synthetic construct
  source 1..75: mol_type = other DNA
acaatataagtagaatattacagcaccaatattcgcatagtccaacactcagaagattagttaactattacatag

SEQ ID NO: 175134 - DNA, 75 bp, synthetic construct
  source 1..75: mol_type = other DNA
ggcgcggcactaaatggggttaaagcggtcagcggcagtgcctatcgcgtgacaattccagccgtactgcaaatc

SEQ ID NO: 175135 - DNA, 75 bp, synthetic construct
  source 1..75: mol_type = other DNA
atggcggcattcctgaccagcaagcttggcggcattccggtgaaagtttcccttagccgtgaagagtgtttcctc

SEQ ID NO: 175136 - DNA, 75 bp, synthetic construct
  source 1..75: mol_type = other DNA
caaaccatttgtcggtggcggttttggtaataaacaggatgtactggaagagccaatggcggcattcctgaccag

SEQ ID NO: 175137 - DNA, 75 bp, synthetic construct
  source 1..75: mol_type = other DNA
atgagacacgtaattacataccttcggtacagttcagccatacaaggcgctgaaggtgctgattcaaccagacga

SEQ ID NO: 175138 - DNA, 75 bp, synthetic construct
  source 1..75: mol_type = other DNA
agaaaccccggtaaacaagtccaaccgcgcaaaatacacctgccctgtgtgtcatgtgaatctgtggggtaagcc

SEQ ID NO: 175139 - DNA, 75 bp, synthetic construct
  source 1..75: mol_type = other DNA
ttttggcaaggccgggagacgtggctatcacaacaaagaatgggccgcgctaatggagcgggtagggttaatgcc

SEQ ID NO: 175140 - DNA, 75 bp, synthetic construct
  source 1..75: mol_type = other DNA
gaagcgcacagagctacagaccacgattgataacatgaggcgtaaggcttcactcactgataaggaactacccca

SEQ ID NO: 175141 - DNA, 75 bp, synthetic construct
  source 1..75: mol_type = other DNA
cgctataccgaactactacgaagccgctatagatgcttcaacgttcaataaagctcaagagattcttggtaagaa

SEQ ID NO: 175142 - DNA, 75 bp, synthetic construct
  source 1..75: mol_type = other DNA
aagctaccgccctacttcttgagatggatgatattgatgaactaaaaattcagcttaaggaactgaaccagaagc

SEQ ID NO: 175143 - DNA, 75 bp, synthetic construct
  source 1..75: mol_type = other DNA
gggtgtcgatgcctatgacagacaaacctggggccgtgcaccgcaggctgaagtcttaacgccgggctataagta

SEQ ID NO: 175144 - DNA, 75 bp, synthetic construct
  source 1..75: mol_type = other DNA
aataaattagagcaactaaatactcgccgtcgcgacattgccctgcaatatcagcaagcactggcaactctccct

SEQ ID NO: 175145 - DNA, 75 bp, synthetic construct
  source 1..75: mol_type = other DNA
ccgctgttcccggatatgactaccgccgatgccgaccgtgtcatcacagcccttcagcaactcgcaggacaataa

SEQ ID NO: 175146 - DNA, 75 bp, synthetic construct
  source 1..75: mol_type = other DNA
tctctgcttgagcaactgcgttctggttctaccgaccaggctgtacgcgatcagttcaatagcatgaagaaagat

SEQ ID NO: 175147 - DNA, 75 bp, synthetic construct
  source 1..75: mol_type = other DNA
atgtcagaatttttgcctttttcgcgaccagcaatgggcgaggaggaagtcgctgcagttaaagaggttctcgaa

SEQ ID NO: 175148 - DNA, 75 bp, synthetic construct
  source 1..75: mol_type = other DNA
caatctgaccgatattaacgccgcgattgccctgacacagttagccaaattagagcacctcaacacccgtcggcg

SEQ ID NO: 175149 - DNA, 75 bp, synthetic construct
  source 1..75: mol_type = other DNA
cagcactgcggcgggcgcgggtactcgcgtttcccagtagatcttgttcggcaggcggttaatcagcttgttttt

SEQ ID NO: 175150 - DNA, 75 bp, synthetic construct
  source 1..75: mol_type = other DNA
tatggagtgcggcggatataaatttacgtttgacgactacggagaaaaacacctttgcaaaaaatgcaaggggca

SEQ ID NO: 175151 - DNA, 75 bp, synthetic construct
  source 1..75: mol_type = other DNA
tgaagacgccatagctgagctattcaaagaagaggcccgcgctgaaagcgaaattaaacgagttacacggggtga

SEQ ID NO: 175152 - DNA, 75 bp, synthetic construct
  source 1..75: mol_type = other DNA
cagcagatattgacgccattcgcgccattgctgaacgccacggtatcgcggtcattgaagatgccgcccacgccg

SEQ ID NO: 175153 - DNA, 75 bp, synthetic construct
  source 1..75: mol_type = other DNA
cggcagatattgacgccattcgcgccattggtgaacgctacgatatcgcagtcattgaagatgccgcccatgccg

SEQ ID NO: 175154 - DNA, 75 bp, synthetic construct
  source 1..75: mol_type = other DNA
tgtacgtagccctatcgcacatggttatgccgtaagtattaatgatgaacaagccagaagtttgccgggcgtact

SEQ ID NO: 175155 - DNA, 75 bp, synthetic construct
  source 1..75: mol_type = other DNA
cgccacagagcaggaaaaacgccgcgagggcaacaccacagaactgctggtgacgcaggtgccgggggagcgccc

SEQ ID NO: 175156 - DNA, 75 bp, synthetic construct
  source 1..75: mol_type = other DNA
cggtcagataacgttaaatgggcagaaaatgtcgttagaagattttgttggcatgtttgctgatgccagctctta

SEQ ID NO: 175157 - DNA, 75 bp, synthetic construct
  source 1..75: mol_type = other DNA
tcaccaccagcctgcaatatgctaacggtcagataacgttaaacgggcagaaaatgccactggaagatttcgttg

SEQ ID NO: 175158 - DNA, 75 bp, synthetic construct
  source 1..75: mol_type = other DNA
cgccgctaagctggaaaaacagtcagggtgaaagtgcgctgaatctgtcgctgttcctgaaagatccggcaacga

SEQ ID NO: 175159 - DNA, 75 bp, synthetic construct
  source 1..75: mol_type = other DNA
gctcgaatctgcgccgtcaggcagttctggaacagtttcttggtaccaacgggcaacgcattccttacattatca

SEQ ID NO: 175160 - DNA, 75 bp, synthetic construct
  source 1..75: mol_type = other DNA
ctgaacttaaagcaaaatattctacctactcgcgagcgcgccagtttaatcctgacgaaaagtgctaatcatgca

SEQ ID NO: 175161 - DNA, 75 bp, synthetic construct
  source 1..75: mol_type = other DNA
acaggtttgcagcaggcgcggcagcgtattctggcgcttgaaacggcacttagattacatgggctgattgactga

SEQ ID NO: 175162 - DNA, 75 bp, synthetic construct
  source 1..75: mol_type = other DNA
gctcaatacgctgtatcgcgtcgacggtaaaacccgactctacctgaagacattgcaaaaactggcccgtaagga

SEQ ID NO: 175163 - DNA, 75 bp, synthetic construct
  source 1..75: mol_type = other DNA
ccagttcaatagcatgaagaaagacctcggttacggtctgctgctgaaacgctatacgccaaacgtggctgatgc

SEQ ID NO: 175164 - DNA, 75 bp, synthetic construct
  source 1..75: mol_type = other DNA
gcgctctggagtttgccgttgccgtggattgcgattgaagccgggtggtttatgaccgagtttggtcgtcagccg

SEQ ID NO: 175165 - DNA, 75 bp, synthetic construct
  source 1..75: mol_type = other DNA
ttccgcgctttgagtcagaccccgaacagttgtgtgagtattgtctggcgctgatccagcttctgacggaacaga

SEQ ID NO: 175166 - DNA, 75 bp, synthetic construct
  source 1..75: mol_type = other DNA
ttccgcgctttgaaccagatgcagaacagttgtgtcagtattgcctgacgttgctccagcttctgacggaacggg

SEQ ID NO: 175167 - DNA, 75 bp, synthetic construct
  source 1..75: mol_type = other DNA
gcaattgtgtgaatattgcgaggtattactccagatcctgacggaacaggcgcagggatctaaaatggaacaacc

SEQ ID NO: 175168 - DNA, 75 bp, synthetic construct
  source 1..75: mol_type = other DNA
ctccggagcgtaatcttcacctggtgaaaaacatgctcgggcatcagaacgtatcaaccacaatgggatatgtgg

SEQ ID NO: 175169 - DNA, 75 bp, synthetic construct
  source 1..75: mol_type = other DNA
aggagaagcgttctggtggtgtgcactggcgtagttgtgcgattcgtccggcatggtactggatgattgtggtaa

SEQ ID NO: 175170 - DNA, 75 bp, synthetic construct
  source 1..75: mol_type = other DNA
aggtcgaaacggatatccgacaccttacgttaaagctgtattagagacttatcttcctaaattgctggtagctgc

SEQ ID NO: 175171 - DNA, 75 bp, synthetic construct
  source 1..75: mol_type = other DNA
gtaaacaggccgatgttcaggcatctgctgtcagtgaaaataataaggttttaggctttctccgcgaaaaaggat

SEQ ID NO: 175172 - DNA, 75 bp, synthetic construct
  source 1..75: mol_type = other DNA
gaaacccggggcggttcacagagtagcccgcagttgcgtggctggttgcagacccgccaggacttacatgctttt

SEQ ID NO: 175173 - DNA, 75 bp, synthetic construct
  source 1..75: mol_type = other DNA
gactatctttttcactacaaacgttttgttgtgcctgtgtcagaagcaaaacgcataacgggtctgccagatgag

SEQ ID NO: 175174 - DNA, 75 bp, synthetic construct
  source 1..75: mol_type = other DNA
gccggaaatattattaaatgcgttgctatcagtgaatccgttcgcggtgaaggactggcgctgacattagccact

SEQ ID NO: 175175 - DNA, 75 bp, synthetic construct
  source 1..75: mol_type = other DNA
atgttcggcaatgatattttcacccgggtaaaacgttcagaaaataaaaaaatggcagaaattgcccaatttctg

SEQ ID NO: 175176 - DNA, 75 bp, synthetic construct
  source 1..75: mol_type = other DNA
gagttaccgatatccgcttccagggtacgtcaattgctggtgaaaaacgatctcacggctatcgcgccgctggtc

SEQ ID NO: 175177 - DNA, 75 bp, synthetic construct
  source 1..75: mol_type = other DNA
cttgtgaagccgccacttgagcttgttaaaaattataccaagcaagtaagtgcaatctactcgttgattgaaaat

SEQ ID NO: 175178 - DNA, 75 bp, synthetic construct
  source 1..75: mol_type = other DNA
ccatcaactaaaacacctgatttttgggataatggagatattcactggactacacctaaagatttatccaacgtt

SEQ ID NO: 175179 - DNA, 75 bp, synthetic construct
  source 1..75: mol_type = other DNA
caaaaataaatgaaagttctaagctaaaagagttaaagaactctttattacccaagcttttatctaatgcatttg

SEQ ID NO: 175180 - DNA, 75 bp, synthetic construct
  source 1..75: mol_type = other DNA
gaatcgcctttttcatttagatctgcagagtcgcgcgctgaaagtatgaatttattagtcgcagaaaacaataga

SEQ ID NO: 175181 - DNA, 75 bp, synthetic construct
  source 1..75: mol_type = other DNA
cgagggtgaagtggtcggcggcggtgggattgcgccattaaccgggagtgagtcggacatttgcgaactgcaaaa

SEQ ID NO: 175182 - DNA, 75 bp, synthetic construct
  source 1..75: mol_type = other DNA
aggttttcaacatatcgactacgcgcttggctgtacgggccatgtggattgtgaagtgcggatgctgcgcgaact

SEQ ID NO: 175183 - DNA, 75 bp, synthetic construct
  source 1..75: mol_type = other DNA
ggtaaagggctggcgaaaaaactggctttaatggcgatggagcaggcgcgagaaatgggcttcaaacgctgctat

SEQ ID NO: 175184 - DNA, 75 bp, synthetic construct
  source 1..75: mol_type = other DNA
atcgccgcaactggcagctaattgccggggaattacaacatttcggcggcgatagcatcgctaacaaactgcgcg

SEQ ID NO: 175185 - DNA, 75 bp, synthetic construct
  source 1..75: mol_type = other DNA
gcgtgcttgggcatggtctgctacgcggtgcgggcctgggagggccggtgggtgcagcattaaatggggttaaag

SEQ ID NO: 175186 - DNA, 75 bp, synthetic construct
  source 1..75: mol_type = other DNA
gtcttaccgctgataaaggctacaccgtcgccgatccgaatcttgacgagctgtatcaagtgtatagccagcctg

SEQ ID NO: 175187 - DNA, 75 bp, synthetic construct
  source 1..75: mol_type = other DNA
ctctaaggcaatcaacgaagatgctgccggtaactacatccattatggtgttcgcgaatttggtatgaccgcgat

SEQ ID NO: 175188 - DNA, 75 bp, synthetic construct
  source 1..75: mol_type = other DNA
cgtctaccgacgcattcgacaagcaggacgctgcttaccgtgaatccgtactgccgaaagcggttactgcacgcg

SEQ ID NO: 175189 - DNA, 75 bp, synthetic construct
  source 1..75: mol_type = other DNA
tgatttcctgaaacacaacccgcagaatccgtcctgggctgaccgtgaccgctttgtgctgtccaacggccacgg

SEQ ID NO: 175190 - DNA, 75 bp, synthetic construct
  source 1..75: mol_type = other DNA
cacaccagatggtgaaaaaagtcgggctggaaggcgcagaaaaacgctacatctggcagctttccggtggtcaac

SEQ ID NO: 175191 - DNA, 75 bp, synthetic construct
  source 1..75: mol_type = other DNA
cgcccgccgctttgttgcgggagagtcgagccgcagcatcaagtccgatccacaattcatcgccatgcgcgaata

SEQ ID NO: 175192 - DNA, 75 bp, synthetic construct
  source 1..75: mol_type = other DNA
aagcgtttttccagccagggatatgttgagcccggaaaatacaatttacaggttcaactaaggaaggtgcgaata

SEQ ID NO: 175193 - DNA, 75 bp, synthetic construct
  source 1..75: mol_type = other DNA
cggagatgcaggggaaaattttttaaaaacaagagtttttattaaccctattgaaaataacaaaagtttcaaagg

SEQ ID NO: 175194 - DNA, 75 bp, synthetic construct
  source 1..75: mol_type = other DNA
taaattctggaataatatcttttgaaagtcctgtagattcaccatctaacgaggatattaaagttgcgctcgaaa

SEQ ID NO: 175195 - DNA, 75 bp, synthetic construct
  source 1..75: mol_type = other DNA
atgaggagcttctcgatattactgatgactcacctgagttagaggaaacgttgcccgcgatatcagaggacttat

SEQ ID NO: 175196 - DNA, 75 bp, synthetic construct
  source 1..75: mol_type = other DNA
ctcatgaaaagagactaaccgtaaatatgaacaatattaatcaatcagaaaatattaatattcattttaataaag

SEQ ID NO: 175197 - DNA, 75 bp, synthetic construct
  source 1..75: mol_type = other DNA
aggaacttatcaaaaaaatacctcttgatgaattagcggcgttccaaccctatgttaagatgtctttggctgatt

SEQ ID NO: 175198 - DNA, 75 bp, synthetic construct
  source 1..75: mol_type = other DNA
tttatcatcagtaaatttttctgattccagatttgatgatgctgatcttagtggctgtaacctgtcaggtgcatc

SEQ ID NO: 175199 - DNA, 75 bp, synthetic construct
  source 1..75: mol_type = other DNA
atgaggaacttctcgatattactgatgactcacctgagttagaagaaactttgcctgcgatatcagaggacttat

SEQ ID NO: 175200 - DNA, 75 bp, synthetic construct
  source 1..75: mol_type = other DNA
tggaaggtaatgaactttatagcgccactggatttaataatgaaaactatggatactataaacgttctggtgacg

SEQ ID NO: 175201 - DNA, 75 bp, synthetic construct
  source 1..75: mol_type = other DNA
tgacattatgtagaggaactattgcatctcaggctgaaaacattgtttcatatggtactgcaggaggagccgaga

SEQ ID NO: 175202 - DNA, 75 bp, synthetic construct
  source 1..75: mol_type = other DNA
aagtatggaaggtaatgaactttatagcgccactggatttaataaagaaaactatggatactacaaacgttctgg

SEQ ID NO: 175203 - DNA, 75 bp, synthetic construct
  source 1..75: mol_type = other DNA
ccaggatttaatgcattagcaggaactagcagtatactgaatcatgcagttgttgaaaaatctacggatgtatgt

SEQ ID NO: 175204 - DNA, 75 bp, synthetic construct
  source 1..75: mol_type = other DNA
tatatctaacactagaattgaataatttaagatcaaatagaaaatcaaacaaaagaaattttgaacatatattca

SEQ ID NO: 175205 - DNA, 75 bp, synthetic construct
  source 1..75: mol_type = other DNA
ggccctgtatttaaaaatatgaacgatggtgcatttttacaggctggaatatattttgaaaaacatccagaaaaa

SEQ ID NO: 175206 - DNA, 75 bp, synthetic construct
  source 1..75: mol_type = other DNA
gcgccattaaccgggagtgagtcagacatttgcgaactgcaaaagatgtattttcttccggctatccgcggcaaa

SEQ ID NO: 175207 - DNA, 75 bp, synthetic construct
  source 1..75: mol_type = other DNA
gggattgcgccattaaccgggagtgagtcagacatttgcgaactgcaaaagatgtattttcttccggctatccgc

SEQ ID NO: 175208 - DNA, 75 bp, synthetic construct
  source 1..75: mol_type = other DNA
gccacgcatattgggtggttgagtacgagggtgaagtggtcggcggcggtgggattgcgccattaaccgggagtg

SEQ ID NO: 175209 - DNA, 75 bp, synthetic construct
  source 1..75: mol_type = other DNA
ccgcgcaacgttcccctgctacttcattaaagagcagagcgttattaaccactgttataccgaaattgatctgaa

SEQ ID NO: 175210 - DNA, 75 bp, synthetic construct
  source 1..75: mol_type = other DNA
gtgcggtttttccacgctgaccagcgtacccggcgtgatggtgctgatggaaaacagcgccacgcgactgaaacg

SEQ ID NO: 175211 - DNA, 75 bp, synthetic construct
  source 1..75: mol_type = other DNA
ccgcgccacgttcccttgctacttcattaaagaacagagcgtcattaaccattgttacaccgaaattgatctgaa

SEQ ID NO: 175212 - DNA, 75 bp, synthetic construct
  source 1..75: mol_type = other DNA
ctgagcaaagctgagcttactgctgacttaatgtggttgtcagctaatcgaacgggggaagagtctgctgaacaa

SEQ ID NO: 175213 - DNA, 75 bp, synthetic construct
  source 1..75: mol_type = other DNA
tgattcaggcactgctacgggagatcggcgccggacgtccggggcttttttacccacgttgggctgggatcgttt

SEQ ID NO: 175214 - DNA, 75 bp, synthetic construct
  source 1..75: mol_type = other DNA
tgattcaggcactgctacgggagatcggcgccggacgtccggggctttttaccataagcgctaacttaagggttg

SEQ ID NO: 175215 - DNA, 75 bp, synthetic construct
  source 1..75: mol_type = other DNA
gcatggcctcgacgatgacgttgtgcctgccgacgaatcactacgtttgcagcaggccttaagcgagacgggacg

SEQ ID NO: 175216 - DNA, 75 bp, synthetic construct
  source 1..75: mol_type = other DNA
atgattgaaatagaatcacgcgagctggcagatattcccgttcttcatgcttatcctgtcgggcaaaaagatacc

SEQ ID NO: 175217 - DNA, 75 bp, synthetic construct
  source 1..75: mol_type = other DNA
atgagagatagtcttgcatttgaaaatatgaacgatggtgcatttttacaggctggaatttattttgaaaaacat

SEQ ID NO: 175218 - DNA, 75 bp, synthetic construct
  source 1..75: mol_type = other DNA
agcggcggaaatgccagtattcaaaacgtgccagcattgcggcgggcgcgggtactcgcgtttccctgtagatct

SEQ ID NO: 175219 - DNA, 75 bp, synthetic construct
  source 1..75: mol_type = other DNA
ctcccttgctacctcaatcagcgagtcggaagaattttggcaaaagaatgcgcaaatcaggcattcattacttat

SEQ ID NO: 175220 - DNA, 75 bp, synthetic construct
  source 1..75: mol_type = other DNA
tgccgaatcctccctcggcagaaagccacctgaacggttttaacaccgaccagatgctgaaacagctgggcaacc

SEQ ID NO: 175221 - DNA, 75 bp, synthetic construct
  source 1..75: mol_type = other DNA
ggcaatgaagtgacggtggtgttccaggatggcttccagctgaaaaccgtggaggaaatggcgctggagcagtca

SEQ ID NO: 175222 - DNA, 75 bp, synthetic construct
  source 1..75: mol_type = other DNA
cggtcaatgtctggacgtggcgctctcactaattccgaccttaaaggcgttctttcagcgccattcattgcttta

SEQ ID NO: 175223 - DNA, 75 bp, synthetic construct
  source 1..75: mol_type = other DNA
caagtggggggactaatatatcaaatctaagtcagcaaatattgaatgatatcaatctacttttgcctcctctta

SEQ ID NO: 175224 - DNA, 75 bp, synthetic construct
  source 1..75: mol_type = other DNA
ttgagaaaaaactcgcttgcctgagagatgagaaaaaagccctgatgcaacagctactgactggcaaacgtcgtg

SEQ ID NO: 175225 - DNA, 75 bp, synthetic construct
  source 1..75: mol_type = other DNA
ccgtaatgttattgtaatatttgctgagggattttcatctgaaattatgggtaatgccaaaccaagagcattttc

SEQ ID NO: 175226 - DNA, 75 bp, synthetic construct
  source 1..75: mol_type = other DNA
atggtacaaatatccagtttaataaaatcgacctcactaatacaactacgcatatttcaagtgaggaagcattcg

SEQ ID NO: 175227 - DNA, 75 bp, synthetic construct
  source 1..75: mol_type = other DNA
atggatgattctttattacttttgcgtgatttcagcgacctgaccagaccggagttaattgcacggttgaagcgc

SEQ ID NO: 175228 - DNA, 75 bp, synthetic construct
  source 1..75: mol_type = other DNA
gaagagagtaacccgggaagtcccgtgccgaacccgccatccgcagagagtcacctgaatggtctgaataccgac

SEQ ID NO: 175229 - DNA, 75 bp, synthetic construct
  source 1..75: mol_type = other DNA
cggtgcatcgaaagcggcacagaccctcagtgactactacatcaaacgcgctgagcagtatcacccggtgatacc

SEQ ID NO: 175230 - DNA, 75 bp, synthetic construct
  source 1..75: mol_type = other DNA
ctgatgtggacatgtccggtaacggtgagacggtggctgaacaggagcctgtgccggatatgaccggtgtggtgg

SEQ ID NO: 175231 - DNA, 75 bp, synthetic construct
  source 1..75: mol_type = other DNA
gggtaagagtttttatcctgaagtcatgcggttagatccacgaaccaccagaccgtggctactcggagtgaagtc

SEQ ID NO: 175232 - DNA, 75 bp, synthetic construct
  source 1..75: mol_type = other DNA
gcccggtcacgccggacgaactggcagaaagcctgcatgaaaaacaggaactgccgccagtacggttaaaaacac

SEQ ID NO: 175233 - DNA, 75 bp, synthetic construct
  source 1..75: mol_type = other DNA
cgccagaaaagaatgcttgttaccggatattgttgtcggagatgtaaaggccttgcactgtcaagaacatcgcgg

SEQ ID NO: 175234 - DNA, 75 bp, synthetic construct
  source 1..75: mol_type = other DNA
atttcggtgacggaaaagctgctcgccaatagtcagcagcagaaaaaagccctgatgcagcaattagttaccggg

SEQ ID NO: 175235 - DNA, 75 bp, synthetic construct
  source 1..75: mol_type = other DNA
tttgcccgcactgccggctttgcggtgtcgctggatggtgccggcatacataccactggtgttgtacgttgcgat

SEQ ID NO: 175236 - DNA, 75 bp, synthetic construct
  source 1..75: mol_type = other DNA
tgttacgtcgcactacgtaaaacagcgcaggcgaagcaagaaaactgggagcgccatgctaagcgcagtcgttga

SEQ ID NO: 175237 - DNA, 75 bp, synthetic construct
  source 1..75: mol_type = other DNA
ccgctgtggtttatcgcgctggggctgggctggctgtttattggtaagaagcgggctgctgaactgcggaaataa

SEQ ID NO: 175238 - DNA, 75 bp, synthetic construct
  source 1..75: mol_type = other DNA
aaaatcgctatgacattctttgacgctgccggaacgcccgccagtttgctgggtaagagcttttaccctgaagtg

SEQ ID NO: 175239 - DNA, 75 bp, synthetic construct
  source 1..75: mol_type = other DNA
gcggcgggaagcgtcattgcctggtattttgactttggttttgcgggcttcgtgatcgcctggtacgcctcgaat

SEQ ID NO: 175240 - DNA, 75 bp, synthetic construct
  source 1..75: mol_type = other DNA
tcgttaattccaactttaaaggcattttttcagcgtcattccttgctttataacgcagccggggtaatgactcca

SEQ ID NO: 175241 - DNA, 75 bp, synthetic construct
  source 1..75: mol_type = other DNA
gaatggggtgaggtttagtgtggagtggaagagagtaaaactgggtgcgatagccgatatgaacagtggaggtac

SEQ ID NO: 175242 - DNA, 75 bp, synthetic construct
  source 1..75: mol_type = other DNA
agcgagtagctagcgaagatgttagtacgtacaaaatagtgaaaaaaaatcagtatggctataacccctctcgtt

SEQ ID NO: 175243 - DNA, 75 bp, synthetic construct
  source 1..75: mol_type = other DNA
ttttgatagcacaaactattgcatcgttagcttacgttattttgttgtttatgttttgtcatctgtttggcgtaa

SEQ ID NO: 175244 - DNA, 75 bp, synthetic construct
  source 1..75: mol_type = other DNA
ggaaggtcactacatcagcgagaaacgttttttgctggaagcgcaagtctgtcagcaagattgccagaaacgcat

SEQ ID NO: 175245 - DNA, 75 bp, synthetic construct
  source 1..75: mol_type = other DNA
gaatctgattcatcctaaagattacagttatttcaacacattaagcaccaagctcggctggtcaaaaaaattatt

SEQ ID NO: 175246 - DNA, 75 bp, synthetic construct
  source 1..75: mol_type = other DNA
ggggattatttcacgctcacagatgattttgagtctttagagcctcataagatgaatggcaatgaaattgtgcat

SEQ ID NO: 175247 - DNA, 75 bp, synthetic construct
  source 1..75: mol_type = other DNA
ctcggcaggcggtccaatcctgacgccttctctggatgcaattaccctcgtgcccatgttcccgcatacgttgtc

SEQ ID NO: 175248 - DNA, 75 bp, synthetic construct
  source 1..75: mol_type = other DNA
aatcgctcacgaactgcaactgaagaatgtgaaaactggcacgctcgcggagattgggcaactggctgatctcgc

SEQ ID NO: 175249 - DNA, 75 bp, synthetic construct
  source 1..75: mol_type = other DNA
aatgtgaaaactggcacgctcgcggagattgggcaacaggctgatctcgcggttgtcgttggcggcgacggtaat

SEQ ID NO: 175250 - DNA, 75 bp, synthetic construct
  source 1..75: mol_type = other DNA
cggataactttggcgtggagcctcaatacccggttgcgttccgggcatgggcgaaggttatccagaccagtgcca

SEQ ID NO: 175251 - DNA, 75 bp, synthetic construct
  source 1..75: mol_type = other DNA
atcgtccggcaatccgccgtatcgcactgatatttatcgtactgattgtactcaacgaaatcgtgccggaggtat

SEQ ID NO: 175252 - DNA, 75 bp, synthetic construct
  source 1..75: mol_type = other DNA
ctggagtgtacggaactgggtgccgaagaacaaatgggaggacgcagtggagcagacagcatttttacacgttga

SEQ ID NO: 175253 - DNA, 75 bp, synthetic construct
  source 1..75: mol_type = other DNA
gatagctcatgttttaaaactcactcgaaaaggtgactctcagagggatttaatcagtgcgggcttaaaactgaa

SEQ ID NO: 175254 - DNA, 75 bp, synthetic construct
  source 1..75: mol_type = other DNA
atgtttttattttttcactctgaacaaactgaaaaaaacaccagttattacaaggggttactttttgaagagttg

SEQ ID NO: 175255 - DNA, 75 bp, synthetic construct
  source 1..75: mol_type = other DNA
ccagagaggacggtcgctggcaacctgaaggatgtcggtggttctgcacgctgggaacttcagacacgcaacccg

SEQ ID NO: 175256 - DNA, 75 bp, synthetic construct
  source 1..75: mol_type = other DNA
catacgaaagagtaccatgatttatggaatagatgctctggcaaggttgctcaaatgtcgaggcttgggcatgtc

SEQ ID NO: 175257 - DNA, 75 bp, synthetic construct
  source 1..75: mol_type = other DNA
aagcgtcgtcagaggtggttaggcagtcagacctggccctgttgacagatgtacaggcagcccttcagcaggaaa

SEQ ID NO: 175258 - DNA, 75 bp, synthetic construct
  source 1..75: mol_type = other DNA
aagcagagtaaggctctgctggacagggaaatagcaatgacacgaccaattgtacgtgaaggggcgatgtcagaa

SEQ ID NO: 175259 - DNA, 75 bp, synthetic construct
  source 1..75: mol_type = other DNA
tatggtggtcttgacggcgtggtgacactggtaagtccggatactttacgtgaccagaaacgtccgggagattta

SEQ ID NO: 175260 - DNA, 75 bp, synthetic construct
  source 1..75: mol_type = other DNA
tgccccgtctgcagcggcaaactgaaaccgctgggagaaagcatctctgtaagcgtcgtctcagcaccgtctggc

SEQ ID NO: 175261 - DNA, 75 bp, synthetic construct
  source 1..75: mol_type = other DNA
ggttatctccccggcagaaaccgaatgccccgtctgcagcggcaaactgaaaccgctgggagaaagcatctctga

SEQ ID NO: 175262 - DNA, 75 bp, synthetic construct
  source 1..75: mol_type = other DNA
ggatgagaaacagaataaatacctgacggaagctggagctgaactagtgaagacagaagcagagcttgcacaggc

SEQ ID NO: 175263 - DNA, 75 bp, synthetic construct
  source 1..75: mol_type = other DNA
gatttttctgctggtactggtagtgacgtttattatctgggcatggaacagccctctggatgaagtgacccgtgg

SEQ ID NO: 175264 - DNA, 75 bp, synthetic construct
  source 1..75: mol_type = other DNA
cgaagtcgaaaactataacaatgtcgtgaaaacccccgcgccggactggctggcgggctactggcagaccaaagg

SEQ ID NO: 175265 - DNA, 75 bp, synthetic construct
  source 1..75: mol_type = other DNA
caggcggttgaattgagggcgattctttctgagataatgccagtttatgatgattacaagatatctaaattaaag

SEQ ID NO: 175266 - DNA, 75 bp, synthetic construct
  source 1..75: mol_type = other DNA
atgacagaaaaaacggaacggaataaagcgtcgtcagaggtggtcaggcagtcagacctggccctgttgacagat

SEQ ID NO: 175267 - DNA, 75 bp, synthetic construct
  source 1..75: mol_type = other DNA
gcaatctgtaccaaaaactcggtgtcgcccaccgtcaggccgcggtacaacacgcgcagaaactgctgaagatga

SEQ ID NO: 175268 - DNA, 75 bp, synthetic construct
  source 1..75: mol_type = other DNA
gcgtggatataaaaacaggtcagaaaagtgtatttcagtacctgattaaaccaatcaccagaatgaaacaagctc

SEQ ID NO: 175269 - DNA, 75 bp, synthetic construct
  source 1..75: mol_type = other DNA
ggtgccgctctatccctactgctgtaacccggacgatgtgatgttcgctcaggagtcgatgcgcgaacgctacgt

SEQ ID NO: 175270 - DNA, 75 bp, synthetic construct
  source 1..75: mol_type = other DNA
actggcgtgcaccgctgttcggttactgctgctccggcgtggtttataccgagcatgacaacccggaagagacga

SEQ ID NO: 175271 - DNA, 75 bp, synthetic construct
  source 1..75: mol_type = other DNA
gatttcttcctcgcagtcctcatcggtaatcttctcctcggtatttacacttcatttcttggttacattggcgca

SEQ ID NO: 175272 - DNA, 75 bp, synthetic construct
  source 1..75: mol_type = other DNA
acatcgctggcatggatggaggatgactctcgaattaccatcgtttccagcacccagatcccgcacattgttcgc

SEQ ID NO: 175273 - DNA, 75 bp, synthetic construct
  source 1..75: mol_type = other DNA
tgtacgtagccctatcgcacatggttatgccgtaagtattaatgatgaacaagccagaagtttaccaggcgtact

SEQ ID NO: 175274 - DNA, 75 bp, synthetic construct
  source 1..75: mol_type = other DNA
tgccattgctaaggtcaccgggcgggcacgatatactgacgattatgttatggcgggcatgtgttacgcgaatta

SEQ ID NO: 175275 - DNA, 75 bp, synthetic construct
  source 1..75: mol_type = other DNA
gaagtcgacaatacggcgacctggcgttgggagaacatggacatcgcgcgcgtacagggcgcagaacacacgggg

SEQ ID NO: 175276 - DNA, 75 bp, synthetic construct
  source 1..75: mol_type = other DNA
gcagagaatggctgctgcacatgcctgggtgtggttggatgtgaagaagtcacaggacgcgggaacgaaacaaaa

SEQ ID NO: 175277 - DNA, 75 bp, synthetic construct
  source 1..75: mol_type = other DNA
aacataaaaagctgattacgttttctgactcggtacaagacgccgcgcatcgtgccagcttctttactgcccgta

SEQ ID NO: 175278 - DNA, 75 bp, synthetic construct
  source 1..75: mol_type = other DNA
ttattacaagcaaagaaaatcgtgttgaactaatatcaaatagtagtgatagtgaattaataaaacttgctgaat

SEQ ID NO: 175279 - DNA, 75 bp, synthetic construct
  source 1..75: mol_type = other DNA
ggacagctttctgcagaaagctccatcaaaaccaccacgaacccaccagcgtttggctgtacctttgttgatctg

SEQ ID NO: 175280 - DNA, 75 bp, synthetic construct
  source 1..75: mol_type = other DNA
caaccaaccgtggaatatcaacctgttgtcggcaacaccgacgctggagatgggtattgacgttggggatctttc

SEQ ID NO: 175281 - DNA, 75 bp, synthetic construct
  source 1..75: mol_type = other DNA
ttattggtgtctacccatctggtactcatcatggacaagatagtccaaatgaaaaatattttgatggtagcaacc

SEQ ID NO: 175282 - DNA, 75 bp, synthetic construct
  source 1..75: mol_type = other DNA
ggtaataaacaggatgtactggaagagccaatggcggcattcctgaccagcaaacttggcggcattccggtgaaa

SEQ ID NO: 175283 - DNA, 75 bp, synthetic construct
  source 1..75: mol_type = other DNA
caaaccgtttatcggtggcggttttggtaataaacaggatgtactggaagagccaatggcggcattcctgaccag

SEQ ID NO: 175284 - DNA, 75 bp, synthetic construct
  source 1..75: mol_type = other DNA
accccgctgtggtttatcgcactggggctgggctggttgtttattggtaagaagcgggctgctgaactgcggaaa

SEQ ID NO: 175285 - DNA, 75 bp, synthetic construct
  source 1..75: mol_type = other DNA
cggataaagcagccagtgaagcggcggaaatgccagtgttcaaaacgtgccagcactgcggcgggcgcgggtact

SEQ ID NO: 175286 - DNA, 75 bp, synthetic construct
  source 1..75: mol_type = other DNA
agagtgcggcgaccgaaaaagtttgccctaagtgcggcggccacgggcatttaccaaatccatattgcaaataca

SEQ ID NO: 175287 - DNA, 75 bp, synthetic construct
  source 1..75: mol_type = other DNA
ctttcgaggtttaagaggtcagttaacttctggttatcaatttcgggatggttttactgatactggtacaggtat

SEQ ID NO: 175288 - DNA, 75 bp, synthetic construct
  source 1..75: mol_type = other DNA
agtacccgcgaaagggctgaccttctcctgcatctgcctgctcggcggcgtggtgatgctgtatgtgaatcccag

SEQ ID NO: 175289 - DNA, 75 bp, synthetic construct
  source 1..75: mol_type = other DNA
ccgctgtggtttatcgcgctggggttgggctggttgtttattggtaagaagcgggctgctgaactgcggaaataa

SEQ ID NO: 175290 - DNA, 75 bp, synthetic construct
  source 1..75: mol_type = other DNA
tcaatgagccgcaatccgcatacggacataagtcactgggtgagccacccataattcctgttgccgctgctattc

SEQ ID NO: 175291 - DNA, 75 bp, synthetic construct
  source 1..75: mol_type = other DNA
cgctggaagatgatacccgccaggcgctgctggtgaccccgctgtggtttatcgcgctggggctgggctggttgt

SEQ ID NO: 175292 - DNA, 75 bp, synthetic construct
  source 1..75: mol_type = other DNA
gccggattccagatagcggttttcgctttcgtggggattgagctggtaggtacaacagctgcggaaaccaaagat

SEQ ID NO: 175293 - DNA, 75 bp, synthetic construct
  source 1..75: mol_type = other DNA
gctcagttctggttccccgatctctccgactgggtcgcctcgctggcggtgatagtgctgctgctgacgctcaac

SEQ ID NO: 175294 - DNA, 75 bp, synthetic construct
  source 1..75: mol_type = other DNA
cgttcgctaaactctctaagcgcgcagtacccgcgaaagggttgaccttctcttgtatctgtctgctcggcggcg

SEQ ID NO: 175295 - DNA, 75 bp, synthetic construct
  source 1..75: mol_type = other DNA
gacaattcaccaaacttggccttgaaattgacggcgaacgcgtccagcgcgcctactcttacgttaattctcccg

SEQ ID NO: 175296 - DNA, 75 bp, synthetic construct
  source 1..75: mol_type = other DNA
tatttgccactgatgcaggaactggaaaaacgctacgaaggaaaactgcgcattcagacggtggtcagtcgggaa

SEQ ID NO: 175297 - DNA, 75 bp, synthetic construct
  source 1..75: mol_type = other DNA
acacccgccaggcgctgctggttaccccgctgtggtttatcgcgctggggctgggctggctgtttattggtaaaa

SEQ ID NO: 175298 - DNA, 75 bp, synthetic construct
  source 1..75: mol_type = other DNA
ttgaactgttcgtgttggtggggctgcctgctgccgcaagtgtgatcaactttgtggtactgacctctgcggcgt

SEQ ID NO: 175299 - DNA, 75 bp, synthetic construct
  source 1..75: mol_type = other DNA
ggctggttcccgaaaggcttaagtggcttctttgccggattccagatagcggttttcgctttcgtggggattgag

SEQ ID NO: 175300 - DNA, 75 bp, synthetic construct
  source 1..75: mol_type = other DNA
tgtacgcgcgcctacggaaccttctgcgggcggagaagtaaaaaacccggaacaactgaccccggaacaacgcca

SEQ ID NO: 175301 - DNA, 75 bp, synthetic construct
  source 1..75: mol_type = other DNA
atgcctgcggtttctcccgcaatggtcgctattgctgccgccgtccttgtgacctttatcggtggtctgtacttc

SEQ ID NO: 175302 - DNA, 75 bp, synthetic construct
  source 1..75: mol_type = other DNA
cttcattacgcatcacaagaaagaagtgtccgagacgctgcaaagccagaaagtgaccggaaacggactaccacc

SEQ ID NO: 175303 - DNA, 75 bp, synthetic construct
  source 1..75: mol_type = other DNA
tatttgccactgatgcaagaactggaaaaacgctacgaagggaaactgcgcattcagacggtggtcagtcgggaa

SEQ ID NO: 175304 - DNA, 75 bp, synthetic construct
  source 1..75: mol_type = other DNA
cgaagcagctggcttctttgtgctggatgaagtcccggattgtgaaacactgtggatgctggcgaccggtacggc

SEQ ID NO: 175305 - DNA, 75 bp, synthetic construct
  source 1..75: mol_type = other DNA
tgtcgctggatggtgttggcatacgtaccacaggtgttgtgcgttgcgatcaaccccggacaattgatatgaaag

SEQ ID NO: 175306 - DNA, 75 bp, synthetic construct
  source 1..75: mol_type = other DNA
cgtataaccagatagcgattgttaacccgcagctcaagccggaacgcgcgcgcggggtggatttaacctggaatg

SEQ ID NO: 175307 - DNA, 75 bp, synthetic construct
  source 1..75: mol_type = other DNA
acaataacgtctcgatgctggagcaatttctggcccagccggaaacgctgctgaaagggccgtatctttccgccc

SEQ ID NO: 175308 - DNA, 75 bp, synthetic construct
  source 1..75: mol_type = other DNA
ccgtgctagaagaggtgagtttaataagatgaaaagatgtttgaatgttatgtttaacttcaaacgaaataaagg

SEQ ID NO: 175309 - DNA, 75 bp, synthetic construct
  source 1..75: mol_type = other DNA
ctcagcagtcgcgtacgactgaacaaagctggcagcagcagacgcgtacgtcgcaagccgcaccggtacaggcgc

SEQ ID NO: 175310 - DNA, 75 bp, synthetic construct
  source 1..75: mol_type = other DNA
ctcacgcatcgataaactcaagcgcagtatcgataaactggagaacgcgccgcgcgatcaaaactttgacagcga

SEQ ID NO: 175311 - DNA, 75 bp, synthetic construct
  source 1..75: mol_type = other DNA
gggtatcgagatgcctcaaccgacgctggtggcgaccgggacgggttctggtaaaacggaatgttttatgttccc

SEQ ID NO: 175312 - DNA, 75 bp, synthetic construct
  source 1..75: mol_type = other DNA
gatcttgccgcagaaactcgccaacagctgttgtcttatcttcagggcgcgccaggacaacgctcgctggtgcag

SEQ ID NO: 175313 - DNA, 75 bp, synthetic construct
  source 1..75: mol_type = other DNA
ttgttgataaagcgatttcactctataccgaatcattcggcgacccggcccatgaacccattattctgatcatgg

SEQ ID NO: 175314 - DNA, 75 bp, synthetic construct
  source 1..75: mol_type = other DNA
accagatgggtggggctattaacatcaccacgcaaaaaccgactaaaccactggaagccagtctgggataccgtc

SEQ ID NO: 175315 - DNA, 75 bp, synthetic construct
  source 1..75: mol_type = other DNA
ctatttcgacggcgtccccatttatgttccctatgatggtaacctcgatctggcgcggattttaaccaacaatct

SEQ ID NO: 175316 - DNA, 75 bp, synthetic construct
  source 1..75: mol_type = other DNA
gctgattattcatggtaaagggcgggatgataaatcgcatgccaatattgtccgcagctatgtggcgcgctggct

SEQ ID NO: 175317 - DNA, 75 bp, synthetic construct
  source 1..75: mol_type = other DNA
cactggcatccaacgcgtaaccaacgtgcgccgcagcgtatcgacacgctgcaacttgataatttcctcaccacc

SEQ ID NO: 175318 - DNA, 75 bp, synthetic construct
  source 1..75: mol_type = other DNA
cgcagcggtggtaacggcgcagtggcggttttcatggcttgttatgactgtttttttgtacagtctatgcctcgg

SEQ ID NO: 175319 - DNA, 75 bp, synthetic construct
  source 1..75: mol_type = other DNA
aaagttgctgcggttaaagctccgggcttcggcgatcgtcgtaaagctatgctgcaggatatcgcaaccctgact

SEQ ID NO: 175320 - DNA, 75 bp, synthetic construct
  source 1..75: mol_type = other DNA
tgccgaagcgaaaacgggtaaatcactccccgcgaaatgttgcctggcattcaactggaaagcccgaaaatcacc

SEQ ID NO: 175321 - DNA, 75 bp, synthetic construct
  source 1..75: mol_type = other DNA
atgtcgcgcgtcaatcatctatcttcgctttcgttattggcggttctggttttagcagggtgtagtagtcaggct

SEQ ID NO: 175322 - DNA, 75 bp, synthetic construct
  source 1..75: mol_type = other DNA
atatcccggatattgatacgcttcgacggatggctgcagagttgaatgtgccgttaaactactttttttgtgatg

SEQ ID NO: 175323 - DNA, 75 bp, synthetic construct
  source 1..75: mol_type = other DNA
atgtccccgatattgatacacttcgaaggatggcggcagagttaaacgtgccgttgaactactttttttgtgatg

SEQ ID NO: 175324 - DNA, 75 bp, synthetic construct
  source 1..75: mol_type = other DNA
accgacctgccgaaaaacgatgcagctgacttaggcgctgctggcggtatgggcggcatgggtggcatgggcggc

SEQ ID NO: 175325 - DNA, 75 bp, synthetic construct
  source 1..75: mol_type = other DNA
gatcgaccactatttttcgcaagcagatatcatcctgatcctgatcagcagtgacttcattgctgctgattactg

SEQ ID NO: 175326 - DNA, 75 bp, synthetic construct
  source 1..75: mol_type = other DNA
tagaagcttttaatgaagattggacagaagattccaagaataaccagaaaattgcagaagccgatattatagtaa

SEQ ID NO: 175327 - DNA, 75 bp, synthetic construct
  source 1..75: mol_type = other DNA
ccgttctgacgattcttggttaacaggccgtgagcataacaaaacttacaagaaaatctctgaacataaagtagc

SEQ ID NO: 175328 - DNA, 75 bp, synthetic construct
  source 1..75: mol_type = other DNA
gcgccgatataccgttttgccgattttaacgctggctggtacgccagccgtaatgccgcttttcagaacgcggtc

SEQ ID NO: 175329 - DNA, 75 bp, synthetic construct
  source 1..75: mol_type = other DNA
agcaaagccagcggcgtgaaactggcgctggatggggatttgattcgctatgacagcaaagaacccggtaaaaca

SEQ ID NO: 175330 - DNA, 75 bp, synthetic construct
  source 1..75: mol_type = other DNA
atcacccgtaaccttaccaccgcatggtttgcgaagcgcgttgatgaacgacgggcgcgttgtatgaaacagtga

SEQ ID NO: 175331 - DNA, 75 bp, synthetic construct
  source 1..75: mol_type = other DNA
gcatttgagcgagcgactttcgagcagggtaaatcgacgaaacttatgatgctgaccgataagcaaatcgccgat

SEQ ID NO: 175332 - DNA, 75 bp, synthetic construct
  source 1..75: mol_type = other DNA
gcccttcttaaacttggtattttcgggggcagcagtgacttctgcatttgcactggtaatgactgtttttcttat

SEQ ID NO: 175333 - DNA, 75 bp, synthetic construct
  source 1..75: mol_type = other DNA
atacgtctgaaggtttttttgaaattggtgtcactatcagtaatcctgtatttactgaagaggccattaacaaaa

SEQ ID NO: 175334 - DNA, 75 bp, synthetic construct
  source 1..75: mol_type = other DNA
tattcatcgttgatcttcaccccgcgcggtggcggcaccggcactaacggtcaggcgctcaaccaggggattatt

SEQ ID NO: 175335 - DNA, 75 bp, synthetic construct
  source 1..75: mol_type = other DNA
agtgaatccagattaaacatctcattgctgatgcttgaagttgagcatatggcgcgcggtaaggggctgcgttga

SEQ ID NO: 175336 - DNA, 75 bp, synthetic construct
  source 1..75: mol_type = other DNA
atgaaacgtgtaaaaacatttatgctgatatcattattgacggcttcattttatagcagcgcaggtattccggtt

SEQ ID NO: 175337 - DNA, 75 bp, synthetic construct
  source 1..75: mol_type = other DNA
gagttatgcgccgctgatggcgcgagcgccgaagacgtttaacttcttcattaaccaaccgctggtgcgcaaact

SEQ ID NO: 175338 - DNA, 75 bp, synthetic construct
  source 1..75: mol_type = other DNA
ctcattcgcgtaccggttaagtctcatactaaccatgggcgtaatgcagaatattatgcctgggtacaagaacat

SEQ ID NO: 175339 - DNA, 75 bp, synthetic construct
  source 1..75: mol_type = other DNA
gtacgtagcaacgtgcatttcttttccgggaggaatgacgtgtctgaattaatggcagcggcagatctcttactg

SEQ ID NO: 175340 - DNA, 75 bp, synthetic construct
  source 1..75: mol_type = other DNA
cgttaactcagtcgccattgcgaatggcctgggcggagaatgctcgccattatgccgatactcaggatttgtata

SEQ ID NO: 175341 - DNA, 75 bp, synthetic construct
  source 1..75: mol_type = other DNA
tataaagatcccagctataacgatgactttggtattgaaacaccatcggcgctggataacttcacccaggctatt

SEQ ID NO: 175342 - DNA, 75 bp, synthetic construct
  source 1..75: mol_type = other DNA
ttccagaagcattatcaaactgaacctgaacgttttcaaattcttcctcccggtatttatccggacagaaaatac

SEQ ID NO: 175343 - DNA, 75 bp, synthetic construct
  source 1..75: mol_type = other DNA
caaacgttaatacgtctgaaggttgttttgatattggtgttctgctcagtaaccgggagtttacggaagatgcca

SEQ ID NO: 175344 - DNA, 75 bp, synthetic construct
  source 1..75: mol_type = other DNA
gctggattaccgctgtaacctggcgctggcgatgctggaatataaccgcgccgatttcccgcaagcggtggcgta

SEQ ID NO: 175345 - DNA, 75 bp, synthetic construct
  source 1..75: mol_type = other DNA
tgccataactgaagtttatgtctgttatgagcgagaagcggaagttcaacgtgataaagctcaggaacattgtcg

SEQ ID NO: 175346 - DNA, 75 bp, synthetic construct
  source 1..75: mol_type = other DNA
ggcatcagaaggactatgtgcttgatatgagatcaaaaaaatatcagaagcatcacaactccaatggcattcaaa

SEQ ID NO: 175347 - DNA, 75 bp, synthetic construct
  source 1..75: mol_type = other DNA
ccgttatgtgaagtcagtgcaccagaacctgatgcgggtgggaaacgcattgtggcatatgtttataaatcatca

SEQ ID NO: 175348 - DNA, 75 bp, synthetic construct
  source 1..75: mol_type = other DNA
gcggcggtggcactggtactaatggtcaggcgctcaatcaggggattattgttgatatgtcccgccatatgaacc

SEQ ID NO: 175349 - DNA, 75 bp, synthetic construct
  source 1..75: mol_type = other DNA
gtggaatttgctggtgatgatgaggcgctgattgacgagcgggtaaatgcactctgtgcgcggctggacgaactt

SEQ ID NO: 175350 - DNA, 75 bp, synthetic construct
  source 1..75: mol_type = other DNA
atgaatagtctgctgccaccaggttcaacgccactggagcgccgactggcgcagacctgtagcgggatttctgat

SEQ ID NO: 175351 - DNA, 75 bp, synthetic construct
  source 1..75: mol_type = other DNA
atgagtaacaacacgcttctgccgcctggctcatctgcccttgagcgtcgcctggctctgacctgcagcggcatt

SEQ ID NO: 175352 - DNA, 75 bp, synthetic construct
  source 1..75: mol_type = other DNA
cgggtagtgcaggatgctttctatattcatcagcacaaagggacgctcagcgccgttcgtcgcgtggttgagccg

SEQ ID NO: 175353 - DNA, 75 bp, synthetic construct
  source 1..75: mol_type = other DNA
ttgcaggtgccgctacgtgacttgtggaatccagctacctgtccggtcagtttcctgccttatctcgcctgggcg

SEQ ID NO: 175354 - DNA, 75 bp, synthetic construct
  source 1..75: mol_type = other DNA
caacttcactggagcgccgactggcgcaaacctgcagcgggatttctgatttgcaggtgccgctgcgtgacttgt

SEQ ID NO: 175355 - DNA, 75 bp, synthetic construct
  source 1..75: mol_type = other DNA
gcagacctgtagcgggatttctgatctgcaggtgccgctgcgtgacttatggaatccggcaacctgtccggtcag

SEQ ID NO: 175356 - DNA, 75 bp, synthetic construct
  source 1..75: mol_type = other DNA
attacttcagatgaaaattggctgggaatgttacgtcaaaggtaatgagttatctcctgcgccagaatttgctct

SEQ ID NO: 175357 - DNA, 75 bp, synthetic construct
  source 1..75: mol_type = other DNA
attgcggccatgaagaatgcgtcatcttttattaccgatccgacattaaaaaaagtcctgaaagagaatgcgggg

SEQ ID NO: 175358 - DNA, 75 bp, synthetic construct
  source 1..75: mol_type = other DNA
tcgaaagggtgaagggctggtctgtattatttgtgaaacatgaagacgatccgtcagtaaaggaagagacagaaa

SEQ ID NO: 175359 - DNA, 75 bp, synthetic construct
  source 1..75: mol_type = other DNA
tcgaaagggtgaagggctggtcagtgctgtttgtgaaacatgaagacgatccgtcagtaaaagaagaggcagaaa

SEQ ID NO: 175360 - DNA, 75 bp, synthetic construct
  source 1..75: mol_type = other DNA
tctgacacacaaaaagaattaattaactggttggaaaaccaaaaaatattgccattagaatcggatgaaagtaat

SEQ ID NO: 175361 - DNA, 75 bp, synthetic construct
  source 1..75: mol_type = other DNA
cggcgttgaatgcggcatatcaatcaagattgattccgaatgggtaaccaaatgggatgctgctgaaaacacgca

SEQ ID NO: 175362 - DNA, 75 bp, synthetic construct
  source 1..75: mol_type = other DNA
ttacagtaattcaagggattcgttgctgactaacgaaggcatggcagaacatctatgggatatgttctttagccc

SEQ ID NO: 175363 - DNA, 75 bp, synthetic construct
  source 1..75: mol_type = other DNA
caactgttcagggcccgcgggaaagtgaatgtggtgacgggctggcgaggcctgttttccggggaggctgcagac

SEQ ID NO: 175364 - DNA, 75 bp, synthetic construct
  source 1..75: mol_type = other DNA
atccggcactgaaaaaagtgttacgcgaaaatgcggggctgggcactgaagcgacccgcgcagaaatactggaaa

SEQ ID NO: 175365 - DNA, 75 bp, synthetic construct
  source 1..75: mol_type = other DNA
cactgttcacccgtaaatatattgagaaacagggtaagcatatccgggcaacacaactgggggcagagttgattg

SEQ ID NO: 175366 - DNA, 75 bp, synthetic construct
  source 1..75: mol_type = other DNA
cagaatgtgctggcgcaattgcagccggcgcgaatttcccgggtctggaatgatgcaaaaattaccgctcaccat

SEQ ID NO: 175367 - DNA, 75 bp, synthetic construct
  source 1..75: mol_type = other DNA
tattcctgaacagtggaaaatggtggttaaaaaagatgcagtttcgttgtttcggaccataaaacagttactcag

SEQ ID NO: 175368 - DNA, 75 bp, synthetic construct
  source 1..75: mol_type = other DNA
gaagagcgggaagcatatccggtcaacgcaacggggcagggagctgacggccgccctgccggaagccctgaccag

SEQ ID NO: 175369 - DNA, 75 bp, synthetic construct
  source 1..75: mol_type = other DNA
tatgccattccgtatacgttatatgcgcttgcagccgggtttcttgttacattttttttgtccccaatgtacgaa

SEQ ID NO: 175370 - DNA, 75 bp, synthetic construct
  source 1..75: mol_type = other DNA
ttcagtgcctgtattgattcgtggaaagctgacccggaattaaataacgtgcgtgatatgtggaacatcctgatg

SEQ ID NO: 175371 - DNA, 75 bp, synthetic construct
  source 1..75: mol_type = other DNA
gaaataatatttaggggtgtccggatattcctgctgaaacgccgtatgcgccgggagaacgaattaagggagggc

SEQ ID NO: 175372 - DNA, 75 bp, synthetic construct
  source 1..75: mol_type = other DNA
ctggttttggtgcttcagctaaagagtctatgggtattcaaggttctgaagaactttttaaaagtatgattggct

SEQ ID NO: 175373 - DNA, 75 bp, synthetic construct
  source 1..75: mol_type = other DNA
gcttttaaacagtttaggtggaagcggtaagagtcttggtgaatctcttggtagtctcatgacttctatgtcaag

SEQ ID NO: 175374 - DNA, 75 bp, synthetic construct
  source 1..75: mol_type = other DNA
atgtatgcaattccgtatacgttatatgcgcttgcagcagggtttcttgttacatattttctgtccacaatgtat

SEQ ID NO: 175375 - DNA, 75 bp, synthetic construct
  source 1..75: mol_type = other DNA
atgatcctaaatttgtggcattgggcgagcgccttgaaaaactgcgtcaggactatgaagctggtgttatcaagg

SEQ ID NO: 175376 - DNA, 75 bp, synthetic construct
  source 1..75: mol_type = other DNA
actcttcttcaggccatgtgccgaaccaaccggttgtatgaaaccgatgatgcacgaaaagacatgggattaatt

SEQ ID NO: 175377 - DNA, 75 bp, synthetic construct
  source 1..75: mol_type = other DNA
gagtggatcgtgatgccatcaatgaagagttcgagcaactggctaccgaaaacaacctggatgaagaagaaaaag

SEQ ID NO: 175378 - DNA, 75 bp, synthetic construct
  source 1..75: mol_type = other DNA
cagaaccgggaatcaaacaaattgaaagggagattgaacgtggttgtgataatgcaaaaaaatacttctggcttt

SEQ ID NO: 175379 - DNA, 75 bp, synthetic construct
  source 1..75: mol_type = other DNA
gtgttgatcgtcggcaagccgctaatttcgctggtgtttggcgttaagtatctcgaagcgtatgacctgattcag

SEQ ID NO: 175380 - DNA, 75 bp, synthetic construct
  source 1..75: mol_type = other DNA
ccctgacggctaaagaacaggaacaacgcgcaaaacgcttggagattgatcttatggggcgtttacgcggtagcc

SEQ ID NO: 175381 - DNA, 75 bp, synthetic construct
  source 1..75: mol_type = other DNA
aggtgacattagcttaccgtggtttaaccgatgaacaaaagaaagtagttgatgctttaggttctggcttgatta

SEQ ID NO: 175382 - DNA, 75 bp, synthetic construct
  source 1..75: mol_type = other DNA
cagcagcttactcagctaatatgtctaagctaaaaggctttgaccctattttgcagaaatacatcaaatctcagt

SEQ ID NO: 175383 - DNA, 75 bp, synthetic construct
  source 1..75: mol_type = other DNA
taataagacctttgaccgtctggaagctagagccaaaaatactaaagctttccgtttcacaagtcaggttaatga

SEQ ID NO: 175384 - DNA, 75 bp, synthetic construct
  source 1..75: mol_type = other DNA
agcattctttagatttacacaagcagctagtgaccagttcacagcggatatgctaattagctcaggctatccaga

SEQ ID NO: 175385 - DNA, 75 bp, synthetic construct
  source 1..75: mol_type = other DNA
aaccaatcttttaaatgctcttggtggaagtggtaaaacattaggtgaatctcttggtagcttgatgactgatat

SEQ ID NO: 175386 - DNA, 75 bp, synthetic construct
  source 1..75: mol_type = other DNA
taagctaaaaggctttgaccctattttgcagaaatacatcaaatctcagttttacgggctatctgctaaagccgg

SEQ ID NO: 175387 - DNA, 75 bp, synthetic construct
  source 1..75: mol_type = other DNA
ggggcaattatctgaagctttaccgggtgctactcaggcatttgcaaaggctttaggtctgactgaaaaacagct

SEQ ID NO: 175388 - DNA, 75 bp, synthetic construct
  source 1..75: mol_type = other DNA
tgaagagcttaaggggcaattagctgaagctgttcctggtatggttcaggtattcgctaaagcaaccggaaggaa

SEQ ID NO: 175389 - DNA, 75 bp, synthetic construct
  source 1..75: mol_type = other DNA
aataacacacaatcaactccaccagctatcacaggtgacatggttaatagcaatgctcaacttgcaatgactatt

SEQ ID NO: 175390 - DNA, 75 bp, synthetic construct
  source 1..75: mol_type = other DNA
attagctggtagtgctatctatgcaggttatgagagattagcttctacacctgaacgaatggaagcacaagctaa

SEQ ID NO: 175391 - DNA, 75 bp, synthetic construct
  source 1..75: mol_type = other DNA
tttgaatagtttaggtgggagtggtaaaagtcttggtgaatctcttggtggcttgatgagcgatatgtcgcatgg

SEQ ID NO: 175392 - DNA, 75 bp, synthetic construct
  source 1..75: mol_type = other DNA
ctcaggcacaactagggaacctgaaaaactcttggaataccacgcttgatagtatcttcagaggttctgaaaatg

SEQ ID NO: 175393 - DNA, 75 bp, synthetic construct
  source 1..75: mol_type = other DNA
taatgctcaattagctatggctgtatcagagttaggaagaaaggtagacgctttaacagcagaagccaagaagcc

SEQ ID NO: 175394 - DNA, 75 bp, synthetic construct
  source 1..75: mol_type = other DNA
aacctacgccacaaaccgccatacccgccgtatgctacgcaagctccacggcatccaggcaaaaagaatgtgtga

SEQ ID NO: 175395 - DNA, 75 bp, synthetic construct
  source 1..75: mol_type = other DNA
ggtacgccagcagtggcgtggtgcgatggagtgtaacggcaacggtttatgcttcaactttgatgcccgtagtcc

SEQ ID NO: 175396 - DNA, 75 bp, synthetic construct
  source 1..75: mol_type = other DNA
gatgattggggccatttttgttttattagtggcctggttattcctgtcacaatggattcgcattaccgttttgtg

SEQ ID NO: 175397 - DNA, 75 bp, synthetic construct
  source 1..75: mol_type = other DNA
ttttctcccctgagaaattctatggctgattccgtcgattccagagatattccaggacttcctgtacccccatcg

SEQ ID NO: 175398 - DNA, 75 bp, synthetic construct
  source 1..75: mol_type = other DNA
aattagacccaaacaatcatggaggacgtcaacccaaggacgttgatacgcgttctgttggtgttggaagcgctt

SEQ ID NO: 175399 - DNA, 75 bp, synthetic construct
  source 1..75: mol_type = other DNA
caagctcgtacgaaaatactggccaaattagacccaaacaatcatggaggacgtcaacccaaggacgttgatacg

SEQ ID NO: 175400 - DNA, 75 bp, synthetic construct
  source 1..75: mol_type = other DNA
ccagcagtggcgcggtgcgatggagtgtaacggcaacggtttatgcttcaactttgatgcccgtagtccgatgtg

SEQ ID NO: 175401 - DNA, 75 bp, synthetic construct
  source 1..75: mol_type = other DNA
tcttgcgcgcggtaaggggctgcgttgggataagagccagtcattacaaataccaggatttagcctcgcattcgc

SEQ ID NO: 175402 - DNA, 75 bp, synthetic construct
  source 1..75: mol_type = other DNA
tcaggtctacaaaacgctgctggtggcagtgaacggtgatatgaaacatctggcagtggccgttacgccggtcgc

SEQ ID NO: 175403 - DNA, 75 bp, synthetic construct
  source 1..75: mol_type = other DNA
catccagaagtgaaggatttggacttactgttttggaatcaactaagttaggtatacctgtaataacgtctaata

SEQ ID NO: 175404 - DNA, 75 bp, synthetic construct
  source 1..75: mol_type = other DNA
cctataagggattctgttgctgatgctatcgatgctcgttccagcgatgttccgggacttcctgtacatccgatg

SEQ ID NO: 175405 - DNA, 75 bp, synthetic construct
  source 1..75: mol_type = other DNA
tggagcgaatccagattaaacatctcattgctgatgcttgaatttaagcatatggcgcgcggtaaggggctgcgt

SEQ ID NO: 175406 - DNA, 75 bp, synthetic construct
  source 1..75: mol_type = other DNA
aaagaggcgggggaggcggccagacagcaggctgttgaaagcaatgcacaggcgcagcagcgatatgatactcag

SEQ ID NO: 175407 - DNA, 75 bp, synthetic construct
  source 1..75: mol_type = other DNA
ttaacaatggaaatttccagaaatttcttgaggttttagcacatcataactacaacgttgattttggtgtgattc

SEQ ID NO: 175408 - DNA, 75 bp, synthetic construct
  source 1..75: mol_type = other DNA
ctcctgaaggtggaagtcgagaattttggccagatgaattgattttagaatgccatcgtaaccataaagggcata

SEQ ID NO: 175409 - DNA, 75 bp, synthetic construct
  source 1..75: mol_type = other DNA
atctcgggctcgtcaaataggaaatgcggtccctccgaagatgtctgaaacgattggaaaacatttgcttaatat

SEQ ID NO: 175410 - DNA, 75 bp, synthetic construct
  source 1..75: mol_type = other DNA
tcttttgcattattttcaaccgtcaaaacgggcaaaaatactccacctaaacgcgttaaaatcctgccgcgttat

SEQ ID NO: 175411 - DNA, 75 bp, synthetic construct
  source 1..75: mol_type = other DNA
acgtgccgataatgcgttaaaaaacccgacggtacttatcgttgtggaccggcgagatctggacagccaaattaa

SEQ ID NO: 175412 - DNA, 75 bp, synthetic construct
  source 1..75: mol_type = other DNA
aggccaatgaaaacttccaggaatggctgatggctgaaaaaaccttgccttttggcaagaatggcgaccatatca

SEQ ID NO: 175413 - DNA, 75 bp, synthetic construct
  source 1..75: mol_type = other DNA
gaactaaaagatgatgttgttgcgcaaatagcagaacaagctaaagcggcgggggaacaggccagacaggaagct

SEQ ID NO: 175414 - DNA, 75 bp, synthetic construct
  source 1..75: mol_type = other DNA
cgttgcttcagatatcacggaagcccgccaaaggatactggagctgttagagcccaaagggaccggggagtccaa

SEQ ID NO: 175415 - DNA, 75 bp, synthetic construct
  source 1..75: mol_type = other DNA
caagcgcacgtacggtagagaataagcctgcaaataatacacctgcacagggcaatgtagatacccctgggtcag

SEQ ID NO: 175416 - DNA, 75 bp, synthetic construct
  source 1..75: mol_type = other DNA
ccattttaaaaacaggtgctttattctctcctgtattatcaataattgggattatagctttggttcttagggaag

SEQ ID NO: 175417 - DNA, 75 bp, synthetic construct
  source 1..75: mol_type = other DNA
gattaaacgaatatggcaaaaacctttctttgtcgttgatatcttcgagtatcttgattggtgcatcaataatat

SEQ ID NO: 175418 - DNA, 75 bp, synthetic construct
  source 1..75: mol_type = other DNA
gatggcgatgcaggtgcttttatcgcgggagcggtcattttaactataggaataggatttgtcatctggtcattt

SEQ ID NO: 175419 - DNA, 75 bp, synthetic construct
  source 1..75: mol_type = other DNA
gtggagccgttcggcttcctgatccgcattattgagtggtggcagaccggagaaacaccgggcacgtttcgtctg

SEQ ID NO: 175420 - DNA, 75 bp, synthetic construct
  source 1..75: mol_type = other DNA
gaaaatcgcgtctggccgacaaaagcagaaaacaatctacgctttaatattattaatgataaagaaaaccgggtg

SEQ ID NO: 175421 - DNA, 75 bp, synthetic construct
  source 1..75: mol_type = other DNA
gaagcgttatgattcccggacacctgttaatctggcgacgcgtatggcgctcgatgcttttaacgtcgcactggc

SEQ ID NO: 175422 - DNA, 75 bp, synthetic construct
  source 1..75: mol_type = other DNA
gcaggagcaattgttgaaacaaatgacggtagagaatgttaacactgccgttaaacaatatctttctcatccggt

SEQ ID NO: 175423 - DNA, 75 bp, synthetic construct
  source 1..75: mol_type = other DNA
cacagtggacgcggtatgatccccggacacctattaacctggcgacacgcatggcactggatgcattcaacgtcg

SEQ ID NO: 175424 - DNA, 75 bp, synthetic construct
  source 1..75: mol_type = other DNA
ttgaagactatttctggcggcactgcgcgcagcgttaaaattgcacccgattatcagtcgctgtttttccgtgta

SEQ ID NO: 175425 - DNA, 75 bp, synthetic construct
  source 1..75: mol_type = other DNA
ccagccaaaaaagactggctgaaaatctgacgtcactgaccctttctaatggcgcaaacgtcattctggcaaaat

SEQ ID NO: 175426 - DNA, 75 bp, synthetic construct
  source 1..75: mol_type = other DNA
ccagctcattaaataatacgccgttcttgtcgccggaagagacatatcaactttcgaaacgtctgtggcagcaaa

SEQ ID NO: 175427 - DNA, 75 bp, synthetic construct
  source 1..75: mol_type = other DNA
acctatcggcctgatggatactgtcgccacggtcacaccggcacaattgcgccaattttatcaacgctggtatca

SEQ ID NO: 175428 - DNA, 75 bp, synthetic construct
  source 1..75: mol_type = other DNA
gtgagtgccgacaatgtttcattaaccggtgcggcaaggctcgcatccatgttaacggagatatttctcctgcaa

SEQ ID NO: 175429 - DNA, 75 bp, synthetic construct
  source 1..75: mol_type = other DNA
gcgttacttaggatcaatcaaacactctgattcgccattagccgcaggtaaaccattaactcgcgcgacggacaa

SEQ ID NO: 175430 - DNA, 75 bp, synthetic construct
  source 1..75: mol_type = other DNA
agccacgcaagcaccttaaaatcaccatcatacactaaatcagtaagttggcagcattacccattgcaggaagaa

SEQ ID NO: 175431 - DNA, 75 bp, synthetic construct
  source 1..75: mol_type = other DNA
ttaccgtgcaaagtctggcggaaaaatggcagcagttaagaaagaaccaggacgcattttgggagcaaatggtaa

SEQ ID NO: 175432 - DNA, 75 bp, synthetic construct
  source 1..75: mol_type = other DNA
ttaataaacgagaagaaagagtttattttatttacagcaactgccctagtttttgttggttcttttgtcgcaata

SEQ ID NO: 175433 - DNA, 75 bp, synthetic construct
  source 1..75: mol_type = other DNA
gcattctcgtcgttgccgatgatttcacaggggccaacgacgcaggagtaagcctggcgcaggtgggacatacgg

SEQ ID NO: 175434 - DNA, 75 bp, synthetic construct
  source 1..75: mol_type = other DNA
atggaaaagggaatcactaagccgagcattctcatcgttgccgatgatttcacgggagccaacgacgcgggggta

SEQ ID NO: 175435 - DNA, 75 bp, synthetic construct
  source 1..75: mol_type = other DNA
gcgacctggatcgcatcgctgccgctgtgatgcaggctaaacaaccgctgctgctggtcggctccgctggtattt

SEQ ID NO: 175436 - DNA, 75 bp, synthetic construct
  source 1..75: mol_type = other DNA
gatgggctacacaccgtgggctgcatcgactgcgtgtcattcactaccgggcagtacagcaaacgctacggcttt

SEQ ID NO: 175437 - DNA, 75 bp, synthetic construct
  source 1..75: mol_type = other DNA
gtgaaaaaactcaccttaccgaaagatttcttatggggcggcgccgttgccgctcatcaggtcgaaggcggctgg

SEQ ID NO: 175438 - DNA, 75 bp, synthetic construct
  source 1..75: mol_type = other DNA
attaatagcgacagccgggcgatggatcctagtcaggcggcaatgaaaatgacctcgctgatgcgccatcttcct

SEQ ID NO: 175439 - DNA, 75 bp, synthetic construct
  source 1..75: mol_type = other DNA
gtacctgtaaagtgggtgtggtagatactggtatgcatagcgttaccactgatggcgtggttaccctggatactg

SEQ ID NO: 175440 - DNA, 75 bp, synthetic construct
  source 1..75: mol_type = other DNA
gattttaacggtctggttcagtctggtacttgtaaagtcggcgtggtagacgcgggtatgcacggcattactacc

SEQ ID NO: 175441 - DNA, 75 bp, synthetic construct
  source 1..75: mol_type = other DNA
gggattttttattcatcaccttcctaaattatcatttgtaatagtcgttgaattgtttgcttatttttttctacg

SEQ ID NO: 175442 - DNA, 75 bp, synthetic construct
  source 1..75: mol_type = other DNA
agtatttagaagaaaattacccaatttcagagacgtagaaataaataacaagataggtaaaaactatcgtttcga

SEQ ID NO: 175443 - DNA, 75 bp, synthetic construct
  source 1..75: mol_type = other DNA
cagtactgaacaggcaagcagtgttattgagaaactgaagaagtggcagcgcagagctgcgggagtcaaacatga

SEQ ID NO: 175444 - DNA, 75 bp, synthetic construct
  source 1..75: mol_type = other DNA
tttaccgctggataaccatccgcagtccaggaaaattcgtgcgctatggcttgaaatggctgctgccggcattgt

SEQ ID NO: 175445 - DNA, 75 bp, synthetic construct
  source 1..75: mol_type = other DNA
aaagtcgcagcattttgctgcaactcagttcaataatggtgaaactcagccgatggatctcatcataaaacagac

SEQ ID NO: 175446 - DNA, 75 bp, synthetic construct
  source 1..75: mol_type = other DNA
atgaaccacttaagtttgaacgaatgaatggtgcaattagaaaagaacatgaatggattcggttggttgctaacc

SEQ ID NO: 175447 - DNA, 75 bp, synthetic construct
  source 1..75: mol_type = other DNA
gtatacagacaaatacatatccaccaggcatattcacatgctatgcaatcagggatataaaggatacactattcc

SEQ ID NO: 175448 - DNA, 75 bp, synthetic construct
  source 1..75: mol_type = other DNA
tcaccagccggtagagcaggtcgcttctctgcgcgtaaccccgaacatgtctacatggcgtccgtgtgaccaggt

SEQ ID NO: 175449 - DNA, 75 bp, synthetic construct
  source 1..75: mol_type = other DNA
atgaagttcagctcgaagtttcttttgggtccgttatttttagcgccactgatggcaatggctgatgccccccaa

SEQ ID NO: 175450 - DNA, 75 bp, synthetic construct
  source 1..75: mol_type = other DNA
caatggatctcacggtaaaacagacaaagccgggagtgctggcggcaggtaattatgaggggcgcctgaatattg

SEQ ID NO: 175451 - DNA, 75 bp, synthetic construct
  source 1..75: mol_type = other DNA
cgcttccccggccacgaatttactcccctgctggccgaaaaccgccgtaacggcatcaccgttgatgacagcgtg

SEQ ID NO: 175452 - DNA, 75 bp, synthetic construct
  source 1..75: mol_type = other DNA
cgcttacccggccacgaatttactaccctgctggccgaaaaccgccgtaacggtattaccgttgatgacagcgtg

SEQ ID NO: 175453 - DNA, 75 bp, synthetic construct
  source 1..75: mol_type = other DNA
atgctggcctatataggcacgggttcgcagcatcccggttgtgggttccagcttataaatcaaaatagcgtgatc

SEQ ID NO: 175454 - DNA, 75 bp, synthetic construct
  source 1..75: mol_type = other DNA
gctgttgttagcgttacgtttcccgctcgatgatgctacccctgaaaaacttgagaatgaaatagaagtcgtcgt

SEQ ID NO: 175455 - DNA, 75 bp, synthetic construct
  source 1..75: mol_type = other DNA
ttgagaatgaaatagaagtcgtcgttaagtcaatggaaaacctgtatttggtattacataatcagggcataacat

SEQ ID NO: 175456 - DNA, 75 bp, synthetic construct
  source 1..75: mol_type = other DNA
tttgcagagaatggtgggccatatctgtgctatgaggctggagcacaatcgctgttgttagcgttacgtttccct

SEQ ID NO: 175457 - DNA, 75 bp, synthetic construct
  source 1..75: mol_type = other DNA
cagtagggcaggaggggcaattgctgactttgccgggcatcggcaaacggcgtttcgcgaactggaacgggtgct

SEQ ID NO: 175458 - DNA, 75 bp, synthetic construct
  source 1..75: mol_type = other DNA
atgagaaaaaaaatactttatacttttcttctcctgttatcttcaccagttattgcacgtgaccttgaaggtata

SEQ ID NO: 175459 - DNA, 75 bp, synthetic construct
  source 1..75: mol_type = other DNA
gttcaatttgccatcaacacaaggataaaattaatatatcgcccacataagataaacaacaaaaaccaagtttct

SEQ ID NO: 175460 - DNA, 75 bp, synthetic construct
  source 1..75: mol_type = other DNA
ttaattattccagaaaaaaacgctaaaacaattagttattctacaatcaatgattatggcggggaaacgccgact

SEQ ID NO: 175461 - DNA, 75 bp, synthetic construct
  source 1..75: mol_type = other DNA
cggcgctgacgccaaacaacccgcaaaaatcgatctatggaattacgctaccgacttcactgttgtttattgccg

SEQ ID NO: 175462 - DNA, 75 bp, synthetic construct
  source 1..75: mol_type = other DNA
gctggcacgttattcgcgacatcgacggtcatgacgcggcatctatcaaacgcgcagtagaagaagcgcgcgcag

SEQ ID NO: 175463 - DNA, 75 bp, synthetic construct
  source 1..75: mol_type = other DNA
gtggcgtggaaatacggcgttgagcgtcaggacggcccgactgcgcttatcctctcccgtcagaacctggcgcag

SEQ ID NO: 175464 - DNA, 75 bp, synthetic construct
  source 1..75: mol_type = other DNA
ggcttcctgccgtacacttccaccttcctgatgttcgtggaatacgcacgtaacgccgtacgtatggctgcgctg

SEQ ID NO: 175465 - DNA, 75 bp, synthetic construct
  source 1..75: mol_type = other DNA
ccttcggtgaatctgctccggcagagctgctgtttgaagagttcggcttcactgtcgacaacgtcgttgcgaaag

SEQ ID NO: 175466 - DNA, 75 bp, synthetic construct
  source 1..75: mol_type = other DNA
atgtgaagagcgaaatgcgcagggcatgtgttcgttggccggttttacgcaaatcgcgaatgaagcacgcatacc

SEQ ID NO: 175467 - DNA, 75 bp, synthetic construct
  source 1..75: mol_type = other DNA
gtggctgacaccgcgcggtggtgagctaatcgcttatctcggacattaccaacgccagcgtctggtggctgacgg

SEQ ID NO: 175468 - DNA, 75 bp, synthetic construct
  source 1..75: mol_type = other DNA
gtgaaagcgcgcgtggtttccatgccgtctaccgacgcattcgacaagcaggacgcggcttaccgtgagtctgtc

SEQ ID NO: 175469 - DNA, 75 bp, synthetic construct
  source 1..75: mol_type = other DNA
ctccatgctgatgtatagcctgctgcacctcaccggctacgatctgccgatgtccgagctgcaaaacttccgtca

SEQ ID NO: 175470 - DNA, 75 bp, synthetic construct
  source 1..75: mol_type = other DNA
agcagcctggcaaagggtgaagccaccaaagcagcgtttaatcagatggtggaagggcataagttgcccgcctgg

SEQ ID NO: 175471 - DNA, 75 bp, synthetic construct
  source 1..75: mol_type = other DNA
aaaaatggtaaagggagtcgtctttatataacgtacgcatcaccggctccagggcatctgaaagaagcaacgctt

SEQ ID NO: 175472 - DNA, 75 bp, synthetic construct
  source 1..75: mol_type = other DNA
ttcgccataatcctgagttcacaatgatggaactctacatggcgtatgcggattaccacgatttgattgaactga

SEQ ID NO: 175473 - DNA, 75 bp, synthetic construct
  source 1..75: mol_type = other DNA
aggtctgggaattggtatcgaccgtatggtaatgctgttcaccaacagccataccatccgcgacgttattctgtt

SEQ ID NO: 175474 - DNA, 75 bp, synthetic construct
  source 1..75: mol_type = other DNA
gcagaagcacatctgattcagccaacctttattacggaatatccggcagaagtgtcaccgctggcgcgccgtaat

SEQ ID NO: 175475 - DNA, 75 bp, synthetic construct
  source 1..75: mol_type = other DNA
acacgttactgggaggaagagtaccgctggcacagtttcttcctgactccggattatctgtccctgaaggagaca

SEQ ID NO: 175476 - DNA, 75 bp, synthetic construct
  source 1..75: mol_type = other DNA
tggccgggggcctgttttcttattttcgtaaagagcagatcattcatacactcgaaagactcaaacgagacccgt

SEQ ID NO: 175477 - DNA, 75 bp, synthetic construct
  source 1..75: mol_type = other DNA
aatatccggcagagtctattcagggataaaggatgatctggattctctttatggtgcgtttgcgctcctggccat

SEQ ID NO: 175478 - DNA, 75 bp, synthetic construct
  source 1..75: mol_type = other DNA
accgatatcgctctcacccaacatcaactaacgcccgcgcaactgaccgatgacgaacgccaacgttttgccgcc

SEQ ID NO: 175479 - DNA, 75 bp, synthetic construct
  source 1..75: mol_type = other DNA
gagcaggttacacagcgtgttaatgaagccctggctggaggggtgttttcctattccagtaaagacagaataatt

SEQ ID NO: 175480 - DNA, 75 bp, synthetic construct
  source 1..75: mol_type = other DNA
tgtctgaattatatgaagatagagatacacatgacacgctgacgcctgcattcagacgttctgtcgatatcattg

SEQ ID NO: 175481 - DNA, 75 bp, synthetic construct
  source 1..75: mol_type = other DNA
cgccaggcaccttccggcttgatattggcgtactggaaagcggcatcacagaggcaatgtatcaggaaatggaac

SEQ ID NO: 175482 - DNA, 75 bp, synthetic construct
  source 1..75: mol_type = other DNA
aacaggcgctggaaaaggtggcggagaaaggggactgtgcggatatcgcccgtcatatgctgggaggtaaccaat

SEQ ID NO: 175483 - DNA, 75 bp, synthetic construct
  source 1..75: mol_type = other DNA
gtggttcggggcaatatccggctgaaacaggcgctggaaaaggtggcggagaaaggggactgtgcggatatcgcc

SEQ ID NO: 175484 - DNA, 75 bp, synthetic construct
  source 1..75: mol_type = other DNA
gttgatgggtgagtctttagagcagataattaaagatagaatatctgatagaaccataagtcaaatcaatacagg

SEQ ID NO: 175485 - DNA, 75 bp, synthetic construct
  source 1..75: mol_type = other DNA
gcaaacctgcagcgggatttctgatttgccggtgccgctgcgtgacttgtggaatccaacgacctgtccggtcag

SEQ ID NO: 175486 - DNA, 75 bp, synthetic construct
  source 1..75: mol_type = other DNA
cggctacaaacaaggggttctgccacagcgtccggctttagttaacctgcaatgcgatattgaccacccgactca

SEQ ID NO: 175487 - DNA, 75 bp, synthetic construct
  source 1..75: mol_type = other DNA
cgacgctgccgggtaaagcctggctggaacatgcactgccgctaattgctgaacagttgcagggtcgccgctcag

SEQ ID NO: 175488 - DNA, 75 bp, synthetic construct
  source 1..75: mol_type = other DNA
taagcgatgccaaaccatgtagccggcacatgatcggcatgtccatcaacctgcagaccagcggcccgcattggg

SEQ ID NO: 175489 - DNA, 75 bp, synthetic construct
  source 1..75: mol_type = other DNA
taagcgatgccaaaccatgtagccgccacatgatcggcatgtccatcaagctgcagaccagcggcccgcattggg

SEQ ID NO: 175490 - DNA, 75 bp, synthetic construct
  source 1..75: mol_type = other DNA
tgtaaagcctgttcgacccagtgccccatcaaaattgacgtgccagagttccgctctcgtttcctgcaactctat

SEQ ID NO: 175491 - DNA, 75 bp, synthetic construct
  source 1..75: mol_type = other DNA
gctaaggattgtgcctgtagggggagctagtgaagttaaaaaaatatttaagcatttagaagcttcttatgaaga

SEQ ID NO: 175492 - DNA, 75 bp, synthetic construct
  source 1..75: mol_type = other DNA
gagcgaaatgagcggaaaaggccagagtggattgccaaaattgaaaatttttttataagtgataaacctgtaaag

SEQ ID NO: 175493 - DNA, 75 bp, synthetic construct
  source 1..75: mol_type = other DNA
gacggcgaaaaagacggcggatttcctcaaccgtatggcgaagctgggaatgccaatggtgggtgtcgatccggc

SEQ ID NO: 175494 - DNA, 75 bp, synthetic construct
  source 1..75: mol_type = other DNA
gacgaatctcatcaggggcaggggatcatttctcaggcgctgcaggcattgattcatcattacgctcagtctggt

SEQ ID NO: 175495 - DNA, 75 bp, synthetic construct
  source 1..75: mol_type = other DNA
aagaaacgaaataattttgcgttgtgacttgttaggtcatataaatgttacaacgaaagacaacataaagcgatt

SEQ ID NO: 175496 - DNA, 75 bp, synthetic construct
  source 1..75: mol_type = other DNA
cggacgatctgcgccagcgactgaaagaaggcaaagtctatattgccgggcaggcggagcgcgccattgaacatt

SEQ ID NO: 175497 - DNA, 75 bp, synthetic construct
  source 1..75: mol_type = other DNA
gaccgggctggtcgggcgcgtttccgcgatgatcggcgtgttgatggtggcggcagtgttcctcgtcatcggcaa

SEQ ID NO: 175498 - DNA, 75 bp, synthetic construct
  source 1..75: mol_type = other DNA
ttgctgctggtatgctcgatgattggctgggtggcagcgtggcttgccacggtacaacatttacgccactttacg

SEQ ID NO: 175499 - DNA, 75 bp, synthetic construct
  source 1..75: mol_type = other DNA
gaaaagcaagccgtttgccacatttttgacggtgatggtgatcgccatctctctgacgctgccaagcgtctgcta

SEQ ID NO: 175500 - DNA, 75 bp, synthetic construct
  source 1..75: mol_type = other DNA
ggcaacaggcggaagcggagttgaaactggcgcgggtgacgtattcacgtcaacaacgtctggcgcaaacgcagg

SEQ ID NO: 175501 - DNA, 75 bp, synthetic construct
  source 1..75: mol_type = other DNA
tggcgatccactgacgcgctacgaggggcaaatcaaggatgtgctaccgacgccggaaaaggttaacgacgctat

SEQ ID NO: 175502 - DNA, 75 bp, synthetic construct
  source 1..75: mol_type = other DNA
cgccgcgacggagatggctgtgaaacaggcgcaaattggcaccattgacgcgcaaatcaagcgcaatcaggcctc

SEQ ID NO: 175503 - DNA, 75 bp, synthetic construct
  source 1..75: mol_type = other DNA
gacgcgatccttttatgcatcggccataacaccggcagcgaaaaactggtccgcgcagcggcgcggctggcgtca

SEQ ID NO: 175504 - DNA, 75 bp, synthetic construct
  source 1..75: mol_type = other DNA
cgcaccccgcttacggtgctgtttggtcaggcagaaatcttaacgcttgatctggcaagcgaaggttctccgcac

SEQ ID NO: 175505 - DNA, 75 bp, synthetic construct
  source 1..75: mol_type = other DNA
aatcacttgaattacatgctgttgcggaaagtcatgtcacacctctttatcagttaatctgtaaaaataaaacct

SEQ ID NO: 175506 - DNA, 75 bp, synthetic construct
  source 1..75: mol_type = other DNA
aaagtgacatgcagcattacgcccaactgttctggcattgcccattaagtgacgccgactatcaaaaattggtgg

SEQ ID NO: 175507 - DNA, 75 bp, synthetic construct
  source 1..75: mol_type = other DNA
atttcgatctgtacggcgtttatccggcaatcgatgcctgcgtggcgttaagtgaactggtccattcgcgtttga

SEQ ID NO: 175508 - DNA, 75 bp, synthetic construct
  source 1..75: mol_type = other DNA
tggaagcaacagtacccgacacaatacagcctggtttatggcgcgtaccgtaaaaacagtgagccgaatgtgcat

SEQ ID NO: 175509 - DNA, 75 bp, synthetic construct
  source 1..75: mol_type = other DNA
ttgcctataccattatatctattattattgcactaggtttagtgtataccaatagaccaagaatctttgttttat

SEQ ID NO: 175510 - DNA, 75 bp, synthetic construct
  source 1..75: mol_type = other DNA
ggatttcagacagtttatacagtcgctctttagcgtatggcacacccttactgaatggaaagcaggaaacggcgg

SEQ ID NO: 175511 - DNA, 75 bp, synthetic construct
  source 1..75: mol_type = other DNA
atctgaaaacgataaaaatactgccctacgcagacgccatgaacgacgtgatgaacacgcttacctgccccgtta

SEQ ID NO: 175512 - DNA, 75 bp, synthetic construct
  source 1..75: mol_type = other DNA
agtgaactggtccattcgcgtttaagtggcgaaacgctcgaacacgcggtggaagtgagtaagacttccatcacg

SEQ ID NO: 175513 - DNA, 75 bp, synthetic construct
  source 1..75: mol_type = other DNA
atgaaacagatgaaagagcaggatttattcgaagaccttcgggacgacagcgttctggaatatcttaacgattac

SEQ ID NO: 175514 - DNA, 75 bp, synthetic construct
  source 1..75: mol_type = other DNA
attatcaggacgacagtatccttgaatattttgatgatgttcaggaaaagtcgggatttccatctttactggctg

SEQ ID NO: 175515 - DNA, 75 bp, synthetic construct
  source 1..75: mol_type = other DNA
cctgcggatctgcttttgctggctgtcgctccggaaaaactggtcggtttttcttcctttgactttgcccgcgaa

SEQ ID NO: 175516 - DNA, 75 bp, synthetic construct
  source 1..75: mol_type = other DNA
cgcgtcaacgtgaaatcgccgcgaaacatggcattcgcctgactaaccacagcctctatctttacggtcactgcg

SEQ ID NO: 175517 - DNA, 75 bp, synthetic construct
  source 1..75: mol_type = other DNA
tttcagaatgaagggctgctaccgtggcgcaatgtccaggacaacgtggcgttcggcctgcaactggcaggtata

SEQ ID NO: 175518 - DNA, 75 bp, synthetic construct
  source 1..75: mol_type = other DNA
tgctgttgattacccacgatatagaagaagcggtgtttatggcgactgaactggttctgctttcacccggccctg

SEQ ID NO: 175519 - DNA, 75 bp, synthetic construct
  source 1..75: mol_type = other DNA
catctgtatgaccgcttgccgccacatcgtccggtaatccgccgtatcgcgctgatatttatcgtactgattgta

SEQ ID NO: 175520 - DNA, 75 bp, synthetic construct
  source 1..75: mol_type = other DNA
aggatgtggctgatcgtgtaggcgtgaccaaaatgacggtcagtcgttttttacgcaacccggagcaagtctccg

SEQ ID NO: 175521 - DNA, 75 bp, synthetic construct
  source 1..75: mol_type = other DNA
gaatcgaaagcgtcaccgacgcgcacggttatcagacgatgctggcgcactacggttataaaccggaaatggagc

SEQ ID NO: 175522 - DNA, 75 bp, synthetic construct
  source 1..75: mol_type = other DNA
cgctcttgatgaactgggttatattcccaatcgcgcacccgatatcctctctaacgccaccagccgggcgattgg

SEQ ID NO: 175523 - DNA, 75 bp, synthetic construct
  source 1..75: mol_type = other DNA
cgatcaactttggtctgatttatggcatgagtgctttcggtctggcgcggcaattgaacattccacgtaaagaag

SEQ ID NO: 175524 - DNA, 75 bp, synthetic construct
  source 1..75: mol_type = other DNA
cgacatataatccctgcgcacactctcaccagtgacgataacaatcgtgtcatacaacggtacacccggcaggat

SEQ ID NO: 175525 - DNA, 75 bp, synthetic construct
  source 1..75: mol_type = other DNA
tttgcagactcgcctgttacgggtgctggaagaaaaagaggtcacccgcgtcggcgggcatcagcctgttccggt

SEQ ID NO: 175526 - DNA, 75 bp, synthetic construct
  source 1..75: mol_type = other DNA
gatcttttttgccttaggcggcatcggctggttgctggcaatgctgaaaaagctgtcaccggcattgcgtacgct

SEQ ID NO: 175527 - DNA, 75 bp, synthetic construct
  source 1..75: mol_type = other DNA
gatcttttttgctgttggtggcatcggctggttgctggcaatgctgaaaaagctgtcaccggcattgcgtacgct

SEQ ID NO: 175528 - DNA, 75 bp, synthetic construct
  source 1..75: mol_type = other DNA
gttctggctttggcgctgctcaaaggcgacctgcgagcagaagcccagcagcgtgttattgcctgcatgtttggt

SEQ ID NO: 175529 - DNA, 75 bp, synthetic construct
  source 1..75: mol_type = other DNA
ggtattgaactgattcgccaggcgcggcgggaatatccgcagttagatggcgtgttctgtaccaacgatgacctg

SEQ ID NO: 175530 - DNA, 75 bp, synthetic construct
  source 1..75: mol_type = other DNA
caggttttcgcggaagtattacgcggaatcgaaagcgtcaccgacgcgcacggttatcagaccatgctggcgcac

SEQ ID NO: 175531 - DNA, 75 bp, synthetic construct
  source 1..75: mol_type = other DNA
cttgtccgacaacatcactcagtcttcctgccctactttgggatacccgatcggagatctctgaaagcgagcttg

SEQ ID NO: 175532 - DNA, 75 bp, synthetic construct
  source 1..75: mol_type = other DNA
acgattaaaaccgacgttgaactggagctgacctgtgaacaactggaagtgcagcaaccggcggcggaagagttg

SEQ ID NO: 175533 - DNA, 75 bp, synthetic construct
  source 1..75: mol_type = other DNA
tacggagcgctacgcaaaactgacaccagagcgaatgcgtcagaccgggcagggtgttaccgaccttcttttacc

SEQ ID NO: 175534 - DNA, 75 bp, synthetic construct
  source 1..75: mol_type = other DNA
atgcaaaaatccttccgatttaccaattcatccatcaaagcccttccggcaaacacagataccagatctacagag

SEQ ID NO: 175535 - DNA, 75 bp, synthetic construct
  source 1..75: mol_type = other DNA
atgatatttaaccgcctgaaacttgcggtagaccgcgtcattgccgcgttttctgtcgccgtaatgcttgctctg

SEQ ID NO: 175536 - DNA, 75 bp, synthetic construct
  source 1..75: mol_type = other DNA
atgacaacatcgtgatggacaggactgaagcagcccgcatttaccgggcgagctgcgaacagcggtcgggggatt

SEQ ID NO: 175537 - DNA, 75 bp, synthetic construct
  source 1..75: mol_type = other DNA
gttaaccggtacccgcaaatcagaaatgcttaacgtcatgcacaaacatgttgatcgggataataggtccttgtt

SEQ ID NO: 175538 - DNA, 75 bp, synthetic construct
  source 1..75: mol_type = other DNA
gcgtctcgataccccaataaagctgccgggggactgatcgctatgctgctgttaaccggcacccgcaaatcagaa

SEQ ID NO: 175539 - DNA, 75 bp, synthetic construct
  source 1..75: mol_type = other DNA
cgaaagagcagggctacgttgaaacgctggacggacgccgtctctatttgccggatatcaagtccagcaacggtg

SEQ ID NO: 175540 - DNA, 75 bp, synthetic construct
  source 1..75: mol_type = other DNA
agcaggcaagtggttacaggccaaaggggcgaaaccggccacaaagtcgcaggaaaccattgttgtcgacgaaat

SEQ ID NO: 175541 - DNA, 75 bp, synthetic construct
  source 1..75: mol_type = other DNA
ccatcaactttggtttgatttacggcatgagtgctttcggcctggcgcgccaactgaatattccacgcaaagagg

SEQ ID NO: 175542 - DNA, 75 bp, synthetic construct
  source 1..75: mol_type = other DNA
ttagggctgttcaaaaagtatgagttcaaacgctggactgctgatgtcgaagcgggcaaatggttacaggctaaa

SEQ ID NO: 175543 - DNA, 75 bp, synthetic construct
  source 1..75: mol_type = other DNA
taccatcctcggaccggaagaggtggtgaataagtacggcgtgccgccagaactgatcatcgatttcctggcgct

SEQ ID NO: 175544 - DNA, 75 bp, synthetic construct
  source 1..75: mol_type = other DNA
cagttgaacattccgcgtaaagaagcgcagaagtacatggatctctactttgaacgctatccaggcgtgttggag

SEQ ID NO: 175545 - DNA, 75 bp, synthetic construct
  source 1..75: mol_type = other DNA
atattattcaataagatagctaacgatcccagcaatatcatcataggccaagcaaccacgaaggaaaccgctcag

SEQ ID NO: 175546 - DNA, 75 bp, synthetic construct
  source 1..75: mol_type = other DNA
cattacccaacccagatacagccgtttatcgttgtcctgaatgtgaaaccgactggaccgaaggggatcgcctac

SEQ ID NO: 175547 - DNA, 75 bp, synthetic construct
  source 1..75: mol_type = other DNA
gattaaccaacaatgggaactctcggataagagaaaatatcatgtcgtttgccagcattgcggacacaagcacgt

SEQ ID NO: 175548 - DNA, 75 bp, synthetic construct
  source 1..75: mol_type = other DNA
cccgtgaaagtgatgtagcaggattctggatcagccgtctgtattcaccttttagctctatcaaatcatgtgttt

SEQ ID NO: 175549 - DNA, 75 bp, synthetic construct
  source 1..75: mol_type = other DNA
cacgttgggtgaaaaatcccggatcgcagaggaacgaatgcctcgactgttttgtgtattgtctggctgcttctc

SEQ ID NO: 175550 - DNA, 75 bp, synthetic construct
  source 1..75: mol_type = other DNA
tggaaaaatcttcatgccattaaagggagttcctccggtaacgctccactgattccggttaagccaactaccacg

SEQ ID NO: 175551 - DNA, 75 bp, synthetic construct
  source 1..75: mol_type = other DNA
ctggcgatgaagtacctgtaaatgggaaagtcgtaaaagtagaatctcttaatgattatggcgaaattgagacat

SEQ ID NO: 175552 - DNA, 75 bp, synthetic construct
  source 1..75: mol_type = other DNA
gtgaataagcgtagtgcagtaacgaagtttttcactaaccgggtaacaaaaacgctggggatgaccctggcgctg

SEQ ID NO: 175553 - DNA, 75 bp, synthetic construct
  source 1..75: mol_type = other DNA
ggcaccgcagaacagaaggcgcatctcaatacgttaatggccgagatggcggcgttaaaagaacatttccgccgg

SEQ ID NO: 175554 - DNA, 75 bp, synthetic construct
  source 1..75: mol_type = other DNA
tcatgggaaaaactcgaagccatcaaagatagtttgaaccgtgaaccagaagaatccgtagaagctcctaaatcg

SEQ ID NO: 175555 - DNA, 75 bp, synthetic construct
  source 1..75: mol_type = other DNA
acccagaaactgctgatgttcatgccgggtgatgaagtgcaggtgaagggaaatgtggtgaaagtggaatccctg

SEQ ID NO: 175556 - DNA, 75 bp, synthetic construct
  source 1..75: mol_type = other DNA
ccttatatctatgcaatcggtagtctcttcgacaaaaatggaaagaaaattgaagtgaatagtgatactgcaaaa

SEQ ID NO: 175557 - DNA, 75 bp, synthetic construct
  source 1..75: mol_type = other DNA
ccgaccgtctatcgaagcatgtgatgcattaaaagacgtggttacagacaagaatgatcgcaatgcggttaacaa

SEQ ID NO: 175558 - DNA, 75 bp, synthetic construct
  source 1..75: mol_type = other DNA
atgaatatgtgtaaaagtattgttggcatggctaatattaatgcacaggaattgcagaatatagagatattaatc

SEQ ID NO: 175559 - DNA, 75 bp, synthetic construct
  source 1..75: mol_type = other DNA
aacagcagcgccttttcgatgtgctgactccgcttcagaaaagattcagcttagccattatcaagggcaagaatc

SEQ ID NO: 175560 - DNA, 75 bp, synthetic construct
  source 1..75: mol_type = other DNA
tttagggctgaagtttgggaatgttccagatgttttacttaaatataggttgacggatagcaccataagtagacg

SEQ ID NO: 175561 - DNA, 75 bp, synthetic construct
  source 1..75: mol_type = other DNA
ctggcttttttcctgacggtcttgctgagtggaccgatacttgcggccgctattctgcgggccgcccgcgttacg

SEQ ID NO: 175562 - DNA, 75 bp, synthetic construct
  source 1..75: mol_type = other DNA
tgacaatcaataagtctttgcgtgaagttttcgacgttacacgcatgattctgtcagcgaaagaagagttggcta

SEQ ID NO: 175563 - DNA, 75 bp, synthetic construct
  source 1..75: mol_type = other DNA
catcgtttcccgaaaggaacgattcgcgacttggttgattcagtaaattatggaacttcagcaaaagcctctatt

SEQ ID NO: 175564 - DNA, 75 bp, synthetic construct
  source 1..75: mol_type = other DNA
gcattacaggaagtggtaacagataagaatgatcgtaatgcggtaaacaacaataaccagattcagctaaaaaca

SEQ ID NO: 175565 - DNA, 75 bp, synthetic construct
  source 1..75: mol_type = other DNA
atgaaactgatttctaataaggccaaattaaaaaagattctcagaaatgccgcaaaatatataactccaccgcct

SEQ ID NO: 175566 - DNA, 75 bp, synthetic construct
  source 1..75: mol_type = other DNA
tttgaatggcgtaacatcgatggtaagaacttacccgatcctgataccgctcgttatatttgcccccactgtaag

SEQ ID NO: 175567 - DNA, 75 bp, synthetic construct
  source 1..75: mol_type = other DNA
ttccagcgcggaatgattgacgctatcaaaggcaataagaagaaaatcgttcttatgacttctgcacagatcggc

SEQ ID NO: 175568 - DNA, 75 bp, synthetic construct
  source 1..75: mol_type = other DNA
ttgtgtggttgattttagtcatgcgtggcaatcctttgatttacaatcattttataacaccgtgttaggcaaggt

SEQ ID NO: 175569 - DNA, 75 bp, synthetic construct
  source 1..75: mol_type = other DNA
caatctgacgagcaaatcgaagaaactaagccaatcacacgaccgcaacgtcaaaacatcgccagacgcccaaat

SEQ ID NO: 175570 - DNA, 75 bp, synthetic construct
  source 1..75: mol_type = other DNA
aattgttagtggaatggctggaaggactgcaagacgtgacgccgtttattgatttcggcccgcggattgacgata

SEQ ID NO: 175571 - DNA, 75 bp, synthetic construct
  source 1..75: mol_type = other DNA
tatcgaactgaaacagcagagcgttaacgttggcggctgcgcactgaatattgccgtggcgttaaagcgcctcgg

SEQ ID NO: 175572 - DNA, 75 bp, synthetic construct
  source 1..75: mol_type = other DNA
tttgagaaagctgtgtgagtggaaaagtgtacggattctggaagctgaatgctgtgcagatcatatccatatgct

SEQ ID NO: 175573 - DNA, 75 bp, synthetic construct
  source 1..75: mol_type = other DNA
tatcaactggcctcgccctgcggcgaattgttagtggattggctggaggaactgcaagacgtgacgccgtttatt

SEQ ID NO: 175574 - DNA, 75 bp, synthetic construct
  source 1..75: mol_type = other DNA
gattttggcccacgtattggcgatatcccggatgcattactggcgcggattatggcttgtcggccactggtgtca

SEQ ID NO: 175575 - DNA, 75 bp, synthetic construct
  source 1..75: mol_type = other DNA
ctcaatcgccaggaagctgagattgccgccgaacgttttgctttatccgcaaatatcacaatgcttggcacgcaa

SEQ ID NO: 175576 - DNA, 75 bp, synthetic construct
  source 1..75: mol_type = other DNA
cagagggtactacgtcgatacggtgggtaagaacacggcgaagatacaggattacataaagcaccagcttgaaga

SEQ ID NO: 175577 - DNA, 75 bp, synthetic construct
  source 1..75: mol_type = other DNA
ttatccgccgggtgctggagccgctgctggcgaaaataggaattcatcagcaaaccacgctgttacgccacggtt

SEQ ID NO: 175578 - DNA, 75 bp, synthetic construct
  source 1..75: mol_type = other DNA
gtggtggagcgtttcttgccagtgcggtttagtctggtggaggcggatggcgtaacgcgggtgagcattgaatga

SEQ ID NO: 175579 - DNA, 75 bp, synthetic construct
  source 1..75: mol_type = other DNA
gtgagtggaaaagtgtacggattctggaagctgaatgctgtgcagatcccgcccaaaatgagcgtatccggcttt

SEQ ID NO: 175580 - DNA, 75 bp, synthetic construct
  source 1..75: mol_type = other DNA
tggttaaacagacttcaccaccaagaatatctgttgcctgtatcgcacgggaacacgctgtcgttatcaaaacag

SEQ ID NO: 175581 - DNA, 75 bp, synthetic construct
  source 1..75: mol_type = other DNA
acagagagaagcgtagagcaacaggcagtattttgagaaagctgtgtgagtggaaaagcgtacggattctggaag

SEQ ID NO: 175582 - DNA, 75 bp, synthetic construct
  source 1..75: mol_type = other DNA
tcgcctgactattctgcaggaagaccagggacaattactgactcttgccggtgagcctgacggaaaattacgcgc

SEQ ID NO: 175583 - DNA, 75 bp, synthetic construct
  source 1..75: mol_type = other DNA
gctgatcacaccatgctcaagtaacattagagaactggtggggaaaataatcttaatccaattggaaggaacgcc

SEQ ID NO: 175584 - DNA, 75 bp, synthetic construct
  source 1..75: mol_type = other DNA
atgtcaaccatagtaacatcacttggtggtaacattggttacatgaaaaacactatcagcgaacgtattcggaat

SEQ ID NO: 175585 - DNA, 75 bp, synthetic construct
  source 1..75: mol_type = other DNA
tgaaaaatctcatatcttcgctggaagagaatgactggcctgtagtatctcctgccggatcatgcacttacacga

SEQ ID NO: 175586 - DNA, 75 bp, synthetic construct
  source 1..75: mol_type = other DNA
acctatgacaatgaggcgcgtgagttcattcctctcacgccgctggaagacttccagttttctgacatcgttgtg

SEQ ID NO: 175587 - DNA, 75 bp, synthetic construct
  source 1..75: mol_type = other DNA
ttctgattatctccgtacttatggcaatcggcattatgcgaattatccacacactgaaggatatcgaattattct

SEQ ID NO: 175588 - DNA, 75 bp, synthetic construct
  source 1..75: mol_type = other DNA
cattgggattatgcgaattattaattcagtgaaaaagatcgagcgtttttctctgatgaataacgatacaaataa

SEQ ID NO: 175589 - DNA, 75 bp, synthetic construct
  source 1..75: mol_type = other DNA
gctgcgtttcctggccgatcactctcgttcgaaagataccgtactgaaagaagtgccggaagagtgggtgaaagc

SEQ ID NO: 175590 - DNA, 75 bp, synthetic construct
  source 1..75: mol_type = other DNA
atggatcaaaaacagattgaagaaattgtacgcagcgtgatggcgtcaatggggcaggcggatgccgcgccagcg

SEQ ID NO: 175591 - DNA, 75 bp, synthetic construct
  source 1..75: mol_type = other DNA
gcctgtcggttgaaacaggcgctttctaaggccgtgcaaagttttcttacggaactggataactacacgcttgcc

SEQ ID NO: 175592 - DNA, 75 bp, synthetic construct
  source 1..75: mol_type = other DNA
tcatcttggcatcacagatgttggggcaaaactcaatggtcgcgctgtgtaccatccctcctgcagcctttcccg

SEQ ID NO: 175593 - DNA, 75 bp, synthetic construct
  source 1..75: mol_type = other DNA
ctattctgcaggaagaccagggacaattactgactcttgccggtgaacctgacggaaaactccgcgcagcaggtc

SEQ ID NO: 175594 - DNA, 75 bp, synthetic construct
  source 1..75: mol_type = other DNA
gcccgcgtttgtaccggtcgtgccggtccgcgtccgcgtacgcaggcgctgctgcgtttcctggccgatcactct

SEQ ID NO: 175595 - DNA, 75 bp, synthetic construct
  source 1..75: mol_type = other DNA
ctcatggcgtggcaacggcgtatgtcgaaagcggggtactgcgcattcagcgtgatgtcaccacgtacaggaaaa

SEQ ID NO: 175596 - DNA, 75 bp, synthetic construct
  source 1..75: mol_type = other DNA
gacggtacccgctttggtcccggtcaggcgattgtcaccccggcggtgatcaaaggggaactgctggcaacctac

SEQ ID NO: 175597 - DNA, 75 bp, synthetic construct
  source 1..75: mol_type = other DNA
gtgagcaatacaacgatagagattttctctggagagaaagattatgatctaaacggttttgattgcggcgaagag

SEQ ID NO: 175598 - DNA, 75 bp, synthetic construct
  source 1..75: mol_type = other DNA
aaacgctattatctgggtaatgctgacgagatcgcggcgaaagcagcggccgttgcaaaccagggtaaagcgaag

SEQ ID NO: 175599 - DNA, 75 bp, synthetic construct
  source 1..75: mol_type = other DNA
atgaagctctacatcgctaactgctcacgtcagccgcacacgttcaactacaaactccccgaaaaaacgcagtcg

SEQ ID NO: 175600 - DNA, 75 bp, synthetic construct
  source 1..75: mol_type = other DNA
ccgttgcgtaacccgggcgaccgcttaggagaagaaggtaccggcgcacgcttactggaagatgaacaaaactaa

SEQ ID NO: 175601 - DNA, 75 bp, synthetic construct
  source 1..75: mol_type = other DNA
tactatcagggaactgaatagcaccctgtctcaacaaccggcgagcgtctatgtgcaacaccgcgactggatcag

SEQ ID NO: 175602 - DNA, 75 bp, synthetic construct
  source 1..75: mol_type = other DNA
aggtcaagccggacggtaccgccctgtggccatcaaaaattttgccgtggtccgatcttatgaccggtaagattg

SEQ ID NO: 175603 - DNA, 75 bp, synthetic construct
  source 1..75: mol_type = other DNA
tagagccagactggatgattaacggcggcgtaccggaactgaaaaagcagctcgatcttaacgatgctgtgcccg

SEQ ID NO: 175604 - DNA, 75 bp, synthetic construct
  source 1..75: mol_type = other DNA
gattttacgtggttatctgctcgtgacgagagaggataaaccacgtgtcatggggtactacaccctgtctggcag

SEQ ID NO: 175605 - DNA, 75 bp, synthetic construct
  source 1..75: mol_type = other DNA
aaattagcggtactattttgttccgcgaagattacctgaataaaccacagacccagcaagccgttagttatctgc

SEQ ID NO: 175606 - DNA, 75 bp, synthetic construct
  source 1..75: mol_type = other DNA
acgtgcagcatcgcgactggatcagaacgtcgggcgaccgttttgttctcgaccctggtatccctgaggttcagg

SEQ ID NO: 175607 - DNA, 75 bp, synthetic construct
  source 1..75: mol_type = other DNA
gttacaacgaaatgaaccagtatctgaaccaacaagggacgggtctgacccctgctgagatgcatggtttaatca

SEQ ID NO: 175608 - DNA, 75 bp, synthetic construct
  source 1..75: mol_type = other DNA
cattcatcctgcttcttgcaggggaattaatcggtcgcggcgtattctacggtttgcatatgaccgtgggtatgg

SEQ ID NO: 175609 - DNA, 75 bp, synthetic construct
  source 1..75: mol_type = other DNA
ggctggttgctggcaatgctgaaaaagctgtcaccggtattacgcgcgctgtggctggtggtgacgatggttctc

SEQ ID NO: 175610 - DNA, 75 bp, synthetic construct
  source 1..75: mol_type = other DNA
gtggctggtagtgacgatggttcttggcgtcatctttgtctggatgatggtgcgtgtctataacagcattgatac

SEQ ID NO: 175611 - DNA, 75 bp, synthetic construct
  source 1..75: mol_type = other DNA
tctggtgcagagggtattacgtcgatacggtgggtaagaacacagcgaagatacaggattacataaagcaccagc

SEQ ID NO: 175612 - DNA, 75 bp, synthetic construct
  source 1..75: mol_type = other DNA
gggactacgtcgatacggtgggtaagatcacgtcgaagatacaggcttacataaagcaccagcttgaagaggata

SEQ ID NO: 175613 - DNA, 75 bp, synthetic construct
  source 1..75: mol_type = other DNA
catagtttttgcgccaaaataccgaagactggtgttctacagagagaagcgtagagcaacaggcagtattttgag

SEQ ID NO: 175614 - DNA, 75 bp, synthetic construct
  source 1..75: mol_type = other DNA
ttgaagaggataaaatgggagagcagttatcgattccctatccgggcagcccgtttaattctggaggatatttat

SEQ ID NO: 175615 - DNA, 75 bp, synthetic construct
  source 1..75: mol_type = other DNA
ttatgggatatctgaaagggaaaagcagtctgatgctttacgagcagtttggtgatttgaaattcaaatacagga

SEQ ID NO: 175616 - DNA, 75 bp, synthetic construct
  source 1..75: mol_type = other DNA
cacgacctgacgaacgaaggcatggctttcggtcatgagctggcacaggcactgcgcaaaatgcactctgccacc

SEQ ID NO: 175617 - DNA, 75 bp, synthetic construct
  source 1..75: mol_type = other DNA
tgccagccatttctgtactggcactggtggtgagtggcgtgatgtcagtgatgcagggcgcagagctggcgacta

SEQ ID NO: 175618 - DNA, 75 bp, synthetic construct
  source 1..75: mol_type = other DNA
ggtggtgagcggcgtaatgtctgtaatgcagggggctgaactcgctacgattcactcttctgtacaacaggcagc

SEQ ID NO: 175619 - DNA, 75 bp, synthetic construct
  source 1..75: mol_type = other DNA
cagatcatatccatatgcttgtggagatcccgcccaaaatgagtgtatccggctttatgggatatctgaaaggga

SEQ ID NO: 175620 - DNA, 75 bp, synthetic construct
  source 1..75: mol_type = other DNA
gctgggtgagcaatttggagtgagccgtactgcggtacgcgaagcggtcaagacgttaacggcaaaaggaatggt

SEQ ID NO: 175621 - DNA, 75 bp, synthetic construct
  source 1..75: mol_type = other DNA
cagacagcgacctgatggagcagatcgaacgtccggatggcattattaaactgaatccggcccgaaaaaatcaga

SEQ ID NO: 175622 - DNA, 75 bp, synthetic construct
  source 1..75: mol_type = other DNA
atggacgaggatgccacccagttgtcagacaacgacctgatggagcagatcgaacgtccggatggcattattaaa

SEQ ID NO: 175623 - DNA, 75 bp, synthetic construct
  source 1..75: mol_type = other DNA
acagacttcaaccgcatgtgggaacaatggaaatctatccgcgccgctggcatttcgcatcaaaggagagtgaga

SEQ ID NO: 175624 - DNA, 75 bp, synthetic construct
  source 1..75: mol_type = other DNA
ccaactggtcgaggagtgcgaaattcctgctggcggttctctggtcgagtacgttgacgatatgcgcgagaagct

SEQ ID NO: 175625 - DNA, 75 bp, synthetic construct
  source 1..75: mol_type = other DNA
gaatgtggtgaaagtagactccctgaatgactggggaagcctgcagacctggacaattaataagaagaaaccggc

SEQ ID NO: 175626 - DNA, 75 bp, synthetic construct
  source 1..75: mol_type = other DNA
tgcgtgaggcggcagagaaagcaacgtgtggtgagtggtcgctcgaatatggaaagggccgatttgatggtgatg

SEQ ID NO: 175627 - DNA, 75 bp, synthetic construct
  source 1..75: mol_type = other DNA
gaatacagtaccaaaggaaagccaaatattatcgtactgaccatggatgatcttggttatggacaacttcctttt

SEQ ID NO: 175628 - DNA, 75 bp, synthetic construct
  source 1..75: mol_type = other DNA
acagcgattcgactgcggcgaagaagccttaaatctctttctgacgacacatctggttcgtcagcatcgcaataa

SEQ ID NO: 175629 - DNA, 75 bp, synthetic construct
  source 1..75: mol_type = other DNA
ccgttggtcggagaaaacgaaaatgcgttatttttcccaaccaaatccatagaactgctttttacacagagcgat

SEQ ID NO: 175630 - DNA, 75 bp, synthetic construct
  source 1..75: mol_type = other DNA
tctacttccaactggtcgaggagtgcgaaattcctgctggcggatctctggtcgagtacgttgacgatatgcgcg

SEQ ID NO: 175631 - DNA, 75 bp, synthetic construct
  source 1..75: mol_type = other DNA
tgcgtgaaaaggcagagaaagcaacgagtggtgtgtggtcgctagaatatggagaggagagatttgatgctggtg

SEQ ID NO: 175632 - DNA, 75 bp, synthetic construct
  source 1..75: mol_type = other DNA
ctggctgaacctgcaggatataccgccggccctggagggaagcggtattgcggtggcactgcgtacgaagctgaa

SEQ ID NO: 175633 - DNA, 75 bp, synthetic construct
  source 1..75: mol_type = other DNA
atgatcggagagatccgcgatggcgaaacagcagagatcgctattaaagcggcgcaaactggtcacctggtgttg

SEQ ID NO: 175634 - DNA, 75 bp, synthetic construct
  source 1..75: mol_type = other DNA
cagggaggcgaccattgaaataactaggaagaaaaagttatccgacggggaaaagaaaaaaccacgcctaccacg

SEQ ID NO: 175635 - DNA, 75 bp, synthetic construct
  source 1..75: mol_type = other DNA
gtgccatcaccaaaaagcgttggccgtcagagtcgtgaatacaaaactgttggctttgatgccacgaaagaacta

SEQ ID NO: 175636 - DNA, 75 bp, synthetic construct
  source 1..75: mol_type = other DNA
agcaggacctggtcaccagggctttctctgttagagagaaagaatcaggtaaagacatcattttgcgtcctaaca

SEQ ID NO: 175637 - DNA, 75 bp, synthetic construct
  source 1..75: mol_type = other DNA
aagctatctcgataatccactgcaaccggcgaaaggtcgtggcgaagatacctatgtacaggtgagctgggaaca

SEQ ID NO: 175638 - DNA, 75 bp, synthetic construct
  source 1..75: mol_type = other DNA
caggcgatggaaaacttcatcagttaagcgaagtgttttcaacattgacagcagcacaaatggtatatccatttg

SEQ ID NO: 175639 - DNA, 75 bp, synthetic construct
  source 1..75: mol_type = other DNA
ttcagggcagatgacgaactgcgcagcagataagatgacagtaaactccaacgcgtctatcggtcagtctgctat

SEQ ID NO: 175640 - DNA, 75 bp, synthetic construct
  source 1..75: mol_type = other DNA
cgatgatctgaaacccggcgaagaaatcggaatggtgaagtcggatcgcccaaatcctaaccttgaaacttttcg

SEQ ID NO: 175641 - DNA, 75 bp, synthetic construct
  source 1..75: mol_type = other DNA
gcgaataaatctgacgaagatattgattacagtgatatcccaccctccagcgatgagcaatggtcaaatgccgaa

SEQ ID NO: 175642 - DNA, 75 bp, synthetic construct
  source 1..75: mol_type = other DNA
ggcgcaaactggtcacctggtgttgtctaccctacacactaattccacctgcgaaacgctggtacgtttacagca

SEQ ID NO: 175643 - DNA, 75 bp, synthetic construct
  source 1..75: mol_type = other DNA
aacatcagcgtgaaacatcggctgtggtaaaaaccgtgacgccagctacgccgcgtaaaatggccgtggcagata

SEQ ID NO: 175644 - DNA, 75 bp, synthetic construct
  source 1..75: mol_type = other DNA
atcaggacgggttcgaaaagcagtatatggcgtatatgcagcaaaacgatcgtctctatgacatcgccgtcaccg

SEQ ID NO: 175645 - DNA, 75 bp, synthetic construct
  source 1..75: mol_type = other DNA
ggtggatggctctaatgagatggggcaactggcagagagtttgcgccatatgcagggagagctgatgcgtaccgt

SEQ ID NO: 175646 - DNA, 75 bp, synthetic construct
  source 1..75: mol_type = other DNA
attatggagcataaatcaggaattgcccgttcagtatggacagcccgatttaatggttgtcagattatctggaga

SEQ ID NO: 175647 - DNA, 75 bp, synthetic construct
  source 1..75: mol_type = other DNA
atatttcaggctcatataatagccaaaaagatgcttataatacatcaataattttttctggtgggtataattcat

SEQ ID NO: 175648 - DNA, 75 bp, synthetic construct
  source 1..75: mol_type = other DNA
cgcgcaacacgctgctgcatgaacagtggtgtgacctgctggaagagaactctgtcgacgcggttaaagtacgtt

SEQ ID NO: 175649 - DNA, 75 bp, synthetic construct
  source 1..75: mol_type = other DNA
ctctgtgctgaacattcatggcggaagcctgatactgaataatggaggagaatctgcaggtactattgcagggga

SEQ ID NO: 175650 - DNA, 75 bp, synthetic construct
  source 1..75: mol_type = other DNA
atggaataaaacaagggggagatgctatttctggaaatcaaatcactttgaataataacggtattgttcaggggg

SEQ ID NO: 175651 - DNA, 75 bp, synthetic construct
  source 1..75: mol_type = other DNA
caaatcactttgaataataacggtattgttcaggggggatatggccccgacggtggttgctctgtttatggagaa

SEQ ID NO: 175652 - DNA, 75 bp, synthetic construct
  source 1..75: mol_type = other DNA
gcgtcaagatcgcaaaccgcgaactggaagcgaacggcaaagtgggtgcaacttactcccgcgatctgctgggta

SEQ ID NO: 175653 - DNA, 75 bp, synthetic construct
  source 1..75: mol_type = other DNA
gttccagtctggtctggtaactgcgggcgaacgctacaacaaagttattgatatctgggctgcggcgaacgatcg

SEQ ID NO: 175654 - DNA, 75 bp, synthetic construct
  source 1..75: mol_type = other DNA
cacaccatgccggttatcaccgaagtaagcggttttgtacgctttactgacatgatcgacggtcagaccattact

SEQ ID NO: 175655 - DNA, 75 bp, synthetic construct
  source 1..75: mol_type = other DNA
ggtgaacgtgtagaacgtggtgacgttatttccgacggtccggaagcaccgcacgacattctgcgtctgcgtggt

SEQ ID NO: 175656 - DNA, 75 bp, synthetic construct
  source 1..75: mol_type = other DNA
ggaagcgaacggcaaagtgggggcaacttactcccgcgatctactgggtatcaccaaagcgtctctggcaaccga

SEQ ID NO: 175657 - DNA, 75 bp, synthetic construct
  source 1..75: mol_type = other DNA
agaaaccaaaggcaaacgtcgtctggttatcaccccggtagatggcagcgaaccgtacgaagagatgattccgaa

SEQ ID NO: 175658 - DNA, 75 bp, synthetic construct
  source 1..75: mol_type = other DNA
ataatttgcgtcctgaggcaggtagctatgttgccagtattgctgctgcaaataatctgtttgtaacgaatctgt

SEQ ID NO: 175659 - DNA, 75 bp, synthetic construct
  source 1..75: mol_type = other DNA
cacactcttgacgcccatggaatatattagagaacaaaaatttcaatatgtggtggacgcatacagaggattgac

SEQ ID NO: 175660 - DNA, 75 bp, synthetic construct
  source 1..75: mol_type = other DNA
ttgacgatgccactctgacgaatgatggcttctggcctgacctgagcgtgaaagattttcagtcccagcgcacca

SEQ ID NO: 175661 - DNA, 75 bp, synthetic construct
  source 1..75: mol_type = other DNA
ccagttaacagcccagtacaaaaaagcggtctacgcccgcgcaaaggccgatttgctgggggagttcgccaccat

SEQ ID NO: 175662 - DNA, 75 bp, synthetic construct
  source 1..75: mol_type = other DNA
tctcggatgggagtaagcgcatagcagagttagaaagtgattctcaggcacaaaagttagttgaagcaatcattg

SEQ ID NO: 175663 - DNA, 75 bp, synthetic construct
  source 1..75: mol_type = other DNA
gagaggataaagaaatacaaacctaatgatctcatattagatgacgaaaaggacagatctgggaaagtatttgag

SEQ ID NO: 175664 - DNA, 75 bp, synthetic construct
  source 1..75: mol_type = other DNA
tatcagtaacctggtggagcagggggccacaacccttgcggaaatcaacgataactaccagtttgcctgccagca

SEQ ID NO: 175665 - DNA, 75 bp, synthetic construct
  source 1..75: mol_type = other DNA
ctcgccagcagccaggtcaatattactgagaacggaacactttccggctatggtggtgtcgcagggaatgtgacc

SEQ ID NO: 175666 - DNA, 75 bp, synthetic construct
  source 1..75: mol_type = other DNA
atggtaaaaatacgacaggtattctgaatgtatcaggtgcgaatagtaaatttatacataataataatggaggtg

SEQ ID NO: 175667 - DNA, 75 bp, synthetic construct
  source 1..75: mol_type = other DNA
gcgctaaacatcagcgtgcctcctgaaaccaattataatgaaaatatattatctgttgaaagtagtgttaacatc

SEQ ID NO: 175668 - DNA, 75 bp, synthetic construct
  source 1..75: mol_type = other DNA
gtaccaggcgtaaaaatgggcggactgaacagcctgtgcgcccagtatatgaaggccgtttttgccagggcaaaa

SEQ ID NO: 175669 - DNA, 75 bp, synthetic construct
  source 1..75: mol_type = other DNA
ctaccgccagatattgacgctgacaccatcagccaggcgttgcttgcagcggtggcggaggtgaatgcggaactg

SEQ ID NO: 175670 - DNA, 75 bp, synthetic construct
  source 1..75: mol_type = other DNA
gcagacggtgacaaacggcgagccgttctggccggaccttgatctggctgagcttcaggggtcacgcacgcttcc

SEQ ID NO: 175671 - DNA, 75 bp, synthetic construct
  source 1..75: mol_type = other DNA
tcaatataggcaaagaaaatcatgttgaactaattcaaaataatagtggtaatgaattaataaaattagccgaac

SEQ ID NO: 175672 - DNA, 75 bp, synthetic construct
  source 1..75: mol_type = other DNA
tgaggtaattaaagttttttttgtttttattttatttgttatagtttcattcattacaatgccttcaggtgctct

SEQ ID NO: 175673 - DNA, 75 bp, synthetic construct
  source 1..75: mol_type = other DNA
tcgttacaagcaaagaaaatcatgttgaactaataccaaacaataatgatagtgaattaataaagcttgcagaaa

SEQ ID NO: 175674 - DNA, 75 bp, synthetic construct
  source 1..75: mol_type = other DNA
ggctttatgggatatctgaaagggaaaagcagtctgatgctttacgagcagtttggtgatttgaaattcaaatat

SEQ ID NO: 175675 - DNA, 75 bp, synthetic construct
  source 1..75: mol_type = other DNA
tgccgaaggataaagagtcagtgtactggctgaacctgcaggatattccgccggccctggagggaagcggtattg

SEQ ID NO: 175676 - DNA, 75 bp, synthetic construct
  source 1..75: mol_type = other DNA
ggacaattaataagaaaaaatcgacagcaccggaagtagcaaaaacagagaaagcagatactgcagtgcagaaat

SEQ ID NO: 175677 - DNA, 75 bp, synthetic construct
  source 1..75: mol_type = other DNA
gagatattgaattcaaatggttataagacgatatttctttcttcaacagaaaaaactagcactttgaatgcgatg

SEQ ID NO: 175678 - DNA, 75 bp, synthetic construct
  source 1..75: mol_type = other DNA
gttattacggctgatcattcaactttccctacaccacaatttaataaatcttttagttcaaattctgattatttt

SEQ ID NO: 175679 - DNA, 75 bp, synthetic construct
  source 1..75: mol_type = other DNA
aataaacagtatcaatgggttataaccgaagcatatgaattgtttgaagactatattaagaaaatatatgcccat

SEQ ID NO: 175680 - DNA, 75 bp, synthetic construct
  source 1..75: mol_type = other DNA
acagaatataaaaaagcatttaatagcgattctcgttactttgtaggcgaaataccatttctggttattggagga

SEQ ID NO: 175681 - DNA, 75 bp, synthetic construct
  source 1..75: mol_type = other DNA
ttttgataaagttcttggtatgggtgattttattggttatcaacgagacagaatgacggataagcaaacatttaa

SEQ ID NO: 175682 - DNA, 75 bp, synthetic construct
  source 1..75: mol_type = other DNA
attattataaccatacagctgcaacattccgaggattaagaggtcagttaacttctggttatcaatttcgagatg

SEQ ID NO: 175683 - DNA, 75 bp, synthetic construct
  source 1..75: mol_type = other DNA
gtcgttaaaagagcatttccgccgggagcgttggattgaggtcgatatggcctggcatgaacatatttatgaaat

SEQ ID NO: 175684 - DNA, 75 bp, synthetic construct
  source 1..75: mol_type = other DNA
cgtgcggcgttgtttgcgacccgtatatttgtgtgaactcagatggcatttccccagagttaacaaggaaatatc

SEQ ID NO: 175685 - DNA, 75 bp, synthetic construct
  source 1..75: mol_type = other DNA
tactggataaaaatggtaatcctgtggaaataatggtgtgtgatgatcaggaactgcattttttcgttccaaaga

SEQ ID NO: 175686 - DNA, 75 bp, synthetic construct
  source 1..75: mol_type = other DNA
aagagaaacaacagatgacgaatctgacattaacaccctgtaccttgattcatttaaaagtaaaaacaactgcaa

SEQ ID NO: 175687 - DNA, 75 bp, synthetic construct
  source 1..75: mol_type = other DNA
gagcgccaatccgtttttgacctcattcgcctcgctattccattcggtttatcacacttacttcacgtcaattac

SEQ ID NO: 175688 - DNA, 75 bp, synthetic construct
  source 1..75: mol_type = other DNA
tcggcgctgcatttctatgaaagcaaaggtttgattaccagtatccgtaacagcggcaatcagcggcggtataag

SEQ ID NO: 175689 - DNA, 75 bp, synthetic construct
  source 1..75: mol_type = other DNA
atggaaaagaaattaccccgcattaaagccttgcttactccaggcgaagtggcgaaacgtagcggcgtggcggta

SEQ ID NO: 175690 - DNA, 75 bp, synthetic construct
  source 1..75: mol_type = other DNA
tggcagccgtcgcgattgcttagtgcctgcgccaaccattgaagagatgcgtgaagctcgtcgccagaaccgcaa

SEQ ID NO: 175691 - DNA, 75 bp, synthetic construct
  source 1..75: mol_type = other DNA
agttggcgacccatcacgtcggcggttatctgaagattgccccggaacataccgaagaagggccgttatcgaaga

SEQ ID NO: 175692 - DNA, 75 bp, synthetic construct
  source 1..75: mol_type = other DNA
gaaagcccgctccccgcagggactgacgccagatactttctgtccatggctgcttttcgcatcttacgtcttaac

SEQ ID NO: 175693 - DNA, 75 bp, synthetic construct
  source 1..75: mol_type = other DNA
gttgtgacaaagtggacaagaatttttccggtatctgctattccattgataaacctgtgagcgttggccgcattg

SEQ ID NO: 175694 - DNA, 75 bp, synthetic construct
  source 1..75: mol_type = other DNA
gcgttgtgacaaggtggacaagaatttttccggtatctgctattccatcgataaacctgtgagcgtcggtcgcat

SEQ ID NO: 175695 - DNA, 75 bp, synthetic construct
  source 1..75: mol_type = other DNA
catagtatttgcgccaaaataccgaagacaggtgttctacagagagaagcgtagagcaacaggccgtattttgag

SEQ ID NO: 175696 - DNA, 75 bp, synthetic construct
  source 1..75: mol_type = other DNA
cgccatcatgttgattatatttatataaatccagtaaaacatggttgggtaaaacaagtgagtgattggccattc

SEQ ID NO: 175697 - DNA, 75 bp, synthetic construct
  source 1..75: mol_type = other DNA
tctcaacgttccatcgtgatgtcgcgcgagggctatatcccatcgattgggcgggagacgtagcggattttagtg

SEQ ID NO: 175698 - DNA, 75 bp, synthetic construct
  source 1..75: mol_type = other DNA
tcaagcttccttttttagagttacctaaccatcaagaaaatcttgtgtccttgaggttacaggcagcagaggccg

SEQ ID NO: 175699 - DNA, 75 bp, synthetic construct
  source 1..75: mol_type = other DNA
agcgtcttccggggagaaggtatctgattcgtcggataatttgcctgataaagcagataaagcagataaagcaga

SEQ ID NO: 175700 - DNA, 75 bp, synthetic construct
  source 1..75: mol_type = other DNA
ttgattatgagtgctttgatgtggacgtatgggaaggcctgcgttttggttttctgatcccgggtgattatcgcc

SEQ ID NO: 175701 - DNA, 75 bp, synthetic construct
  source 1..75: mol_type = other DNA
gtgaaagggttatatcccatcgattgggcgggagacgtaacggattttagtgctggggagcgtatcattttatag

SEQ ID NO: 175702 - DNA, 75 bp, synthetic construct
  source 1..75: mol_type = other DNA
ctatcgtgagtttgcaaacgatatggctcgtgcagcgtttacaacagatttttctgtagattctaagggaagtga

SEQ ID NO: 175703 - DNA, 75 bp, synthetic construct
  source 1..75: mol_type = other DNA
gcaggtacatattgcagcgaagggaatggaatttaccgcaatcatcataatcctcaagctgttgcgctaaaaaat

SEQ ID NO: 175704 - DNA, 75 bp, synthetic construct
  source 1..75: mol_type = other DNA
aatatggtgaacagaaacactggatgctggtgacgctggcggcgatgttagggcagattggtacaccgggcggcg

SEQ ID NO: 175705 - DNA, 75 bp, synthetic construct
  source 1..75: mol_type = other DNA
ctattaggttcgcagttctacataatcttgacgaccttcctgacccagccgaattgaataatagaatcaatcatc

SEQ ID NO: 175706 - DNA, 75 bp, synthetic construct
  source 1..75: mol_type = other DNA
ctattttcttaagacacctggtaagctcgaagtcattaacgatatcaatggtgaactggtaaatctgtatcgggt

SEQ ID NO: 175707 - DNA, 75 bp, synthetic construct
  source 1..75: mol_type = other DNA
agccgttttgtggggcagcagcgctctattttcttaagacacccggcaagatcgaagtcattaatgatatcaacg

SEQ ID NO: 175708 - DNA, 75 bp, synthetic construct
  source 1..75: mol_type = other DNA
ataccccctggcatatcaggggtgtaacgcgttcgctcacggacgcctatcgtcgccacaatgtcggggccacac

SEQ ID NO: 175709 - DNA, 75 bp, synthetic construct
  source 1..75: mol_type = other DNA
agaaagcacgcacggtgctggtggtgcaagaccctttcaccagttattacgatgcacaggtggtagcggattttg

SEQ ID NO: 175710 - DNA, 75 bp, synthetic construct
  source 1..75: mol_type = other DNA
gcccggcgtttttcggtgaggaacttttcgctgaactgcgcaaagttaaagcggcgtttgatccgcataatcggc

SEQ ID NO: 175711 - DNA, 75 bp, synthetic construct
  source 1..75: mol_type = other DNA
cagcttgaagctctcaatgcagagcagaaagcgcgcacggtgttggtggtgcaggacccctttaccagctattac

SEQ ID NO: 175712 - DNA, 75 bp, synthetic construct
  source 1..75: mol_type = other DNA
cttcagaaaaattaggctatatgggttggcattttaaaaaagcagaatatttactaggtgagattttagaatatt

SEQ ID NO: 175713 - DNA, 75 bp, synthetic construct
  source 1..75: mol_type = other DNA
aactgccggaatcgcgagccagtttgcggacgttaattgcccgcacgcgcaatagctggcacgcaaataaaggcg

SEQ ID NO: 175714 - DNA, 75 bp, synthetic construct
  source 1..75: mol_type = other DNA
tctggtgctttgttatcgcgacgaatataagctgacgctgggcgaggagcgcggtgattttcaggtcttactggc

SEQ ID NO: 175715 - DNA, 75 bp, synthetic construct
  source 1..75: mol_type = other DNA
gaaacgctgggtaaatccaataccacaatcgggcgaatttataacacggtttatcaacgttgccgtcagcaacgc

SEQ ID NO: 175716 - DNA, 75 bp, synthetic construct
  source 1..75: mol_type = other DNA
gcggcagagaaaggcgtgacgtctgcacaaatcgcgctggcatggctgctggcacaaaagccgtggattgttcct

SEQ ID NO: 175717 - DNA, 75 bp, synthetic construct
  source 1..75: mol_type = other DNA
cgccctgcaaagcgaatattccatgtggtggcgtgagcctgaacaggaaattctgccgttgctggaggaactggg

SEQ ID NO: 175718 - DNA, 75 bp, synthetic construct
  source 1..75: mol_type = other DNA
gcgaccacctcgtcgctacggtcgagagctacgcaccgctgatggcacgcgcgccgaaaacctttaacttcttca

SEQ ID NO: 175719 - DNA, 75 bp, synthetic construct
  source 1..75: mol_type = other DNA
cggtggtttgttgtggggcgaacatggtaaaggttttcgtgccgaatacagcccggcgttttttggagaggaact

SEQ ID NO: 175720 - DNA, 75 bp, synthetic construct
  source 1..75: mol_type = other DNA
aacgcaccgtttatggtcgaagcgcgcgcgctttcggtagagacggtagactcaaaagtgctgaatttggcgcgg

SEQ ID NO: 175721 - DNA, 75 bp, synthetic construct
  source 1..75: mol_type = other DNA
aaaccacctatctggccaaaacgtccaccaccacgtcggacagctacagctccacagagctggaacccggcacca

SEQ ID NO: 175722 - DNA, 75 bp, synthetic construct
  source 1..75: mol_type = other DNA
ggccaccgccggtctcactcgtgccgtccagggcgaactcccgctgcccggcagcacctccgccgccgacagccg

SEQ ID NO: 175723 - DNA, 75 bp, synthetic construct
  source 1..75: mol_type = other DNA
aacgtggccgtcgcctcaaaggtgtacgacgacatcaaagccaccgtatcggccatgctgtcggcagaaggctcc

SEQ ID NO: 175724 - DNA, 75 bp, synthetic construct
  source 1..75: mol_type = other DNA
acctactacttcaacaaaaacatgtccacctatgttgattacaaaatcaacctgctggacaacgacgatgacttc

SEQ ID NO: 175725 - DNA, 75 bp, synthetic construct
  source 1..75: mol_type = other DNA
ggcgagatgggccgcaaagatctgatcaaaatcgaaaatacctttttgagtgaagatcaagtagatcaactggca

SEQ ID NO: 175726 - DNA, 75 bp, synthetic construct
  source 1..75: mol_type = other DNA
gagcgcatcgacaatgtgctggtctgcccgaacagcaactgtatcagccatgccgaaccggtttcttccagcttt

SEQ ID NO: 175727 - DNA, 75 bp, synthetic construct
  source 1..75: mol_type = other DNA
ctgaccaggataacggcgatgtcgattttggtcaaaatttaattgcccgcaatagtggcgtaattcgtgttggcg

SEQ ID NO: 175728 - DNA, 75 bp, synthetic construct
  source 1..75: mol_type = other DNA
aagaagacacctggaaagtgattcgtattggcgatgtggtgttcgatgtggtgaaaccttgtagccgttgtattt

SEQ ID NO: 175729 - DNA, 75 bp, synthetic construct
  source 1..75: mol_type = other DNA
aatggagcagttccgtccgaatctggtggtatccggcgtagcggcatgggaagaagatacctggaaaatcattcg

SEQ ID NO: 175730 - DNA, 75 bp, synthetic construct
  source 1..75: mol_type = other DNA
gtccccgtctgctggctgcaggtcaaccggactgacagcctgtccgtggatgatgtggcggccctgattgccgac

SEQ ID NO: 175731 - DNA, 75 bp, synthetic construct
  source 1..75: mol_type = other DNA
aatccacggtgccgatgcagctgcgtatcaccggtctggtggaaatgccgaacagcaagacgtatgacgcaacgg

SEQ ID NO: 175732 - DNA, 75 bp, synthetic construct
  source 1..75: mol_type = other DNA
gtggtgttccaggacggcttccagctgaaaaccgtggaagagatggcgctggagcgcacgcagaacagagcggaa

SEQ ID NO: 175733 - DNA, 75 bp, synthetic construct
  source 1..75: mol_type = other DNA
gttacggtgatgctaatgccatcgctaacaaaacccaaaactttgaagttgtggatttgcccctatatttccaga

SEQ ID NO: 175734 - DNA, 75 bp, synthetic construct
  source 1..75: mol_type = other DNA
gaattacagttctctgcgcgaattgtacgcggtggcaaaccgtgagcctgtcaccattcatcctgacgatgccca

SEQ ID NO: 175735 - DNA, 75 bp, synthetic construct
  source 1..75: mol_type = other DNA
ggaatgcagcgccagcagtttggtgagcaaaaacactggatgatcgtcacgctggcggcaatgttggggcaaatc

SEQ ID NO: 175736 - DNA, 75 bp, synthetic construct
  source 1..75: mol_type = other DNA
cggcggcggcgaaacacgcggatatcgttctgcctgcgaccacctcttttgagcgtaatgatctcaccatgaccg

SEQ ID NO: 175737 - DNA, 75 bp, synthetic construct
  source 1..75: mol_type = other DNA
aggtaaggatttaggcggttgggctcatgacggcaacggcgacccacgttacaccaataaagatctggttaaata

SEQ ID NO: 175738 - DNA, 75 bp, synthetic construct
  source 1..75: mol_type = other DNA
gtttggtgatttgaaattcaaatacaggaacagggagttctggtgcagagtgaaccgccccgggaatcctggaga

SEQ ID NO: 175739 - DNA, 75 bp, synthetic construct
  source 1..75: mol_type = other DNA
gagtggcagggcaatgccgaaccggaacagttgcagatactttctgctcacccggcacatcgtctgcacagtcag

SEQ ID NO: 175740 - DNA, 75 bp, synthetic construct
  source 1..75: mol_type = other DNA
gggaatacagcgttggcgtggctggagaaatacaccggcccggcattgccgcttacggcgtttgatccgccggcc

SEQ ID NO: 175741 - DNA, 75 bp, synthetic construct
  source 1..75: mol_type = other DNA
ggtgcgacctactacttcaacaaaaatatgtccacctatgttgattacaaaattaacctgctggacaacgatgat

SEQ ID NO: 175742 - DNA, 75 bp, synthetic construct
  source 1..75: mol_type = other DNA
aatgaaagtgctggttctggtgagggcacaggcaatagcgagggtcgcaaactgtcaaaagaaaatggtgacggt

SEQ ID NO: 175743 - DNA, 75 bp, synthetic construct
  source 1..75: mol_type = other DNA
gcatctgggggattattcgaccggcgcggcacaggcgatcatgccgtatgtcgtggggggcagcgaagtttatca

SEQ ID NO: 175744 - DNA, 75 bp, synthetic construct
  source 1..75: mol_type = other DNA
ctcgcggctggggaatggttgtgcaggcaacacggctttggcatggctagaaaaatacaacggtccggaactgac

SEQ ID NO: 175745 - DNA, 75 bp, synthetic construct
  source 1..75: mol_type = other DNA
acgtgctgaccaaagatctccccagctcgcggctggggaatggctgtgcgggtaatacggcgctggcatggctgg

SEQ ID NO: 175746 - DNA, 75 bp, synthetic construct
  source 1..75: mol_type = other DNA
tttgatgactattcccgtgatttgggatagcgaaggtaatgaaatcccggaaggcattcttgatggcgtaatgac

SEQ ID NO: 175747 - DNA, 75 bp, synthetic construct
  source 1..75: mol_type = other DNA
ccgacctgcattttgctgaaaaataacggcctgcatattgagctgcaaatcgatgccaacgggcggattggcaaa

SEQ ID NO: 175748 - DNA, 75 bp, synthetic construct
  source 1..75: mol_type = other DNA
gaaggggcgatggtcagcggctacgatccgcagcgcggcgagcaggttatcgcctgggtccgtcgctttcttgat

SEQ ID NO: 175749 - DNA, 75 bp, synthetic construct
  source 1..75: mol_type = other DNA
tatcaaagaccccatagagttcgatggccagaagcattatgtcgataccgtggacggtaaagctggttcaagaaa

SEQ ID NO: 175750 - DNA, 75 bp, synthetic construct
  source 1..75: mol_type = other DNA
ggttcggttggtcctttatgattgctgcaggcattatgtttattaacgctctgtttttataccgttgtacgggtg

SEQ ID NO: 175751 - DNA, 75 bp, synthetic construct
  source 1..75: mol_type = other DNA
atgctcgggatgtgctgctatatggccttcttttttggcatcctgcacaccaataacatcattatcgcttatgtt

SEQ ID NO: 175752 - DNA, 75 bp, synthetic construct
  source 1..75: mol_type = other DNA
aattgaccatatccccgcccagatcggttttaagctgttgagtctgttcaagttgaccgaaacagatcagcgcat

SEQ ID NO: 175753 - DNA, 75 bp, synthetic construct
  source 1..75: mol_type = other DNA
atgtactgcaccggcggcattcgttgtgaaaaggccagtgcctggatgaaacataacggattcaacaaagtctgg

SEQ ID NO: 175754 - DNA, 75 bp, synthetic construct
  source 1..75: mol_type = other DNA
gcaaaaattttgtttttgacgagcggatgggcgaacgtatatcggatgagattatcgcgcattgccaccagtgcg

SEQ ID NO: 175755 - DNA, 75 bp, synthetic construct
  source 1..75: mol_type = other DNA
cagttgaaaaatggtaaagaaaccacgttacgtactccagcacagtttgtcggttaccgtggcgatactgctgcg

SEQ ID NO: 175756 - DNA, 75 bp, synthetic construct
  source 1..75: mol_type = other DNA
cagttgaaaaatagtcaagaaagcacgttacgtacaccggcacagtttgtcggttaccgtggcgatgccgctgcg

SEQ ID NO: 175757 - DNA, 75 bp, synthetic construct
  source 1..75: mol_type = other DNA
gttgcatgcgttgcactatcaccaaaccaacgtacagagcgtgcaagccaacattgccaacacagagttcaatgc

SEQ ID NO: 175758 - DNA, 75 bp, synthetic construct
  source 1..75: mol_type = other DNA
ttagctaaagtgaagcacattatttgttctgaagataaagccgaagcgtatcgctacgttttctctgctgaactc

SEQ ID NO: 175759 - DNA, 75 bp, synthetic construct
  source 1..75: mol_type = other DNA
taaatacgatgtgacgcaggatttcagccttgacctcagttaccggtatctggatgcaggggattccactctgac

SEQ ID NO: 175760 - DNA, 75 bp, synthetic construct
  source 1..75: mol_type = other DNA
atgaaaaaggttattgcgatttcagcgcttactgtggcgggcatgttttcagcccagaccctggctgatgagggc

SEQ ID NO: 175761 - DNA, 75 bp, synthetic construct
  source 1..75: mol_type = other DNA
aaatctgcgtcaactgatgatcccggaacaacagcgtctgctggaaacctttagcctgttggtcgccaatgcgct

SEQ ID NO: 175762 - DNA, 75 bp, synthetic construct
  source 1..75: mol_type = other DNA
gtggtgacattaacccggctttttattcatcctgttaaatcgatgcgcggcattggtcttacacatgctctggct

SEQ ID NO: 175763 - DNA, 75 bp, synthetic construct
  source 1..75: mol_type = other DNA
gcttcatcgggcttgaagcctggggcgacgtgtccagcgaacgcgccatcgtacgcacccgcaacatcagctgcc

SEQ ID NO: 175764 - DNA, 75 bp, synthetic construct
  source 1..75: mol_type = other DNA
agcgcaagcagtttatctggctgggtatcgtgctggcgaccgtgggcgtggtggtgggcggcggctggtatctgg

SEQ ID NO: 175765 - DNA, 75 bp, synthetic construct
  source 1..75: mol_type = other DNA
agaaaattagtagttcgaggaatgaaactttggattgtcttaattactcgcttatatgtttccagtggtatcttt

SEQ ID NO: 175766 - DNA, 75 bp, synthetic construct
  source 1..75: mol_type = other DNA
attgataaagagaatagcgagcatgacttagtattattagagaatctaagagatagtgaaattgatattgaaaat

SEQ ID NO: 175767 - DNA, 75 bp, synthetic construct
  source 1..75: mol_type = other DNA
cagaacgtgtacgaatgattcgtaggggtgaatgggtagtaacagcaccagaagtaaccgatataatgggatatc

SEQ ID NO: 175768 - DNA, 75 bp, synthetic construct
  source 1..75: mol_type = other DNA
gcgccgttatcaccttaattgccatgcagtggctgatggcgtttgatgccgccaacctggtgatgctgtatctgc

SEQ ID NO: 175769 - DNA, 75 bp, synthetic construct
  source 1..75: mol_type = other DNA
gcaaatgctggaaccgggtttatcgtcgcccatcaatctttctctgccagagccgctgaccttaatccacgttga

SEQ ID NO: 175770 - DNA, 75 bp, synthetic construct
  source 1..75: mol_type = other DNA
gcagtactcctcttacagagcagtgtctgtcgataaatgacgctgaagaccagaccagaagaaacgctgaaaata

SEQ ID NO: 175771 - DNA, 75 bp, synthetic construct
  source 1..75: mol_type = other DNA
gatattaaagaagattttcgccctcaccgcttcgccaacgagtttgcccgcagcaaagcggccagcgaagaagtg

SEQ ID NO: 175772 - DNA, 75 bp, synthetic construct
  source 1..75: mol_type = other DNA
gctgatcgctttcgatgacgcggtacgtagcacgttgaaagaggaggaaaaactggtcaactccagcgactgggg

SEQ ID NO: 175773 - DNA, 75 bp, synthetic construct
  source 1..75: mol_type = other DNA
gggactacgtcgatacggtggataagaatacggcgaagatacaggattacataaagcaccagcttgaagaggata

SEQ ID NO: 175774 - DNA, 75 bp, synthetic construct
  source 1..75: mol_type = other DNA
ttaacggacgctcgctggtgcagattgcgcaggcgcttgctgcgcctttcggcattgaggtggtgaacagcggtg

SEQ ID NO: 175775 - DNA, 75 bp, synthetic construct
  source 1..75: mol_type = other DNA
tgattttggtgaggccaccattgccgcaatacgtcagaccattcaggacaatggcgtgacccgttatcgcccttt

SEQ ID NO: 175776 - DNA, 75 bp, synthetic construct
  source 1..75: mol_type = other DNA
tgcgcttacccgtgagacaacatatacggttcagggctggcggcagggcagtggcgcgttatggcgtccggggtt

SEQ ID NO: 175777 - DNA, 75 bp, synthetic construct
  source 1..75: mol_type = other DNA
accccgtgcgcaatatacgtaagctaaaaattcagaatacagagatggcctttctttctgatgatgagattgagc

SEQ ID NO: 175778 - DNA, 75 bp, synthetic construct
  source 1..75: mol_type = other DNA
agaccttaagtatgtcgatcagaaagatggatgatggaagatggttgctagatatcaggccgcaaggggcatacg

SEQ ID NO: 175779 - DNA, 75 bp, synthetic construct
  source 1..75: mol_type = other DNA
ccgatttacctaagggccaggcaacccatgtaatgcggcatacatttgccacacactttatgatgaacggaggga

SEQ ID NO: 175780 - DNA, 75 bp, synthetic construct
  source 1..75: mol_type = other DNA
gtctctgatgaagttgttagtgagatcaaaacaaagaaatccggccttttgtttgacgtcaattatgaggaatat

SEQ ID NO: 175781 - DNA, 75 bp, synthetic construct
  source 1..75: mol_type = other DNA
tatcgtcggtaatcgcgtgacgttcttcaacaccaagaacgggaagtcccgttcggttccggtgtctgatgccgt

SEQ ID NO: 175782 - DNA, 75 bp, synthetic construct
  source 1..75: mol_type = other DNA
taaatggccgggagtggaatggctggacatcggtgcgcatcggtgccggtgttgaacgactggcgcgggatttca

SEQ ID NO: 175783 - DNA, 75 bp, synthetic construct
  source 1..75: mol_type = other DNA
gacatccgtccgtatcagtgcgggcattaaccgtattgcccgggattttaatgttgccattaccacccgctggcc

SEQ ID NO: 175784 - DNA, 75 bp, synthetic construct
  source 1..75: mol_type = other DNA
gaccccatttgtggcttcaataaccgcgagctgctcatttctgaagtgtcattcactaaagacaacaacggcaca

SEQ ID NO: 175785 - DNA, 75 bp, synthetic construct
  source 1..75: mol_type = other DNA
attgaggtaatcaacaaaatactcggtcagcagcaggcactggcttacgacgacccgcacggcaggctggtgatt

SEQ ID NO: 175786 - DNA, 75 bp, synthetic construct
  source 1..75: mol_type = other DNA
ccatcactgcacgcattatccccaataaccgccgcatggcctttctgccacgtctgttcggcgcctggtatctca

SEQ ID NO: 175787 - DNA, 75 bp, synthetic construct
  source 1..75: mol_type = other DNA
aagtggaagtgctgattggtgatgagctggtgatcaccggctgggtggaggcgacgcccgttcgttacgattccc

SEQ ID NO: 175788 - DNA, 75 bp, synthetic construct
  source 1..75: mol_type = other DNA
cctatctgtaccagggcatcgctgaacgcaactttgaacgcaaattccagttagctgagaacattcatgttcgtg

SEQ ID NO: 175789 - DNA, 75 bp, synthetic construct
  source 1..75: mol_type = other DNA
tcgctcaggccgccgcagccgtaaaacaggcgcaggccgcctatgactatgcgcagaacttctacaaccgccagc

SEQ ID NO: 175790 - DNA, 75 bp, synthetic construct
  source 1..75: mol_type = other DNA
cttgccgggtatcgcgatgaagaaatcgctcaggccgccgcagcggtgaaacaggcgcaagccgcctatgactat

SEQ ID NO: 175791 - DNA, 75 bp, synthetic construct
  source 1..75: mol_type = other DNA
tggcggtagtggtgcttgccgccgtggttgtcggaggctactggtggtatcagagccgccaggataacggtctga

SEQ ID NO: 175792 - DNA, 75 bp, synthetic construct
  source 1..75: mol_type = other DNA
tttcactaacgcgtccggtgtgggtgcgcgcttatgttgatgaacgtaatcttgaccaggcccagccggggcgca

SEQ ID NO: 175793 - DNA, 75 bp, synthetic construct
  source 1..75: mol_type = other DNA
ctcgaccaggcccagccggggcgcaaagtgctgctttataccgacggtcgcccggacaaaccgtatcacgggcag

SEQ ID NO: 175794 - DNA, 75 bp, synthetic construct
  source 1..75: mol_type = other DNA
tagacgaaggtgatgccatcaaagcgggtcaggtgctgggcgaactggatcacaagccgtatgagattgcgctga

SEQ ID NO: 175795 - DNA, 75 bp, synthetic construct
  source 1..75: mol_type = other DNA
tggctggcttggctgaaacaatgttggtcaaattctccaatcagcagtgctcatctgatatgcatgaggttgttg

SEQ ID NO: 175796 - DNA, 75 bp, synthetic construct
  source 1..75: mol_type = other DNA
ggctgctgaaaaagagaaattcgctgtcgaatgcgcagcaacaaagatcgccattgcgtatctgaaatcaggccg

SEQ ID NO: 175797 - DNA, 75 bp, synthetic construct
  source 1..75: mol_type = other DNA
ttgatcgtccgcggtaataaattaagcaaagcgcaagaaaatgccgcctggtttactgctcttgcgaatcgcagc

SEQ ID NO: 175798 - DNA, 75 bp, synthetic construct
  source 1..75: mol_type = other DNA
attgccctgttacccagggacttattgctgtatcagaattagcatcccgggtatcctctaaaaccggtcgaaaac

SEQ ID NO: 175799 - DNA, 75 bp, synthetic construct
  source 1..75: mol_type = other DNA
gtgcaggtacattgaatgttaatgtttctcaaggtaataatcttaaaacgggggatggtcttgtcgtattaaata

SEQ ID NO: 175800 - DNA, 75 bp, synthetic construct
  source 1..75: mol_type = other DNA
attgtcgaatgtacaggcttttatacctccgccgagaaatcgcaggcgcatcttgatgctggcgcgaagaaggtg

SEQ ID NO: 175801 - DNA, 75 bp, synthetic construct
  source 1..75: mol_type = other DNA
cgttctgctggaatcacgattgacaaccttgaggctaagtgcgcagcgctggctgctgagaatgcagagctgaaa

SEQ ID NO: 175802 - DNA, 75 bp, synthetic construct
  source 1..75: mol_type = other DNA
gacgacgacttctacaaagaaaacggcatcgctaccgatgatatcgtggctgtgggcttagtctaccagttctaa

SEQ ID NO: 175803 - DNA, 75 bp, synthetic construct
  source 1..75: mol_type = other DNA
gtagcaacctatcgtaacaatggtttctttggtcaagttgatggtctgaactttgcactccagtatcagggtaac

SEQ ID NO: 175804 - DNA, 75 bp, synthetic construct
  source 1..75: mol_type = other DNA
accgattattttattgcgcacgttacaacgtgaactgctgctgttggttaacctgaaacgccagtctgcccatac

SEQ ID NO: 175805 - DNA, 75 bp, synthetic construct
  source 1..75: mol_type = other DNA
gatcaatgaacaacttctcacactcaccggacttctgcatgacgacctgctgttgatcgtccgcggtaataaatt

SEQ ID NO: 175806 - DNA, 75 bp, synthetic construct
  source 1..75: mol_type = other DNA
caggccacctcacgctgacttctgggttcagtcaatttgcgaagctgaggaaaaggttaagcgagcgcttgaaga

SEQ ID NO: 175807 - DNA, 75 bp, synthetic construct
  source 1..75: mol_type = other DNA
gaattccaccctttctgtccgtgacggcggtcatctgacggcacaaaaagggctctacagtaacggccgggttca

SEQ ID NO: 175808 - DNA, 75 bp, synthetic construct
  source 1..75: mol_type = other DNA
tattaaaaacttgccgaaaaacagcaatatcagcccgcagagtcgctctccagattatccattcaaatattatct

SEQ ID NO: 175809 - DNA, 75 bp, synthetic construct
  source 1..75: mol_type = other DNA
atggcatgattgagtccctgcgggtattaaaaacttgccgaaaaacagcaatatcagcccgcagagtcgctctcc

SEQ ID NO: 175810 - DNA, 75 bp, synthetic construct
  source 1..75: mol_type = other DNA
ggcaggaaggtaatcagcgcctgaccaaagaaccgtttgagatcaaaggcggtctggttcaggtgccggaaaaac

SEQ ID NO: 175811 - DNA, 75 bp, synthetic construct
  source 1..75: mol_type = other DNA
cgttgcgtgagcgatgcccgcgttttgagaatcgtgttggtggtgcggcgcagtttaaggcgatccctgatgccg

SEQ ID NO: 175812 - DNA, 75 bp, synthetic construct
  source 1..75: mol_type = other DNA
atgaaagataatcttttgattgtatctattctgatcagtttattgaccatatgttcttgcgataaaaatgataaa

SEQ ID NO: 175813 - DNA, 75 bp, synthetic construct
  source 1..75: mol_type = other DNA
accgttaccgacttaatcgtggtggagatcgtgctgcaaatgtcacgaacggtgcaatagtgatccacacccaac

SEQ ID NO: 175814 - DNA, 75 bp, synthetic construct
  source 1..75: mol_type = other DNA
tcatgagcggcgctggttcagcagatggcgggtacagcgataattatacccatgttcaggtcggctttgacaaaa

SEQ ID NO: 175815 - DNA, 75 bp, synthetic construct
  source 1..75: mol_type = other DNA
gaaaaaagcgcatccggtgctgttaatcggcgtgacgtttgttctttctattgtttgttctgcattcggcatttt

SEQ ID NO: 175816 - DNA, 75 bp, synthetic construct
  source 1..75: mol_type = other DNA
gaactcttccctctctgtccatgacggtggtcatctgacggcgcagaaagggctctacagtgacggtcgggttca

SEQ ID NO: 175817 - DNA, 75 bp, synthetic construct
  source 1..75: mol_type = other DNA
tttacccatgttgccgccgctgcaccgggtaaaattactgctgaaccgccccgggtttcctggagagtgttttat

SEQ ID NO: 175818 - DNA, 75 bp, synthetic construct
  source 1..75: mol_type = other DNA
atgaatctgagtggtgcacacgcaccgttctttacgcgtaatattgtgattatcaaagataattctggtcacact

SEQ ID NO: 175819 - DNA, 75 bp, synthetic construct
  source 1..75: mol_type = other DNA
gtcagaaaatgaccgtcaataataaaaatattactgttaacggtaatacaaccgctattgaactgaccaggaata

SEQ ID NO: 175820 - DNA, 75 bp, synthetic construct
  source 1..75: mol_type = other DNA
acagggtggcttccctgatggtgatgccttccacctgtgaatcatttggtatggctgcagtggaggctgctgcat

SEQ ID NO: 175821 - DNA, 75 bp, synthetic construct
  source 1..75: mol_type = other DNA
caccgtgcgggctaaaacacctgtgcaggtggattacgccattgaagccaacatcactatctatcgtgatcagga

SEQ ID NO: 175822 - DNA, 75 bp, synthetic construct
  source 1..75: mol_type = other DNA
acgaaaaagtcaggccgctcactgataccgtgcgggctaaaacgcccgtgcaggtggattacaccatagatgccc

SEQ ID NO: 175823 - DNA, 75 bp, synthetic construct
  source 1..75: mol_type = other DNA
ataagtattacagcgacagagatgaaaaccatcctgccagatgatttaacaccaggaaaatacaacaaaatttat

SEQ ID NO: 175824 - DNA, 75 bp, synthetic construct
  source 1..75: mol_type = other DNA
gttgctggtcattgctgaaaatgaatgggctaactgtaccactatcacccttaatatgaccggagtggccgatga

SEQ ID NO: 175825 - DNA, 75 bp, synthetic construct
  source 1..75: mol_type = other DNA
ctcggtgaactggttggtgtgtaccgccttgccgcgcagcctgctaccaccacgctccagttctccgtggatgag

SEQ ID NO: 175826 - DNA, 75 bp, synthetic construct
  source 1..75: mol_type = other DNA
agatcaccatctaccgcaatcaggatgccaactcggtaaaagacgaggcaaacaacgccatccagaactgggtcg

SEQ ID NO: 175827 - DNA, 75 bp, synthetic construct
  source 1..75: mol_type = other DNA
aacgccagagtgggttggggccgactgtgctcgccgcactttatcgcgcctgtcaccgcgtaaactctccaccat

SEQ ID NO: 175828 - DNA, 75 bp, synthetic construct
  source 1..75: mol_type = other DNA
ttgggcgtgcgatgagcgatctgcaaacgccagagtgggttggggccgactgtgctcgccgtaccttatcgcgcc

SEQ ID NO: 175829 - DNA, 75 bp, synthetic construct
  source 1..75: mol_type = other DNA
ttgttccaccctgcggaagtttccccggatgaagccattgaactggcggcccgcgcagaacaggcggcattgcag

SEQ ID NO: 175830 - DNA, 75 bp, synthetic construct
  source 1..75: mol_type = other DNA
accagatcatacaacgaaattaatgcaatcgatgacttcctgactgagcgatcaggcgttgaatcgttctattgg

SEQ ID NO: 175831 - DNA, 75 bp, synthetic construct
  source 1..75: mol_type = other DNA
atccagattacgaatctgaaaaaagcgtaaaaccgaatgtaacggtacttaattttggtgatgactacgagcagc

SEQ ID NO: 175832 - DNA, 75 bp, synthetic construct
  source 1..75: mol_type = other DNA
tcgtgctgaacaggcggcattgcaggcggacaaacgcatcaccaataccgaaggcggtagctttaacagccacta

SEQ ID NO: 175833 - DNA, 75 bp, synthetic construct
  source 1..75: mol_type = other DNA
tactgctggttaacacccgggccacctgtactgagccgggaataaacggaaataactggcaaccggcacaaatca

SEQ ID NO: 175834 - DNA, 75 bp, synthetic construct
  source 1..75: mol_type = other DNA
actgcgagagagaggggataacacaggctcagttcgttgagaaaattatcaaagatgaactgcagagactggata

SEQ ID NO: 175835 - DNA, 75 bp, synthetic construct
  source 1..75: mol_type = other DNA
atacagaaaaggtaatcctctgacgcttgcagaacgtcagcaggcatccctggcaagaaagcgagtcacacataa

SEQ ID NO: 175836 - DNA, 75 bp, synthetic construct
  source 1..75: mol_type = other DNA
tgtattacaccgggaaaaacccgctggcgaagattggttataagagtgaagacgtcttcgtaccgaagggcgaca

SEQ ID NO: 175837 - DNA, 75 bp, synthetic construct
  source 1..75: mol_type = other DNA
ctgtcgcgggagcaaaccactggggtacagcaacaaattcgtcaggctttgtcagcgttgccattaccggttaat

SEQ ID NO: 175838 - DNA, 75 bp, synthetic construct
  source 1..75: mol_type = other DNA
ccttattcctttcaatcaattactggctattcactgtaagcgcggtttggtatggggcgagctggaatttgtgtt

SEQ ID NO: 175839 - DNA, 75 bp, synthetic construct
  source 1..75: mol_type = other DNA
ttgatgcccactggcggcgttggagcgaagagatgagtgaaattgccgccgacgttttacagcaacaactggatc

SEQ ID NO: 175840 - DNA, 75 bp, synthetic construct
  source 1..75: mol_type = other DNA
ccagcgccgagcagcacaataacagcatcaaccatatctacccacgcatcgcccgtgtgcgcagtgtggaagaga

SEQ ID NO: 175841 - DNA, 75 bp, synthetic construct
  source 1..75: mol_type = other DNA
aaaagattgatgccatggcggctgaaaaaatcagtgccggtcagtcagcagagccaaagtccacgcccctcccgt

SEQ ID NO: 175842 - DNA, 75 bp, synthetic construct
  source 1..75: mol_type = other DNA
gtactttacacgttctcgccaaaggtggccgaatcgcgcacgtccgcgatgcgtctggccgcgtcaccgccgttg

SEQ ID NO: 175843 - DNA, 75 bp, synthetic construct
  source 1..75: mol_type = other DNA
gttatatgacattcgttcatacaacgctgctttatttctgcgcagtggtcagtgcgttatatctggtgaccggcg

SEQ ID NO: 175844 - DNA, 75 bp, synthetic construct
  source 1..75: mol_type = other DNA
ccagcgccgaacagcacaataacagcattaagcatatctatccgcgcattgcccgtgtgcgtagtgtggaagaga

SEQ ID NO: 175845 - DNA, 75 bp, synthetic construct
  source 1..75: mol_type = other DNA
ccgcgctggtggtgatcgatttacaagaaggcatcttaccttttgccggtggtccacatactgccgatgaggtgg

SEQ ID NO: 175846 - DNA, 75 bp, synthetic construct
  source 1..75: mol_type = other DNA
atgaactggcattatgagaaaaatggcgtgcgtcacgacaatgtgaccgaagccgacataaccgaacgtattcag

SEQ ID NO: 175847 - DNA, 75 bp, synthetic construct
  source 1..75: mol_type = other DNA
acggtaaaaaactgtccaaacgtcacggggcggtcagcgtaatgcagtatcgtgatgatggttatctgccagaag

SEQ ID NO: 175848 - DNA, 75 bp, synthetic construct
  source 1..75: mol_type = other DNA
gaaagcgccggtaccggtttatgcgcacgtttctatgatcaacggcgatgacggtaaaaaactgtccaaacgtca
